United States Patent Application Publication US 2013/0129668 A1 - sequence listing, part 25

SEQ ID NO: 414273 - DNA, 122 bp, Homo sapiens
ttccgcgtttccccgctgggccggaggagcctgggcccgaggtatccgggcaggaggtggcggcctcgccgccctggtcaggcctccgggagggagcaggcgcgggagcgggaggaggaagt

SEQ ID NO: 414274 - DNA, 122 bp, Homo sapiens
ttcacccgatgaccgtggcctttttgataatccactgcggggccctcccgttgcggaaggcgctctccccgggcgcggttctggtgggcatgtcttccaagagcgatgcgagtgtcagtggt

SEQ ID NO: 414275 - DNA, 122 bp, Homo sapiens
tgctggtgtcctggacgctgcactgctttgccagaggccagagccccccctcatccagaacgccctcgtggggcattcgcagagctgccaccgccatagacaagcatggagacccctcttgt

SEQ ID NO: 414276 - DNA, 122 bp, Homo sapiens
ggggctgggattgcgagtctctctggggccacgctttctaagcgtatcacttccaggatacgtgcctccaacagaaggaatgaaggctaggaaacaaaaacgtggatgcgggtgaggagctg

SEQ ID NO: 414277 - DNA, 122 bp, Homo sapiens
gggtggctgccgggcggagacgctcctcacttcccagacggggtggctgccgggcagagacgctcctcacatcccagacggggcgacagggcagaggcgctccccacatgtcagacgatggg

SEQ ID NO: 414278 - DNA, 122 bp, Homo sapiens
ggggcccccgggctggagtaagagccgagcaccggcgcagcctgcgggactggcactcaccgggcctctcaatccccagaccttgccactgcagttggagctggaggaggaagaggaggaag

SEQ ID NO: 414279 - DNA, 122 bp, Homo sapiens
gactttggtgctaacactgggtaagtcccatgagatcatctggttaccctcagtgcatctcgccattctgctactgcaccttcctgtcaagagttacagacctgaccgccgtatgatggacc

SEQ ID NO: 414280 - DNA, 122 bp, Homo sapiens
gtgcccctcactattggctcgtcctaggagctgcgcacgcggactggacagcctgaaaggcgctgttgctagggtgccaggattcgctgcagcagcttccggaaaaggcggtgactgggggc

SEQ ID NO: 414281 - DNA, 122 bp, Homo sapiens
tggtggcactgggttccaaggctgggcattcaggttctgaaactttctcagtctccatctcgtgcagctcagcctcatctgagacccccactaccttccctatgggactcaacggggaggga

SEQ ID NO: 414282 - DNA, 122 bp, Homo sapiens
gacccccagaactgtttgccaacaaagacatgcagggggcggagcctgagcgtcagataccgtgagcggcgtgcagagggcggagcctaggagtcagataccgcgagaagtagtctcccgaa

SEQ ID NO: 414283 - DNA, 122 bp, Homo sapiens
ggtgcatgtcagctatgcggttgggcgggttggccccactctaattagcctggcttcccacgttgacatttcaggtacgggttcactgttgggtttcgcgtcttctgtaacggggagtgaga

SEQ ID NO: 414284 - DNA, 122 bp, Homo sapiens
aggaacaactccttaatatcatcaagtcacctcacatctctttcataagcaaatggataacgtcacggcagtataaatatggatggtgaatttataggtgacaccttattttcctacactaa

SEQ ID NO: 414285 - DNA, 122 bp, Homo sapiens
tggacttcccagccagcacctccccattgcccgcttcccagcccgcgtcctcagttcctccgcaaagtcagcttcgccgcagcccacctcccacccaggaccggccccaaagcccttctcga

SEQ ID NO: 414286 - DNA, 122 bp, Homo sapiens
cggcccccgccgagccgcggggcccgctccgccgcgtccccgcgctgcgctccgcccgcccgagccccggactcctggctcccgcctgccaccgcgccgacagccgctccagcgcccgcggc

SEQ ID NO: 414287 - DNA, 122 bp, Homo sapiens
agaatctgcacacacccatgtcctttgtctgagccgcaggtcccctgggatttggggagacgtcaatacgttgaattttgatatcccttttataaatcatttaaaaatgtcttctcagcgtg

SEQ ID NO: 414288 - DNA, 122 bp, Homo sapiens
cacgactgtgggttgacccttggtaggcagcagacagttgaatgtgccaactccaagggacggggtcactaagtttcatcagcaaaaagcagtgtttttttatgtctaccctatgggtgata

SEQ ID NO: 414289 - DNA, 122 bp, Homo sapiens
gtctgagatgttctctgctgtgctggagtcctcggatgacgactcatacctggggaggaacgagcggggagggggagatgctgcaggtgggatgagaaatggtgggaaaggaaggcagggat

SEQ ID NO: 414290 - DNA, 122 bp, Homo sapiens
tccacctctccagcgggcgacccctcagagaaggtctcccagtgagtctggaatacgtgccgagtgcctggagtgctattgtgtgtatgtgagagcacattggtgaggctgcccatgcatgc

SEQ ID NO: 414291 - DNA, 122 bp, Homo sapiens
gctgtggcaacagttgatctgtggcagcggaccaggaggagggtcaaatgggagaagggacggccagctggtcctaccagagactgtcgctggcgtcctcaggggccgctgcagggccacct

SEQ ID NO: 414292 - DNA, 122 bp, Homo sapiens
cgtgtgatctctgtgtttataaataccaggaaggtgctgttggcgggggggtgctgatggcgtgtctgccctctgctgcagctcccccacccgctctgtctcgagagagagctgggttaacg

SEQ ID NO: 414293 - DNA, 122 bp, Homo sapiens
acacgtttatgtaattttggtggtctccctgtatagatggattaattgatactttccttacgatgtcttagcctcctcgggaagatgaacaaaattagtatacattatgtacaacaatggtg

SEQ ID NO: 414294 - DNA, 122 bp, Homo sapiens
ctgttcggatacacaaacacccttgtgtcacagttgcctacagaattcaatacagtcgtgcgatgcagaggttcacagctcaggagtcgtaggctgtgctattgaggcttctgtaagtcatt

SEQ ID NO: 414295 - DNA, 122 bp, Homo sapiens
caggaatatctggttcttacattttagctttgactccgcccctgggtcccctcacctacccggaccccaagcaagccctttgtgtgtgtcaaccatcagtgaatgggatctcaatctgaaaa

SEQ ID NO: 414296 - DNA, 122 bp, Homo sapiens
gcttcacgagttcggctcctcggccatccacagcccgggcctccgcctctgctgacctggcggctgtagaaggcagaagaggcctgaaacctgcagcaggagcaccaccctgccccgcggcc

SEQ ID NO: 414297 - DNA, 122 bp, Homo sapiens
ggttaaagtgatactccggagaagattaacctaagggtcttaaaaacaggatgaatcggccgggcgcagtggctcacgcctgtaattccagcacttagggaggccaaggcgggcggatcacg

SEQ ID NO: 414298 - DNA, 122 bp, Homo sapiens
agagttgggaaggggataggcggagggccgtcactagcgcacagcatgctgggtagcgaacgcagcctcacgcttaatcgccaaatagagtccggcctcaccctacgccggcgcactgagaa

SEQ ID NO: 414299 - DNA, 122 bp, Homo sapiens
ctgggcctcgtgggcgcgttccgcgtgggttctggcgtcgtcaccttccaccccaagccccgtcagtggtcacctctgtaagccagggcacttccctacgcgagcccagggcgcccgcaccc

SEQ ID NO: 414300 - DNA, 122 bp, Homo sapiens
cggggatgaggggttgatctgggaagccctcaggatgtgtgtgtggctcctggaaggtgacgcacattgttagcttcagtaaggttttcaacaccatgtttccgcagaacttggtcataata

SEQ ID NO: 414301 - DNA, 122 bp, Homo sapiens
tttgtttactgtaggtaatattaactagggttgcagtccgtggagggccgactatgcgaacggtttctatgaaccatcctttgctgaaggctgaaacctcttcgtcccctgggagagttcct

SEQ ID NO: 414302 - DNA, 122 bp, Homo sapiens
ggaaagcaggcagtggcagaaggccatagtcctgggttcagagctgactcccttcacacccgaggttgctgtctctggttctccttccctgacataggctggaaaaagcttgagtctccatg

SEQ ID NO: 414303 - DNA, 122 bp, Homo sapiens
gctcccacccctccgctccatgccttgcaggcaggaactgtgtggcagcaaggacagcttcgagatgtgcccactttgcctcgactgccctttctggctgctctccagcgcctgtgccctgg

SEQ ID NO: 414304 - DNA, 122 bp, Homo sapiens
ggggcctccgccgagggtccagggtatggagctcggctcggagtcgaaatggatgagctacggctattgggatcaacagggctaggacttaaacttcgtgctgaatttaaaaaatcaggata

SEQ ID NO: 414305 - DNA, 122 bp, Homo sapiens
gcattactggagaaaatcatcttcttgaaattgataaactgggctccaaggagacactctcgacccctccaccgcattggtctccagcaatgcaacctttacaacctgtcaggtgctactct

SEQ ID NO: 414306 - DNA, 122 bp, Homo sapiens
tgaagcgtgaaggcgccaatgaggccttcggctactccggcaggggcggaactaaaatgccggccacacccctctctgtgactcagtctctgagcgttttaatacgatggtgtccccgcggg

SEQ ID NO: 414307 - DNA, 122 bp, Homo sapiens
tggtgtggatatggagaagagaatgatgcagaagatgaacagatacagggacagggaaagcgcctggaaatctcaaatctggggaaagaaagagaaacagcactttgtaatggcatcctaat

SEQ ID NO: 414308 - DNA, 122 bp, Homo sapiens
gctggagacgggacagcacccgcacagggtttacagtcttgcagacagacgtgagccacgcgttttctaaaaatacgccacagcctggtccttcacaatcccagggaaggtgactgagtcgg

SEQ ID NO: 414309 - DNA, 122 bp, Homo sapiens
tctgcccagcggggagatcgtctccaactgtgaggctgcggctgaccagtggctggtgaacgacccctccaagccacactgcccccacagcagctccacgaccaagcgcccggccgtcactg

SEQ ID NO: 414310 - DNA, 122 bp, Homo sapiens
agtgaaatacagtgaagtctttccggtttctgaagctatgatcctcagggtttcacatcacgcaaacagctttctgtggttggtgaatatgctggtacattcatcaagctctcaacagacac

SEQ ID NO: 414311 - DNA, 122 bp, Homo sapiens
tacattagagaaacatcaacggaaagttttgccagggagggtccaaggcataactaactgcgaggctgggtgattaacatgggtgagaaagttaacataaaggtggagagtactcatagcag

SEQ ID NO: 414312 - DNA, 122 bp, Homo sapiens
attcaccttatgcagtactgctgtggtttcgcagtggccagaaaacgaatgtcacctccccgggtgccttataatcgctagcccttcgggggcaattcttcacgaaggaaaaagtgatcgta

SEQ ID NO: 414313 - DNA, 122 bp, Homo sapiens
tttatgagggcaaagggtgggcaccaacatccccattttacagatgaggaaacacaggctcggagggatttaatgggttgcccaaggccaacccagaacttttaactacagctccagaaatc

SEQ ID NO: 414314 - DNA, 122 bp, Homo sapiens
gccaacccctcttccccccctgactcttaggacctccatcgcaggggggcgaggcgtaggcgcgctggttaggaggggctggctcctaagaccagttagaatggcaatcattaaaaagtcag

SEQ ID NO: 414315 - DNA, 122 bp, Homo sapiens
ccacggatcttttcttcccgcttccagccgccaatcattaaggaccaggaaggcgtggagcggtgagtcagcgcttcgtgctgggctgttcgtctcttctatgtgctgatttcctgggttac

SEQ ID NO: 414316 - DNA, 122 bp, Homo sapiens
ctgtacagtctcatcaggtcccagtgtcccgcagctccctgctcatgcttgaggtacaggcgtttttgggacaggttgctgaaagtccattttgctagatgtgtgtcttgctccctttcctc

SEQ ID NO: 414317 - DNA, 122 bp, Homo sapiens
agcaactcccccccctcccgaagccgccgggcctggccgtcaggagactcggaggagactcgttctgataaattacattttgtaatgcagctttcctggaaatggcttcttgagctgcctcc

SEQ ID NO: 414318 - DNA, 122 bp, Homo sapiens
aggagaaagacagacaccctgggcgcacgggtgcctggccgtggaggaatccgtcctgggcgcgcaggtgcctgggagtggaggaatccgccctgggcgcgcaggtgcctgggtgtggagga

SEQ ID NO: 414319 - DNA, 122 bp, Homo sapiens
ttgccgtccttgcaactgtgtcttatttgcctgtgccgttatatcttggtgacccctccacgtgtacactactgacaaacgggtggagtgctggggagaagtcactgtgccgcccacctagt

SEQ ID NO: 414320 - DNA, 122 bp, Homo sapiens
gaagctggtttccgaattcacgccagctcacaactgaccttcatgctacactttgggtcccgtgagggcggctgcttccccctgctcactcttgggcagctggagcctaacatagaacctgg

SEQ ID NO: 414321 - DNA, 122 bp, Homo sapiens
tgcattcattgaaaagaaccattttaatgaagtgatcattttaagatcaagaatgaagggcgcaagagcttttcatggtagcattcaatgtaaaccgacactggctgtgttgctgaattatc

SEQ ID NO: 414322 - DNA, 122 bp, Homo sapiens
atgactgactcggacagtcttgtgctcctcatggccgtgctgtgggataggcgctggcaccggcccacctcctaactgggggccccaggccaggcaggctcagcacctggctgcagccatag

SEQ ID NO: 414323 - DNA, 122 bp, Homo sapiens
gcaatttctagaggtctcacatgaagaacttcactatcaactctgtcttcatcaagtcgacgacatcagaagtcatgttatatttatcactggaaagactccgctgtagcactcttgtgaga

SEQ ID NO: 414324 - DNA, 122 bp, Homo sapiens
gggccgctcctcttacagtagacagcggtgcctgcatcgaaatggaattcaggaggagcacgtgagggggaggggagaggtgcattttggaggaacttgataggaggtgccttgggacaccc

SEQ ID NO: 414325 - DNA, 122 bp, Homo sapiens
taataatttggacagcagcagaaccaagaatgatgaccaagtcttctaatgcttatttggcgctatcataatgattatccatttctcttttaatacaaaagcaagtattcatggaaaataaa

SEQ ID NO: 414326 - DNA, 122 bp, Homo sapiens
aattcttgtcaagttccattctattaaaagaatttcattttttgcttccacagataaatccgatcaacttgtgctgtcaaagaaaggggagaagagggtacaggtagccagcctccaagaca

SEQ ID NO: 414327 - DNA, 122 bp, Homo sapiens
agagtgagatgagggctggggagagggcaggtagaggaagacttgtgggaacacagcaagcgctaaataaacagaagccgcctttgtgggatattgacattgtcattgttccagctgggaaa

SEQ ID NO: 414328 - DNA, 122 bp, Homo sapiens
ctggcagagctcctggcctgtgggaggcacgtgggctgcggtcccctctgaagaaggcatcggcggctgggagttttccgaaccaccttcagggtcacccttcctctgcggtgaagagccgc

SEQ ID NO: 414329 - DNA, 122 bp, Homo sapiens
aagtttgaggcccgggtgtcagggcggggagaagaagaggaggaaggaggagggttgggccgctctccattcaaccacacatcagccaggcgcgcccctcggctgcagcggctgcttgcagg

SEQ ID NO: 414330 - DNA, 122 bp, Homo sapiens
tcagcctcagtctactggcctgtgaaatggggccagtcatgccttctgtgggtggccttgcggtgaggcttggtgtcactcctagtaccgggccacagagggcaaatggaagttccctttct

SEQ ID NO: 414331 - DNA, 122 bp, Homo sapiens
ataaacgaaatctgattaacctcatttgaataccgcatctataaatgaacagggcctcggcgggagtgattattttctcaggtgtttgcaacagtgttctaactattaacgctacgatgcct

SEQ ID NO: 414332 - DNA, 122 bp, Homo sapiens
gcagctcttcgcgcagagctacaactccagcgccgaacaggtgctgttccagagcgtggccgccagctgggcgcacgacaccaacatcaccgcggagaatgcaaggcgccaggtgggcgccc

SEQ ID NO: 414333 - DNA, 122 bp, Homo sapiens
caacgccgcacctgcacgttgattgaaaccaccctggaagtcagcgggaaaaccagcagacggtttggccttcctgccctcatctgtttcgcagctcccgagacttgcttggccagagaagt

SEQ ID NO: 414334 - DNA, 122 bp, Homo sapiens
cggctgcctccaaggaattattaaacctgggtctaggaatctgttcagacatctgggcaccgctgcctcgcctaccaggctccgcctcgctgcccctcccgcttcccctcccctcctctatc

SEQ ID NO: 414335 - DNA, 122 bp, Homo sapiens
caagacagcaatgaacttacaaagtcaagtgaaatacccaaaaagtgttcttttcctaaccgggtcctcacccggttaggatctggggtgtctggctttgtagctcttgcctttaacaggtt

SEQ ID NO: 414336 - DNA, 122 bp, Homo sapiens
gtccggaagcataggggttggccgaggccgagggtcggcgttgacctgtcccctcttgcgcgcaggccgcggcccctccccgctcgcgggccctagcgcccggcagctcctggcgcggttgg

SEQ ID NO: 414337 - DNA, 122 bp, Homo sapiens
tggagcaagtttctgcctctggaaagggggcgggcccttttcacaacaggctggttgtaccgagtaaacaacacgatgccatgaagaccctggttcagtgtctcgcacgtggtagacactca

SEQ ID NO: 414338 - DNA, 122 bp, Homo sapiens
agatttagacgttggcaaatttagaacaaaagagatgcaattttccacctcgtatgctcgcgctgttttacctaatattattataatgcattggctccagcagcggacctgcgcggccgggg

SEQ ID NO: 414339 - DNA, 122 bp, Homo sapiens
tgcgggtgactctggtgggtctaggctccgcggggagacttgggcctggagaccccgccccgcacgcagatcccgcccgccccggccgcgggttccggggaagcgaaggcgccgccagcccg

SEQ ID NO: 414340 - DNA, 122 bp, Homo sapiens
cgcggggcgcacccggatccgcctggggcgggagccgcccccttcccgccgcaggcggcgcggggctgcgagtcaagtccaggactcgggccagtctctccggaagacaagaccaacctcgc

SEQ ID NO: 414341 - DNA, 122 bp, Homo sapiens
caggcaaaagagaataatattactctcaatatcgcagggagtgtaaccccctcaaccccccgtatattgttcgtaatatgcagcggggtagaagctgatattactcccagtttcgcagaagg

SEQ ID NO: 414342 - DNA, 122 bp, Homo sapiens
cgtctgtaatcccagcaccttgggaggccaaggcgggtgtatcacctgaggtcgggagttcgagatcatctttggctaacttcattaatcttgagcaatacctgagatactacacaaggtca

SEQ ID NO: 414343 - DNA, 122 bp, Homo sapiens
cagctctaaggtgtgtagggcttggtctgggaacacccccagggcaagggtcccgccgcgcgcttggaattagaattaagaatgcatatttaggcgcccagggtctgcccccttctccctcc

SEQ ID NO: 414344 - DNA, 122 bp, Homo sapiens
ttagtgttttattatttatttatttttattatactttaagttctagggtacaaacctgcacgttgtgaacaagtcatatgctatttttaaggttagcattgacgaagaaggtttggtggcaa

SEQ ID NO: 414345 - DNA, 122 bp, Homo sapiens
tctcctagtacttcctgttctcggctaaccctggcgctgggccgggggctggagagtgaccgtggtctgagtgacctggggcggctgcgtgggccggggtgggcctcaaagccgggcaccag

SEQ ID NO: 414346 - DNA, 122 bp, Homo sapiens
gacagggcaatcatgatctccctggtcgcaatcacaatctgtttgttttaatgagaaattcgggcagtaaatctttttctgtcccccactccccacccttgccccaggtcatttcattagat

SEQ ID NO: 414347 - DNA, 122 bp, Homo sapiens
gctctcatgatatctgatggtttaaaagtggcacttctgcctttgctcgttttctcctgccgccataaaagacttgctttgcttccccttctgccatgatttaagtttcctgaagtccctgc

SEQ ID NO: 414348 - DNA, 122 bp, Homo sapiens
gtaggcctcgggcatggcgggtgggttgtgagccctgccccgtcgggaggtggctgacaccggggacgggccggcgcgggcgggccggcagtggtgggaaacttgtccgcccctcccggtgc

SEQ ID NO: 414349 - DNA, 122 bp, Homo sapiens
ggtgggtccctgagtgctcatttttcgttttccgtcagaggccgacctttttctctggaacgcacaagccaggtccaaaagttccttcagggcctccaggaaccactaaccaacgtccctgt

SEQ ID NO: 414350 - DNA, 122 bp, Homo sapiens
ggagagatgaatcataccccctcctcccacccacagcctggggaggtggaggccaccagccggcctggccttaaatctcaggaaactttaaagtcacaaatgctcagggccagccctgcatc

SEQ ID NO: 414351 - DNA, 122 bp, Homo sapiens
ctgagggctggagctcgagaactgaatgcgctcgccgggctgagcgtgcgtggatggaggcggtcggcttcagcacgcatgcgggttccggagcgggaggcgggaggacgccgcggctctga

SEQ ID NO: 414352 - DNA, 122 bp, Homo sapiens
atgatgggtgcatgtatttggaaaccataacactccattggcacatgcgagagtggtttgcgatggaactcagtcctcacaacactgaggaaacacagttgggagactgaggcacacagaga

SEQ ID NO: 414353 - DNA, 122 bp, Homo sapiens
cgctcaggactcaccaggcggcagcagaggtccaccaggccaggttaaggaaatctgcaacggtgggctgcagtggagagaggggcgtggactgccactgctgcccctcgccctaggtcacc

SEQ ID NO: 414354 - DNA, 122 bp, Homo sapiens
cctcttgagcagtcgtgaggtgtggctgcctgccagtcagcagcacactctgagcagcctcgccagctccctctgtgcagccgcatgtgctgcagcggtaacttgcattatcagaccttgat

SEQ ID NO: 414355 - DNA, 122 bp, Homo sapiens
atcgtgggcgggcacgaggcgcagccacactcccggccctacatggcctccctgcagatgcgggggaacccgggcagccacttctgcggaggcaccttgatccaccccagcttcgtgctgac

SEQ ID NO: 414356 - DNA, 122 bp, Homo sapiens
agcaagttccgggaggactatgtcctggggttccgaaaagggctggggaatgtccaggcacggataaggcacacaagctctctggaggaaaagggaggctcctttgcacttccccttcctgc

SEQ ID NO: 414357 - DNA, 122 bp, Homo sapiens
taccgtcggcgttgggaccgaggcagccctgcatcctgggacttgtagtttctcgcactgcgtgttaagattttggtggttacagagactgtccgtacctctcatttagggttacgcctgga

SEQ ID NO: 414358 - DNA, 122 bp, Homo sapiens
gcagggcagggggaggaggggcatcccccagggccaggccagatgtgttcccagggccctcgccctgttctgatccggagcccccacttggggctccctggcgtggggacacaacccagcag

SEQ ID NO: 414359 - DNA, 122 bp, Homo sapiens
acattgaaaggcgggtgggggggacaaaggagaaggtttgggaatggctggctgtgtgcccgtgtatgtatgggcacatctcattgttgatatgtcttgggggaaattgagggaaattttgt

SEQ ID NO: 414360 - DNA, 122 bp, Homo sapiens
aagaggatgaacaggccaggcgcagtggctcgcgcctgtaatcctagcactttgggaagccgaggcaagcggatcacgagatcaaggatcgagaccatcctggccaacatggtgaaacccca

SEQ ID NO: 414361 - DNA, 122 bp, Homo sapiens
gagcaatgcaccatcgtggtgagaggtgacaacatgctagcagccctcacagcctttgctcgctctccgcgcctcctcggccttggcgcccactctggtcgcgcttaagaggcccttcagcc

SEQ ID NO: 414362 - DNA, 122 bp, Homo sapiens
ctcccccctccccccacccgcccccaactcacaactcttttgagtccagaatctcagaatcgggcgttgggctttgccgggtgcttcagatcaatggtaattatttaattttttccagtttt

SEQ ID NO: 414363 - DNA, 122 bp, Homo sapiens
ggccaacggcagcgtctagtgaagcgcatgcgctgtgagcaaatcaaagcctactatgagcgcgagaaggcttttcagaagcaggaagggttcctgaaaaggctgaagcatgcgaagaatcc

SEQ ID NO: 414364 - DNA, 122 bp, Homo sapiens
tccataataagtacaaccaagagtgcaaaaggatttccagatgaccatgccaaagcttaccgtaaagcaaatggatcactgtacataatgcccagaatatcataggcactcagtaagtattg

SEQ ID NO: 414365 - DNA, 122 bp, Homo sapiens
gacgttgccatggagacaggccgctggctgaggcccggctcgtgtccctgcagggcatggcgggtcagttccgcagctacgtgtgggacccgctgctgatcctgtcgcagatcgtcctcatg

SEQ ID NO: 414366 - DNA, 122 bp, Homo sapiens
aagttcctatctggcccctggaaagcagcccagggggaccaggcttagtgcccaaatgtacgcgctgtgcaaaagagaaacttatgaagtcaaggacctcgtggcgtgttagacgagagccc

SEQ ID NO: 414367 - DNA, 122 bp, Homo sapiens
ctcttctggtccgtgtttgttccacttccaggtgagcttttgctcgccgtcaaccactgccgatcgctgccgtagcagacctgccactgacttccacccttccagatccggcagggtgtctg

SEQ ID NO: 414368 - DNA, 122 bp, Homo sapiens
aagctgtctctggcgaaccagggagcagctgggtaggccgcggggggcgcctgtcatcgacgtcatttccttcagcaagagcgccgcaggaaaccacttccacaccactgctcccctctccc

SEQ ID NO: 414369 - DNA, 122 bp, Homo sapiens
tgggcgtgggcgggatgggtgggagaacggatctggtagcggaacggcccagtgcggaggcgaagagagctactcgaggtggattttgtttgagggacagccatgaagtgacaatgacgggg

SEQ ID NO: 414370 - DNA, 122 bp, Homo sapiens
ggccgagcttcccccagacaattgctggattgttcggggacctgttgatgcaacaaacctcgtgctgagaagcttgccccgtaattagcaagcaatgctgtcaagctcatcaaatggttttg

SEQ ID NO: 414371 - DNA, 122 bp, Homo sapiens
cctcactgtagtaaagtggaatgccatcgccctccacgctaatgcaaaccagctgccggccggccccagcttgcgatagaacaggcggaattcttggacactgagttattcttagaagcatg

SEQ ID NO: 414372 - DNA, 122 bp, Homo sapiens
ccacgggctccaagggcacctggcctagttcggcaccctctgggacccctcgaaggatgacgtgggagaaatgcggctgaggatccccaggattggctctggaacccaaccctgtcacttct

SEQ ID NO: 414373 - DNA, 122 bp, Homo sapiens
aatccttccccacaccaggcaaagcagtattggacatgagttggcatgtggctgggcccacgtccttatcccccaggcctgaggggagaccaccttctgatgataaccaacccctagctacc

SEQ ID NO: 414374 - DNA, 122 bp, Homo sapiens
gacaagatcgagaagagtcaggaggcgtacctgctggcgttcgagcactacgtcaaccaccgcaaacacaacattccgcacttctggcccaagctgctgatgaaggtgactgacctccgcat

SEQ ID NO: 414375 - DNA, 122 bp, Homo sapiens
cgccgggccccggggcctcgggccgccgggacgccggggtcccataggccggggcgtgggcggggcggccagcctgacgcagctctgcaccccctaccaccaccagggccggcggcggcggc

SEQ ID NO: 414376 - DNA, 122 bp, Homo sapiens
agataaaataaaataaaaaagatatcttcagctgctcctagtagcttgagagataggtcacgcagtgtcaccatccccatttaacagatgggaaggctggctcagttttgaggccacagaag

SEQ ID NO: 414377 - DNA, 122 bp, Homo sapiens
ccccctcaccgttccatgatttctgagagttgcatcctcgccaggaactgattgtccttgcggatttctcgaacggcccctttaaattcacgcttgtgtttgtggatcagcctcttcctttc

SEQ ID NO: 414378 - DNA, 122 bp, Homo sapiens
gaggcgctgcctccagtcctcccgggtgggggtctcccctccgagatccccgagggaacccgtcccgtgcactaccggatttccggtctctgaccagctggggcttcatttctacgcgtgct

SEQ ID NO: 414379 - DNA, 122 bp, Homo sapiens
atacagcacttggtacacttcacttgcctcaccctagtcccggctctacaaaaacatatgcgaagtgaggagcacctctgtgccaaccctatttggccagccatggggtgtctgtgtgtttc

SEQ ID NO: 414380 - DNA, 122 bp, Homo sapiens
ccgaacccagtcttacctacggtggcggagtgaccagaagaagcgggccgaagtaaaaggcggggctcaagatggccgccggggcctcgcctcagccccgcccatatgatgccccgcccctc

SEQ ID NO: 414381 - DNA, 122 bp, Homo sapiens
accagagtgaaatattgtcatttttttctctcctgcatgtagtattttaatgtgctgggacgggcatttgtaagattgtatctaagtggctatgtctggtggctcctgttgagaaagcttgc

SEQ ID NO: 414382 - DNA, 122 bp, Homo sapiens
taaaatgccttaactagttaagggatctcaaccaagtatgggaggcattgtcagtattaccgctttctgcaatctttcttttactaactacccactccaaaaccctagtacctgcctaccct

SEQ ID NO: 414383 - DNA, 122 bp, Homo sapiens
aataaacttttagtttttaaattaagattaaataaagttaaaaattcagtttctcaataacggtggccacatttcaagcactcagtagccatctatggctagtgctaccatattggatagat

SEQ ID NO: 414384 - DNA, 122 bp, Homo sapiens
ggcccccggctcctagttcgggcaggcgcccagttggcactcaataaagatgtgctggcccggcgcggtggctcacgcctgtaatcccagcactctgggaggccgaggcgggtgaaacacga

SEQ ID NO: 414385 - DNA, 122 bp, Homo sapiens
tttataaatgcagaacccatgacaaatgttatgctaaagtcacatcctggctcctctagacgtttgtttagaaatgcattcacgagaatcatctaagtaacaaaaacaaaaacctgaattac

SEQ ID NO: 414386 - DNA, 122 bp, Homo sapiens
gggatgtccccggtggcgtcgcccgcagaaacacggacaggtttggggttcacgctggcacgggcgccagcagccacgtcagcaggcaggagggtcccactgcacagctgaggggtgatgat

SEQ ID NO: 414387 - DNA, 122 bp, Homo sapiens
aaacagataatagagacattccgggaatagttagctaactaagctgtgccaggcaacctccgggctaagaagaactcagtgttttcggacaatgaccaattacaataaccagtattatttga

SEQ ID NO: 414388 - DNA, 122 bp, Homo sapiens
acaaagtcctcccctgtcatcccatggcatgtgatcctgccctcctgacaactctgccaacgctctctccttagcactgggggactcagagatgaacttggcaaagacttgtcttgagtcat

SEQ ID NO: 414389 - DNA, 122 bp, Homo sapiens
gcagcatgatcttcaacaaggtggccgtcactctgggtgacgtgtggatcctgctggccacgctgaaggtcctctccctgctttggcttctctactatgtggcaagcaccacccgccgacca

SEQ ID NO: 414390 - DNA, 122 bp, Homo sapiens
ccccagggcccctgcggggggtggggtggctctcttccctaagtcacttgggctctgccccgtccctgcacatccctaccccccgccgtcatcccccttccccgggcccccagggcctaggg

SEQ ID NO: 414391 - DNA, 122 bp, Homo sapiens
ggaggactgggctcaagtgggtggaaagctcatgcaagtacgcagccaaacatccctggccgcgcgcggtccgacaccggcggccgcccggtctgcagaccagactggccggaggggggcgg

SEQ ID NO: 414392 - DNA, 122 bp, Homo sapiens
gccgcgcgtcccctcccgcccgcgcccccctcgccgggccccgccccgcgccccccgccccgcccgcgccccccgccgggccgcgccccccgccccccatgcaccacctcctggagcagtcg

SEQ ID NO: 414393 - DNA, 122 bp, Homo sapiens
cttgacgggaaggaaggggctggtcacaccttttctccagacgcgtcatgaagtacatctcgggagaaatgggaagtctccctcccccatcctggtttttaactccatgctggcgatgagga

SEQ ID NO: 414394 - DNA, 122 bp, Homo sapiens
aaataaataaatatataaataataaatatacacaaataataaatatataaaacatacagacgtatatttaggagctctgcacagagctttgtctttgaccctggttcctgacatagagtgcc

SEQ ID NO: 414395 - DNA, 122 bp, Homo sapiens
gcaattccatttaaaaattttttgcaaaaccagtatggttctggaactgctgtgcatacacggaacacgaagaaatactgctttgaaaatacctgtgtcagacacagcctaaggcacagtag

SEQ ID NO: 414396 - DNA, 122 bp, Homo sapiens
agtgatccacccactttgcccttccaaagtgctgggattgcaggtacgagccactgtgcccggcctgggctgcctccacatctggacagtcagtcccacagcacagggagcgccgttttgtc

SEQ ID NO: 414397 - DNA, 122 bp, Homo sapiens
aacctggagcacgaggctgagaaacccaccacgcaggccagctggaggctgccgcccagccgggagtcagaagctggagccactgggtgctcccgaagccatctggagcacctgaggaacct

SEQ ID NO: 414398 - DNA, 122 bp, Homo sapiens
tctcctgctggtgctggtgctagggaccatcttgctacccgctgtcaccatgctgggcttcggcttcctctgccactctcaggtgagcgtgcgccccggggtgtgcgtgtgagtgtgagtgt

SEQ ID NO: 414399 - DNA, 122 bp, Homo sapiens
ctgtgagctccctaggcagggaccatgccccattcattccggtaatgtgggagcctggcacggtgtctggcttggggcagacaccgaaatagatgctgagaattaacatccaaagatgtacc

SEQ ID NO: 414400 - DNA, 122 bp, Homo sapiens
cacaccgccctttccagaacaggcgggggagcgcgaggcagggcggttctcgcttggagacgggtgggtggactggagggcagaggcaggctctgggttctgcacccatttacatatcccct

SEQ ID NO: 414401 - DNA, 122 bp, Homo sapiens
cccacccactggctctgcagggcgcgcactcccagctggcgcagaaagtgtggggcctcgcgggttgtacggcgactacggcgcctgccaagggcaaaaaaacctctttgccgagggggtgg

SEQ ID NO: 414402 - DNA, 122 bp, Homo sapiens
gcaactcttagtcattttagcctaaaagtcatcatctgtcataagctcttaatcatactacgttcccttgcataatattcacaagatcctacttttggagagtggtgttggccgctcctagc

SEQ ID NO: 414403 - DNA, 122 bp, Homo sapiens
ctcgaactcctgacctcgtgatctgcccgccttggcctcccaaagtgctgggattacgggcgtgagccactgcacctggcctctaaggtgtggtttttacggtaaatgttctgaagagctca

SEQ ID NO: 414404 - DNA, 122 bp, Homo sapiens
gggggtggcagcgctcgggccggacgtggcgaggccaagcgggcagcgctgctctggtgccggctcccggattgcaggcctaatcgatgcatttttctgagtgagtcggtgactcccccacc

SEQ ID NO: 414405 - DNA, 122 bp, Homo sapiens
gacctttagggaattccttgggtaacaggttctgaatgtgtgagcacaatagggcccattcgcttgaaggtattttactcaaaacttgaaatctgggctccagctagaaagagggggaaaaa

SEQ ID NO: 414406 - DNA, 122 bp, Homo sapiens
agtttgcatagattgatactagttctttataaaatgtttggtagaattcagcaatgaaaccgtcaggtcctgggcttttctttgatgggatactttttaatactgcttctatctcatttgtt

SEQ ID NO: 414407 - DNA, 122 bp, Homo sapiens
tgcggtggtctccgggatgctgtggttgtgggcccggctgctcccctgagccctccatgacgctcagccggtcgccgtgctccacggcgtcccgcccctcctcctcggttgtcgccaccgcc

SEQ ID NO: 414408 - DNA, 122 bp, Homo sapiens
ggcgcgccgcgacggggcgggtggagcagcctggtttggggaattagcaccaaggacgggcgcgcgcgcaggtccccagcacatctgggcgagagcggcgccgctggagccgaggggggcgc

SEQ ID NO: 414409 - DNA, 122 bp, Homo sapiens
gcgcctcccgcgggtggaagtggctctcctgcgccttgcggaaggcgtagcagctctggccgtagtcgcggaaggtctgtagatctagctgcgccacgggctgggccgggccgggcaggggg

SEQ ID NO: 414410 - DNA, 122 bp, Homo sapiens
aggggcggctcccaggtccccgaggtgagaagccagagcgggaagctggccgagaggccccgtctacgcgccttccgggtggaaaaggcgctcgctggaacctgcagctccagtggcaaagc

SEQ ID NO: 414411 - DNA, 122 bp, Homo sapiens
gcgagcccccaccccattcgctaggcgacggcggcgaccgggaggagcctgcgggcactccggaactggaaggagcttgttgctgtcacgatttgcattttcactgcactgctgtccttaaa

SEQ ID NO: 414412 - DNA, 122 bp, Homo sapiens
gaactcatttcttctatctagctgtaattctgtatctattaaccaacttctcatcatcctcggttcctctttgccctttccaggctctaatgctaagggccaaatcttcatataaaaaatag

SEQ ID NO: 414413 - DNA, 122 bp, Homo sapiens
ttgtgtacacactctactccaaactggcccagaattttatcagctgctcttcattctgtacgttgtatttggggtttttatggccatctaccatctctcctctaattccgggtgcaaaaaga

SEQ ID NO: 414414 - DNA, 122 bp, Homo sapiens
gactgcaccgtgtttattcatgtgtctgacgcctgagcaaagtggagttccttaaagtcccggagctgtgacactcatctccatagcagcagccccaggtccttcaagacagccgtgcctct

SEQ ID NO: 414415 - DNA, 122 bp, Homo sapiens
ttgggcacagaggtgaagcagcagccagcatcagtaaatttgccattattaaccgcccaccgccaccctcaaccccattcccaccccctgttggaattggattagccttctggtattatttt

SEQ ID NO: 414416 - DNA, 122 bp, Homo sapiens
aggcccctgcgctacaatcaccctgattcgaggtgtcctggaggttaccagttccgcgtgcgaagttctgccattcccgcggggctggagccccgaggctgaacttcccacgggcggtgggc

SEQ ID NO: 414417 - DNA, 122 bp, Homo sapiens
tcatgggcttccgtgcagaaggggagctgcaccggcgagcacccggcctctgagctgagccgcatcctcacggacaggacagcgccccattatgaggctcctgcagctgttcctcgctccag

SEQ ID NO: 414418 - DNA, 122 bp, Homo sapiens
cagttgatctaaagcgagacacacagatcctgaccccgccttcgaccacccgaggggcgtcgccatcttccgcccccgccagctagttggaaatggctgcctcgggggtgatcctcgccgtc

SEQ ID NO: 414419 - DNA, 122 bp, Homo sapiens
ccggggctcccctcctcctccctcccctcccccacccacgtggctctagtggcctccgcccgagatcggatcctacctgaggcgggagccctgggcttggtcacttcccaccttccagatgt

SEQ ID NO: 414420 - DNA, 122 bp, Homo sapiens
aaggtgtctacacttgcgtggctcgcaactacctgggggcagcagcgagcagaaacgcctcgctggaagtggcaggtgagagtcagttgaccgtcagctggttgcttccagagcctggggta

SEQ ID NO: 414421 - DNA, 122 bp, Homo sapiens
ggaggctctgaacccagccagggagaggcaggagggagtcccgccccttgccctccatatcggaccataggaacccactcattggctgcagtgtttgtcagcgtctggaggcttcgaaccca

SEQ ID NO: 414422 - DNA, 122 bp, Homo sapiens
gcagagtgtgacaaaacccaagtaaggccaggtggccccccagccccctcctgccccagccgcacccttcccaagggagagggaggctcccgagagaagctgctttgggaacagagggggca

SEQ ID NO: 414423 - DNA, 122 bp, Homo sapiens
accaccagatgtgcaggcagcgtggggtctctccagcatcccctgttcagacggcccgttcggaaactggacataactgtgacttgtgtgcctggctctgaataatcagttaggccagtgaa

SEQ ID NO: 414424 - DNA, 122 bp, Homo sapiens
gaatcgtaatccccaaatgttgaggtagggacctggtaggaggcaattggatcatggggccggtttgccccatgctgttctcctgatactgagggagttctcatgagatctgatggttttaa

SEQ ID NO: 414425 - DNA, 122 bp, Homo sapiens
ggttctccaggttggggtcacagtctgggggcccgctgttgaggatggggttgaggagcccgtcccagccggccgacgtggtgatctcgaacaggcagatgatgctgttgccgaaggtctcg

SEQ ID NO: 414426 - DNA, 122 bp, Homo sapiens
tccaaaacacacactggagttccctgacgtttccttcctctgaaaaactctctttccaggcggggcgttctgtggtcagacgaggcagaggcctccccggaacgaagtccacgccccctccc

SEQ ID NO: 414427 - DNA, 122 bp, Homo sapiens
ccctgctagcacagattaagaccctctggtcaagctgattcccgaacacattctgtaaggcggagctagttgggataagcacatccctcccccagcctcctccaggaaggctgtgcatattc

SEQ ID NO: 414428 - DNA, 122 bp, Homo sapiens
ggacatttgggaccttgtatgggaggagtcagtaaaaagccattcaagtgaaaggcaaaccggaagagagtgtcatcatgaacctaagccaggatgtttttttaggatgaagggtgtggtca

SEQ ID NO: 414429 - DNA, 122 bp, Homo sapiens
ttgcactagaggtttctctcctgtgttctcagggtcaacccgacagtccctctgaaaccacgaaggggtccccgggcagttgctgcggggtgtgtgtgtgtctttctttccctttttggggt

SEQ ID NO: 414430 - DNA, 122 bp, Homo sapiens
tggatactttgaagttgccatatcctgactgaagtccttcccagaacggcagtagttggtcgagtatgccacaggttatctggttgagtaatctgagattagctctcctaacattaactttg

SEQ ID NO: 414431 - DNA, 122 bp, Homo sapiens
tacaagaggctctgtctgcttaaagtgctcagtgcctggtgatgccatgttttttcctgtcgctagccccctcaaaagaaggaaattcatttgggagttgtttgaggtggatgaggacatcc

SEQ ID NO: 414432 - DNA, 122 bp, Homo sapiens
ctactgaccaccctggtttctatgtggtctaaacaaacggggaacaactttttaccctgtcgttataggaaaaaatgatatatctttgagcaggaaatcagcaacccaaagtggtggcagga

SEQ ID NO: 414433 - DNA, 122 bp, Homo sapiens
acacgctggagcctttttggaccaacgttggattttcggaccagagaaaccaaaagaggccgagcacgtttttccctgttaaccaggttcccggggaagcttaccagtaggtgagatcagtg

SEQ ID NO: 414434 - DNA, 122 bp, Homo sapiens
gctcccggggtaggggtggctcccggctctggggttgtgtctgatgaaataggccgggcccgggctacactcggtggtggtggaccggcgggaggacgagcgctacctcagtactacttctg

SEQ ID NO: 414435 - DNA, 122 bp, Homo sapiens
ttgcataagagaaaatgtactggccaaacattgattttgcttacatacacatacttaacacgcacattcttgacctacatctatttaaaaaaaaaaaaaaaaagaacttgtatataaaaatc

SEQ ID NO: 414436 - DNA, 122 bp, Homo sapiens
aaggaggcggacgaaggcgctgcagcagaggctgaaactaagggccaagcggggttttggcgcaggcgcgtgcggtcgaagcgcacacctggatttgtttccccccaacccttcatccctgt

SEQ ID NO: 414437 - DNA, 122 bp, Homo sapiens
attcacctggggagttatttcctgagcaggaccatcatttctttaagatgcttgaatacacgataacaaggtaaggctaccgatgatggctacaagcataacattttgaagttaggtctgct

SEQ ID NO: 414438 - DNA, 122 bp, Homo sapiens
cccagctcaattcatcggccaaagacacccagcctccatggtcagagtatcttctatgcccgacaggagggactgtacccttagaattgaaatcagttgaaatcagtcatgcttcatggaag

SEQ ID NO: 414439 - DNA, 122 bp, Homo sapiens
cacgggttccctgtatctctgattaagacacgagattagtggagtgggcgggtgggggcgcgcgcaggagttggtagcaactctcagtgaaatacagtagagccatggaaagcgggggctgc

SEQ ID NO: 414440 - DNA, 122 bp, Homo sapiens
gctcccgttcttccccaggtcccctttccccgttgctccttctctagggataggagaggtcgcttcccggccctccgcagggtcacagctcggttcctcccagcccgccctccggggagctt

SEQ ID NO: 414441 - DNA, 122 bp, Homo sapiens
ctgaaagaagcttcaaaccattatgcccctaattgaattccccaggagtccagtaaactccgaggaaaaaagaaaaatcacaacatttgctaaatcatcttaaaacatatttcactgcaagg

SEQ ID NO: 414442 - DNA, 122 bp, Homo sapiens
tatctcaatctctctggagccaacctaggtcctcagagaacattaattgattggataaatcgaagaaagtggggacaaaagggaagagggaggctggccagttttaatggcacagagtccag

SEQ ID NO: 414443 - DNA, 122 bp, Homo sapiens
tgtaccctgcgctcacacctttttcaacccggatggcggtgatagttaatactttctgagcgcttttactatggtcaggcattatatttacacctaatcctcgcaaaacactactgggaaga

SEQ ID NO: 414444 - DNA, 122 bp, Homo sapiens
gaaggaaagtgtcaggatgaaagtggacggaaggccaaagctttccaagcctaggttattcgtagaaccataaatgggtgacttagccacagttcccaggaggcgtgtctattcacggggga

SEQ ID NO: 414445 - DNA, 122 bp, Homo sapiens
cacggggtacgtgccaagcatcctcgcgcgaccccgagagcccggggagcgggggcttgccggccctggcactcatttacccagagacagggagaggctcttctgtgtgtagtggttgtgca

SEQ ID NO: 414446 - DNA, 122 bp, Homo sapiens
aatgcaactagagggagtgcaggcacaggagcagccagggagtgaggttctgggtgttgccgctgtgctaggttgcattcaatatgaagatttctgttcaactgagcatgtgcggaatgagc

SEQ ID NO: 414447 - DNA, 122 bp, Homo sapiens
ccaaatttaacatgcacttttaacttcatttcatatgtgagccccctgcccttgtagtcccgaatgctccctttttcttgaaactctcttgttcttttgattgtgtgatatagttatctcct

SEQ ID NO: 414448 - DNA, 122 bp, Homo sapiens
aacccaggactccagcgaaattacagggaattcgtggtcacgggaccggcctccgccaatcgctcgtctgggcctggtggaaaacagagagcattatttggtttaattgattcaaaaacacc

SEQ ID NO: 414449 - DNA, 122 bp, Homo sapiens
tattagctgttggctgggagctcagctgaaatgcctacgcacagctttggcttctcatagcgtggcagctgggttctaagagaaagcttcccaacagtaagcatttaaagtgaaagtggcaa

SEQ ID NO: 414450 - DNA, 122 bp, Homo sapiens
gaaggaatctggagccaggagtaacagtagctacagcccttgggtaaccattctgggctacgagttttggctgtcttgttcccaaaagcaaagggctgaatgagctgctaatgctgtctagt

SEQ ID NO: 414451 - DNA, 122 bp, Homo sapiens
gagcgcagagtagatccaggtagggacctggtgcccaagtgcaccagtggcggactctggcgcctcttatttacattaaacctgtccctcagcattccgttttaagaggcgtctttactctc

SEQ ID NO: 414452 - DNA, 122 bp, Homo sapiens
aataagggtgtatctctctctcccaccagccatctttgatggcagaaaccatgtcttattcgtatttaatccccagctcatatttatttgggcacagagtgggcactcaaatatctgatgaa

SEQ ID NO: 414453 - DNA, 122 bp, Homo sapiens
ttcatttgcaaatgttactgggggacacaccggctcccagtagggtttccgccaaggctccgcgaaacgccactagagggcgccgctagcgaatcccacagcgcgccccgctgcccccactt

SEQ ID NO: 414454 - DNA, 122 bp, Homo sapiens
cggtggctccagcatgtatcagccgaggtggagctgcggggccctggcatgaaaggtgagcgcgccgcacccggccggggacggggtcctcccccctccccccaccgcactgtcctcctgca

SEQ ID NO: 414455 - DNA, 122 bp, Homo sapiens
gcctgcctggcccccacctgctcaaacccagaagccaaagttagctagttagagccaaaacgtggagaaacaagagacaggccagttggcaggtcctacctgggagagaaaaaaaaaaagat

SEQ ID NO: 414456 - DNA, 122 bp, Homo sapiens
ggtgtttacgtctggtttactgggccgacggctgacattcctggagagaaccaggtgggccgtgcccagcatgaaccagcacgaccctgacaagctcctttcctggggcagccctgcccgcc

SEQ ID NO: 414457 - DNA, 122 bp, Homo sapiens
tagccgccccgaggattaaattacctcccactgggtccctcccatgtcacgtggggattacgggaacaattcaagatgagatttggatggggacacagccaaaccctatcaactagggattt

SEQ ID NO: 414458 - DNA, 122 bp, Homo sapiens
aggagatgtgtaggttcaagaaccagacgttgaatcttcttgtagtccttcccaggaggccggtcatggggtgagttctggcgtggggggagaggggcagtctcagacagctggccgaagta

SEQ ID NO: 414459 - DNA, 122 bp, Homo sapiens
atgtgaatgtcaggttggcagggtgcagctgtgtggttccagatgaccagaagccacaagcggttgctgcttctctcttgggattggttggggagtgaagggcagaccgacggatgccttgg

SEQ ID NO: 414460 - DNA, 122 bp, Homo sapiens
tgggaagttcgaaagcacagcaccagcattttgtgagcacttttatgctgtattgtccagcggcggaagagcagaagggcaagtgagcacttgtgaaagagtgaggaccaaggatgggagtt

SEQ ID NO: 414461 - DNA, 122 bp, Homo sapiens
ttccaggtgccatctgtcacccctttccttgaccaggaaagggaactccctgaccccttgcgcttcccgagtaaggcaatgcctcgccctgcttctgctcgtgcacgggtgcgctgcaccca

SEQ ID NO: 414462 - DNA, 122 bp, Homo sapiens
ttgagagactgggttctttgggacctgggaatgttgggtggcctagtttgcctgggcctgcgggttcttctcctggcaccagcacaacataccagggagggagctttgggctttaggatcca

SEQ ID NO: 414463 - DNA, 122 bp, Homo sapiens
gcgtgcggcgtgcgcgtgcggcgtgcgcgtgcggcgtgcgcgtgcggcgtgcgcgtgcggcgtgcgcatctctggtggtgtcagtacacgtggcacagacagttgcggatgcgtgcaacctg

SEQ ID NO: 414464 - DNA, 122 bp, Homo sapiens
tgggggagactgagcaggccatccacaactacctgctgtcactgtatgcccgtggccggccggactcactactggcctatctggagcaggctggggccagcccccaccgggtgcattacgac

SEQ ID NO: 414465 - DNA, 122 bp, Homo sapiens
aaggtctggagcttgaatctgcatcgtcttcctaggtgcttgcctgaggtgagtggtcagcgggtgctggcttgggggcagctggcagggcgtatgctgcgggtaggaacccagggaacact

SEQ ID NO: 414466 - DNA, 122 bp, Homo sapiens
gagaccggcctgggcgacatggtgagaccaccccttctaccaaaaatacaaaataatagccgggcatggtggtgagcacctgtggtcccagctactcgggaggctgaggtgggaggatccct

SEQ ID NO: 414467 - DNA, 122 bp, Homo sapiens
aattgaggcatccattttttggttttgttgccttccctgtgtcatttctccactctctcacgatgctttctaggatcatctctcaaataagttatttatgctcaaattcttaagaaatgctt

SEQ ID NO: 414468 - DNA, 122 bp, Homo sapiens
aaagtgataacggagcttgagcatcctctgaattgatctctcaacagcaagttagttcttcgcacaaggatatcagtattctctgtgtcttacgaaccaaagccctatggagtgtgaggtca

SEQ ID NO: 414469 - DNA, 122 bp, Homo sapiens
gagatgcggggagcacctctgccctgccgccccgtccgggatgtgaggagcatctctgcccggacgccccgtctgagaaatgaggagaccctctgcctggcaaccgccccgtctgagaagtg

SEQ ID NO: 414470 - DNA, 122 bp, Homo sapiens
cagacaggaaccagaaggccagcgctggttcagggaacacaccagatgagatttcagcgacgggtggtgtggcagaattcaagacataattctctgagccttacacaccactccagttggga

SEQ ID NO: 414471 - DNA, 122 bp, Homo sapiens
aggacaaagtgctttttgatagtgtgagggaagtggctccccagggcggggattccggctcggagctccctgagcatcgatcgctggggcttccctgtcttatgctgagctgaacgcgggct

SEQ ID NO: 414472 - DNA, 122 bp, Homo sapiens
aggctttattctaattcctttaaaccagtaggaaggatccctagggagggttgtgtacctcgttcctcaatttaacaaagactaccctcctttggaccagtggctggctgcaatccatggca

SEQ ID NO: 414473 - DNA, 122 bp, Homo sapiens
aggttgacatgctgagcctcgcatgagcccgggggcagccgcacctgggggcgcagtgcccgctgatgcctcctgggcctggccgagaccaggccttgccttctgcctagatggacaccgca

SEQ ID NO: 414474 - DNA, 122 bp, Homo sapiens
tttattttttgagatggcgtctcactctgtcaccctggctgcagtgtggcagcacaatctcggctcactgcaaactccacctcccagattcaagcaattctcctgcctcagcctcctgagta

SEQ ID NO: 414475 - DNA, 122 bp, Homo sapiens
cagctcacaggccctgaggccgcagccgccgctcccgcctccctgcgggccgctgggccccgccgctccgcacccaccgctccactcgccgcactcctagccgcgccgacccccgcgcccca

SEQ ID NO: 414476 - DNA, 122 bp, Homo sapiens
gcgactacttcagagtccaccttcctccgataatgttctagtcgttttcaaatacattgtcgcatatgatcctcacaatccagtgaggcagtggggtgacggcgacaccaaaacccacagtg

SEQ ID NO: 414477 - DNA, 122 bp, Homo sapiens
tccctgacacagcttcgatccccttgggtagttagtgtgttcggagcgctggtatccctgcgtgctttctgctgagtgcccacccctccattccagcaggtcctctcttccagccccgttat

SEQ ID NO: 414478 - DNA, 122 bp, Homo sapiens
aaataaccataaaaggactctggaactacataaagatacaagacaaattggtttggagaacggaaataaaatctacctataaaatccaggtaaatatctgatactggcacacaggttggagc

SEQ ID NO: 414479 - DNA, 122 bp, Homo sapiens
ttagagaccaagtaggggccagtttccaattcaccctgtcagggagtgagccggatctgacgttccttgtgacttaagggtccggcttgggaattaaagtttgtttctggcctttagcctac

SEQ ID NO: 414480 - DNA, 122 bp, Homo sapiens
tagacgaggactttgaggagccagtgctgtgcgatggaggagtgtgctgcctctgctccccgtctctggaggagagcacctccagtccctccgagcctgaagatgtcatcgacttagtgcag

SEQ ID NO: 414481 - DNA, 122 bp, Homo sapiens
cacattccctaccaagcgctcagcgatataggattcgttccccatgggcagtgcgggaatcgtaggcaaggagcaccgcggagtcccatcgcttttccctgaagggtgagattctgaacgtt

SEQ ID NO: 414482 - DNA, 122 bp, Homo sapiens
cggttagcgcgcggtacttatatggcagtatgtgtgcgagtgatgccgaggttgtgagttcgagcctcacctggagcattgttttccaacccaaaatagcattacttgaagtgcctttcccc

SEQ ID NO: 414483 - DNA, 122 bp, Homo sapiens
aagctgcaccgatcaaagctgaaaaaagccggggatccagcagaccctgaggctccagcacgttgagagtagatcaaaagatcctttcagcagggtgccaatgcttagacgccatctgggag

SEQ ID NO: 414484 - DNA, 122 bp, Homo sapiens
ccagctgatgtgctgggtaaatgttggcctaagcatgcttgtgtttttagtgatttgaaacgtaaaggcagcccactgacattttttagcaagctttgcataattggtttttaattgtggct

SEQ ID NO: 414485 - DNA, 122 bp, Homo sapiens
gcaagggtttcctctcagcagcggctcatcctccacgccgggggcagctgctttagttttcggctcgcgggctcctggaagatcctccatgcagtcttgctggccagaacccgggtcccgct

SEQ ID NO: 414486 - DNA, 122 bp, Homo sapiens
ccccaagtgactacagccacacgacaggttgtggagttcataaaatcttttccgagccagcgggttgcagccagagctgccaagttcaaaggcattgccgtgggttcaagtgccccccaagg

SEQ ID NO: 414487 - DNA, 122 bp, Homo sapiens
gggccgccgtcctggcaccaacttgaggggctgtgcggcggagggcggctgcggagcgcccgcgcgggctgcacctgctcagggagctgcccctctgttgttgttgttattttccttcttgg

SEQ ID NO: 414488 - DNA, 122 bp, Homo sapiens
taatccataaataagtcagatttctttttaagacgagaaacttaattttattgatatggacgaagagcaaggaaacacagtatctgcatctccagatttccgataaccttggccagcacgat

SEQ ID NO: 414489 - DNA, 122 bp, Homo sapiens
gcctgcattgcacacagcctcctgcccctgaaggcagccccaaagtaagcctgcacttcccggtgcagcactcagcaatatgggtaagatttccaggttcagatatcagcagaacccaggaa

SEQ ID NO: 414490 - DNA, 122 bp, Homo sapiens
ctgaatggggctgtgctgttttcttagtcccaggcgtgcatctgctaaacagcagcagggcgtttgcctccggctattgtgcaacatgatcttgattcctcttttaaggggagcttttaaga

SEQ ID NO: 414491 - DNA, 122 bp, Homo sapiens
gcaccgccagaaacacggggaccagtgcgccaagctgtacgacaacgcaggcaagaagcacggaggcctgtggtggacctacctgttcagcctcatcttcaagctcatcattgagttcctct

SEQ ID NO: 414492 - DNA, 122 bp, Homo sapiens
cctggatgtagccttagcagacggactttttctacaacattggccagctgccaattaggccgcaggttccttggctggacaggagctcgacagaggggacaggtgtaaccccagttctggga

SEQ ID NO: 414493 - DNA, 122 bp, Homo sapiens
ctgaggggggctctctaagtgaggagctgtccttgggagcagctctctgaaggatgttctcgctgagggaggctgtctttgagaaggactctctgaaggaggggctctcttggcctgtcctg

SEQ ID NO: 414494 - DNA, 122 bp, Homo sapiens
cagccccggggggatcgggcccgggactctgcggaatctggaggccgaagcccgcgcgcacgcagggtctctgctgcttccccaacgcctgttgcgtggccgcaggacccgccgccctcccg

SEQ ID NO: 414495 - DNA, 122 bp, Homo sapiens
taaaaataaaaagaattacgatgcgggcgaggcttgtgggggtgagaagaggagattccacgtctccccagtgctgcgtcctgataggacccccagggccttccgagccctctcccagcgac

SEQ ID NO: 414496 - DNA, 122 bp, Homo sapiens
gccgcagcgtgacttttgaaacctggaactctaggggagccctaaaacgagcgtgttgtccgtgaggataagtgccttcagagaagtctgaatgggctgttctcccaacagtgtgtttctct

SEQ ID NO: 414497 - DNA, 122 bp, Homo sapiens
aagagagtaggattaagctgacagctttttgggaaataggtttttgacctgaatcttaaacgtgatggttatgggacatgagcatgaccattttaggatggtagttttgtaatgttcaaatg

SEQ ID NO: 414498 - DNA, 122 bp, Homo sapiens
aaccaggggagcctcagtctttctgtatctgagttttcctctagataggaaggaagaaaacgtgccatacctgcaaggaaacctcacattttgtattcgcttctaagatgtcacactctctc

SEQ ID NO: 414499 - DNA, 122 bp, Homo sapiens
caggagtgtcctctgtggggctgtgggaagcagccacatcacatggaaaccgcgcagtgccggcagcagcacggagcgcaggcccagccccggcccagaaccacctgtgtggcggtgtggtg

SEQ ID NO: 414500 - DNA, 122 bp, Homo sapiens
tcagtgatgtcttagtcaatacaatgaaacggcgtctgaggtaattcacgtgaaggtaaacgcaaaccagtggggctggggggagggaggtgctctacaaaggactggccacagacacgggg

SEQ ID NO: 414501 - DNA, 122 bp, Homo sapiens
tcctagcactcctcacattcagccgtgagtctgaggagaaacaaaaggggcattctccttcgtgcaccatggagagcctctgaaatgttagctttccctgttgcttacagcctttgtcattc

SEQ ID NO: 414502 - DNA, 122 bp, Homo sapiens
gcaaaatcattatgtaaaaaaggcctagctttcaggaaagttgtcaaaatcctagcaaaacgttctccccacaaacacatttgacttctgttggaaaccaagaaatgtttataagcctgaat

SEQ ID NO: 414503 - DNA, 122 bp, Homo sapiens
tgggcactgtcgctgcctggagtagaacaaaaacaggacctggtcagagcccgcaggagacgtgggacaggaggaattatggggtgggtgagctcctccacactcccacccccaccacttac

SEQ ID NO: 414504 - DNA, 122 bp, Homo sapiens
ctctgcgccctgcctaaggcctagtctgaaagaagtccgaccaaataacctgaaataatgcggatttgcatgctttctgtatcttctttgcattctctaggttcaaggtcaagattttgccc

SEQ ID NO: 414505 - DNA, 122 bp, Homo sapiens
atggcccggtttagggttccggggcgggcggcgcgcacgggattaggtgaattagggagccggagcagtgccgccgtcgccgtcgcagcgccatggaggaccccgccgaccctgccgacccc

SEQ ID NO: 414506 - DNA, 122 bp, Homo sapiens
tcccagaccttccactgttaccgtgccacctcaagattggtccctccaaggctctggcaccgtccccgcttttgaactagctggccccactctaggttacgacctcgtggcctggggcatga

SEQ ID NO: 414507 - DNA, 122 bp, Homo sapiens
actgccaccaaggtccctcggatgcagggctcgccacagtcctcctgtgctaggactttccgctcctccgacctggaggatcctccttgtcctcggactccaggcttccgctttcgtctccc

SEQ ID NO: 414508 - DNA, 122 bp, Homo sapiens
aaggccctgggagaagacactaacagaaggtacaggacaagggaccaatggctggaatgccgtcttccacagaaagctcaagagaacaaatcagatggacacccagagacccagtaaatcag

SEQ ID NO: 414509 - DNA, 122 bp, Homo sapiens
ccacagtgaggtcaaatggatcatttaacccgtcgagtttggtttcttgttcatccgacgcggttgatcttattaacgcatatgtgtttgtgttgatgtggcctccagcttctgtcgcactg

SEQ ID NO: 414510 - DNA, 122 bp, Homo sapiens
aaaaaggcattcaaggttaaagaggcagtagctgggtcatggtcacggggagagatgctgcgcgctctctgcggtgcttgggccggggacacttgtgcttgtcaattttgagaaaaaaaatg

SEQ ID NO: 414511 - DNA, 122 bp, Homo sapiens
cactcctgagccacgaacttttcctgactctattctttcctttccaactaggagttaccccggtcaccacgttcgcccttctcaacctgactaagtgggcgttagcactgtccgcccactgc

SEQ ID NO: 414512 - DNA, 122 bp, Homo sapiens
tctctaggttggattaagttttttactgacccctctgcaggttacataacacctgtgggacgacctgtggcatcccagtgaggcagcgatgccatctcggtctcatccaggatgaaaccgtg

SEQ ID NO: 414513 - DNA, 122 bp, Homo sapiens
gaggggggtccatgctgtgtgactgggaccactggatcccacccatcgcagcgggaggggcgtccatgctgtgtgactgggaccactggacccgacccatcgcagcgggaggggggtccatg

SEQ ID NO: 414514 - DNA, 122 bp, Homo sapiens
gccaaactcctacccccactccccgcctccggtcctcacccccttcctctctcccagcctcggtgtctggttacggctcctctgctcgcattgtgactttgggccaggctgggggaaatgac

SEQ ID NO: 414515 - DNA, 122 bp, Homo sapiens
tggagagaaatcaagtgatggggaagatgagggcaaaaggcatgcctctagtcagctaaacgtgcaagaattccacagagggaaaaggagaaaaagggaggcagattgagatttctttaagt

SEQ ID NO: 414516 - DNA, 122 bp, Homo sapiens
gtttaggatggtcaagtttccaggccctggcagagcagcatcattatctctctaagccttcgtgtatcaacttccctggccatatttcactttctatgtctttcttctctgaaatcaggtga

SEQ ID NO: 414517 - DNA, 122 bp, Homo sapiens
ccgcccggtgcccagtggctccttctctgtgcagcgtcatcctcgtgcctgtgtggtcgccgaggatgttttctgagggtctttgtgatatcgagggaatatcaagaagtttgcaggcttgg

SEQ ID NO: 414518 - DNA, 122 bp, Homo sapiens
ctcagtataacatcttcctccacagacattctggctgggtctgtgatggctacttcttcccgtctcacttgcagttgaggaagaatgtcattaagttctggctgatgggactgaagcagaag

SEQ ID NO: 414519 - DNA, 122 bp, Homo sapiens
ccctgccgccgcactgctctgtgggacgcggcgacccctctcccgcggcggccgggaccccgcgcccaccgcgtctggagcccacctggcggccccactggctacatttccgacctggaccc

SEQ ID NO: 414520 - DNA, 122 bp, Homo sapiens
ggcagcctccggacagcgttctgttttgaactttaagcggagatgctacctctggaaggccggggaaggacagagcctgccttctccccaggatggcctgagcgtgtgtgggacttgtgggg

SEQ ID NO: 414521 - DNA, 122 bp, Homo sapiens
agtggagtaaccagaacattcttttcaagcagtcactgggttcctccatacctctggtagcgcagagatgcccaaggaatatttgttgaattgctgcctggttcccttctccattctctgtt

SEQ ID NO: 414522 - DNA, 122 bp, Homo sapiens
gcctcgccccgactccgctcctcccacccgccagcgagtccgcaactcccggccccggcccgcgtccccagctccaggccccggccccgccccgcccctgctcaggcaccgcccactccggg

SEQ ID NO: 414523 - DNA, 122 bp, Homo sapiens
ttttcagctttgcagatgtctgaagtcaagcagaagagatggagagtctgataaagcacacgtggcaaatctctggccgagttgatattagaacacagagtcccagagtgatttactgtcca

SEQ ID NO: 414524 - DNA, 122 bp, Homo sapiens
aaccaggttagaattcaggcctgtttgattttgaaggctgtgcagtttttcctttatccccgattgagtcatcttatttcacattttgtattggaatggagacgagagtctattttctacca

SEQ ID NO: 414525 - DNA, 122 bp, Homo sapiens
tttcggttagaccaaggggcccagacctcactgagatgaatcctgcactatttgtttactcgtcaacagattgcacagttaacggtgtgtggactagaggaacacaaccagattttcagcat

SEQ ID NO: 414526 - DNA, 122 bp, Homo sapiens
gcacttcaagcagcacgagctgctgagccaggagcagagcgtaaaccagctggaggaggacggcaagcgcatggtggagctgcggcaccccgcggtggggcccatccaggtgcgctgggggc

SEQ ID NO: 414527 - DNA, 122 bp, Homo sapiens
cttgggcttttgtggcctgtcggtggatgaggtggcgcggagtagccgtttctcctcagccgcagggacacaaacggagctttgtatggggcagacgcaggtggaagggaaggagctcaggc

SEQ ID NO: 414528 - DNA, 122 bp, Homo sapiens
accgcaagcccgccacattttccctcccttaagcacttgagctctttccccacttctcgtcggttctcttgtctaaggagtccaggagccctaggatcaccacggctttttaaccttcttta

SEQ ID NO: 414529 - DNA, 122 bp, Homo sapiens
ccagctgagtcatgggtcacttagtaggaaggcaccctgagatacagacagggtgctgtgcgcgctgcagaatgcctcctcccaccctcctccctccctgacttctcctggcgtaggaatct

SEQ ID NO: 414530 - DNA, 122 bp, Homo sapiens
cctcacccccaccctcaccatgtgaccagctgccaaagaggcgcgcggaaactgggagggcggggcgaacgccggacgttctgggcacgtgaccgccacccatgcgctgaggggcggacagg

SEQ ID NO: 414531 - DNA, 122 bp, Homo sapiens
gcagcgccttgggagttttattggctttgagctttcccccaggttggagattctgccaagcggctccggtggctctgctggggtttgcaatcccttaattgcagcgtgtaaaataaaagttg

SEQ ID NO: 414532 - DNA, 122 bp, Homo sapiens
tgtccgccggcggagagctgggattgggcttgggaggcggggtttgtcctggtcccgccccggggcgggagcgctcctacgcggagatagtgctccgctacgtgttagagctgctgaggacc

SEQ ID NO: 414533 - DNA, 122 bp, Homo sapiens
aggaggcagtgttaggccttaggccgggtgggccgggtcaggagagacgcgcccatctttcgccatccggggtgcgcgaggtcctctcgggacccggccggcgacccgtagctcgggcacgc

SEQ ID NO: 414534 - DNA, 122 bp, Homo sapiens
ttttcactaaaaccattatttggctggagcagaatatcaccagcatagaatgaagttacgcgatacaagaataaatatgaggtagtaaaaaaatacaaccaatcctatgcatttattaatat

SEQ ID NO: 414535 - DNA, 122 bp, Homo sapiens
acagacagtccctgggtctccgaccccaatattcccctagtggcccgtgagatcatgcagcgaatgatccaacaatttgctgctgaatatacctcaaaaaatagctctactcaggaccccag

SEQ ID NO: 414536 - DNA, 122 bp, Homo sapiens
caggtgccatccatcaggctgaggctcggctcttatgctaacctgaggccccatggctggcggccctgctggtgtggacgaccgctgtgtgcgtctcttgatggctggggagcattttgttt

SEQ ID NO: 414537 - DNA, 122 bp, Homo sapiens
gcaaggccttcattttttaaggagactttgagagctctgcacactgcagtgccgtctccacggcaacggcaaatgctgagaagccagggaggaagggaaaatatgccttattctttgggggg

SEQ ID NO: 414538 - DNA, 122 bp, Homo sapiens
ctccccaggccaacgcttttccaccttgttaaactacccggtagctttctccatgggaggcgccttcttcacagtactcggacccagttacacttgtggccttccccggcttctgctgggcc

SEQ ID NO: 414539 - DNA, 122 bp, Homo sapiens
ccccatccctgggagaaccgggctggtcactctggggtcggggcggggcacacctgtgcccggagtctgaggtcactcaccggctgaccctggtggtggtgcgggcccaggaacctcaggcc

SEQ ID NO: 414540 - DNA, 122 bp, Homo sapiens
cggcgcccgtgtcccggcgcctagaggctccggcgtcgcagcgtccggagctttgggttccggcctacgaactaacgcgttacactcggacgttccctgcagcgcaggctgaggtcagaaca

SEQ ID NO: 414541 - DNA, 122 bp, Homo sapiens
ggggcgcacagacctggtgcagggcagtgagtccgtccacattggcgtaattgatgtcggcgccgcggtgcagcagcttgaggacctcgtccgtgtcgccgctggagcaagcagccaggaag

SEQ ID NO: 414542 - DNA, 122 bp, Homo sapiens
agcctggtttcagaggtggggcctgcacctttaaggcagcatctgtttgttgctaagcaccgggttgaaatcactgcccagatgaaaagtacccgagagaatgaaccagggaaaaaaatgtg

SEQ ID NO: 414543 - DNA, 122 bp, Homo sapiens
gatggccgactcctcctgcacgcgagacgaccggcgcgagaggatcgtggcggagtgcaacgccgtgcggcaggcgctccaggacctgctcagcgagtacatgaataatgtaagtcttggga

SEQ ID NO: 414544 - DNA, 122 bp, Homo sapiens
tccttcttctcacagctctccaagagctcggtcatgaaggagatatagacgatggccaggcggagggtctcgatccgggacagccttttctcgtaagcaaacgtgggcaccttcctccgcag

SEQ ID NO: 414545 - DNA, 122 bp, Homo sapiens
agtagggaaggaagggctctggacagaggcaaagaacatgcagccaggcgcggtggctcacgcctgtaatcccagcactttgggagaccatggtgcaaggatcacttgagtccaggagttca

SEQ ID NO: 414546 - DNA, 122 bp, Homo sapiens
ccttgctcagatggtggttgctgtaaatagctgcaatttccctccttccgtctcaaagcacggatgggaatggatttgcagcagggactctgcattatatttaaggtcttggtgagatggac

SEQ ID NO: 414547 - DNA, 122 bp, Homo sapiens
gagaaagtcatcatcccaaaccagtgggtatgcccaagaccaccctgtgagccacccatgcggaaccctgagcaggctcaatttgttttcttgacagagttcattgtcatgggaaccagaac

SEQ ID NO: 414548 - DNA, 122 bp, Homo sapiens
tcttagagaaccttcaccgttttacaagggagttcgcaggggctgcccttctccctcacgcggtctatttacaacgccgaaatctccgtgttaatggacctaggataatggtgtttacttta

SEQ ID NO: 414549 - DNA, 122 bp, Homo sapiens
cagagaggccccgcggcgcggtgcggcgcgatcacgcccgagtctccttctcgttcccctcggcccttcctaaaacctgctggctcaggtctgaacaatcgcagctggacaggtggtgcaca

SEQ ID NO: 414550 - DNA, 122 bp, Homo sapiens
gccgctcagccctcgggcctcagccccctccggtgagggactctggtttctgtcggttcccgcagggtggctctggcccagcctgcagccctccttgtgcagctctgcccccgcagccgcgc

SEQ ID NO: 414551 - DNA, 122 bp, Homo sapiens
catgccaaaacctaaaaggctgctgtgtgaggactctgtcgacacgcaagctctcacttgcgcccactagagcctcaaggtccttacgaagacacttttcaaaaacttgaatttggctttac

SEQ ID NO: 414552 - DNA, 122 bp, Homo sapiens
ctgctgacaggtcagctcacgtgtcagtcagagtctgcctctcagggcctctgccgaaagcgtggggcacgtgactgtgacggcatgggttggcgcatgcgcttcgttcccggagtggctgg

SEQ ID NO: 414553 - DNA, 122 bp, Homo sapiens
ttagggatcagctgaggccccagccagtcactcacctgaggttggatgggggagggcttccgccttctcagtcactcagggctgatggacaattcatggagtcaatacatggaaggattttg

SEQ ID NO: 414554 - DNA, 122 bp, Homo sapiens
tttccagctggttgggctaagtctgggaggagcagtttttgcggtggaggacttgccttgcgttgtaacattttaatccacttgcagcctcctgcctagagaatctatagaggcgggtgaga

SEQ ID NO: 414555 - DNA, 122 bp, Homo sapiens
gacatgatttatttgcaacagtaccatgttaaatgtcaccatattagggtggtgtggccacggctgccccttaagttttccagtcacaaaacagccctttttcccctcagaaatcctaaaac

SEQ ID NO: 414556 - DNA, 122 bp, Homo sapiens
gagtgttggtggttttggaattgtgatgcttttccagacattcacattgcatcgcaaaaacgtgagacaaaacactgtgggtgaggctgaagtttaacatcctccctcagtgccctttcctc

SEQ ID NO: 414557 - DNA, 122 bp, Homo sapiens
agcctggatgggatgacaggggcgtgggggtatagggctggaggcagaggggaagcttcacgtcaccctgaggtgtccaacccccaccctgacaaagaagacccagccgagttctccagggc

SEQ ID NO: 414558 - DNA, 122 bp, Homo sapiens
gagtgggtggggcttgcatgttgacgggcagcgcgaggggcgcggctttagtccagggggcggagcctgaccggacctgggtttttcgggcggctggcggacttgacagagagcgggagggg

SEQ ID NO: 414559 - DNA, 122 bp, Homo sapiens
ctctttaatagagataattataactattagacttattgtacaaatggaacccacagtacacgtttaagggatatcaagtcaaagtcatggacccagagggtatgatgatacttttccattga

SEQ ID NO: 414560 - DNA, 122 bp, Homo sapiens
gaaagcgcggggtagaaagggcagagtccgtgactaggcctctagccccagggacctaggcgaggacaggcactcctgcttttccaagagcaccctggcccgccacgcccccagcctgggcc

SEQ ID NO: 414561 - DNA, 122 bp, Homo sapiens
agctaaaacctgcaagtgcaagaaaggggaaggaggatgggaagagagaataaggaaaagcgaggcagaaacccgaaagaccaactctcaagggcgtgtctcataagagttcactacattgc

SEQ ID NO: 414562 - DNA, 122 bp, Homo sapiens
ttagacacggggcgtccggctaaggccggggacccagggtggtgggcggggtgtcccgcccgcctgtggaccccgcgcagtaactgcgaacatttcgctttcattttgggccgagctggagg

SEQ ID NO: 414563 - DNA, 122 bp, Homo sapiens
agacacagctgcacttctgacgacgaccaccctgaggtccccagggtgacgtccacaccacggaacaagcaaacagccacttcgcatgaggtgtacaaagaacagtcagtgatgtgacaagg

SEQ ID NO: 414564 - DNA, 122 bp, Homo sapiens
ctgctaagtactccggttcccagcttctgcaaaaggtaaggtttctgtggtggcaggaagcgatgatttttccggcacagaaaatggaggcagatttagttttccaaacaaacgtgagcccc

SEQ ID NO: 414565 - DNA, 122 bp, Homo sapiens
tgagcagggctgagtgagctcagggaatcggagctcggcgagacgaggggagctcttggccgtgtgaagagcacttggaggcctcctgctcacctggcctaagcccctgattttacagatgg

SEQ ID NO: 414566 - DNA, 122 bp, Homo sapiens
cctgtgatccatcctctctcctagctgagtaaatccgggtctctaggatgccagaggcagcgcacacaagctgggaaatcctcagggctcctaccagcaggactgcctcgctgccccacctc

SEQ ID NO: 414567 - DNA, 122 bp, Homo sapiens
agatgcagtgatggaggtgggcaaggatgggagaaagtgttcgttcaaaagctaaagctacggagagatactctaaccattgggcaggaagggagcaagtgaagaataaaactacttacatt

SEQ ID NO: 414568 - DNA, 122 bp, Homo sapiens
ccaggagaacggagcttgtgatagatcctttcgtaacaccaagtattgtaccaggacctgcggctccgccccagaggccgccatcttcctgaccacccgaaaggccggacctactccccggt

SEQ ID NO: 414569 - DNA, 122 bp, Homo sapiens
actactgctattggattaagaccccacctttatgacctcatttaactttaattacaggcccggcgcagtggctcatgcctgtaatcccagcactttggaaggccgaggcaggtggatcacct

SEQ ID NO: 414570 - DNA, 122 bp, Homo sapiens
ggtgggttggggaggtcagcctgtaggaatttataagtaggtgcttgtgcaagaatgctgcgtgaatacggatgtgtgcctgtgtgtgtactgctaacctcaacgagtacctgtgagctacc

SEQ ID NO: 414571 - DNA, 122 bp, Homo sapiens
tttgagaggccgaggcagatggatcacttgaggtcaggagttcaagaccagcctggccaacgtggtgaaaccccatctgtactaaaatacaaaaattattcgggcatggtggtgggcacctg

SEQ ID NO: 414572 - DNA, 122 bp, Homo sapiens
agccagtctatcaagctttgcctgtcacttacccaccacgcagtggtgcaggacgctggccgataccccccacacagtggcacaggacgctggccgataccccccacacagtggctcaggac

SEQ ID NO: 414573 - DNA, 122 bp, Homo sapiens
gtgttgcaattaaccatttctcgttggtccgtcctggtgttacaggcgcactggaatgaacgcagacccttctctcctcccggccggggccaggaggaggggtggggcggggcctctgacgc

SEQ ID NO: 414574 - DNA, 122 bp, Homo sapiens
cacccacagtgcctggcaacctagaccagtcagggacgcggcaggaaatggaagagcctccgcaagaggctctggctgaacccttgaaacatgaaagcccagccgctccctcaagtgctggc

SEQ ID NO: 414575 - DNA, 122 bp, Homo sapiens
tccgcccgcctcagcctcctaaagtgctggggttacaggcttgagccatcgtgcccagcccgattatttccacagctgggttggaagccatctttccctgacaaggcagctcacctttatat

SEQ ID NO: 414576 - DNA, 122 bp, Homo sapiens
ctggccccgctcgcccagcctggagggaggccctgggactgctgctgagagcgtggcgggcgtgcgagcggtgcccaatccccggggctacccgcaagagtggcggcggctgccgccaatca

SEQ ID NO: 414577 - DNA, 122 bp, Homo sapiens
tcacaatttatgcactcaccatacaccattgctcctccagtttcatgcaagaagcggaatcgatgatttttaaataaccagattgtcaaaatggtaaggatgagcaaaaaattgaagacaag

SEQ ID NO: 414578 - DNA, 122 bp, Homo sapiens
ttaactttaagtgcacagatgtctaatggcccgagacacgtaggttaacacccgtgcacgcgtacacagaggccttcacctacaaccatccccgtgtagacagcatcagaggcagggcacca

SEQ ID NO: 414579 - DNA, 122 bp, Homo sapiens
ttggctgggagttgaaaccccaggctagaaggcgacccttagactttttaggtctgatggcgggcctatgctggtgtgggaataacaccgccggtctcagctggaggtcgccagccctttgc

SEQ ID NO: 414580 - DNA, 122 bp, Homo sapiens
gtcagcgcagtgcctgacccagggtgagcctcagcgagcaagagcccacgatggggttggcggagaggcgcgtcctcgaggtaacagggatgctgagaggtggctgaattcttccttctttc

SEQ ID NO: 414581 - DNA, 122 bp, Homo sapiens
aaaccagctggcctgaatcaaagcaattctgggtaaaagacttcccagatgatctctcaacgccttggcaacgcttggcgactgggagctagaaccatgagttgttaatgtgtgcacggaag

SEQ ID NO: 414582 - DNA, 122 bp, Homo sapiens
aggtcagatactgtctgcctgatgtagcaattctctcaggctgtatctgcgataccagtgcggccggtgaagagggcgatggtgaattgcaccaataatgctgtaggtggcgctgtgtactt

SEQ ID NO: 414583 - DNA, 122 bp, Homo sapiens
aagtgctaaaatgccttcccaactgaaaagatgtctactggcttttgccagaaattacaacgttagctattccagctcggtggggtggttcctttcactctgctagatcacaggattttgga

SEQ ID NO: 414584 - DNA, 122 bp, Homo sapiens
gctcacagtccttgccaggctgggccagtggcttaggggaccaagcccttcctgataggccgcttgatctatctggccagcctagtaggcaaatggggaaatagtagtcaggagttgacaaa

SEQ ID NO: 414585 - DNA, 122 bp, Homo sapiens
cagcctcaccatcgctgagttcaaggtgtggccatgggggcggggtccggaggggcggggcgaagaaattggggggttcccggaagggggaggctgggaggggccggggagtgactgggcgg

SEQ ID NO: 414586 - DNA, 122 bp, Homo sapiens
ccccaatgttggagggaaggcctagtgggaggtgtttgggtcatggggacagatccctcacgaaaggcttgaggctgtccttgtggtaatgagtgagttctcactctattagttcccttgag

SEQ ID NO: 414587 - DNA, 122 bp, Homo sapiens
ctgaaaccagagcctcatacccggtaccctgacctcatcagtcccatagtttgcattactcgtctctcagaggtgaggaagggctttcaccaccaatataacatttttttttcacttttgga

SEQ ID NO: 414588 - DNA, 122 bp, Homo sapiens
caaaaatggtggtcctgggggctgtttgtgtaaatcacctggtattttgtgtgtttcttgcgtgcaacccggcttggccgtgccttcgtggtgggcgccttctccatgcaggcccattttcc

SEQ ID NO: 414589 - DNA, 122 bp, Homo sapiens
gccaagacggactaatcgtccttcagtccatgccgcacgtcaagtcttcatacgcactctcgtgctcagcagccctttctacagaggagagaaccctgaagcttgaaaagatgcagtaactt

SEQ ID NO: 414590 - DNA, 122 bp, Homo sapiens
ccaggtacgggagattggggggatgaaggaccagtcaacctgattcgaacgacgaaaactcgttgtttctggaaaaaaaaaagtcacaaagaattgctttggaagagtttgaagcggcaatc

SEQ ID NO: 414591 - DNA, 122 bp, Homo sapiens
aaatggaaataattctaaatcactgagggtatgaagtgtctagtaccttaggttatactccgagagttgtagtataattaaagaaattcagaatttataaaagtggttcttaggataactgc

SEQ ID NO: 414592 - DNA, 122 bp, Homo sapiens
tgtgactatcgaaatccctgctctccggaggcttgccctgacttggggtggggagtgtgacgtagagacactgcgaagccggagcgatcaggttaggtgaggccatgcttaagttggattcg

SEQ ID NO: 414593 - DNA, 122 bp, Homo sapiens
ttcctatcctctacatgtggatgactatcattcaacaatctaggattgggtccaaatgttcgacactttagatttagcgggctttgtgttttgactcactggctgcagatattggcaatgcc

SEQ ID NO: 414594 - DNA, 122 bp, Homo sapiens
ggacattttttttggctgtgtattgcacaaacaagtggacacccgggagctggccctgctcgtcccctgggccctccttccctggtcctgcaggtcttgctgcttgtcaggcctctcctcca

SEQ ID NO: 414595 - DNA, 122 bp, Homo sapiens
ggggtttcaccgactccaccaagtgaagataaatgtcaaaggtaaacaggcaggacggggcgctgtggccaactaacaaggtcaaaaacgccagtctcacttagaattacacattagccctg

SEQ ID NO: 414596 - DNA, 122 bp, Homo sapiens
cggccgtgggcggctgcggcgcggccgcggcgaggggcgagcggggctggtctcgccgctcgggcgagagcatccctttgggggccaaccctgcggctccgccttcacccgcgctgggcgcc

SEQ ID NO: 414597 - DNA, 122 bp, Homo sapiens
tactgtggtgacggctcccggaacaatgagactgctcctcctgcctccgcgccggtgatgcgccacccgccctgtccccacttgccgccgccgcccagatgagctaggagtgaggccagcgg

SEQ ID NO: 414598 - DNA, 122 bp, Homo sapiens
accctcagttagcatttcaaagtacatactagaaacaagaggctgggtggcgtgtgtgtgcgttatggctgattcaccaggtggtaaaaaaacaagaggttaatctcctctttttgattgtt

SEQ ID NO: 414599 - DNA, 122 bp, Homo sapiens
cttgatctcctgacctcgtgatccacccgcctcagcctcccaaagtgctgggattacaggcgtgagccaccgcacccagcccatagagtggctttttaagtgatggagattgcttctttcaa

SEQ ID NO: 414600 - DNA, 122 bp, Homo sapiens
gggtcacagcggcgtgaatcctgcccgcaaggcgcgctgactcggttccgaaccctttcgcgggccctagaccccgtggagagttcacctgcccggcagccaggccttcacgcttctctgcc

SEQ ID NO: 414601 - DNA, 122 bp, Homo sapiens
tgaggttaatagagggctttgcgcatgaagcagaagataagcgctgatgtctcgactgctcgtgggaatcccctgctcatggatgagtctgcggctgccccttctgagccgtgtccctgtat

SEQ ID NO: 414602 - DNA, 122 bp, Homo sapiens
caagaaaatttcaaaattgtttatacttggttggctgtatctgaaagcaaatctttaatgcgtttatttcaaggtcagaagtgatttatttcaaggtcagaagtgatttttctaaatttatg

SEQ ID NO: 414603 - DNA, 122 bp, Homo sapiens
taatatgatgtcatataatataaatctcataactgtatgaagcatttattattattatgccgtttaacagtagaggaaaccaattccagttataggacttagatttttttcccaataataag

SEQ ID NO: 414604 - DNA, 122 bp, Homo sapiens
gcggcagggggtggaaggctctggacgagccggggacaggcgcagcgggtgctgactgggcggtggggaggatgtggtccacagcccagcgaagggaggagtcttgttggcctggggtggga

SEQ ID NO: 414605 - DNA, 122 bp, Homo sapiens
gagtcgatggtacttgttccacaacctgcttcttccccatcttcaattcagattgtcaaacgttccactacagctgggtatggccaagaagcctgttttccctcttctttcatcttccagtc

SEQ ID NO: 414606 - DNA, 122 bp, Homo sapiens
acggagcggggagctggaaggtaggatgagaaagggggttatgaagcgaagaagaggatacggaggggaccatttggcactcaggcctcgcagaccacccgtctgggagatccagatatcgg

SEQ ID NO: 414607 - DNA, 122 bp, Homo sapiens
tgacaccgccatgccgggccaagcgccggatagtgcacttggtaatgccctgaatattatcgctcagtaccttgcgatggcacttggcaccgcctttcccaaggccttttccggccttgccc

SEQ ID NO: 414608 - DNA, 122 bp, Homo sapiens
aggagggtggtaccaagcggcgcccaccctcagagcactacttccatctctgattggcttcgctgggtgcccgtcgctactccactcgccgctgataggccattcaaccgccgctctgcgcg

SEQ ID NO: 414609 - DNA, 122 bp, Homo sapiens
ggacaaggaggaggaaggggcacgaacgcccgaggagcctggagtcaggaatcggggcggcgggagagaccgggggtcactcccaggaaggggtcgaggtcacgaggcgcatggagtcgaga

SEQ ID NO: 414610 - DNA, 122 bp, Homo sapiens
cccaaatcatgcaaccgaagttcaaattctgtaatgggtttttttctataacctaccgtccgtcgctcatggtgtgtggtctcctttgcctcaaagaacactaaacccaatttgttcagctt

SEQ ID NO: 414611 - DNA, 122 bp, Homo sapiens
ttccttcaatccatcaggataatctgctgatcaggtttgtgtgctttgactctaagcccccggctatggatgattagaacagaagtagagacctaaactcagccaatcagattctctctccc

SEQ ID NO: 414612 - DNA, 122 bp, Homo sapiens
ccagcaagacaatgatgatctccactgtctgattcccgcttcccaggttctcacagtagacgaggagcctgtttttcagctagctgccacaagggggctggaaatttctcccttcagagtgg

SEQ ID NO: 414613 - DNA, 122 bp, Homo sapiens
gggcgccgggagaaggggctgcgggtgacgggtgcgctgggacggacctggggagctcgtcgtgaggaagaaagaaccactctagggccaggcccagtggctcaagcctgtaatcccagcac

SEQ ID NO: 414614 - DNA, 122 bp, Homo sapiens
tttggatccagggcaaggggcttgatgctgatgtgccttagtttcctcagctgtgaccagcgctacttcctctgctttgcaagggctaagtcggttatttatgtgagaatcccagaactgtg

SEQ ID NO: 414615 - DNA, 122 bp, Homo sapiens
agttattcacatctattcacctctcccttgaaaaacaaatgaataaatagcccctatttgcgtctttactcccacactaaacctcacaccgttgatgagcctggagggctaggttggcacga

SEQ ID NO: 414616 - DNA, 122 bp, Homo sapiens
tctctctaatgacaaatatgcgtgtcatctacccccaaaatacagcaatcgccaggaaagcgaggttcctggagctgaaagaatttgcccaaggtcacacacaaccggcagaaccgggactt

SEQ ID NO: 414617 - DNA, 122 bp, Homo sapiens
tggaggggaaccagctcaggggtggccaggtaatccgactttgacagcaggtttttcccacgagatcctttccttggtgcctctgatttacgaaagggagatctttttcttaatcccaatgc

SEQ ID NO: 414618 - DNA, 122 bp, Homo sapiens
aggcaagagcaggagtagggatacaggtcagcaggctgtcccaggggccctagtgagagacgtggctgcctgggcttggggtccgatggtagtggggagatggactggagttgatttaggtt

SEQ ID NO: 414619 - DNA, 122 bp, Homo sapiens
ggaccagcgcacagaggaggagccaaggcagtcagtgaggccgcagccccagaccccctgcgcaggagaggagcctgctagaacccccacccaccagcctccggaacagggcacttgtgtgc

SEQ ID NO: 414620 - DNA, 122 bp, Homo sapiens
tgtagcaagaaaaagtgtgggggtttagcagctgcctggtcctttaaatatatatattggcgggcttgtcttattagtattattcttttatgaattgggaacaatttaccaaggatacaaaa

SEQ ID NO: 414621 - DNA, 122 bp, Homo sapiens
gattctatttacaaagtgaacacacccatgtgtctgcaaatcaaatcaagatgtagtcaccgttttcatcactccccagaattcctttgtcttttctgagacaatacccccaaaaataacca

SEQ ID NO: 414622 - DNA, 122 bp, Homo sapiens
atactccctgaaaatccatgtgctacaagagaatcctagggttaaaaattcagagagctgcggggaggggagagacagggagggaagcctgggaaaagcagatagaaaacttttggctcttc

SEQ ID NO: 414623 - DNA, 122 bp, Homo sapiens
acagcatcaaaaccaaattgccctgtcaagggaaacagaatgagacaaaaatgaagaaaacggcagccacacgctcacactggtagcataatgccatcggttgcccagcattacggggcaac

SEQ ID NO: 414624 - DNA, 122 bp, Homo sapiens
tgtgagcacgtcagaaagcgaatgtgcctcactagaacgcacggtggcggcaggagtggccggcagtgcccggcacgcagtcacgggaggtgggtcgagtcctggtttatgtgagtcctgtg

SEQ ID NO: 414625 - DNA, 122 bp, Homo sapiens
tataaagataattttaaaacttctcgagtcattgagaatcactgcttttaaagggaaacacgtcattgtaaagaacacgttgtttagcttctgggactagaggcaaggaaaatatcttgcct

SEQ ID NO: 414626 - DNA, 122 bp, Homo sapiens
gcagcgctccagcctccccgggcctcccccggcccggcccactcggccttgctagcctggcgctgggggcgggcaccagcccccacccctcggcgtaccatcccctttacttcccccacccc

SEQ ID NO: 414627 - DNA, 122 bp, Homo sapiens
gtaggaaggcaaaatgcctcctcgaagcaactgcaaaccacaccctgggacaaagtatcccgaaagccacggggcctcctcccctctgacaccacttctccatccctgcccatgctgctcag

SEQ ID NO: 414628 - DNA, 122 bp, Homo sapiens
acgctccagaggtggggtttggttcgaccccgccccttcatgctcgcttcttaaagggcccgggttcgatgattgaatttaccttggttcccttgaagctgtagggaaaaggctggctgcgc

SEQ ID NO: 414629 - DNA, 122 bp, Homo sapiens
ggtgggggtggggttctcccggagcctgcgaccccttcccgcggcggagcgcagcctgggcgcccagggccgggagtgttggacccctaggcccaagtcactagggctccccgagagccgag

SEQ ID NO: 414630 - DNA, 122 bp, Homo sapiens
caggaaattaactcattaaattactcaggtctcccaccatccacaacaaatcagtcagtacgttgtgcatattttcacgtgcaaacatgccccaaatggagaggtggtaaaatgcccatggc

SEQ ID NO: 414631 - DNA, 122 bp, Homo sapiens
gagggaggggaagaggagtctagagttgctgggactggacctctgcctggctcaggagggcggggtggggctgggggtagaattgagagggacctgccaggtttggagagaatgggccttta

SEQ ID NO: 414632 - DNA, 122 bp, Homo sapiens
aattagtggaaaaactgggagacctgtgggtatgtgtgaaatagacacgaaacggagcttcgctgccaattgtcactggggtctcacacggcccagatctggcctctgagccatgtcactgg

SEQ ID NO: 414633 - DNA, 122 bp, Homo sapiens
cacggtgcgcgcacccactgacctgcacccactgtctggcactccctagtgagatgaatccggtacctcagatggaaatgcaaaaatcacccgtcttctgcgtcgctcacgctgggagctgt

SEQ ID NO: 414634 - DNA, 122 bp, Homo sapiens
gatctcagctgtcatcctgtgctggacagtccgtcacgtgcagagcatcctcccgactggcgaggtggcttccacgtgccccgtcaatcagggctggacagtccgtcacgtgcagagcatcc

SEQ ID NO: 414635 - DNA, 122 bp, Homo sapiens
tcgttcctcttttgagagctctgctttcttcccattggttgacaggcatcctactctctccgcccctccggtcgcttggtggcgtctcaggacgcagcgtgatgacgtaggtccccgacatt

SEQ ID NO: 414636 - DNA, 122 bp, Homo sapiens
attttttaaattatgattttattaaaatcaacataaattacaaaggttccatctttgctacggttcttttaaaaatttatcttaacttactgaagggtcaagaccccacagggcctgtctag

SEQ ID NO: 414637 - DNA, 122 bp, Homo sapiens
gtacgcggattcgggtgagctgtgtatttccacagcacctgaagcagcaggcgagggggacgggtgcttttgagtccttgacagtaatggacacatttccttagctgagcgcccttcggggt

SEQ ID NO: 414638 - DNA, 122 bp, Homo sapiens
attgcactccaacctgggtgacagagcgagactccgactcaaaaaaaccaaacaaacaaacgaaaactcagtgggagtgtcttcactatgcagtcgtctattcagcaaccttgacaacaagc

SEQ ID NO: 414639 - DNA, 122 bp, Homo sapiens
tgaaggggaaaagcctcttcttggagggtggagattaggggagggtctgggagtgtcacacgagaaatgagaaacagatgtaagatctgcggctgagcccagtcagaggagttggcgggtgg

SEQ ID NO: 414640 - DNA, 122 bp, Homo sapiens
tcactgcccaacaaggtgcaccccatttagcccgcttcgggggcatgcagcctacacggtcgcacagggcccaagcccacaagagctctgtgcatttggtttggtgctccgctgtcgcatct

SEQ ID NO: 414641 - DNA, 122 bp, Homo sapiens
aatgggctaggcggtaatagcctaaaagcctcgacagcctttgcgacctgctattctcaccggatcttgtatctttatgatagattactcgcacccggccttctcttttatctcagagagtg

SEQ ID NO: 414642 - DNA, 122 bp, Homo sapiens
gcaacgtttaatgggctctaataaaacggctaataattttgatccgcggaagcaccgactcgctcgctaagccgaatctgcgagggtgaagctgcaactccaacgccggaaagcgcggctac

SEQ ID NO: 414643 - DNA, 122 bp, Homo sapiens
ctcacccacagccccagctggggctgaccctctgtgggctgctccgctgcttctggggttcggggaggctcaaggggtcagagacagacatcctgggagggacacccggtactagatggagt

SEQ ID NO: 414644 - DNA, 122 bp, Homo sapiens
tggcaaatgcatctgaggcacaccaggcaacaggattttttttttaatccactcattgtccgatgcagttcaacttgaaagagatacaacagagaaaagattgatcctttgtggcctattct

SEQ ID NO: 414645 - DNA, 122 bp, Homo sapiens
ttgggatgctaaacatcaaaaaagcccagcctggggtttcagggcccgaagccactagagcggctctccaaggctctcgagaaagtcctagtgtttacatggcgaagtgggggtggggagag

SEQ ID NO: 414646 - DNA, 122 bp, Homo sapiens
ctgcggcgaccgcgggacggcgagaggcacgcggcgggaggggaccggaatccgcagctccggccgcgccatggacggcaacgacaacgtgaccctgctcttcgcccctctgctgcgggaca

SEQ ID NO: 414647 - DNA, 122 bp, Homo sapiens
gcagagcggcgcgggcagtaagccgggcgctaggaccgcggggagcccgggctgcggcggcgctaccttaaacccagcccaatgccgctgcctgcgccactctgcgcgccggcgggggctgc

SEQ ID NO: 414648 - DNA, 122 bp, Homo sapiens
gtggtttttagcatgttcacgaagttgtgcaaccatccccactcatctcactccggaacacgttcatcatccgcagaagacgtcctgtgcctgttagcaaccgctccccgccacggtttgag

SEQ ID NO: 414649 - DNA, 122 bp, Homo sapiens
gcgcggccgcgcttgccttttccggtggaagtgacgccatcggcagctgcagcagaagagcggaaatgtcaaacgtggaggtgagcagtctgtgggcggtggggcttcagggaaagcttggg

SEQ ID NO: 414650 - DNA, 122 bp, Homo sapiens
agggaaagaaaaaaaagaagccagccagcttatcgctccctttcagtcggttcttttccccggggagccggactctgactcaactccgcagtttttcctccacctgtcggttctccccgctc

SEQ ID NO: 414651 - DNA, 122 bp, Homo sapiens
gtcaggatgcacggagcatgtcgaagaggacgaggctggtgcccgacagttgacgcagcccgcctgttggccacagggagccactgaaggcagatctcacgtcacgatcagtggcctctgca

SEQ ID NO: 414652 - DNA, 122 bp, Homo sapiens
gggaagccgggcctgtgggggcgtgggtgtggctacgctcggctctgtgattggctgcaccgagttccttggccgcctcccccgcttgtggaaggaactgagcacgtgtttctaattgtgga

SEQ ID NO: 414653 - DNA, 122 bp, Homo sapiens
ggcaacaagttcgaagagctgcgagacgttcccactctctctggtgtagccttggctcaccgaggcgcgcagggagtggaagtgcctgaggataaaggtgtacacgtgcgagtctgagatga

SEQ ID NO: 414654 - DNA, 122 bp, Homo sapiens
ccggccggcgggcgcgcgcctcgcttgcgcaggcgcagactgccctccgacacgtggtggcgatattgagctgtgtgtaggtacaccctgcagcttgcgcttttaactgcttgtggttgagt

SEQ ID NO: 414655 - DNA, 122 bp, Homo sapiens
gctgattgggcgggacgggcttatttgcatacagggcgtcaccctggaggcggcgatgggcgtgcacttgggcgtggccccgacccgggagttcatgggcctgggactcagacgcgaaagga

SEQ ID NO: 414656 - DNA, 122 bp, Homo sapiens
tatctgaaaaatgcctctgggccatcctttgtgtagtgtgtagacactacaaataacagccggaatggagcccggagacccttttaaaacttgtctgggcatgaagtaaagaagtaaccaat

SEQ ID NO: 414657 - DNA, 122 bp, Homo sapiens
aagcgtgaccgccggggaaggaagccgagcgcgcgcgcccacaccggccctgcgccgcggcgacagcgagcagctcgcctactccgtccgtctgcgcttacccagcatgcacttccaggccc

SEQ ID NO: 414658 - DNA, 122 bp, Homo sapiens
tgaacccaggaggcagaggttgcagtgagccaagatcgcaccactgcactccagcctgggcgacagagtgagacgctgtctgaaaacaaaaaccgaaaaacaaaaaacacacaaacaaaaaa

SEQ ID NO: 414659 - DNA, 122 bp, Homo sapiens
cttcaacaggctctgcatcacagaatggatgaaggccacatggaagcctccctgtccagtcgggggctgggtggtaaggaggagcaggattaggtttagaagaatgggatgaggccaacagc

SEQ ID NO: 414660 - DNA, 122 bp, Homo sapiens
ggaggtcgactgtgacatactgatcccagctgccactgagaagcagttgaccaaatccaacgcacccagagtcaaagccaagatcattgctgaaggtgccaatgggccaacaactccagaag

SEQ ID NO: 414661 - DNA, 122 bp, Homo sapiens
ctttcccctgaaacactgtcttccctgatcgttcacttatctttttgctctcatagaaaccgggctttccctgaggatatcgcttccctacagaagcacagataatttttttctcccataac

SEQ ID NO: 414662 - DNA, 122 bp, Homo sapiens
ggccacctgcctgtgtgacacagggagccctcataggtgacaggccctgagaggttgtaccggcccagggcaggtggccggtggggggcagagggcatgggtgatttgcatccagagccctt

SEQ ID NO: 414663 - DNA, 122 bp, Homo sapiens
ggcgttttgagtggggaagtgagccggggcctgtgcctcccggggagccgtgggcaggtgcgtggccacggactgggctctcggagcttcccataaaaccccggagacccactcagcacggc

SEQ ID NO: 414664 - DNA, 122 bp, Homo sapiens
gggctatgcgtggtgttgcgggagacctgtcattgctgcctgccgcgatgccaggccccacgctgggggagccacccgggtcctcacctggagatgtggctctctgtggcgacgtgccctga

SEQ ID NO: 414665 - DNA, 122 bp, Homo sapiens
tgacagcggcctctccaggcccagctcttgcctcacgttggcctccctgggccacgtttccgcctgcctcgcggcagccccgacaatcccggctcctgcctcccgatggcatctttaggctc

SEQ ID NO: 414666 - DNA, 122 bp, Homo sapiens
ccgcccaggggcctggaatactggaggcccttcgacggagaacaacaagaaaggcacttccggtgtctgttgccaggcgcgggcccagtgggccgtaggggcgacattgttgccgttgtctt

SEQ ID NO: 414667 - DNA, 122 bp, Homo sapiens
tagaggtgtttgttgttgtttttccggggcacacagtggtgcgaaggctttggggagaggcggggaaggcaatggtgaactccttagaggcaacagcacttgtatgccagagtgccttgaac

SEQ ID NO: 414668 - DNA, 122 bp, Homo sapiens
gtgagccactgcgcgtggcctcttgtttctttatatttttcaccccccaaaacggagtctcgctctgtccgcccaggctggagtgcagtggcgcgatctctgctcactgcaacctcctccgc

SEQ ID NO: 414669 - DNA, 122 bp, Homo sapiens
tggagtagctgggattacaggaaggagccaccatgcttggcctgggacttgtttctttcacgtaacattctaagattcatctatgttgttgcttgtagctgtagttatgcactgtcgatgct

SEQ ID NO: 414670 - DNA, 122 bp, Homo sapiens
cttagctggttgtgtttgaagctctgatcctgactcccttccttagctgccataatccaccgatggagccttacctcgagagacaatgccagtttctcctcattgttatgagagtaaccctg

SEQ ID NO: 414671 - DNA, 122 bp, Homo sapiens
agaaaaatgagaaggtcttaatctgaactccctcaactttctgttcttcctcacactcaccgaacttgcttatattttatactggtacttaattcttcccttcacagtcacaaggaagatgc

SEQ ID NO: 414672 - DNA, 122 bp, Homo sapiens
cccgaggtcccagggtcatgcgtgtttgtcctgattgcacgagtcgtgtgagcacagaaacgtaggtggaaagatggtggcttcgtccagggaggtagactgggaacgtcttttgctgcttc

SEQ ID NO: 414673 - DNA, 122 bp, Homo sapiens
cgagtaccccacctgtctccccggcttccttccggccctttgtgttttcttctcttgctccgccccctcgcctgcccgctaagcacttaagctggtgaagtcaccctactgccacctggcag

SEQ ID NO: 414674 - DNA, 122 bp, Homo sapiens
gggtgcgcgtttggtctgggcgagctggtgaagaagatggtgatcgtgtcctgggcccagcgctgaagctcggctacggcgtgtcttgaccctgcctcccctcctcgcctgagccagagaga

SEQ ID NO: 414675 - DNA, 122 bp, Homo sapiens
taaaactgcttatacgcccaccaaagtggctaaaactaaaaagacaacaccaaacattggcggtgaggtagggcaattggaaccctcaaatattgtggtggtaatgtaaaatgtatgacttt

SEQ ID NO: 414676 - DNA, 122 bp, Homo sapiens
ggaaggcgaggcgagctttggtgaggaggcgccaagggatcccgaagtgcagtctgcccccgggaagatggctcggcctgggcagcgttggctcggcaagtggcttgtggcgatggtcgtgt

SEQ ID NO: 414677 - DNA, 122 bp, Homo sapiens
gtggtgctgtatgacgtgaaaagagaagagaaggctggtgaactggaggtgagtgcacaccggctctggttctactgccaagctcgtgccaaagagctgctcctttttgaacaaactcccag

SEQ ID NO: 414678 - DNA, 122 bp, Homo sapiens
cgtccccacaacacacccacactcccacaccaccacaaaccaacacgatgcgtgtgagaacgtggggagggtgtcgcacctgtggagctcctccaaaaacccaaatcacctcagtctagtca

SEQ ID NO: 414679 - DNA, 122 bp, Homo sapiens
caggactcccagtcttagtgcaaaatatatgcaggaaagagctgcgccgattggccggcacgccactgggaccgccccctactcccttccaggtcctcccgcttccctgcttccccgcctcc

SEQ ID NO: 414680 - DNA, 122 bp, Homo sapiens
ataataagaaaaagctaaacaaatggaaacaagctaaaataagaaacagtaattctgagacgcatgacaggactaagctcacagggtgaagatgtaccctgaaaaccagacggacaggctga

SEQ ID NO: 414681 - DNA, 122 bp, Homo sapiens
cgagagccgttcacagtgggcttgctcacttcctcttcctgtcggctgcagtttcccaggcggtgtctccggggttgggcacacgagagtagcgggcagaagccaacgcagggttgggatac

SEQ ID NO: 414682 - DNA, 122 bp, Homo sapiens
ccacacatttaatatcaatgcagggtcctgatgggcactgccacatacccccaggacaaacggaaaaatccacacagcagaaacaagcagttggcaaaagctgtcctcatgctacttggcaa

SEQ ID NO: 414683 - DNA, 122 bp, Homo sapiens
agatgagatcgattccattttccacatgacaaacattcaaagattttagaatgtcaattgcgcccctgctgaatggcttggagaagagcaggaatagttctagttatcctaacaattgctcc

SEQ ID NO: 414684 - DNA, 122 bp, Homo sapiens
ccaaggctgggccgggcagtcctgcctcttcctggaaccttggcagccccagtgcagaggcgctggacaacgggttgccagggcaacagaacctcatgatctttgtggtggcgatccacagg

SEQ ID NO: 414685 - DNA, 122 bp, Homo sapiens
acacacacaaactgagatgttgcccattaaagtagacaaagcagcagagcatgagcgttacgggaagagatggatccttaccaggttgtgaggcgggaacgactgttctgtaacccctacaa

SEQ ID NO: 414686 - DNA, 122 bp, Homo sapiens
aaaagtagctcttcatcaggaagcactagggagttgccaaacaccccactgaggactctgcgccagaccacagacacaactcatgccataaaagtagataaatcaaacccatgtgtgggcta

SEQ ID NO: 414687 - DNA, 122 bp, Homo sapiens
gtgaaagcagcgtgccagggtcaggcggtcacgcgtgtaaaggccgctgtgcgtgtgcagcgtgcctgggtcaggcggtcacgcaagtaaaggccgctgtgcgtgcgaggcggcagcgaagg

SEQ ID NO: 414688 - DNA, 122 bp, Homo sapiens
aatgcaacagggagagggaccaggtgacacgcacgcagtgccgggacattagtcaaaaagcgaggacctggggactgaggggtgggtggctgggcggggggagaaaggggagaaggaaagag

SEQ ID NO: 414689 - DNA, 122 bp, Homo sapiens
cagccccgcgccgctccccgccccgccccagagttccaaagcccctccccatccttgccccgctggctgggcaccgctccgactgaagggtgcctaagccccaacctcgagccctagagccg

SEQ ID NO: 414690 - DNA, 122 bp, Homo sapiens
ctgtggatgtggagcaggcggctaccaaggaattccaggacctggggatccatcaggtggcgtgggcggggtgggtgggtggctgctgtgtggctgggtggggcctcctgcacgtcgttgtc

SEQ ID NO: 414691 - DNA, 122 bp, Homo sapiens
cttgaactcctgacctggtgatctgcccacctcaaccccccaaagtgctgggattacaggcgtgagccactgtgaccggccaagtttactgcttttctattgaaactgttctcatacccgtg

SEQ ID NO: 414692 - DNA, 122 bp, Homo sapiens
tccaccgcggcatttccaaaacaacagggacaagtctccccggctcgccgcaggcctgaccgcccagctccgccaggatttgcagagagcagcgcgctccatttgcagaaaggaaatcgagt

SEQ ID NO: 414693 - DNA, 122 bp, Homo sapiens
gggtttccaaaggttaaatacttgacacctctgtctagaacagacatgacagacgaatcacgtgcctcccggtttgcagaaggcgagcgtgatgcagataaatcgtgcatctgtatcaggaa

SEQ ID NO: 414694 - DNA, 122 bp, Homo sapiens
aaaggaaaggaaacaagaaagaggaagaaggttccacgcacgtcttccagccactgcacacgggtaagctggaaggcagagcagagctgagtcacaaggacatcagtatggctcagaaagca

SEQ ID NO: 414695 - DNA, 122 bp, Homo sapiens
aggcttggggaggacgagggactggcggcgtgaggggactgggtcgggctggcaggaattcgacaggagagaggtgtcgatactggagggggaggggaacagtgcaaggggccggagggcgg

SEQ ID NO: 414696 - DNA, 122 bp, Homo sapiens
tgaagctaccaatgtgatgtcattgaatgcagaattgggaagagatagaaagaatcagctcgcatgagctggtgggacccagctcagcatcccactccatcatcctgagctgggctctgggc

SEQ ID NO: 414697 - DNA, 122 bp, Homo sapiens
gagtgaggagcgtctctgccccaccgccatcccacctaggaggtgaggagcgcctcttcccggccaccatcccatctaggaagtggggagcgtctctgcccggccgcccatcgtctgagatg

SEQ ID NO: 414698 - DNA, 122 bp, Homo sapiens
acctcagactccgccgggcccgttgccctgggcaacgccccgcgcgccccgccccttccccgccccccagccccaaaccccaggcctggccgactgcccgtcacccccacgtccgaccaatc

SEQ ID NO: 414699 - DNA, 122 bp, Homo sapiens
tgcaccctccacgaaggctgcccccagacctgggagcccaggagagtaaaataagcctgccgcagggtgccgggagtcagcactatgtcaccccggcacaatgcgtgcaccctccacgaagg

SEQ ID NO: 414700 - DNA, 122 bp, Homo sapiens
gggttcggctgctttggaggcgcagcggttgcggcgggccggcgggcccggggaagcgggcggtggccgctcagagaataccttccttccggcaggagaccgtttggccctgtattccgggc

SEQ ID NO: 414701 - DNA, 122 bp, Homo sapiens
ccgcacgcgccctcggtcctcggatcccgccctctcaggacagtgccagtcccacgaaggcgcaaatgccgcccgtactgctccaccctggcggagggcacccaggtcggagagtccgcacg

SEQ ID NO: 414702 - DNA, 122 bp, Homo sapiens
gcagggaagagccagcaccaaggccagagtccccagagccatccgcgtcgagggcacgagcgtgaagaagaagcagggactcaggccatcctgcatccaggccggacccacgggcccttcgg

SEQ ID NO: 414703 - DNA, 122 bp, Homo sapiens
ataaagtggctggtggaaagttcactcaatcagggctgcacggtcttgtggaataaaatacgtccagacagggttacgacgtgctttggattccagcagggggagctctgactctggaaacc

SEQ ID NO: 414704 - DNA, 122 bp, Homo sapiens
tctcagatcaatgaatgggcaaagaaacacctcatggctctgggaaggcatgctgagacccgtttttgcaagtcctgaggaatggaagaatatagctgccaggtatcccaagtctagggcag

SEQ ID NO: 414705 - DNA, 122 bp, Homo sapiens
ggctcatctcaaaatgtgggaggacagcatgactcaggaagagagaaataggagggaggccgggacagctgcacacaaggaaaacgaaagctcagactacagcagtgctcagaccagtgttc

SEQ ID NO: 414706 - DNA, 122 bp, Homo sapiens
agatggcttccggaaagtggtccacatcgagcagggcggcctggtcaagccagagagagacgacacggagttccagcacccatgcttcctgcgtggccaggagcagctccttgagaacatca

SEQ ID NO: 414707 - DNA, 122 bp, Homo sapiens
ctgctctcttcttccctcctaattttacagcactgtgtaccaggtgcgacagtgattgagcgctaagtaaaggtattttaaccttcgagacaccctggttggagttcacaatgaaatgaaat

SEQ ID NO: 414708 - DNA, 122 bp, Homo sapiens
aacatacttagctctatacctggcacccaagtaaacaataagtttgttggctattaaagacgttgatttctctactgatatcgtcagagatgggcctcatgctcattaaagttccttcctct

SEQ ID NO: 414709 - DNA, 122 bp, Homo sapiens
gagtttttgaccaaacgtaaacatcagaggagcgggaacccgagccccgcctgggctgggcggcagcgaccccgacgccgcggcggcagagccggagctcgaagcagccgccgctgttgcga

SEQ ID NO: 414710 - DNA, 122 bp, Homo sapiens
taaccccatagtttcactggcttaaaaacacaaaggtttatgtttgttaacattataggtcgactgtgggtcgactaaggctctgctgtacgaatcttcattctggaatctagactgaagaa

SEQ ID NO: 414711 - DNA, 122 bp, Homo sapiens
tttgccttgaccgctgggttggcagggaacatatttttcctatttgctcaccagcttaaccgtctctcccagtttcacactcccagagctgccaaaaaaatcccaaccacagaatcaggaag

SEQ ID NO: 414712 - DNA, 122 bp, Homo sapiens
ccggggctgaggagctgcgctccaggggccgacgagggcgaggctgggaggcacccagggcgggaatccacctcgcgggcgaggactttaaaaagcccggggcgggaggaggggtcaggaaa

SEQ ID NO: 414713 - DNA, 122 bp, Homo sapiens
tgaactcctgacctcaagtgatccacccgccttggcctcctaaagtgttgggattacccacgtgagccactgcgcctggtcgtcttttagcccacatctgttggtggcttactgtgtgctat

SEQ ID NO: 414714 - DNA, 122 bp, Homo sapiens
aaaaagtgagacccagtctctccaaaaaacaaacaaacaaacaaacttagccaggagaatcgcttgaacccgggaggtggaggttgcggtgagctgagatcacgccattgcactccagcctg

SEQ ID NO: 414715 - DNA, 122 bp, Homo sapiens
ttctgagaaggcccaagaccatcacgcgggtcttcgaaggggtgaggccctcccatggcccgactgtgcccctgggtgacaggagccaggagctctcaactcccagacacagtgcgggagat

SEQ ID NO: 414716 - DNA, 122 bp, Homo sapiens
caggaggcagctcttcagtagtgaccaaggcacacgtggtccatggacaattttatcctgcgagagacaggaaggagaacttggtgaaccgtgtcaactctgaagaaaggcagacaaacgca

SEQ ID NO: 414717 - DNA, 122 bp, Homo sapiens
gcaccttcctgaatgtatacttttaaacattcccaagattcagcttctttgtcccaaaggcggaactgggtgacactttttatccaagtttcagagtgcccctgggaggctcagtcaaaaac

SEQ ID NO: 414718 - DNA, 122 bp, Homo sapiens
gacataaaaaacgcatcacagcacaatgtaacctccacattaatagacgcagaagaagagcggggaaccagttctttctggaggaggaaagaaaggactcccagagcaggtgacatttacct

SEQ ID NO: 414719 - DNA, 122 bp, Homo sapiens
ccttggcacctgtggagggaaaggggcggcggggcggtggcgtcctgggatggatgctctcgccgtcttcagccccggcggcctccagggcaaagccggctgcacccctgcgcagcctgttc

SEQ ID NO: 414720 - DNA, 122 bp, Homo sapiens
gagccccggccccacgtggcagctccccacgtgctcgtcccgtcctccttttctctttcccgagtcaccaccagtgaatgctgcccatgccctcaggtcgaccacggagctgcgcaaggaaa

SEQ ID NO: 414721 - DNA, 122 bp, Homo sapiens
ctgtccattcccctctccagcctctccaactgcatgcgaagtgacaaatccacaccaaggcgcagacatgacaggcaatttccggccaagaggatttttccaaaacaatctaccgtattctc

SEQ ID NO: 414722 - DNA, 122 bp, Homo sapiens
gaggcaaaacaaagctggggccggggcgtcggagcctccgcgttgtagttgggagaggttcgaacggggccccagctggcgaaagggaaaacggacccggacccggacccgtggagcctgct

SEQ ID NO: 414723 - DNA, 122 bp, Homo sapiens
acatttaagggtcaacaatcttgggatccaatgactgaacttggtatactgcaaagcccccgttaaaattcacctacagaactctaagttgtacttaaagagcatgtaagtgttggaacccc

SEQ ID NO: 414724 - DNA, 122 bp, Homo sapiens
ccacgggagaacccggacgcgcaggaattaacaagtcatcagtgctaggaagctgggaggcggacgatggctcctaaagtcccagtatattcctagccaaacttcccggataggcccactga

SEQ ID NO: 414725 - DNA, 122 bp, Homo sapiens
gttcccgtgtgtgtgcatgcgcacgtgtgtgcaggggagggttggctgcggcaggtaaagcgccttgtttatgcctcgctcatcactgtaattgccttgggggatttattggctttgtaagc

SEQ ID NO: 414726 - DNA, 122 bp, Homo sapiens
aagaggctgcggcaggcgctggtgcgcactagtactgggaaggtcccacgggcgacaagacgctccatcgtggatgtgctgcggagggacgcgtcggacatggcccggggctgcgcaaacgc

SEQ ID NO: 414727 - DNA, 122 bp, Homo sapiens
atgcttccattggtcgaaggccagaccagcggagactcccattggccgagggctgtggttcgccgcacggcctactgggagttgtagtcgccgcgtcgccggtgcggccgccattgtccggc

SEQ ID NO: 414728 - DNA, 122 bp, Homo sapiens
gtgtacacatcatatgccacatccctgctggcgccattaatgctgcaccagcagaggcagcgctctcattacatactgctggcccatatttgtaatgtgtgacattttttatgaaatactgt

SEQ ID NO: 414729 - DNA, 122 bp, Homo sapiens
gagtgccgaaggggcggaggaagctggtgcccggcaggagatgcagcccaggaggacccccgggcctggctcgtcgccaaggacgatgcagtggtgctcatggctgcactgtctgtgacggg

SEQ ID NO: 414730 - DNA, 122 bp, Homo sapiens
gcttccccgctggagggcgccatcatcccatccacagagagctcagcaggccacgtgccgcggcctgctgcgaacccgcagggactgctccctggctggcggcacccttattgttcaataaa

SEQ ID NO: 414731 - DNA, 122 bp, Homo sapiens
cgccaagagccacccgctttccagctcgtcccactccgcggatgtttacccaccttcatgcgcagaggaggagatgaaacactggggatatcttgttttccacactaggaatggagcacacc

SEQ ID NO: 414732 - DNA, 122 bp, Homo sapiens
ctgcaagcgcatctacacggtgcacacctgcatgtctccgtacactctggattgtgtgagcgcgtccacacggtgcacgcctgcacgtctccccacactctggattctgcgagcgcgtccac

SEQ ID NO: 414733 - DNA, 122 bp, Homo sapiens
ggagaacgcttctaactgttcttcctccacaaatcactctgagacgctgtgctggccagacgagctgctaaatggatgtgacttcttccacaggggatgcgggagagaagggagacaaaggc

SEQ ID NO: 414734 - DNA, 122 bp, Homo sapiens
aacaaccctatgacatcacacaactgctaagattgattccactccttgcaactaactcaccgttggtgttttttggcataatgaggagtgcaggtgatgtactgagcacccaagtcagctgt

SEQ ID NO: 414735 - DNA, 122 bp, Homo sapiens
ctcctcctggcgacgccgcgttgtgggcactgggaggcgccgtatttatagcgctctgctcgcgcacacaccccctttggggctggctgcaaacctgcatgactcacgcccaaagaatgccg

SEQ ID NO: 414736 - DNA, 122 bp, Homo sapiens
ctcgctcgccaaaacccaagcgcagcactaaagaaacgggagacccggcttcgggtgactcgtccccccttccaaacgtcagcacagtcgaaaacgtgcaccccgcagcctccactgccgcg

SEQ ID NO: 414737 - DNA, 122 bp, Homo sapiens
tccgagcgtcggcgcatgcgcagatcgggggcgcgaggcctcacggagctcgtagtttcccggacgggccgctcccggcctcgcggcctcgcctccccacactacaactcccacggggcagc

SEQ ID NO: 414738 - DNA, 122 bp, Homo sapiens
gcgcacgccaggatcagcctacgtgttgggtggcaagaacgcagggcctcggattgggtccgactcggtcgctggccggcagcgggcgtggccgggcccgaggaccgagctaggactctcag

SEQ ID NO: 414739 - DNA, 122 bp, Homo sapiens
ctgctccgaggtgagacactcgtcgcgccgcccccgcagcagccgggaccccctcggccgcgaccctcttcagggccggaagcctctcaacttagaacctatgcggtcgggtgatccttttc

SEQ ID NO: 414740 - DNA, 122 bp, Homo sapiens
tatttagatgcccattggctggagtttttaagaccagcccaggctctgtgggccaagaatcggcgcaggagcgaaccgatttgttggccaagaattcgggccaaaacttgtaaagttggcag

SEQ ID NO: 414741 - DNA, 122 bp, Homo sapiens
tttacagtgcatctgtgggcagatttctttaaaatgcatggtactttaaactttgtcttacgagaggtccaggaaaatgcccactaagcctctgtgattttaataccgtgccaggccatggc

SEQ ID NO: 414742 - DNA, 122 bp, Homo sapiens
aaatgtcgatcacagtgagaacagaacttatcttctgactagtccaggcattgcccagtacggtgtgagtgctcactcaatgcaatgtgttggtgatggtaactgtccttggtctctttcct

SEQ ID NO: 414743 - DNA, 122 bp, Homo sapiens
agccgctccaggagcggggtttcgggtagggagagccctccgattgggtccgtcatagggcggggcattaaaagggtagggaatgcctagagagcttgacctctgatagggcagtgttttgg

SEQ ID NO: 414744 - DNA, 122 bp, Homo sapiens
cggaagacgctttcttgaggcagcacgtgccattcgtggttcaccaggacctgcgctggtcgtgtccgaaggcaggctaccagctctgtgtcattcccaccagtgccgcctggaggacagcc

SEQ ID NO: 414745 - DNA, 122 bp, Homo sapiens
gggaaacaaccacctacctagtaatccgttactctgaacagctggagcccctctgcagggcgggagggaggcagaaatgcgatctccctcagctctgttttaacgttggtgaagatatgcct

SEQ ID NO: 414746 - DNA, 122 bp, Homo sapiens
gatacttttatttcattgtccatatagtgaattcacttcagaaagccagtctggatctttcggggaaggctctttggccaaggctcaatggtctgatttagacctaaaatttcccttcattc

SEQ ID NO: 414747 - DNA, 122 bp, Homo sapiens
aacaaattgccacctcagtggaggctctttggcatgctaaattttttccagttcttgcggcgagatcaggaatccctaaaagtagccgctcccccgccccggggccccgacagtgcttgggc

SEQ ID NO: 414748 - DNA, 122 bp, Homo sapiens
cgcaggcgcgctccggctcgctcaccacgcacggaagtgcgcctgcgccaggagacgccccgcccagcccctggccgactataaagtgtcgagcttctcctcgcgagagacttagtgctcat

SEQ ID NO: 414749 - DNA, 122 bp, Homo sapiens
ggtcaaacaccacacctgcagccccctctgctggctcccaatgggtacatctgcaaagagcgagtccaggcaaatgaacactattaagattctctggttggcccccatactctctggtttcc

SEQ ID NO: 414750 - DNA, 122 bp, Homo sapiens
aaaccttggtgtgcgtttccccgctcggtttagaacgcacccctgcctccactccacaaacgtgcagtgagccctcaaaaacctggacaaatgacctcacctcgaaagccccctctctgatg

SEQ ID NO: 414751 - DNA, 122 bp, Homo sapiens
gaatagttgcttcttgagttcaggcccatccggatgggttagtcttttaaaaccaggacacgctgaaggagtgcgcgcaccccaggaagatcaggacaggcaagactagtgcagagcgtggg

SEQ ID NO: 414752 - DNA, 122 bp, Homo sapiens
tgatctcgtgatccgcccaccttggcctaccaaagtgctgggattacaggcgtgagccaccgtgcccggcattatgttgggtttctaatgtgtcaaactaaagctggcatatttcacttttt

SEQ ID NO: 414753 - DNA, 122 bp, Homo sapiens
aaggaagcagatgtcaatacttacagtggccaacccccatggctccataatgattggacacggcaatgaggtcgtacacataaggccttgctgacaggttacagacaaactcggacatgttc

SEQ ID NO: 414754 - DNA, 122 bp, Homo sapiens
tgtggtcgtgtagcccgggccatctgctcattgtacgctgcttttgttctgttgcccttccgaagcatggtgggcccagcctttttttttgtatcgtgtgcatgacgacattgttacacaca

SEQ ID NO: 414755 - DNA, 122 bp, Homo sapiens
agtacacgttgcccgagcccgtggggtactcaatgaacagcttcaattcgtagtccatgccgggcttggagacggcgtcgaaggcgaaaacgcggcccagcagcgagtggtccttcttgaag

SEQ ID NO: 414756 - DNA, 122 bp, Homo sapiens
catgagacaacttatgtgtgagacaaaaagtttcacacctccccccaccccaaacacacacggtataacacagtgacccaaccttaggcaaaagggtaccactgccagcaaatgcatttaac

SEQ ID NO: 414757 - DNA, 122 bp, Homo sapiens
gcgctccgacggagacgcagtgcgcctgcgcaagagccggtgcgtatttgcctgtacctacgcgcgatgccagtacttctggtcagtttccaggagcggcaagtgaggaatatgaaataacc

SEQ ID NO: 414758 - DNA, 122 bp, Homo sapiens
caacatattcctcaggacaacatccagactggtcctttacatgaatgaataaactgaggacgggaatggctaaacagcttgtccccaaacatccatagttggggccaggcaacaggttacca

SEQ ID NO: 414759 - DNA, 122 bp, Homo sapiens
gcagccctttctgagtggccccgacccctcagctcctgaagaagatgagctccagcgacacgcccctgggcaccgtggccctgctccaggagaagcagaaggctcagaagaccccctacatc

SEQ ID NO: 414760 - DNA, 122 bp, Homo sapiens
gtctcagaaaggaaaagtgaagtgcggtctggagcataaacagcgcgttagtgctgtgaccgccgccctgaggaggtcagagggtcccctcctaggacagtgccgtgctgtggcactcctca

SEQ ID NO: 414761 - DNA, 122 bp, Homo sapiens
gccgaccctgcgctacttcaccaccgagcgcttcctgcccctgctgcggatgcgcctggacgaccccagcggctccaactacgtcaccgccatgcaccgggaagtgttcggcgacgttccgg

SEQ ID NO: 414762 - DNA, 122 bp, Homo sapiens
cggctctgcagcaagtgggtgccggccacgctggcgctgcgcacagcccgggagccaagacgccgttcctcccacacgtgtctgaggtgtcagtcgccatgggaacagcctggggtccggaa

SEQ ID NO: 414763 - DNA, 122 bp, Homo sapiens
tcagcgatgttttactaaccacttctgaaaaaccacagtttaaggtaaagacaattatatcgttttttggtttgtgacataactaagttgactttgaaagttagctgtatttttagccaaaa

SEQ ID NO: 414764 - DNA, 122 bp, Homo sapiens
cacctggaggcattgaccccaggaccttggaccccagacctctgaccggggggcagccagcgtccaggtaccccaacccctgccctgggtccggcgtccccccattagtgagtcttggctct

SEQ ID NO: 414765 - DNA, 122 bp, Homo sapiens
cggcctttcattattaagataatgctgcagtgaacattcttgaaccaaagtatttgaacacgtctgcaagaatgtctattggataggccgggcgcggtagctcaagcctgtaatcccagcaa

SEQ ID NO: 414766 - DNA, 122 bp, Homo sapiens
tctcaaataaataaataaataaataaataaataaatgcttaacccctgggaaaagctgagcggagaagagtaaggcaccacctggctcactgagtgggaaagccagggaaggtgccacaccc

SEQ ID NO: 414767 - DNA, 122 bp, Homo sapiens
taaattgagtgaactagtcagtaacattctagactgcaattaaacatcagggacttggtgcgtgggccctactccggtttccaggtgaaatgtctctgggtcacgtgtgttgcttaacaccc

SEQ ID NO: 414768 - DNA, 122 bp, Homo sapiens
gtgcggtggtgccatcttggcttactgcaacctcttatctcctgggtcaagggattctctcgcctcagcctcccgagtagctgggactacaggcgcccgccaccactcctggctaatttttg

SEQ ID NO: 414769 - DNA, 122 bp, Homo sapiens
gcttctcgttcactgtgcccagggcctaagagagtgtccagcagctagtgggcgctccaccgagtagttgaattaatgttgtgttatgtccaagataacacgaaagaacctggtagcgcggc

SEQ ID NO: 414770 - DNA, 122 bp, Homo sapiens
gacctagccaggacggcgagggggacacgaggaaagactagtcgagagacagaccccccccggaattctgagcaccaaaaggtaagggcgagagaaactgcaaccctcggcctctcctgcca

SEQ ID NO: 414771 - DNA, 122 bp, Homo sapiens
tcccacagcctctatcctgtctgagggggctttttcctcctctgcttaccctgtcctacacgatggccaggtgtccctgaggccaaacacatgtccagtggaaaggatatgaacgcaaagga

SEQ ID NO: 414772 - DNA, 122 bp, Homo sapiens
tgcctaaaacataaataacttagcaagatttttctcttggcttagagcataattgtaagacggcatatagctcaaaagttttggtgctcagctgtgtgctgaagaaagtatttccaagtctt

SEQ ID NO: 414773 - DNA, 122 bp, Homo sapiens
tttcacactctagcgcccattctgtccttcctgctggattctggctcaggagaagagcgccgccaggaccccaggaagctgcagacaggagccgctgacacctccacctcacgcggacgcca

SEQ ID NO: 414774 - DNA, 122 bp, Homo sapiens
ttgtcgaagtctgggggttgggactggaccccctgattgcgtaagagcaaaaagcgaaggcgcaatctggacactgggagattcggagcgcagggagtttgagagaaacttttattttgaag

SEQ ID NO: 414775 - DNA, 122 bp, Homo sapiens
ggatgaaatccagacgcagctgggcccgctgaagcgcagggtacctgtcgtccatgccctcgaacacgacccgcgcaactcaaggggacaaggacacctgaccggcagccgttcgcctgcgc

SEQ ID NO: 414776 - DNA, 122 bp, Homo sapiens
ccttctggctcgtctctaaataaatttggtttactcgttttttaaacatagtgtttggagcgatgcactggattcactagttgagagtgtgatttcactgttttatggctttacagatggtg

SEQ ID NO: 414777 - DNA, 122 bp, Homo sapiens
gtggtgtcaccctggcagcacactgcagcggtcactgctgaagacacagaaacagcttcccgtgttcttggacttgacatcaaagatggaacggggatgtggcctgggaacgaggaacgtgg

SEQ ID NO: 414778 - DNA, 122 bp, Homo sapiens
tcacagcagcgttccgcgtcatggggatttggcagcgtctgctgctttttggtggggtgtcgctccgggctggtggcggggccactgccccgcttgggggaagccgagcgatggtttgtggg

SEQ ID NO: 414779 - DNA, 122 bp, Homo sapiens
atatcacatcagggcaaaggctcgaagccacgggggtgctccacagggctgccctcgggccgccggcctggaagcggaactgacctcacttcctcgtacttcttgtcacggtaaaactctct

SEQ ID NO: 414780 - DNA, 122 bp, Homo sapiens
cgccggaatggaagttaagaccccacccggccccttgggctcctcatgcctctgagtccacgtccagaaagggattgtctgtgctggcccggggattgatcctgaccacccagggggaattg

SEQ ID NO: 414781 - DNA, 122 bp, Homo sapiens
ctaatcctatgagtgtcatggttgttaatctaagaataacatactgccttcaaagaacagcgtcaagtttgagaaaaggaagaattactcccttctcattagaaaaaagacaatcatgtacc

SEQ ID NO: 414782 - DNA, 122 bp, Homo sapiens
agcgtgcgcatggtggggatgaggggaggactagggaagtaaatacagtgcctgctgccacgtcaccttcacacagtccatgtttaataagaggtcgctgctgtgatgatagggggtcggcc

SEQ ID NO: 414783 - DNA, 122 bp, Homo sapiens
ctgagtcaaaggcaggcctggcccgggggtgagggtgccgggtgcccctctgcactcattcgcaattggaacaccaggacttttttagaaagtagttctgggtctccaaccctcacactctg

SEQ ID NO: 414784 - DNA, 122 bp, Homo sapiens
tttgttttgcagctgtctcaatgtgctttacttgggatgaggcaggtggcggagagcggccggaaagactctataacccagttctgggaagaactccaagctgggagtcagtcacactgact

SEQ ID NO: 414785 - DNA, 122 bp, Homo sapiens
ctggctcacctctctcctgctcctctgcctgcaagcagatagggatattcttcttccagccgggcatggtgtcgctccctgcgctcgctgtcgggctcgctctttctcgctggctctctttc

SEQ ID NO: 414786 - DNA, 122 bp, Homo sapiens
gaagtagctccgaacaggaagaggacgaaaaaaataaccgtccgcgacgccgagacaaaccggacccgcaaccaccatgaacagcaaaggcaaggaccgagggtggcagaggccgtcggggg

SEQ ID NO: 414787 - DNA, 122 bp, Homo sapiens
gcagcgggagtctcggagctcctggacgccctcacccttggtggctgccgacacttggcccggggtctttttgttgagggttagggtctttcagccacagtcttccaaaattaggttcacag

SEQ ID NO: 414788 - DNA, 122 bp, Homo sapiens
tcccagtctgcctgaaggggaccaaggtgcacatgaaatgctttctggccttcacccagacgaagaccttccacgaggccagcgaggactgcatctcgcgcgggggcaccctgggcacccct

SEQ ID NO: 414789 - DNA, 122 bp, Homo sapiens
tcccttgccttcatcggactcttaagggaggcggagacccagtgggatctgggacccattcgctccacagcctgaccttctgtgctgaacgaacactaggtggcagcggccacgggaaaccc

SEQ ID NO: 414790 - DNA, 122 bp, Homo sapiens
atggcacccttgtagtccttcacagaacagacttgaaacctatggtttctaggcactaaacgttatctcttgctactaagccatattgtattcctcacattctcaggtcaaaccttttgatg

SEQ ID NO: 414791 - DNA, 122 bp, Homo sapiens
tgcacctctcgaatagctcaccatgactccagcctgctgcatgccgcgtgcgtgtgagcacgcaacctgtccatgcttacacacacgcccacagatgcccacgctcacacgcacctgcccac

SEQ ID NO: 414792 - DNA, 122 bp, Homo sapiens
attattccaagcactttttacggtgtttttcactctcagtgctaattcacgctgtggtgacgatgtaccatccaatccttgataggaaagatcagagaatctgaccaagactagatggagag

SEQ ID NO: 414793 - DNA, 122 bp, Homo sapiens
gcttgcccggaactcacctcctgctgtgcagctgagctcctaacaggtcatgtaccactacgagtccatggcccgggggttgaggacccctgaattatactgttggtgatttttcaaataca

SEQ ID NO: 414794 - DNA, 122 bp, Homo sapiens
aggcacaggctctacctgggaagggagcgcttggagatttgttcctggagtggactcacccgccgggaccacaggtgtgagcggaggcattagagcccacgccgttcccttcagttctcacc

SEQ ID NO: 414795 - DNA, 122 bp, Homo sapiens
tccatctgctcttcccgaggagggcgaggcagggcttgtgattaaagtcctgtgttccggcgcccgtgtcccaaaggcagcccctgggagcccttccggcagcaactcaaccccagacagcg

SEQ ID NO: 414796 - DNA, 122 bp, Homo sapiens
tgcagccgtcgcgtcctgcggcacgccacggcgttctaaggcctcccagcacccgcgcgtcgccgcttagaacccgcccctggtttgcgcgtcacaacacccgccaggcgccgactcagtct

SEQ ID NO: 414797 - DNA, 122 bp, Homo sapiens
ctaactaggagtattccccagtggcctttatacaacttgctgatcttttcctacttggctcgtctactcgccgcacaatcattcccatgcagccccaccccaccccagtcccacccgtcctc

SEQ ID NO: 414798 - DNA, 122 bp, Homo sapiens
ccttccagcaccgggaagattctgggcactcagggacgttgagcttcccacctgagcctccggggggacccctcacaaccgccaccgcagagcgaggcaaacccaacgcgggggcagagggc

SEQ ID NO: 414799 - DNA, 122 bp, Homo sapiens
ttcccccacctccttgtctttccccgaccgagcaccagactgcagaatgaggcaataatacggaccaacaagaagccgccttatcaatgccagcattagcgactggactgtttttgtttttt

SEQ ID NO: 414800 - DNA, 122 bp, Homo sapiens
accctccccagtgtctgtctacccctaagtccagagaacacgtcctctctaggctcgagccggaatcaatataggctacaagggcatcagttcaggctgcgcggaggagagaaggaagtgct

SEQ ID NO: 414801 - DNA, 122 bp, Homo sapiens
agcaggatggagatgccctggtctgcccccggccaggctccctggaccctttgggatctgcggacacagggcctggactggccacatccctgctcccagacagagcacagaccccgctgggg

SEQ ID NO: 414802 - DNA, 122 bp, Homo sapiens
gcgtgggcgggcagaggtgatagcgagcgccggcggctccaggtgcgggggcgcccctcgcgctccacctgcgccgccgccgccggctctcagggcaagtttatctccccccttctgcggaa

SEQ ID NO: 414803 - DNA, 122 bp, Homo sapiens
ttttcacaaactgaacacagcattttgtcaaaaccaatagtctctgggaccatctctctccggaacaatgccaaaagtctaaattcgagtccttctatatgtgtgaggacactcctgagttg

SEQ ID NO: 414804 - DNA, 122 bp, Homo sapiens
ccccgtgttcactagtgcaagtccttttagctaaaacctctcccaaaacctctcctgatccggacaaagatgatctttctcctctctcagaccccatagataacttatcttcccctcccctc

SEQ ID NO: 414805 - DNA, 122 bp, Homo sapiens
cactttggactctgcggtgtgcgcctggggtcccggaccggggcgatcctgctgcacactcgggtaggagctttgagtccagctttctgtcaggcagttcttacagagtttgcctgactttg

SEQ ID NO: 414806 - DNA, 122 bp, Homo sapiens
cctgttgcactccctgacccaggaggggaagcgccggcctgagagcagtccagaggacagcgccaccagaccgccaccgttcgacgcccacgtgggcaagcccacccgaagaagcgaccgct

SEQ ID NO: 414807 - DNA, 122 bp, Homo sapiens
tctggagagtgcagggcccacgcctgaggctgttgatgcgccgcagggtagcgctcccagcggtcacctcaccctgcccaggaccccagaccaggggacccacttccccccaccccgagctg

SEQ ID NO: 414808 - DNA, 122 bp, Homo sapiens
taccgtgtgaagtcgctgtcgcgcgtggccgcggggctggccacggtgaagcccgtgcggcgcccgccccgccccgccccggccccagcagcagcctctcccgtggcgtgacggctgccgtc

SEQ ID NO: 414809 - DNA, 122 bp, Homo sapiens
catcacccgctccaaggcggaggagctgctttccaggacaggcaaggacgggagcttcctcgtgcgtgccagcgagtccatctcccgggcatacgcgctctgcgtgctgtgagtacaacctg

SEQ ID NO: 414810 - DNA, 122 bp, Homo sapiens
attaggaatttcctttcttcctggcactatttgctatcatgtggtcatatcttcataaatcggtgcattatttttcctaagagaatacagaatagagccagatactgtgtcttctgtttctt

SEQ ID NO: 414811 - DNA, 122 bp, Homo sapiens
accacccttcgtggacacgccctctaggcgtaaggttccatgcgagcggtaagagtgcggcgggacttggaaatcgaatctgtgctctgtgagagatcctaggaaaggaaactgggagcccg

SEQ ID NO: 414812 - DNA, 122 bp, Homo sapiens
ctccagtgcgacgccgtgaacctggccttcgggcgccgctgtgaggagctggaggacgcgcggtacaagctgcatcaccacctgcacaaggtggggcaccctgaaccccgaagacggccccc

SEQ ID NO: 414813 - DNA, 122 bp, Homo sapiens
tgtggtaaagataggctcagaaatctgtccctgaatcatcaggaagtgataaattccactcggtgcacaggctggtaagtcagggaactgtgtcattcatttcagaacattttccagcaaga

SEQ ID NO: 414814 - DNA, 122 bp, Homo sapiens
ggttggggtgagcgcctcaccgagcctcagtttctcatctgtaaaatggacacctgtgcgcgcctcgcggcaggggctgctgagcacgcggatgggtcctctggaggctgggccgccaagag

SEQ ID NO: 414815 - DNA, 122 bp, Homo sapiens
gagatggtacatcaggataactgctcgtatcaggtaaaatttaaagcctgattctgaggccggcatcctttgggagaggaggccttcctcttccaaagcagcaggttgcctctttccggata

SEQ ID NO: 414816 - DNA, 122 bp, Homo sapiens
tgtagtacttgccgccttattttatttggatatgtagaccatccgtcttcctcctttgggcggatagcgccttgatggtacgattgggcatgggccatgtcatgtccctagaaacatgtgca

SEQ ID NO: 414817 - DNA, 122 bp, Homo sapiens
cgcctcccccgcgcgcggcaccgcctccccgtgactcagcgctttgtgcgggctccgagccggaggtcaatctgggggaggcttcttagggcaaagtctcagtccatcactcctgacctctg

SEQ ID NO: 414818 - DNA, 122 bp, Homo sapiens
gaaggcaggcattatcttagcttcactttggaggtcagccaaaatccctattcatcccttcgtgggcctctcatttaaggaggacttttcccaactgctatcagagaacaaatatttggagg

SEQ ID NO: 414819 - DNA, 122 bp, Homo sapiens
ctgaaatgtactctcttagcaattttgaaatggacattattattaatcatattcaccacacgtaagagaactgtgaagatggaaacagaagtgacaggacacatctgattgacaagaaagct

SEQ ID NO: 414820 - DNA, 122 bp, Homo sapiens
gtcatcattatttacaattaacaaaaccccggacacttctagattggagctctgctcagccggtggactctttggaaagagggaggatagtggggagaaagagcagaagaaagatattgctg

SEQ ID NO: 414821 - DNA, 122 bp, Homo sapiens
ccctcggggcccgccccttcgcgcgtcattagcaattccgccatcttgaagtgactctgtcggggactacaaatcccggcatacaaagcagctacccgcttttgttgggcgttcaggggcca

SEQ ID NO: 414822 - DNA, 122 bp, Homo sapiens
cccaggaagtggactgggatgcctgagggatccaagaattagcagtgtcctgtgtggtctcgctgagggaagccaggcaaaatctagcggctcagctgtaacagccggagctcttggctccc

SEQ ID NO: 414823 - DNA, 122 bp, Homo sapiens
cagcagccagggctgacagctctagtttcccctatgggtgtaactgggtctggtggtgtgcggcaccaagaaggggcactcaggccaggctcttggtgggctggcagagagggttgaggcca

SEQ ID NO: 414824 - DNA, 122 bp, Homo sapiens
caccaaaaaaaatccagaagccatggtatttagctgtttccatctttcttgcctcctgcacgtgggagagtactgagtatcatgccctcctacagcctctggaggacatgccaatgtctagg

SEQ ID NO: 414825 - DNA, 122 bp, Homo sapiens
cctccccgggcagttttcaggagagggtccagctggggtctccgcggtggggtccagaaacgatattccgggttggattcttcctcggttggggaagcacagctggcggagaattcccacgg

SEQ ID NO: 414826 - DNA, 122 bp, Homo sapiens
tgggagatttcctttcactgaaagggccagatcctggcgatggtgacaggaacggtaccccgcacggtaagggtcaggcaggaagggcctcccaccgcggcgtggctgccgccgttctaaga

SEQ ID NO: 414827 - DNA, 122 bp, Homo sapiens
aaggtaaaaaatatagaaatatgggtcaaatagcataaaataagagggcaaaaatgcatacgtgcactttttcagctaaaaaagtctgtcagactggactgatgcggaaaaaaagctccata

SEQ ID NO: 414828 - DNA, 122 bp, Homo sapiens
ggggaggtctcagggtcggaagcggggctgtggcaagagctctgggcctttccttcgccccgggcgtagcaaggccgggccctgagagcgtgcccgcagtgctggctgagggctgatgcccc

SEQ ID NO: 414829 - DNA, 122 bp, Homo sapiens
ctccctacagcgtcttttcttcctgttgtacccttgctgtctgtgcactaaagcacaacccgaagccgcaccttctctgggacagcagccccctcagcaggcctggtgcaggtgtgaatcag

SEQ ID NO: 414830 - DNA, 122 bp, Homo sapiens
gctcatcacggcctgggagagaagactcatcttcactatcggcacgtccaacaccacgggcgagtcggacaccgtggtgtggaacgagatccaccacaagaccgagtttggatccaacctca

SEQ ID NO: 414831 - DNA, 122 bp, Homo sapiens
ctggccgcggctcttgagctcttctattaagtttcggtttctgaagcttacgtttagtttcgatttcttaagtttcagtttctgagcgctcggcatctgattcaatctccagtttcctgttc

SEQ ID NO: 414832 - DNA, 122 bp, Homo sapiens
aggcctcgttgccatggcgacccgaagcaggggcctggggcctcctctcccctgacttggcgccgcaggaggcccggggtctggatctcagctgctctcacgcatcccacccctgagcagag

SEQ ID NO: 414833 - DNA, 122 bp, Homo sapiens
gagtgaaaccgggccccatgctgaggctacaagggacatagaaagggacaagacgcagcccgtgccctgaaagagcttacagttcggtaggatggccttcaaatgacatgatccaacactca

SEQ ID NO: 414834 - DNA, 122 bp, Homo sapiens
ggcaggaggcgggaagggaggctgccagaccaaggacccgtgtggaaggaggcggctccccgctgcctgccctgacctacaggctaggtggtggtctccttgttttggtgtcaaggactcag

SEQ ID NO: 414835 - DNA, 122 bp, Homo sapiens
caagggggtccttgtagccccacatgatctcacccacagtgcggttcatgaaggcacgttcgccgagggtggtgaatgccaaggtcatgatgagcttcagggtcatgggcttattctccatc

SEQ ID NO: 414836 - DNA, 122 bp, Homo sapiens
ggcgcgggccgcgacgctctccgccccgagggcacgctcccggggctcttggccgcccctcgcccaccgggctctgggtagcccctcaccaggctcttggcggccacctagcccggcgcccg

SEQ ID NO: 414837 - DNA, 122 bp, Homo sapiens
gccctcccggcctcagcccctcagcggcggaaacgccagtcttcgctgtcccgccttttccgggagggaaatggaaacaaaaatctagtcggtttggatgcaggagtgatggggactcgcga

SEQ ID NO: 414838 - DNA, 122 bp, Homo sapiens
cgcgggcggggaaaagggctggggggcagcaggcagagacagaagcaccagccgaggaagcgtcgaggacggcgtctctgggcttctgccccgaagcgcgccgagcctcgggatcacccacg

SEQ ID NO: 414839 - DNA, 122 bp, Homo sapiens
cggatcccgggccccttccccctcggctcttttcgggccggcgtcgtgcgggggcgctcgcgtccatatccgcacagcggcgccccctgtccgagcagccccgccaccccggccccgcgcac

SEQ ID NO: 414840 - DNA, 122 bp, Homo sapiens
aagaggaagtggcagctacacggtaaggcaagaccattgaaacagctgcagggaattcaacgccagtaccaaccgtatggttcacattattctaaattgcctgggattaatcaatgtagggt

SEQ ID NO: 414841 - DNA, 122 bp, Homo sapiens
ctgctgactccctgtgcaaggggcggggcaggcaatgggtgcacgcatgcgtgtatgagacgtgtgcacaggggagagtcaggcctacaagccccagatctggggaaccccaaatcccatgg

SEQ ID NO: 414842 - DNA, 122 bp, Homo sapiens
agattgagaagtatgcactggaggccattgtttctggatgtcagggtaggaaagagtaaacggtgacagtagaggtctccttgcagtgaattggggaatgaatatcaagtgaaatagtgcac

SEQ ID NO: 414843 - DNA, 122 bp, Homo sapiens
ctaccgcggcgggccgcgtacctcctggatggcctcttagacgttctctgagtcgctgcgcgacaggggcagcaggcacacccaggagcccgctacgctgcaggccttgaagctgccgctgc

SEQ ID NO: 414844 - DNA, 122 bp, Homo sapiens
ctttttttttttttacccccctcaaaggagttctaggtgtaaaaagcatcatggtttaaacgttacgaggcatcagtgaaggcagcagaaaagtcagaaactaatatagccaagtctagatt

SEQ ID NO: 414845 - DNA, 122 bp, Homo sapiens
gaggagacaatgccaaattgactagcctattgttttattttggttttgtgttttagttctcgttaattatgctaagagtagtttgttaggacagtggtttaaaatatataagagaatcagta

SEQ ID NO: 414846 - DNA, 122 bp, Homo sapiens
ttctagttttcatatttaatttttcacctttcttaattgaaacaaggcaaacaagtgtgtcgcattcacatttctattcctctattgttatgtacagcgtgtaaatactgctttataattgt

SEQ ID NO: 414847 - DNA, 122 bp, Homo sapiens
gccaggcccctcgtcctagaagacccttcccgacctcgggaaagtagatgtggagggtggcgccctgcgtaaccctcaccctgtccctcccactccctggggggtctgttccacagtgactg

SEQ ID NO: 414848 - DNA, 122 bp, Homo sapiens
gttcaagatcgagaccctgtctaattaaaaacaaaacaaacaaacaaaaagaagtccaggcgtagtggctcacacctgtaggccaaggcaggtggatcacgaggtcaggagctcgagaccag

SEQ ID NO: 414849 - DNA, 122 bp, Homo sapiens
ggatcctggcattatttcgtcttagaaaaactgaattcgaaatgcagagagttgaacccacgtgtccaggtctggtctgcgatcggcaggcgccccagtgtccccatcaggcagctgcagga

SEQ ID NO: 414850 - DNA, 122 bp, Homo sapiens
aatccagaggatatcaccagctgctgatttgcacataccaagaacatgaacattttccaacggagaatttccctagcttaataagaaaaagtccaagagccggtcacagcattaacatttag

SEQ ID NO: 414851 - DNA, 122 bp, Homo sapiens
aattgaaaaactctggcgagttacctgtgattttcagtcccagggatttcacggagttagcgctgggcaatcatcttgctcagctctctaaagtgaaaattagaaccctcggggcgaggcaa

SEQ ID NO: 414852 - DNA, 122 bp, Homo sapiens
ttccacgtggtttagcctaatagcttactctctttttccttggtttcctcatgtgtgaaacgcagatagccaccaaacttttcaggacactgtgaggaccaaatgagagggacacataaggt

SEQ ID NO: 414853 - DNA, 122 bp, Homo sapiens
caaaacattccggctgcgcgcccccgccccgccggcggcgccccttcctccgttacccgccgcgagctcacttagggctccgcaggcacccctgggcaaggccagacacggggcctgggatt

SEQ ID NO: 414854 - DNA, 122 bp, Homo sapiens
gtttcctctgtgaaatgacaatgtactagtaccaacaatccccatctgctgtgaggattacgaaagccaatttatgtagtagtacttcataaaatactgaaggaaaaaaatttttttccatg

SEQ ID NO: 414855 - DNA, 122 bp, Homo sapiens
ctcaacccctgcgatggggctcctaagagccaggaggggagaggggctggctcttactcccggtatcgcaggaggtgtgtacaacccctgcgatattcggagtaatatcatcctctcccgct

SEQ ID NO: 414856 - DNA, 122 bp, Homo sapiens
gaaaacgtaaggacccacagttaggtggccagactgagagcagagtgctgagtcaccacacggtgctgactcaccctcttcacgtgacagcccttcctgtgtgtggagaccacagtggtttt

SEQ ID NO: 414857 - DNA, 122 bp, Homo sapiens
gaaacctccgaatgactaattcttaaatttaagggtgcataataatcacctatggctcaccgctgcatttccgattcagcaggctggggtgggtagcgaagtctgtatttcaaatgagcccc

SEQ ID NO: 414858 - DNA, 122 bp, Homo sapiens
gatctagctctcgcgagaagttactccccacttaacgcgagattacgcaagcccgggagtcgggagttggaaggaaagcgtagtagccccagccacccaaactgcgaatcaacttccctctg

SEQ ID NO: 414859 - DNA, 122 bp, Homo sapiens
atcagtgacggggctgacgagaaaccgtgaggcccaggtgacaagcaggctcaggacatgcgacaccgtcttcgggatgctgctttccgctaagctgctgtctgggaaagtcaaccgtctat

SEQ ID NO: 414860 - DNA, 122 bp, Homo sapiens
ctagggaactcggggtgcggccctcgccggccccgggccagcggccaggtccccgccctccgcgggatttactcctgtcccgcctcctcggatttagcccaggcagcctgggaggttccgca

SEQ ID NO: 414861 - DNA, 122 bp, Homo sapiens
ttccctaaatcctcaatatccaaggaaaaataattctatccagtggccataactttcttccgttgcttcttgatctctccttgctaacaactcatgtctgtgggaactggtaacatttacaa

SEQ ID NO: 414862 - DNA, 122 bp, Homo sapiens
caccagctcaactccgtctccagcacctaagcagtatcctcccgccatccctccccacggcgcctgcgttccccggcaaccggcgccgctgggcagcctgggaggcaggaaaaagcgactct

SEQ ID NO: 414863 - DNA, 122 bp, Homo sapiens
ttccctttggcaaaacacgggagaaaaggcagctgctatacaagctaagattttgatgttcgtaaaggtcacgcatgggctactgcatcagtttggaaccagacgggctatttaatttgtgg

SEQ ID NO: 414864 - DNA, 122 bp, Homo sapiens
ggggcgccggcggtgttgtcagtgtcagctctgcgcacgcagccctcccggagccggtgccggcccgcgagccccagcgtctctgcagaccagtcccctccagggtccggcggggcccgcgc

SEQ ID NO: 414865 - DNA, 122 bp, Homo sapiens
cggggtctccgcggggaaggcgcccacagcaggtgtggtgttcatcccgggtcgaccggccgctcgcgctgccctgaaactctagtcgccaggtgaggaacttcccattccccattccgctc

SEQ ID NO: 414866 - DNA, 122 bp, Homo sapiens
cggctggatgtacgggacggtggagcgcaccggcgacacggggatgctgccggccaactacgtggaggccatctgaacccgcagcgcccccatctgtcttcagcacattccacggcatcgca

SEQ ID NO: 414867 - DNA, 122 bp, Homo sapiens
actagttttcatatggcagtaggtgtaccctcaccctgtgacaccgatcctaatacccagcgggtagagtatgacatgactgccaacagagcaatcaatgtacagccacccggtgatattgc

SEQ ID NO: 414868 - DNA, 122 bp, Homo sapiens
ggtgtaggtcaccagtcatgtcacgctcacaaccctttcgcctccctctaggtcaggcaccgcatccaagttaagcaaccgacgccggctccttggtgtcccaacaaggtctagtagaaaag

SEQ ID NO: 414869 - DNA, 122 bp, Homo sapiens
aaaacgggtggcgatggtgtccaggaaggtgttttgcggggccagcaaccccttcatgaccggcatggccccggggcgtgggttcaaggcgcggcgctggggagctttcagcgcggccgggc

SEQ ID NO: 414870 - DNA, 122 bp, Homo sapiens
ggcagcccagcaacaagcggccaccgcccccaccccggggcgggcaggtgagtccccccccgacccgcccccagcccagagggccgccctgcgctctcgcccccggcccctggccgcgcgtg

SEQ ID NO: 414871 - DNA, 122 bp, Homo sapiens
acccatacctcctgccctccatatcccttcaaggtacgatgtaatccggcctctgaggaccgctctgacttcacctccttctgccccactcctccgtcctccctatcctcttccatgggtgc

SEQ ID NO: 414872 - DNA, 122 bp, Homo sapiens
tcagaatccacacttctaactacaacactatgctgccttgccagagcagaacagaacattcgaaataacctacttggccatcaataagtgatatgaaaaattaataaacccaaacaacggaa

SEQ ID NO: 414873 - DNA, 122 bp, Homo sapiens
aacaaaaagcagctttccttagcccactccactttccagctcaataattgctacccctcccgtgcgacgattccctgcccaacgtaggaaaaaaagaggtccaaaaggttatagcatcacct

SEQ ID NO: 414874 - DNA, 122 bp, Homo sapiens
cgccaggagggcagcgatgctccgggctggtgcaggcttgctgggggatgtcggctgatgcgagctggagagcgcgtgtggcggccgcggcgccagtgtttgtgtgtatgtgagaaagcaag

SEQ ID NO: 414875 - DNA, 122 bp, Homo sapiens
aaagccgctcgcgtgaaagtaattaattattccatcacttcccgggggtggaggggggtgcggaaaaggcgcatgagctcaatgctgtatactgcagcccgattccagctctttcttgaggg

SEQ ID NO: 414876 - DNA, 122 bp, Homo sapiens
gccccgtaccccaccagcagccagctccaaggggctgaagcgactctggctgggggagcacgtgaggcccccgcgaccagggctctcagggagacagtcaggggggtggccagacagagcgg

SEQ ID NO: 414877 - DNA, 122 bp, Homo sapiens
cgccccccaggaccccgggtccctcccctccctcctccgtgttgtccgcctgcagtccttcgggtcactgttctcgggaggccgccccgccccacagtcaggctgtgcccatcccccgccgc

SEQ ID NO: 414878 - DNA, 122 bp, Homo sapiens
cagtcggggtttccagggccgcagtgcactgtgcttgcacatggtaagtcattgttgggacggaaaagaagccggcagtgggcagggcccagcgtgcggctcaggcaccgagcaaccgcttt

SEQ ID NO: 414879 - DNA, 122 bp, Homo sapiens
gctttatttgccacgtttatttctgatacaggcttctcctttttctctccattgaaacagcgggtgccatggttttgctctcatcctgtctgagatgacacttgaagtgggatatgtttgac

SEQ ID NO: 414880 - DNA, 122 bp, Homo sapiens
cctcagtcctgcaggctgttgctgctcccctcttccaccaatgccttccatggagcaccccgacagacggaagcttctctgtctacccagtatgactttaactccatgcagcctgacttcct

SEQ ID NO: 414881 - DNA, 122 bp, Homo sapiens
aatcaagaaatgtgggaggacatatctctgatgagtcagaatagtggaagggagtggccccggaatgtgactacctggaagaatctagttccttaggctaagtcactagtgttagcccagta

SEQ ID NO: 414882 - DNA, 122 bp, Homo sapiens
tcgtttttgaacagaaagacttgtctgtaggaacgacagctcaggcagccacgtgggctgcggactgtgtttgtggactacatctcccaaagtgctccgcaggcgcgcccacaggaagtcgc

SEQ ID NO: 414883 - DNA, 122 bp, Homo sapiens
gcggggccgagggctgcggaggggcgcggcccgcgagacaccatgggacgggcgccccctcgtgaccacagccggcacagcctcggagcccagccaggagtggggtctcacttccgtgtccg

SEQ ID NO: 414884 - DNA, 122 bp, Homo sapiens
ggtttccccgcatggttccggaagagcgcggcgcagctggctgtgagcgcagggctatcccggcggccgcttcggcagccagggcggcgcggaggggcagggccagagggaagcgctttgtt

SEQ ID NO: 414885 - DNA, 122 bp, Homo sapiens
aggatgatatctataaagccagccaatattaattacatcttcaagtgaaagtacattacccgcctccctgcagttttaaccctatacagtggaagtgtagcctttccttcttccaggaattg

SEQ ID NO: 414886 - DNA, 122 bp, Homo sapiens
cgttccacccacatataatttagaactataaattccacaattccctgcggttaaggtagccgcgccaactacggacacccggtcgggtcaataagtacctgcgcggccaaagtgcctagcat

SEQ ID NO: 414887 - DNA, 122 bp, Homo sapiens
attgtgtaaaaaagaaacatctagagaatgccacagacaggcctagtatggctacagtaccgtatataaaagacaattgctcacaatgatagcactgaagcactgagagatatcaaagtact

SEQ ID NO: 414888 - DNA, 122 bp, Homo sapiens
tagtggaaccacagaacttcctgagcctagagctgctgtgttacttagaccgctgccgtgcggcagccacgcttgtccttgaacccaccttcctccatccctgccagccgatagtgctaggg

SEQ ID NO: 414889 - DNA, 122 bp, Homo sapiens
ctgaacaattgaagaggctggctatggtccctctgttccatcaggcaccatgcacaaactcgatctggaaaatcttcaaccccaatcttccacaattgcattcaggctcacttttgttcaga

SEQ ID NO: 414890 - DNA, 122 bp, Homo sapiens
ttgaaatagcacgggcacacggcagcctcctctgcagggctttgccagcgagccccgccccgcctgcagatcctgggtatgctactgggtacgggaaccgacccctgaccgtgaggctcggc

SEQ ID NO: 414891 - DNA, 122 bp, Homo sapiens
ccattctgtatcttaccctaagatctggttcttccctccccatccccaccccccacccaccgcctgccagctcacactaatagatgattcttaattgccaaatgtgttagagtttgtatatc

SEQ ID NO: 414892 - DNA, 122 bp, Homo sapiens
aaccacaaaaaaagtgcaacagcggtttgcaactgtgtggttagttctgcctgttggtagcgattagaacaagccatgagtcgagggtgctcagaaccgagtaaaagggaccccggccgctt

SEQ ID NO: 414893 - DNA, 122 bp, Homo sapiens
gtatttaatgttttttcttgctgagtatgtagatcaagtttacgtttagtaagaaaataacgtgataaggagatcactcaaaaacacccataagatgcatagctaattttgtcctggcgtat

SEQ ID NO: 414894 - DNA, 122 bp, Homo sapiens
ggccccagggctgggatggtgctgctcagcccagtcacgggcttctcggctgccgggggccgagcgttcccaggccccaatcccgcaacgcccggacagacccggggccgatgcacttccgg

SEQ ID NO: 414895 - DNA, 122 bp, Homo sapiens
actcctggcgcctaatcaagatatcaatcacggcgcgggggcaggggggcgcacgggccccgaaggctccagaacccggcaagtgcaggtagccggccgcctggccggccagggctgcttgg

SEQ ID NO: 414896 - DNA, 122 bp, Homo sapiens
caggagctgcggaggaaggcgtgagaaccggagcccggggtgacttgcgggggaggggatcgcttccccgtcgcccacacctgcctaacccacgcccacggcggccgcaaaggcgacaccgc

SEQ ID NO: 414897 - DNA, 122 bp, Homo sapiens
gtagaactacatccttcctagtcaattacacctttaggagactttaaataggcacagaaacgacaaagggcttatactgagaattgcacaaaaatgagttacttggcagcacaaggtaggga

SEQ ID NO: 414898 - DNA, 122 bp, Homo sapiens
gtgtggctgttagtgtgtctctctactcccaggagccccatgtctatcaggatctaccaccgctccactggatgtgccactttgtccatcaaaatgctcaccatggatgtgattcagcatga

SEQ ID NO: 414899 - DNA, 122 bp, Homo sapiens
cataggtctgagtccagcactccggtgtcccccagggcggtttccccatgtgactccctgcgactggttcctgtgtgtagctctgtggggatgacttacacgcccctgatgtatctactcta

SEQ ID NO: 414900 - DNA, 122 bp, Homo sapiens
gttacccgcctccactttcccgttgcccatttcactgccaccagctcctcttcctctgctcgaacctatgagtcccagcctcactggcggcctcagacatgctcaggagtgacggggacaga

SEQ ID NO: 414901 - DNA, 122 bp, Homo sapiens
cgcgggacccccgcgagccctggtgctgggtcaacgcggtgaggtctcagttactgatctcgtgcgcggccctaacagacggtgtagccaaggcaacggctcagcccgccgcggattggctc

SEQ ID NO: 414902 - DNA, 122 bp, Homo sapiens
gtccttaactcacttccttttccttggttatttggtgctcggtccttagtgaatggtttccgctaggcaaaagcaatcgagccatcgtaacatacttgtgcgtccgcccagaaatgtgggcg

SEQ ID NO: 414903 - DNA, 122 bp, Homo sapiens
agatgcagtctccaaggcacacagaccttgccagttgacatgtgttgcagttcagtttaccgagataatttaatcacaacctcaaactcaggaaagggcaccccagcagactgtaacaggga

SEQ ID NO: 414904 - DNA, 122 bp, Homo sapiens
cactctgcgcttccttctgggtcccccatctctggaaggtttactcttcctctaggcactcggacagaccctgccccacctcctccacctgtcagcctccagcaccatgctaccagcccctg

SEQ ID NO: 414905 - DNA, 122 bp, Homo sapiens
aaaggtaagtgtggggcatctcttcttctgaatgtcatgaagtccaggaaggaagaagcacgtagagatgaaggttaaactacagttaggcaaaagagaacaacaaaagggcttctcatgtt

SEQ ID NO: 414906 - DNA, 122 bp, Homo sapiens
tgaaagaggaccagagtcgtcggggcgtccgcaagcagacgggggggagggtgtcgttgccgtggcaacaccccccatccgtccagacttccaaagagggaggaagaacttcaaatcccaac

SEQ ID NO: 414907 - DNA, 122 bp, Homo sapiens
tggctcctggaggcaggtgacagccagggccgccagaggcctcaggcagagggatcctggcgccccactccccacgcgtccacagtcgcccgcttcccgggtgcacacgacgctctggggag

SEQ ID NO: 414908 - DNA, 122 bp, Homo sapiens
actaatgagcagttaaagggaggaaaaaaaacctgatttcttccatttcctaaggacacacgaacatggcaatcttgcactagagacacaggacccaagaaaatgtttgagatgtggaaaaa

SEQ ID NO: 414909 - DNA, 122 bp, Homo sapiens
agcaccaccaccacggctcgccctacgcgtcgggcggagggaactcctacaaccaccgctcgctcgccgcctacccctacatgagccactcgcagcacagcccttacctccagtcctaccac

SEQ ID NO: 414910 - DNA, 122 bp, Homo sapiens
aggaacaggggagcctggagtctcagggttgcggggagcagaggcgttctgggtggtgaacgtccccagcctgccctccctgctcactgcgaggtcgcgcaccggctctgctccaggccttc

SEQ ID NO: 414911 - DNA, 122 bp, Homo sapiens
agacgtaacagactgcaagatgtcccccgtggccaagatggaagaggcaacggcatcggacgctaggaagacctgggagacctgggttgaaacccggcctccgccactgacctgcagcaggc

SEQ ID NO: 414912 - DNA, 122 bp, Homo sapiens
gtgcagctcagattctggctgatagggctgtctggagaggttgtctgagccagcaggctgcgcgctctgcctggccagctgcaacttgactctcgacttggccgggtccttctagtgcggct

SEQ ID NO: 414913 - DNA, 122 bp, Homo sapiens
gccagaagactcagcaagccagcttatcccaccttcttcccactgctttgttccagccaccgagcagcggattggatggtgcccacccacattcagggtgggactttctctcccagtccact

SEQ ID NO: 414914 - DNA, 122 bp, Homo sapiens
attccctgcgcagccaacaacagaaaagaaaaccagctcccacacagaggctcccggctgcgcagaccttgcccagcacaccagattgccagctccgagacccgggactcctcctgtcctgg

SEQ ID NO: 414915 - DNA, 122 bp, Homo sapiens
cgtcgtggcttccgggcaggtaccgggcagctggagacgccagagccggcgggtaaggtgcgggcggtgcgccgggccgcgggcgcgcaaggaggggcgagagggtggggaggggcggggcc

SEQ ID NO: 414916 - DNA, 122 bp, Homo sapiens
cactcctgcccccttgtcctggctccgcccggttcatcgctcctgcccctgtcctggctccgctgcgaggccgctcgcttcccacactctggaaatgtcgctggaaactctgagtggcccgt

SEQ ID NO: 414917 - DNA, 122 bp, Homo sapiens
agatgtaaaaggactcctgaaaactacatttcccatgatgcccgtctccccacgcaaccgcggccgcgacgtcgctcccatggcaacccagaaggcctcactcccagactccttgcggagct

SEQ ID NO: 414918 - DNA, 122 bp, Homo sapiens
ataaaatatgtacacgtaccttgtcacacaatgcagaatgttatgccacattatagaagccgtgagaagtgacataaaagttctagaaagaacaatcacctctagtagggcctgaagatttc

SEQ ID NO: 414919 - DNA, 122 bp, Homo sapiens
cgtgccctcttgagcagggacgacgcaggggctgggctggaaggggccggcgctgagcagcggcgcttcttacctgttttggttaagagatctggagatggaatgaaaaagcgctggctctg

SEQ ID NO: 414920 - DNA, 122 bp, Homo sapiens
cgggtggttgaggaaggtttggtcactgggctgggagaagtgagccgggcaacgccatcccgaaggccccaggcagccgccttgggcccccgggccacagccaccgtcagaacctgtcgccg

SEQ ID NO: 414921 - DNA, 122 bp, Homo sapiens
tctcttagtgtttatcactgtaggcagctttgctatgaaaagagaaaaggttgagataaacgagttaattaagctgccaggcctagtccagccccgagagattctttatcctcctttctggc

SEQ ID NO: 414922 - DNA, 122 bp, Homo sapiens
cagatgaagaaactgagacatagatagagaggtggagagaacttgaccagggctctatagcgagtagtggtaaagtgagggctgaaatcagatctggttagcctcagggcctgaggagtatt

SEQ ID NO: 414923 - DNA, 122 bp, Homo sapiens
aaagactcgcaaagttcggaagagaatctttcccgacattttccctcccctcgggctctgcgctgcggccatcagggctcttaaaagagaaccgagagctctctggttttctcctggtgttt

SEQ ID NO: 414924 - DNA, 122 bp, Homo sapiens
cggtaagagggagccaatgggcggccacagagggaaccgtgacggtgcgtcagaaggccacgccccagcggagctgtagctgcccgcttcctgcactctctgccggctgacatgagttggcg

SEQ ID NO: 414925 - DNA, 122 bp, Homo sapiens
atcccagaccttcagccactgccagcccggccagcctgcgtctgacgatgtcagttctctcgggtttccttgatcaggcttcctcaatgcccagaactttgggatacttcgtggtggctctc

SEQ ID NO: 414926 - DNA, 122 bp, Homo sapiens
tgaaatctgcaaatatatacatcccatcagaaaagacatgcagaactgccagcttacagacgtgctcctgacatcctcattccttaatcagaaacccatgtacgttaacatgaagaaaatag

SEQ ID NO: 414927 - DNA, 122 bp, Homo sapiens
tctgggctgcgtgtgtgctgatgcctttcggcgtgttcactgctgcgtactattcactggcgtgacagtacctcggctttgcttctgtcaagggaccttggcttgtttccagttttttggtt

SEQ ID NO: 414928 - DNA, 122 bp, Homo sapiens
gtgagtagtctcctccccgtccccccatcaggacccttgtggctaggtcgcacgaggccacgctcacaggccaggaaccttggggtgggtatgggaggacagccagttcccaggaaggaaaa

SEQ ID NO: 414929 - DNA, 122 bp, Homo sapiens
gggcaccggctggcccagtgtcctgagttgcctcacttgaagcagacgccagacggggcccgggagattgtacctctacctctcctgccgcggctcttagggaatgccggttgcagggcagc

SEQ ID NO: 414930 - DNA, 122 bp, Homo sapiens
ggggcccaaagcctcacagctggacccagctgaactaagctggacttaaccgagctctttcggcttctatatgaaattagagggagaaactgcttctccccactgagttctctcctccccta

SEQ ID NO: 414931 - DNA, 122 bp, Homo sapiens
ccgcgtccccctgtgcgggcgtcccgctcgcctcgcggtgatttcttccagacttccgcccgtggttgtgagaggcattcagctacattttactgccttggctcactcttgcgttcccacgg

SEQ ID NO: 414932 - DNA, 122 bp, Homo sapiens
cgcccagctcggggggaagaagacggcccgcaccagagtcgcgtcgctgccctgcgggatcgcagcgccaccccttcggccagcccagagccgcactgccccggctccgcccagggagcagg

SEQ ID NO: 414933 - DNA, 122 bp, Homo sapiens
cacagtcaacgctgataaaattgctgatgcagattgcctgcccagctgcgagtgctggcacgggaccagcagcccagacggtcactggaagtggttgggctgattattggcatcatctccat

SEQ ID NO: 414934 - DNA, 122 bp, Homo sapiens
ccgtgcgaggaaagccaacctcgtcctgcctgccctcccagccgcgggggagggggccaccgcagtacttcaggacagttacatgggcacagcctcctccgtcctggcgcagggtcaggctc

SEQ ID NO: 414935 - DNA, 122 bp, Homo sapiens
ccgcccacccccgggccttggctcccggctgcgggccaggagaagagagcgccgcgtacccgctgcttcccaaaacccactgagcctgatgcgcgcgcctccgctgtgccaggggcgccggg

SEQ ID NO: 414936 - DNA, 122 bp, Homo sapiens
gattctttgcccacctggatattaggaaaaacatcacggcgcgggggtcgtggaaaaccccggctattttgaaagtatcatcccctttttccccggatactatgaacagtatcacaggaggg

SEQ ID NO: 414937 - DNA, 122 bp, Homo sapiens
aaagaagaccggttgctaggaagagaaagccgagcgttgctccgtgacgtcatcactccgcgccacccgcgacagtttcccagcagggctcacagcagcgttccgcgtcatggggatttggc

SEQ ID NO: 414938 - DNA, 122 bp, Homo sapiens
tggccgcgactctctgcttctctccagctctcaatctgctgcattttcctctagtgcttccggatcctcttcattcttttcggctactcaaccactccgcatgctgctggaatatttctggc

SEQ ID NO: 414939 - DNA, 122 bp, Homo sapiens
atatgcactgaatgtggtcgagacactcaggaggaatagaacgcattgctttgttgtttgcgtggtctgctaccccagaccacatttctaccgcactgactttgtgctaggcactgcctgag

SEQ ID NO: 414940 - DNA, 122 bp, Homo sapiens
cgctcagaagccgccatcccgtatcgctgagaatctactctgtgccaggcacatgctcggcggaaggcctgggactcaagtacctgtctttggactagacacaatttttgataggaaaaatt

SEQ ID NO: 414941 - DNA, 122 bp, Homo sapiens
ttcaggacattatccctgtggttccctcagtgaaaggagactcgaagcgcgactagaagtcgccgggccccatagatctgcggtgcccaggccgtaggcggaggcgcgggcagaggcggcgg

SEQ ID NO: 414942 - DNA, 122 bp, Homo sapiens
ggatatctgttttcttaaactgtgtccttcaaggtcagggtacttctcttgttctttcaccgtacccatcccattgccttattcattcagccccttaataaatattttggtgtgatttgcta

SEQ ID NO: 414943 - DNA, 122 bp, Homo sapiens
cccccctccccccagaaggagcggcgcaggcgcaatgactatttccttttctttggaacccgccctctgtttgtggagtccacaactgagcaagcgcaaaggtgattctcttgcgagggtct

SEQ ID NO: 414944 - DNA, 122 bp, Homo sapiens
cgataccagtaccttccatttgaccccattttcctcaagttctgcctcagaggtgggcaccggcagctgtactcagaggaccgcggagggggctccaccagcctgcactaggtcccgcgtcg

SEQ ID NO: 414945 - DNA, 122 bp, Homo sapiens
tgaaggctgtgcctacacagggggcctgccaggggtttggcttcttacccaacccagccacggccctctccggcgcaggcagatttgaggaccgagccttcttgatgctgacggcctgaggg

SEQ ID NO: 414946 - DNA, 122 bp, Homo sapiens
gccagtctgtcctcagagggtccagggcagctctggtggccaccacgtcggcctgtgcagcgtccgccaagggccttcccaggttggtcaaaggggaagcagcccgggcctccaagaggagc

SEQ ID NO: 414947 - DNA, 122 bp, Homo sapiens
gagtgaacccaaagggagagtttggctggcacacggggagacgggccaaggcgcggcgggcgagggcggcacaagcatggcgctgcgacaccactgctgggagcagggctgaaaggtgtctt

SEQ ID NO: 414948 - DNA, 122 bp, Homo sapiens
agtaaatgccgcgaagatatgccacggttaagagtcatgcttttgggtcatggaaatccccgagtgggtttgccaggccactgattaagaggaagtgtgtgtggttattaccgctggagttc

SEQ ID NO: 414949 - DNA, 122 bp, Homo sapiens
gtttcaatgaggtcattagggcgggccctaatccaacaagacgggggtccttatcaaaggcggagatgcggacacggggcagccacagggaacaccgcgtgaagacggagacggcacccaca

SEQ ID NO: 414950 - DNA, 122 bp, Homo sapiens
gttaggttaaccccccaactcctatgactcacatggatgtaatctgagggatgaggttgacgcaggctgctaggcgcttctccaccacggccctggagtgaagagacagtcccattcagagt

SEQ ID NO: 414951 - DNA, 122 bp, Homo sapiens
tgagctcctcagtgcccagcaagcctgtgagcatgacttttgtgagctctgccagatgaacggcttagaagtcctggagagaggcactgggaaagcatttccatgctcctccttcctcttgg

SEQ ID NO: 414952 - DNA, 122 bp, Homo sapiens
atcccaggctgactgacgtccctggcacccaaatgtcgcggggagtgcggggccagggtgcgccctccctcctcctccagccagtgaaacccgggacagcggcacccagccccagggcggag

SEQ ID NO: 414953 - DNA, 122 bp, Homo sapiens
cgcctgcgcacacggtccgctacgacccccatccctcttcgggcgtggggtggcgctgggcgcatgctccccggcagcgcggtcatcctcgcctccttcgggccgctctagccgccccactc

SEQ ID NO: 414954 - DNA, 122 bp, Homo sapiens
gagcagagcgggaggatggtgaaacccacccggctggcagatcagccgtcttcatcctggcggccggtgcggtgacaaaggttcagccagagcaccccaagctcagcacgtgcttatgtaga

SEQ ID NO: 414955 - DNA, 122 bp, Homo sapiens
ccccctctcccttctgggatcccatgctggtgcttctggtgtgtcagggacacctttccacgccaggccagggggaactaaaggccttagcggaggacctgttagcgctctgcatcagcgcc

SEQ ID NO: 414956 - DNA, 122 bp, Homo sapiens
ttcatggtgccgtttataatgttgaaaaatctagagcatcctcgatgtccaactccagggcggccgcacaatggcacgtccacatttgtgggagaagagtcggtggccggatgcggctggtg

SEQ ID NO: 414957 - DNA, 122 bp, Homo sapiens
ccatcatgcttaccttggttgtcactatacagagacagtccatgttggggggcctggccgcggcggcgggtaaggggctctgacttcatcggagtttcgttcctcccctccgtgggttctca

SEQ ID NO: 414958 - DNA, 122 bp, Homo sapiens
cctgagaccacttctgccccgagaattctagactagtaagacctggtgacatacaaacgacgaagatattttacaataatgccatggcccttgatagctacacgaggtttgtgttctgattt

SEQ ID NO: 414959 - DNA, 122 bp, Homo sapiens
ttcacctcatcaactgaggagaccacaagttcaggaatcatagccacaggatggtggagccgccattggcctcaactctgagtcaccatggcaacagtctccttggagaatcatgtggccca

SEQ ID NO: 414960 - DNA, 122 bp, Homo sapiens
gctcctggggcccagccctgcagaaacacatggggcaggctgggcagaggggctcacacccgttattcccagcgctttgggaggctgaggcgggaggatcgcttgagcccaggagtttgaga

SEQ ID NO: 414961 - DNA, 122 bp, Homo sapiens
ggcaaaccctctttctcgaccacccacctaccattcttggaaccatggcggcagtggcggcggcctcggctgaactgctcatcatcggctggtacatcttccgcgtgctgctgcaggtaagt

SEQ ID NO: 414962 - DNA, 122 bp, Homo sapiens
tcctgtagggaatctgagctcaagctccaggcaacggctcctgtgttgtcaccggggcaacgttgctgactcctccctgcaccctctgtcatggggccccctcaggccctgctgtccaccat

SEQ ID NO: 414963 - DNA, 122 bp, Homo sapiens
tgatgagagggagggtggtcagggaagcctccatgagaggccaggtggttggggaagcctcgatgagaggccgggtggtcggggaagcctcgatgagaggccgggtggtcggggaaggctcg

SEQ ID NO: 414964 - DNA, 122 bp, Homo sapiens
cctgggcctcccgggtggatgaagccaggcgtcgccccctccgggagccctggggtgagccgccggggcccccctgctgccagcctcccccgtccccaacatgcatctcactctgggtgtct

SEQ ID NO: 414965 - DNA, 122 bp, Homo sapiens
tcagcgaaggcaccaccatcctgactggcagagtccgggagtggagaaacactctctggtcgggcgtgcctgggctttcggcccaggcccgtcctgtgtcaagaccctaagagcccgggtcc

SEQ ID NO: 414966 - DNA, 122 bp, Homo sapiens
cctgccggggagagaacacaaacagcgtcggggaagccacctggctgcgcccgggagaggcgacagccctcatccgtttatttcctctcttgaccatttgttcagcgactctcccctccgtt

SEQ ID NO: 414967 - DNA, 122 bp, Homo sapiens
tgtgagagaaagagagagagagagagttaagctgctatacctgaaggaagagagagccagcggcacagctgtgtgtggcagctggcttctaaaagctgttgataaaggttactgctgagtca

SEQ ID NO: 414968 - DNA, 122 bp, Homo sapiens
actctgcctgttccatcatctttgttccatctctgcctgttccatcatctcggcaagatccggtatttccttatgtgtttatggcctacttctcctcactggaatgtaaactcttagaaagc

SEQ ID NO: 414969 - DNA, 122 bp, Homo sapiens
caacattttaaatttgtcactgctttgacttccctagctttatctcccttcagatcaaagcggggagactaggagttgtcactactggatttggtttcagactatgttggtgtacccttgct

SEQ ID NO: 414970 - DNA, 122 bp, Homo sapiens
gtgtcagatctgccagcacctgtgctacctgtccatggtgagcccgcctggccctgccggcgccctcgcatgtagtgcttggcctgagagctccggggttgcccccagaagagggagggcgc

SEQ ID NO: 414971 - DNA, 122 bp, Homo sapiens
tagcctggtgcggctctgcttcattaattcccagcaacggctgtgcgttattctctctgccgacagtggggactccctgctaatcaggcaggagccggcaaagcggtgaggtggctgcagct

SEQ ID NO: 414972 - DNA, 122 bp, Homo sapiens
gcggcatcgcgccccctgacggccgtcgcaggcggtgcaggatgctcaggtgctcgcggtcgagctgtggcctcgcccctccggtggatctccgaagttcactgttctgacaattacacgcc

SEQ ID NO: 414973 - DNA, 122 bp, Homo sapiens
tgtgtaccacagtggttacaaatagtggttttggaatcaaactgattgtgtcgaaatctccgatgaagcatttactagttgtgcaaccttgaatgcattacttacccgctctgaacatcagt

SEQ ID NO: 414974 - DNA, 122 bp, Homo sapiens
cagcctggcgacctggacctcggacctcaggagttggggacagggacacaaagttggccccgaccccggctcccacgtggccgctgctggctgcacgtcctccaggcacggccaggagctca

SEQ ID NO: 414975 - DNA, 122 bp, Homo sapiens
ctgcacatgccttgacaggagctgaattcttatgtcagaaatggcttggaagactgcaaacggaaaacacccactaggcaaagccatcatttttctcaaaactgaaacactggttctattcc

SEQ ID NO: 414976 - DNA, 122 bp, Homo sapiens
cgcgccaggtgactcctggcacagccgccggagccctgagctgggctggcctggagggggcggccaccactgccccgaggacaccggtcggggaggcaggcccgcccctctcccccgggaac

SEQ ID NO: 414977 - DNA, 122 bp, Homo sapiens
ccaaaggggtcaccgctggaccatgagactgttgttagaaggtgatatgaggaaacactacgttctgtccaggatgttggagaggtttcccagagaaggagcatttgggctgggtgttgaag

SEQ ID NO: 414978 - DNA, 122 bp, Homo sapiens
cgccgctggttccagcacaggctaaagagcttcggcatccagaaaaccagaagcgcgccgcgcacgcgcgccaaggagttcggcgacggccccgccccttcgggggtagggacagcgcggct

SEQ ID NO: 414979 - DNA, 122 bp, Homo sapiens
gctgagcccatttttcgcttcttggtcccattctgaaggaacagcttcatctcatgtattcgtgtgctctctgctccccctgactctagacaatgtaaatggactcggtgatgggaggaggc

SEQ ID NO: 414980 - DNA, 122 bp, Homo sapiens
ccgagggctcagccaccatgtgggtgtggactgcggccagttgtctgccccaaccgggcccgacaccctgagctggtccagaggctcccggccctcagcatctgtgcatccaggtgtgggtc

SEQ ID NO: 414981 - DNA, 122 bp, Homo sapiens
cggctgcggccggcggggcggggcggggccacctggcagtggctgcctttagggcggagccggctcccgctctcctcagtctgcggtgggctagcggacggtccggcttccggcggccgttt

SEQ ID NO: 414982 - DNA, 122 bp, Homo sapiens
tttatcaccctttcggtaaatagtggtcccacggctcggcctgcttttggaatgaagctacgcttggtaagttcaactctctttcacagccctctccacagaaagaactctggagttcgttc

SEQ ID NO: 414983 - DNA, 122 bp, Homo sapiens
gtggggtgtccttccatcaaagcaacgccagggggcaagaagcgttaacaaagcccgggacgctccgcactctccctttatctacccgtgtgtgcgtgtcacactttccagggcgaaatgtc

SEQ ID NO: 414984 - DNA, 122 bp, Homo sapiens
gtgcagggatgtctgtttcaccccaggaaaatggcaggagctggagggctggcgtggtagcgggcatagtgtcttacatctcttcacctcttataaacatacaatgaaagctagtctgctca

SEQ ID NO: 414985 - DNA, 122 bp, Homo sapiens
gagagaggagagcaggacgggaggagctggcagtggaaggcccccggaaagagctggccacggctggtgaagaagccgctcacctcgtactctggctcgtcatcgcctgctttggtggcatt

SEQ ID NO: 414986 - DNA, 122 bp, Homo sapiens
tcgaaggctccctttgtaagcaaaatctttttttttttctttatggggtgcagtgctctccgctagctcctaaaattcctatgggagaaaccagactttttctgaagaaaatgtttccccca

SEQ ID NO: 414987 - DNA, 122 bp, Homo sapiens
cgctccccgctgtatggcgggacttgtagttccccagggtcgtcgtgggcggggccgcagcgaaggcgggggcgggaatgctcgggcgcgagtcgtttgctacaacttacctacagcaatga

SEQ ID NO: 414988 - DNA, 122 bp, Homo sapiens
aattccaccatccgagagagtctgtgctgcggagccaccgtctggtcgtcgggttgaaggcgtctcttgctttaccgaactttaactgatcgtagtctcatttatttccttccgacctagag

SEQ ID NO: 414989 - DNA, 122 bp, Homo sapiens
gcctgagctgtttcctcttggaaaggccgaggaggctccgccactctcctttggactggtcgcgctgaagctctatcctagggcactggtcgcaagagcagatggtgccacacgctccgggc

SEQ ID NO: 414990 - DNA, 122 bp, Homo sapiens
gcctcgggcgtgcctcgccaccggctgtgtgaggcattgaggacgtgcgtgatgcccaggcggcgaagctcccggcggttgttagccatgtccctgcattgagtagaggttagaggaagggt

SEQ ID NO: 414991 - DNA, 122 bp, Homo sapiens
tctctattaagtaattaatcctaactatatccttgggctgatttgatttctgcccccacccgacagactgacccttgtcccccttccccattccagctcaaggcacttaatattacaaagaa

SEQ ID NO: 414992 - DNA, 122 bp, Homo sapiens
aggcgggcgtcgggctagtgggcaggcgtggcttccggctagagggtcgtggaaggcgcccggttttgctgcgcgttcacctccggtcccgccccctcacggggcgggttttcggcccccta

SEQ ID NO: 414993 - DNA, 122 bp, Homo sapiens
gcacttgaattttattctttaggcaaaaggaagagtttaagggtttcaagaagaaggacacgaccagtgggttttaggaagatcattctgatggcctttcagaggatggctgaggagagcta

SEQ ID NO: 414994 - DNA, 122 bp, Homo sapiens
aggattccatgaagagggactgacagaacctgagagctgaaaagcacctcaagaagtcatcggtccagtcttgcctctaaggactctccatctcaatcagcaggaccctcacccagtcagca

SEQ ID NO: 414995 - DNA, 122 bp, Homo sapiens
caccatatttcctttttcacaactttctcacccctgtggtttcccatgtcatcatgtggccgcttcccgcaaggccttagcggggtgcaggtatgaacatagtgtcaggcaaggaggcatct

SEQ ID NO: 414996 - DNA, 122 bp, Homo sapiens
ctcgggctttagttaaataccttcctcgggtggatcctggtctgacccccgtggtaataacgttatcattgattctttatcatttcctagattctgtgtccgtgccttgtttgaagagcttt

SEQ ID NO: 414997 - DNA, 122 bp, Homo sapiens
gccacgggccaccggggctcacacccaaccgtgcggccgctcctggggacccccggccgtcgccaacccccaaacacctcccggcgatgcctgaccgcccccggtctcgcgtcccggagccc

SEQ ID NO: 414998 - DNA, 122 bp, Homo sapiens
aacggaagtcggatgttggaccgctgggaagaggttgaaccttcgcctcaaacgatgttgcgcagacgcagtgggccattctagtgccttctagaaaaggttgtaagaagggtggagcttgg

SEQ ID NO: 414999 - DNA, 122 bp, Homo sapiens
ctctggattagcctgaagcggagactaccggctgcggagcggcggggcgagacacttgctcgccttttgaccccatcatgtcgcggggctccatcgagattcccctccgggacactgacgag

SEQ ID NO: 415000 - DNA, 122 bp, Homo sapiens
gcgccggtctacccagccctgctcgagcaagttggaggcggggcggatgggtggggtgggcgtccagaggcggtgccaaggtggcccgagtcctgattggtaggcgcaggcgggcgggcacg

SEQ ID NO: 415001 - DNA, 122 bp, Homo sapiens
agaggacccgtaaggagagttattctatttacatctacaaagtgctaaagcaggtccatccggacactggcatctcttcgaaagctatgagcattatgaattccttcgtcactgatatcttt

SEQ ID NO: 415002 - DNA, 122 bp, Homo sapiens
tgtctctctctctctttctctctctctccccctcaccaatctctttcttccctccttgtccgattctctgctgtagcttccagtggagaaaaataattattcttcaatgggttagcacgggg

SEQ ID NO: 415003 - DNA, 122 bp, Homo sapiens
tgtgctgagccctgctgcagtccagcgtccagatggatgcacgttcactactgtgacggccgcacctcccccatgcaccccaccctcccccaaagcccggatcccgagaaagatttagtagg

SEQ ID NO: 415004 - DNA, 122 bp, Homo sapiens
cgaacccccaaggagagcacagccaagattttggacttcaggaaacagcatccaggccatcgcttgccctcgggctgaaggccacgcatccctgcccgtcccctcacaggcggctgcacgct

SEQ ID NO: 415005 - DNA, 122 bp, Homo sapiens
ttactggtattcggctctgtgacagtctaccatattatgttacagataatacaggaaaaacggggttactagtagccgcccatagcctgcaacctttgcactccactgtgcaatgctggccc

SEQ ID NO: 415006 - DNA, 122 bp, Homo sapiens
gcatgaacttcctgaggttccaccccagtgtgcaggccggttggagtttttctggggatccgctcccacctggctgtctcgcatgctttttttctttttcctttttttttttagtgaaagtt

SEQ ID NO: 415007 - DNA, 122 bp, Homo sapiens
ggcacagaggagactggacacggacagacccctccagagcggggagaacgcatcccccaacgtttctgggataggctgggcccgggggtccccaccagaaaggacccctgcgtgtctgtagc

SEQ ID NO: 415008 - DNA, 122 bp, Homo sapiens
ctaggcctcccgagtgtgcaagcatgtggcagagaagggaaaagaaaggaagtcacattccgactacaggcctgggcacttgctatccatggggacaaaatgtcaccactggcagcaaatag

SEQ ID NO: 415009 - DNA, 122 bp, Homo sapiens
ctgggcaatggagcgagactccacctcaaaaaaaaaaaaatacaccaaagtcttaattatcgggggaagtaggattataagagatttcactttctacagaaattgttaatattcatattact

SEQ ID NO: 415010 - DNA, 122 bp, Homo sapiens
agtgggctttttcccgggcggcggaggcggcggggctgggccccggcgggtgacagcgagcgcctcaggccgccctccggccccggaaggcggagcttcttttgctggttggccaggactga

SEQ ID NO: 415011 - DNA, 122 bp, Homo sapiens
gagcagacccatgaggacatgatcgcattataaagcagtgggctacagatggcaacatagcgatcatatgccatggcagtcaggaggtaaccctcagccaccacaaagaccacaaagaaaaa

SEQ ID NO: 415012 - DNA, 122 bp, Homo sapiens
gcggctgcccgtgcttccccggtccccacccctgccccccggccccccgacccagctctccggcctcagaggctgtgacaatggactatgactttaaagtgaagctgagcagcgagcgggag

SEQ ID NO: 415013 - DNA, 122 bp, Homo sapiens
cataagtcacgtgctcggggcggttgtgcaggagcggactgtcctctgggaacatagaagcgcccccgactagagtaggggcggggagggagcgccggaggaggcaggttctgggccaaggg

SEQ ID NO: 415014 - DNA, 122 bp, Homo sapiens
attttgtagtttaacatatcatttttccatttataggatccattgatagttttcatgaatcgtggaatgatttatcttttcagaaacagataaatggttccgtgattcatgaaaactaccag

SEQ ID NO: 415015 - DNA, 122 bp, Homo sapiens
taaactgctcagtggaaatcttgggactttttggacacccagagaacaggtcccagataccgagtccgcaactccaaacatcgcgattaataggaggtgaacacagcttttctcttctcttt

SEQ ID NO: 415016 - DNA, 122 bp, Homo sapiens
tgtggcgcacctagtggtgaatcctcagaattggagaagggagtaatgagaagagtatgacgtcaagagaaggagttgttatctctagaaccttgaagcagggcctaaacaaaacgagaata

SEQ ID NO: 415017 - DNA, 122 bp, Homo sapiens
gacggtgtggtccaggcttgggaaattctaaaagagctccaggtgactgccatctgcaagcgagtttgcaaagcactgatgcccaggtgctgcgggggcgggcgcagcgcgcgccgctcgcc

SEQ ID NO: 415018 - DNA, 122 bp, Homo sapiens
agtatcaccgtaaaaacggttatctttccagccaaaagtcttgaaatgtgtggctcctagcggcaagcagcaatgggatagtcgccagggtccttttaccctgtttagaaggttggggaggc

SEQ ID NO: 415019 - DNA, 122 bp, Homo sapiens
attagaagctgaggctggagcggcgaggagaaaacgacatcgagtcaccccgcgcgtgagcgacgctctggagcaggagagaaggaaaaggaagagacacacgtatatagcatgtgttacct

SEQ ID NO: 415020 - DNA, 122 bp, Homo sapiens
ttttggggggtttgtgacgagtctgtgtttgggggggtttgtgacgtcggcctcgcagagcggtgacggtcgcagagtctgtgttttggggggtttgtgacgagttcgtgtttgggggggtt

SEQ ID NO: 415021 - DNA, 122 bp, Homo sapiens
ggatacacaccagattgggtctgggctcacaccaccctgcatccccagagcctccctggacgctgtttgcaaggtcctcaccgcctggaagtccaggagccatttttagggaacagcattca

SEQ ID NO: 415022 - DNA, 122 bp, Homo sapiens
ttgatgatatattaggaagccatttggcttcttccttccccctcccccaacacccagcaccgcactcccgggctccgaaagcacaagtcctgtgggaacccccagcttcggggaacggcctg

SEQ ID NO: 415023 - DNA, 122 bp, Homo sapiens
ctgccggccgcccaatggacggggatgcagcctcgagggggcggggcctcaccggagaggcggggttttgaagaaaggggtggggctggttgtggagaggcgggacttgcagcccacccaca

SEQ ID NO: 415024 - DNA, 122 bp, Homo sapiens
ccccaacttctggagaggagagaaaggctgaaggttgagttgatcaccaaaggccaatgtcgtgatcaatcataaaaacccaaagggactggattcagagagcctccagattgctgaacaca

SEQ ID NO: 415025 - DNA, 122 bp, Homo sapiens
caatcgtcttgtctaagttttagaatgttccataatcaaatgattggacaaccacccccacgtcagcaatgacacttcgccgcagtaaaggcgggtgctagcaacctgcttcttcactgtta

SEQ ID NO: 415026 - DNA, 122 bp, Homo sapiens
aagatccacactggagacaagccatatgaatgcagcgaatgcgggaaagcctttagccagcggtgccggctcacgcggcatcagcgtgtccacacgggagagaagccctttgaatgcactgt

SEQ ID NO: 415027 - DNA, 122 bp, Homo sapiens
tcccattggctgccgccgctggcggggcggggctccgctgcccggaaaaaagtgtaactgcgtaaaaaagtcctcgcctgggtgacggatgctcaaaagttcagaagttttcccaatgcttc

SEQ ID NO: 415028 - DNA, 122 bp, Homo sapiens
aaaaaagtaagattcaccctggttattgcatacaatcaagtcaggggtaagtgaatgttacgggtgttgtgaaagggttcgtacctacatggagtggaagatgaagagacaggagaaatgga

SEQ ID NO: 415029 - DNA, 122 bp, Homo sapiens
gctgggagctccctggcctgacaaaacaggttagactggtggcaggcaagtgcctggccccgctgccttgcagctccagtggtggggtctgggggctgctttcaaccttcctggggagttag

SEQ ID NO: 415030 - DNA, 122 bp, Homo sapiens
ccggaggaaccgcagtgcggggccgggaccacctcttgcctccgcctgcttgtcctctggcgccagtttcctggattggaagcaagaccctgcccagaggcagcagtaacggcagcgactta

SEQ ID NO: 415031 - DNA, 122 bp, Homo sapiens
cgcgggcgcggcgcgggggacggggactcaccatggggggcgcgggggccacaggccgggcgtccccgcccctgccgcggaccggagcgcgcgctgtcccccgcgggcgagcgggcaaaggt

SEQ ID NO: 415032 - DNA, 122 bp, Homo sapiens
gtctttaggaaccaaacatccagggaaatcggaacctgagcatcagaacctctatcagggcgcctcctggatttctacacaggacagtagctttcaagttttttgaccaaaatccgtagtaa

SEQ ID NO: 415033 - DNA, 122 bp, Homo sapiens
gccaaagccagccttacattctgctgcctggcagcagcagaatggaattgagcaaaattccgtagttcctattggctatgaacacaaggaagatatatatatatatttgagatagagttttg

SEQ ID NO: 415034 - DNA, 122 bp, Homo sapiens
ccggtgctcagtgaggttgtctgtgtctgtcagtcagaaaacaggcccttaggctgtatgcggtggctcacgcctgtaatcccagcactttgggaggccgaggcgggcggatcacctgaagt

SEQ ID NO: 415035 - DNA, 122 bp, Homo sapiens
cctcccggccgcgcctccccgatctgtgggcggaggggctgggaagcggggtgctcagtgcgcgcccggctccgagtagagagaactgggggagagcggccggcgcggggccgggagaggag

SEQ ID NO: 415036 - DNA, 122 bp, Homo sapiens
gaactaggggtgaagccctgccccgggctcctgagtggcagggaaattcacagcgcaattcggattgcacagaggctgctgtgaggaaggaagtggggcactttcaacaagcctgcgggcca

SEQ ID NO: 415037 - DNA, 122 bp, Homo sapiens
agcttagatgttgcaaaataataactttgtccacaatgaacacaggcactttactaaaaacgctcttgtagacctgtggttatcatctaaaaccatcgtctagatatggagatactagcaaa

SEQ ID NO: 415038 - DNA, 122 bp, Homo sapiens
gacagctcttgctcccctgggctggtgtggccctagggtggtcagccaagtactcagccccggacttcttcaagtctccctctcccaggaggccggcctgagcgcctagtccccttccccca

SEQ ID NO: 415039 - DNA, 122 bp, Homo sapiens
cttactccatttccacatgtccatggagaacatgttccaggacggccccttctccctcaccgctcatttcacagaggtaagatggggcaggtggactgaacccattctcctggccctcaccc

SEQ ID NO: 415040 - DNA, 122 bp, Homo sapiens
ctctgagttgaaaaagcagtcatcatagagcttttcaagaaagatcttggaaccagtggacgcctcccaacaccttagccaatggagtgtcctctgggccctgcaagtgcatgatgacacag

SEQ ID NO: 415041 - DNA, 122 bp, Homo sapiens
gagccagtcttgagccacagcagggatgggacagtgaaatggtggacagcagtgcctgcccggggcctgccctaaagcaccctcttagcctctcttcctcctagcccgggagcccagcgccc

SEQ ID NO: 415042 - DNA, 122 bp, Homo sapiens
ctctatgggtttctgagaatgagataatttttcggttatccggatcctgagcggaggcagcgagcggtgcctgttttggcgttattggatttgggagagttcggcagtaccactgccgtgag

SEQ ID NO: 415043 - DNA, 122 bp, Homo sapiens
aggaccgggcgggacttgggtcctgactctgggacagtggcggcagcctcacctgagcggcgcactggtccaggtagagctccaggtaggtctcctcctgctccatggaccgtaatcccact

SEQ ID NO: 415044 - DNA, 122 bp, Homo sapiens
tgacctcctcccgtgacacgactttccgcctctgggatttcagggacccctccatccactcggtgaatgttttccagggacacacggagtgagttgcggtagtttagacatctgtccttagt

SEQ ID NO: 415045 - DNA, 122 bp, Homo sapiens
tcaggcgcagtatttctttttgggggctggatgtgttcctggcagggccgatgatggatgcgcccgccgccgcccgcctgcccgccagctttccctcccgctcattcccgctccgcttcaac

SEQ ID NO: 415046 - DNA, 122 bp, Homo sapiens
gccagcccactccagaggagacgctttcaggggaagggaaggacaggggcaacattttggcgcccatcctgctggagcagctcctggggacttgtgttccccgcctcgtgcgaggccgtgtg

SEQ ID NO: 415047 - DNA, 122 bp, Homo sapiens
ataggggcgccggggcagtagttgcacaaagccagcctggcggtcgcgttgccatggcagcgggggaggggccgagccgcagcgtggctgtgttgccgggcgacggaggagccgcgggggag

SEQ ID NO: 415048 - DNA, 122 bp, Homo sapiens
taagttccagttctttgtttctcaaagtgtggttgctggaccaactgtatcagcatcagtcgggacctatttgaaatttggaatctcagatagtatgtcagaacaactgtcaaaatctacat

SEQ ID NO: 415049 - DNA, 122 bp, Homo sapiens
tgaaagacctgaatgtaagactgaagagcccttttggcccctgctgtgggtgagggtaaacgtcccactcctctcctcagggcttcaaggtgttacacctgtgaaacctcagcccttccaaa

SEQ ID NO: 415050 - DNA, 122 bp, Homo sapiens
attgggcacgtcctgtctttaatattctcataactcataacttgcccaacccaaatctcacgaacatgctcagacactctaaaatttctactcatcacatgtcctttcacatgatgtttgat

SEQ ID NO: 415051 - DNA, 122 bp, Homo sapiens
gcgaagcaaaatttcatagggatagtagcacaacaataaatcgcctcctgaaagccagaccgcccagacagcctcgttggaacatgtaagactcataggaaaaggagtctaggccaataaag

SEQ ID NO: 415052 - DNA, 122 bp, Homo sapiens
ggaactgtgtccactccaaacatctgtctatccctcaaatcctggcttttgcatcaccatcgccagttctggggaaaggtgtgttacctttcttctcagcaggctaattcagatgagagtca

SEQ ID NO: 415053 - DNA, 122 bp, Homo sapiens
gatactagtgtaggaaaatctaagatggcatcactatttctgcactcttcacttgaagcacgctgaatagctccactggttacagcatgtctaattaagatcccccgactctgtgtaagctc

SEQ ID NO: 415054 - DNA, 122 bp, Homo sapiens
aaagggatagaattctgaagaaaattctgaagattccagggacaagcttgttttgccatccgtcaactttttgaatgagagtcctgggataactcttgctcttttatatttcaaagtatctc

SEQ ID NO: 415055 - DNA, 122 bp, Homo sapiens
agtagctgggcagagctgggggctgctgaggccggatggccacagctctgtggggctcatcgcgggcaccaccttcggggtctgcccagcggccgaagccaaggcccggggcccttgcagca

SEQ ID NO: 415056 - DNA, 122 bp, Homo sapiens
gcttcccatcagagattccggttaatgctgagctgaccagcatattcagcggctgggtgacgtggcattcaccgtgctgaacgcttcctgactgtgtttgtctgtttgttaggattgggctg

SEQ ID NO: 415057 - DNA, 122 bp, Homo sapiens
aggcagtgccctccgtgtctctcctggatctgtggtggtgtgagggtttcaccctggcagcgggaatgtggactctctcttcctagccctgagtggggactgtcccgcccgctcctcctggt

SEQ ID NO: 415058 - DNA, 122 bp, Homo sapiens
ttcccagggtatggaagccagtggatcaccttctcatcctttttgcccgggatgcacccacgcagtgcctcttcggatgaccaaccctcccaagctatgcactctggtgccccccacattgg

SEQ ID NO: 415059 - DNA, 122 bp, Homo sapiens
acgggcccagaggcttgtgtgtgccaggctcagcacctcaggaccctcggtctgatcgctcgatgcccaggaagcccaggaagtgcctgtgtccccctcatcccctgcacagtcaccccaac

SEQ ID NO: 415060 - DNA, 122 bp, Homo sapiens
catgagcgcggcgcccctggtgggctacagcagcagcggctccgaggatgagtccgaggacgggatgcggaccaggccgggggatgggagccaccgtcggtgaggagtgaggaagtctctcc

SEQ ID NO: 415061 - DNA, 122 bp, Homo sapiens
ccgcggcccagaaggggaggcgggcgaggtcttccacgccatcctgagttaatgagcggccggaggcaacaaacccaagaagcccacggggccttggagcactcaggccccggcttctcccg

SEQ ID NO: 415062 - DNA, 122 bp, Homo sapiens
ttcatgttcttcctttaaaaaatgattcctttttctttcagctttatcattttgtgattccgtgtaatttttgtgatactaaaactgccttctgtgacctgaattattataaaaacatcata

SEQ ID NO: 415063 - DNA, 122 bp, Homo sapiens
tacgggccagatgaggtggctctcccctgtaatcctagcactttgggaggccgaggtgggcggatcacttcaggtcaagtgttcaaaaccagcctagctgacgtgatgaaatcctgtctcta

SEQ ID NO: 415064 - DNA, 122 bp, Homo sapiens
acgcgggcgccgctgctgctggggcttccagcaatccggggccggagccggggcgcgctgcgcggggctccagtttcgccaaccccggtgctatttaaaggtgtcaggtggctcggcagtgg

SEQ ID NO: 415065 - DNA, 122 bp, Homo sapiens
cacatgatgacctccagttctttgcaaatgacatgatggctgaatagtactccacatacacgtgtgcaccacattttctttctccattcgtctgttgatggacacttaggtcgcttgcagat

SEQ ID NO: 415066 - DNA, 122 bp, Homo sapiens
gagtagtaaaacttctcagtgatagattcattctcccaaagcttagctctgcagagctaacgctacaggagaggtaagagggtaagaacattctagcaggtaagctgtatgctacaaattca

SEQ ID NO: 415067 - DNA, 122 bp, Homo sapiens
gtccctgcgtcacagttcaccatgtcctgaaggaggcagtgcagagcgacagggctgaagcgggcaatgctcaagggttggaggaggaacaggagtcatcaggagggagagaggtgcaggag

SEQ ID NO: 415068 - DNA, 122 bp, Homo sapiens
ctttgcaaataatagtaattcaatcatgcaaataataataatagtaaacgaactggagagcgcactggaaacgccgcatagtccagctgagtcggtgccaccgccccatccactccagcgca

SEQ ID NO: 415069 - DNA, 122 bp, Homo sapiens
tggggcagttagtggggacagagggcagatgggtaagattcagagcacaggctagtgtgacggaagtttaaacttgtgagttaaatagggtttggcaatctagctggatagcatccctgccc

SEQ ID NO: 415070 - DNA, 122 bp, Homo sapiens
aaatactgacacacaataaggactcaatgaacattacctattgttaagaatgataaaaaccggggccacatgtcaggaccacctgaggctgcgtcataaatttttttatttgtcaaatgata

SEQ ID NO: 415071 - DNA, 122 bp, Homo sapiens
aataaacttgccgaggagggggtggcgggggtcagggggcgctagtgtccgcccctggcccgggcaggaagaagacctagtccagcatttaatctcattccgtaaatctcattcccgtgttc

SEQ ID NO: 415072 - DNA, 122 bp, Homo sapiens
gtttgatgtgatagctaattatggtccgcggagcctcaaaccgagtcgggcctgtgactccgagctgcgctgcctcgtattgattgtcatgcctttctccaaatacgcaccagataaactat

SEQ ID NO: 415073 - DNA, 122 bp, Homo sapiens
acttgtccgctgggtggtaccctctggaggggtgtggctccttcccatcgctgtcacaggcggttatgaaattcaccccctttcctggacactcagacctgaattctttttcatttgagaag

SEQ ID NO: 415074 - DNA, 122 bp, Homo sapiens
gccctttgaaatgggctaggaccggcaggtggcagactagggctgcttgagttcaaagaccgcttccaagaccaagcccggagccagctctgtgctaagcgttccatcacacaaccgcggac

SEQ ID NO: 415075 - DNA, 122 bp, Homo sapiens
actctggtgatgtgattaagtctgatgaatacagtgatttgtttatccaattttctgaagcgttaacaataaagataaggtcaaatttgggtttttgtatgagacatttagctttgagtgag

SEQ ID NO: 415076 - DNA, 122 bp, Homo sapiens
ggcggccgagggaagtccacgcgggctctggcgcagcagcgaagctggaggcgtttgctccgctctgcccggagcaaggggcgcgcaggggaaaccgcttctagagcttcgcggggaaggga

SEQ ID NO: 415077 - DNA, 122 bp, Homo sapiens
tcttctgagtgaggctgccttcccaatttttctgtttttatgaatattatcactattctccgagttgcccagaagcaaactttgagttctctgagatttctgtcttctttatctcttaaatc

SEQ ID NO: 415078 - DNA, 122 bp, Homo sapiens
acacggcccttcccctgcaacatctgtggcaaaatgttcacgcagcgcggcaccatgacgcgtcacatgcggagccacctgggcctgaagcccttcgcctgcgatgagtgtggcatgcgctt

SEQ ID NO: 415079 - DNA, 122 bp, Homo sapiens
ggacaggaagtgtggtgactcaacacacgttaatatgtaatttgctgatgccagggcttccgcttagagaaagttttcataagcataaccccttgcctgtgagtgcctctgaaagcactttc

SEQ ID NO: 415080 - DNA, 122 bp, Homo sapiens
taagttttacacaattttttaaacttaccttgtgatctttctcctctgcaactttgctaacgtagttcccatgcctctatctggacttcacacttctgtgccccctggaaataccactcccc

SEQ ID NO: 415081 - DNA, 122 bp, Homo sapiens
cgccccgcagggctgggcctccaggcgccaggagaggcgcagcaggttccccatcccccccggcaaagcgcattcacagcccgcctctccgtgggctgaatgaaggaggaagacagctgttt

SEQ ID NO: 415082 - DNA, 122 bp, Homo sapiens
ggccgcatctggagaggtgcccagtatttgtgaggcagagaaggggatgcactcccgcgacgacaaacaagtgcgtgtgtgcggggctgtgtttgctcggctcatttctgagtgctcccaag

SEQ ID NO: 415083 - DNA, 122 bp, Homo sapiens
cgtcccccatccagacatgcccatttgattcctcttctacccacacacccagaaagacagcgcgctttcctcccggcatccgccccctctttttgcctaaaacattccctagggaggagcga

SEQ ID NO: 415084 - DNA, 122 bp, Homo sapiens
ctcaggcctggctgagatgtagaccctgagcctcatccagaaaatgccacgacagctccccgaacccggccactggcacggaggggcacggtgaggccggactgcagggccaccgtggggtg

SEQ ID NO: 415085 - DNA, 122 bp, Homo sapiens
tctgtgacctagaaggatgtgacaggaaggtaaaggacagtacctgcatgtcagcgctgtcgcacactctgagaagggcagtgggagcccagtgaagtcaacctggaaacatctgtgcacat

SEQ ID NO: 415086 - DNA, 122 bp, Homo sapiens
ttgacgccgctgaagtttccggaccgggccagtttggaattgacgaaagcagcctccgcccggtcgagccagtctctcggttttctcggcggcttcttgaggatgaggcatttctaggtttt

SEQ ID NO: 415087 - DNA, 122 bp, Homo sapiens
gggaaagaatcctgtaagatttgagaagaaggattctaacaaaagaacaaggggcagatgcggaagtgggggtgaaaacctggctgaagtaaactgtaagcaacatttgctttattatgctg

SEQ ID NO: 415088 - DNA, 122 bp, Homo sapiens
gctccgaggcctcaaaaccataatcgggtctcaacagactctgggactttatacgtcgcccggtgtttggcactgagcccactatggtttggggactactttatctcggcggagtgttacgt

SEQ ID NO: 415089 - DNA, 122 bp, Homo sapiens
gaacccaccaattccggacacattgggaacttagagcagtgcttgggacatggttatcagcgtcagatatttccttaaactagcgtgaagtcgactttaaccttccagcagtgtgagtgagg

SEQ ID NO: 415090 - DNA, 122 bp, Homo sapiens
gacaactgcgacccagagcaccacagggtgtcctagagccacctgggcgtagaataatgacgtataaggatgtggaggccaccaattggctgcgctgtgcgaagacggacaggtaggcgggg

SEQ ID NO: 415091 - DNA, 122 bp, Homo sapiens
ttcgatccatctcctttctactgtagcggagactacaagtcccaggatgccccgctagcccgtgaccggctaggaaataaagagccttctctccgcggtaggggcgctgttggatgtgctga

SEQ ID NO: 415092 - DNA, 122 bp, Homo sapiens
aaatatataaaataaggccagaggctgcactggaggccacttcccagtggtgcactgctgcgctgggtgtccctatgcagctagatacatgttaactgcatagagtaccataaaggagccca

SEQ ID NO: 415093 - DNA, 122 bp, Homo sapiens
agcaccttcctgcttccaacctccggttatctgtaaatacccaagtcctctaatttaggacgcaggtcatgggaagacgctggttcttagggcagaagtgagctcacattcccagcattttt

SEQ ID NO: 415094 - DNA, 122 bp, Homo sapiens
atatatatatatatatatataaaattttttttggctcctgctaaaattagcagggctcgccgcgcgcctgtgtgccagtgtgtgcgagtgtgtgtgcgtgcgggcgtgtgtgtgtgaatgtg

SEQ ID NO: 415095 - DNA, 122 bp, Homo sapiens
gaggttctgcgcggttggcagagtgctggcaggacacaggggttgcccaggctacagatccgggttcaggcccagccgtggggactgttcacctctgagagggcagccctgccccgcggccc

SEQ ID NO: 415096 - DNA, 122 bp, Homo sapiens
aagttggtgcattttgctttttcatcctcaaaaagtttagaccaggttccagatttcttgcggcggcgagacacctcgccaggagagcaccgcactatgcacaagcctttgctggacttcca

SEQ ID NO: 415097 - DNA, 122 bp, Homo sapiens
gacagcctcccgccgtgcgctgtctgggattggcctgctggtgccaggccaccattggtccggacgtcctgggaggcgggccaaggctcggatcctagttttgattggccgttgtgcaaacc

SEQ ID NO: 415098 - DNA, 122 bp, Homo sapiens
tgagaggaacatcatcccgactgaggggagggttcaacactaggtgttttggggtaaccacgtaaagcattttgcattgtgtctctaggtaaaaggaagagtgatgagaaaaatattggagt

SEQ ID NO: 415099 - DNA, 122 bp, Homo sapiens
aggtgtgcaaaggctgagggaagcaaattctcatgtccaagttgttgcaattgatcagtgcggtagagaagaagccgtagtacactccttgggtaacccttaggtaacccatgctcttactt

SEQ ID NO: 415100 - DNA, 122 bp, Homo sapiens
cgcgggcgccggggcctccagggcgagggggctggggccggggctggagcagccggaggacgcggcggagacggcagggctgagctgcacggccgtggtgtcctgtgccgtgggctcgctgc

SEQ ID NO: 415101 - DNA, 122 bp, Homo sapiens
tgcctccgggcccggggagacctttccatctgcaaataacactggagaattcagactaatcggttcagcttccctgaggcaaaggggaaaaaaaaatgtttcttcaaaggaaaaggattaag

SEQ ID NO: 415102 - DNA, 122 bp, Homo sapiens
gcgagcgggaggacgagcaagcaccaggctggggggcctctcccgggaggggtgccgtggcgcctcgctcgtgttggtgcagttttatttcttgcggtgcagtgtgttggtgggtgctcatc

SEQ ID NO: 415103 - DNA, 122 bp, Homo sapiens
tggaccatccttccaaggggagttccgccctgagtcagggaggcgaaggtttgctgtcagcgcgtcagcagagaccccagcccacaggaaaggctcggagggggtgggcagcctgcctgaca

SEQ ID NO: 415104 - DNA, 122 bp, Homo sapiens
aaatctgtaagacattaaacaatcagctttgcattacatctttcctgagctttacctctccggaacttccttatagttaactgacactatattttgtgacttgacttctgtgggagctgagt

SEQ ID NO: 415105 - DNA, 122 bp, Homo sapiens
acagcccgggccgaagtgacaggtccacccctagtgactccaacaggtgaggagcacccccgacccgcctccctcggcactaaagcgggacgatagggcgcagggctccacccggaagcctc

SEQ ID NO: 415106 - DNA, 122 bp, Homo sapiens
tgagctctgccgccacgcccctcacctgcccgggctccccgttgccccctcacctgtctccgccctgtgccgcgcctcacctgcttgggctccccattacccaatcacctgtccctgccccg

SEQ ID NO: 415107 - DNA, 122 bp, Homo sapiens
gggagctaaaatctgccatttcgcttagcagagaccccagttcacaatagaagaggtggccgccgacagcctagaaatgcggcctctggcttcatgaaaggtgactttgaaaagctgcattt

SEQ ID NO: 415108 - DNA, 122 bp, Homo sapiens
aagataaaggtcaaatacttcataacgctcaaacttctgccaaatggggttggaaagattcgtgattccatagcacacagggaaggtgctgaatgctctacctactgctgtcctggctcaac

SEQ ID NO: 415109 - DNA, 122 bp, Homo sapiens
cgcccagcaaggacttcaggcacgtaggcctaagatgatgggggctcttcccaaccagtgcgcacaggcagctccagcgcgaccccacttcctctcccgtcggttcccgagcactctcatct

SEQ ID NO: 415110 - DNA, 122 bp, Homo sapiens
accgcacgctccccttccgcagttcctgacggcatccgctgtatgcagatgctacagaaacgcgtgttcccttcccagtgcacccggcggtaacgctgcaagaattttaagtgctgggtccc

SEQ ID NO: 415111 - DNA, 122 bp, Homo sapiens
tcccctcgtgctgacagacgactcagcgtgtctccccagagctgctctgcgaactgcacccgtggaggagcccatactttctgaacagccgctttgatctacttaagcactgccgtgttttc

SEQ ID NO: 415112 - DNA, 122 bp, Homo sapiens
ggagagggaagatcagagcagtaccaatctgctgctccttgccccaaaactggcaagaggcgcctttcctcagccagaaaggcctcttctccaccagctgtgtcctgcaatcaactgcagct

SEQ ID NO: 415113 - DNA, 122 bp, Homo sapiens
agccaaggggcgctacttcctcaacgagggcgaggagggccctgaccaagatgcgctctacgagaagtaccagctcaccagccagcatgggccgctgctgctcacgctcctgctggtggccg

SEQ ID NO: 415114 - DNA, 122 bp, Homo sapiens
gttatctactccagtacttgtggctgggtcggcccgtggctcagctccagcggaacgggacgtgacgagggcggtcgcctccctccttcaccagcggtttgtggaactcccgcccggctcgg

SEQ ID NO: 415115 - DNA, 122 bp, Homo sapiens
cgggtgtggtctgcatgaccttcggcaagtcgcttgacatcttccaggccccaattcctgcgccctcacaggaggcagggggccatcccacaggctttgaggtcggtcgagcacccagcggg

SEQ ID NO: 415116 - DNA, 122 bp, Homo sapiens
gagaaagaagggcctgtggggaccagggtcaaggcacccatggccactctagagggactgcggcccgtgcaggcgcaatggccactccagagggactgcggcccgtgcaggcgccatggcca

SEQ ID NO: 415117 - DNA, 122 bp, Homo sapiens
cagttcccagagcgagagcgaaagccggaggggcctgtgttttcctgcggggttggggggcggggggtgcccgccccgcgccgccccgcccagccccagcccgctcactcccggccaatcct

SEQ ID NO: 415118 - DNA, 122 bp, Homo sapiens
aaaaactaaagtctgccacagggactgagtggcagagatatttatgcttatcagaggtggcgggcaggcatcaagaaattttgagaaagtgaattaaagtcttataaatactttagtcataa

SEQ ID NO: 415119 - DNA, 122 bp, Homo sapiens
ttttgcactatttccttgacaactacacgattgccaaaaatatggtcatgcagctcttcccgacccttgtcgtgctttgtcattctccggttcaggcgggtgcattgatctgctttcgctga

SEQ ID NO: 415120 - DNA, 122 bp, Homo sapiens
ttgccaggcctcaactctgaccacagtcccagtgtatttcatgggtgtgaggtctgtttccggtgtcttagtctatcttctacttccatagagcttagcagttaggagcatgtgcactcaga

SEQ ID NO: 415121 - DNA, 122 bp, Homo sapiens
ttacacataaacaatcatagtgtagccaggatcccaacgagctccaattccagatcggggcgagaatctagctgtaatctcagaggaagaaagcagcaagcatcgctcaggaggcctcagag

SEQ ID NO: 415122 - DNA, 122 bp, Homo sapiens
gtctcagggccaggaagtgatgtagaaccttctgccacccagcatggtggtgcacctctgcgtccagagtcatcagaagatgctggacctttagcaggtcaacaggagacttcagttcaatc

SEQ ID NO: 415123 - DNA, 122 bp, Homo sapiens
cggcaggagagctagggatgttctcctgctatgctgatgctactcacagcaaaactccttcggtgttatgctaacaagtttctgtctcaactccatctttccgcacactcctctccctgcta

SEQ ID NO: 415124 - DNA, 122 bp, Homo sapiens
gagttgtaacctgtctgcacttccaaccggtttgggaatgcaagcagcattcccaagtcccgctttcacccgcgcgctaacggctcaggttcgagtacaggacaggagggaggggagctgtg

SEQ ID NO: 415125 - DNA, 122 bp, Homo sapiens
aggatgacctgtagtgatgattagtagcaagaggaatagcatcttctgtagcaaagtggtcggtagccacagcagctagagctgtatccacagccatatccacagccagagccgtatccaca

SEQ ID NO: 415126 - DNA, 122 bp, Homo sapiens
gagggaagaaataagtgttggtgaggatgtagagacattagaacctttatatgcaatgttcgtgggattgtaaaatgtgtaactgctatgggaaacagtacggcagttcctcaaaaaatcag

SEQ ID NO: 415127 - DNA, 122 bp, Homo sapiens
gacctagactgcctcccccaacccccatcacgaaggagagtggattgaccccaacactcacgctgctgccgctacccccggttcccccaggaccctcaacgccctggtcactcttctgttcc

SEQ ID NO: 415128 - DNA, 122 bp, Homo sapiens
gtgaacacacgtggagaggcagtgtagaaccccccagcctggctctatttggccgctggccgagtcttctccatttccatcctcccgccccgccccagctgagccacccacttctcctctcc

SEQ ID NO: 415129 - DNA, 122 bp, Homo sapiens
caggaaatccatagaacgtgaacaataaggaaccgttcaggatggccaaaccgccgtctgcgctgttttctcgccagggctcaggcctgggaacggaagaggttaaaatccagtggcttgtg

SEQ ID NO: 415130 - DNA, 122 bp, Homo sapiens
aagaaacccccaaagtaaccattaatcttccactgcattaaagtggatcacgatgggtctcgggggttcgcccgattccccacacacagtttttgttctgtagccactcggggagccctcgt

SEQ ID NO: 415131 - DNA, 122 bp, Homo sapiens
gcaggacttcatccagctccctggtgagaggtaacaatgcagcagggtttacagttccagcgctttgcagctttactgtgggtcatctaaaaatatggcttgatatctacccagtcagcctg

SEQ ID NO: 415132 - DNA, 122 bp, Homo sapiens
aacagaaaacactccatctgctaaacaatatctcgactgcaaagcttctcttactgttggcggatagataatgacatagcccagtcattatcaccgtggcaacagtgaccagaaactatcag

SEQ ID NO: 415133 - DNA, 122 bp, Homo sapiens
ggctgaatgcttgggcaagtgacacgtggttttcctactgtcgccccaaccttaaaagaacgaatccaggcggggcattaggtatttgtttccatatttcccactgttttgttaaccttgtg

SEQ ID NO: 415134 - DNA, 122 bp, Homo sapiens
aagtgattggttaggagcgaaaatgctctcgccctctgccacctcagccaatgacgtaggcggaggtagagaagacgcccctgacttggacactccctaccgagcacacggggaagacgccc

SEQ ID NO: 415135 - DNA, 122 bp, Homo sapiens
ggtgggaacacgggtgggggtggggaggccagggcccccagatctcaccacctccctcagcgtcctctggcccagcgccccgaagcccgacccccatcagcccccggcccgcagggtccccg

SEQ ID NO: 415136 - DNA, 122 bp, Homo sapiens
tttcctgagggatgatcagtatcagcattgtttggtatatttacatattttgataattatcgggtatgttgcaagctatgatgaaagcaaaacatacagctggaaagacgatcattggtcag

SEQ ID NO: 415137 - DNA, 122 bp, Homo sapiens
acaaaaaacacaagaaactcctggcaatttgaattatttccgctcctgcacctcagtttccgcctctgtaaaatgggctcgcgctgccttaaccctcctccgcccgcccactctgacaccac

SEQ ID NO: 415138 - DNA, 122 bp, Homo sapiens
gttgccccaacagagcccacctgagagagacattgttaacatatgtcctcttctccctttcggcagtgacggcccccagctccccgctgagccccccggtgtcccccgtgttctccccaccg

SEQ ID NO: 415139 - DNA, 122 bp, Homo sapiens
ggatgccgaggtactgcaggaaagaggaaggcgggcctggagcgggagagatggcggtggcgcctggcgagcgcagagttgagaccagagccacgtgccctgactcccctcctagcgctctc

SEQ ID NO: 415140 - DNA, 122 bp, Homo sapiens
tggctcgaagcagtctcgggccccaggggttcttggcagacaagccgggcccttgtctcacgctgcttctcaggctgctgctctcaaatgcaccgttcacctgcatctccgggtttgcgggg

SEQ ID NO: 415141 - DNA, 122 bp, Homo sapiens
acttcttacagaaagtccgtcgggttttagggacgttaaccatgcttgcgtgagcgctatcggcacggaaagaaagaagccgcgccgcaaacggaagtataccttttttttttttttttttt

SEQ ID NO: 415142 - DNA, 122 bp, Homo sapiens
tccttcaggttcattcctggctggccagtgcccaagactggcgagactacgattcccagacgcccaagcgagtcgccggtcacgtggccgcaaggacgctgggccggtgggcgggggccggc

SEQ ID NO: 415143 - DNA, 122 bp, Homo sapiens
cccggggctggtgaagggtgtgttggcagcattgccaacagctggaacagggttgggggacgcggcaggtataggttgcggtggctctgtggttttcctctttatttgtccctcctgctggg

SEQ ID NO: 415144 - DNA, 122 bp, Homo sapiens
aactgagaggtgggaatgagggcgatttagaagaaagtcctaaaagtacccaccttcccccgattctcattacacaaagcgaccaaatgcaggaggcccactggttcctaagcagaaatggc

SEQ ID NO: 415145 - DNA, 122 bp, Homo sapiens
gcaggcttgagcagcctctgagtcacctttctatggatgtccaattgctctagccccaagcgttgtgtgttttactattggctcccctcctccccaccaggattttggctttccagtaattc

SEQ ID NO: 415146 - DNA, 122 bp, Homo sapiens
gagtacacgtgaatatgaaaagggactctatgctctcaagaccaaaaaagaaatcctctgcgccgcccggctacattgcgcctggtgggacaatgtacacgacccctcccccgccgagtccc

SEQ ID NO: 415147 - DNA, 122 bp, Homo sapiens
gcggagggaaggcagagggcacttggggcatgggcgacatgggtcgtggcgggcacccggcgcacacggcagccgggcgcaggccagaagcccccccgcgtcgccgggccgcccagtccggg

SEQ ID NO: 415148 - DNA, 122 bp, Homo sapiens
gtttatgacgacacagagcagccttatagtcagcctcatttctgaactctacaaagccttcgccagttgctttcccattgggtccataagctatataaatactatcttccacaatatccagc

SEQ ID NO: 415149 - DNA, 122 bp, Homo sapiens
gcctctggccctggctgctgctgtgcgtcagcaggtgcatcttcagctggtgcttcttggcgaaggtttgcccgcacagcgcctcggggcacaggtacagcaccacgcctggaccagagccc

SEQ ID NO: 415150 - DNA, 122 bp, Homo sapiens
tgtcccactgaccacatggcagtctggtgaagtttatggacccctctctcagtataatggcgggtaaatatataaataaaatatatatgctggaaagaaaactaatactggtgagatgattc

SEQ ID NO: 415151 - DNA, 122 bp, Homo sapiens
tcttttgatcaacatttgattctctatttccttcttagcatatagatagctgcttcaggtcgtgaaaaaatacatttagtgaaatgaaacatagtagatatgttcaccaagaaactaaaaag

SEQ ID NO: 415152 - DNA, 122 bp, Homo sapiens
gcgcaacctcgcgcccaacctacggcggtcccagcccgcggaccccgggggtccgcccggcgtccacatctcccgggcagggtcccggcctcccgaaccccacgagcggcgccggaggccca

SEQ ID NO: 415153 - DNA, 122 bp, Homo sapiens
cattgctaaagctggcctgtgggaacactgagcttaatcagtggctactcagtactgtcacggggacaattgccatgggccccttctttctgacacttctctcctatttctacattatcact

SEQ ID NO: 415154 - DNA, 122 bp, Homo sapiens
accaagggcccccggggagccaactcccgcctctttcttcattggggaccagaatggggacgctgtgttatctaggaaaccgcttgcggctccaggggatggggagggcctagggcagacag

SEQ ID NO: 415155 - DNA, 122 bp, Homo sapiens
caaagccgagcaaacggactatttgtgaaaatgccatcctggctcaagtctgattaagaccgggggtccccaggccgtttgatcttcgctcatcaaagagagtctttaaacaagcttcattt

SEQ ID NO: 415156 - DNA, 122 bp, Homo sapiens
ttgcatgccagcttgagttctgggtgggcgtggtttggcggcccccacactctgagctgtcggctgccccggccagcccgggcagtgaggggcttagcaaccggaccagcagctgcaggggg

SEQ ID NO: 415157 - DNA, 122 bp, Homo sapiens
caagaatagaaaatgtgtcagagcagattaatatgagtgttgatgccctaagacaacatgcgttcatttgcagaccattagtccagagtgtgacgataacaaatgtgacacatgatatgagt

SEQ ID NO: 415158 - DNA, 122 bp, Homo sapiens
cttccatctctctgaagcaacttactgatgggccctgccagccaatcacagccagaataacgtatgatgtcaccagcagccaatcagagctcctcgtcagcatatgcagaattctgtcattt

SEQ ID NO: 415159 - DNA, 122 bp, Homo sapiens
acaaaatgctcataatccatacagttcagaagttgtcatcaaaagcacttacacaagtcacgtattgtagtttattagaatcaacttggtctgtgctttttgttttgcttttaaataaaagg

SEQ ID NO: 415160 - DNA, 122 bp, Homo sapiens
tgaactcactacagaggacgacactgataaggcacacccaggaagcccccgcgatgggaccgaagcccaggcagacatgacgcagaggccacatcctgaagcaccacgccgtgccctcacag

SEQ ID NO: 415161 - DNA, 122 bp, Homo sapiens
agcgggacagagagcgccggcggccgcagcgcgagtgagctgggtgtgcgaggccgccgccgcccactgctgcgcggcccagcagctcccgccccactccgtcccaggatcagcgccgaccc

SEQ ID NO: 415162 - DNA, 122 bp, Homo sapiens
gcaatggcagtaagggaggttcctgagtagggtgagtgtggcgctgagtgcaccgcacaccgtcctgcccaccgttagaagctgcaaatgagagagtacataagatgagctcaacataagta

SEQ ID NO: 415163 - DNA, 122 bp, Homo sapiens
cgaaggttcagcaggggagagacaggtcaactggacattttcagtagagtaccctggccacggggtaaaggctgaacctatagaaggacaagtgtggaggcagagactgtagttaggaggct

SEQ ID NO: 415164 - DNA, 122 bp, Homo sapiens
gagggactaaagctggtactgtttcttgagaacctgtcctgtctctggccccatgcccaccgactttcctggaacctctacctgggtctccgagggcctggcagcagctgaaagggagagct

SEQ ID NO: 415165 - DNA, 122 bp, Homo sapiens
cggagcgtcccgccctctgcgcgtgctcggtttggaacttaggctcccttgcacgcggggcggcagcatgctctgggctccctgagttgctagaacgccgtggatgacgcagggaaggaggc

SEQ ID NO: 415166 - DNA, 122 bp, Homo sapiens
agaccctcctttcagacccgccctcctgttcacagggacccatttcggagccctggctcacgctgggcgggaactgccgtgacgaattccccccaaggtgttgattatccatcccaacccag

SEQ ID NO: 415167 - DNA, 122 bp, Homo sapiens
gccaagcagcttggcgcccagcccaactgttaagggtctcatttgcatcaggcagcccagcgccggcttgtccagccctcccgatggccgtcctgggggtgcttggcgtcacccgcgtggag

SEQ ID NO: 415168 - DNA, 122 bp, Homo sapiens
cggatgtgacacgtccagaacaggcaagtcctcgcgaacagaaagcacactagtgtttgccgggggctggtgggtggggcaatggggagtgactgcttacaaggtgtgggatttccttttgg

SEQ ID NO: 415169 - DNA, 122 bp, Homo sapiens
gccaggtgtctgttctccgggtctctgggcctggaggcgggagtgtttcaaagcacttcacgctccgcggccccaccggctggctgcgctgcccgctgcggccggcaggggtagtccacgga

SEQ ID NO: 415170 - DNA, 122 bp, Homo sapiens
ccggccggctttggacggctttgccgttgccgagccagcgccgtgagctcgtgggctctgcgtctgcacatgtttgccggtgacctctgggaagtgtttcgacgaggatgggggttgagggg

SEQ ID NO: 415171 - DNA, 122 bp, Homo sapiens
ccacagccagtctcattaaagaccttataagaatgtgttgagtatatgaataaacaaatgcgtacatcaacaaatgaatacatgaatgaataaaagtactcagtggacgcatgtaaagatag

SEQ ID NO: 415172 - DNA, 122 bp, Homo sapiens
aaatggctgtgctttaatcaggagtaggccaaggctgctttctggtgcagcatgactcagcgggtttggagtgcaggcacacaaccccccacattaggtaaccatgccatgtgaggtgcatt

SEQ ID NO: 415173 - DNA, 122 bp, Homo sapiens
tttgtgtctttccgggagcacagggtgagcttggccttcaggaatgactcagaatgaatccgcctataagagccaaactaaagacgaccccccgccccagccccccaaccataacccaacgc

SEQ ID NO: 415174 - DNA, 122 bp, Homo sapiens
ttctgggaattgtagtcctgtccccttgggagcccgcctggcacctgggttgttagggctcgtgggaggactacaacccccagggtgcagtgggacaggcgttgccgggtcgcaggtcccgc

SEQ ID NO: 415175 - DNA, 122 bp, Homo sapiens
aattccctctgctccctttccgcactcgcccttcatagtgggagatcagctccaaagggccgggttgtaggctcccaaagcaccccgctcctgtgtcagtgacctcagacgtccaccccagg

SEQ ID NO: 415176 - DNA, 122 bp, Homo sapiens
ggccgccccaaagaggagacaaataaggaaggctcctgtgcatttgtcattcgacaagtacggagttgtctccaggttcaagtgtgctctatttaaaattacgtcttgttttgtgagtctgt

SEQ ID NO: 415177 - DNA, 122 bp, Homo sapiens
gaagagtgggacggacactcagcactgacacggaggccacggcagccacctgcagcgagccgccgctgcgcacagctccacaagtgagtttaaagccgggttgcacaggtggagaggacgcc

SEQ ID NO: 415178 - DNA, 122 bp, Homo sapiens
cggtagggcaagagtcccgagcctcaggtcttcctcttcaggggccaaagcagaggctggcgagtcagggtgcttgcaaagaggaagcccaggagtttccctggggttaccagagggctggg

SEQ ID NO: 415179 - DNA, 122 bp, Homo sapiens
aatgtaatgagaccttcccgtttatccggccagcgtgggcgattgtgggtgagtgaggcccgaggaagcgctgggtgcctgcgatctcccagctccggggttttctgtgcaggtgcgaagct

SEQ ID NO: 415180 - DNA, 122 bp, Homo sapiens
ctgctccttccgcagcagcagacatagggatcccgagtagccagagagcttaggtcccgccgagagctcctgccaagcgcttctctctcgactagttatcaattgagaaaaaaaggatcaga

SEQ ID NO: 415181 - DNA, 122 bp, Homo sapiens
aatttttgttcacagcctcaacacccggggcggtggatcagtccgtttattcagattccacgggacgctgcgttggcatctctgttcaacaagccctttattctaatagaaaatgaacaatg

SEQ ID NO: 415182 - DNA, 122 bp, Homo sapiens
atggaggatggggacagtaggcgctcctccacctctctgcgccgggaggctgggatgcttcgtgcgttttgctttggtgccagaagccaggaggttgcggttttgagagaggcaccgccagg

SEQ ID NO: 415183 - DNA, 122 bp, Homo sapiens
aactacacgctgcttccggttctgtaagtttaccaaagatctcgcgagacctatgtctctcggagcgagaggggcgcggagtttgagcgaggggagtaaactgggaaataaatttatggcta

SEQ ID NO: 415184 - DNA, 122 bp, Homo sapiens
agccccgcaggccggaggcagaaccaggccagaagcccgtggtgcccacactgtatgtgacggaggccgaggcccactctccagctctgcccggactctcggggccccagcccaagtgggtg

SEQ ID NO: 415185 - DNA, 122 bp, Homo sapiens
ctggagaagcaggctaatcacacaggcagttacaagtacacacagatcagaacccgtcaacgacaactgtgcagagggggaaaatacacccaagtccagagggccatgctggaggcactggt

SEQ ID NO: 415186 - DNA, 122 bp, Homo sapiens
acagcggcagcacctctctccacaaaactctcaggaagagcagccggggtccaaccgcaacgccgagctcaggaaggaatgagagaaaaacacacccatggcagggaggagagccttgtgga

SEQ ID NO: 415187 - DNA, 122 bp, Homo sapiens
ccgggggcaggcacttttgagctaaggaggaagcgggggagggaaggagggcgggaaggacgcgccacctacttcctgaatcccctgcaaaccccagaggagctcggcctgcgctgcgccac

SEQ ID NO: 415188 - DNA, 122 bp, Homo sapiens
ggcttttgtcctatgaactagaaaaacgtggcccttctcacagacacggcttggtgagcacgtagctgcttcggtgagaattcgaaaaacggtacaccttcctccatgcgatgaagcccatg

SEQ ID NO: 415189 - DNA, 122 bp, Homo sapiens
ttctatcagaagcattgagaaaaaaatttctgaaggagaaaaaagtgaaatgttactctccggtgaatggtttcacacagaaatgaatctgttgtctaacaaagatttggttttactggtgc

SEQ ID NO: 415190 - DNA, 122 bp, Homo sapiens
taaatggctccagcactgctaggcacgtttagaagtgggtcaggatctactgaagctgaacgcaggcatacgctgtgacccaccaacgctattcctagtcacacacccagaagaaacacatc

SEQ ID NO: 415191 - DNA, 122 bp, Homo sapiens
ggtaaaaacatgggctgagacaaacaaagtccatagcacacagcagtgtgagtaccaggccgagctcacatccgcaggagaggcagtccactcatatatgtctcagtggagagacggtgcac

SEQ ID NO: 415192 - DNA, 122 bp, Homo sapiens
tggggttttacataacacatcttctcacagaactttgaatgtgctgcatattagttaggtcgcattaggggtctcttcactcccacgtccacttccgcggcccagacgtgagcgcccagtgg

SEQ ID NO: 415193 - DNA, 122 bp, Homo sapiens
atgaaatgagaggcaaaagtgtcaaaaggattgtccatgttgggtgaatgacagaacttacggcaggggagaggatggcagaaatcataagatcatgaacttggcacccaatcctcctttaa

SEQ ID NO: 415194 - DNA, 122 bp, Homo sapiens
tgaaactcaatgcattaatccccgggatggaccccagtttaatccaactcactcatttcccgaaggcagaaacaagcctagagaggggaggtgagcatgccagagtcacccagccagggagg

SEQ ID NO: 415195 - DNA, 122 bp, Homo sapiens
tgacttcagtgaatctaaaaaccacctattctgattggcaataaacagatgctctttagacgttgttttcaatgctagcactctttttacaacttacatacagtctgtatttcagcttctct

SEQ ID NO: 415196 - DNA, 122 bp, Homo sapiens
ccgtctgggttggggatgccccaggggggcctttgcgcaaacgtctccactggcaacagccggtcgcttggcaacccgcacgccccaggcccctgcgccccggggagccccgagtggggcgg

SEQ ID NO: 415197 - DNA, 122 bp, Homo sapiens
ttgcgcgcgcaggaacttggatctcaaccccagggctaggtgcctcctcccgctgctttccgccagctgcggggtgtgagattaatccccgccgattagcgccaggtgtactaatccctgga

SEQ ID NO: 415198 - DNA, 122 bp, Homo sapiens
gggtccccggtgggtggcgcctggctctctgggccgagtctctggttccagtgccttctgcgcgccgggcccacaccccggaggcctgcctctcgcccccctcttctggggtgctctcgcgg

SEQ ID NO: 415199 - DNA, 122 bp, Homo sapiens
acgttgccctctttgttaccacccctggtgcggtggacacagacattgcccaaacactaacggagagggaagaggtgcggggagctcagggcgttcggggtggtgttctggtggaggggacg

SEQ ID NO: 415200 - DNA, 122 bp, Homo sapiens
ggaacccactctgtcataatgttcctcgcattacagccttagtcctgacaatctgtgagccgctattaggatcctcattttataaactaggaaaccaaagcatggagctatcccattccatg

SEQ ID NO: 415201 - DNA, 122 bp, Homo sapiens
ctcctggatcctgcccccgccctccctagacatgaagctgaagtgtggccctttaagagacgagcgggacattggggccaaaaagtctgattccgggcacagagaactgatggctagattcc

SEQ ID NO: 415202 - DNA, 122 bp, Homo sapiens
ccttcgtcttccaggtaaaatgaatgttccttcatccatcatccgcagagtaccctcaggcgtgcgtagaatctgctgatgaaacctattagcgccgactgggcagctttgtggagccaccc

SEQ ID NO: 415203 - DNA, 122 bp, Homo sapiens
gggcagctcccaggagcaaccgtgaactgggggggtccaggcctgagccccaggtagtgtcgctgggaaggggcctctgtggagggccccggttttggggacacagcaccagcacatcaggg

SEQ ID NO: 415204 - DNA, 122 bp, Homo sapiens
gccgcagcgtcggaggaggaaagcatttaagaatagcacaaagccttaggctcgaggaagcgtgactgcttacgtgttgaaaataaaggttctgtaagtcccaccgcgggtgcatattgaaa

SEQ ID NO: 415205 - DNA, 122 bp, Homo sapiens
atttgaaagggccatagcgacagaagtcgatctctaagaaggcataaactcggcctgagacgtgggggggagacactgcagagaagaggccaagttccagcgcagaaggggggttccgcggg

SEQ ID NO: 415206 - DNA, 122 bp, Homo sapiens
ggattacaggcgtgagccaccgcacccggccaatttttcctttttttaaaaaaaaattatcgtagtaaaaaacatgtaattctggactgctccccatagggttaccacctcttagaaattgt

SEQ ID NO: 415207 - DNA, 122 bp, Homo sapiens
tggggagcgacagcagctaaacaacccaagcccataaagccttctaattgctccgacccacgtggtcacagtctccccacttatataaaaggcctacagaggtgcaagtagtgaacgcctga

SEQ ID NO: 415208 - DNA, 122 bp, Homo sapiens
tggagatttcccggaaaacagtgagcatggagtgccggactctgtcagccagagctgggacgtcatctggtgtcagcccttccgtgggcactgggggcagcacccgcacctgacattgtcct

SEQ ID NO: 415209 - DNA, 122 bp, Homo sapiens
ggaggcgggacaaggcttgcttgcgtcctccgtagattggcaggtcactgggacggccagcgcgtgcgcactggcctgtcagcggccggtggaccatggaggccgcaaggcccttcgcccgg

SEQ ID NO: 415210 - DNA, 122 bp, Homo sapiens
cggtcagactcaattcatcctaaagttcctttgaggaactccttaaaaggagacggaaagcggaaagcaaccgcctgtaaccaagtgtagacatcagtcaatcaaagttcgctgaactgaga

SEQ ID NO: 415211 - DNA, 122 bp, Homo sapiens
tccttcggaatgaatttaatacccttgacaaaatatatattacagacccgacatcatcaccgccctcactctgacaggaagaggaggaagataagcgtgtgttctgttcttttaaaattttt

SEQ ID NO: 415212 - DNA, 122 bp, Homo sapiens
ctgatcccggccttcccatgagcctctggggcaggctccaaggcgagcgacggaagcagccgctcttagtttccggcaacacgacagcggctgccgagcgacccggaagtattcccattttg

SEQ ID NO: 415213 - DNA, 122 bp, Homo sapiens
agctatcatcctgcctcagcctcctgagtagctgggactacaggtacctgccaccaggcccggctcattttttaatttgtttgtagagatgaggtcttccaatgttgcctgggctggtcttg

SEQ ID NO: 415214 - DNA, 122 bp, Homo sapiens
actccttgcttaggctggcgacgaaaatgcaaggctcagtccagccccaaaaattggttccggtgaatttagggaggctcagggcatttgcgcgaagaaacagaaacctatgttggggcaag

SEQ ID NO: 415215 - DNA, 122 bp, Homo sapiens
cagactcctccccattgaacaaggcgcaactttctgtggctcgaccccgtttccccggtgcgcatgtgggccttattctgaaagaatcggctgggaaagggcgggcaaacaggggcagttct

SEQ ID NO: 415216 - DNA, 122 bp, Homo sapiens
caggcattagacgaggctgcctgaggccggaagcatagctttggccaggacagcaccctccggcagaaagcaatgctcagagaagaatgtggctggaacccagcagccacgaacaccccaag

SEQ ID NO: 415217 - DNA, 122 bp, Homo sapiens
ctctctgggttctgctcagtgtctgaagtgatggaaagaccccagggttggtggctgtagcggcccccaggggtggcagaaccctttgggaggccaagtgttctttcccaaagctgcgcggg

SEQ ID NO: 415218 - DNA, 122 bp, Homo sapiens
agagcaactgagcttgctgcctagcggtgccacttccctgctctgcgctaaggctatcgtcgaaggcccagagacaccttgaccctggaaacccaatccagcacgtcctgcctccccacaaa

SEQ ID NO: 415219 - DNA, 122 bp, Homo sapiens
tccgcggcgacggtagcagccgcagggccaaagccggcttccgtgaggtacgtctacttccggttaacgaaccagggggctggcaatctcttccggttcgtcttggcaacgtgtgtgaaggg

SEQ ID NO: 415220 - DNA, 122 bp, Homo sapiens
ctcttctcctaccttagttcctagtcacaaactctggggttctcttggcttttccatgcacgtggattggggcctcagggagcggacgtgtaactggggaatccccaagacccctgggcgcg

SEQ ID NO: 415221 - DNA, 122 bp, Homo sapiens
aaaagaccaactatctttttttgacttgactagcattccttctggaaggacttggataatcgccattttccacgctgatgatccaagcatttgtttatgctttttgctatttggtccttgaa

SEQ ID NO: 415222 - DNA, 122 bp, Homo sapiens
ggccagagagagccaattggggtacgtgggccgcggtcgggaggcagagtcaggggcgttcgtgcgggtaccccagggctgaagcccgctggatccggtgggtcagggcatagggcggactc

SEQ ID NO: 415223 - DNA, 122 bp, Homo sapiens
ttctgcggcggccgcgtctcctgtgctgaggcggatgccttctctctagtcttgcagaggcgaagccggttacccggcccctcccagcagaggtgccagtctagggggagaatggcagcaga

SEQ ID NO: 415224 - DNA, 122 bp, Homo sapiens
cctcctcattgtagactctctgcactctcttttttctgtctgtccgtcagttcacccgtccgtccatctgtcccagggcgtggtttccatctgtgttaaccatgagtcctcctcactgtaga

SEQ ID NO: 415225 - DNA, 122 bp, Homo sapiens
aaaaagagaaatgtgggtcgtgttcgctctgggttctcgttaagtgcaagcatacagaggcgccgagaccccgcggctcgccctcgccgcttcctccacaggagccgggcggagctcccggc

SEQ ID NO: 415226 - DNA, 122 bp, Homo sapiens
tagggtggtgttggtccttctaggggtgctcagtgtctgtgcagccagcggccatgggtccgtagcggagagggaggccggcggggaggcggagtgggcggaaccgtgggatggcgcggttt

SEQ ID NO: 415227 - DNA, 122 bp, Homo sapiens
ttcagaatttttattgatgtttccttatgtaagcatgactgactgaatcatcgcccatgtcgctcagtctttagctattctcccctctctggatattgaggttatatcactaggctcaaagc

SEQ ID NO: 415228 - DNA, 122 bp, Homo sapiens
aggggcccccggtgcacccatggacttgcagtgccacgacgccaaccgggactacgtcatcgtgacctggaagccgcccaacaccaccactgagagccccgtcatgggctattttgtggacc

SEQ ID NO: 415229 - DNA, 122 bp, Homo sapiens
ttgaagataagaagcacagtggctggctgtcagaagctcacaacaactgagagcaatcatcgaaactgatcctcttttaactacacgagaagttgccgaggaactcggcaacttcaaccatt

SEQ ID NO: 415230 - DNA, 122 bp, Homo sapiens
ggcagtgagataccacaatgcaggcaaggaagacgggatgggccccaatcgggaagcacgcgccaccagctctggagagaaccgtctgaggagacgcgggggagagtttgggtcacaggagc

SEQ ID NO: 415231 - DNA, 122 bp, Homo sapiens
tacctgtgaaaaggaatcagattagtacctacatcataggattgatctgaggattaaatgcgttagtaaacataaagcacttagaacagtgcctggcatatattaagtgccacttaattgtt

SEQ ID NO: 415232 - DNA, 122 bp, Homo sapiens
gttaataggaaaggcagcattaattagctagcgctagcacaattagcttcctcctcttaccgcctagcatctaactggataatgagtctctctctgtccagagggcaggcaggacaaagggg

SEQ ID NO: 415233 - DNA, 122 bp, Homo sapiens
agcagctcagcgtggtgccctcatcgggggagtcccaggtaccccgtccccataggcaagcgctgcagggcccagcttccacgtgggcatcccggctctgcccagctggacctgcgactggc

SEQ ID NO: 415234 - DNA, 122 bp, Homo sapiens
ttccaccctagcctcccaagtagctgggactacaggcacgtaccaccacgcccagcttaacgttataagaatatgtcaaactggctggatacagtggttcgcatctgcaaccccagcacttt

SEQ ID NO: 415235 - DNA, 122 bp, Homo sapiens
caggtgaacaggccccagaacccggctccctgaccctggccataatgcagagctgcctggcgcacctcagaccactccctggccctctggtgggcacgccggggtgcagacccctcgccccg

SEQ ID NO: 415236 - DNA, 122 bp, Homo sapiens
cgaatggactctaagggtcccggagccggagcagctgcggagccgcagcagctgcaaccccgaagcccacctagctgctctacgtgcgctcccgccctggaggagtgggattggttctttca

SEQ ID NO: 415237 - DNA, 122 bp, Homo sapiens
ccagtggccggctgggaagatggtgcatcctgggcctttcacgtgtgggtgtccgggtggcgccgtgcgtgaccctgtgcagccgtgtctgcgtgtgcgcaggtgtccgggtggcgccatgc

SEQ ID NO: 415238 - DNA, 122 bp, Homo sapiens
gcctttgtctgtctcctgcctatataatttttacattaggacaatgaggcaaattgaagtcgtagatggtaacagtgacagtactgtctacttcttgtagacagtaacagtgaatactgtga

SEQ ID NO: 415239 - DNA, 122 bp, Homo sapiens
ttctgtaagttcagaagcatgttctgcatgacacacgacaatcaacctgcgtggaggtggcgaccacagtgatctgggagcgggtcgtgagaaagctgcagaagatttcaggcgctactgct

SEQ ID NO: 415240 - DNA, 122 bp, Homo sapiens
aagacctatccaatgaaaaccgctgccaggggggcatttgaactccgtcgcttgctgtctcgctgtcccctctctgccccgcgcacctcgctccccctcccggccggcgctcgcagtggcgc

SEQ ID NO: 415241 - DNA, 122 bp, Homo sapiens
cccccttgggcctcctgaccctcaattagaagtgaaaacacccacctttgcagtaaatctcgccatccttgtctgccagggtggttgactcaaggcctttgccacacttggcacatcgaaag

SEQ ID NO: 415242 - DNA, 122 bp, Homo sapiens
agccatcgtctccggcccagggaaagccatcgtctccggcccagggaaagccatcgtctccggcccagggaaagccatcatctctagcctagggaaagccatcgtctgtagcctagggaaag

SEQ ID NO: 415243 - DNA, 122 bp, Homo sapiens
agccagagaggccaacccacaggcaggattcaatcaagacacaggccgaggtgggtggatcgcctgaggtcagtggttcgagatcagctgtccgacatggtgaaaccctgtctctactaaaa

SEQ ID NO: 415244 - DNA, 122 bp, Homo sapiens
tgtaactgatgatagatagactacttttatggctcctcccatgtccattaaaactaaaaccgtgtgtgattatgtttccttgaatcattaccacttttttcttcctaagcacattaacttcc

SEQ ID NO: 415245 - DNA, 122 bp, Homo sapiens
ccagacaggacattaaaagcctgtcctgagctgctcactcttgcctgagaggtgtgccttcgagatagttgacttttacaacacatggatcaatctcgttttgtaaaatgtgatagcagccc

SEQ ID NO: 415246 - DNA, 122 bp, Homo sapiens
cagagaggctgacagagccatcggaatggtggcgcagggccgagagccacctctgcccctcggccttctgagagcggccccctgggccaccccggagttcccactccacctccaggccccca

SEQ ID NO: 415247 - DNA, 122 bp, Homo sapiens
gccaacagaataatgcacgtcgattgggcagctccaagggacaacccactaccgcttgcccgcccaccacccacttcccgcgcagttccaaaccgcgaccagagagtctggcgccagctgcc

SEQ ID NO: 415248 - DNA, 122 bp, Homo sapiens
taggagactgcctactgcctaacgtgtgccttttgacctaacttcacttgtgttaccttacgcatgtcatttaactttgttgtcattatcttatatgagatcaattactaagtgatatctac

SEQ ID NO: 415249 - DNA, 122 bp, Homo sapiens
agccggggaaactgtccagggaggcatcctctgcgatgaaggcggggcctcggcgtggcccgttccgcgctctgtccagccctggagaagccccaccctcaccgagctcgaaataccccctc

SEQ ID NO: 415250 - DNA, 122 bp, Homo sapiens
gaagaccttacaacaggtggacaggatgctggctgaggttggccgtgtcctgcaggtgggcggtcgctatctctgcatctccctggctcaggctcacatcctgaagaaagcagtgggccact

SEQ ID NO: 415251 - DNA, 122 bp, Homo sapiens
cctgatcagggacacggagatggctctcagatcgtccagccattctggggaggccagccccgccatcccccaaagattgcggttaaatttctccgcagcttcagatgcatttgcagttcttt

SEQ ID NO: 415252 - DNA, 122 bp, Homo sapiens
cacatgggctctttttgatgtgcaacttcagaggtcatggccactgaataacaggtacagcgattgtcagtagccattttctgctacatgtagcaggagtgccttcttcatttcagcacttg

SEQ ID NO: 415253 - DNA, 122 bp, Homo sapiens
gctctctcatgatgccggacacaggctgtgagccacaattcctagtcagccatgtgataacgagggtaaacattcattgtgataagaaatagatatatactctgggtatggatttgcctttc

SEQ ID NO: 415254 - DNA, 122 bp, Homo sapiens
gaggctttgcaccccagcccctgcccaggccactgtgagggtgggtgctggctgagcccccggggcagcaggagccaggcaggtgatgtctttgttctcggctcccacagcagagccaggtg

SEQ ID NO: 415255 - DNA, 122 bp, Homo sapiens
tatagacatatatcctctttttgttctttctctgtcagagaagccactgcaagatgctgccgaagataaccctctctttcctgcctcattcttctctcttccttcctgttttttcctagttc

SEQ ID NO: 415256 - DNA, 122 bp, Homo sapiens
cctggccgtccgatccaggttctaattcatagttacacggcgctggccgctgacttgcgacgttgtgtccctgggaccctagtccagtttaggccccatcccgcctgtaggccgtgaacccc

SEQ ID NO: 415257 - DNA, 122 bp, Homo sapiens
cggggtctgcggttgcgcagaagcccagcgactgcagaaccctgccccaggcaccctgggcgctctgccctaccggcggcgcctctcactgctcacggaacgttctggaagtttgggaaacc

SEQ ID NO: 415258 - DNA, 122 bp, Homo sapiens
atggagaagagaacctaaaggggacttaggtagggggttcagagttgccaactggcgtgacgctctgtcaggattcctattcctattcctcccacctcaggcccccttctagtcctctcagc

SEQ ID NO: 415259 - DNA, 122 bp, Homo sapiens
aaaaagagctaggccctcctgcctttgtgccttctaccatgtgagaatgcagcaacaaggcgccatctatgaagcagagagcagcattcaaccaaacactgaatctcttggcaacttaatat

SEQ ID NO: 415260 - DNA, 122 bp, Homo sapiens
atggcatcctccagcccaaggtggcttccggtccgaggtggggtcggttcgcgcgaggagcgcacagcagaggacatgggctgtgcgctcagaggaggagctggctgtccctggaggacgtc

SEQ ID NO: 415261 - DNA, 122 bp, Homo sapiens
accccaaccccagagcacagtgcggccgcctcaccgtcccccccaaggctgcagccgtgacgcgtctgtaattggatgcttcgctgttccagctcttggattattcaaattacaggattttc

SEQ ID NO: 415262 - DNA, 122 bp, Homo sapiens
aggagcccaggttctgtgctgagcaccttgagacttgttgtgtaggaagtagtgaagaatcggtaaacagaatagagaatctcaagaccaaaggaacccgtgaaaggcagttatagctgtac

SEQ ID NO: 415263 - DNA, 122 bp, Homo sapiens
cctcctcatcctccaattccctacacctttcttcattccacttactgtttccccttgtggcgcattctagcccgcggtccttccattttcccagcgtctcttcccctgcatcacctttcctc

SEQ ID NO: 415264 - DNA, 122 bp, Homo sapiens
ccgtctgcaaatttgaattcctggatttcacaacagtgagctcttcttgtgcctaccacccggcatgagcaagacaagggggtgggtggtgggagagtggggaagtgtgggaaagaaaagtg

SEQ ID NO: 415265 - DNA, 122 bp, Homo sapiens
agtacattccatgacagtaagaaacaaaaggaggaaacatgacgacaaagcctggtcctccgccagcgcggcgcttctagggtcagattatccgcacacgagtatgtaaagacaaaatccaa

SEQ ID NO: 415266 - DNA, 122 bp, Homo sapiens
tcctgaagcatgcgcagttgcctttccgtcaattcctgtcctgggcgtacgtcaagatggcggcgtctgtattaaacaccgtgctgaggcggcttcctatgctatctctcttccgaggttct

SEQ ID NO: 415267 - DNA, 122 bp, Homo sapiens
tggattgggggagtgcaaagggcactttttcagcgtcgaaaagcacacttagttgaaaaccgggggggaattggtccttctgtcacggagcgaaggctcacatcatttctgatgtctcagtc

SEQ ID NO: 415268 - DNA, 122 bp, Homo sapiens
gtgaagctgcagaccttcgtggtgagtgttactgctcataaaagcagtgcagacccaaagcgtgaaagaacaaagcttccaccacgtgaaaggagacccgagcgggttgctactgctggctc

SEQ ID NO: 415269 - DNA, 122 bp, Homo sapiens
ctcgctgccgacgctatttttccaccagctgtaggagaagcccgaagaccactggtcccccgggtagcccaagtaccactggtcctcctggctcctgacgctacgggtcttcctcgtggcgt

SEQ ID NO: 415270 - DNA, 122 bp, Homo sapiens
aaaattgggagaggagcataataaattaaacccatttcataatttgttctcatggactcccggtagttttaaataacagtccttaattaactttcctttctttcatttagtagttcactctt

SEQ ID NO: 415271 - DNA, 122 bp, Homo sapiens
tctgtgaagtttgggaaaataagatcttttcactgtactgggtcaagacctgtccctactcggcacggcccccgtgtgcttccggtatctctgcgggaggaggagcgccaagcagccgggag

SEQ ID NO: 415272 - DNA, 122 bp, Homo sapiens
ttccacctgggcttccaatgtccttctcagaggcagtcagggaccaccaaccagggagcgcgtatgagggctcagcttggttctagaacctttgtaaactcatgcttgctattttgatgatc

SEQ ID NO: 415273 - DNA, 122 bp, Homo sapiens
attgtacccaaataggttacatgatttgcacgggatcgcaaggctaataacgatagctaacgatgaatactcagtatgtgtctgccaggtactgtgtaaagtattgtacgtgcatttatatc

SEQ ID NO: 415274 - DNA, 122 bp, Homo sapiens
agttcctcgggcctggcccctttactaggtcagtctggcaggtacctcgccggcccaggacggggctggccaaacctcaccgcttgctcccgggctggcttccagaccaagggcacgcagag

SEQ ID NO: 415275 - DNA, 122 bp, Homo sapiens
ttgtagacggttgggggaaggcaagcaccatatgccttgggggcagtggccatggattctcgggatgagaggcctcggtagaactgactagcttcctcaacatgagttatttggtgccactg

SEQ ID NO: 415276 - DNA, 122 bp, Homo sapiens
tctaaaagttagagctactaagaagattaaggactaagggaccaagtgagtgtgactattcgtcggagaagaaggtcacaactaggatttactgtatttgcactcagcacagactgtgctgt

SEQ ID NO: 415277 - DNA, 122 bp, Homo sapiens
cagcaccatctggaggaaaatcgatgtctctatatttaggccagatgggagcagcgtcaacggaaccgagcggcacatgtttgtaccagtatgtgccaacagcacgcgtgacaccccacatc

SEQ ID NO: 415278 - DNA, 122 bp, Homo sapiens
actctcccagcaaacaccagctcctccccgagccaggccctggaagagaagtcaacatcacgagctgccatctggggggtggcaccaggctgtgaaggatccacagactggcatatgcagga

SEQ ID NO: 415279 - DNA, 122 bp, Homo sapiens
tttggttttgagcagggacgtggaaacgtggagaccaggtgaggtctcattattttggggcgaaaatgtgggttgctattaatactcctgcaatgggcgtgtgaatgtgttcccagaaatga

SEQ ID NO: 415280 - DNA, 122 bp, Homo sapiens
cctgggcctggccccgcctccaggtccggccccgccttcgtgccggggcccgcgcacgcgcgcctccccggcccagccttgctcccgcccccgccggtcccgcggtcccacggcgcctggtt

SEQ ID NO: 415281 - DNA, 122 bp, Homo sapiens
ctaactaattaattcttgttaacttcctttgcattgctgttcttttaatttaaccagagacggcccagagttgctactagtgtttagtctcaactagattaccccaattcattaagggctgt

SEQ ID NO: 415282 - DNA, 122 bp, Homo sapiens
tccgcagtggctgagactgcggtgtgattccgtttccctcttgcatgtgtcccgggagcccgagttgtcgaagcccaaattcaggctcaggaacctgatgtgctgttgatgccaaacactga

SEQ ID NO: 415283 - DNA, 122 bp, Homo sapiens
gttattacctgcttggctctcttccttgcatcatccaaagatcttcctctctctaccaaccgttgaaccactttttcccatcgactttgtacactgataagtagattcttgattagaacaac

SEQ ID NO: 415284 - DNA, 122 bp, Homo sapiens
tagggaaaagctaaaaccccggccttggtggatttcctatccctacccgcttccctggcccgccctctcccaacacacattcagccggttactgaggacagtaacagggtctggggacagac

SEQ ID NO: 415285 - DNA, 122 bp, Homo sapiens
cagccagctcagctcgggtcggtttcgcggaaagctgtctagacggcattgtaaacggttcggagcctgcgggccacaaagctgtggagctacggaaatcaactctgagatgcgttttaggg

SEQ ID NO: 415286 - DNA, 122 bp, Homo sapiens
gtattttagtagagacggggtttcaccatgttgggtaagatggtcttgatctccagatctcgtgatccgcccacctcggcttcccaaagtgctgggattacaggcgtgagccaccatgcccg

SEQ ID NO: 415287 - DNA, 122 bp, Homo sapiens
ctcctcccgctccgcgtcctagggggataggcaggggcaagcccaagccgcagagggggccgccaccgcctcctgcctcctcttcgtctcctccccctcccccgtctgacgctgcctcctcg

SEQ ID NO: 415288 - DNA, 122 bp, Homo sapiens
ccttaagggcctcctcgtcctcccggtctccggtcgctgccgggtctgtgcgccggtccgcgcccgccctcgctctgccatgggcgcttccagctcctccgcgctggcccgcctcggcctcc

SEQ ID NO: 415289 - DNA, 122 bp, Homo sapiens
actcccctcttggaggtggctgtgaataacccgaatgcatgtgcagcctctcgacaaactcgtgtccgcggctgtgggctacgttctcgccaatggctgtgtcttcggccaacacacctgag

SEQ ID NO: 415290 - DNA, 122 bp, Homo sapiens
gttttgggggtagggatataggaacagactgtcctgagaaagccagagtcagcgagtccccggggcgggggctcttggactgcacccgcagccggggcctgcctacggaccttggggcctta

SEQ ID NO: 415291 - DNA, 122 bp, Homo sapiens
cagaggctcccccaccaggacccgcgggagaggagaggggcgtgcctggatggcatctgccggggcagccataggtccctgtgaacctcgcttgtagaatacacctgctctcaaagccagcg

SEQ ID NO: 415292 - DNA, 122 bp, Homo sapiens
ggcagctcatcagagcctcgttagctgccttaaaagcccattttatttccgcagcgggcccgctggtgaaggcagaaggctcagtccgtccgcctccacctgctgccacggcagcgcgaacc

SEQ ID NO: 415293 - DNA, 122 bp, Homo sapiens
gccccggcccgccccccgcccgcccccggcccgccccggccccgcctatgtccccgccaccgcggaccgcacctctcggcccgtcggatcctccgaccccaccggacacccggccgctgtca

SEQ ID NO: 415294 - DNA, 122 bp, Homo sapiens
tgcgagggggtctggaagctcagtgggtgcagggatctgcctcccaacacccaactcccacgtctccttggtgctcagtggcctcgtgcattggcggcccgagtgctctacagggcgaaggt

SEQ ID NO: 415295 - DNA, 122 bp, Homo sapiens
agggaaaagtagccgaaagcactccgagaagacaagacaactgcagttctgtagggactgcgcggcacgcgtgggcccagagcctgtcccagcgaggtagcagctgccatgccgaccgctgg

SEQ ID NO: 415296 - DNA, 122 bp, Homo sapiens
gcggttcggtcggctgcagcgctacttttggtccggggtcggcagggaggccgcggctaccgcatcacagctgacgtgaggactacgtggggccgctgccggctccgggttgctgggcggcg

SEQ ID NO: 415297 - DNA, 122 bp, Homo sapiens
ctctacgacaaccacgcggggaagtcacccaatttccagcagcctcggcctgacaagaagcgcaagtaccaggcccacttcgaggtggtccactacgcaggcgtggtaggtgcttgctggaa

SEQ ID NO: 415298 - DNA, 122 bp, Homo sapiens
aagcgggaggccaccggcaagcggctctaaagttaccggaagaactaggtagtctcttctcgcgagaaagggaggggtcgcaggcccaggcgctcggagcgttaccagggaaacaggtctcg

SEQ ID NO: 415299 - DNA, 122 bp, Homo sapiens
tagctgagaagctgcagtagctacctcaagtccaaactcttcccctggcctgttggcctccgtagtctcatctccccatctcccgctgtgcagcttcttctccagccatgtcatccttgctg

SEQ ID NO: 415300 - DNA, 122 bp, Homo sapiens
tgaaactgctacaggaggccagatacaaggtagaacttccagtcaagaaccttgaacaggcgctcgttgtgtgagaggggtgatgcggactgtcaaaggtcatcccctaacggctttaaaat

SEQ ID NO: 415301 - DNA, 122 bp, Homo sapiens
gaagctgactgtccgtggccctgtcctgcccttctcatggaaccctctgctggcctcccacgtaccccacattctggcctgacccctcagaagccagaccactgtcggcctgggaagtccaa

SEQ ID NO: 415302 - DNA, 122 bp, Homo sapiens
tctccagaggattggtggatgagtgcacatatagcccaccctcgaaggtaggcgggtaatcgagctattggctggagccccgccccagggcgaggaggagaaggaggggcaggagggtttgg

SEQ ID NO: 415303 - DNA, 122 bp, Homo sapiens
tagcagggaacctactcatcggctaagttcatgggactgggcagaaccagctatcaatagcgccacggtgtggtggtgagacgcagtggcggcaacagattgatgaaattcgcatcccgacc

SEQ ID NO: 415304 - DNA, 122 bp, Homo sapiens
actgtactcagggtgtctggggcactcggcccgcacgggcacagggcaggggctggacaccgtgtgggctgacgaaggccacacttggagggtacatggctgacggctgtcccccttttccc

SEQ ID NO: 415305 - DNA, 122 bp, Homo sapiens
ctgaagtatgcatactgtacaggcaaggttaaacgaaactccacgaagaaaaatgcaaaacgctcaacgctccagaagcccccagcggcccccggcagccaccttcctccctgcagaggcac

SEQ ID NO: 415306 - DNA, 122 bp, Homo sapiens
caaggtcatgttcttcataagattaatccaagtacagaattggcttaataacatttctgacgatttttcctataacttgtaaaaccttggctatctgaaacccttgggaagtgaatcatcct

SEQ ID NO: 415307 - DNA, 122 bp, Homo sapiens
ggacagaaattgtctgagctcctttcatgtcaccttcccttgttggaagttcacagggtgcggaggcatcattctctactttctcctcttccccgcccctttttccctgtctcctcccccag

SEQ ID NO: 415308 - DNA, 122 bp, Homo sapiens
ttgactgagtttacacaaacttgtgaggtcacgtttgttgcctctggttgaccagacgcccgcatatgcagttatatacatatttgcttaattttctaaaaagagaaacaatgagttagttg

SEQ ID NO: 415309 - DNA, 122 bp, Homo sapiens
agatggtggtcgcgctcccagccccgtgcccccggctctgcctgtctcatcctgcaagggcgctgaccttggacaaggccagagccagcacccaggagtactatgacccacctccgggctgg

SEQ ID NO: 415310 - DNA, 122 bp, Homo sapiens
atacaagggcattatagactgcgtggtcgtattcccaagaagcagggagtcctgtcctggcgcggtaacctggccaatgccatcagatacttccccacccaggcttttaacttcgccttcaa

SEQ ID NO: 415311 - DNA, 122 bp, Homo sapiens
tcccctgccgtggggctgaactggcacgtttaagccccaccccaccacagggctcctctccgcctcacaaggggatgcatggtgacagctgcccaccgcgtcctctgctggaagggtgcccc

SEQ ID NO: 415312 - DNA, 122 bp, Homo sapiens
cttgggacccacagcatccttgtgaggcccggaggcctgtccagcccgactggacagtgccgaggggcaccgagagccagcttggcaccgagagttcgtttgttctctggcggggaggtctt

SEQ ID NO: 415313 - DNA, 122 bp, Homo sapiens
ggcctcccaaagtgctgggattacaggcgcgagccaccgagcgcggcccatacgggaaaacgtcaaagcctgacaggtgtgacaaataatgggcccctaggcaggctggggctggcgcgtgc

SEQ ID NO: 415314 - DNA, 122 bp, Homo sapiens
tggccttggttagagacaccgaaggccagctgtgtcttccccagcagagacaaaggtgtgcgcatgggcataggtgaggggcgtgtgtgtatgcacatcctataatttcaactgaaaaatct

SEQ ID NO: 415315 - DNA, 122 bp, Homo sapiens
ggcgcctccttatctgggagtgtgaactaaataaataaataagggcttttgtttgtttgccggctcctgcacatggctgctgggactcaagcgctcgtgttgtctgcgcctctgtgggactc

SEQ ID NO: 415316 - DNA, 122 bp, Homo sapiens
gggatgctgcaggacacgagaaccagccaagacctatggcccctgcagccaccgagggctcgagagcgcccctgtggacttggctgggcccttcatggtgacatccaggaatgcggctgagc

SEQ ID NO: 415317 - DNA, 122 bp, Homo sapiens
agtttgaccctcatggatacttctctttaggccctgggtttcccaagtctccaacctgatcgttctttctgaccatttatgacaacttctggtttttctttgaaagcttgtttctaggtctc

SEQ ID NO: 415318 - DNA, 122 bp, Homo sapiens
ccactcacgggtcaccaggtcgaagcactttttctcctcagggtttggcctcacttggcacgtcagcagggtcagcttcaccgggggccggtttatctgtgggaatttaggggcggaggatg

SEQ ID NO: 415319 - DNA, 122 bp, Homo sapiens
attccagcctccaggccaacacacgtgaccacgtctgcctggggcagttgaagtaaaggacgcgaggcggcgctgtcaccgcattctgtgaaccgcagcgctctgggtccctcccgctggtc

SEQ ID NO: 415320 - DNA, 122 bp, Homo sapiens
gcaagagttagaccctatttctacaaaaaaaatataaaaaatgcaaagagagaaaactggcggtaagtcatgtggactctgagagagcaagatactgtgttctggcagatagctctgagaaa

SEQ ID NO: 415321 - DNA, 122 bp, Homo sapiens
cccaggccaggaatccggcagcacttttgttccttttcacaaaaggcgagcacgacgccccgtcttgctcaccgctcagtgagcgttacaaacgtttgccaacacgcacctccctctgcgct

SEQ ID NO: 415322 - DNA, 122 bp, Homo sapiens
gtcctcaccgacccacctctgagggcacggccgccccgtcctcaccgacccccgagggcacggctgtcccgtccacgccaaccctcgccgcacagctgaactctcccctcctgtgcccacat

SEQ ID NO: 415323 - DNA, 122 bp, Homo sapiens
ggcctccagttacacattgctccttgaagaagggggccgcctctgagcctagagtgacctcggaattgtggttgggaaccaggttcaccttccaagtgccaatctcactctgcagaggagtg

SEQ ID NO: 415324 - DNA, 122 bp, Homo sapiens
agctcaaagcctgtcaacatgactgactgcagactcacttcaggaaagtatccccagtgccgctatagtgctgctgcccagtacaaattcttcattgttgcctgtgacccccctcagaagag

SEQ ID NO: 415325 - DNA, 122 bp, Homo sapiens
ccccctcccccagggccgcctccccgccacccgcagcagaaaaggacagacccccacgcacgtacccccattttgttggtgcgtgtgaatttcaaatggcgcagtaagttcattagtgtttt

SEQ ID NO: 415326 - DNA, 122 bp, Homo sapiens
gtgcaacgaacatcacccgcagctccctgggaggaccgcgagcttcacgtgtgggagctgcgccgccccctggtacccagagacacacggagcctgggctccctggctttgtaatgctcgtt

SEQ ID NO: 415327 - DNA, 122 bp, Homo sapiens
gtccttggtcctagcccccttgaatagcgacgcttctttttgttgtgtttgttggggcaccgatgtgtaaaagaacgtaaatctttagggtagtgtcttaaatgtaatttttaagtcttttc

SEQ ID NO: 415328 - DNA, 122 bp, Homo sapiens
cgcatcaaagcaggcagaagcaggcatggtgagcaggccgccgtgcatgcctggggcaggcgtgtgggtgtgagctgtgctgtgcatgtgtacatgcgcacagacgagcgtgggcgtgtccg

SEQ ID NO: 415329 - DNA, 122 bp, Homo sapiens
actggaaaaccccttgcagttttttcaggcttccttgcgagtcagagatataaatgaccacgccccggaattccctgccagagaaatgctcctgaaaatatcagaaattactatgccaggaa

SEQ ID NO: 415330 - DNA, 122 bp, Homo sapiens
gctccccacagcaccacccaggacacaaggagctgtcacaacaccgaggcccatggcaggcggccctggggaccagggctttgggcccacagccttgcctccacccatcccccagtcccagg

SEQ ID NO: 415331 - DNA, 122 bp, Homo sapiens
agcgcgcgcccgggaggacatggcgtgggcaccgatggggacgcagaaaggggctctgtgcgcggcggggcgcccgcgggggcgcggggagcactgacctgcggcgacgagtccggagcgtc

SEQ ID NO: 415332 - DNA, 122 bp, Homo sapiens
cacagggagctgtgctgcccgggcctgctctgtccaataggctaacctgacctgctccttcgacatctaaggtgctgctcatgtgtattcatgacctgggtggatgttggggagcccaggcc

SEQ ID NO: 415333 - DNA, 122 bp, Homo sapiens
accagctcacctccaatcccaagaacacggtctttgacgccaagtggctcatcggccgcacgtggaacgacctgtctatgcagcaggacatcaagttcttgcggttcaaggtagttgaaaag

SEQ ID NO: 415334 - DNA, 122 bp, Homo sapiens
ggggcgggagcctgggggacgcccgactctttagtgggggcgctgaggggtgcacccccccgccagcccctcacagcatctgtatgccaggccccctcatcaacaccatccgcgtggtgtgc

SEQ ID NO: 415335 - DNA, 122 bp, Homo sapiens
attcagatcagtgttcgtgtttgaagagagtcaccgtcctgccatgggaaacacttgcatcgtcttccaaccttgacaggattacgcgcgctcctggaccgcatccaaatagaactctccct

SEQ ID NO: 415336 - DNA, 122 bp, Homo sapiens
ctcttgtctgaagaggttgctgcgctctggagtcgtgctctgggacagatgggcaagctccgctcttggggccggaagcgtgtagcgtctccacccgggctccaatccccagcctcgcactc

SEQ ID NO: 415337 - DNA, 122 bp, Homo sapiens
gggggagtcacgacacagcagtgtaagagccgccacgagggtcccacacagggggagtcacgacacagcagtgtaagagctgccacacatgggtccctgcggcctgcagttcgaagcccact

SEQ ID NO: 415338 - DNA, 122 bp, Homo sapiens
cgataatattttctttcctgtcttacctcggagacagggtggggctttttttttccagcccgctatcctgggccgacagcatactcaggtttactcagtgaatatttataaacctccaggct

SEQ ID NO: 415339 - DNA, 122 bp, Homo sapiens
gttccacaccatttgtaatggtcaagaccttcttaccctttccccagcgtccagtgttgccggtttccaggccatcctgtgctgggccacgacatcaacttgtgatactaagttgcattaat

SEQ ID NO: 415340 - DNA, 122 bp, Homo sapiens
tgggatctctggtgcgcccaacctcccctcccggcctcccacctttctttctccaggcaccgcacacataaatcacgggtgggaggcaggcttggttcccgcttggttccccctgcactggg

SEQ ID NO: 415341 - DNA, 122 bp, Homo sapiens
agacccgggcagggcggggtagggctaggcagaggtggtgcacaccgctcagctgggcagcgccaccagcgcggctgcggatggatccacaccgtttgaaatagacacataggtcttctggc

SEQ ID NO: 415342 - DNA, 122 bp, Homo sapiens
ccaacagtttcccctgtaagcttaacacagccatgtgcacagccccaaggaaagaaatcccgcagctacccccagacctgaggggcagtaggcccagctactcctgattagtccagaggcca

SEQ ID NO: 415343 - DNA, 122 bp, Homo sapiens
ctctgacttgcttatatagggctcaggggctatataaagctgcacggtcatcctccccggcgcgaggggctgaaactgagctgcacccccgccccgcaccccagatcatgtttagtgactca

SEQ ID NO: 415344 - DNA, 122 bp, Homo sapiens
caaacaacttctacatttcaacggattgttgtaggcctaccatgtacctgacactattctcgaagctgcagatagagcagtgaacaaaacagacaaaaacatatgccatcatcaaactcaca

SEQ ID NO: 415345 - DNA, 122 bp, Homo sapiens
gttagaatcatcaccaccaacactttacgaggcaatctgctttccagaacatctagctgccggattaacttcacagccaccagattccacaggcaggtgctcagggggacacagctttctca

SEQ ID NO: 415346 - DNA, 122 bp, Homo sapiens
tgacattctactgaggccatggacacgtacagtacccaagtaagcagtgagaagatggcacgggccacggagaaaaatgaagcaaggttggcaggacagggcgtgctgtgcaaaggcaacgc

SEQ ID NO: 415347 - DNA, 122 bp, Homo sapiens
ctgctcgccttctagaagttcctgcaggaagctggtgatgtggcctccctgacccgggcccgccccccaccactttgctggaggggtagtcagattccagccgggatacgtagcagcagctt

SEQ ID NO: 415348 - DNA, 122 bp, Homo sapiens
agggctttaagggtaaaggcaaagggccagattttcaggtcacctcttggccgcccccaccgatttccctttgaggtctgggcacctcccccggttacagcctcggcaaggcctcctctctc

SEQ ID NO: 415349 - DNA, 122 bp, Homo sapiens
ggaggccaggcgcctctgggagcctacggaagatcagggagccccggactcgcctcccaccgctcagctgccgtaaggctccgcaggtgaagacccaggacccgcagtagccgggatgcgct

SEQ ID NO: 415350 - DNA, 122 bp, Homo sapiens
ggaaccacccgcggactcgcggcctctccccaccggaccccgcaacaccgcggggacgcccgggaggctactgaagagccagtggcgcctgcctcgatcacacgtcccctgtggagctccac

SEQ ID NO: 415351 - DNA, 122 bp, Homo sapiens
cctctccaaagcagtctgaacccagccttggggagtggcttccgagtgtgtccttccttgcgtatttttcttcagccttagggcacttattgagttttctttacatctttatagttactctc

SEQ ID NO: 415352 - DNA, 122 bp, Homo sapiens
acggggcggctgccgggcggaggggttcctcacttctcagacggggcagccgggcagagacgctcctcacctcccagacggggtcgcggctgggcagaggcgctccccacatctcagacgat

SEQ ID NO: 415353 - DNA, 122 bp, Homo sapiens
ggctgcacctggcacccgcgtctcccgtctcatcccctctgtgcacagcaacctggagaccgacagcagcagccagtgggaagtcttcaaccccatgatgcacacagggcggctgcggctct

SEQ ID NO: 415354 - DNA, 122 bp, Homo sapiens
accctcaccttgggcagacctacaagagccctgacattgtgcacctgcttatgtgtgcgtcgtctccctggaaggggcacaggaagctgatgatggtggttgcccctgggaaatcagctggg

SEQ ID NO: 415355 - DNA, 122 bp, Homo sapiens
gccccaactgcctggctacaatggaaatctctgagagccaaattcagatctggtcagaggcgtctgatttggtgtgtattggtagggggagggggatctctgaatttcaacaagttttctcc

SEQ ID NO: 415356 - DNA, 122 bp, Homo sapiens
gctgctgttttccgattgcaagattttcctgatccatgcaattactttcgctgccctctacgaggctgaaactcgccctcaggatgtgggacgtctggactcttctctccgtccccttgtag

SEQ ID NO: 415357 - DNA, 122 bp, Homo sapiens
aaaactcacagaagcagcagcggaaatggccccgcgcggcaggaagcgaaggtgacgctacgcgagcgagtgggccccgccctctacgggggcactggcgcggaaactggccctgtgtcgaa

SEQ ID NO: 415358 - DNA, 122 bp, Homo sapiens
aggaatttatttgcttcaagttcctagatacaaccttcccatgctgcacttctccactgtcggagcacgttccgaaaaacagaatgccttgatccctggtgggtgcgaaggcagttgttagg

SEQ ID NO: 415359 - DNA, 122 bp, Homo sapiens
catccatggacaacatacacctttaaaaataagtatgcatgctaacatgggctgagcactcgcactccagagcctcctttgcattctcttattcttaatcctcacagccttatggggtaggt

SEQ ID NO: 415360 - DNA, 122 bp, Homo sapiens
tgtggctccggagacgaggcacagcgctcagggcgcaggcctggggctgaccaggtgaaccgactgggttctgccccggagtccttcaggttcccctcggtagtgccctgtccccctgtccc

SEQ ID NO: 415361 - DNA, 122 bp, Homo sapiens
aaacggcctctcgagctgcggggcaaggcctccagtcctgcgtcttgtgtttggggagcacgtcagcttccagggcagcaaactcgcggtgcttcctctaaatgcttagactatggtacaaa

SEQ ID NO: 415362 - DNA, 122 bp, Homo sapiens
aagcaggagaactgcttgaacccgggaggctgagtttgcagtgagctgagatcgtgctgccgcactccagcctggatgacagagccaaactccatctcaaaaaaaaaaaaaaaaaaaaaaaa

SEQ ID NO: 415363 - DNA, 122 bp, Homo sapiens
acaggaaacaccaaaagcaaggaagaaggaaaggaggtagcctgcttagcccagattagccgggagtaacttcccaactcaaagggtgagtgagagatttccagcagcccacatccccaccg

SEQ ID NO: 415364 - DNA, 122 bp, Homo sapiens
atttcaactttctcttcttttttttaaaaaaataagcgtgactctcaggggatgtctgcacgggaacccatgtctctgctgccccacaaacacagcaagagccgcgagcacgcgaatgcatg

SEQ ID NO: 415365 - DNA, 122 bp, Homo sapiens
gcagaggacagcagaagaggagattgggtcagaaaactgccctgccgcaccagagcacagcgcactagtgggacaggggtcctgactcagacttaactggctgtgtctcgtggtttttcact

SEQ ID NO: 415366 - DNA, 122 bp, Homo sapiens
tattcctgtccctcactgctcctggaattcagatgccgacctcacagcagctggccgccgcggagtcagcggtcacagaaaggattaacacacatcttggctgcgattctgcaagtagccga

SEQ ID NO: 415367 - DNA, 122 bp, Homo sapiens
gcctgggacccctttgctgccctttagagtggtggcagggacttttccagcaaggataggcgcggcaggcgcgagtgcggacggcgcgcccattaggaggaggccgggtgaaaacctctctt

SEQ ID NO: 415368 - DNA, 122 bp, Homo sapiens
aacctacctaccctggacaactactatcatcaccacctggggacaccaatcatcgtgacacggagtccaccttccactcagttcccccatcctcttcctcctctcgctgccagacttcatac

SEQ ID NO: 415369 - DNA, 122 bp, Homo sapiens
ttcaattatccttctattatccagctggtatttaagcatgtttattattcaaatcagcagcgaatgtgctgctgttgtgtaaacaactgtcaattgctgaaacaatgattaggaggcaccat

SEQ ID NO: 415370 - DNA, 122 bp, Homo sapiens
aagactggcccccaattcgagctgtggaccctgcgtgatggggccaggtcagtgcagattcgtcgcacagcaaggacccagcaccaaggcaaaggcgctaacaataggggtgcagagtgtgt

SEQ ID NO: 415371 - DNA, 122 bp, Homo sapiens
aacctgccgggggcctcggaatccagaaggccccgtccagggggactcgggcttcctgggcgccgtccgtggtgctggccgggtctcccagcggggctgggcactggccggggccctgggcc

SEQ ID NO: 415372 - DNA, 122 bp, Homo sapiens
gcaagccccgctcctcacccaagccgcgggggaggagccctcttctttcccgcccggccccggcccccagcaggacccctcccgctcagctgctacagtgggcacgaagaggggcatggctt

SEQ ID NO: 415373 - DNA, 122 bp, Homo sapiens
acgtgggccaggccttcacacacccaaagcggatccgcggcagtgaaaaccactgacaaccggcctcatgacccaggcagaaacacagaaagaggctcaccgaagacagggcgacatgcgag

SEQ ID NO: 415374 - DNA, 122 bp, Homo sapiens
ctttcctttcccaacttccccattcctggcaaagtcatttcccaaagtctgggaatattccgtagggtgtccagaacactttcagctatctcctcttgctcacaaaatatgtatcagaaaat

SEQ ID NO: 415375 - DNA, 122 bp, Homo sapiens
caggcgtgagccaccgcagccagtctggtgcctgtccatatgtgagccacctatagagagcggttcataggagaaacccacttcacacagtcctgcatggtaagtgtgtgaagtgaaggggt

SEQ ID NO: 415376 - DNA, 122 bp, Homo sapiens
cagcggggagtccttctcagcctccttgggtaacttgggcaccacagtgaaggagttgggcgtgccctggctgtggaagatgctgtcagagctggcctcggcttggtggctgtggtcacgga

SEQ ID NO: 415377 - DNA, 122 bp, Homo sapiens
ctttgctctccagcatgggcaacaagagcgaaactccgtctcaaaaaaaaaaaaaaagaccgggttgtcccaagacctcctagcaagctctcggagcctccggaccgccgcgagcccctggg

SEQ ID NO: 415378 - DNA, 122 bp, Homo sapiens
tgaaggagcagtcaaaggccaggatggttggggggagtcagaaagtatggggccagtcaccgaggtcagtgtaggccgtcagaagactcttgacagtcccgctctgtgaggtggggagccat

SEQ ID NO: 415379 - DNA, 122 bp, Homo sapiens
agagtagggccagcagggatggggggctgggtccctgaggtgccacagcctgagagcccacgcggcgtgctcagggtgggaggcggcacaagccttctgctacagggctcgctgctccaaga

SEQ ID NO: 415380 - DNA, 122 bp, Homo sapiens
gactggtcagtccacctgccttgagtgagcacctactgtgcattagccctgaggttggcacggttggaagaaggaaagcttccagtgcacacttcctcctactacaattttgctgctcagcc

SEQ ID NO: 415381 - DNA, 122 bp, Homo sapiens
gacctctgcgatgggcttccggattcgaggccccgtccctttctcagaaggtaaggcttgcgtcaggtgaaccacattggtcgtttggctctaacaataacggcgccttagaatgaacactt

SEQ ID NO: 415382 - DNA, 122 bp, Homo sapiens
ttttaacactgagagggcggtctttttaggcggacaccaggcacgcaacttagtctcacacgccttggagagcaagcgagtcttgccattggataattccaccgtctttcttctgcaagtcc

SEQ ID NO: 415383 - DNA, 122 bp, Homo sapiens
gggatcctttgtcatttatttaaaagtaatataaaattataaaaatgtttgttactggcccggcagagccaatttggcagtctagaaaaagtctggatttataagcaaactaatggaaatag

SEQ ID NO: 415384 - DNA, 122 bp, Homo sapiens
cgctcctttgaaatgactcattttgaagctggtgagaatgcactaaatttacatctccttcgtaggatgaataaacatagctggaatttgcatgttagtaaaatgctctagagtaatgacac

SEQ ID NO: 415385 - DNA, 122 bp, Homo sapiens
gacacgggagggagggcgagaggagagagaggatgagaagggagggaggtgaggcagtcccgtgggggaggatcagcagacccagaaacctggcctccagcctcgcctcatccctgccacgc

SEQ ID NO: 415386 - DNA, 122 bp, Homo sapiens
tgctggcgccgtccgggctcccgagcgggctgagggccctcccctggggctgcgccaccccgctccgaggcggggcccttcctggaaccggcttccctgcaccattcctgatcggaggctgc

SEQ ID NO: 415387 - DNA, 122 bp, Homo sapiens
ccttcttgtggtgtcttttgctctccccaactttcatctgcctcccagaaactcttagaacgagtaatgagcacaaaccaactaccccatatacaccctccacccaccagccatcctaactc

SEQ ID NO: 415388 - DNA, 122 bp, Homo sapiens
aattggcttccactcttgtcatgttcactaatattacctcagccttcaaaaacattcgggcgctttatcctccttaatgtgtccacagcacttacaaccttttaccacataatccttcactc

SEQ ID NO: 415389 - DNA, 122 bp, Homo sapiens
gaccccagctctcacttacctgcttctttgaacatcatcaaactggggaacagaatcactcgcaatgaggtcccggaatgtggcaaatcaaatccacacaggaaccccaaactgtaaaaagt

SEQ ID NO: 415390 - DNA, 122 bp, Homo sapiens
cctcttccaggcgacgacgtctggagggtgatctctccatcttctttctctcggttcacacgccacgtgtgcaacatcggagatgctcataaaataacccctggcccgaaagggcagtagaa

SEQ ID NO: 415391 - DNA, 122 bp, Homo sapiens
atggtacggccctcctctccctctgttactcttctcttagattcctgatccactttctaccgcctgctgtgcttacaaatgcaaatggttacttcacattcaagcgaatgtgcatcaatatg

SEQ ID NO: 415392 - DNA, 122 bp, Homo sapiens
ccaatctggaaaacagtttcctaaaaaattaaatgtatgcttcccatatgggcattactccggagaaacaagaacttaaatttacacaaaaacctgtaggaagtgttcacttcatctttatt

SEQ ID NO: 415393 - DNA, 122 bp, Homo sapiens
atcgttggaagtgagaatgggcgaggtggcagcaccgctagatcccaggccttcccctgccggtggggagctcaggttcacattcaggagccctccattgtaggcagacaggatggtgttgc

SEQ ID NO: 415394 - DNA, 122 bp, Homo sapiens
atttagcagctacgtgtcaagcacctgctctgtcagggcagcatgatttggtgcaggggccgggtagtagacgtctgagctgcgctccacagggaagagccgtcccatatcgggacctggcg

SEQ ID NO: 415395 - DNA, 122 bp, Homo sapiens
tttgagatgcactggctggaaaatattgcagcagcccaggcagggcttgatttcagccgacgtttctcagggcctccacactaggcatgcctgggaaattgccttttgggacctctgccagg

SEQ ID NO: 415396 - DNA, 122 bp, Homo sapiens
actttgaaatgcccaccgggtaccgcttggatgccaaatcaaaaataggaatatgcagcacgattttaaaccaactcgaagttcccgaaaggcggaattgggatgtgctagatagagactag

SEQ ID NO: 415397 - DNA, 122 bp, Homo sapiens
ccaataagcccaagagatttgtggaggccacgcccagaccatgcctaccctagcctttctcgagctccgcccgtttctccaagactgggcccctccagcctgaagccccacccccaggacat

SEQ ID NO: 415398 - DNA, 122 bp, Homo sapiens
tactaccctttcttactcatatctcagtctcatctcccatattcattcattaactctttacgctattctttgagctaaagtcaatgggatggctgttagttcattacatgattctttagcag

SEQ ID NO: 415399 - DNA, 122 bp, Homo sapiens
cggcgagcgggactcccctgacgctccagctgcaccgccccggggcggggactaatccgccggcctggcgtcttggtcttccccgcaagcagtaatctcctgcaacccaggaaaggagacta

SEQ ID NO: 415400 - DNA, 122 bp, Homo sapiens
cctggggaacccggtggcacccgccctgaggagcgcaccaccccgcccagatccaggtcccgtcagggtgccacctgctgcatgggcctgaggttcggggacacagcaaaggcacaccccgt

SEQ ID NO: 415401 - DNA, 122 bp, Homo sapiens
cacacagatggctttgcacacacacccagtgcctcgtttccccgactttattcagtggcacgttcacagcggggatgggggtagacacaaggtggggcctgatctgtcctggagccctgggg

SEQ ID NO: 415402 - DNA, 122 bp, Homo sapiens
gccgtgagctgcggagaaatctccacgcagagtcgcctgttgataaccctccagttaaaacgttcttggcagcgggagcccctcagatgtaaatttccctttcacacgcttgagcttcaggt

SEQ ID NO: 415403 - DNA, 122 bp, Homo sapiens
agggaccctggctttaatgtgagagttatgtggaatggtaggaagaacaccgagatccatcgagttgggggaacagagccttctaagattgggaaaatcttcgcttaatacttgctggggaa

SEQ ID NO: 415404 - DNA, 122 bp, Homo sapiens
agtatgggtcacatggcatgacaagtaggttaagggccagatttagacactgatggcctgcgtaaggaggagcaaaccacacactgcttgctttgggtttctctagctcccaaggccagaag

SEQ ID NO: 415405 - DNA, 122 bp, Homo sapiens
gttgcattgttttcgcattccaacttgtgtactgttgcatttgtcatgctcagctgtcatcgtgaattaatatcgcctagatatatgtatgcatgtgatgtaaatctgcggcagcctagata

SEQ ID NO: 415406 - DNA, 122 bp, Homo sapiens
aaaaaaacaagtaaaaaaaccaaaaacaaacaaacaaaacaaaaaccagccttgaatccacgtgaacaggaaaggcttgtgccagaccaggagcctgggcacctctggatccagtgctgatg

SEQ ID NO: 415407 - DNA, 122 bp, Homo sapiens
aacaaagggcacttagcaaatttgaatttgtataataaagctttcaggtgttacagaaatcgtagacaagcaagtgcacatgataaacatcaaaatattacccagctgaatagttactgctg

SEQ ID NO: 415408 - DNA, 122 bp, Homo sapiens
atcccaccactcatgaaacagcagaggtggtagcttcaaccctcattgaacacataatcccgagatttggcctccctcggacaatccaatctgaaaatgggcctgcttttatctccaagata

SEQ ID NO: 415409 - DNA, 122 bp, Homo sapiens
gtggtgcaatcatggctcactgcagcctcgacctcccgggctcaagccatcattccgcctcgcttcccaagtagatgggacttgcccggcccgaagcggaactactgagtttccttattttg

SEQ ID NO: 415410 - DNA, 122 bp, Homo sapiens
tggtaacgccatccattaatgtggaggctttattaccttgctcacaggaacccacggtgacgactcgctttttaggcatctattgactgtgggtatgagcagtgccctcctgatatggtaaa

SEQ ID NO: 415411 - DNA, 122 bp, Homo sapiens
atctctccttccaacttttaacttccaagcttttatggagttttatagcaggaattttgacggagacaagaaaggatttgaaaggagaaagttagaaatgggtgatttctttttgactttgg

SEQ ID NO: 415412 - DNA, 122 bp, Homo sapiens
aaaaggaaatttgtattagaaactagaaggcttatgacaggtggtagcttgctttcttggcggagctcagataccttgaaataacattgtaaattcagataaggcttttcatgctttcttta

SEQ ID NO: 415413 - DNA, 122 bp, Homo sapiens
cacttgctgttgcctggcagggcacaaggtcacccttcttatcctgcctcagggttacatcggctttctcgctctgcgccaccaaatccacaggcaccttcatcaggtcaccaccccgtaga

SEQ ID NO: 415414 - DNA, 122 bp, Homo sapiens
gatagctatgtgatctcacaggtgcggacggtaggcatttggtcaccttagtcaacatgccggaggtcagttccagagcctgcttgacttggtgtgagtttactttagaaaatgtatcctat

SEQ ID NO: 415415 - DNA, 122 bp, Homo sapiens
caaaatccacatggggagccccaggggccgcctcagcgggtactctggctgcagtacctgcggaacttcatccacgggggcccgcccggctacgccccgtactgtgaggagcgcctgagaag

SEQ ID NO: 415416 - DNA, 122 bp, Homo sapiens
tcttcgattacttccggttcgcagcgcggccgacggcgcgctgtgttttcgcaaagcttccgaggattctcggcaatttccgcccacgcccgaaagccaagccccacccctttccctagtag

SEQ ID NO: 415417 - DNA, 122 bp, Homo sapiens
cgtcgtctgtgcaacaaacactgaccacccctccagacaaggactgagatgcccgacacccgattcctgccttgaaggagctctctgtctaacgggaagacaggacaggaacccacgcagcc

SEQ ID NO: 415418 - DNA, 122 bp, Homo sapiens
ggcgccagcgacgctttcccgcgtccacgactggggtgggcaacagggcagggacagggccgcccacctccccaggcgcgcagcgaggccaactcacctgcgtggccgccagccgcgcccgc

SEQ ID NO: 415419 - DNA, 122 bp, Homo sapiens
actgcccagagctggaggcctgatcaggaggcctggcacttgtggcgccctgagggctgccggtgcctctcgtcctcctccctccagggcccgtgctttgtctgcacgcactcgcgcctggg

SEQ ID NO: 415420 - DNA, 122 bp, Homo sapiens
ttcgtagtgaccccttaaatccggtgcttagactcactacttgctaaataacgttggcttcgttacataaacccactggcctgtttttcaacggtcagactggcgctgttagtccctgtgtc

SEQ ID NO: 415421 - DNA, 122 bp, Homo sapiens
aacagagcacaggactgtgataactaagagaagagaaacaaatgaagtgagtcttacgtccgagcttactgtctcaaagcagtttccaggcatcactgtagggatggagaacccaaacagag

SEQ ID NO: 415422 - DNA, 122 bp, Homo sapiens
tcccaggatgatgaagagcgaggggccagagctaggggagttagtgatgcatctgctagccgggctggccctccctgtgggcacagagaaagtggttcctcaacagccatgggtgaccttta

SEQ ID NO: 415423 - DNA, 122 bp, Homo sapiens
ggctttcttaggtccttttctcagccattttcctccttccccaaccggagaattgccccgcgtgtgcaaggagcggcgtgcctccacgcagcagcaacaacaacagccgcgcgagtggccgc

SEQ ID NO: 415424 - DNA, 122 bp, Homo sapiens
gtcctgtgggcggcgtggcgcttgcaagcgcaggaagagtcctggggggaccgcggtgggcgggatacctttggcgccggatcttcctctttctcccggtttgttcccgacggtgctcgctc

SEQ ID NO: 415425 - DNA, 122 bp, Homo sapiens
cccgcggcctctgcctcgctggcccgtacctagggaggtcgtggacgagacgtggttaaccgcggcgcttgggtcgctggtccgtcgccggcgccacagcccctggtgcggttgctgccctc

SEQ ID NO: 415426 - DNA, 122 bp, Homo sapiens
ggccagactcttctttttttgcatgctttcctctcccatgcttgggttgcacagagctaccgcacatctgtcttctaggtcaggctacagagtacttcggatacagcaagttacgacccatc

SEQ ID NO: 415427 - DNA, 122 bp, Homo sapiens
gagcagtctgcttggtacgagccattgcgaacttctaaaccctgctaaatgacgaaaaaacgaaagtctagcctttcgtacccgtatatataaagacacccctgttctgattggacaaggca

SEQ ID NO: 415428 - DNA, 122 bp, Homo sapiens
cacagccatgagccaggctgcttgacgggacctgaccccgccaggttcccgtccagtccgcggggtgactccacccacagctggccgcgccaccgctcaggtttcaatttttattggttcgc

SEQ ID NO: 415429 - DNA, 122 bp, Homo sapiens
atgataataaaacaaagaaactgtgtgtgatccagtaaggtatgtacgcagccggcgctccgtgggggctaacagcagctgcagggcagtggggctggagcttgctgcccacacccctccgg

SEQ ID NO: 415430 - DNA, 122 bp, Homo sapiens
cctgggtggcggggggcctgagggcacacaggaagagctgcagtgggattttcaaagaaacgtcatcatctagagaccctggagctctggaaagcaggaaggccgctaggtcgcccctctgg

SEQ ID NO: 415431 - DNA, 122 bp, Homo sapiens
tttggagagggaaatacaaattgccagcccaagccattcatcaaacagcaacagaatccacggggtggtgggggggatagagaagaggcgggggtgatgcagggggtggatttaaagaatca

SEQ ID NO: 415432 - DNA, 122 bp, Homo sapiens
ctcctcggcctcaggctcccaggcactgcaggatgctggctgggcactcagcagtcgaggcgctgggcatgctcagtggctgggacccggcgggccgcgggggagcgcgcctcggcccaatg

SEQ ID NO: 415433 - DNA, 122 bp, Homo sapiens
aagcaaaggggcgtgtgggtgctgcaggaggagcacagagcactggcgcccctcccctcccgccctgcagatgccggaggccccgcctctgctgttggcagctgtgttgctgggcctggtgc

SEQ ID NO: 415434 - DNA, 122 bp, Homo sapiens
aggtgtgggtgtgagctgcttgcctgccgacctccctcgccttgcacagcaccctgctggcgtccagtacttggctcccaagtttcattgctcagagcctttctggtttccagtctgggttg

SEQ ID NO: 415435 - DNA, 122 bp, Homo sapiens
ttgcagatgtattattccatagggttttcttccttttgtccatgttttcaagtgtgctggcgtcatgacctgagctagtatcttcagatgtcttgtaatctgccgtgatacctcctcacatt

SEQ ID NO: 415436 - DNA, 122 bp, Homo sapiens
gtctctaggtttcggggacatcaggggctgtgcctgaactccggatagggctgaactccccgtgccctcacacccgtggtcgccttgcgaaccacgtctcccagaggccctctcaaccacag

SEQ ID NO: 415437 - DNA, 122 bp, Homo sapiens
cccagcgcacctggatgggccccaccgcggggtgccgcagctccaccatgcgctcgccgtcgtcctccagctggttcacgctctgctcctggctcagcagctcgtgctgcttgaagtgctgg

SEQ ID NO: 415438 - DNA, 122 bp, Homo sapiens
tctaccaatagagcattttgtcatctagtaaaacctccagaccccaaagaaaatgcaccacgcagaacttaaaaaaaatcctttaaaatgcattactctagtactttttcttgccagtaatg

SEQ ID NO: 415439 - DNA, 122 bp, Homo sapiens
gaaggaatcgccgggggaatacaggccaaactacaattcccgagaggtagctgggctctgcgggggggggggggggggcgcctgcgtgttcacgtgacttccttccttctcgcggagaccga

SEQ ID NO: 415440 - DNA, 122 bp, Homo sapiens
cttagggccttagcacttgggtgtggctccgatcctggcccactgactgtcctcttggcccgtttccttacacatcccaccagatccccaggctgaggaggtgggtcagtggcccacccgct

SEQ ID NO: 415441 - DNA, 122 bp, Homo sapiens
aatgaagcaaagcaaacaagtgacaaggctcgaagccctgacggcccagagactgcacagcgggcccaggagcaggtgcgccccctcgaaggcggcgtggcctccgcgactcggctgcgggc

SEQ ID NO: 415442 - DNA, 122 bp, Homo sapiens
aagatatatgcaataaaaactattacgcacaatatgcaaagactctttaaactcaacaatcgaaaaacaaacagtttaatttaaaaatgggtcaaaaaccttaatggacacctcaccaaaga

SEQ ID NO: 415443 - DNA, 122 bp, Homo sapiens
ttgggtagggcaaggtgtgccagcctcaaggaaatgcttttcagtccctccttcccactgcggggcgtggctgccggcaaaggatggagttcgggcgggctcccgcgaagggaagtctgcgg

SEQ ID NO: 415444 - DNA, 122 bp, Homo sapiens
tgtagcgcctgtaatcagccccacacagcccccgccgcaggcgcccatcagtgccacttccggagactacttgagatacacctgctcacgctaaaaggagaagcagtaatccatcaaaacaa

SEQ ID NO: 415445 - DNA, 122 bp, Homo sapiens
cgcgataggcggccgcgggtcttgctgggaaatgaagtcccaaagcgtcagtgtttcttgcgagaccgcccagagcgctgaaagtaactcggccgccagggtcacaacaaacttgctggcag

SEQ ID NO: 415446 - DNA, 122 bp, Homo sapiens
gatattgtttttaatatccagggggagagaagaagacattactcccaaaattgctggcagcgtacacccccacagtgatatttctcctaacatccagagggagagacgatgatattactcca

SEQ ID NO: 415447 - DNA, 122 bp, Homo sapiens
gatgcgggcagccttcgtgtcagagcagcagcagaagctgagcaggtggctgtgggccgccggccgcgttaatcggccaagggtgggacggggcctcattaactggcagggtgggggcgggg

SEQ ID NO: 415448 - DNA, 122 bp, Homo sapiens
tcctaattcggaaaacttagctcttcctgccctttcatttcttcattcataaagtgaatacgaccaccactgaggtccagggccaaataactaacagaaatattatgatgaactttgcagac

SEQ ID NO: 415449 - DNA, 122 bp, Homo sapiens
tctctagttccgtactcggagctcaaggtgacagaggactgcgcttccagccctgcgctgcgcatcgcgtcggtcccgcggacctttgccccgcctccttccacacccgttcccttgacagc

SEQ ID NO: 415450 - DNA, 122 bp, Homo sapiens
gtggtaggctggaccctaaagatatcaggtcccggtctgtggaaactcggactgttagctcgcaaggcagaagggactttgcagctgtgatgaggggccttgagatgggaagagcatctcca

SEQ ID NO: 415451 - DNA, 122 bp, Homo sapiens
tctgcctggagacaggccgacggctctggaaggagggaggcattttaagcggcgggtctgcggtgccagggggagtcacgggatagctagtgtgtctctggctctgttctcaaagcccagga

SEQ ID NO: 415452 - DNA, 122 bp, Homo sapiens
tatgcagtaggctccgcccaggacccagcccggcccctccttaggcctgggctctgggagcggaaattccggcgacagcagggcaaaacaggagctgattcgagctggcagagctgggccat

SEQ ID NO: 415453 - DNA, 122 bp, Homo sapiens
agcgtccgagcgtttccacattcattcttacgcagttggtaggctcaggatgtttgtgaacgccgaagggtgtgcgtgcaccctggagtgtggagatactagcatgctatttaatgatggcc

SEQ ID NO: 415454 - DNA, 122 bp, Homo sapiens
tctccatgcttgagatcaaatgggccattatcccatgactccaacactttctagctttgtcgtttccatgacccagagaaactggaggaccagctctggattctcggaacatctacagcctc

SEQ ID NO: 415455 - DNA, 122 bp, Homo sapiens
agcgcgtgacggaggagcggttggccaacgcagtggcggcagtcggtgtaaacaaggcctcgcgccgctgcgggtcctgcgaccgctcctggctggtgggtggtctcgcgtggggcggttac

SEQ ID NO: 415456 - DNA, 122 bp, Homo sapiens
agagactgttgaggcaatgcatgaaggtgcgcctctgagagcgtagagctagatagaaaacggtagagaaaagatctggcaaggcaggcaatggccaacagagctggatgaatttagagcca

SEQ ID NO: 415457 - DNA, 122 bp, Homo sapiens
tcttctcttcctatgtaccacgaacagcaggctccaacctagggctttgtagcacaggcccgggctgctcagagcctgaggggctcactgctactcctcatctcctctctgcctcccatgtg

SEQ ID NO: 415458 - DNA, 122 bp, Homo sapiens
ccacccggtctctgaagctgggttgcacgcgtgtccaggtccacggaaggctgcagtacccgcgcagccccggcatcacctggcgtcacccggcgccacctggcgcatcgctccccacggca

SEQ ID NO: 415459 - DNA, 122 bp, Homo sapiens
acacaggcagagtgtggagcctgtgagggggttggtgctgcattgggcatccccatggcacggctggctcagacacatgtcttccaagtggcacaggagtcctggaggggtaagagggggtg

SEQ ID NO: 415460 - DNA, 122 bp, Homo sapiens
ctctcggcgccacgggttcctctgggagtgcgccctggccttgccttagggtttcagcctcggaggaccggttctgggcagtggagaagggacctgagttctgccttgtaaagttaacgttt

SEQ ID NO: 415461 - DNA, 122 bp, Homo sapiens
ttcataggtgatacctgcacggggttctcaattctctctatttcataggtgacgcctgtacggggttctcaatattctctgcgtgtttcataggtgatgcctgcacggggttctcaatattc

SEQ ID NO: 415462 - DNA, 122 bp, Homo sapiens
ggccgcgggccgggcgcggagggcgcgcccagggtgcggcgcccgcgtggcctgtcgccccggctgttcggtaccccagcacaggttcagggaaaagggtgccaccactaggctgacgcagc

SEQ ID NO: 415463 - DNA, 122 bp, Homo sapiens
tggaggtttggtgccgggggttgagaacaacagtcaaaccctcttcttcccctggcaccacgcacctgccccccgggatgccgaacgaagtggtccctaaagctcctctgcaggcccaaccg

SEQ ID NO: 415464 - DNA, 122 bp, Homo sapiens
ggaattacaggcgtgagccacagcacccggccctgagggcctctaaggtagcgtttcactcgctaggaatttccagtctcctccgagttccgaaggttcgttcacgggaccgtgagcatctt

SEQ ID NO: 415465 - DNA, 122 bp, Homo sapiens
cctcatctgcccttttcagtccccttcacaaagagcttcaggagcccttttatggggcatcgcctcaaggaaatgaaactgctgagaacaactctgacttccccttattcgttgtgtccaag

SEQ ID NO: 415466 - DNA, 122 bp, Homo sapiens
gtaaatgagtaacagagctcccgtatgcttcatggggtcagtgataaccaagttcattaacgagtgacagtcttaatgactaacacacctctaacatttcacctctagctcagatgagagag

SEQ ID NO: 415467 - DNA, 122 bp, Homo sapiens
aggcggcgcggggagggtgggtgaagagcgcctgtgcgcgctaggcggagcctcacccgccgccctcctctgcggcaccgccccttccatggcagggctgaccccgcctcctccatccgacc

SEQ ID NO: 415468 - DNA, 122 bp, Homo sapiens
aggtggccaggaggaaaggctaaaatttggccggatagtcccatcccagggctgctctctcgaccccgggtactggggtcttcttggcagcgcaaaatgctagcaaaggcggccaagcagct

SEQ ID NO: 415469 - DNA, 122 bp, Homo sapiens
tgggagatcgccacactggccgagcagccctaccagggcttgtccaacgagcaagtccttcgcttcgtcatggagggcggccttctggacaagccagacaactgtcctgacatgctgtacgt

SEQ ID NO: 415470 - DNA, 122 bp, Homo sapiens
gggacctggagggcagatatcctcgatcccaagagagcaactttgtcgcctcagaaaacacgccaacttccctcctgctctttccttggtcaactcagaatcaaccgattgtattgaaatct

SEQ ID NO: 415471 - DNA, 122 bp, Homo sapiens
gcttcagtttcccctctatgagagcccgcgggtctccacctgagagaatgcaggtgctcccgcgccgggagtgggcgggcagaagagcgggcggggggcggtccggatgcctcgtcccgccc

SEQ ID NO: 415472 - DNA, 122 bp, Homo sapiens
ctcaccgatcgcgcagatcttgcgatcgtctagccagacgccagtgtagggcgggggccgcgcgcgggcgtcctgcaggccctggagctcgcacaggcgcacggcgcacgcctccagcgacg

SEQ ID NO: 415473 - DNA, 122 bp, Homo sapiens
tcctgcagtcgactttccacgcagcagtcggagtgacccttttaaacataagccagatcacgctgctgcgctgctcagaaccgtccgtggactcctacctcgtgcaatagccactgggcact

SEQ ID NO: 415474 - DNA, 122 bp, Homo sapiens
cctttgcatttactattcctgcagcttagaatcctccagtctcagaaatcatatggctcccgcccttacttccttctggtcctcactcaaaaattcatcttctcagtaaggtcttccctagt

SEQ ID NO: 415475 - DNA, 122 bp, Homo sapiens
gcaggcagcacacctggctcttgttctgccgggaggagaagcagtaggagtgcagtgagtcgatgagcttgcaggcccctgacgccgacaggatgacctcgttgatggacatggggctggcg

SEQ ID NO: 415476 - DNA, 122 bp, Homo sapiens
tctgcgctgcaggaagactgtctggtcgaagcagggcctcaggcagcgggccaggaaggccgcgatgatcagcagcagggtgacgctccagccgatggcctgcaaagtaaggaggcccgagg

SEQ ID NO: 415477 - DNA, 122 bp, Homo sapiens
agaacctaggatggagaaactaggcatgctgactgcttttgggaacacatagccgaatgccgacatctctatggtgaatggagacacttcaacattgacaactggaacagtgtatccaggaa

SEQ ID NO: 415478 - DNA, 122 bp, Homo sapiens
cgcggaaccccctggtgggttcctcccgcaggagcaccccgtccccctgcccccgctccgcgccccaggaccctctgccctccgcccgggcgcgctcacctcccggcccagcagcggcagga

SEQ ID NO: 415479 - DNA, 122 bp, Homo sapiens
tccgtgcttcttccttgcctgctggctccacctacatttattcaacgtctacttcaataacgtgtctccctatattaaaattacctgtagctattgaatgtgtcccctgctgaacttgtgac

SEQ ID NO: 415480 - DNA, 122 bp, Homo sapiens
gaaagggggacgcgttgcgcaaggtggaggcagacacctgggcgggcgctaggacccgggcggcgcacctgttggctgggcccggggccccgcccgcccggcctccgcccggagtgcgggat

SEQ ID NO: 415481 - DNA, 122 bp, Homo sapiens
agtatgatacaattactatagaactaggaaaaaccttttctatgttatcttttgagtctacgtatattggtaagaacacagagcacctaacattacttaccttgggtggggtgagaatacgg

SEQ ID NO: 415482 - DNA, 122 bp, Homo sapiens
gggcggcggtcgtcaactacagttcccatcatgccacgatccgcctggagtaattctccacgcctagtgagaacgaggagaatgccgggacccttccgcgcgcggctctttgcgcgccgcgc

SEQ ID NO: 415483 - DNA, 122 bp, Homo sapiens
ttccgaaagacagtgtggaaggtccgtcagcacggcagcccttgaagcactctgctggtccggccgcggaccctcccctgcgcgcccccacctgttgtgaagctccccaacctccgtcttgc

SEQ ID NO: 415484 - DNA, 122 bp, Homo sapiens
gagggaagagtccgtttctgcagtggatttgcccgggagctgaacttattcactggcggacggcttgggcatggaggagggcttggatggagactggggattgttctctgacccacgtagtc

SEQ ID NO: 415485 - DNA, 122 bp, Homo sapiens
agatgcaaagggctcatccttcctgtacattcgtccagggaagtctgattcatacatgaccggcacctgtgtgcacacccacagctccctctgcaccgcgtttcgccctcgctcccgggacg

SEQ ID NO: 415486 - DNA, 122 bp, Homo sapiens
agacctagcttctagtgaccttgagcaagcaaggcataacttctctggagtcagtgttctcgtgtgtgtgtgtgtgtgtgtgtgtgtgtgagtgtgagatggagtctcgctctgtcgcccag

SEQ ID NO: 415487 - DNA, 122 bp, Homo sapiens
ctcagctcgcccgggcctgccaggcctcaggtgcccaagggagccaggtcctgtggtgtgcggtctgaagccccacgggacctggtgtggctccccctctggcctcacctggacagctgctc

SEQ ID NO: 415488 - DNA, 122 bp, Homo sapiens
acacccttaacaaccctatcaggcagaacaaattgctccgcaaacctgcggcttgcagagcgatggtggactcccgagctcatcgggtccggcacctcttcaccacggaggcctcgggtacg

SEQ ID NO: 415489 - DNA, 122 bp, Homo sapiens
gtgatttctgaggacaggtcacaaaggacattatggcttcttctttcttgttctcagagacgctagctggcatgtcacgaggacactcaacacacaagcagcgagccctatggcaaaatcca

SEQ ID NO: 415490 - DNA, 122 bp, Homo sapiens
tccgataaaatacttgcaataagggaactctctcctcctacactctcctgactgatggttcggaagtcctcctgccctctgagagcttgcagtttcttgtgaaaaagagaaactaagcagca

SEQ ID NO: 415491 - DNA, 122 bp, Homo sapiens
caagaattgttcaccatttgggaaaaccacgcgcttcactggccacgctgctcctggtcccggagacccaacaatctgcatttgctgccgtcacgttcaggcgactccccaggcgcggctac

SEQ ID NO: 415492 - DNA, 122 bp, Homo sapiens
gttcatgataaattaaaagaaaatttctgtattcctaataagcccagcgctttccactctcggcagacactggtgtaggagggaacactttcttcgtggagaaacaacgcaaaataaagttg

SEQ ID NO: 415493 - DNA, 122 bp, Homo sapiens
gggacgactggaacacctcagtaggatatgggtgggcaaacgtgggccacacgatcccaccggcctcttttgtcctaagtcccgaggcacgggtgcagctagaagagtgggcggtaaagcgc

SEQ ID NO: 415494 - DNA, 122 bp, Homo sapiens
aatatggccctggccagtatgttaataatccccactggttctgagacctccatccaccaccgatgtgacattctttgtgttcaaatgtctagctgacgtctgatgcttaaaacagcccatgc

SEQ ID NO: 415495 - DNA, 122 bp, Homo sapiens
ctttttctccgccacctgggccgtgattgggcgcgacctgggctcctgggtgctcattggcgccgtgaagtgctcgtcaccgccccctcctgccccttcatgcatgcgcggaggccgcctgc

SEQ ID NO: 415496 - DNA, 122 bp, Homo sapiens
gcgccgcgcacggccgcactctcccgccaccccacgcacacgcacacccccgcccgcccacgccccccacccgggaggggggagagaggcaaaaagtaagagaggaaaaaaaatagcaggaa

SEQ ID NO: 415497 - DNA, 122 bp, Homo sapiens
taccggtgcgcggggaccacactcacaaaccgcattccggtcttcccgcccgaaaatccgcgctgtgcgagggacccacaagactggcggtctaaaagggacccgcctcacttggaaacggg

SEQ ID NO: 415498 - DNA, 122 bp, Homo sapiens
ataataacaatgccacatgttgcttgtgtgataaataatctttgtttactgtggacacttcggcaatttggttcatcttggtacagaaaatacaaagacaggactaatattttattcatttt

SEQ ID NO: 415499 - DNA, 122 bp, Homo sapiens
ccacgtcttcacttttcacccttcccgtggtggaatcttctccaatggcctggggtggaccggagggaggagggcaggactcatctgccactcagggctggtggcttccattcctcccctgt

SEQ ID NO: 415500 - DNA, 122 bp, Homo sapiens
gagcagcaaagggccactcttgtcctttttaccccacgaagtcccacctcccattccttacgctcaagttttcatttcttggagagcaccccgtacgagagaaagggaaataacttctgcag

SEQ ID NO: 415501 - DNA, 122 bp, Homo sapiens
gtcactgattctgcatttgtcaaagatctttcattctgtggggccaggtgaggtgttaaacgtgacggcccccagagccttccctccccacagacccccggcaggggtggagggggctcagg

SEQ ID NO: 415502 - DNA, 122 bp, Homo sapiens
gcaggaacatcatggcacaagggcacacgtcgcacacccagctgggcccactgtggacggcgcagatgctgcctcagagcagcctccgagacaggcagctgcagcggtgcagcccagggccc

SEQ ID NO: 415503 - DNA, 122 bp, Homo sapiens
gtgcaggacctgcctgtggggtggccctgttgatatctgaggtgagtcaacacggccatccgtgccggcactgtcaactaagctgggcaggccccgcgaagctctaaggagtcacagccccg

SEQ ID NO: 415504 - DNA, 122 bp, Homo sapiens
tccgggaggagcaggggtgccccttccgtgggcatgtggaagccagcccttcctccctcccggggcgtgagttggtgcccaggcactaggagggtatttcctctgacttcttcacctcccct

SEQ ID NO: 415505 - DNA, 122 bp, Homo sapiens
gatgccacctcgcagggctgactgtgtgctggcaccacaccgagtgctctgcttgcatagcggaacacagctttgcgacatgcccttttgcagatggagaaactgaggctcagcgaggacaa

SEQ ID NO: 415506 - DNA, 122 bp, Homo sapiens
aatcaaggctgtggaggcagattagcagcagtccagccccgagctgggacctgctcagcacgcctcctctgcactggcattgcctgcatgtccaggtcctgccacaactgcacactccacct

SEQ ID NO: 415507 - DNA, 122 bp, Homo sapiens
cccacttctgcttcacagacacagcctcccgcaggggtggagggatggtcccaggcagtgcgcagggctccagacatgagggggcattctagtaacacaggctgaggcgccccattgttgga

SEQ ID NO: 415508 - DNA, 122 bp, Homo sapiens
tttgtcttctcccacccccacttagggtctttcataagctctgaggccctcttccaaaggcgggactgtgacagatcaaattcatttatgcatcactactctcaaggtttatttaaattttt

SEQ ID NO: 415509 - DNA, 122 bp, Homo sapiens
ttgcgaagcgggtcgcagagagagatgggcgttgcagaatcagctggggtcacttatttccggtctcactccagatgaaggagccactagccggcgagagttcaccgagggaacgtgacact

SEQ ID NO: 415510 - DNA, 122 bp, Homo sapiens
ccaataggagaggcctgaggcctgaaggcggtggggcggggcattggcggctccagcaaccggaggccgtcccagggagggccaatcggagtaaggaggtgggagaaacctagccaatcagt

SEQ ID NO: 415511 - DNA, 122 bp, Homo sapiens
aaaacagggacatgacgaaggaagggacactgtatagtgagcaggtttacaagatgcttccgggataagcaggagggaaaaggcagaaatgtccacataaccacagctgcggccaaatcctc

SEQ ID NO: 415512 - DNA, 122 bp, Homo sapiens
tcccagctatagtcagagtgctctaagacccccacagcaccccatctgctgaatgtcacacgtgaggtctctaccatggaagccacagctgccacaacctcctgtctgtcaccacccccatt

SEQ ID NO: 415513 - DNA, 122 bp, Homo sapiens
atcccagggattaagcccacttgatcgtggtggataagccttttcatgtgctgctggattcggtttgccagtattttattgaggatttttgcatcaatgttcaccaaggatattggtctaaa

SEQ ID NO: 415514 - DNA, 122 bp, Homo sapiens
tgagacgcaggctccagggttgcctgtcccttcaactgtgaggttctgggggaggctcagcgggggcgtggcgtggacacagggtgactcatacagcgggcccagggccagtgtggtctggt

SEQ ID NO: 415515 - DNA, 122 bp, Homo sapiens
tgcctgactgccagccccatgccatggtaggaggcagagtctctagttccatctcgctgccgtctgtcccgttctgtgtcgaccaccaagcctctggctacctctgtcccctcaggtttggt

SEQ ID NO: 415516 - DNA, 122 bp, Homo sapiens
aatctccctccaggttaactacttcctctaaaacatttgctgacccacatccagggcacccggaaagcccacaatgtggaggcctttttctaatcctcccccaacacttttgcccctaccag

SEQ ID NO: 415517 - DNA, 122 bp, Homo sapiens
gtgtgcgtgatggcttcgcagatttgggtttttatcacccagcagagccagcagcctcttcgccgcggcgccctagctgcagggacccgcggggacgagaacgggaggcggcgagcagtgcg

SEQ ID NO: 415518 - DNA, 122 bp, Homo sapiens
ggggccagctggggcctgtgggctctgcttccaggcagtgtgggggatggcgggcaatctcgtggctctttctactcacacccttcccatcacccaccctttccaaaaaatcatccattgac

SEQ ID NO: 415519 - DNA, 122 bp, Homo sapiens
ctgaccgtggtgctgagcgcggctcgcgctccgacgcggtgcccgagcctgtcgcggccgcgccctgctgcactgcgggcccccagcggtaagtcgccaaggccccgagaggctgcgttggt

SEQ ID NO: 415520 - DNA, 122 bp, Homo sapiens
agagtgctagtaagggtaaagtcaagttacataacctagcggaaaatgaagacctaaaaccgctcgtgagcaaacacaacactttagacgtaaacctcttccaaagaagggtggatctcagc

SEQ ID NO: 415521 - DNA, 122 bp, Homo sapiens
cccggctccaaagcttcctccggctagccgcaagccctccgtttcctaccgcctccacttcgagagctccgggggatgcggcacctctaacctgcaccagcagggctccttctacaactacg

SEQ ID NO: 415522 - DNA, 122 bp, Homo sapiens
ggggcacgggtcagtagctgagggtggagtcatcccactccagctgctgctgccgggttgcgttctgggggtcgccctgctccccctcctcctcctcgctgctctccgactcggcgctggtg

SEQ ID NO: 415523 - DNA, 122 bp, Homo sapiens
ggaaacgagcgacgcgccccgccccgcggtgccccgcccacgctccgaccccgcctcccgcgcctttgccagcctggcctctcctgtccggcgccccagcgcactcgctccaggtgtcgggc

SEQ ID NO: 415524 - DNA, 122 bp, Homo sapiens
aagaccctcctgttccctgccctggagggaggagggggcttaacccccaccggggcttcccggattctcctagacctctgcccgctgaaaagcagcgggagcccgtagactgtcgagggcct

SEQ ID NO: 415525 - DNA, 122 bp, Homo sapiens
aaacaagcaagtctcctcttcatcttgcattccctactcctgcacatcagctgacttcttcgtgaatgagtgaatcagctgagggatatttatgactttggcttgtgtctcggctattgaga

SEQ ID NO: 415526 - DNA, 122 bp, Homo sapiens
actaaattcaagtttgtaacccggactctatcccatgactaaagaggtcatagcagaacacgaaggctgggcttttggtctaagaaagaatactaggagaaaaaaaaagttattttcacgga

SEQ ID NO: 415527 - DNA, 122 bp, Homo sapiens
ggccctcctgtgaagcgagggatggcacctctgccatatggcctaggttcctgcaaagaccgggcaggatgaaggagagcgtctcgggagccgagagcagacacaggcaaggctcagtgcgc

SEQ ID NO: 415528 - DNA, 122 bp, Homo sapiens
gtcccatctttaaggcctgctcttttacccgtcttgcagaagttcttccgagagtgggcccgagacagcctcccgcccgaactaaactctccgcagcgcttccggcccttggccccgaagtc

SEQ ID NO: 415529 - DNA, 122 bp, Homo sapiens
cagaatgtcaagatgccctgatgagacttggtgggcttgagaatattcagacatttgctccggggactttgcatctttccaaagagggagagatgcagtatctgagccactggagcttttgc

SEQ ID NO: 415530 - DNA, 122 bp, Homo sapiens
ttatttaaagtatattctcctcatagtcctagggtagaccacagccctccctgaggggcacggtttaggcattgggccccacagctggtagggagtcagccttgtttgcatactggcgataa

SEQ ID NO: 415531 - DNA, 122 bp, Homo sapiens
aataaaatttatgaactcattaccttgatgatgaagttcttttagatgtttggctgaaaacgtgacacccagaagggagatgtgcccctttagatggaactgagaagtgccaagttcttggg

SEQ ID NO: 415532 - DNA, 122 bp, Homo sapiens
tacgggctgcagcagtactgggggtccagggcagcggccggctggagcctgacgctggagcggaagtacggccacatcacccccatggcccagaggaagctgcccccatccttctggaagga

SEQ ID NO: 415533 - DNA, 122 bp, Homo sapiens
caagatggtggcagagcacaggcagcccagctctctaaattcctcacctcaaaggctttgcgtgaggtctttctctccacctgtctttcctttccccaactgtgttcagaggttccttggaa

SEQ ID NO: 415534 - DNA, 122 bp, Homo sapiens
tctgtcagtttctagaccagtgcttctcaatagggtgcaatttagccaccccgcaacccccgccaagacatttgacattgactggcacatttttgtttgtcacaagtaggaaagggatgtgt

SEQ ID NO: 415535 - DNA, 122 bp, Homo sapiens
gaaagcaattacccgtgtatcaacagtcaagcggctcggcgcgcagtgccggcagaagcgcgttcggctccatctgggaataaggattttcaattaggaggcaaatggctgcagaggggctc

SEQ ID NO: 415536 - DNA, 122 bp, Homo sapiens
acgcacgggcctcggacgcatttccagccccggcgttggttgtggatgctggacatccaccgcctccaggcagtttcgccgtcacaccgtcgccatctgtagccaaagcaaaacatatccta

SEQ ID NO: 415537 - DNA, 122 bp, Homo sapiens
gatcacacagcttctgattcccctctcaccccaagtaagaccattttataacctatggaacggaaaaagaaactccagataacacatatgtttatttttcaaccaattatatgtatatattg

SEQ ID NO: 415538 - DNA, 122 bp, Homo sapiens
gcccggccacatcggagccaatggctggtctctggacctcggtctccacatttgctcagccggcaggaacatcccttctcccgccctctacctcggtgggtggccacggccgagcaggcagc

SEQ ID NO: 415539 - DNA, 122 bp, Homo sapiens
caggctctggtttgctgtaaaagagacctaatcttgctttagttccctggatccggagcccgtgaaactgccagcgtctccttgacacccttcagggatataaacaggggcctgctggtgcc

SEQ ID NO: 415540 - DNA, 122 bp, Homo sapiens
agctatgtgaggtatgcaggcccagagagacatgagcataggacatcagtcatgcccctccgacctgtgcttggaggcaattgtttcaagtcattttatttctgactagctacctcacccat

SEQ ID NO: 415541 - DNA, 122 bp, Homo sapiens
cattctgctcctcactccccctcgtcttgctcagaaggaacctcatctgctccttactgacggcgtttcgttttctgatccagccagtaccgtgtcccccccaagttctcatcttcagcatc

SEQ ID NO: 415542 - DNA, 122 bp, Homo sapiens
cccgacgctccgcccgccctccacgctccgccccgccctcccggcccccgcctgcgcccgcgccctgggctggtgcccgccaccccagcgatctcatactggcccctgggcgcacggtgacc

SEQ ID NO: 415543 - DNA, 122 bp, Homo sapiens
gaaatacggatccagattttaaaggccttcgaatccaaagtcctcgttttacaaagagcccgcggggtgaaatgacttgctcatggtctggtagctaatcgcagatctgctctctaactcct

SEQ ID NO: 415544 - DNA, 122 bp, Homo sapiens
ttatttgtttcacacttttggaaatatgaacagtggtggatgcatagatctatgctgggtcgcttctcacagaccttgattcctgaaatgatgcaggagcagggtcaatgaaaccatgcacc

SEQ ID NO: 415545 - DNA, 122 bp, Homo sapiens
cggggcgccagggctggagcgcgcggctcgggggtggaggctgcagagccagcgagcgagcgaggggcgggggcgcccgggccggcgcgcaggaggggcgggggcggcggggaggggggctc

SEQ ID NO: 415546 - DNA, 122 bp, Homo sapiens
gtagccggcggaggcccactgtgacgagcgtgcggcgccgcccacggaggcccactgtgacgaacctgcgttctgcctcagcactgtgtatcctcggggacgtcggcgctccagctgcactc

SEQ ID NO: 415547 - DNA, 122 bp, Homo sapiens
ccgcactgactgacaagccgcgcatatttatcctcgcgcgcggaggggagactctcagaacgctcctcgaccagcagcgaggaagtcgagcccgcatcccgcatcccgcatcccgcatccag

SEQ ID NO: 415548 - DNA, 122 bp, Homo sapiens
aatattaataacaactcaataacttaacaatagcattaataaacaagtgacttggccgggcgcagtggctcatgcctgtaatcccagcactttgggaggccgaggcgggaggatcgcgaggt

SEQ ID NO: 415549 - DNA, 122 bp, Homo sapiens
ctgctgtgggcaccttggcagattcagatgcggtctcctctggactgcaggcagggccctcggaggtgtttttttccatcattgctggactggctggggggccagggtggagtgtgcagggg

SEQ ID NO: 415550 - DNA, 122 bp, Homo sapiens
gggacctgccacggtcgtgcctgtgacaagtcgttaggatctgccatggagatccaccaccgtatccctaagtggacggactggcgctgtcaccacgggctggcgcactctccctgggcggc

SEQ ID NO: 415551 - DNA, 122 bp, Homo sapiens
tgtggccccaaggttcctggcaggtctctcccgcaggaccatggagctgccgttcccagacggccaagcctgcacagaccagagccaggtcccagggagatggagcgcttctggttctgtag

SEQ ID NO: 415552 - DNA, 122 bp, Homo sapiens
gatggaccaggaggtagcagagttcttgattgaactctgcacactcagaatctgcactgacgctagatttgacaagagaataagggaagaagggagaaagaacaggactggttattcaggtt

SEQ ID NO: 415553 - DNA, 122 bp, Homo sapiens
gttattcagggtaacgtcagaggtcaggtctgcccaatcaggattcgcaaatccagaagacgcactactattggttgaaattaaactgcagccctaaccaacaacacgtcttctttttcgcg

SEQ ID NO: 415554 - DNA, 122 bp, Homo sapiens
tttacagcccaggttcagccgattgaattagggtgtgtcaccatggagacagggccggcccgcgtgctcgcttgccattggctggggactccagggcaagggatataagccagagcctagac

SEQ ID NO: 415555 - DNA, 122 bp, Homo sapiens
atcatcagtaggggatttgcatttctcctcccacttgaggctttcctgtgcgtcagtgttcgagtctctgggactttacttgggtcagttcccacccactctattctagaaatgctaacacg

SEQ ID NO: 415556 - DNA, 122 bp, Homo sapiens
ggcagaaagactgtgcctttacggtggtgagtcttccgatgcccaagcctcaccccagaccgatgaaatcagaatctctggagacccgacccagacattggtgggttttagggctcctggct

SEQ ID NO: 415557 - DNA, 122 bp, Homo sapiens
tcagcacgcgatatatttcttgcaggggatcctctctggctcttgccagcgcctctcccccgtggctggcagccgccctagccgggcctgcaaacagcggatgccccaggtcgctatccctc

SEQ ID NO: 415558 - DNA, 122 bp, Homo sapiens
actgctgtggacacggcatctcgcacgcccccgcccccgaggccccgccaggggacacagcgccgtgcaaatgtacaaacacaaacgcacatttcgtgcgcgcccaggtgcccgccgcgctc

SEQ ID NO: 415559 - DNA, 122 bp, Homo sapiens
cgcctacctgagggcactggcctggcggaccgcgccgggggagcacttccgctggacgcacgcacttccggccccctggaaccaatgagagtgcgaccgagatgttccactcgctggcgtcc

SEQ ID NO: 415560 - DNA, 122 bp, Homo sapiens
aaagaaggaacggtggaagaagtgaagggtcgaggagaagtaaagggaggccaggagacacgcgagcagtgcacggagtcccaaggcacactgaaggaaatgcacggagtcccaaggcacac

SEQ ID NO: 415561 - DNA, 122 bp, Homo sapiens
ttggtccgagtcactgcgatgctgacgctgtggttggtgagtttggatgtcagtcagagtcggaggcagggtcaaatagggagaaatggcgacggagcctggctgtgggtgagtgcttcctg

SEQ ID NO: 415562 - DNA, 122 bp, Homo sapiens
aacatggctaatagctgtcagcttatctctgctactcacagaaaaggtaaattatgacatcgatctaacctgtgccttgaaatgaacagcattaaaacccttgttattaggttctctcatga

SEQ ID NO: 415563 - DNA, 122 bp, Homo sapiens
attgtgagaagataaaatgcaatgctcatcatggatgaatggttactctcgttctgtcctcgagccacaatcaattgtacatcattaacaagacacaaaatctttactaattagcttttatg

SEQ ID NO: 415564 - DNA, 122 bp, Homo sapiens
cctagtttctagcactccaccagctttgagctctgtactctgacatttcaagctttatgccgccctagcttgagcatagttgggaaagagcatcatattcacagatttggctccatgttact

SEQ ID NO: 415565 - DNA, 122 bp, Homo sapiens
aaaaacaaaacaaaacaaaaaaaacctctgtttccgcccagtttcgaaccggggacctttcgcgtgtgaggcgaacgtgataaccactacactacggaaaccacacgcggaacctgcgcggc

SEQ ID NO: 415566 - DNA, 122 bp, Homo sapiens
tcgggacttctgctaatttcactccatctcaaggaagtgattttggggttggtggttccccgtcctctcctccctcctttttctctctctgcgggcacaaaaggcccattactcattgagcc

SEQ ID NO: 415567 - DNA, 122 bp, Homo sapiens
cataatgaaaaatctgacagccttctttttagagaacgctctgcaagcgaagcagctcaacgatgctgactattctctgtcaacttgatttcaaattgtattgtctaaatcttgccattagg

SEQ ID NO: 415568 - DNA, 122 bp, Homo sapiens
gaggtctacgttttattttttaagaaggcagagctcgagggggccttgaagtcacatcgccggctgctgagtctacgaacagggaagcagccgcagtccccgaaaggacccgtcccagcgag

SEQ ID NO: 415569 - DNA, 122 bp, Homo sapiens
agatgtctagttatcaacatgataggaaagggggcattatcggcctttagtgttgaggaccgacaatgtaaaatatcctgtgcaggatagtacctcagaaggaagaattctgctgtaacctc

SEQ ID NO: 415570 - DNA, 122 bp, Homo sapiens
agcaactcaagacaagttagcaatttccgccgggaagccgtgaacatcggcagccactggcgtttcctccgagtcctcggaactccggaaactctgggagcttttagcccgcccaccagggg

SEQ ID NO: 415571 - DNA, 122 bp, Homo sapiens
tgatgctgaggcagtttgcaatcccatgacaactggatttaaaagtacagtacagatagtcgtactgatcatgagagactggctgatactcaaagttgcagttacttagctgcatgagaata

SEQ ID NO: 415572 - DNA, 122 bp, Homo sapiens
cttaaaccagcatcacttttgtcttcaatttgccttccagtgattttagtttacaacctgcgttttgttatttgaaacacacacacttatatataaacacatgtaattttactattttattg

SEQ ID NO: 415573 - DNA, 122 bp, Homo sapiens
caagggacagctgggggtaggtggccacatcccggatggtacctgtgaatgaccatcacacgctctctgagccccctggggtgcagggggcaggcaggtgacagggtgcctggctgattccc

SEQ ID NO: 415574 - DNA, 122 bp, Homo sapiens
ggtgggaagatgggaatgaggaccgggcggcgggaatgttctcacttctccggattccaccgggatgcaggactctagctgcccagccgcacctgcgaagagactacacttcccgaggtgct

SEQ ID NO: 415575 - DNA, 122 bp, Homo sapiens
aaaaagaacagaatagctgagtgccctcagggaatcctagtgttactcccgttggccacacgctgactttatttagagatcaagtaaaggcgctatggctagcattcggcgaaaatgagcac

SEQ ID NO: 415576 - DNA, 122 bp, Homo sapiens
tcaatcatctatctatctattgagacagggtctcacactgtcacccaggcaggtgtacagcggcacaatcatagctcattgcagcatccaccttctgggctcaagcaatccttccacctcag

SEQ ID NO: 415577 - DNA, 122 bp, Homo sapiens
atcatgcccagatttctgattaagaaactataaacaacaaatgagtgttatttggccaggcgtggtagtgcacacctgtatcctaacatttgaggagctgacacaggaggaacacttgcagc

SEQ ID NO: 415578 - DNA, 122 bp, Homo sapiens
tggcgtcaccacgacaaacgtcgccaggctgagccgacttaagggggcaacggccgccaccgggttctggcagcgttaaacgttccccactacgtttttggtgcccggtctcgccctccaag

SEQ ID NO: 415579 - DNA, 122 bp, Homo sapiens
tctgataatctgccctgtctgtttggggcacagagacctttcacatgtcatataattacacgtacagttggatttactttccttgctttgttgtgtcttttttattcttccctttttgattt

SEQ ID NO: 415580 - DNA, 122 bp, Homo sapiens
ggccacagcgggcgggtcctggagcggctcgggagagcggagggtcggcgagggtgcctgcgcgcggctgggcctggggatgcaggttccagcctgcttgcgcgtctcacctgatttaggag

SEQ ID NO: 415581 - DNA, 122 bp, Homo sapiens
gtcataaggaatttttcttctccaaattagtctgttgcctgtattcccagcactgcctagcgtcttgttcacagtaggaagataatgagcgattgctgaatggatacgttaaatacttcttc

SEQ ID NO: 415582 - DNA, 122 bp, Homo sapiens
gaggcccccaccacacactccaggccgaacctggctccgagtaattccagacccacttcccgtgagaaagtccaggcaggatgaacctcctggggacaccaagtggagacagacatgaacct

SEQ ID NO: 415583 - DNA, 122 bp, Homo sapiens
ctctgttaacccagcaaggtcttctggtggtggctgcagactctgcactctcccctgtgccgggactctgggtcttgcttctgagggtttgctgcagtcaagggagagatattttcaatgcc

SEQ ID NO: 415584 - DNA, 122 bp, Homo sapiens
tactccacgtgtcctgcaacacaaatgctggcatcttgctctgaagaaaacagtgcactacgaaaaataaagcagaggctgcagagtaggctacacgctggccatgagaatgaaagaggcca

SEQ ID NO: 415585 - DNA, 122 bp, Homo sapiens
tccccacccacagatgccactccacccaggcccttctggggcaaagctgcagcacgaggacgggccctccccgctgcggcacctgatgccacggcggatggcctccgtgggcgcgcacgtga

SEQ ID NO: 415586 - DNA, 122 bp, Homo sapiens
tgggcaagtcacttcacttgggtcactgaccctcagtttcttccttcagcgaaatgtgcacgatgataggaactacctcttgggcctttattacaaccaggtccaggcacaaagtcaaggaa

SEQ ID NO: 415587 - DNA, 122 bp, Homo sapiens
ccaagccactcagtcctggggaacccagcttctcagatgcaggtccccctttagggccaacgatgacccttggagtaccccaccccctaaccccacgcttcctctgccttttccctttccct

SEQ ID NO: 415588 - DNA, 122 bp, Homo sapiens
gctactggcacagacagcagggaatcgggagtttgaaagaagatttacatttggcatacacgtgtgcccacgtggcctttcctactgcaaagggtgctgacaaaatcaagcccctgatcctt

SEQ ID NO: 415589 - DNA, 122 bp, Homo sapiens
cgatgagtcaacaggagcatttttagagcgcctccaatcggatttacaccccttttgacccggcagtccccgaaaatagctgtgctcttaatttggcatttgtggctcaggcagccccagat

SEQ ID NO: 415590 - DNA, 122 bp, Homo sapiens
ccggtccgcgcgccagacggcggtgctcggccgtgcccggtccctgccctccccattctccgctccccaccgcgcccagctgcgccgacgcccccgtccgcccccacaccacccctgccttc

SEQ ID NO: 415591 - DNA, 122 bp, Homo sapiens
cagcgacgcggctaaaagcgaaggggcgagtgcgagtcccctgagctgtacgaacgcggtcgccatggaccgcccagatgaggggcctccggccaagacccgccgcctgagcagctccgagt

SEQ ID NO: 415592 - DNA, 122 bp, Homo sapiens
taatggtggcagaggaatctctagctctttcagtcttagcttttcatattgtgaaactctcgcttgtacaattcttgggtcctttgtagagcttagcttagtttttctggtggcaaggcagc

SEQ ID NO: 415593 - DNA, 122 bp, Homo sapiens
gaggagcttctctgcccggccgccatcccatctaggaagtgaggagcgtctctgcccggccgcccatcgtctgggatgtggggagcacctctgccccaccgccccgtctgggatgtgaggag

SEQ ID NO: 415594 - DNA, 122 bp, Homo sapiens
ccgactctcatacgcagccaatcggaagtgaaggcggggcttctgggtcttcctggagtgcgcatacatgggccagcggccacaagaattacgatttaccccatcgtcctctgagctttggg

SEQ ID NO: 415595 - DNA, 122 bp, Homo sapiens
tctcaggtggcacagctgcccaggatgggcttggtgctggtcccagggaggcagatgacacgtgttgcccctcagaacagtggggacagccaggtgtgccacaggccatctcgcagggcctc

SEQ ID NO: 415596 - DNA, 122 bp, Homo sapiens
gagaacgcccccggccagattccccccggagagacccgggtagggacagggacagagagacgcctctaggggcagaggccctgggaggcaaagacccccaggagagatttacccaccccaga

SEQ ID NO: 415597 - DNA, 122 bp, Homo sapiens
cagcctgatgcttgttccttaatgcaccctcagtatcaagccaaatgactccttaagcctcgaaacagatatgtatgattatatcaagaccctaaagaatgttcataacctttgaaccactt

SEQ ID NO: 415598 - DNA, 122 bp, Homo sapiens
gcaggaatgggcatcgcccaaggacgtttccagggcggccctcttctgggggggtttccacgtcgctccatccctctgtggtctgagttccagggctgtgctggaacgcgaggcgagcccgg

SEQ ID NO: 415599 - DNA, 122 bp, Homo sapiens
agccagggctgaaacttctgtggatttcaaagtcagggacagcctcaggacgctgtaatccgcttgcctgcagagaaatcccctagtttctcctgaatcagacaagttctccagtgtctcaa

SEQ ID NO: 415600 - DNA, 122 bp, Homo sapiens
aaggatgtacactggtccctgtaaggtcctccacctctcatctgggcttttaccaaatagcggtaggtttggtattgttctcagcgatgaataccaggttgtaacatctttatggtgccagc

SEQ ID NO: 415601 - DNA, 122 bp, Homo sapiens
atccccactgcggggctccttcgggccgggcgcggttgggcgggcggcggggtgtggcggcgcctttgttccaaaccttggcctgtggttgggggtcctgcggctgggacccgcccctgacc

SEQ ID NO: 415602 - DNA, 122 bp, Homo sapiens
ttttttttttttttttttggtccgagtagcttttaaagggccagtagctcggttgccctccggaaggaatggggaaatcagagagcggtgatactgggttaagagtggaaggattgtttgga

SEQ ID NO: 415603 - DNA, 122 bp, Homo sapiens
cagcagcacctggtgcttggaaggactagaggacctgagatgtcagtgtctagggcccctcgttttacaggagcccagagagggaaaggcctagcctgaggtcacacagcacgacagcacaa

SEQ ID NO: 415604 - DNA, 122 bp, Homo sapiens
ctccccctcctctgtacctccaagccccgcggccagtttgcgcgtgcgtgccaagtgccgcgcggaggcccgctcactcgggcccgccccccaatcccggctgcccatggcgctactcgctc

SEQ ID NO: 415605 - DNA, 122 bp, Homo sapiens
attctatttgaagatcaatcctaactctgggaccccttgggaatgtccaggagctaggaacgcagcgccgcggtctctccagcctctggtccctgggagcaagcagggcaccggtggagcag

SEQ ID NO: 415606 - DNA, 122 bp, Homo sapiens
ggctcgctgtggactcgtcatggcgaccgagcagaggcctttccacctggtggtgttcggcgcgtctggcttcaccggccagttcgtgaccgaggaggtggcccgggagcaggtggacccgg

SEQ ID NO: 415607 - DNA, 122 bp, Homo sapiens
gggagccccccgggcagccgcgcgccccttcccacggggccctttactgcgccgcgcgcccggcccccacccctcgcagcaccccgcgccccgcgccctcccagccgggtccagccggagcc

SEQ ID NO: 415608 - DNA, 122 bp, Homo sapiens
tacccacaccattggatatgattcggccacaaaaaggaccgcagctttgacatgccggggcgtgggggatgctcagcgacttcatgccaaacacgaaagatcgcgttacgtgagtccacaca

SEQ ID NO: 415609 - DNA, 122 bp, Homo sapiens
ggaggggaagaggaggagccggcgcgcgcgccacccaggcggggcggtgcttccagggggcgagtaggccgccaccgccaccgccaccgccaccactgccagaatcgcctctcgggggtcgc

SEQ ID NO: 415610 - DNA, 122 bp, Homo sapiens
aaagagaagatgtactaataactctgccccagggtcactgtgagatcatgtagtctgaaccgcactaagcactttgcagagtgttttgctcttcctttagccccagcttgttttccagggtg

SEQ ID NO: 415611 - DNA, 122 bp, Homo sapiens
actgtgagtttctgactccccaaatgaaattgaggcccagaaactttcaactgctttgttcgttgaataatgccaagtgtctggaaatgtgactattcagattaaatgcttaatgtgtgtgt

SEQ ID NO: 415612 - DNA, 122 bp, Homo sapiens
tctcttcttgactcctaaatgttgttgtccctgagaactcactcattgcccctcctctttcgacgcttcccctggctgaataaccccaactgtgttctgatacagcatactgtctcaggcag

SEQ ID NO: 415613 - DNA, 122 bp, Homo sapiens
ttgtaggcagtgggacttgtaatcaggtcctgaatgtttcccaacaatgccctttcactgcgtagtactccctgcggtgggtcaaagggattcctgcagtgttgcaacctgagtaggaaaag

SEQ ID NO: 415614 - DNA, 122 bp, Homo sapiens
ctcacctttaagagagtcttaaaggtaaagacacgaaaacacttcctccagggaccttcccgaaaacgttctggctctcatctggtgcggcatgtgtccactttgcctttaaggagttctta

SEQ ID NO: 415615 - DNA, 122 bp, Homo sapiens
tgaatctgcatagtcttcaaaataggggaggaataaaggagcaatttgtggttcacagaacgactattgtcaataacaagtggaagtgaaaaatttttaagaattactaagacttgcatttg

SEQ ID NO: 415616 - DNA, 122 bp, Homo sapiens
ccaacagtagggaggggtttccccaacttccctccaggctcctggcacggggctggcatccggttgtacctgcaacacaggttatcttacgagtgaatggagggcccctacagcctcccatt

SEQ ID NO: 415617 - DNA, 122 bp, Homo sapiens
ttgggctcagcactaaggagcacctgacttttccgaggtgcatccataagtcccatggtccgtgtgctcctccatgcctccgtgtgcgcatgctctgctgccgggccacctcccgcacctcc

SEQ ID NO: 415618 - DNA, 122 bp, Homo sapiens
tttaccctaaatattcttagtctgaaaagtaattatctttgagcttataaaatggatccccgctaaattcatgaagtcagtagaaaaagggaagaatattgcaatatatattttagatacac

SEQ ID NO: 415619 - DNA, 122 bp, Homo sapiens
ggaacaaagtgagggggagccggccggctggcccgggaagccccaggggcgcaggggaagcgggactcgcgccgggcggggtttccctgcgccccggcgccccgcgggcagcatgcccctgc

SEQ ID NO: 415620 - DNA, 122 bp, Homo sapiens
ccatgcgttctatgtctctggccaggactacttcgtcagccctcgagtagaggtagagctcgggccagcgagagcccgcgtcctgtagcctgtcatagaagtgggtgtggaagagggctgtg

SEQ ID NO: 415621 - DNA, 122 bp, Homo sapiens
atttttgcatcaaagaaaggacatgatgaagataatgttttaggaagcttcatctgagagcgttatacaggaggtactaaaggacgcatcagttacaatccccaacatgctgcttcagttgc

SEQ ID NO: 415622 - DNA, 122 bp, Homo sapiens
ggatgcatgtaagagacttgttaattacacgttctatttaggtcacactgataggcaaatcgctattctgggcccccaggaagccttttcgtccttgctatagtcaattcattctccagatg

SEQ ID NO: 415623 - DNA, 122 bp, Homo sapiens
cacccgaatactgtgcttttccgaacggcttaaaaaaacggcgcaccacgagattatatccggcacgtggctcagagggtcctacccccacagagtctcgctgattgctagcacagcagtct

SEQ ID NO: 415624 - DNA, 122 bp, Homo sapiens
ctgtcccggggcccccactttagcctgttgcttctctggtcgctccaggtcggtttttcccggcgactctagtgtggcttccaaacttctgggctctgggctcacttcggaatttgcccccg

SEQ ID NO: 415625 - DNA, 122 bp, Homo sapiens
ggccatcagaacttggggagagcagagcccgcctgcttcctgagtgaagcattgctcaagcgctctctgcccggccccctccgagtgtggttttcctcccaggccagcaccaaacccagaat

SEQ ID NO: 415626 - DNA, 122 bp, Homo sapiens
agctgggctatgacacacgtgtgaccatcctcgggcacgtgcagagaggagggaccccttcggcattcgacaggatcttggtgagttgggaagggttgggcatcttcacaaggtctctagga

SEQ ID NO: 415627 - DNA, 122 bp, Homo sapiens
ctttctctgaagcccttgggcgcaccttactggtagactcctacctggaggtgaagggctcgtagattttctgggagtggcagagggatgtggtccaagttgttatcagtgaggtacagatg

SEQ ID NO: 415628 - DNA, 122 bp, Homo sapiens
gttgcacctggtcttcgccgacagcttgcaggaggtgctgccggatatcactgaccgccccgacccctctgacctccaggctgagctgcagttttacctagtggtggccttggccttgatct

SEQ ID NO: 415629 - DNA, 122 bp, Homo sapiens
cagtgacaagttaatatgggcgtccaagcctctgtttcccaggaggaaatttgcaagaggcggcagcccctgagcgcccagagctcttgaaaggccacccaggagaggtgtgagacccggcg

SEQ ID NO: 415630 - DNA, 122 bp, Homo sapiens
gtcagtaacacatgtgtaagagccgcggagggagcgagcgagccggctagaggccagcgccgccgccgccgccgcctccgagccgggcagcaacagccccggcagcggcgcaggctccagcg

SEQ ID NO: 415631 - DNA, 122 bp, Homo sapiens
agatgccactctttgtgggaagcggtcctcgaaacgcgttcaaatcggggagaggtcgggcgcgggctcacgcccgtaatcccagcactttgggaggccgaggcgggcgctgcgcatctcct

SEQ ID NO: 415632 - DNA, 122 bp, Homo sapiens
ctgagctgcagatgggcaccaacatatgtgcctgccagtcgggcgcgacaacttagggcacgatgaggcatctctaccaccccaagaaccgtatcctgccctctggaccactcgaccatcag

SEQ ID NO: 415633 - DNA, 122 bp, Homo sapiens
gcaacatcttggatgctgggtggggcaagcattggcctgggactcagaaggcctgggttccggtcttggatctgccactcacaaaggcacaacaccgggcagcagcctgaccactgttggcc

SEQ ID NO: 415634 - DNA, 122 bp, Homo sapiens
ccattgccctcctcaggcacatctcccagcagtctggagggttcgctcttgaattctgaacggactgcaaaccttcacatggaagctgactgtgacctccggatggttgggtccacaaaagc

SEQ ID NO: 415635 - DNA, 122 bp, Homo sapiens
ttatgctggcttcataaaatgaatttctagtttatccggccaaaggcccatggatcacaacgctgtgactaaacattctttcaagcatacagcaaatatttattgggtgcacgctatgtgct

SEQ ID NO: 415636 - DNA, 122 bp, Homo sapiens
cctcccctccgcccgcccggctcatcccttcagaaggccctcgtggctgcccacctttctcgccaatcgtgggggcctcacctcccgggacagtcccgaggcattgtgttttttgttttttg

SEQ ID NO: 415637 - DNA, 122 bp, Homo sapiens
ttgtcctgcagattcccctccccatctttctctgccacacacgcttccctaagccgcgcgcgccgcaaactcagtctcggtccccgcaggtgatgtcatgcccattgttttggtgcgcccaa

SEQ ID NO: 415638 - DNA, 122 bp, Homo sapiens
agcgggccggggaacagatggcaccgcggcttgcctatttttgctttttggcagaggtgacggacgcctagaattactgactgataatggaatgagtgttaggtggactgacgccggaaaag

SEQ ID NO: 415639 - DNA, 122 bp, Homo sapiens
ccagtgcaccagactgctggtcccgcagcaactcgcggccgggtccctcctctttcacgtcgcccccgaactgggacacagcctcccaccaccgtgatgcccgaatccccttccctaccgcg

SEQ ID NO: 415640 - DNA, 122 bp, Homo sapiens
ggggtctccaagaggagtgggtcgtggtgggcgttgaagggccgtaaaagacgagcagcccgcgtccgcgtccgtcctcccgggtctccagtccgcaggcggccgccgcctcggccccgccc

SEQ ID NO: 415641 - DNA, 122 bp, Homo sapiens
aagcactttaacttatgtcagcttatttagtccttccaatggaaaccttgtaaggtgagccgagaatgtattactagtccccttttaaaggtgaggaaattgagcctcagaaaatttcacta

SEQ ID NO: 415642 - DNA, 122 bp, Homo sapiens
gcttccggacccgcgcgactgcgaagagccctgacccgggggcgcccacgcccgctcctgcgcagcttgggggcgctggcctcagagacaccctcacttgaccccgagctcaccacagctga

SEQ ID NO: 415643 - DNA, 122 bp, Homo sapiens
ctcggggtgcccacttcccttatggagaagccaaggcaaataaagcccagtcccacatgacggtcaaggaagtgcggggcagaccgtattcagggtttcaaggcgctgaccccggaaaggcc

SEQ ID NO: 415644 - DNA, 122 bp, Homo sapiens
gatttctttttcagatcatccattcggatgcactagacaaaagagaagtgggaaaacaaacgcaatgggtaaaaataaagcgaatatcatgacagttcgtatagctaatgagaaactcagct

SEQ ID NO: 415645 - DNA, 122 bp, Homo sapiens
ctcccgcggcccggctcccgcagcccccggaaaagccagctttcctcccgccgagctccccgctttttaataaaatccaggtagcgccggtttaaagaatcccaaatctccatatacagccc

SEQ ID NO: 415646 - DNA, 122 bp, Homo sapiens
acgaaagggggtccaggagacgaggtcagcgaaacgcgcctggtaaacagttaagggccgcgcagcactacccacaccggctcccgccccgggacctgcccccggggagtctgtcctgaatt

SEQ ID NO: 415647 - DNA, 122 bp, Homo sapiens
acactcacttggccactctttcattacctgggggagggagagtgctcccatggcaccacccgaacgctcactacctgagagcaaggacaggagggaggtgtgctctctatcctggggaaggt

SEQ ID NO: 415648 - DNA, 122 bp, Homo sapiens
ttgaaccccacggaaatctgctcttgtgggcacttgcaaaacaacgaaccccacgtgatccggagatgtggtggaggggtgaggctaacatttcctacaacctcctgcaaaggatggaagcg

SEQ ID NO: 415649 - DNA, 122 bp, Homo sapiens
acggagacagacatcaggacatccgtgactcctgcaagcctgaagaatagtctttccatacgtttggcctctctcaccttcctcttctgaggggaggtaggccaaaggcggaattacttaca

SEQ ID NO: 415650 - DNA, 122 bp, Homo sapiens
aagggtatcccgtgagcccctagggatggagaacagaaggccacttttcctaaacacacacgtggttctgtcctggccagatcagtggacttccagtgtccttcctgagtcacaccgaggtg

SEQ ID NO: 415651 - DNA, 122 bp, Homo sapiens
ggccggctgctccgagtgcggggccgccgagcccacgcccacccggagctcgcgctggcccgcaagcaccgcgtgcagccccggttcccgcctgcgcctctcccaccaaacctccacgcaag

SEQ ID NO: 415652 - DNA, 122 bp, Homo sapiens
cctgcacttccccagcgagctctaagccaaaaactgcgctcaagttgagtgcagaagctccgcgctgaaccgtccccagaacagacaggcgagagaacgacggctggagctgaggggggttc

SEQ ID NO: 415653 - DNA, 122 bp, Homo sapiens
gggccagcttcgccgcgggaaaagaacgggaggcggagtgtccgcagcgcgcacgcgcaacgaaagtcaatggcggtctggagagactggcggaagctagctttgcaatatggcggccgagg

SEQ ID NO: 415654 - DNA, 122 bp, Homo sapiens
cgcccccagggaccggactgggtgcgccgtccacccttccagtacctggaacattctccgcggattgggaggttctgggttctgccctagattcccaagcaaagttgctcctttgctcttgt

SEQ ID NO: 415655 - DNA, 122 bp, Homo sapiens
cctcaatgtcgggggccgctccgagtgcagggcccgccgagcccacacccacctggaactcgtgctggcccacaaccaccgcaggcagcactggttcccgcccgcgcctctccttccacacc

SEQ ID NO: 415656 - DNA, 122 bp, Homo sapiens
aggcgaggctggaggaagagagatttctcggaactttggggaccgcggcagtcggtctgccgaccctaggagcactaaactccagcccctacgagttgtgcttctaacaccctcaagtacag

SEQ ID NO: 415657 - DNA, 122 bp, Homo sapiens
accccttatcttggtgtttcttgcttttcctcgcagccccgccctttttgcttcgaaggacgagtttttcctgaattcacaatacttttgcattgaagatgtccggtccctttaaggtcttg

SEQ ID NO: 415658 - DNA, 122 bp, Homo sapiens
tgtctataaccagctggcacccagagcccagactgagtggggctgctggtcagggatgggcgtgaagggcagaagtctgggccaggggagatggggatagcagggacagaggggctctccag

SEQ ID NO: 415659 - DNA, 122 bp, Homo sapiens
ccgggacctccacgtcgcgcgcaggccactaacctgtcagcaagaatgtgccagtggtcgcggggctcatcctgcgtgtcccccgaccctgtcccgtccaagcacaggggtctcccagctcc

SEQ ID NO: 415660 - DNA, 122 bp, Homo sapiens
agggccgggccggagcggggtgggtaggggacgcgaggcggagcggggccccacacaggccgcggcggctggctcgggcccctacggtcccggcggcggctggaggaggaagccaggcggct

SEQ ID NO: 415661 - DNA, 122 bp, Homo sapiens
cttccctggattaaaaaaaaaaaaaaagtgttaacagtgtggtctccagggattgatattcggaatgctattttaaaatattttaaagagcatcgagaaaagagagagtcttagctcttcta

SEQ ID NO: 415662 - DNA, 122 bp, Homo sapiens
gtaatcttaatgctgcttaatgtccataacacgctaaataagcctcattccggttgatatcgaagttcagaatgattggctgatgtcatagttgctcatgctacctagtggattttcactga

SEQ ID NO: 415663 - DNA, 122 bp, Homo sapiens
cgtagggcatggtaagggtgtaatcctcggctcggttcaggaaggtgagcgtggctttgccgtccagcagcgccgacagcgagttccctgcagagacaagagacagcaggaccagtgagtgc

SEQ ID NO: 415664 - DNA, 122 bp, Homo sapiens
cctgccttggcctgcattttattttcaaccaaggttgaaatggtagccccacgcaaaatccgatggtgtgtggaggaactgcccagtcattgcagtctgcacgccttcttaagtgccaggtg

SEQ ID NO: 415665 - DNA, 122 bp, Homo sapiens
ggcagcttcttaacccggttgaggagggtgtctgctgtcccccggtgcaggggctctgggcgaagcagggccacaccccggcgggaagggccccctcgagactccttcctgaggaagggaaa

SEQ ID NO: 415666 - DNA, 122 bp, Homo sapiens
cctcagaggtccaggggcttggggaaggaggatgtatgtttctccctccccccaccgccccgtgacttctttgggggcttgtttgttgtttgggttgttcttgctctctctttctggggatg

SEQ ID NO: 415667 - DNA, 122 bp, Homo sapiens
tattaaaagacaagctatcttggctccatgggagtctgattaccttcatagactacctttcgcaaattcccatgatgcctgtagtgagtgctgcatactcagtctccacctcccaccctccc

SEQ ID NO: 415668 - DNA, 122 bp, Homo sapiens
aatcctgctgctcaaggggtggctctggcttcctggcagcaattagaaaaatattcttctcgtcatctcagctgtgacactggcaaatatacagccttgtcagttgatattcagggctaggc

SEQ ID NO: 415669 - DNA, 122 bp, Homo sapiens
cgtcgagtctgccaaccccatgataaaatgacaagaataaatcttgccacctatggaggacgctgcactttgacgtcgctggggagaggaggcgggtgcgagtgaacacaaagcagtttggc

SEQ ID NO: 415670 - DNA, 122 bp, Homo sapiens
taacactcacggcaaaggtcttcagcttcgctcctgaagtcagcgagaccacgaacccaccggcaggaactaacaactccagaggcactgcctttaagagctgtaacactcgccgcgaagat

SEQ ID NO: 415671 - DNA, 122 bp, Homo sapiens
cagagtgtgtcattccattcatgatcctggaatagggcatgaaagccagtggcagacacccgaggccttaagaggtgtgtcccatgaggatgggaaggtggtaaagtttatgcaaacaatag

SEQ ID NO: 415672 - DNA, 122 bp, Homo sapiens
aaggttacattcattcattccatacacatttactgagcacctactgtgtgccagtcttggcgacgacccagtcaggaatagaactaacagtaaaccctgccctggagggcttctggtaggga

SEQ ID NO: 415673 - DNA, 122 bp, Homo sapiens
cttccgacgcaagaaccggaagccatggcctgacttccggcaccgccccgctcccccgcgcggtgtttcaaagagcctgagcgactccgtgcagcgaaccgcgtgccctccgccacctgttc

SEQ ID NO: 415674 - DNA, 122 bp, Homo sapiens
tcggtgctgcctctgttgctggtgttctcagactggggcgccgttgaggagcacgcgctccgtgaagggcacctgcgtgggtgccacgcgctccctgcccagcatcgctctcatccgcctgc

SEQ ID NO: 415675 - DNA, 122 bp, Homo sapiens
ccaacagcagctgaaggacgaacagcatcttagccaagaccacaacctcagcgaagaccacgatgaagcccccaacagccacgcccaccactgctcggacgaggccgaccacagacatgagt

SEQ ID NO: 415676 - DNA, 122 bp, Homo sapiens
aggaccagaacagaaacctgaagcgtgaggcaacttgcctgaagggtcctgccagcgtcacggtggcgtaggggtcacattgcccattcacgatggggaggccctggcactcgacgatgctg

SEQ ID NO: 415677 - DNA, 122 bp, Homo sapiens
ctcagagagcctctgatggtgtctggtgaggctgccaggaggactgcaagagcgtggcctcgatgggacctacaattctctataattctgaatggagccaacgaagatgccggaagccatca

SEQ ID NO: 415678 - DNA, 122 bp, Homo sapiens
gggtcgaccgcgatgcctgtcaaacgggaggtaaaattaggagggattaagcagtgaccacgggagcagtcagcagacacaagccaagctgcctccacatcagcacatggcttgggagttag

SEQ ID NO: 415679 - DNA, 122 bp, Homo sapiens
cggtgcgtctggtgttgtttgtccctcccatccggagttgttcattcctcccggtgggttcggggtctcgctggtctcggaagtgaagccagacacctttgcggcgagtattacagctcgca

SEQ ID NO: 415680 - DNA, 122 bp, Homo sapiens
ggttttcgaatcggggaggctggacctgtatacctttccccctcatccatatgacaaacccggtaggtcgacatcgccacatgtttgtgcagttccggaatctgtgccgtccacgcctctgg

SEQ ID NO: 415681 - DNA, 122 bp, Homo sapiens
tttaagccccatatgaacttgggtctgatccaaaatcatctttattactacaattctccacggtcttaacccagctgcccgcaggagtatcagttatctttaggttactttttgtgaacttg

SEQ ID NO: 415682 - DNA, 122 bp, Homo sapiens
cctggacaactgcacgtacgtgctggtgcagcagattgtgcccgtgtatggccacttccgcgtgctcgtcgacaactacttctgcggtgcggaggacgggctctcctgcccgaggtccatca

SEQ ID NO: 415683 - DNA, 122 bp, Homo sapiens
agtaacacggacggccgccggcgccaaactgtttcccgaagccaccaagccggtccccagcgccagcgctgccaccgccctccgccctcagtatcccggagcgcctcccccagctttccggt

SEQ ID NO: 415684 - DNA, 122 bp, Homo sapiens
tgctaggcgaaacagtctgcagaggacgctttgctgattgcttttagtgtgttttgtgcccggatctttaggggtcggctacggagcggaccggaggcgcggccgccagatctactcgcggt

SEQ ID NO: 415685 - DNA, 122 bp, Homo sapiens
ctactactctttcaaacactgcagcaagttgcagcaaggcgggcaaataccgacagcgcgcgtgggggcgggcggcgggcgccgcggggcccaccccctccccggtctccccgcgccctcgc

SEQ ID NO: 415686 - DNA, 122 bp, Homo sapiens
ggggcaggcgagacgtgaggcgagacgtgaggcgagccgtgaggcaagccggctcataaacgctcctaacggggaaaacagacgaacgaggagttggtgataatatcagccagtaacacctg

SEQ ID NO: 415687 - DNA, 122 bp, Homo sapiens
cacacctgcatgcatacacacatgcacacactcatacatgtgagcatacacctgcagacacgtacacatatgcatgcacgtacatgggtgcacgtatgcacacgtacatgggtacactcatg

SEQ ID NO: 415688 - DNA, 122 bp, Homo sapiens
gagactgcgtgccccagatcttgagtacctctttgaaaagccacgttgagctgtgctccacggcctggcatgggggttcagtctgtggatggtaactacttatgatggacgttagccttgct

SEQ ID NO: 415689 - DNA, 122 bp, Homo sapiens
cctgcgattacaggtgcgcgccgccatgcctgactggttttcatacttttttggtggagacggggtttcgctgtgttggccgggctggtctccagctcctaaccgcgagtgatctgccagcc

SEQ ID NO: 415690 - DNA, 122 bp, Homo sapiens
caccgacacccctcatccgcgataccccacaggacaggatgtccagctgccctcacttatcgtgcccctgggcatttgaggggttcagagagagaaacgcagtaacttattaccctcacatg

SEQ ID NO: 415691 - DNA, 122 bp, Homo sapiens
tccgagggctgtgtcagaaggctgggcagccatggcgtcctatttcgatgaacacgactgcgagccgtcggaccctgagcaggagacgcgaaccaacatgctgctggagctcgcaaggtggg

SEQ ID NO: 415692 - DNA, 122 bp, Homo sapiens
actgactcgctccctggctttctcagttcgttttgggagataacttgttttgctccaagccgcatccgttgaccccttacagtcggatggtctagatgactgaatggagttttgagttggac

SEQ ID NO: 415693 - DNA, 122 bp, Homo sapiens
cctggggggaaggacacactggcccactctcagcacagtgtctcccaagcaggctggacccggctgacctgtgtctttggggtcaagcccaactgtaagcctttctggggcacacatacacc

SEQ ID NO: 415694 - DNA, 122 bp, Homo sapiens
tgcgccttgcgcccgggtcagacattatttagctcttcggttgagcttcgattggtcaaacggcgccgcccccccccccccgccccccgccccccgctccccgctcgcccgcgctaccgata

SEQ ID NO: 415695 - DNA, 122 bp, Homo sapiens
tgatgttgctactacagttgtcacttggtattaatgagggaattggttccaggaccccctcggataccaaaatctgcaaatgcacaagtcccctgcttaaagtggcatagtatttgcatgta

SEQ ID NO: 415696 - DNA, 122 bp, Homo sapiens
tcttctcaatctgtcatcgttgaaccacacgctcctgacaccgggattcatttgtcttgtcggctctgacagttggattctcccagagctcttcctagtggatcgccctgggattttaaacc

SEQ ID NO: 415697 - DNA, 122 bp, Homo sapiens
aaaaaaaaaaaaaagcaatgagccgcaagccttggactcgcagagctgccggtgcccgtccgagagccccaccagcgcggctcacgcctcagtctcgccgccccaaggtgggatccgacgcc

SEQ ID NO: 415698 - DNA, 122 bp, Homo sapiens
tcttctctccagcccttggttcgccggagcaggatgctggtctcaacactagggctatgtcggcttctcaccgaaccgagattttcaatttcagctttgcgattcaggattccacttgaatt

SEQ ID NO: 415699 - DNA, 122 bp, Homo sapiens
taccgctggaggggagaacctgggcccagtgagcttaatcagtcctcacaaggtcggggccgctgacccactaatcagcttgagcctcctaatccatccccagcaggaaccgcaggacagac

SEQ ID NO: 415700 - DNA, 122 bp, Homo sapiens
atcaatttatctatggttaagatataataaatagtgcttgtataagtaatggtccaataacgagacagaaaccacacagtaatttgaaaagagaatgcttaatataaagaatcattaactat

SEQ ID NO: 415701 - DNA, 122 bp, Homo sapiens
gcccctcactgggctggcggaagccagagccggctccctctacttgcggggaggtgtagacggagaggcgcgggagggaacccgggctgcgcgcgggtgctcgcgggccagcgcgagttccg

SEQ ID NO: 415702 - DNA, 122 bp, Homo sapiens
atgacatgaaatttatatgaaattcagatttcagtgtccataaataaacttttattgggacgttgccatgctcattcatttacgtgttgtctgtggcactcttacgctacaagggcagaact

SEQ ID NO: 415703 - DNA, 122 bp, Homo sapiens
agtcaccgcctctctctgggccttggcaagatggggctgaattatctctaaatgtgcccccgccccaccccacccccagcctgtacatctctcaaggcactgccttgcttccttaagcatac

SEQ ID NO: 415704 - DNA, 122 bp, Homo sapiens
tgcatttatcttggcctaggcacgttctctggctgtcatcctgaggacaattccattgaccgcaacaaatccatgaatgactggaggggaccaaagtatgacttgacctccagagctctctt

SEQ ID NO: 415705 - DNA, 122 bp, Homo sapiens
gtgcaggccggatggctctgggaagaacttgtagggcactgcgggtgtgtgcaggggggccggggggggggcaaaaaggatgggggagtgagaagcagagttcaacccgttgtgtccagctc

SEQ ID NO: 415706 - DNA, 122 bp, Homo sapiens
ctatccaagtctctccttttgtctcgttctctctctcgttctcgttctcgcaatctatctcgatccctgttgcgtggccaatctttatcagcatctcggtcccattctctctgcctcgtatc

SEQ ID NO: 415707 - DNA, 122 bp, Homo sapiens
tcctatgagcacagctcctctccagcgtgctgacagtgacacttaaacccagcgagggtgcgttcaccagtggggcttggagaccgcagagcagcctgacggagcgggactccaggcacaag

SEQ ID NO: 415708 - DNA, 122 bp, Homo sapiens
tgtcctagagtattcaaatctttagaaagcacgtgccccaaatgaatcggactgaacagacgctggaaccgaacatggtaaagtaaaatacttatccatgaggcactttgtaatccccgcac

SEQ ID NO: 415709 - DNA, 122 bp, Homo sapiens
agctgggaccacaggtgcacaccaccatgcccagatattttttttcattttcggtagagacgggggtctcaccatgttgcccaggctagtcttgaaattctgggctcaagcaatcctcccac

SEQ ID NO: 415710 - DNA, 122 bp, Homo sapiens
ggcaggtcgggctgtacctgagaccaatccccttgataaaatgcagccaggcctgaagcacgttcagaacggaagcagcaaaggtgatgatatcgctcgttgctactcagctttcaggagga

SEQ ID NO: 415711 - DNA, 122 bp, Homo sapiens
gcagccccaggtcctgctcactcatgtcctcatccagaaaacattctggagcagccacttcgtgtctgcacggtgcaggcaggggtgcagctagggtgcaggtgtgcaaggcatccacaccc

SEQ ID NO: 415712 - DNA, 122 bp, Homo sapiens
atcactttgaagccactccaaggtggcatctgcacttaataacaaacaccctgcaaaaaccgctgtgcagccgtgggcctaaggtatgtgcccacttcatcagcctcattctgggccacttg

SEQ ID NO: 415713 - DNA, 122 bp, Homo sapiens
ttaatattataatctgcatctgcagaatgacgagttcagaatagtttcattcttcgtgggcggtttattagttgtttggcttggtgtgttgaaaccaagtgtgacttgagatcttttcccct

SEQ ID NO: 415714 - DNA, 122 bp, Homo sapiens
ccagcaggcgggcgaccagtgtcaccgtcgtccggccaagccctcgagccagagctccatcgccttcgcctgccgtcgcatcggccccacggagacggccctatgcttcatgtgaaggttta

SEQ ID NO: 415715 - DNA, 122 bp, Homo sapiens
taaagattcctcaatttcagaccccggcctccagagttgggagaatacgttatgctgtttcgagcgccctgctttgtggtgctttgctgtggcagccatgagagactaacacgggggccggt

SEQ ID NO: 415716 - DNA, 122 bp, Homo sapiens
gaaggaaaggtcatgaaagctaggtagagtctttcaaatagaaggtgagaatatggcacccgaactgagaactgcaggaagacctagcttctagtgaccttgagcaagcaaggcataacttc

SEQ ID NO: 415717 - DNA, 122 bp, Homo sapiens
tccgcttgagggtggcgggtgagttttctcccgtccacctatgcctacagggctaagaaacggtcgtttttctgaatcgaaatgtctgcagctggctatcctccgtcgcagctgattccgaa

SEQ ID NO: 415718 - DNA, 122 bp, Homo sapiens
gtttccactcctcagatgcctcccttttttcataacaatacttctccataaaagtaacctcggaaaacaatatgatgttgttagtttatttgcttgtcccaagtaaagtgaaggagtttttt

SEQ ID NO: 415719 - DNA, 122 bp, Homo sapiens
tgttctggttctggattggtcagtctagagttccaggggtgtggccaaaagtctgtgaggcggggccgtaggcagcctaaatcaggcatcggcgcggtcagcctcgtggcgcgcccacgccc

SEQ ID NO: 415720 - DNA, 122 bp, Homo sapiens
cggagctgcaggcttctaggcgctgggagggcgaagcaggagagccggttagtccatccccgcgctccgcaaacttttctaaccgggtaacaaagtgagcagcggtggccgccgcgattcct

SEQ ID NO: 415721 - DNA, 122 bp, Homo sapiens
gaccgctcctgcgccccacgccagggccagaggccgaggaaggcgggctaagtgagggggcgcggcgtggagaaccgccggggccgggagcggtagcgagcgcctagtaccgagcgccaggg

SEQ ID NO: 415722 - DNA, 122 bp, Homo sapiens
ctttctggttggatgttttgggtgagtttcttggcgcgcatgcgtgttgtgtctcaagggcgggtttgaagggaagtgggtgttgacctgcgggcaactgacgctgttgtcagattacaccc

SEQ ID NO: 415723 - DNA, 122 bp, Homo sapiens
ggcgcctggcgaggcagccgccccctgagccaggtccccgcccgcctctgtcctgccaggcgctgctgggtttgggaggaatgcgtttactctccaggaccaacgagtctgtgcaggcctgg

SEQ ID NO: 415724 - DNA, 122 bp, Homo sapiens
ggttgggggcttgggagtagaggagcggtggctgaagggatcaggtagtcctgatcaggacgtggagatccacccacaagccctgacaataactcagtcgagttcctggagggtctcaaggg

SEQ ID NO: 415725 - DNA, 122 bp, Homo sapiens
gcggcggcgatgcctgtcatggtgctacatcgagagcccccctggtgtcggctctgcgagcgccgggcgggcgagggagggagggaggccgggtggggtgaggagaggaggggctgggggag

SEQ ID NO: 415726 - DNA, 122 bp, Homo sapiens
ggaactgcggacggctgcgcaggagcggacagcggagaggcggtactgaccggtgcgaggcggtgctgaccggtgcgggccggtgcgggccagtgcaggccaggcccggccggggcgaggca

SEQ ID NO: 415727 - DNA, 122 bp, Homo sapiens
gacagagtccatctccccacacacaaccccaagaaacagtacccagggatctagacacagcgggctcagggctgggatccctacgacaggaggctagggaccctacgacaggaggctggggc

SEQ ID NO: 415728 - DNA, 122 bp, Homo sapiens
aaaaagtggctctccgctgatctcgaatgcaccagcgagcctccagattctgggtgaagccgattttggaaatccatatgccgccctagcaaacacatcaggattgaggttaccgcataaga

SEQ ID NO: 415729 - DNA, 122 bp, Homo sapiens
agcgcaagtaccgcagccagcacatcatccccctggaggaggtcacactggagctgttgccggagacgctgcaggccaagaaccgctggatgatcaagacggccaagaagtcctttgtggtg

SEQ ID NO: 415730 - DNA, 122 bp, Homo sapiens
atacaacagcagaagcagcaacatcttccaatgcatcttgtccttcaaaaggtgaaaaatcgaccctcaagcccagtggaaccccagtagctgcaggtatgcccgtgccgttcttcccagtg

SEQ ID NO: 415731 - DNA, 122 bp, Homo sapiens
cgcaccccagggagcggcgggggcggcgcgcagggcccactgtgcccgggacaaccgcagcgtcgccacagtggcggctccacctctcggcggcctcacctggcctcactgcttcgtgcctt

SEQ ID NO: 415732 - DNA, 122 bp, Homo sapiens
agtctagttctagcaatttaacctaaggaaataatgaggatgtgaacaaagccttagctacggtggtgtttgacagaagcatttcttatttataaaaaagagaaacccgtgcaaagtaactc

SEQ ID NO: 415733 - DNA, 122 bp, Homo sapiens
aaggacgcggcgctgcgaggtggtccggaacctgctcgggggacacaagctcccgccccgcgagagatcccgcccccacgagagaccccgcccccgcaagaggccccgcccccgcgagaggc

SEQ ID NO: 415734 - DNA, 122 bp, Homo sapiens
ctcctgtgcgccttctctcctctctgcaattcggggactccttgcactggggcaggcccccggccaggtgcatgggaggaagcacggagaatttacaagcctctcgattcctcagtccagac

SEQ ID NO: 415735 - DNA, 122 bp, Homo sapiens
acagagggggagtgactgtggctgaccatgtgggcagaggggctggcgggctggcccctgcgagaggcggactcagggctgctggatgctccgtccttggccgctttgatctggagccacgt

SEQ ID NO: 415736 - DNA, 122 bp, Homo sapiens
gtgattagaagagggaggcactccctaacccacgaccctccctgacagctgccttgataccgtaactcacaggccttggtgggtgtgttgactcctcatttattctgatttgttcacctgtg

SEQ ID NO: 415737 - DNA, 122 bp, Homo sapiens
gcactgggactgcagcagccccgacaaggagccgttctccatgaatttagtcaccagagccggcttgggatcttggtcccagttcaccttctcgataaccccttctaggcgcagcacgaatt

SEQ ID NO: 415738 - DNA, 122 bp, Homo sapiens
ggcgcccagcagaggttaggtgtttaaagttaggacctgaatgggttacgttgcgatacacgatcaaacatcgcccttataagctctgtggtatccccgagccccactcctgtatgcaggga

SEQ ID NO: 415739 - DNA, 122 bp, Homo sapiens
atccggcggctggagctcctcttgagcgcgggggactcgggcacttttttctgcaagggccgccacgaggacgagagccgtacagtgcttcacgtgctgggggacaggacctattgcaaggc

SEQ ID NO: 415740 - DNA, 122 bp, Homo sapiens
aggaggtcgcgggccccgaggcgcggctgaagggccaggccacaggccgcggggcggggacgtctccggggtcccagacagccaggcctggcccagggccaaggcttggaggtgacagacag

SEQ ID NO: 415741 - DNA, 122 bp, Homo sapiens
gggagcgctgcggggggcctgtctcggtggggagtcactcctgctccgggagcggctctgcgacttggacccaccagatgtggagccgctgtcacttttcctgggaggaagaacagcaccac

SEQ ID NO: 415742 - DNA, 122 bp, Homo sapiens
agccttccccatccagctgtggatccgtcctgggatgcgtgtcccggcctgctgtctctccgtcacagaagggaatgttagaatcccgagagagagctgttaagggtagcggctctgcagcc

SEQ ID NO: 415743 - DNA, 122 bp, Homo sapiens
gaaatacacacaacactctgaatgttaatccagatccctcttgttgagtagctgcagagacggcagatggaaaatatgctcagaagttgtttaatgacctttttgaagattattctaatgct

SEQ ID NO: 415744 - DNA, 122 bp, Homo sapiens
ggggcggggagcgggaggcggggtcggacctgcacgccccgcccccggactcctggcggccgctgatccggggccttcccattggtcacctctcgtggcgaactcggattgggccatatcag

SEQ ID NO: 415745 - DNA, 122 bp, Homo sapiens
aatacaggccaatgcaactgtcatccaaaattctctggtgcaaaatgtacagagtgcagtcgaggtcactggaactaccctcgctgcaatctctgtgactgcttcctccctgggacagatgc

SEQ ID NO: 415746 - DNA, 122 bp, Homo sapiens
aattatgtcgccctgaatctctctctttttgctctttgtctggaccgtcagtaatccaggcgtggtaaaatctcccagcgttggggctggccaacggctgcaccccgcggtttttgcttttt

SEQ ID NO: 415747 - DNA, 122 bp, Homo sapiens
ggccccaccccacaaaagggagacactctccagcaaagctgccgctaagcaggggctcggcggtgactgcagctggtgcatcttttcttgtttccgttttgctgtggtcacttgattttaga

SEQ ID NO: 415748 - DNA, 122 bp, Homo sapiens
aattatcctttttatttattaaatagagacagagtctcactatattgccccagctggtctcgaactcttgagctcaggcagtcctcccaacttggccgtcgaaagtgctgggattataggca

SEQ ID NO: 415749 - DNA, 122 bp, Homo sapiens
gcatgtgtaacaaatctgctttcagcacacatcccatccaggtaaagccaggaaatacaacgagggctggaaatagctcgtggctagcatcctcaacactagtcatttagtgctttcaacaa

SEQ ID NO: 415750 - DNA, 122 bp, Homo sapiens
caaattaaaggaccacattttgcacttctacttgaagtcacacattgcagccatgttctacgtcactctggggcccaacaccttcagtattaacttctgtgccacccaaaagccttggaagg

SEQ ID NO: 415751 - DNA, 122 bp, Homo sapiens
agcaactcaagccaccgcaaagctcacctttgtagcctttgcccttggtcaccccgatgacgtcgatcatctcatcctgcccaaacacttggttcacaggtacctgctgctcaagcctctcg

SEQ ID NO: 415752 - DNA, 122 bp, Homo sapiens
ccagccttagaaaatccatgtactctgttgttagagggcccagagttccttctccacccccgctctctctctcttggcctgagatctctgtgcaggaaccaagatggggctgaagcctctgg

SEQ ID NO: 415753 - DNA, 122 bp, Homo sapiens
tcagggccgcctgtgaggcacagagcgaatggggcaccagcctgccctcggcctcagacacggagaggctcccacggcactgagccacgcatggccacgcgacagagggacagaatgccgtg

SEQ ID NO: 415754 - DNA, 122 bp, Homo sapiens
gtagaggttccacgtggcactgctgctcccgtggaactgccactgccttgaggtctgcggcgcacgttccctggaggtgtcgtcacctagctctggggcgcctgcgggggaagccacctggc

SEQ ID NO: 415755 - DNA, 122 bp, Homo sapiens
acaaactcgcctttgcagtgggtggctcggtaacctctgtcggccccaagcccagagctccgtacgcactccctctctccagattttccttcttttggaaccttattccttgaccctttccc

SEQ ID NO: 415756 - DNA, 122 bp, Homo sapiens
cttcctttatattattaatagtagctacccttttttgggcacttactatgtaccaggtaacgtgctttatatgtaatacttatttaatcctcacaacaatccaatgaggtaagttataattc

SEQ ID NO: 415757 - DNA, 122 bp, Homo sapiens
aggagtgggggcggtgcgtcctccggcgcgcagcggtggccacagctctcctcccgccgccgcaggtcttcctcaccgctttgcgcgccccgaagccgaccctgcgctacttcaccaccgag

SEQ ID NO: 415758 - DNA, 122 bp, Homo sapiens
cagacatctactcttttcctaaaattctactttcatgatttaagaaattgtggccaggtgcggtggctcacacctgtaatcccaggacttggggaggcagaggcagttggatcatgaggtca

SEQ ID NO: 415759 - DNA, 122 bp, Homo sapiens
gcgcggcaggtagcaaggaacggtggcggggccaaaggtttcctcaaagaccctgggggccgggcggggctgtgccaggcacccgcgtcgcgctccagctccagccctttaatgctctttgc

SEQ ID NO: 415760 - DNA, 122 bp, Homo sapiens
gcagcaagcagctgatcagggtgggagaaccagtggtagtggaggcagtagtggggctggcggtggttccaggtgcggcacaggcagtggccatagcagcttgttggataagtggaagacag

SEQ ID NO: 415761 - DNA, 122 bp, Homo sapiens
gggagggacccactgcttcagaaaggtccgctgtgcacaggccatgggggcagcatgggccgcttccgaccttcagcttcataatgttgatttctcctgggaaataaagataataatcagga

SEQ ID NO: 415762 - DNA, 122 bp, Homo sapiens
ggttctttttctgatttgacacagacagcgggactgacgacctcataggtagctgaaaaccgtaagtggagatggtccttctatggtgtgtgggggcgtggccagttgttagattgtgtttg

SEQ ID NO: 415763 - DNA, 122 bp, Homo sapiens
ctatcacatgctacctcctgctgctgggagataacgtgcatcagtattgggaggaggggtcgagggtggtgctgtgccaactcaagggaatggaagaagggaaattcaaaattcatttgttg

SEQ ID NO: 415764 - DNA, 122 bp, Homo sapiens
gcaggcgccgcaacccgtcaaccggccaatgagaagacgcaacagcaatgacgccaggcacggccggaaaggagactcctgggaaaattgagctggaactcgggctttagttaaataccttc

SEQ ID NO: 415765 - DNA, 122 bp, Homo sapiens
cttttatctaagctcctctgatagccggtggcagtctctaatcctgctccctgcttcattcggctccggggaagcagaatgaaagggaaacagagagagagagagagagaaagagagagaga

SEQ ID NO: 415766 - DNA, 122 bp, Homo sapiens
cattagtacacttcttacaaaatttttgaaagctgttgtagtaaatcccttttatctgaacggctgcagattaaaatgaaatagccatattgttgatttttataactttgctaatgatccat

SEQ ID NO: 415767 - DNA, 122 bp, Homo sapiens
ccattccccccacgagcccagacttcctggaagagctggggtcctgcgtgccacctgctccgcctccttcggcctgcaatggttcattctgtgtcagcttggccaggccgcaggactctgat

SEQ ID NO: 415768 - DNA, 122 bp, Homo sapiens
ttgtaagccagccggactatcaggaagtgtgaatcaacaggataaatttctctctcatagcgcaagtgctggtcatccaaccagctcattgttgtttatgttgactgtttcaaactctttct

SEQ ID NO: 415769 - DNA, 122 bp, Homo sapiens
gagcaccaacagtggcatccatttctctgtggaggccaggaatataaaaaaatatgcaatcggaagcattctaaatgtaatggcaaatttagctgatagaacgtgcagaatactaatgagca

SEQ ID NO: 415770 - DNA, 122 bp, Homo sapiens
acgaagttacttgccgggctacccgccgagacttgaaaacttcgcggcgacttctctcgccggccttagcatcgcccccatttttcaggttacaggacaggcctgcaactgcaaaacgcttt

SEQ ID NO: 415771 - DNA, 122 bp, Homo sapiens
ctctaagtatgggtaggagacaggcggcctagggattccggttagcatgtcgcgttctgccgcagcagggctgggagcatccccagagcaggcggaggtcggaggtggtgaggcctttcggc

SEQ ID NO: 415772 - DNA, 122 bp, Homo sapiens
agccctgaggcctgtggcccctagagcgttctcaggaccaaggtctgagttgggaccgcccgtatctagttcctcggaggggtggatctggatgtccggggaaaggcgaatgaagagtagag

SEQ ID NO: 415773 - DNA, 122 bp, Homo sapiens
ttttgacaaagattgacaaaggtatagggaggacgcatcgggtggggccctcgacggcggcgtaggttaggaggtcctgcagttcccccgggaacccgggctccctgagtgaggctcaaata

SEQ ID NO: 415774 - DNA, 122 bp, Homo sapiens
tatcactggtggctcaccacccccactctcccccatcgccagctccgccttaacctcccacgaaatcaaatccccgctttaccaacccgcagcagccgggggcatggagagagaagcggggg

SEQ ID NO: 415775 - DNA, 122 bp, Homo sapiens
agctggctataaacaagatcatgcagattgggttcctgagccaacaaacccaaagaagaccggttgctaggaagagaaagccgagcgttgctccgtgacgtcatcactccgcgccacccgcg

SEQ ID NO: 415776 - DNA, 122 bp, Homo sapiens
ggtgggggtggccggggagggggtgaggaggaagggagagatgggactcagcgccgaggacggcgtctgggccgtgatcatctcgcaccagcagtgctgggccagcacctccccgggcaccg

SEQ ID NO: 415777 - DNA, 122 bp, Homo sapiens
agctatatctaaatcctacctgttactttcttgatttgtgaccttgggtaaattatttaacgtctctattgcttagcagatacttcatctgacattcactatagcatcctcaggaccttaaa

SEQ ID NO: 415778 - DNA, 122 bp, Homo sapiens
ctgacaagcgctcttgtgaagagagctggaggctcatctcctccttgcgggagcagctgccgcccaccacggtccagaccattgtcaaacgctgtggtctgcccagcagtggcaagcgcagg

SEQ ID NO: 415779 - DNA, 122 bp, Homo sapiens
ggccctggtgggaagcgacccgagcgtattcgccgcccgcagctcgcgcgcctgggcacccgggggcgctcacagtgatcgcggggccagcacaccctcacccaggacatccctttcctccc

SEQ ID NO: 415780 - DNA, 122 bp, Homo sapiens
atgatcctccacgcctgaccaggattacaacttcattcttccagctgctcagatctaaaccgccagagtcatccccgagtcctctcttaaactccacatccgccctgtgggtatccgcctgt

SEQ ID NO: 415781 - DNA, 122 bp, Homo sapiens
ttctctctggggctcttcaaaccctaaaccctggcaggaagcatgtcgaggaaggagctccggcaactccagaggctccgacagaactctgggctgagcctggctctcctctccagcaaggg

SEQ ID NO: 415782 - DNA, 122 bp, Homo sapiens
ccgttgctctcctttctttcttcttctctggctaaagtgttgcctcagatccttacccctcgtggctggatcctgctaactatgaataaaattcctttattcaataaaagactttgaaacat

SEQ ID NO: 415783 - DNA, 122 bp, Homo sapiens
agggtttgtgtcgcctgggtggtagaggatgcggccgggagctgccctgcagatggagcacgctgggaacgttggtcacgacacggagtctctgggaggttgtggaggccagcgtgggtctg

SEQ ID NO: 415784 - DNA, 122 bp, Homo sapiens
cgccaggcccgggagtgcgcaaggactttctccaacctgcagccagagaggtgggggaaacggacgcaaaaggaaaaattgaagtggtactttggggccaccaagtccccaaacttacctgt

SEQ ID NO: 415785 - DNA, 122 bp, Homo sapiens
tctggctgtctcttccccatcaagtcataaagcgagcgggttgggcgagagggcacagctcgaggcagagaagagacggggtcactttcacaactcccaggaatcggcttcagaaaggaacc

SEQ ID NO: 415786 - DNA, 122 bp, Homo sapiens
gaataaaggtttgagcctacatattcaaatgtgtaggctgataagatttataaaagggagcgtttggaaaaacaagtttgggccttgagcatgaaatgtcaactatagatccaaggtaattg

SEQ ID NO: 415787 - DNA, 122 bp, Homo sapiens
cattcagaaggttgtcattccagttcccaaaggcctgaggttcagaagcctaggagggctcgtcaaaagctgcgctgcctaagtaggggcacaacctaccactgcaaagaggaagagtgtga

SEQ ID NO: 415788 - DNA, 122 bp, Homo sapiens
ctttaacctgtctcttagctgttatactacaaacctcaggcttgttaagagaaaatgctccgcaaggaactaaacacagaaggttctaacgctgagccaagactgggaaacgaactctggga

SEQ ID NO: 415789 - DNA, 122 bp, Homo sapiens
atgggaaaactattttaaattccctgtttaactggtcataaacgtctagagaatgtaccacgcgttttgctggagaagcacaaaagagtttcatccacctctgcatatttggttcatcgtcc

SEQ ID NO: 415790 - DNA, 122 bp, Homo sapiens
ggcggcggcgcggcttaagcctcgggggcggggcccggggtggggcctgcggggcggggccgggcctgccagctcctacttgggtgcggagaccctggagcagccgcctttccgcggggacc

SEQ ID NO: 415791 - DNA, 122 bp, Homo sapiens
gccccatgccgccttcccaggggccaggcttggacaggaaagaggataaactgaggacatcgcatcctccgaagttggaagtgtcatggccccagggaaatgcagggcccttgggccaggag

SEQ ID NO: 415792 - DNA, 122 bp, Homo sapiens
tttcctttaaagtgaacattttacaatatcatggtatagtcgtcaaagctaagaaaccaccgctgacacattacttttaactgaactgcagattttatttgggttttgccagtttttccgtt

SEQ ID NO: 415793 - DNA, 122 bp, Homo sapiens
caccgggcgcgcgggtggtgcgcgggcacacggaggcggaaggccggaggggcagtccgccgcgggggcgagcgcgcatgcgccttcctgggacccacggcaggcgcgaatcccagcggccg

SEQ ID NO: 415794 - DNA, 122 bp, Homo sapiens
cgggctctgccaccgcctgaggtcatacccaggcactgggtgttggcgggagcagtaaagcgccataaaagcaccacttggatgactattgcaaagtaagccttcttcgctcggattctatg

SEQ ID NO: 415795 - DNA, 122 bp, Homo sapiens
cctcctttccttacgtggggtcccctctgcagcccacatcccctctgacagatccctccacggaaaggctccggcacctcaacctcactctggctgcattggaaactcttctgtcgctatcg

SEQ ID NO: 415796 - DNA, 122 bp, Homo sapiens
aggtgcgggcggtgcgccgggccgcgggcgcgcaaggaggggcgagagggtggggaggggcggggccggcgtcctcgtcacttgataaaacgcctgcgagtctccagagaacaacgggctca

SEQ ID NO: 415797 - DNA, 122 bp, Homo sapiens
cctggccccaccaccggccacagtggggctgtgcacaccgctcctaccgcaggagtagggcggactgacaggaagatgagtccctgcgcccggagctcaccagagcccggataagccgaagt

SEQ ID NO: 415798 - DNA, 122 bp, Homo sapiens
attcaaacatatttttcctcgttatgtcgcgggctggtataccatcgagaaaataaaaaccgagaacccatgatctctacattttgagaggaagaggagctgaccacgctcaccgcggacgt

SEQ ID NO: 415799 - DNA, 122 bp, Homo sapiens
gtctttgtccagggctttgggtgttggcgtcagctcctcacgcagcaggtataagacagacggaaggcacataggaacattcgtaactcttctaactcttctaacatccctaactcttcctt

SEQ ID NO: 415800 - DNA, 122 bp, Homo sapiens
ccagggccttcatgggggcgatgcccacttcccatgccaccgccagggccttcgtggggacgatgtccactgctgttgcccatgcccccaccagggccttcgtgaggacgatgcccaccacc

SEQ ID NO: 415801 - DNA, 122 bp, Homo sapiens
ctccgtagggcacagccgggccttctgggctgaggaacacaaaacagcacggcagcaccacgcttcggggccatttcaaacagcaaaaccaccaacagaaagcacacagatggggaaatatg

SEQ ID NO: 415802 - DNA, 122 bp, Homo sapiens
tacagtgaggaaatgcagcaattgagaagcttctaaatgctgtaatcctaaacatttctccgcattgctcatgtaaatagccaataataacaatatgatagttctattttttctgtaatcta

SEQ ID NO: 415803 - DNA, 122 bp, Homo sapiens
caaattgccgcaattaacacgtgccactgccacgatctatgggctgaaacgtggctggaacgacgcagaagcagaaaccacagagagcgtgcgctccaataaaacggcactaaatggcacgg

SEQ ID NO: 415804 - DNA, 122 bp, Homo sapiens
cccatgatgtgtgcaccccctacaatgtgtgcatgcccctctgtgttggtgatggtcctccgaagctccgcccaccatgatgtctgctccgccccctcgtgttgctggtggtcctctggagc

SEQ ID NO: 415805 - DNA, 122 bp, Homo sapiens
agcctggccaaccccatcagaaaatgaaaaagaaaccaccaggcgaagtgaaagcagttccgtgtgatgcggccgctcactcagagctatgctgtgatccaccagatgggctcgcgctgatg

SEQ ID NO: 415806 - DNA, 122 bp, Homo sapiens
cgcgacccgcagctcaatcgcagggcaaaccgagctgcctgtgcgcgcccgagaactccccgagaaattaacttcggctcaagtgaaaatagcagctgttgtccagaaatggcccgggagta

SEQ ID NO: 415807 - DNA, 122 bp, Homo sapiens
gggtgccgctggctttttgccggcgggtactgggcggggaggcctctgggatcactctcccggccctgtaggtgccggggaccgccccctcccacccgaccgaactggagaatccgccccgg

SEQ ID NO: 415808 - DNA, 122 bp, Homo sapiens
ggtctggaggcagagaggggctcgcaggcggcccgagggcgccgcatccaggccccggagcgcaaagccttcctcccagggggaggcagtttcccatccaccgaccaggtttccccggagag

SEQ ID NO: 415809 - DNA, 122 bp, Homo sapiens
gctccgccggcgcttccgggagggacggcacgggggcggcgcctgccgggggtaggtgagcgccggagccggaccggggacgcgtgatgggtagggcgcggggcggggtctgtggtgggaag

SEQ ID NO: 415810 - DNA, 122 bp, Homo sapiens
attgccaccccgagcccacaatgtggacacgggtaatttacgtgaggtttaggggatacccgctgtggttgacctgtaatacacatggcctgcctgttggttctcaggataaagtgctcaca

SEQ ID NO: 415811 - DNA, 122 bp, Homo sapiens
gaataaaggttggctgtacttacggaaccaatgcctataatgtcctctcaggaaacctgacgtaggtccagtttatagtgtccagtcttacagttagtaaggaaagtcacttctaggcaagt

SEQ ID NO: 415812 - DNA, 122 bp, Homo sapiens
cagaaaaaaaaattttaagtattaaatatcatacaattcagcaatttaaagtatacaattcgatggcttttagtgtatcacagagttgtgcaaccatcatcacagtcagttaagaacatttc

SEQ ID NO: 415813 - DNA, 122 bp, Homo sapiens
ccaagatcatttatcacataaacccatggagtatgactcctacaataaaaaatatatatacgcttagttataacattaccagaaaaccataattattcataaaaagatacaaatctcatccc

SEQ ID NO: 415814 - DNA, 122 bp, Homo sapiens
ggcaagaccaagtcatccaggcgtcagtgagggtgctgggctacctcccggaagagaagacgacagaaaaggagtccggacaaagcaccatccagttgtccagagctagatgtgcctgagga

SEQ ID NO: 415815 - DNA, 122 bp, Homo sapiens
gaggggcaggctggccccaattctgactggctggctccagtgatcaggaccagggccccacgtggtgctttgctggagatctaggcttggtggggcagctgtggggtaaggggcaggaccag

SEQ ID NO: 415816 - DNA, 122 bp, Homo sapiens
ctcggccacattgacatagagggctttggccagcacattcaggtggttcatggtgtccggcgggcctggggccccggctcccgtgggggcgcacaccgagctgcccgggccgcgtgccctcg

SEQ ID NO: 415817 - DNA, 122 bp, Homo sapiens
ggactgatcctgtcctcgtccttgtatgcagctccgagtcagggcccaggtgcagctctccggtggacacagaatgcagccatgctgagggcagccggagccaaggccctgagaaagcctgt

SEQ ID NO: 415818 - DNA, 122 bp, Homo sapiens
attgagaggaggtctggcgagcaccatctagggctgaagaactaggcagtggctccagcgcggggcggtgggggggacaagtgagccagggcaagaagaatggatttggccctagagtacgg

SEQ ID NO: 415819 - DNA, 122 bp, Homo sapiens
gccaccccatgagccgcgcgtctggctcttcggtggagtgagcctagaaagggcggcgttcgtccagtgatcagtgctacccgaggttgctttttgcatgactgcttgcagttaagttcacc

SEQ ID NO: 415820 - DNA, 122 bp, Homo sapiens
gtcctgcgtctgcaagaagagcccgtgccccagcgtggtggcgcctgtgtgtgggtcggacgcctccacctacagcaacgaatgcgagctgcagcgggcgcagtgcagccagcagcgccgca

SEQ ID NO: 415821 - DNA, 122 bp, Homo sapiens
tttaaaatagaaataaacatctcagaaccaaaagggtaccctgaaaaatctatcctgagccgggtgcagtggctcacacctgtaatcccggcactttgggaaaccaaggcaggtggatcatt

SEQ ID NO: 415822 - DNA, 122 bp, Homo sapiens
taaaatggcctgtgccatcccactgaaaggagatttccagctgatatgtttgattgctctcggagagacaatgccaagatcacaagggagggcttcttactttcaagataagattggatgtg

SEQ ID NO: 415823 - DNA, 122 bp, Homo sapiens
tggccgggtatataagaactgcaaaggtgaggccggctcctgacccgaggggggcccccacgcccgctctggcctctcaggtcaggccctcccctcccctcccctcccctcccccgcccctg

SEQ ID NO: 415824 - DNA, 122 bp, Homo sapiens
cagcaggtcacgcggagtagggcgggtaagcgcgccttcttattggatggcgatggacagcgtgctcttacgacccaccccagaaggcaagtcccctgcgcgcggggcacggcgggagtaag

SEQ ID NO: 415825 - DNA, 122 bp, Homo sapiens
gggtgggagggggaggggactgctgaacgtttcaggccaaggagacgctcgcggcggcggcggcggcggcatcttttaagactgacctgctttaaaagtgccactttaatggcctaggaaat

SEQ ID NO: 415826 - DNA, 122 bp, Homo sapiens
agtttaaatgttttgtgcatcattgcatcaccgctttaagaattctttttccttgcatctcgctataattcttgtttcctgtttctggcttgttatatgtcctgcagtatttgcacttaggt

SEQ ID NO: 415827 - DNA, 122 bp, Homo sapiens
caggccccaggtttagctgagaccaggttggtctcctgatagcgaaccaacagctactgccgtgtcattgaaaagtggcagcagagagtctgcatgtcaatcatccctttgaaatgaaaggc

SEQ ID NO: 415828 - DNA, 122 bp, Homo sapiens
acctcatgatccgcccgccttggcctctcaaagtactaggattacaggcgtgagccactgcgccccgccccaggctgttttttataagatggtatttcactgttgcccaggctgcactcaag

SEQ ID NO: 415829 - DNA, 122 bp, Homo sapiens
tggacttgctttttggtatggaacctccttgattcttaatggagaacctggatataccatcgggactgttcttgctgtaagtcttgtttgagaacaaggtgtcaggcctggataatctttcc

SEQ ID NO: 415830 - DNA, 122 bp, Homo sapiens
ctcaggagaggaaaaagttagctttcttttctctgctcctgagtgccatggcctgcagtacgtgaccagtccttggcacagagtcactcagggctcatggtagatgcttagcggtcacagcc

SEQ ID NO: 415831 - DNA, 122 bp, Homo sapiens
agggaatagaggagcaggctggtgacaggccgtagagcacattggttatgtgcatcctcccggcctcccagaaggaatccatcactttttccacttttataggtgtttccgcactgtctttc

SEQ ID NO: 415832 - DNA, 122 bp, Homo sapiens
cgcaggccctctggctaccaaacctcccagcgcccccgcgcccctttggagttctgaccccgcgggtgcacccgtgtctcctggacacagaggctgccctctgattgggttgagcaccttgg

SEQ ID NO: 415833 - DNA, 122 bp, Homo sapiens
agccatcaggaggcttcgagctccaaaccagctgtgaccagaaggctggactctttagggcggcctaatgaggatgctgctggagaaacaaccttcagctggtcactgtggacaacgaattt

SEQ ID NO: 415834 - DNA, 122 bp, Homo sapiens
gagttaaaatagaaaacaagcaacagatccaagtggagacatgcagatcacacaagagatcggactctccaggatccagccttgccgctaaactcaccaagggtattaacatatctaaggaa

SEQ ID NO: 415835 - DNA, 122 bp, Homo sapiens
actagactcacctgtgtcgtgtctatttgtatatctgtttacagccagttcggccaccctcggcctgcccagcagtgccctggatgtgtcttgctttccccgggagccaatccatgtgggtg

SEQ ID NO: 415836 - DNA, 122 bp, Homo sapiens
ctctggagtagctgggactattgccatgtaccaccatgcctaattttttaaaaattttttcgtagagatggggggtctcacactatgttgtgcaggctggtctcagactcctgggctcaagc

SEQ ID NO: 415837 - DNA, 122 bp, Homo sapiens
aagatatcagaagatctctcatccttccctacagcgaacttctctcagaggcagtcttttcgtatggctactctggagacatcctgtaaatccagttatctagctggttttgttgtaaagct

SEQ ID NO: 415838 - DNA, 122 bp, Homo sapiens
gactgaaccgtaagaagaccaactgggacaaagggcccgcttgtcctggctctcagagcacggggaatggagaccaaaaagggaaaagaattgtccttatcaaaaagattctcaggtcttaa

SEQ ID NO: 415839 - DNA, 122 bp, Homo sapiens
cttggtctctttaaaataaagccattccaagcccagcatggaggcttatccctgtaatcccggaactgtgggaggctgaggcaggaggattgctcatggtgacgtgtgggtctgtagtaccc

SEQ ID NO: 415840 - DNA, 122 bp, Homo sapiens
ttgccttccccatctgttctcagccagtcactcatggatctcatctatctagtttttttgcgaactcttaatgattttgtaaggaccctactagacggcaactccctttctgaagaacaatt

SEQ ID NO: 415841 - DNA, 122 bp, Homo sapiens
acaaccagccatccaaatgctgttggtgccatacattccccggagaggtataaacatccccgcattgaaaggagtccatgactgctattaaaactgagaaaaagagtgccaacaattcccat

SEQ ID NO: 415842 - DNA, 122 bp, Homo sapiens
gagagagaagggttgtcacgatggaagatgaggacactagtctcatgtagcacagaaacacgaagtcacatgcgctggcagcctccggggtgctccttgctgtcatatattaaaccttacat

SEQ ID NO: 415843 - DNA, 122 bp, Homo sapiens
aaaaatcttccagctcatcatgaaacaagtcccactcatcttcagagtctgttagttcgtcgtccccacctgcagccaaaagcataagcaacatctcgcccagctcaaaggtgacaacctct

SEQ ID NO: 415844 - DNA, 122 bp, Homo sapiens
agaattttaaactcgatttcaacatgtgggggcttattttggatttcttgatttgttacgcggctttcaggtatatttaaaaatccaagaaatgcaggaggttttaaagaaataactagctg

SEQ ID NO: 415845 - DNA, 122 bp, Homo sapiens
gactttttccccttcaatagctctttactcctcctatgttactcagagctagctgtaatccgtttgcttagcacaacaccaaaatctttcccttgccagtggtgtcaaatctgccttccttt

SEQ ID NO: 415846 - DNA, 122 bp, Homo sapiens
tgttatagcaaagagtatgattattgaactccacagtgtcccggaagtacagggcaggaccgccaattagagaagccaaaagccagatgaatataatgacaatcagagagttcttgagggtt

SEQ ID NO: 415847 - DNA, 122 bp, Homo sapiens
ttagaaaaactagggacaaccttagttaccaatctgcatctggagcattaatgttgcacacgatgaaataattcttatttagttagacttttactaaagagagctttaaaatagtaatgatc

SEQ ID NO: 415848 - DNA, 122 bp, Homo sapiens
cagggtgtgttcgacgagcatgatgaacacctgccttttccccagatgctcagatggcggcgtggctctgggctgtgttttctgaagttctaatgcaaccctcccaaggcctgatgaacctg

SEQ ID NO: 415849 - DNA, 122 bp, Homo sapiens
aacaacttctatgccggggaatttgaaacttcctaaatggttgaggtggtgctggggacacgttgttacctgtgtgtgtgcttaaaactcacttacatgctcaccacaaatcaaacatttgt

SEQ ID NO: 415850 - DNA, 122 bp, Homo sapiens
tcacttcagcaaaaaagatgctatcgaacatgcgcacatcccccaacagtctgcctcctgcgattgcttttcacagtatccaaagtgtccatctgtctgcttgtcttcgagttaccctcctt

SEQ ID NO: 415851 - DNA, 122 bp, Homo sapiens
ctcctaactgagctccaacacacaggcactgctaccttagtgtctgttaactttcaaagacgccgcgtttttgctaaatctcagtgccatttgcatactacttggaggtggggctgggaagg

SEQ ID NO: 415852 - DNA, 122 bp, Homo sapiens
ttcgggtgtcctctgcagggacgtaggggggccaggcctcaaaacgaccagaacgctggccgagagacatggttctgaggccccagctctgtctttccatgattttactccccattaaaccc

SEQ ID NO: 415853 - DNA, 122 bp, Homo sapiens
ttatggttaggggtaatggactcattagattctggttgtgttgtgttttgttttgacgcccgcacggcttcaaacacagtggtagggtgtgtgcttactgcacctcagcaagagtagtgtat

SEQ ID NO: 415854 - DNA, 122 bp, Homo sapiens
acaaacaaacagacagaaagccttttgcctgggaggtctcgcgattcccacgcttgggggcgacaagagttggctggagcagggtcggtcgaggctagttaacaggtgggagcaactttatt

SEQ ID NO: 415855 - DNA, 122 bp, Homo sapiens
gtgttcattttcaggtgtgactgccatgccttgggctccaccaatgggcagtgtgacatccgcaccggccagtgtgagtgccagcccggcatcactggtcagcactgtgagcgctgtgaggt

SEQ ID NO: 415856 - DNA, 122 bp, Homo sapiens
tgtcattcatgtgtggaggcgattcatggatcatacctggttctcctgaaatgtcaaacacggccacctaggcagcatttacaagcaagagtccactgcttttttgatgtatatcttaagcg

SEQ ID NO: 415857 - DNA, 122 bp, Homo sapiens
aaagaagcaacaatcatattagctgggggaggaggaaaggtgtagggctaaagctgtaatcggcaaagaagcaacaatcatattagctgggggaggaggatagtttggtatttttgtagttt

SEQ ID NO: 415858 - DNA, 122 bp, Homo sapiens
cactggaaactcacctcacccacactgaacccaaacaggagttctgactgctcagcttcgcgcagagacaactgcagagagtgagaagctagaggacgggattcttccacactgaaacaaac

SEQ ID NO: 415859 - DNA, 122 bp, Homo sapiens
ggctgaggctcgcagagacctaggcatcgaattttttaatggtccaaatcgcagggaaagcgagcactccctgttctgaaggttttccctaaacacggagacaacactaaaaagctgtgccg

SEQ ID NO: 415860 - DNA, 122 bp, Homo sapiens
tactcaggaggctgaggcaggagaattgcttgaacccaggaggtggaggttgcagtgagccgagattccaccactacactccagcctggatgacagagagaaacactgtctcaaaaaaaaaa

SEQ ID NO: 415861 - DNA, 122 bp, Homo sapiens
atttctggaaggcacccactgtggggtgctgcttgttctgtggtgttgctgtgcagcggccgggaggagcagagggctgcaggagaccctctgagattctgctttgtgcacatgtactgcca

SEQ ID NO: 415862 - DNA, 122 bp, Homo sapiens
tgcctgagtcctcgccagcatccgccctctcccactcccatccttcctggatccgcctctcggttcccgagggacagtcccgaccgcaaacccacgtagagtaaggaatgtgggacaggcga

SEQ ID NO: 415863 - DNA, 122 bp, Homo sapiens
ttatctcatttacacttaacctattatcatggatttaaaactattacatggcttatgtcacgtactagtattaacctcatgaggtaggtactatcattttccccattttatggctgaggaat

SEQ ID NO: 415864 - DNA, 122 bp, Homo sapiens
gacccagtgagggagttgagcaaaccccccagcgggcagagacggagacaggcaggcagacgaagaagacaaagagtcagtcagatggaaaagccagggagaaaaacagagacagcagcaga

SEQ ID NO: 415865 - DNA, 122 bp, Homo sapiens
caacctgcaaatggcaggccccggttaggggatgtgccaaatccactcgaatcttcctctcgtttggggaggaaaaaaaaggaagaaccagcaagtagcagcagccaccagcagcgtcgcct

SEQ ID NO: 415866 - DNA, 122 bp, Homo sapiens
aatgtcacagcatgtttcctgtgtgaccctgcgggctgtcatcgctggctgcctgccttacgcccacaggtctggtggtggcgaccagcagctgcaaaacgaccgactctattgaagacaca

SEQ ID NO: 415867 - DNA, 122 bp, Homo sapiens
gcccggtttccggtgccaggacctttccgaagcgtcgagtggcctaacggtcacagctgtcgcccatcggagaggcaggactactgcgagcagttttaccgcgacctccggaggccggcgtg

SEQ ID NO: 415868 - DNA, 122 bp, Homo sapiens
ggaacacagagagcctagtgtgctggaggtgagcgaggccggatcaccaacagcctactacgccaggcagaagcctttgagcagaccagtaacaccatctaagtgtttcaagtgccattctt

SEQ ID NO: 415869 - DNA, 122 bp, Homo sapiens
gcctttcgcataggggctttaactggactctagttcctgggagcagaggggcgaatgaggcgggggatttctcagccagtttctgactgcccctagtgtatgtggcattttggttcagtatg

SEQ ID NO: 415870 - DNA, 122 bp, Homo sapiens
tggagagttacatccagctcccgcttgcctgttagggctgcctttacaataatctgctttcgcggggagaaaatttaaactttccaaatggaactgttttttcttggaatgtgacatttgtg

SEQ ID NO: 415871 - DNA, 122 bp, Homo sapiens
atccgggaatttattcttatttctgcttcttaaacaggctctggggaggagcagtttcgacggagaagttcatagcagcagttattacggaacttgcaacagttggtgccgggcgataggca

SEQ ID NO: 415872 - DNA, 122 bp, Homo sapiens
ggtctcgatctgacctcgtgatctgctcgcctcagcctcccaaagtgttgggattacaggcgtgagcccccgcacctggccgaattttatcgtggaatgtattcttaatgtgaatagttttt

SEQ ID NO: 415873 - DNA, 122 bp, Homo sapiens
gagctgcagcacctttgggagaggtcctgcgtcgtcctcagctgcgtcgctgtgaactcccgctctccactgtgttcctcagtgtctgcttttcaggaagtctgctgtgacctttgcccaac

SEQ ID NO: 415874 - DNA, 122 bp, Homo sapiens
ctgaacaaactcgagactttcacagggcaccaggcatttcgtcaggtccacagctacgcacgtctgagcctcatctcctccctctctgcagtgaaaacgtgaaagaagacccacttctattt

SEQ ID NO: 415875 - DNA, 122 bp, Homo sapiens
gccatggccgcagcctgacatgcaggaaggggagaagagcgggcggatccctcacaccaccggtgtcaccaagagagaaaatgctctgccacctctgtgccctgatgtgtcaacaaagtccc

SEQ ID NO: 415876 - DNA, 122 bp, Homo sapiens
gggacaacgcagccttcccgcaagggcagcccgggccgcgcacagcgtgggctcgggcgccggtggaggaggcctgaaggcagcctggatctcctagcagtcaccctgcctgtcggaggggc

SEQ ID NO: 415877 - DNA, 122 bp, Homo sapiens
gttagaggccgtggacgaagcggtccaggcacagccagctgcagggcgcggcctcggcggcgctgctcgtggccctggtcagtgagcgcactcactcctggactaaggtaacccgcgtggag

SEQ ID NO: 415878 - DNA, 122 bp, Homo sapiens
agcagcgtggggccgcctcacgctcttcctggctctccaattagcccaccctttccctgccgccaggtctgaagcatcgcgagaagagcaacctctgtggccagaaccaagctgacgatccc

SEQ ID NO: 415879 - DNA, 122 bp, Homo sapiens
agactagttccaggaaaaaaaaaaaacatccttccagaaaatgcagaaaggaaactgggtcgatcaacttggcctaaccagtcatagggaaagtaagctaggatgatttccctgtgggagct

SEQ ID NO: 415880 - DNA, 122 bp, Homo sapiens
agaaaacgtgcgtggctgccccagccccgccgccgcctctgcacggcacggtgtcctgtccgtggctccatagccattgtgttctcaaagggactgagccgttattcgtccttttctttggg

SEQ ID NO: 415881 - DNA, 122 bp, Homo sapiens
gaagcctccatcttcagaagggggttctctgccccaaacagcgtctaatctggagacttgcggtggtggcggtggtggtggtgggggcagtgccggggcctcaggctgttctccctcatctt

SEQ ID NO: 415882 - DNA, 122 bp, Homo sapiens
cgctttgacccgtagccctgtggaaaccaattgcatttctcttcatatcttccaccaggccggggcctggggttgccgctggaggggctaaagaccgctcctgcttcctcagccgccccttg

SEQ ID NO: 415883 - DNA, 122 bp, Homo sapiens
caggcccgggcccacaagaagcgcagcagaaaggcgtccggggaccccggcctgcagtcccgccacacagtgcatccagccccgcccggcctaaccccttcggtcactcggcccgacccgac

SEQ ID NO: 415884 - DNA, 122 bp, Homo sapiens
agcgctcgctcgacccgaagtccactctgctgctctcgctctcctctgggggcagctctgcggactggattcccatagcctcagagaggcggggccttgagccagctgcgggtccttccagg

SEQ ID NO: 415885 - DNA, 122 bp, Homo sapiens
ccagagaaggtcctatttaaaagtaatgctcactggcttccccacatccacactttcagacggatccaaatccaatgcctttgtttgatgtacttcagggatcccttccagtgaaaaaaatc

SEQ ID NO: 415886 - DNA, 122 bp, Homo sapiens
tctacgggcgcccatactttggtggccactgaaagtcagcggcgcggactgccctgagggcgggaaagggtggtcactgggtcagcccgaagcacctgacatgagggcggggaccccgaaat

SEQ ID NO: 415887 - DNA, 122 bp, Homo sapiens
agtggccaatgcgggggtctccaggcagggccctaagcaccgcgccaggttaatgctcctcgcagctcttgggcaggactgactgttggaggcttgtccagcagagacaggaatgaggggac

SEQ ID NO: 415888 - DNA, 122 bp, Homo sapiens
atgcggctaccccaggcccagtatgcgccggcagggcttctcacatgtcctccaggaaagcgcctgggaccaccaacggccaccagggccactggatccatgcggcttgtgcctggtgatgt

SEQ ID NO: 415889 - DNA, 122 bp, Homo sapiens
ggaaggggcatggcctgggtggccccgccccgcaggccctctggctaccaaacctcccagcgcccccgcgcccctttggagttctgaccccgcgggtgcacccgtgtctcctggacacagag

SEQ ID NO: 415890 - DNA, 122 bp, Homo sapiens
cgccggcccgcaagtggtggcagcccggaggcctggctacccggcggtgttccgcgttcacgcccgggcgtttctttagtccatatggaaggaaataaatggccttttttttcctctttttt

SEQ ID NO: 415891 - DNA, 122 bp, Homo sapiens
tctgtctgccttccatctccactcaaaagaaacatgctcctggccaggtgcggtggcttacgcctgtaatcccaacacttcagaaggccaaagcgggtggatcacctgaagtcaggagttca

SEQ ID NO: 415892 - DNA, 122 bp, Homo sapiens
ctgtatgtatagtctaaatattattgtccaatcatggcagggattatggttgtatgtactcgagtacctaagagtgggccaggacagttattcactaagggagtgtgtgtgtgtgtgtgtgt

SEQ ID NO: 415893 - DNA, 122 bp, Homo sapiens
ccgctgggcgggtccaccccgggcccagctggaagatgctgccctgaggcgtggtggcggcggcagaggccaagtactctagctatgggcactggccagctgctgggagcggaagcggccgc

SEQ ID NO: 415894 - DNA, 122 bp, Homo sapiens
tccctattactagctggggatgaaggcagtgagaaagatcctggaacctgaagccaggagcgtgtgcacccagcagtgtgtcatgcttacctggaagtggtccttttggagtgtggcttctc

SEQ ID NO: 415895 - DNA, 122 bp, Homo sapiens
gctccaccctcaatccaccagaaccatgggctgctgtggctgttccgaaggctgtggctccggctgtgggggctgtggctccggctgtgggggctgtggctctggctgtgggggatgtggct

SEQ ID NO: 415896 - DNA, 122 bp, Homo sapiens
aaaattgaagcacaaaatggttgtgaagaggaagcacgtacgtagggctgcttcatcaggcgaaccctaattcatgtaaaattcaacgctgggaaatcaaaagaaaggaaaatcactctctc

SEQ ID NO: 415897 - DNA, 122 bp, Homo sapiens
aggtgcttgactgctctgatgaaatcactaataggaagtgccgtcagaagcgataactgacgaagactactcctgtctgattgcagtcaagtcttcaccacttgctggttcccaggagtaaa

SEQ ID NO: 415898 - DNA, 122 bp, Homo sapiens
taactccaaagccgagacttttaatcattttccaataaggcaatgattgtgaaataatgacgtgtgaaaaagtcaacagggaccccggccttggccctaagaagctcacagtctagtgaagg

SEQ ID NO: 415899 - DNA, 122 bp, Homo sapiens
gcggagtgtgctcagccaattctgtggggagacttaaagctgtggaattaaacttgttggcgccaacttttccccagtggggatggtgggaaagaggttggccacagatgcttatcaaggac

SEQ ID NO: 415900 - DNA, 122 bp, Homo sapiens
acagaggtttaaaatgaatttaaatcatgcttttttggtttgtgcagattgacttgtacacggctgggtaacttatagtcactatttagtaatcctggggccaatcttgggcctcacccagg

SEQ ID NO: 415901 - DNA, 122 bp, Homo sapiens
ggctcagggaagggctttatacaacgaatcccgagagaggctcagagccagtcacagggacgttccactggtcccagatcaagtgtgaaagcagtgacaggggagatgaaaggccacgtctg

SEQ ID NO: 415902 - DNA, 122 bp, Homo sapiens
ccttcctccgagtccaggtggactctgtggatgtgtggatgtggcccgagcaggctcaggcggccccactcacccacagcatccgccgccaccccttcgggtgtgagcgctcaataaaaaca

SEQ ID NO: 415903 - DNA, 122 bp, Homo sapiens
caaaaagtgatttagaataatgcaaatttgagtccagaatctagaacacccttccaggcacggaggttttccgtttaaatggccctcgggaaataacactgattttcaaagtcgttttaaaa

SEQ ID NO: 415904 - DNA, 122 bp, Homo sapiens
cgccgctgctgcaggtacaccttctccagggcgaaatgggtgagcgagtgcagcaggcagcggtagggcgaggagaagcctagcatccgcaggtccgggctgcgggcgaagcgccgggccga

SEQ ID NO: 415905 - DNA, 122 bp, Homo sapiens
ggagaagactgtgaacatatatatagtaaatatccattaaatatttgtcaattgagcaatcgttcgttgtttagattgttatctttctaaggaagggacccgtgatatacttttatttattg

SEQ ID NO: 415906 - DNA, 122 bp, Homo sapiens
tctctggcagtgaaagcattctgcagatgtgcagttctacagaggaaatgtaaccagacacgtaccccgcagagaactcacattttatttatttatttatttatttatttatttatttattt

SEQ ID NO: 415907 - DNA, 122 bp, Homo sapiens
acctcggcgcagcccgcttcctgacactaacgcacccctccccggcctgggcggcggcgacggcagtacccaaacgcccttcgctcagtcccggcgcctttaaagtcgccttccagaaaatt

SEQ ID NO: 415908 - DNA, 122 bp, Homo sapiens
tctagggcttcctgttccccctgtcaaatggggatggcgacactgacctcctggagctgacgaggaggttgcaggcgactgtgaaacactcagtaccatgtcgggcacgcagaatatctggg

SEQ ID NO: 415909 - DNA, 122 bp, Homo sapiens
tctaaaggatggtaagtgtctctgtagtacttcagtgatttgccaatgccctctaagtcccgtaacctaagagaatagtaaccgaatagtcacggtgtccagcgatatccatcaggagggtg

SEQ ID NO: 415910 - DNA, 122 bp, Homo sapiens
caaaaaaatagacacaactaaatgttcgaccatatggtattggttaaattaacatctatacgatggaatactagatggtcattaaaattatgtgtcagaagaaggcttaatctcatgggaaa

SEQ ID NO: 415911 - DNA, 122 bp, Homo sapiens
gccagattaatattaacaaaacatgcttcatctaaattcaagttgtaaaaatttgagtttcggtcattgaaaattatgtcttgggatattcttacctgtttctgggcatcacttaaatttca

SEQ ID NO: 415912 - DNA, 122 bp, Homo sapiens
ggagtccaacctctggtgccctcccaggatcctcttcactgcccccatccctaaaggtcccgcctggtggaggatcagggaggggacagtgttctgcctcctgctcaaacttcagagcccac

SEQ ID NO: 415913 - DNA, 122 bp, Homo sapiens
tacatgccccccccacacacacacgcacaggcacacacactcttgcgtgctgactgcaggcggctggggaagagctgcagcctccagccctgctcctatttaaagagaggcattgctggaaa

SEQ ID NO: 415914 - DNA, 122 bp, Homo sapiens
gctcttccgcaccaaaagtccggctgaagtttcagatgaggagctcttcctgagtgcagacgagggccctgcagagccagaggagcccgcggactggcagacataccgcgaagatgagcatt

SEQ ID NO: 415915 - DNA, 122 bp, Homo sapiens
cgcagctctttcgcttcctcttccggtcccgctccttctctcgtcgccttttctccaaagcgcttggcctcagctccttagcattgtcctggccccgggcctcctgtatttcctcctgcagt

SEQ ID NO: 415916 - DNA, 122 bp, Homo sapiens
gttgaacatagtggtgcacagctgtagtcccagttactagggaaggtgcagcaggaggatcgctagacctcagggggtggaggttgcagtaagccgaaatggtaccactgcactccagcctg

SEQ ID NO: 415917 - DNA, 122 bp, Homo sapiens
ccagttaataaaaataacgccgtcctctccacaatggaattaaaagcctcccgtgtactgcgcagccgcggcgcagtgtctgctgggaactcctcgacccggccagaggggagggctaagga

SEQ ID NO: 415918 - DNA, 122 bp, Homo sapiens
aagtgctgggattacaggcgtgagtcgccacgcccggcccactagtgcagttctaattaacgatccagatgattttgatacacataaaagtttgtgatagctgctactgcagacagattcta

SEQ ID NO: 415919 - DNA, 122 bp, Homo sapiens
ctccctgggagccctcgaacttttctctaaactccaccggtagctgaggagcaggacacacgcacagaggaaggacatatttatggcgcatcgccttggtgccaggcaccgttgggaacttt

SEQ ID NO: 415920 - DNA, 122 bp, Homo sapiens
ttccttccatttttataatattcaattatgctaagaggtatgaaaccgtgcccagtatcccgaagttgggcttttgacccatattcagtattaaaataatttcttgctttctaatgtataaa

SEQ ID NO: 415921 - DNA, 122 bp, Homo sapiens
ccagtgggtggccatctgcctcggcaggatctggcagaacttcgactcggcgaggtggtgcggcgtgagggacagcgctcatgagaagctctacagcctcctctccgaccccattcccgagg

SEQ ID NO: 415922 - DNA, 122 bp, Homo sapiens
gttatcagatcaatacagccgcagaaccggccagcaggaggaatgcaagcccactccagacgtctcacctgagcttggaaaatccaggggcctgaccaggggccgcgcactgcccggatcgt

SEQ ID NO: 415923 - DNA, 122 bp, Homo sapiens
ttactgagtctacgcccagtgtgtcttcgtaggtgtgtttgtttcaaatccaggcagtgacgcatggttacagtgaagatctgcctgctcacctcctgcaggggaacttaatatgcacaagg

SEQ ID NO: 415924 - DNA, 122 bp, Homo sapiens
cttaataagcacattcctttcccttcaagtccactaagatagggaagctaaaagcagactcgggggtctgcctgcagttgcagaaaggtctatgaaaacacacaactctccctcccaaacaa

SEQ ID NO: 415925 - DNA, 122 bp, Homo sapiens
caagcgattctcctgcctcaacctctcgagtaggttgatacaagcatgagcctccatgcccggctaattttgtatttttagtagagacagagtttctccatgttggtcaggctggtcttgaa

SEQ ID NO: 415926 - DNA, 122 bp, Homo sapiens
gtgaaggaagcgtgtttatctgaaattctaagaagatgagagtcaaagacacccagcaaacggcggtttccgtgagcaggtaggctgacctttctcatgtgcacaggagggaaggtctacag

SEQ ID NO: 415927 - DNA, 122 bp, Homo sapiens
ctgagagaggtgtggagacctggacaacggatatgacatcactacagctcctgggggtttcggggggatattttgcggggaatttgttaaccaaacaaggattgactctcgtgctccagttc

SEQ ID NO: 415928 - DNA, 122 bp, Homo sapiens
ctgtttgtgaagtggtttgagtattcttgctatgcgctattactgctgttatcagcatcacgagagtctaacatgttgatacaggtggtgtgtgttgagggcgggtgggtgggaagggatca

SEQ ID NO: 415929 - DNA, 122 bp, Homo sapiens
tttttttgtcttttcttccttcatctatttcttggaggttatcatctgtcttagtcccttcgggttgctataaccaaataccataggcttgggtagcttgtaaacaaaggaaacttatttct

SEQ ID NO: 415930 - DNA, 122 bp, Homo sapiens
tatttccttccctttaattaggcggcacgttagcctttaacagaggcgggccactggcggcgtggtttcaggtaagtcgctgaacctctttagccatctccttcccatccctgaagaagagg

SEQ ID NO: 415931 - DNA, 122 bp, Homo sapiens
cctccctttgaactctgtgtgccgctgtcttctcaagggagggtcatggagcactagcatcgtgggaggctgagctgacaagtggggcccagctgggcctggaggccagggcgcccttccgg

SEQ ID NO: 415932 - DNA, 122 bp, Homo sapiens
cccggcgccgctgcagcttcaccagctcatgctgcttctccttgtactggtgctggacctcggcccgccacattctgaagtccagttccaggacgtccatgtcctccacggaggacttcatg

SEQ ID NO: 415933 - DNA, 122 bp, Homo sapiens
atttacaaccttagaacagtggacaatgcttgatagtgtcagactgtgggcactggaaaccggctggtctcaggatagggatcctatacctccaacacttggattgctgacctttcacttct

SEQ ID NO: 415934 - DNA, 122 bp, Homo sapiens
agggacagtcctgccccctgccctgaccatgggggacgtgggacacgcctagacaagagacgttccacaaagagcaaggccgctggcgctctagaagacctcacagccgtgaagcgtcccgg

SEQ ID NO: 415935 - DNA, 122 bp, Homo sapiens
ggccacacctctgcccaggtggtgccaaggagggccaggagcacagccaggagatgcccccggccaggggaggtctctggatgcagcatgggtctgttgggcccgtcaggcgctccgtgcac

SEQ ID NO: 415936 - DNA, 122 bp, Homo sapiens
tctcttcctttctgggctcggacctaggtcgcggcgacatggtgagtgtgggtctctgtgcggcctagaactctatctgcctgcatctgtccttgttttcttctcccgcacccatctcctct

SEQ ID NO: 415937 - DNA, 122 bp, Homo sapiens
gacccagacggggagagggtgctgggcgccggcaagccacagcgtctgctctcatgatctcgcccccacccgccttgggcccccagaggtctgtgctccgctcctcttcctcctcagaactt

SEQ ID NO: 415938 - DNA, 122 bp, Homo sapiens
aatgaataatcagccgttgtcacgtgcaacgaacatccacgctctttccagctcttcgggcgtctgttacaaattaatgcctttgcaggagccagcctgtgctccaagcccctcatccccgg

SEQ ID NO: 415939 - DNA, 122 bp, Homo sapiens
gcgcggcggctgcaggagcgcacagtcggccatggcccggcggcggcgccgcgcctgcatcgctctgttcctggtgctgctcttcgccttcggcaccctcatgggtctgcgcacgctcaagg

SEQ ID NO: 415940 - DNA, 122 bp, Homo sapiens
cgaattcctcacgctgctcactgagacttcccctcactgagacttcacgctcctcactgtcggctatcggccgacagaagatctcacatccaagtcacaaagactcagaaccttcttcaaca

SEQ ID NO: 415941 - DNA, 122 bp, Homo sapiens
ccgcgctcccggcatgctggagagacagaggcccattgaggcattgcagcaggcacagagcgcccccttgtcccccaacaatccgcctttgtcctccagtcctggctgctgcagcttggtcc

SEQ ID NO: 415942 - DNA, 122 bp, Homo sapiens
ggggggatcattctataacactaaaagatgtttccagaagatcccgggattacttttgagcgttcatcctgtaaacaatggctagctgctagaaggagcaaaatggaaggagagcagatgcc

SEQ ID NO: 415943 - DNA, 122 bp, Homo sapiens
cagctatcatcatctgaatcagaaaaactctcttcacttgaatccacactttcaacaactcggtaatgtgatactggtgcacatgcagtcgccctgctctggaaggcccttataagcactgt

SEQ ID NO: 415944 - DNA, 122 bp, Homo sapiens
gaaggggcagacgtagacttggaaggattctgtggcctgttcgaggttccgtgcatgagccgtgctccgtggagagccaggtctaccgttccagcctttgctctcccaggcccctggctgtc

SEQ ID NO: 415945 - DNA, 122 bp, Homo sapiens
gctcagtgggccccagcttcacccagataagcatggtttgctaagccaattagtgggagacgatctgacatgggattcctgccaggctttcgggatctgggaaccccaaaatggggagaaaa

SEQ ID NO: 415946 - DNA, 122 bp, Homo sapiens
cgtgatccgcccaccttggcctcccaaagtgctgggattacaggcgtgagccaccgcgcccggccacaagaactttcacagtttggtgattgaaacccacatataggaattcatattcattt

SEQ ID NO: 415947 - DNA, 122 bp, Homo sapiens
cctggctgctcctcctgcaggtgacgggtgaagctgccctgcggggcacgacgctgcagtcgctgggcctgaccgggggcagcgccaccatcaggtaagggcagtgctgctggggccgagga

SEQ ID NO: 415948 - DNA, 122 bp, Homo sapiens
caggaaccctgagaaggcccaagagtgacccaggagccctcagatggcccaagagcaccccgagtggggagggatccagggtgattcccagccccgagaaaggaagccccattccgggaggg

SEQ ID NO: 415949 - DNA, 122 bp, Homo sapiens
atttgattgggaggcctctcgagggctgggagaagccgtttcccttggcgttccatagcacgctgctactgagatgttttgtgtatagtggcctcgctccgtgcatctaagttgttccttga

SEQ ID NO: 415950 - DNA, 122 bp, Homo sapiens
aaagggaaggccctggggaaggaggagatagctctgggaggaggagggttctgtgtccaccgtgagcctcccggtgcccatggctcctgtcacagggcagctcagtcccgaggagcctccct

SEQ ID NO: 415951 - DNA, 122 bp, Homo sapiens
cttcttggtgcagctgcctcccgcgagccgagacactcctgtcagggaagaggagcgccccggctgtccccctagagtctcctgctggggggacatcgcttccatgaagaaaatcttcaaac

SEQ ID NO: 415952 - DNA, 122 bp, Homo sapiens
ccacttagagttcccaaatatccccacccccagggtgaagcccagctgctggtgggataacgggccctctctgctactgcttgcaaaacagcatgttgtttcttaatgctgtttaagaaata

SEQ ID NO: 415953 - DNA, 122 bp, Homo sapiens
ccgccgcccacgtggagtgggatccgagccaagggggcctcccgagcggggactacagtgcgcgccacgggccaccaggtggcgccgggagcctgggaaagccgcgccccgccagcggccgc

SEQ ID NO: 415954 - DNA, 122 bp, Homo sapiens
ttcctactgcctacaccaagatgtcatgaagctggcctgtgatgatatccgggtcaatgtcgtctatggccttatcgtcatcatctccgccattggcctggactcacttctcatctccttct

SEQ ID NO: 415955 - DNA, 122 bp, Homo sapiens
ggcacagcaccgcggtccggagagcgccagtgcctgtcaccaggagcagagtgaacccctcgtgggtgccagctcctcctgcccctcctgagcctgacggggctacggttttcagtggctgc

SEQ ID NO: 415956 - DNA, 122 bp, Homo sapiens
acagttgagcaagggtaatggaaactgcggaaagtgaaaccaagataagagggggactaccgtatagggaagttagtcacttatgtacatctcacacagtaagctaatgtcagggacaacag

SEQ ID NO: 415957 - DNA, 122 bp, Homo sapiens
aaagaagtatagaaaagagagaaaaacgtcaagaactccagcataaagtcctcttaataacgcgtctttttataatcatcgggcaataaatttctgaatggacaaactatggtatataagta

SEQ ID NO: 415958 - DNA, 122 bp, Homo sapiens
ttgggggtggagagggaggcgcctacaagccccttcccctctcttcggccggacacaaagcgggcttttccacctagagtcccagcgctctcacctgcgcaccagccgtcgcgccgccccag

SEQ ID NO: 415959 - DNA, 122 bp, Homo sapiens
gctcaagaaaatttgttgaaagacaccccaatgagagaagaatggctgtttccagccttccgggcccctcagctttgggctcctgcagggccccagaaccgtgggatcacggccacgaggag

SEQ ID NO: 415960 - DNA, 122 bp, Homo sapiens
cccgggcggccgcggaggacgtgggtgggagagggccgagggcgcgcccggctgggctcccgccgatgccggccccctggtggcctctggccctctgggacccagcgcaccgcgagggaggc

SEQ ID NO: 415961 - DNA, 122 bp, Homo sapiens
ggggtctgatgggcctctcaaacaaaaagctcaacaactgcttcgcccatgtccccttcccggcaaacacatcactgtctgtctgcacagcacacaagcccgaatccaggagtcctgggctg

SEQ ID NO: 415962 - DNA, 122 bp, Homo sapiens
ggagtcgggggggacggcggggtagccgcggcctggtaagtggagctgggattccggcgccgtacgggaggagagagtaggccagcgaggcgatcctctgtccgggcatagccccaccccct

SEQ ID NO: 415963 - DNA, 122 bp, Homo sapiens
cgagggggcgagggctggccgcccgtgaaaggaaaaataaatcctaaggaagcaagaaatcggacgaaaggatcttactttaagtgatctccttgaacgcgtcttttcaaactccgcgatag

SEQ ID NO: 415964 - DNA, 122 bp, Homo sapiens
gcattccgctctcaggtggctccggggccttttgtgcaggccatgattaccaaatgccaccgcgacaccccctcccggccgcctggctcctcctggggccgcaggaatgagggaaggtgggc

SEQ ID NO: 415965 - DNA, 122 bp, Homo sapiens
ttgggaatggggaggctacagctcctccattctccctgggcctggtctcctggggatggtcgggtatggaaggcttcaggtgcagtggcaggtgagagcactgcccctctgatgggaggtgt

SEQ ID NO: 415966 - DNA, 122 bp, Homo sapiens
gtactgtccatattttcatcttggaatggggaaaactggctccactgagcaagttaaggacgtcatagactgatctgtagatgttcaatgaaatctgtaattcaagactaaataacgtattc

SEQ ID NO: 415967 - DNA, 122 bp, Homo sapiens
gtgtttcctccccacttcctgctgttgctcacagtgtccaaagaggttttggggtttgcccgtggacttgaccttgtggttccaaagagagcggggctcagggttgatgactccactagttt

SEQ ID NO: 415968 - DNA, 122 bp, Homo sapiens
acagcctccagagactcttcgtccattggccagcgagagtgtcagttcccaggctcctgccgcgcacgggcgagcccttctaggcgggaaaagttcagctgagagatataaaagagcagtct

SEQ ID NO: 415969 - DNA, 122 bp, Homo sapiens
acctatgccacagtgcactgagggatgttctgagccggccggcatgggaattgcaccctccggtgccttcctgccctgtgttcattcctgaggccttatctttgcagtggaattttccagag

SEQ ID NO: 415970 - DNA, 122 bp, Homo sapiens
ccagtgactaatggtctcaagagtacacaaagattcccttctgctcatattacagcaacacggagtacacctgtttccaggacaaccaagcattttcatgaaacaaccccaaataaaggaag

SEQ ID NO: 415971 - DNA, 122 bp, Homo sapiens
ctctggacaggaattatgcacagggcgtcgctgtggcactagaaaccccaaagtcacaagcgccccagatccgaccaggatgccgctaccggctacagcccagaggcccgctcctgcggcgc

SEQ ID NO: 415972 - DNA, 122 bp, Homo sapiens
ttcctgcagcttctccacggatggagattgtctttgggaataacacagggtcgtgcagtccgcccggcggcgttttcgggcgagggtctggtgctggggagcgagcgcggagcgaggtgtct

SEQ ID NO: 415973 - DNA, 122 bp, Homo sapiens
agtagtgtgtcccttcaatcactgacaacctcctcatccccgcgggtgtgtctttgtgggcgaagagtgattttcttcgaggtcaacttattgtaattagccctttcgatgaaattatattt

SEQ ID NO: 415974 - DNA, 122 bp, Homo sapiens
ctcaaaccctggagctcaagagatctgcactcctcggcctctcaaaatgctgagactacacgcatgagccaccatgcccgagcccagacattttcaatttgtggttgcttgagcctgcagat

SEQ ID NO: 415975 - DNA, 122 bp, Homo sapiens
gacttccctcttccctggcgctccggaaatgcgtcagagaactgcctcgagcgcgttttccgcgcagatccgagaattcgcgagaatctccgcccagccagttcaggccagggcggtcagag

SEQ ID NO: 415976 - DNA, 122 bp, Homo sapiens
ccggcccagggtctcttgggcggcgcctctgactcggggagaaacccaagtgtcagtgggcgggaccgggtacctgggaccctggattccctcgggggccccagaaccgccccctccctttg

SEQ ID NO: 415977 - DNA, 122 bp, Homo sapiens
tctgcggatggagcccctaagaccccaagcggcccagactacgtttcccagaggcctccgcggcctcagccacttccgcttccggtccagcctgtctccgcgtggtgcgagcgctgcaccag

SEQ ID NO: 415978 - DNA, 122 bp, Homo sapiens
agtgaagcaactaaaattgccattttaactgagggcaaggccgagccacttaaccactatcgtcaacctttccaatcgtgctcggttgctcctcagttttcctaccggtgcgaagctttctc

SEQ ID NO: 415979 - DNA, 122 bp, Homo sapiens
ggaacaaacagatcaataaaaatgcaaacaaatgaaactgtatgaaatgctcattatagccgtgagaaagcactccacagagaccagggtgagtgtgggggagtttccttagactgaggagg

SEQ ID NO: 415980 - DNA, 122 bp, Homo sapiens
gaggctcagaaagaggatgctctgcggaagcatgatcaagagacagcttccggaggaggccgcagaaggcagagtgaggtgatggggacgaagtgacaggcacctggagctaggaaagtagc

SEQ ID NO: 415981 - DNA, 122 bp, Homo sapiens
tcttaaaaaacataaaaagtaaaaagaagagagggaaagagagaaaaagatgatggaagccgagacaaagatagtcatggggatggatgaagcaggttctagaacttaccgaaaaaaaaagg

SEQ ID NO: 415982 - DNA, 122 bp, Homo sapiens
gccaaggtatgggaccacaccctgaagtcaggggtcagggtcagaagtgcctgccattgacgtgagggccctccatccctccgcacttgccctcctcattgcctcagagaacagatttcatt

SEQ ID NO: 415983 - DNA, 122 bp, Homo sapiens
gtcaggttgctgctgttggtaaaatgcttcccgcagaactcacagctgcccccgggcccgcggctcttgccccctgacttgggcatctttttgggtgatgccttctggctgtttgcagggtc

SEQ ID NO: 415984 - DNA, 122 bp, Homo sapiens
acaggctccttactcaagctcgggttcttctcctaggcggaagccagaccagagagcgtgcgtgtttttcccagggtgccccgcgctgctgttatggccgcctccttgaggtagtatccgca

SEQ ID NO: 415985 - DNA, 122 bp, Homo sapiens
ggtccagctggtacaatgggcaccgcccagagcccggcctgggaggcggagactttgagacgtttgaaaacctgaggcagagagggtaccaggtatgccctgtgctggctgacatcgagtgc

SEQ ID NO: 415986 - DNA, 122 bp, Homo sapiens
aaagtgggggtggggtgtggatgtggctgtgacccagtgggtcaagtgctctaggacacccgggagaatctaagggctaatgagactttgggaagaagactgggacaatattcagagagggg

SEQ ID NO: 415987 - DNA, 122 bp, Homo sapiens
agttgaggtgctggggcttggcctgcttgcgccgcgacatggcgcgaggaccgggctccccgcgcgtccctaggagtggcctacttcacacaacgaattcccggagttcggaaattaccccc

SEQ ID NO: 415988 - DNA, 122 bp, Homo sapiens
agcgctgcgagactggtattcaaggtcctctcagccgggcctctcacccaccccgctggccgcagccggaggctgccacgcggacaccgtctcaagcctctgagcattgctctgagcctctg

SEQ ID NO: 415989 - DNA, 122 bp, Homo sapiens
acctcccgaaatatgaggcgtctatggagggcgtctgatggacaaggaaattgtagtgctcgccttccgcttaatatggtggtaaaatccagggacggaggtgagaagagattttccacggc

SEQ ID NO: 415990 - DNA, 122 bp, Homo sapiens
aagaaggtgggcaggacaaatggcagcctcctgcagaggcctagtgagaagcctggccctcggccacacaggatggaagacagattgggttccacagaggggagctgccctgggaagatctc

SEQ ID NO: 415991 - DNA, 122 bp, Homo sapiens
acctccacagcaggagggcccagccgccagtgccaatgagacaaccacaccagaggcggacgcacccggcccccgctctgcggcacagcggccccagcctgactcccaggcagtgtctgatt

SEQ ID NO: 415992 - DNA, 122 bp, Homo sapiens
agttacattcaacgctggttctagcatccaatccaaggacgtgtttcagactctgctgcccggtcccagccagccctgagctggcgccttagacgctcgcctggcagctgcgcacactcgga

SEQ ID NO: 415993 - DNA, 122 bp, Homo sapiens
ttaatttgatgcacctctggattcagatgaaacattaaattgtcttcctcgattctccatcgggtgtagagtttttaaactatcaatggcatttcaagtcttctgaaacagcatggctgtat

SEQ ID NO: 415994 - DNA, 122 bp, Homo sapiens
cacagtgggtcccggaaagcggggtttgcggtgcttgggcggctccgtccgtggggtcttcgcacgcgcagacttggccctgcccgaggcccaggacccccggcgcccgaccgctgtcctca

SEQ ID NO: 415995 - DNA, 122 bp, Homo sapiens
gaggaaacatgaggcccggcgcggaggagatggctctgcgccccgggactctgcgcgccgcgccgccgccaccagtggctttgttgggccggccagttgccttggaaacaagagaacccaag

SEQ ID NO: 415996 - DNA, 122 bp, Homo sapiens
gttcatgttctcgggcagagtcctaacaaatcctgcaggtatactacacctggtacctgccgacgcctattgaggaggaaagccacaggatgtggtaacattctcaaaaacagagatctagt

SEQ ID NO: 415997 - DNA, 122 bp, Homo sapiens
cttgaatgaaactagccaaatatccttttgtttttgagtcctgcatttcatccctcatttcgagcattattgtaaagatagtttgctaacaatttcactactaaaataataatggcatacct

SEQ ID NO: 415998 - DNA, 122 bp, Homo sapiens
acagtgcattgagcggcagccccaagaagaccttatcgtgcgctgtgaggcaggcgagggcgagtgccgaaccttcatgcccccccgggtcacccaccccgaccccactgagcgcaagtggg

SEQ ID NO: 415999 - DNA, 122 bp, Homo sapiens
ggctgggttaataaagcactttaaaccttgttggtatatttatactgactctttgaaaatcgcttacctcattggggtgctgtagctgaaccaaaaacagtaagagaaaaattaaataacac

SEQ ID NO: 416000 - DNA, 122 bp, Homo sapiens
tcgcaagcatgggcagtgcgtttaagactgggtgactcactttttctcctataaaatgggcgcacgcaggccccagctcagcgccagaagggggagccccggcgcgccggcagaagacaaag

SEQ ID NO: 416001 - DNA, 122 bp, Homo sapiens
cagcccacagatatcgaggaaaatcgaactatgctcttcacggtaaaatatcacccagctcgtgcacagccccagtctgccatacgctttcaagagaaaatctgctttatggagcgaagatt

SEQ ID NO: 416002 - DNA, 122 bp, Homo sapiens
caggccatcgaccgaccggccgaacgacttggagtttggtcagggcggttggaggagagccggggctgctgagcggcaggaatccaggggaaaacctttccactccatccctcatctgctga

SEQ ID NO: 416003 - DNA, 122 bp, Homo sapiens
ctgggcgccgccgtgcgcccaccccctgccagtggttcgctccgaacacccctcgtcgggcggcgggtactgcggcccgccccacttccggttgttgtccggccctatatccggtgtccgcc

SEQ ID NO: 416004 - DNA, 122 bp, Homo sapiens
gggccagcagacctgccagcaggtgcaggatggcggcggggtggtccgggcagagggcgccgaggaaggcagaggccagcgaccctgtcagggagaccactgccatgccgtcccagtggatg

SEQ ID NO: 416005 - DNA, 122 bp, Homo sapiens
atctcaagctgcacgaaattgcagaagacactggcaatgttaaaaacacacatgagtggacgggttgctcctgagggtgtcgttaccgggccagtgatgtgagatgataaaagatattaagg

SEQ ID NO: 416006 - DNA, 122 bp, Homo sapiens
gcagccacttggacggctccgggactgattgcctggggcaggggtggcagtcgaggccgccggggccgaggtgaggctgcagctctccgggcggcggtagcgctggggaggaggaggagaga

SEQ ID NO: 416007 - DNA, 122 bp, Homo sapiens
tacatgtgaattcaggatggtgctcacacttaaagagtagtaacttttcttgttaaatgtcggccttaaggcattcttgccagagctattaagtgtatgccataaaacacatataaccaagt

SEQ ID NO: 416008 - DNA, 122 bp, Homo sapiens
tccgcggaattcttgtatcctgtccagggtatcctgacctttctcatgaagcttctaccgcgctctgatgctggcagtcaccgccaaaaagtgaaactactaatactttgcagttgacgtta

SEQ ID NO: 416009 - DNA, 122 bp, Homo sapiens
aaagtacagtggctacagatgtgacacaaatcacaccaacaaccagtcagcgcttccgagcgtgaggcaccgcatcaccctgagaagcagtgtgcctgtgttcctgggtcttcactgccacc

SEQ ID NO: 416010 - DNA, 122 bp, Homo sapiens
ctcgctctctccctcgctggctgcctcgctctttctcttcctatataaccttgcccgccgcggctgcgggggactctccaccgctccccacccagacaggggctggaatggcaggctgccgg

SEQ ID NO: 416011 - DNA, 122 bp, Homo sapiens
tctgaaggttccaaagtcagggccattgaacaagatgcgctcctgactgcgctcccactccgcacctgcccggccccaggaggccggcaaggcggctcccatcggtcctcccgctgtcaccc

SEQ ID NO: 416012 - DNA, 122 bp, Homo sapiens
actctgtggttttttaaaaatgcccgacttggtctgaacttgccttcctcgcatcctccccggtttccagctcatttccaggggtgtctgtggtgcctctagagaaggtgtccctcatgggg

SEQ ID NO: 416013 - DNA, 122 bp, Homo sapiens
agcaaccctggctgggcgtgggctccctgcaaggcggcggtggacggcccgcagtcgggccgataaggaaacctgctaccattccttggcttcctgggtgcctcactctagagggggaaact

SEQ ID NO: 416014 - DNA, 122 bp, Homo sapiens
cacagtaagccctgcagcctccctggaatccctgaggaggagccggctcacccagcgccgcgagcatctcttcctgactcgcagggggcccgtgagatggagaatctgcctgacagggtgca

SEQ ID NO: 416015 - DNA, 122 bp, Homo sapiens
gcataagcaccgctctcagccactcaaggaactggtgcatccaaaagccctgaactaatccggcttcacgaggggaagatgcaactataataagggtggccgtggtgatgttgttactagga

SEQ ID NO: 416016 - DNA, 122 bp, Homo sapiens
tggggaaagaatcccggccctggagattatatatccgccttcgcatcagcggagcagggacgctgggagcgcgcgcggcccgccggctagtcagtcccctgacccggaaccgcactggtgcc

SEQ ID NO: 416017 - DNA, 122 bp, Homo sapiens
agcctgggggtgggaggaagctcgcactctgaaggacacgctgatccccgtggggactcccggcgccccgcagcccgggccgccgagggaggcagtaggacccaggggccgggaggcgccgg

SEQ ID NO: 416018 - DNA, 122 bp, Homo sapiens
tcgcagtccccaatccccgcccctcccagccctcgctgaccccacaacgtggtcggactgcggtgcctttaaggcttttgcctgctgcacatgctcagctctttgtgtgttgttggagtttt

SEQ ID NO: 416019 - DNA, 122 bp, Homo sapiens
gaaggctattaagaaaatttaaataatggaaaaaaaatagaataccgatagtgataactgcgcactcatacaatgccttggttgcagaggtcattcccccacattaccttgtggggtttgat

SEQ ID NO: 416020 - DNA, 122 bp, Homo sapiens
tggtgcttatcacccgggcttcctcttgaccctgccggctgggccctgggccttggccttcgcctcttaaacgtggtgcaggactcaccctgggccacccccaggtgggcagccttgggaga

SEQ ID NO: 416021 - DNA, 122 bp, Homo sapiens
gagggggatgcgatggtagtgagaatattagggtattcatatctttcctcccgagtcaaacgttgccaggcacgttcctttcgcccctcccaccctccattctgcattaattccaagtttaa

SEQ ID NO: 416022 - DNA, 122 bp, Homo sapiens
ggtgatccttccacctcggccacccaaagtgctgggattacaagcatgagccaccgctcccggcctccaaatcccacctcttgaagacccacgtgccaggtcctccagcccccgcccccttt

SEQ ID NO: 416023 - DNA, 122 bp, Homo sapiens
cacgactatgcggtacagctccaccagcttggccttctccgtgccgttggcgtggaagggcgggaagtccgtcacgttggggccacatagcttgtccaggttgttggggaacggctccccct

SEQ ID NO: 416024 - DNA, 122 bp, Homo sapiens
tcagtaaatagaattgcctatagtcaatgttatctcttcacatccagggattctaagatccggttacccatttccctcaaaacagcagatagcaaagccagggaaatgaaaacccaccaaac

SEQ ID NO: 416025 - DNA, 122 bp, Homo sapiens
ttcactctccccacaggcacacgctgggccacacacacggctacacccccgccagggacacgcacacatgcggggtggaggcagggtcacagacacccgcagacacatccccaacgcagatg

SEQ ID NO: 416026 - DNA, 122 bp, Homo sapiens
aaatggcctccccttcctacagctactgcaacgacagacaatccgccccggaaggcgaggcgctaactcaacagtacttccggggcaagtgagcgcccacaaggccaagtgcctgcgcgttc

SEQ ID NO: 416027 - DNA, 122 bp, Homo sapiens
cggagctcccctaggacagaagctcaccttcagccccacggctgcactcagagatggccccgcacacgcccgccccgggaaccgcctgcccccacccccaccaaccccgggaaccgcctccc

SEQ ID NO: 416028 - DNA, 122 bp, Homo sapiens
agggaggggttctgggcaccggccaaggggcacagggtcccccactgaggccagaaggggcgggcccaggggcgggccggcccagccccgacgccagggggagctagagaaggggcacctcc

SEQ ID NO: 416029 - DNA, 122 bp, Homo sapiens
ctcagatgagactgcaggaaggcagtggtggaaagggtgtggagtcagggggcctaggttcgaacccttgctctacttgtgaactagagagacatcttgcgccaaaccatgacctcttttaa

SEQ ID NO: 416030 - DNA, 122 bp, Homo sapiens
cgggcccaccacagttgggtctaccacggtcgggcccaccacagttgggtctaccacggtcgggcccaccacaccgcctgctccgtgcctgccatcacccatctgccagctgattctgagca

SEQ ID NO: 416031 - DNA, 122 bp, Homo sapiens
tttttacaaataagttgaacaagacagcctaagttagatgcaccgaagtactagaaatatcgctagcctctgttctccagtttagctttcaaaaccaaatgagccatgtataaaggagttga

SEQ ID NO: 416032 - DNA, 122 bp, Homo sapiens
ttaaactacatgcaggaacagcaaaggaaatccggcaatttgcgcagtcattctcaacaccggccatgcagcaaaatcatcagtggaaatttaaaaaaatacacatggccaggccccagccc

SEQ ID NO: 416033 - DNA, 122 bp, Homo sapiens
acgatcagcagccccgggtacctgcggtagatggcatgcatgcggttgaccagagaaatgcggaaggattcagacttggcccggctcaggcggctgctcagggggcccaggccaaggcactg

SEQ ID NO: 416034 - DNA, 122 bp, Homo sapiens
ccggggcgcgagagccgccgactgccctccttcactcgctgggaagaggaaagtgccgctcggcgtccccgaaaccctcgattacccccatcaggccgacccggcgcactcgccctccctcg

SEQ ID NO: 416035 - DNA, 122 bp, Homo sapiens
aatccaaacgatgtcatttcaaatgacatacagacctttcaggccgggtgtggtggctcacgcctgtaatcccagtactttgggaggctgaggctggcagatcatttgaggtcaggaattca

SEQ ID NO: 416036 - DNA, 122 bp, Homo sapiens
cggtcgagaggaggggaatgtgctgggccccggcctcgccgcgcccgggacggcccacagcggtgttgccagttcctgtctgtagcccaggagctggggtgggagacttctcttgggtttgc

SEQ ID NO: 416037 - DNA, 122 bp, Homo sapiens
acagctcacacgcggggttctgggagggcccacagctcccgaggtgtcaaagtcacaggacgacttctggtggggagtgcaggtagggggtgcggctccgtttcaccccgacacaatcacac

SEQ ID NO: 416038 - DNA, 122 bp, Homo sapiens
cccctcctggggagtgggttttcaatgttttccccttttttcctcccagctctgccctgacgtcaggcctcaggtgcagagctgcactgcgtggtagcacaagccctgagttaacaagagaa

SEQ ID NO: 416039 - DNA, 122 bp, Homo sapiens
ctgcgcccctccccgccccctgcgtccgctctccctcctcccgccctcccctagccgcagcgttcgctgaactcaacccgcgggtaggacggagctcagaccagctgaacctcttgttggtt

SEQ ID NO: 416040 - DNA, 122 bp, Homo sapiens
tgaagaccagtctttaataagtggtgtgatataatatcatatacttcaataattagaatccggttaaatgagaaaaaattatataagtcatacacacagtgctgggtttgtgttcaacaagc

SEQ ID NO: 416041 - DNA, 122 bp, Homo sapiens
ggggacttccctgaggggcgaagttccccttaaggttttctccatatctggctcttcttccgaactagcgccctgactgacacctacctaccccggggactttggatcccgcagggatctcc

SEQ ID NO: 416042 - DNA, 122 bp, Homo sapiens
aagaggtccaccaccctccccacagcagccacagggtgccctttccccaagcccagacatcgttcctgtgggagagaccagcataaagtgagccagggggtctgaaaagccagcttaagaag

SEQ ID NO: 416043 - DNA, 122 bp, Homo sapiens
tatctggcagcatttggtccctgtcatgaggttacagtgagcccctggcccccaccctcacgtgtctgtgaggtcagctccccacgccctggtcctccccacctgcgaggaggctcgtggca

SEQ ID NO: 416044 - DNA, 122 bp, Homo sapiens
tcttccgttgggggagccctccagactcgtagaatataagagagcgcccctccctagccgcgggccatctctaagcgacaggctttaagaggcaccccgaaagggggatgtgaggtggtgtg

SEQ ID NO: 416045 - DNA, 122 bp, Homo sapiens
ccctatcagaaaaaacaacaacaaaaaaaaaacagtgcccgctcggtttttcctgaaacgcgcagccctcgcctgtagccaggagaaaactccgcgagccaggaaaacacaaactcggccag

SEQ ID NO: 416046 - DNA, 122 bp, Homo sapiens
gacaaccttcgcgtcgcgcgagggcacggagcacgcgcagctctgcggtcgacgccgggccgcccccactccgcttctccgggttttccgtgaagctccagccaacagcggccgtcaccgga

SEQ ID NO: 416047 - DNA, 122 bp, Homo sapiens
aacgcctcccctgctctgatttcagtctctccctggcccaggcagaggcaccagtgttctcgccttggaatccttgtcgggagagcctagacccaggctcccggcggcgcgggtcgctcacg

SEQ ID NO: 416048 - DNA, 122 bp, Homo sapiens
cctccatgccaccggccagggtgttgaagcgctggtacagcagcttctggatgttgggcccgccggggccctcgggctctgtgatggagctgcgctttttcaggggccggggcgcgttggcc

SEQ ID NO: 416049 - DNA, 122 bp, Homo sapiens
ttttaccagtgagaaaactgaggcctttaagaattaagtgacttgtccaaggtcactatccgtattttaggagccaagacgagatcaagttcaatattccaggagtggtactgactagacct

SEQ ID NO: 416050 - DNA, 122 bp, Homo sapiens
aaaaccaggaatttgacacaggtacagtgtttgcatgtttttatctcaagtgtagattcccgtaaccgtcaggatacaaactcttctatcaccacaaaaatctccctggtgctttttatact

SEQ ID NO: 416051 - DNA, 122 bp, Homo sapiens
aatgcagaatgatcagcctcacagcgggtcacaggacacaaccgccgcgctctggttggacgcaggctgcatcctgtttcccggacacatttattcagcccaatctttcctgtctgaacaca

SEQ ID NO: 416052 - DNA, 122 bp, Homo sapiens
gaaggaagggaggtgaagagcctcctacagcggacctataaagtaggggccctctctgggcgagatccaggttgccagtaggaaatctcccacctccatgagcctcctcaattgttccaggg

SEQ ID NO: 416053 - DNA, 122 bp, Homo sapiens
ctccgggctcgcccccagaagcctgttcctgagctgattggggttctgggccaggggtctcgaggagtgaggctcaagctcaggaggacaaaaagcaaccacctggaaagtggcaaaatctg

SEQ ID NO: 416054 - DNA, 122 bp, Homo sapiens
ggggcggggaggggagtcgcctcagaaaagcgcatcttgattctgaccgctgcggtctcccgtgaggaccccggcactcggaactgagctgggatccaggcccaggggagtcacaggccccg

SEQ ID NO: 416055 - DNA, 122 bp, Homo sapiens
gagacttactaatgaatatttatccgccgctgctccgtgctcccggcttcccttacctttcggcaggtaagatcctccctgtgccccagccccgggggccctcctagctccccagtcgggga

SEQ ID NO: 416056 - DNA, 122 bp, Homo sapiens
cttgatggacaaaggcattctcccaggcttggtgatgaatgtgttccacttacagccagacgagacactcactcagggctctgcagcagagaagttagagctacagcttttttgctttgtgt

SEQ ID NO: 416057 - DNA, 122 bp, Homo sapiens
cagcagcgtgggccaggcaggcagtgatctccctgcctccaggacttgcatcgaaagatccggggacatttgtttttgatttttttcttcagatagggagagggtgaaacttccccaattgg

SEQ ID NO: 416058 - DNA, 122 bp, Homo sapiens
aattctgctggctcagagcacacgcaagctcctaggctgtgactggcaggaggctcacagcgatttctttttttttgagacagggtctcactctgtcgcccagactggagtgcgcagtggtg

SEQ ID NO: 416059 - DNA, 122 bp, Homo sapiens
gaaacaaatttaactttggttttccaactttttcaaaccataaaaattaaagcagggcttcggtggctttgataatctgacagctgttatatttttctcatttggcaaggctaaggcagggg

SEQ ID NO: 416060 - DNA, 122 bp, Homo sapiens
ctgtagaacaggacgcaccggaccaacgccgcccaggccacccaagaggccagccaatcccgaccgcccatgcaaataaggttcacaggcgcccaatccgggccgtgttcatttcagcattg

SEQ ID NO: 416061 - DNA, 122 bp, Homo sapiens
tgatgggggacagtgggatagtcagggttccataactaagctcccagcatagaatttccacgccgcagttcaggcgccatggcaaccaggggaaataaacactacgagtttcacagtccaag

SEQ ID NO: 416062 - DNA, 122 bp, Homo sapiens
cggaattaaataatacccgaagatgtcatagtccgaggcaggagctgaagaggcgttggccgcggccagttggctttcaccgcagcccggtgtagcccgccagcctcgtgcggagtcctggt

SEQ ID NO: 416063 - DNA, 122 bp, Homo sapiens
gccctcctgtgcctgcttcctattggctggtagtagttcccgcctaggtgattgggccaacgcgcttcctcacgagggcttggttggtccggaggaggaggaggaccagggaggtacttccg

SEQ ID NO: 416064 - DNA, 122 bp, Homo sapiens
taccaaaacgaagtcaattaacatattaattacctcacataatagctttttgtgcgcatgcgtgggataagaatacttaaccccatccccagtgactgcagagtggcccttccagctgttcc

SEQ ID NO: 416065 - DNA, 122 bp, Homo sapiens
cttcaccatttatttctttagaataagtaataagaattttataagcttttttatatttcacgtaatttgagactattgaaaatccagttaagtctctctactgtgttgagaggcattgattc

SEQ ID NO: 416066 - DNA, 122 bp, Homo sapiens
atcattctggatcacgcagctgggttctaaatccagtgacaaatgtctttataaaagatgcgcagaggagagacacacagagaagagcaggaagcaatgtgacgtgcagcgcagctctagtg

SEQ ID NO: 416067 - DNA, 122 bp, Homo sapiens
gtctcacgccgtcctgctgtctccttcctgggatgtggcttgtccctttgtccggtgtgccgatgctgtgtgtacactacctgcccctcagtcactctgtagctgtcttggtgatgaggttg

SEQ ID NO: 416068 - DNA, 122 bp, Homo sapiens
tttcaaatataacatatacacccacttgcacatggaagcataacttacacatcaccctgccgccgccctcgaaatagacacatccacagagacactgaccagtgatgcacagacagacatgt

SEQ ID NO: 416069 - DNA, 122 bp, Homo sapiens
atagatagtaagcggtaaattactccacacgacaatttctagtagctttgcctatttgatcggtggtctaggcacaggaaagtgggttgaattaagcccctgcatccaagaagagaagagct

SEQ ID NO: 416070 - DNA, 122 bp, Homo sapiens
gcaaaataaacccgttatggagggagggcaaataaacccaaggtcatctcacccacacttcgacagggcaggatatcctctgcccagcttcccaggccgctccagggccagttcctcctgat

SEQ ID NO: 416071 - DNA, 122 bp, Homo sapiens
agaataatctattatttggagcctgccaagaggtactgtaatgggtaattctgacgtcagcgcaccaaaactatcctgattccaaatatgtatgcacctcaaggtcatcaaacatttgccaa

SEQ ID NO: 416072 - DNA, 122 bp, Homo sapiens
ttgttttaagcaccttggcaagaaaaataaacacttttcatcgtatcttcaaaacggccccgggagggcacagctgccgcctccctgcctcgcaggtcctgctctgacgtccccggcggtga

SEQ ID NO: 416073 - DNA, 122 bp, Homo sapiens
gcagcactgctacagagaaataacatgaagccaactcagagggccctgaacagcaggaagcggtgtacaggctttgccggaagagagggcaggtctgaggggcagcaatggtagagcctgaa

SEQ ID NO: 416074 - DNA, 122 bp, Homo sapiens
tataaaactgaatggaaaaacattaacaaaaacagtatcccagtatggtcaacagcttaacgacctcaaaactgagaatacaatgctcaagtctaaactggagaaggaaaatcaaaacaagg

SEQ ID NO: 416075 - DNA, 122 bp, Homo sapiens
gaaagtaaaaagatgtaaaatgggactcctgtgtagggcatttaccatgaacggagcttgcgggacttggaagttgctctgtctgcgttggggagtgcggggtgcgtggatgtgaaggcctg

SEQ ID NO: 416076 - DNA, 122 bp, Homo sapiens
tgctgtagataagctaactccaaaaacatttacatgtgaataatcacattctgacaattccggttctgacaacttgaacccatgttttaccaatattctttccaattgtctgtgtttctctt

SEQ ID NO: 416077 - DNA, 122 bp, Homo sapiens
agatcctcttgcctttctgggcacacagccccacgccccgcaccggtcaccaaaatggcccggggaaatacacggaccagcccagcctcccgcaagacgtgccgcacactcaggaaagcagg

SEQ ID NO: 416078 - DNA, 122 bp, Homo sapiens
gcccagtggcattccagaaagatccgtggaccccgaccctcagcgttcccagggtgcccacgcgcccagttgcattccagaaagatccatggaccccgaccctcagcgttcccaggtgctca

SEQ ID NO: 416079 - DNA, 122 bp, Homo sapiens
cctcagcagcagtttttggtgatgaagcaaacaagcctctggctggaaggggactattttcgtcagaggttaaaggggcaggagaatggacaacacagagcagccttctccaaacttctctc

SEQ ID NO: 416080 - DNA, 122 bp, Homo sapiens
cacttgccactctccctggcggcaactctcttcgaactccctccttctgccgccctctcccgcgccacccaaccccctacccgccgctaagtcccggctcggctcattcccgcccgagggcc

SEQ ID NO: 416081 - DNA, 122 bp, Homo sapiens
acagagcctgcattccggaatctgacccacaaagggctgtggcattcataggagaagccacggaagaccggcaggaatgacagaagcagcagcgagagcccttcagaggaccgcgaaacgcg

SEQ ID NO: 416082 - DNA, 122 bp, Homo sapiens
gaaaaagaggaaaaggtgagcatgcaaaatggatctcgtgtttgataaatattaggttcccgaggtaacaataaccataaatgataaggcagaaactttgtgatcctggcaactaactggaa

SEQ ID NO: 416083 - DNA, 122 bp, Homo sapiens
ggactgtctgattacgaagcctggtctcaccattttatgtcacttccttccagtcagagccgaccagtctccaggaatttgactgctgactgcatttatccactttgggaaatctctagtaa

SEQ ID NO: 416084 - DNA, 122 bp, Homo sapiens
gtttcggtctctccagggagcagggaaacctgtgggaggagtcgggctttctagctggcacgttgcccatttagcactgggaaaggatcctagcaagggtgtattttcctgctgggaaggtc

SEQ ID NO: 416085 - DNA, 122 bp, Homo sapiens
ccgtcctgcagaagaggatgacacaggcaggaggaagacacaggcaggaggaagatggcacgtctgggcaccagaccccggatgagaggactgcacgcctcttcccgttgacatcggccttg

SEQ ID NO: 416086 - DNA, 122 bp, Homo sapiens
agagaagccaaagcgctgggaattcagctttaggcagaacccacgcaatcttatatccgtcgcgcagtgatgacgtagcgcgagcgctggcatgagggcggagccaggcgcaggaaactgcc

SEQ ID NO: 416087 - DNA, 122 bp, Homo sapiens
ggctcctccctcacgccaggtgctcaccggaagtggagacgttggccgtgttgctggggtcgctgacgaagctgcccgcgaaggccacgaggcggaactcgtagagaacatcctgcgatggg

SEQ ID NO: 416088 - DNA, 122 bp, Homo sapiens
gccagggctgaatggggtgtgtgtgtattccgtaggcatcttcttgacaccatgcttgatcggggactggtgacaggaaaaagagggaagatacccattttgattttgagacaatttgatga

SEQ ID NO: 416089 - DNA, 122 bp, Homo sapiens
gctggctctgtccatcctcagcgtcgaacctctggctctacaccagccgctgcagggatgcgggcactgagctgactggccacctggtaccccaccacgatggcctgagggtttggtgtcca

SEQ ID NO: 416090 - DNA, 122 bp, Homo sapiens
actttggtcctgtgtccctgcagccctgtgactacacgcgcacacgcaggcgcgcgcacacgcgaactgacggctcgctggcgatgctggaggctttcacagcccccctccggacgcgttaa

SEQ ID NO: 416091 - DNA, 122 bp, Homo sapiens
aaatggtgagaagaaaaagcatgaagaagccgcgaagtgtgggggagaaaaaggtggaagcgaagaaacagctcccggagcaaactgtacaaaaacctcgccaagagtgtcgggaggcagga

SEQ ID NO: 416092 - DNA, 122 bp, Homo sapiens
gttatttccttatcgtgatgggcttccttcgtggcgcaggtaccgcctggctggccttcccggagagtaccagcagcggaacatcaccagcccggaggtgaactactgcctggtgacagacc

SEQ ID NO: 416093 - DNA, 122 bp, Homo sapiens
cctcggcctcccaaagtgctgggattacgggcatgatccaccgtgcccggccccaccagacgtttattaagaccttaatatgtatgaggcacattttaatgagatagcctttgtggcaaaga

SEQ ID NO: 416094 - DNA, 122 bp, Homo sapiens
tgaagacactgagctctagaggcaacatgacctgccagaggtcacacagcagactgcaggcgacatggcaaggacctcaggcttggacagagtcacagccgctggtgcctcaacacatgatg

SEQ ID NO: 416095 - DNA, 122 bp, Homo sapiens
tcaggagggtttccacttccttccttccccttctcagatctcagaacgctttgcattcagcggactgtagtttcagaaaaagcatattctgtgtttgaaaactgcaaagattatattttgca

SEQ ID NO: 416096 - DNA, 122 bp, Homo sapiens
cacagataggaagtgacaaggctgggactctgcagcctgagtgtgtcatcacgacccacccgctgctctgctctcataggtatgacagcacagctctggagcaaatgccacgcacatttgca

SEQ ID NO: 416097 - DNA, 122 bp, Homo sapiens
ccagccagcccacaaatgctgtctaatcgcttgtgaaaagacagagattctgtcctcaaccgccttatattctatgggagagaccattgtagtgggggtaatttcctaagtttctaggaaaa

SEQ ID NO: 416098 - DNA, 122 bp, Homo sapiens
ggtactccccgggggcggccgcggccggcgcgagttggggcgaggcttggcggccggcggcggccccggctgcagcccgggctcccgccgccccccttgcagcccccgcccggcccacgccc

SEQ ID NO: 416099 - DNA, 122 bp, Homo sapiens
cccctcgccgccggagaagctcaaggatcccgcctcggcgaagccaatcgcggacgagcccgccgcgcgtgcgcactacctagccgctgcactgccctgtcctgccctactctgattggacg

SEQ ID NO: 416100 - DNA, 122 bp, Homo sapiens
ggccgcctcgctggctccggttcagtttaatgatgtcgtccagagacatgtccattttgtcggccatggcgggcgcggaatcgggcatcggctcgagcccgcgcgtcagcacgccggcacgt

SEQ ID NO: 416101 - DNA, 122 bp, Homo sapiens
ggcttgacctctcatggcctttgcaacaacatcaaagcctttggaactttgtagggggtacgaggggctaggaaaccaagaaaacatctctttaaaaatataagcgatcgggccgggcacgg

SEQ ID NO: 416102 - DNA, 122 bp, Homo sapiens
atgcctgcagctagtgccaaacggtccccacttaaagggactactactcccaggaaccttcgcgcgaggccagggccttcttccagggtgcaagtgggtctcgccgcacggctctctgggat

SEQ ID NO: 416103 - DNA, 122 bp, Homo sapiens
cggccctccgcgattgtgcttcccaatcaacgggccttcgatgaaaagtgccaaggaggtcgccggatccgcccaagtggaattcccaagatgtttcccggggagcagcctcaggaacgcgc

SEQ ID NO: 416104 - DNA, 122 bp, Homo sapiens
atgtgaggattaaattaactaattaactaattcaatcttcactttgcttagagtagtgcccggaacatattaagcacttaatataaatgatagctgtgcgataactttgttgcttaatttgc

SEQ ID NO: 416105 - DNA, 122 bp, Homo sapiens
ggggcggcccataggcgagtacttcaatagccagaaggactttatggaacggaagcgagccgaggtggacaaggtgtgcagacacaagtacgagctgatggagccactcatccggcagcgcc

SEQ ID NO: 416106 - DNA, 122 bp, Homo sapiens
ggccgcctcccccaacgcagggagccggggattgccccgcgcagaccctctccctcgttccgcccaggaagggacccggggaaccccctgtgtcccacgggccatagtgaaagcacttttcc

SEQ ID NO: 416107 - DNA, 122 bp, Homo sapiens
ttttgagcttctgtttttttttttaatcagtgtgtaacaccaacacccaccgaaaccaaacggctctgggcagaggacacagccattcacgccccctgccaggaaaagctgcagctgacaca

SEQ ID NO: 416108 - DNA, 122 bp, Homo sapiens
tggagacaggttggcctcccggagatggtgcagccctggtcctctctggtcctctaagtgcggcagttttgtgccctgggctgtggtgtgcagacccggcaggaacttggggtgtgaactga

SEQ ID NO: 416109 - DNA, 122 bp, Homo sapiens
ccttcgcctaggaacgggactcgacaggagcgcttcttcctcctcccgcctccaccgctccggccctcgcgggtcccccaggtactcccgttctccaatcccgcgcccccaagcccgttgac

SEQ ID NO: 416110 - DNA, 122 bp, Homo sapiens
ttttgactactgtgacagaaaatgacccaaactagttcatgtaaaatctcatcaacaggccgggcatggtggctcacacctattatcccagcactttgggaggccgaggtgggcagatcacc

SEQ ID NO: 416111 - DNA, 122 bp, Homo sapiens
caactccatgttcattcaactgttccctgcatgtctactaggtgtcacacattgggctggcgctaggggtacaaaaataagatgtagacccctatcctcagggaatagtccagtctagtaag

SEQ ID NO: 416112 - DNA, 122 bp, Homo sapiens
ggccaagaccaccttacctgatatcgactaattctctcctgtttcaactgttcaaatttccgttttaactctgcctgccgttctactttcttttgtgcacggcctacaaatatgattttacc

SEQ ID NO: 416113 - DNA, 122 bp, Homo sapiens
atcccacagttctcttgtctaaacatacaatcttctggaatgggaacagggctttcctctcgggactctgcccagtcttaaaaatcaggacaggcaagggttataagctactgtggcttggt

SEQ ID NO: 416114 - DNA, 122 bp, Homo sapiens
agtggtcgcgggaggctcagtcccagctcattagaaaggcaagctgctcctggctgaccacgcacagctcccatgaccctacctgagacttggaggggaatggacgagactggactggaaat

SEQ ID NO: 416115 - DNA, 122 bp, Homo sapiens
gtcatataaggtaacccaaacaactttagcttcacctataaatttaaaataccttctggccgggcatggtggctcacgcctgtaatcccagcacttagggaggccgaggcaggtggatcacc

SEQ ID NO: 416116 - DNA, 122 bp, Homo sapiens
acggacacccacccccgatgcgtccacactgccgccgaccacagacacccacccctgatgcgttcacactgcccccggccacagacacccacccctgatgacaccggagcccgagtctcggc

SEQ ID NO: 416117 - DNA, 122 bp, Homo sapiens
tcagctgccagcaccggggcctctgagggcgtgacggtctccgtcgctccagtctctgtgcgctgcagctgcgactccacgtactccctcagtgactccaaatcccgctttcccttgtactg

SEQ ID NO: 416118 - DNA, 122 bp, Homo sapiens
cgcgtattcgcgtcttgggagcccgggctgcggcctggcattcgcagtgcaggtgtcaagcgccgcagacttgctgctcgcgcggtggggcggaggctccctgtggcacctgccccgctgtc

SEQ ID NO: 416119 - DNA, 122 bp, Homo sapiens
cagtttgcatacacttgcggatctgcctgtaaccccacttcctatttcacagcctaatctcggatgataccacaatgcccacagtatgctgatcaccaccaacagcagatggaggcggataa

SEQ ID NO: 416120 - DNA, 122 bp, Homo sapiens
tccccgggacgcaggggcgctgggtagcaaggggggtgcgcaggggcgcggggcgcggggcgggctaatcccgtatgtaaatggcagccaatggagggtggtgttgcgcggggctgggatta

SEQ ID NO: 416121 - DNA, 122 bp, Homo sapiens
gaaccgctccgcgggggagtctcctttcttcctagctctccgttgggaatgaaataatcccgcggccgccaggaggccggctaaggatgcggcccggagcgcgccggactgggatcccgagc

SEQ ID NO: 416122 - DNA, 122 bp, Homo sapiens
tgagctagtcaatttccaaggctcagttgactcatctgtaaaaattggtttaataatagccgtattgcatgggctgagtaagattgtggaaatgaacctacatgtctggctgacaagggatg

SEQ ID NO: 416123 - DNA, 122 bp, Homo sapiens
cagctttagcagatgttctggaaggagacagctcaggtaagcaaccccacttggggtcaccgtctctgtcttgttcagccctaaccaactgcttccaggcttaggggccccaggaagagaga

SEQ ID NO: 416124 - DNA, 122 bp, Homo sapiens
caagagaaagtatattttaaagacaggggaaagggcaaggaggaggagagagaagactctcggggcctgagaggtttcccaaatagattagcaggacctaggagaacatgtgcactgccctg

SEQ ID NO: 416125 - DNA, 122 bp, Homo sapiens
tgaggatgttcgctgcagcgtgttttacgactccctgataacagaacgagcaacgacagccgtgtcctggccgcttcgtggctgctcagcgaacactgcccaccaacattctgggacacgct

SEQ ID NO: 416126 - DNA, 122 bp, Homo sapiens
ctgttgctgagccacacgcactagagtctggaggctggtcggccaccagcctgcaaacctcgagggcagacacagccccaggcagcttcagcacccccacgtttgcctcgctgccatggctc

SEQ ID NO: 416127 - DNA, 122 bp, Homo sapiens
tacaacaaggcttaccccgattagtgacagctgtggactggccagacagctttctaacaacgcctcctcctctagggaggccccgcccaaagcccctccctaccccaattaccggtaggatc

SEQ ID NO: 416128 - DNA, 122 bp, Homo sapiens
ttcgcctctgcccgcccctcctggttcatcaacatattaaatgagcgtagggaatgagggcgtattaagtgtcctctttttgaagagacaaagaagtggctgactaccctggcttgggtccg

SEQ ID NO: 416129 - DNA, 122 bp, Homo sapiens
ggggactgaaacccgtggcctggcagatgagcttggacttgcgggggttgccgaagaagccgtcgcggggtgggacgaagacgctcactttgggaggcagctcggcaatcactgcagtgagg

SEQ ID NO: 416130 - DNA, 122 bp, Homo sapiens
aggaggtgctgccagtttctcaatcaccctctgacctccctgactgcacacactcagatgcgtctacaaggagccgcagcagacagacagctgtgaccattccaggcctcttccagagggga

SEQ ID NO: 416131 - DNA, 122 bp, Homo sapiens
catttcattttgttgtcttatttattcagaaattatggttatctgctttcctgcatggaacgtaaatccttaaaagtagggcagaagtggattcatgcttggattctcagggcctggtttac

SEQ ID NO: 416132 - DNA, 122 bp, Homo sapiens
gtctgcctgcctggttgcctaaaccagagctgtggctccaactgctgccagccctgctgccgcccagcctgctgtgagaccacttgcttccagcccacctgtgtgtccagctgctgtcagcc

SEQ ID NO: 416133 - DNA, 122 bp, Homo sapiens
catggtacttctaactttaattctttgatgaactgagaaacttttccataaaacttgcaccgttttacattcctaacattccacaaaagttgtgatttgtcctcattctaatccatagaagg

SEQ ID NO: 416134 - DNA, 122 bp, Homo sapiens
tcgctgaggagacagaagactccgtcccgctccagcgtcccatggccacacacgatgaggcggcccttccgtggctcccgctgtttctgtgggaaagggaactgggtgtcacagaaggagac

SEQ ID NO: 416135 - DNA, 122 bp, Homo sapiens
ctgactgaataatgctcctttctttctcccacctggcctttcagccaagatgctgtcaggcgtcatcagccccacacagggcctgcaaccttgtaggtggggacagcgcagctggccagagg

SEQ ID NO: 416136 - DNA, 122 bp, Homo sapiens
cgtgcatgcccacatgcatgcacacgtatacccacatgtacacgcatatccacactggcacgtctcgtgctcacaggtttcacgtgtgtggacacacacctacacactcctctacactgaca

SEQ ID NO: 416137 - DNA, 122 bp, Homo sapiens
caatgcttcttcttaggtaccttctttattcattctctttttcatcttccacacaggcagcgagactctgacctattttggagagccattaaactgttagctgcatcctactacaggaccct

SEQ ID NO: 416138 - DNA, 122 bp, Homo sapiens
agccggggacactgagacacagccagagagactggtcactttgaacccgctggcaccacacgcaagacttttagaggcttttgtatcccctgaaagctctcttcccgtgagtgttgcatggt

SEQ ID NO: 416139 - DNA, 122 bp, Homo sapiens
aacaaaaataaagggccgggcgcagtggctcacacctataatcccagcactttgggaggccgaggcatgtgggtcaccccaggtcaggattttgagaccatccagcctgatcaacatggtga

SEQ ID NO: 416140 - DNA, 122 bp, Homo sapiens
cccacatctcagacgatgggctgccgggcagagacgctcctcacttcctagatgtgatggcggctgggaagaggcgctcctcacttcctagatgggatggcggccgggcagagacgctcctc

SEQ ID NO: 416141 - DNA, 122 bp, Homo sapiens
ggtgcagttgccatggtgattagagaaaggccgagatctgtccagctgcggtgagaggaacgctgaatcgccgaagagaattggctgcgcttccttgtttgtgagctagaattaggtagcaa

SEQ ID NO: 416142 - DNA, 122 bp, Homo sapiens
tttccttcacggctcaggggcggggagactggggctggtcctggctgggagggcctgccccgcccctggcctagctgggcaaatccgctttggccagctcagcggctccgcccctaccgcga

SEQ ID NO: 416143 - DNA, 122 bp, Homo sapiens
atttgcacacagaaatccatggtaaccaggagctaagatctaaacacagctttgtatcaacgactggttcagacacactgctccaccccgtgccaaaataatttttatcgtgcattaggtcc

SEQ ID NO: 416144 - DNA, 122 bp, Homo sapiens
ctggaatttcaggtgtgagccatggtgcccagcccttctagtttcttgtctaaattaaaccgacttgttttaacagcatttagccagcattcccatcatgtatccaagagcagttgtaaggt

SEQ ID NO: 416145 - DNA, 122 bp, Homo sapiens
tccctctttgcctgctactgaacaatgacgtctcttgttgtgaaccccactggcagagcacggaccatggaagcatcttttggcagcaccagagaactgagcatctcaaaggtcaggcatta

SEQ ID NO: 416146 - DNA, 122 bp, Homo sapiens
ggccccctccagggaggaggcgggcgcgggccggggcgggtgggggcagccctcagaccccgcgccacccagctcctcccccaggacccgccgtagccacttcccccaattttttttccccg

SEQ ID NO: 416147 - DNA, 122 bp, Homo sapiens
agcaaagtggagtgaggatgacagttcctctgagctgtccccttctgtcctagtgccttccgaggctttaggcccagggagttgtttatttttacagagtcctggctaagctgatgaagatg

SEQ ID NO: 416148 - DNA, 122 bp, Homo sapiens
agggggcacgggatgcagggaggctcttcgggaggcatgaaagtcagacgtgttccgaaacgtgagccgcgctggggggcacggcgcacgaccggggacaggaggaggacactgcggtcgca

SEQ ID NO: 416149 - DNA, 122 bp, Homo sapiens
cggtggaatcgcagggtcttggcatcgcggaccccagacacctgggttgagggcctttcccgggtcagtcaggctagcgagccggagcgttctgtctttctgcgcacgcgtagagcacacag

SEQ ID NO: 416150 - DNA, 122 bp, Homo sapiens
tccctttgtaaccaaagaaccaggctctgctactaaaactgtcaggcagttcatcggacacgggtgaacacacacacacacacacacacacacacagcttactgtcaggcagttcatcggac

SEQ ID NO: 416151 - DNA, 122 bp, Homo sapiens
cctgcagcaaaccaggcgccaggtagctcctgcccttagcccaggaggccatccctgcagcggggtgccagagcagctgagcgcaggcccttctgggtctcagggacattcgaggcgggcgg

SEQ ID NO: 416152 - DNA, 122 bp, Homo sapiens
gcgggggctccccgctacctgcgcgcctgctgctcccaccacgcggcaccgacccgggcgcgcccccggcccctgtccgcagcccacagccacaccgcgcaccctacaccctccttgcgcct

SEQ ID NO: 416153 - DNA, 122 bp, Homo sapiens
tccaatcgagataaatctattggattagtaggattatctgattgcagccgaaagaagtaacgttgtttgatcatttgtatttcttgcctgatggtcggatttacatggaggtggctttgggt

SEQ ID NO: 416154 - DNA, 122 bp, Homo sapiens
aaaccaagcccggatcgctgtcagccactcactcagtgccgcatggagctcctcggacagcgcaacgtcaaatgtcttcgtatcctgagagctcgctccttgaccagaaatctcatcataag

SEQ ID NO: 416155 - DNA, 122 bp, Homo sapiens
atatgagacagaacaacagttctagagaaaggaagagcatgtgtaaaaccaaaaggcaaccgcatgcttaatgagtgcataaaacagcaaggggccagtgtggctggagaagagtgagggag

SEQ ID NO: 416156 - DNA, 122 bp, Homo sapiens
aggtgacggacgcacctggaaaatcaggtcactcccacctgaatattgcgcttttcagaccggcttaacaaacggcgcaccacgagactatataccacacctggctcggagggtcctacgcc

SEQ ID NO: 416157 - DNA, 122 bp, Homo sapiens
cctctgccgccgtaaacctgggcgactgcgctccgcagccgggcctgtgtgaaggctgaccgccggccggccgccggcgacagcttccgggtcgacgtcgacgggagcgaggcatgctggga

SEQ ID NO: 416158 - DNA, 122 bp, Homo sapiens
agagctgggaagtagctctggggaacattggagggtcagcttcctgatcatttaaagattcgaatgtccaaagaatccagagaaaaagaacataatctctagtatcagaagcctggagatta

SEQ ID NO: 416159 - DNA, 122 bp, Homo sapiens
cctattccctcagcctctattcccttctcccttgactccactgaaatggctcttaaaggacgccactaagctctatcttgctacaaccaggagtcgattttctgttacctactgccctctcc

SEQ ID NO: 416160 - DNA, 122 bp, Homo sapiens
cccgcctccagctcgcggccccgcgcgccggatcggcgtgcgtgcggctggagccttaagcgtttcccccgcccggcttcatccctgctggcggcccagcgtcgttctcctcctgcgcgagg

SEQ ID NO: 416161 - DNA, 122 bp, Homo sapiens
gggatgcgacagagctgtgtggtttccggatgggaaacctcagtcgtttaggcacccctccgctcgagtcacttccgaagcagtcgattcttggggagaagcgctgcggaaaggggcgactc

SEQ ID NO: 416162 - DNA, 122 bp, Homo sapiens
cataccctggggacacctgtcagacatcctaaaacaaggacacctggatcccaagcgatacgtactcagctcagtgctcccttggggttccaggaacccagcgccttccctcacctcatcct

SEQ ID NO: 416163 - DNA, 122 bp, Homo sapiens
ctgcctgcgccttgataggcctcccgggccctttctctgaatggggaagcactggggatacgtgagccaagaggtactgaggtctgacttaaaggtccttctggctcctgaactgaaacctg

SEQ ID NO: 416164 - DNA, 122 bp, Homo sapiens
agcacaaacaaattactcatgaacttaaagccaagaatagtgcctctccctgaaagtatgcgatgtgttggttttacccctagaacccttcatttctcttttgtatcatatacttgaaggtt

SEQ ID NO: 416165 - DNA, 122 bp, Homo sapiens
tatgattcaaagaggccgcgctcacagtctaaagcatgtccaaaaaaggaaagtggccgccggaacctgttagtccaagctgcaccgtttcgtaagcccccaccatttcacagaccctggtc

SEQ ID NO: 416166 - DNA, 122 bp, Homo sapiens
gatggcaggatgtgaatgcgcgtgtcctggatgagctggacgatgcgctggttcctgttccggaactcctcgcacagaaactccgacagctgcagcatcagctcgcggcccaacgcttcgtt

SEQ ID NO: 416167 - DNA, 122 bp, Homo sapiens
tgtgcacagaaggaagagccacacggaccctctggacaagcagcaagttcagccccatcacggtggggagggcacaacagcaagtccagtaaggcccaggtcagtgtggcccttccaaggac

SEQ ID NO: 416168 - DNA, 122 bp, Homo sapiens
accgggcaatagataatatcttaaaattcccattttactaataaaaaattcctagccagacgtggcagttcacacctgccataccaccactttaggagggcaagacggaaggataacttgga

SEQ ID NO: 416169 - DNA, 122 bp, Homo sapiens
cctgtctcgggtcccagctgggctgccgcgcagcctggtgctgctgcacttggagaagaacgccatccggagcgtggacgcgaatgtgctgacccccatccgcagcctggagtacctgctgc

SEQ ID NO: 416170 - DNA, 122 bp, Homo sapiens
gcccgttccagaaggcaaagagcccggcctccttttattattctgatcgcttctttgagacgctccccctcctcttccacctcccggctttctttccttctctcgcgctccccttcttttat

SEQ ID NO: 416171 - DNA, 122 bp, Homo sapiens
tcctaatgaaattcagggtcaggaaaaaagcaaactgttcagaatctgccatgggaaaaacgagcaggttctgtactggctgacaggattaatgttcctcttaccaaagcacacagggtcat

SEQ ID NO: 416172 - DNA, 122 bp, Homo sapiens
aggattgttcgttactgcagccttaccttatgaaagctgacgcaggcgccacgaggcatgcgcacgcgtgcacacacacgcacgtattagggaactgacaggtagttggtattttctgaggg

SEQ ID NO: 416173 - DNA, 122 bp, Homo sapiens
ggtctgccaggaaaggaggatttcagctgggagtgggggctgggggcacttccttccttccgcagagttggctgggcagtgggagagggacaaagtggttcttgcaggatggaggaaatgac

SEQ ID NO: 416174 - DNA, 122 bp, Homo sapiens
ggaggagtctgagccgagtcacgccccttctcctgtaaacttgggtcgcctctagcttagcgagcgctggagtttgaagagcgggcagtggctgcacacgccaaactttccctatggcttcg

SEQ ID NO: 416175 - DNA, 122 bp, Homo sapiens
cctctgtcgaagcgttcctgcctcaggcatgaaagccaccacgtggcaaagggtggacggcgattgggaaagcagagtgtcccctccccgggcgtgacagcgttccctgatcaaatggaggg

SEQ ID NO: 416176 - DNA, 122 bp, Homo sapiens
acgatgacggccgtggcgcaaagcgttctggggctcgtggttcgcggggtccatggggaacgcggtgtcgctggttcagatctcgcagagctcagagtcctgcatgcctcagtcctcgcctc

SEQ ID NO: 416177 - DNA, 122 bp, Homo sapiens
gcaagcccacgtggagagcaggggtcacccttcactgtgtctctctggtaagagctgaaccgaagtggttgggtctcctgcttttcatctcacctattgacctgcaaacttaggagaaagtg

SEQ ID NO: 416178 - DNA, 122 bp, Homo sapiens
atattttatgtactttgtgcctttcatgaacagaatattccaagcattctctgcaaaatacgcatgaaaacaattgggagagaagaggtcaattatctttgagaagcccaattacagaatga

SEQ ID NO: 416179 - DNA, 122 bp, Homo sapiens
gatctactccttagaatcaagtcactattcctctgaggccaccactggagcaattgggttcgagaacacatggtcatagctgtaataaagaaattaggaagtgggaatcaagaagctgaaca

SEQ ID NO: 416180 - DNA, 122 bp, Homo sapiens
gctgacttggcacacaacttcactgatggtctggccattggggcttcctttcgagggggccggggactagggatcctgaccacaatgactgtcctgctacatgaagtgccccacgaggtcgg

SEQ ID NO: 416181 - DNA, 122 bp, Homo sapiens
tggctgggacacggtgggcaggatgtccagccctctctcgtcttccggtcccgtcctccacgtactttcagactgttgccggatgggaggagagaaggtgcaggctgctccaaggggcagca

SEQ ID NO: 416182 - DNA, 122 bp, Homo sapiens
aaacgtcgggaagtacaaaaggctggcggttcggggatttggggggagccggggccgcctcgccccgcttcctggaggaggggcggctgccctccgacccgggacctgcctgcggggaccga

SEQ ID NO: 416183 - DNA, 122 bp, Homo sapiens
ccccgtctctacaaaagatacaaaaattagccgggcgcggtgcgcacctggcctaattttcgtatttttttctagagatagggggagggcctcgctatgttgcccgggccagtttcgaactc

SEQ ID NO: 416184 - DNA, 122 bp, Homo sapiens
acaaacttacacattttcaatccagaaagtgcccagacagtgccatccttacccaggccacgaggctgatctcagctcctcagccagcttcccttctagtcaattttttgggagctgggcct

SEQ ID NO: 416185 - DNA, 122 bp, Homo sapiens
cgctccgccggctgtgggccgctcggtgcccacgccctgccgggctcccggccaagacgccggtctcggtcttgcagctcccgccacctgcctgcctcttggctggggtggggcccggttca

SEQ ID NO: 416186 - DNA, 122 bp, Homo sapiens
cccaggaagcctgccagacaagcccacaaacagctgcccaggcagtgtggctgcagcacacgcagtgggaagggaggctcagaaagacccctaaggagcgggtattcaatctagcctcagaa

SEQ ID NO: 416187 - DNA, 122 bp, Homo sapiens
cgcctgtgcgctggcacggagggctcgaaaatcggggcgcgtccgcgaagagcgagacctcggagacagacacacaacccagaggtgcactaggttgccagacggtctgatcacaggattct

SEQ ID NO: 416188 - DNA, 122 bp, Homo sapiens
ccctccctcggcccgccgctcggagacgccccgccccgccccaccccgcccccgcgcccacgtgactagcataggcccgcccccgctccgccccccgccacagactccgcctccgggacgcg

SEQ ID NO: 416189 - DNA, 122 bp, Homo sapiens
ttcaggtttctgtcacagccttgaggcaagctctgtgtgtctgtatgggatttttgtgagcgtgcttgtgttttcagggtggatagactaatcaaactttatgaaaaagtttgctctggcct

SEQ ID NO: 416190 - DNA, 122 bp, Homo sapiens
gggcccacaggaacattcacatgggtcacaaaattatggcaaaattccttcgactgcccacgcttgtcgccttatctgaaccttaattttagccgaattcagcgtttttgcatgaataacct

SEQ ID NO: 416191 - DNA, 122 bp, Homo sapiens
ttcatgaggtcccaccccagatctactgaatcaggatcttcgaggggtagagcataggaacgttcacatgtacaggcaggaaatgctaatgctgcctgtacatgtgaacagtcaggagggaa

SEQ ID NO: 416192 - DNA, 122 bp, Homo sapiens
tcttgaattttatttaccaatcctaaatcaggaaagaaagtttctggaagcacagacacacgctgaacaagcaagcctgccatagaattgcactatattgatttggtgctaaaacagaatgg

SEQ ID NO: 416193 - DNA, 122 bp, Homo sapiens
cgcaggcttctggagtgaagctgctgatcttcgctgtgagtgttacagcccttaaggtggcgcgtctggagttgttctctcctcccggccagagctctccattcctctccgtgagtttgcga

SEQ ID NO: 416194 - DNA, 122 bp, Homo sapiens
ttctaactatatatgaggatttagaaaaaataaactatgacctaatttgtgatctaaagtcgctgtggctgtcatgaggaaaacagactttagagaacacaaaaatagaacaatggtaccat

SEQ ID NO: 416195 - DNA, 122 bp, Homo sapiens
gcgcagctgctggctgagctgtcagatcaggctgcggctgtgacgtggctgaaggatggtcgcacactgtccccaggccccaagtatgaggtgcaggcatcggccgggcggcgggtgctcct

SEQ ID NO: 416196 - DNA, 122 bp, Homo sapiens
cccccatacaggagaaggagggcgcccaacggaataaccccgcctgaagcgaaagcggtccgttatgttaggaggctccaggaggcagtgtttgatttgcataggacccaggggttggtttg

SEQ ID NO: 416197 - DNA, 122 bp, Homo sapiens
gctgccacacacccagatatttcaccctgcccactctgcccgacctcgcaaggtcgttaccggagctcaccggggtctagggaagccctgtgactgtgactcagtcacagatggagaaggtc

SEQ ID NO: 416198 - DNA, 122 bp, Homo sapiens
caggcaccatgatggagagctgagagcagcccacccacactcctgaggtttaacaacacacgtggttcagagttgtagtattccaggaccaggaacacacaaaagagattggggatgaaacc

SEQ ID NO: 416199 - DNA, 122 bp, Homo sapiens
cactaaacgagctgagaggatggacccaaccagcagtagtctgcaggtgggcactccaagcggggagccgaggcgcccagcacgcagtccggggacccgctggagggtgggcggaggcggac

SEQ ID NO: 416200 - DNA, 122 bp, Homo sapiens
ccggggcaggatttgggtgctcctggctcacctcgccagatgccaccttacccgccccaacgggaggcaggaggctgctgcttgctgtgtgattaacacccagccagggcgcgttggtgtct

SEQ ID NO: 416201 - DNA, 122 bp, Homo sapiens
ctttgctggcgaaaacaaagaagaaaagaggaggcttcagtattcaaatactgccagttccgcagtgaattctaaaaatggttactcttgggatacaaggaacccccacgaggataaacaac

SEQ ID NO: 416202 - DNA, 122 bp, Homo sapiens
gatggataaaatacagtcagctcatctcgccagtgaataatgtgctttctggttctaccacgtgaaaatgaactgctcagatcctcttcatctggaataatttccagggaagaatgagtgac

SEQ ID NO: 416203 - DNA, 122 bp, Homo sapiens
cacgcactctttttttcccctccactatttagttggctcatttagtaaggataccaactgcggacttcgtaggaagcttcctttaagaaccactctcaaagagccaaggaaacctgttcctt

SEQ ID NO: 416204 - DNA, 122 bp, Homo sapiens
gtcaaaatcaggtgtacgaggcccgtgtgccccgccccgccccaggcggacggctgacagcgccccaccccaggaggaggcgggacttcctcaccgcagagtggctgcttccggtagaatcc

SEQ ID NO: 416205 - DNA, 122 bp, Homo sapiens
gtgctttaggggaagggtcacaggccttgttgctcgtgcacacatttgcacacacaccttcgttctcaatctttcgtccaggcccccttctgagtcaaagaaggccccttctggtgcgttga

SEQ ID NO: 416206 - DNA, 122 bp, Homo sapiens
tgttgacgcttgaggtcgggtaattctgtgactggggctgtcctgtgcattgtaggatgacgagcagcatctgtggtttctacccactggatgccaccagttcagctcccgcagtggggaca

SEQ ID NO: 416207 - DNA, 122 bp, Homo sapiens
attgtatacgaaaacatttcacatgcaaatgctgctttatatgtctcaaccttaacatgccgaaaagtaaaatggcttctttcactcaaatctgcttctcctccttgttccttatcattgtt

SEQ ID NO: 416208 - DNA, 122 bp, Homo sapiens
tctgctcagttagaaataaccttgccttgcagcactgatctcttggcagcaagttggtgacgctgctagcaagtatgtcttcaccatagaggctgggggctgtgagcagcccaaaaaggatg

SEQ ID NO: 416209 - DNA, 122 bp, Homo sapiens
cacagggctgcttggctcacccttgctgcacctggcctgtccgtcctcccaccgcggtgccgcccaggccttcccactgcagggctggctaacggtgcatggaagagactcgagtccgtgtt

SEQ ID NO: 416210 - DNA, 122 bp, Homo sapiens
gccgacgcggagctgagcgcccagctgagccggcggctggacatcaacgagggcgctgcgcggccccggcgctgcagggtcttcaacccctacacggagttcccggagttcagccgccgcct

SEQ ID NO: 416211 - DNA, 122 bp, Homo sapiens
ctttaaaggggcatttccccacattgccaattcttgaccatctggtcacgtcaaggctgacgtgccaatggctgcaagggggagggcacctgggagcccgcggatggctcttatgcagacgt

SEQ ID NO: 416212 - DNA, 122 bp, Homo sapiens
agtgttgatggtgggaagggggtaattgaatgcattgaccctctgttcattaaataaagtcggctaagttacaggatcaatggaaagccagggagagatgcgaagatgaaaatatcgttaac

SEQ ID NO: 416213 - DNA, 122 bp, Homo sapiens
tcaggacaaaattaatgtaaactaaaaacaaactgtatttgttgactttgtgaaactttccggactgagatggtgtcttaaaacagtaggcacacaatctatgagaatacagtggataaaaa

SEQ ID NO: 416214 - DNA, 122 bp, Homo sapiens
gagttcctgtagttcactgcagatgaaatgggcttctcatgctacctcagttaccagaatcgccctctttagagtctcctcccctccaaagatgatgtggtctctccacatatcatgccctc

SEQ ID NO: 416215 - DNA, 122 bp, Homo sapiens
tgggggagacggcaggctggagggcgccaggacgagtgagggcgcggctgaccccagacacgcatttccttcaccgagctcctccggagtccttgctggttgcttcttgggacccgcgagcg

SEQ ID NO: 416216 - DNA, 122 bp, Homo sapiens
tggagggccagcttggctgcacgggcacgcggagcggcattaccttccccgcacgtgtaccgtttctcctcataagaggtatccgtgaactccaggagcaggcggatggcgtgcgccagctg

SEQ ID NO: 416217 - DNA, 122 bp, Homo sapiens
aacgcagtctgcacagagggcagatgcctgcataggcggggcgcagcccgtgtaccaggacgggagccaggatactttaagcgtgtcactctgcaagaattccctcaaccctcgtgggcact

SEQ ID NO: 416218 - DNA, 122 bp, Homo sapiens
tcatggcctgagggggcggggatttaaatgttatccaatcagagacgctaggcagggaaccgtccaatcaggcacgcaggtgaagcggacagggcggcttccgggtttggcggggcctttgt

SEQ ID NO: 416219 - DNA, 122 bp, Homo sapiens
atcagattaacctttgattcttgggaagccgcagggacacccatggtgtgcagctgcccacgacgcccctcctcagcatgaagcagcgagacggatgcgtggcctgattcctcatgattgag

SEQ ID NO: 416220 - DNA, 122 bp, Homo sapiens
cgggagggagtgactcactgagcgtgtgtgagggagggagcgagcgagcgaacgagcagccggcgccgtcctcccgcagcaccagccaggccacgccgccgcctcttcccctgcgccccgcg

SEQ ID NO: 416221 - DNA, 122 bp, Homo sapiens
tttcagtgccaggaaggaaaaacaagcacagaagtcgcccctcccgggcagccatattcccggctaagaagccctcctttgtgccaagagcagaaccgtctatggctgggtggagggtcaca

SEQ ID NO: 416222 - DNA, 122 bp, Homo sapiens
gcctatgtgcaggtacgtgcagcactacggcctgggcagtgcctgtgacaacgtagagcgcgtgctgaagagtgtggctgtgaagctggggaagacgcagaaggtgaaggtgctcacgggca

SEQ ID NO: 416223 - DNA, 122 bp, Homo sapiens
tactcctgtgaccagaaatcagtatccccacacaggaaggggaaaaaaagaccagagaaccggggagccacatgcccttacatcagggtcacagtcactcatagcctcgccgaggtcggagt

SEQ ID NO: 416224 - DNA, 122 bp, Homo sapiens
tgtagaaagacttctgtctcagatacattgtttcatcctacctatcctaccgctttggaacggtgtgaccttgaggagttacttatctgagcttcagcttcttcatctggaaaatgggataa

SEQ ID NO: 416225 - DNA, 122 bp, Homo sapiens
gtgttgctcccctgtctctggacgacgctgtgactgatcccaggcttggagccggagctgcgagcgaggcagtgaaagggtggcaggtatggctttgctggactcggaggacgtaagagaaa

SEQ ID NO: 416226 - DNA, 122 bp, Homo sapiens
cggggtggaccgggtgctgggagggccctgggctccgtccacagaggccgatagagctcccgatgtgccagcttttagaggagtgagtgccttaaagacatccgctcatgagatctctagga

SEQ ID NO: 416227 - DNA, 122 bp, Homo sapiens
agccggagcggagccggggccggagcgggcggaatggagcccctgcgcgcgcccgcgctgcgccgcctgctgccgccgctgctgctcctgctgctgtcactgcccccccgcgcccgggccaa

SEQ ID NO: 416228 - DNA, 122 bp, Homo sapiens
cacgtccggttaaaacgattctattctgcaagccagagcttaggttccatcacttcctaccgagcaacgccccccacccttctcatcagccccgtctgcatcattacggaggacggaggacg

SEQ ID NO: 416229 - DNA, 122 bp, Homo sapiens
tttacattatactttccaggaaattgatatgacaggctttgacataaacattgttttgaacggactagaaatgtgtgcaagtcctgggctaacaggggttctggttttgttatgttttgctt

SEQ ID NO: 416230 - DNA, 122 bp, Homo sapiens
cctctctttttccccaagtttgctaactctagcatatccataaccaaagccaaactagaacgctccctcagccccaggtgattacagctaaccctggtcaaaatcaatcctacatcttcaca

SEQ ID NO: 416231 - DNA, 122 bp, Homo sapiens
ttttatttctttgttccatgatgaattcttcacctgcctaactaaccttgggcaccccggcgcccctcatagtcctgcagaggaggccctgacctacctgaggaggtttcccctgggcaaat

SEQ ID NO: 416232 - DNA, 122 bp, Homo sapiens
cctccagtcgctgtcgtaggaagaggcactgggggtcagcctggtcccgggtcacctcctcgcccagggctcgcagccggctatactcgctctgggcccgctccacctctccccgcagggct

SEQ ID NO: 416233 - DNA, 122 bp, Homo sapiens
caggcagtgctgtgtcatgcacagtaatcctgtaagggagatactatcatgatctctgttcggtggatgaggaaacagtctgaggaaaggcacctgacctgttcaggccacacactaagtac

SEQ ID NO: 416234 - DNA, 122 bp, Homo sapiens
acccagagctcccaaatcactcaccaacctgcaggagacctaaatcctccgggcaggtctcgttagcgcttccagcccccatccccaaatcccctcttctagctccttccttcccctccgcc

SEQ ID NO: 416235 - DNA, 122 bp, Homo sapiens
aaactggaaaaggagctccacgccaaaggcacacttggccccagtgaaccacctggaatacgctgggagcgctgtaaccactaagtaattctgagcaaaagctagggtggattctggatatg

SEQ ID NO: 416236 - DNA, 122 bp, Homo sapiens
ctgtgtccccgtctgccggctccgtccggccgtccctctctctgccgcgtctctgaccctcggcgccacagctcctcagctcagggcccgtcccagaacctccttccagcccttctcccccg

SEQ ID NO: 416237 - DNA, 122 bp, Homo sapiens
gcagggcaggcctgggggcttcatgccgctgtcctgcgggacgcagagagggctggccgtcggtgtgggggcgcccccacctgtgcccagcgccctcctgacatcctgactccgctgggact

SEQ ID NO: 416238 - DNA, 122 bp, Homo sapiens
ctgctgcagatcaagtttgagaaccacagctctgaaagttttctgaccaacacacacgcgcgcgtgcgcgtacacatacacacgcataggtaactaacttttccgtggccactagcaccccc

SEQ ID NO: 416239 - DNA, 122 bp, Homo sapiens
catctaagaaggcttacactgcaagtgtcccttccataggctctagatgagactgcggagcgtgcaatgtctgctaactatgcaccgctcccacgccttaggtttcaggctcgctgcagaag

SEQ ID NO: 416240 - DNA, 122 bp, Homo sapiens
cctcagcctctgcgggagcgtggtaggggaagagtcacagactgaccctgcgtctcccgccgggaaccaactgcagtggtacaccccacggaaagctacgtctccttaccgactgcgcacgc

SEQ ID NO: 416241 - DNA, 122 bp, Homo sapiens
gctggggtaaagactactggggtgtcttctaagacgccgattttgagggagattcaccatcgggcaggtggcagggggttctgttggggcagccgggtggcttcctttttggggtgggggag

SEQ ID NO: 416242 - DNA, 122 bp, Homo sapiens
cccttggcctccatcacggcaagtagtagcggcattggggcagcagcagtgatcaaaatgcggtgagggagattgtggacattctgcttgtagtctcagctacttgggaggctgaggcagga

SEQ ID NO: 416243 - DNA, 122 bp, Homo sapiens
cgccagggctcactggcccgggagggagccacgccttcctctctgggaaacctctggtggcgaggcgcgcggaggtgccgagtcccctttataaggccgagggggcggggcgcccgtgggtg

SEQ ID NO: 416244 - DNA, 122 bp, Homo sapiens
aggaatctgcctaccttggcctcccaaagtgctgggattacaggtgtgtgccaccgttcccggccccttgtctatttctgtgactgttcctgtgccagcactgcccagcagagctttctggg

SEQ ID NO: 416245 - DNA, 122 bp, Homo sapiens
ctcattacacatctgccttcattaaaggctaccagcggaatagcaatcctattggtttaccggtttggccttagagtgtggatggccttagcacttccggaagcagccacaggtcccatgcc

SEQ ID NO: 416246 - DNA, 122 bp, Homo sapiens
tcccaccgaaggctcaccagaaccctcagccagcgcctcaattgcccatgttgtacttgtcgctcctttgccttcaccttgacacagaaaaactggtcttaatacgtctctcgccccaggta

SEQ ID NO: 416247 - DNA, 122 bp, Homo sapiens
tgcacagagggttaactggagttggcgctgggtggagaggaggagacgcgctcccattggcggaaagttattcaggggcggggtcagtgaatctccgtaccccactcccctttccgcaactt

SEQ ID NO: 416248 - DNA, 122 bp, Homo sapiens
gtgccgggccaagcccagccaccgtggttctgggccgggaggacgggctgcagagacactcggacgaggaggaggaggacgacgaggaggaggaggaggaagaagaggaagaggaaggtggt

SEQ ID NO: 416249 - DNA, 122 bp, Homo sapiens
cagaaacgcacttcagagcagagggacccgcacagagccacacgagacacaccaatgtcacgcctctcccatgccccctgccctgcccgggcctccccctgacccccaggacccctgcgctc

SEQ ID NO: 416250 - DNA, 122 bp, Homo sapiens
tgtggctggcccttcaggcaaagctctgccactcaaggtgtttggaaaacactgtccagacgaggccgtcatgaaacggctgcgcagatgttcagctgccttttagcagaacagatggattt

SEQ ID NO: 416251 - DNA, 122 bp, Homo sapiens
aaaacgttatgcaaccaagctctgtggggggcggatggggcagggctgaccaggtggacacgggaggggaaggcggtgggtgggggaggatggctggaggtcactgcttgggtctggccgac

SEQ ID NO: 416252 - DNA, 122 bp, Homo sapiens
ctactaaaaatacaaaaaattagctgggtgtggtggcacgtgattgtaatcccagttactcgggaggctgaggcaggagaattgcttgaactaaacctgggaggcggaggttgcagtgagcc

SEQ ID NO: 416253 - DNA, 122 bp, Homo sapiens
gccagcaggagggagggcagtggagctggacttgcgcccacaacaggatctggccataaacgcagtcagggcgaggctgcggggtgggtggctgagcctcctggtggactatctcccctccc

SEQ ID NO: 416254 - DNA, 122 bp, Homo sapiens
ttaagaagaaaagaactgggtttcagaggcagctaatgattccaggccaataaattgtcacggtgatggagagacttgtgaagaattccaagtggcctaaaaaacagaagtcatatttcaaa

SEQ ID NO: 416255 - DNA, 122 bp, Homo sapiens
gctggaacttattatttggctagactctcaattcccataaaattacatagggcaaagatacgaaccatcattacagttatcaccctcagagggtttgttgagactttctccactgttgtttg

SEQ ID NO: 416256 - DNA, 122 bp, Homo sapiens
gacagatgagtaggtggggagcggcggtggggcagggcgcactgcgagaagagcacttcgcgcatgcgcatatcaccgagcgaacgcgccgtgttcgggaaggtaggagaaagaggcggagc

SEQ ID NO: 416257 - DNA, 122 bp, Homo sapiens
tgaacccgggaggcagaggttgcagtgagccaagactctgccactgcactctagcctgggcgaaagagcgagactccatctcaaacaaaaactaaaccagaatgctggctccatacccagag

SEQ ID NO: 416258 - DNA, 122 bp, Homo sapiens
gtgccattcactgaaatggaaagatggaggaggttagggtgggctggcgcagaaaacaagcgtgggttatggacaggacaagccggaggtgcctgttagcaccaagaagagtcaggagctct

SEQ ID NO: 416259 - DNA, 122 bp, Homo sapiens
ccttccttctccccacagaaggcgagaccatggacacctcctgagttggatgtcatcccccgaccccaccctgttttccaccagagttctgacactgtgactctgtataaaatggttgggaa

SEQ ID NO: 416260 - DNA, 122 bp, Homo sapiens
acccgtctctctcccccaaacttcacccacctccacattcaatctcaaaccaagaagccccgcctgctgtcaggtctaggaagggaggccagccaccatgagggcaggaaagcagcccaggc

SEQ ID NO: 416261 - DNA, 122 bp, Homo sapiens
agttcctgtttctcctccaggattcctgaacaggtgcagaggtacagtcaaggcagggagcgaggagctgacctattgccacatacaagtctgggatgtgatgttttactgacatcaacagt

SEQ ID NO: 416262 - DNA, 122 bp, Homo sapiens
acatgtagaggtgatcactctgaaagtcggggtctggagcgtcgcctcttgctgctgctgcgttgatgtggagggaagggggtgacaggagggaagccggggcagggacagcaggtggggag

SEQ ID NO: 416263 - DNA, 122 bp, Homo sapiens
tggtagctgtttatccagtctgtccgctttctgtcttgtagtcctttagcccatgttctacgctgttttcaaagcagtcttaggcaagcagaacttaatcctgtgactgtttgttgaaaata

SEQ ID NO: 416264 - DNA, 122 bp, Homo sapiens
acggctgttggccattttttcatgtcggctgctgtgtatcgggtgtgtgggttgattttccgcttcagtatttgagctctgtgttctgtgaatcgtccgtttttactcacacctaacaaaat

SEQ ID NO: 416265 - DNA, 122 bp, Homo sapiens
taaactgcacaaaacaagagtacccacaaagaagaatgaaaatgggcagaaacctacctacgagcaaaagagggagagccgccctgtttattcctacatgagaacatctttcttcctaagtc

SEQ ID NO: 416266 - DNA, 122 bp, Homo sapiens
cgcaggactctggaggaagagatggcatctcctagcctagcctgttacaagggtgggacacgagccgtttatccatttatcggccccgtgttagaggaattctggaaacgtgtactggcagt

SEQ ID NO: 416267 - DNA, 122 bp, Homo sapiens
cactgctctgaggacatcatgcattatacaaagtttttgtatctactttgcactctgttacgctaaagtctagcattctggcagggaaatcccaaactcttcattgtcagatagtttccaag

SEQ ID NO: 416268 - DNA, 122 bp, Homo sapiens
ccatgtgtttcagcaatcccactactaggtatttacccaacataaaggataacagtatgtcgaagagatatctatattcccatatttattgcagcatatcacagtaaccaagatacggaatc

SEQ ID NO: 416269 - DNA, 122 bp, Homo sapiens
accgtgcccggcccagttcttaatatctatatgccagtgatctcagagtacctctagctacgatctttcctgacctatctatccaacagctattggaacatttccacttggatgtccaacag

SEQ ID NO: 416270 - DNA, 122 bp, Homo sapiens
gtcgggcccggccgggctcacagcgcgggggtccgggggcccggggcgccccgccgcccgcgccccccacccccgctgcaggcgccctccccgccgccgtcccccgctgcgcccagctccct

SEQ ID NO: 416271 - DNA, 122 bp, Homo sapiens
ggaggcccagtgcggggaccagcaccaccattaatcagcacggcggccggcaccgtgctccgtgccctgccgagagccagctgccccgccgggggctccctgcctgcctcccatccatcttc

SEQ ID NO: 416272 - DNA, 122 bp, Homo sapiens
tgtttagtttttgaaaacctccaaatagcaaaacaccaagtaaagcgtactgcctcgccccgtttttttcctgtcctagatcatgtaccctgttcccaaacagagatgaattagcttcatat

SEQ ID NO: 416273 - DNA, 122 bp, Homo sapiens
cccacctaaaatccttctcatagcctctgaggtaaagtttaaatcaatcacgacataaggcgcattggatctggctctggttcctgccagcttcatgccatactcctctcccccactttacc

SEQ ID NO: 416274 - DNA, 122 bp, Homo sapiens
accatcaaagataagatgtggggtctccagtctacccccagggaggggccagcctgcccacggtgagacacacacacacacacacacacacacacacacacacacacacacacacacacggc

SEQ ID NO: 416275 - DNA, 122 bp, Homo sapiens
tgtcgaagcggctgcagagccggtaacggtggtggcggctgttgggccaaaggcgaaagacgaagaggaggaggaagaggagccgctgccaccgtgcgaggcggtgcgctgggccccagtgg

SEQ ID NO: 416276 - DNA, 122 bp, Homo sapiens
aatcgagtacagggccacgtgtcacagtggctgtgaggtctctttgcgttccggtgcccccggagcaccccctgtgatctggcggtgggaggcctgatttgatacaggggcacgtttggggc

SEQ ID NO: 416277 - DNA, 122 bp, Homo sapiens
ggacagaagaccatcccattcagctgagacacacaggccttgtggaagcggtgggccacacggaagtcagggtggcactccaggaaggtgccctgggagcagggaaacgacatggtcaggtt

SEQ ID NO: 416278 - DNA, 122 bp, Homo sapiens
caagtctgtaagacaccatactcaccggtgcaccgccagactagttatgcactagtctatcgaattgcactccaggcagaaggaactgtttgaatctgacctttctgttgccggatgctggc

SEQ ID NO: 416279 - DNA, 122 bp, Homo sapiens
agggactggcgccccgaggcctcaaaaccagcgccccccgccctccgtgccagccccagccgggaccccacaaggcaaagaccaagaagattgtgtttgaggatgagttgctctcccaggcc

SEQ ID NO: 416280 - DNA, 122 bp, Homo sapiens
gcgtcccgggcccagcgcccaggcccgggcggcgcattggcccctcctcccctcgcgcgccgcgcgcattgttgtcctttagcgattggttgttggaccagaaacagctgtgcagagccgtg

SEQ ID NO: 416281 - DNA, 122 bp, Homo sapiens
cgtgggtccctccctgaggcaccagcaagcttttgctgcagttgctgaatgtctgggttccggaagggctgacagctgagtgaacaatgcattgtgtgtgctggtaagggacagctgacagg

SEQ ID NO: 416282 - DNA, 122 bp, Homo sapiens
gccctgtaagttctccgagggccacttgcacagcaggaggggcgagggccgtgtacgtggcgctggccgtcgggcgggctagaggggaccctcagagcacccgggagatgggggtagaagcg

SEQ ID NO: 416283 - DNA, 122 bp, Homo sapiens
cttcagctggcagccaaggaggcgaagcttcgagacctggaggactcactggcccgtgagcgggacaccagccggcggctgctggcggaaaaggagcgggagatggccgagatgcgggcaag

SEQ ID NO: 416284 - DNA, 122 bp, Homo sapiens
gagacagagcaaacgtccccgggaccccagaaaccagggtcaacacacccggggggcccacgaacacaggcagagatacccaaagctgtgggctgaattaaagggacccgctgagcccaaga

SEQ ID NO: 416285 - DNA, 122 bp, Homo sapiens
cccatctctgggttcacggtccctgccaggagtttgggtaatgcctcacacagggaccttcgggtccaagggctgttggtgcttgccctgcagttccctctcctgcactgggcctggtgaat

SEQ ID NO: 416286 - DNA, 122 bp, Homo sapiens
tcccccgcagcgctcggggagccgccgaggagggggccgccgcgcccccgggaccacctgcgcctgctcatctgcatccagtcccggtgccagcgcaacgcgtgagtgtaccccggcccgga

SEQ ID NO: 416287 - DNA, 122 bp, Homo sapiens
tggcatgtggcccatggtattatgcagggaatgccccaagctttgcctgcctcatagcaccgccagcaagatccttacaccatggctccaacgctccctgtaaacaacaagagtggacaccc

SEQ ID NO: 416288 - DNA, 122 bp, Homo sapiens
cctggctccctctcctccctgagcacctgctgctgcgattttaaagggaactgtactactcgcagtgataggtttgcagagtgtgtgcttggctgtggcagcctagcttggagaagctgctg

SEQ ID NO: 416289 - DNA, 122 bp, Homo sapiens
cctcagctcccgccttcatcccccgcactctccgtcaagatccccacctttaaagggatccgagcgacgttctagaaagcagccaaagcctgtcctgtagccacaactttcaggaggcggta

SEQ ID NO: 416290 - DNA, 122 bp, Homo sapiens
gaggcagtcaacagaggccagaaaggacgttgctatggtttccacgcacgttgtctccctcggcctgtttctttgcgcggcgctggcgattccgtaatttccgcttccggtagtgagaaccc

SEQ ID NO: 416291 - DNA, 122 bp, Homo sapiens
tggcctgaagcccggtgggaaccgcgggggctcaggaggcgtgtgcaagggtgattgggtcgcagttgaggggagcagctcgcgagaagggggcgtgcggtcggcctcgctttacgcaaacg

SEQ ID NO: 416292 - DNA, 122 bp, Homo sapiens
ttaataaactcaaaaataatttattgagatttcatcttgtagtctacggattatgagttgcgaatagaggctgaggtccccccaagtgttatctgcaggctgctgtgttgatgcagagctgg

SEQ ID NO: 416293 - DNA, 122 bp, Homo sapiens
ctcaggatcccagccctggaaacacaggtggcaggggccaggtcctgctccactcttccacgctgggtctgggtgctggctgctccctgaatcctgacttcttcatcaggcaggggccacag

SEQ ID NO: 416294 - DNA, 122 bp, Homo sapiens
ctttgcagaggcgaaggcgcaatagacatgcgtgagaaatatgccaagaaccatttcacccgaggaaaaggaaagcgaggagagaaggggacgagggacatagagagttctaacttagaaaa

SEQ ID NO: 416295 - DNA, 122 bp, Homo sapiens
gggagaagactgagcaggccgaggggtgccctccttggctcccccacctcagcagagctgcgtctttgtgctttcagcttctttacagtgctgccttgtagcattcaggtcaagcagcattg

SEQ ID NO: 416296 - DNA, 122 bp, Homo sapiens
cacctctcccttctccactccactctgtgcattctacagatgttcttgtcctccagtttccggtgggtttggacaactggaggcactagcagaagatgtagggcgggcttggtggctcatgc

SEQ ID NO: 416297 - DNA, 122 bp, Homo sapiens
ggcgcctggagaaggctgtgcgggcggggacggctgcagcccttgccggagagggcgggccggggtcagctgcggcgggcgggccggcgcggggagctgtgggcggcagctgcgtctcctgc

SEQ ID NO: 416298 - DNA, 122 bp, Homo sapiens
gatgtcggctcttactgttgtctgtggtcaccaccattatttgcccagaaatctaatgagcgtaaggaccacagccggggcataggaaggggctgtggaagtcggatgcaggccccctgtgc

SEQ ID NO: 416299 - DNA, 122 bp, Homo sapiens
atgatacctagacccgtggtatccgaagtatggggtatatattcctgggatacgtaagagcggctaatgggccagacaacaaaagaaacattagaacttctatttatttttattttatttca

SEQ ID NO: 416300 - DNA, 122 bp, Homo sapiens
acccaggtgtcctgtctccacggtaactgctgctttgcgaccttcggtttgcagcggtcgcgctgcagccgctgcagtggttgctgggcgaccacggagagaaagccgggacttgaggtggg

SEQ ID NO: 416301 - DNA, 122 bp, Homo sapiens
tactcttcagcctctcctactcctgcgcggatgctctaggccgcttgctctagtacccagcgatctcccttgctcaatgagtccacttggtggtacgaagacccccataaccctaagtcaac

SEQ ID NO: 416302 - DNA, 122 bp, Homo sapiens
ttaagcaagttttgcttcccgaaggactttatgaagcgtcctttactttattgacttcctcgcccagaaagaggaccttttctcctaagaatcagtgcaggtgctctctggcctagcccatg

SEQ ID NO: 416303 - DNA, 122 bp, Homo sapiens
ataaggacagagaaatcttataccagatggagttaccaggcaaagaacacttttccaagacgaatgcagtaggggtcaaaactattgttacaaaggatagagattaaactcagctctgctga

SEQ ID NO: 416304 - DNA, 122 bp, Homo sapiens
ttttaccagagggggaaagcagtctgccaggcaaaaagctcaaacccagtggggtgggagcgcccccactcctttgctgccgcccgccgtaagccggcctgccccccacccataactaccgt

SEQ ID NO: 416305 - DNA, 122 bp, Homo sapiens
ctcatctgttagtaaagatgacaaagaaaggtacggaaagaaaccgctctcgagtccccacgggggagcctgctctatgccaagtaccagtggaactggccgcccaccctccctgtcccagc

SEQ ID NO: 416306 - DNA, 122 bp, Homo sapiens
tgctgtcgacggccgcggagagcggcaagttcggagcaggctacactaaaggaatctgcgcggccagccaccctaagtggaagggaatgcaaagcctcctgcaacctccacagcgctgggca

SEQ ID NO: 416307 - DNA, 122 bp, Homo sapiens
gggtgagggaggttttgatgggtgcatctcggcaccaggacacctgcacagcacacaccacggctgttgtttcaggcgtctggggacgtcagacccccaggtcatcaggcaggcgatgcgtc

SEQ ID NO: 416308 - DNA, 122 bp, Homo sapiens
ggctcacagccggtcctctgggcacctaacgccctgggtaccgactgctgtccacgctgacgctgtgagggccagcaggccctggaaaggagctgcttctggactcacacgtattcccactg

SEQ ID NO: 416309 - DNA, 122 bp, Homo sapiens
tctcacgctgaaatgtgatttccaatgttagaggtgaggtctggtgggaggtgactggatcgtggagatgaatccctcatgaatgatttggcatcatcctcttgatgataagtgagttctca

SEQ ID NO: 416310 - DNA, 122 bp, Homo sapiens
gttataccaaaatttaaaaatagatgaaaagtaaatgatacaacttcgtgtaaactgtgacgtgccatcaaaacagaagccagtcttagcttaaggaaatgtgccacctgcgtgcagggatg

SEQ ID NO: 416311 - DNA, 122 bp, Homo sapiens
gtgaagaagggactggcaccatccttattgggctttttgattggccgcggcaccaggacacgtcacaggggcggggccgattttaaagagccgggcgcggaaaaaaaaaggccgcctgtcgt

SEQ ID NO: 416312 - DNA, 122 bp, Homo sapiens
tctccgtcaccggccctcaggcgcagggaggaagtagggcaggaagcagggggcggaggccgctgtgcagtcagcctggctgtgggcggcccctgcctgctccgtccagctggagacagccc

SEQ ID NO: 416313 - DNA, 122 bp, Homo sapiens
tggcaggagccgcccccggggccttcccttcacaggccccgcagacaccagcccaggacccggaggccacccacaccaccgccggccgatgggcgtcttaccagacatggttagacctggcc

SEQ ID NO: 416314 - DNA, 122 bp, Homo sapiens
ttcacgcctctaccttgggcgggtttggggtaagggccgcgcagaccctaagggaaggcccgaggtcgccggagctcctcctctcgcggctgagtgagggtctgggaggccagatgaaggga

SEQ ID NO: 416315 - DNA, 122 bp, Homo sapiens
cttccctctgccgggagggcctgcaatgaattacatgtgattggccacatacaaagggatcgctgttctgcgagcagggagccagcctgtcagattgcctccgcgagcagtcacgaatccag

SEQ ID NO: 416316 - DNA, 122 bp, Homo sapiens
cctgagagtcctgatctttcagtgctgttgtttccctgtcagggttgattgtttccttttcgagtgccgttctgaatctgaagtgaaagtgcagcgtggaggcatgtcactgttgtgtctca

SEQ ID NO: 416317 - DNA, 122 bp, Homo sapiens
gtggctgagacttcagcaaccggcagtaaaccccgggcctgagctgcaacgtggaggatccgtcttattacaggaagtatgtcctcctctgcctaaccactgctgggcgggtccactttcac

SEQ ID NO: 416318 - DNA, 122 bp, Homo sapiens
ctgttggtcagtgatccccagaagggctgggtgtgtgtggcacaattctgaagcccattgcgcaagcgctgcatcagggtgtctttttggttgaggtgctgtgagaggacattcgccaagct

SEQ ID NO: 416319 - DNA, 122 bp, Homo sapiens
ggcacccccagtcccgcctccctccttcatttccttgttttggaacctggtgggccgcgccgtggcttcctcgagctcattagcgaactcactggcccgccccatggtcgcggaggctcctg

SEQ ID NO: 416320 - DNA, 122 bp, Homo sapiens
tcttttttactctgatgttttggcatctggggccttagtgatgctctggaaactgtccctcgctcttcagcccccacatacaccccaggactagccaatttttagagatagtaaacaacttg

SEQ ID NO: 416321 - DNA, 122 bp, Homo sapiens
cttcccgtccccaggcccaggcctccaggaccccacccctgccctgcagaatccaacccccgcagcccagcttcccagccctggagttgggcccacctcgttcccaatgagcacaggccgca

SEQ ID NO: 416322 - DNA, 122 bp, Homo sapiens
ttttcgaacctgcccctctgagggtcaccgagcagccggtgcaggggcggaagcgggtgacggctgctgaccggcgccttccgcggttgtctccaggccatggcaacaaccgcgcagcgcac

SEQ ID NO: 416323 - DNA, 122 bp, Homo sapiens
ttgtctttttcttcactgctgtgtcctcagagcctaaaactgcacctggcacccaatagtcgctcaatcatgaaacagcctttgcagtcagccaatggctgcaatactggccgtgatcagca

SEQ ID NO: 416324 - DNA, 122 bp, Homo sapiens
cagggggtcccggggacccacggggtgggtgggggctgcgctcaccttggcctcctgcaccgcctcgtccagcggcagcacggcgtgctcgcggtgctcgcgggcgcggtcgcacaccacgc

SEQ ID NO: 416325 - DNA, 122 bp, Homo sapiens
acctgtcggatccctgggccatgacccctgggacggcgagtgagctgcgccgggaacccccgggacggagagagcagcctccaacccccaaggctcacattgcttcacggagtagcggcccg

SEQ ID NO: 416326 - DNA, 122 bp, Homo sapiens
ccctagaccccagcaccttcacaaggtcagctttctctcttctgtgggacaataccccatcgattgatggggtcagctaattttcagtcaccccctagatcccactattaaacttacagtag

SEQ ID NO: 416327 - DNA, 122 bp, Homo sapiens
cagagagggcaggcagggggcctggctccagccccggcttcctaggaagttgtgaccctacggccctctcgggactcagctgtcctttccatgtaggatgggttggtgcaggtgatctccgc

SEQ ID NO: 416328 - DNA, 122 bp, Homo sapiens
acgtgggcgaggggcggggtgtctggactggaacctctgggcccacgtgagtgtctgtcccgctgctgagtgggtgctgtgtgtttgggttgctgtagtgttcgcttgtagtgcaactatcc

SEQ ID NO: 416329 - DNA, 122 bp, Homo sapiens
gaaaagcaagtcaggatggtcagagtcaaaactaagccaggtactgaccattgctgtgtccgagatggatgacggcattgtaagggttctgactcataacatcgagccgcccagctcgagca

SEQ ID NO: 416330 - DNA, 122 bp, Homo sapiens
aagcaaaagaaaactccacaatctaggaagaaggaaaacaggcagcctgcatggcccggacgggctgggaaccagagtgactccccagtaccggagggggtgataatctttctgtggtccac

SEQ ID NO: 416331 - DNA, 122 bp, Homo sapiens
cttttgccacttctcatgggacacttgtgcggggagccttcagccactgtgttagaagtccggctatcctgagggtgccatgtggagaccaggctgggggggtccatgtacggacggaggtg

SEQ ID NO: 416332 - DNA, 122 bp, Homo sapiens
gcctcctcagttccgctgcctggctgaccggaactgagcttgtggccggagaccccgccacgctctcagaagtacttgctggctggaaaacccaaaggggtgaaacctcagctacagccgcc

SEQ ID NO: 416333 - DNA, 122 bp, Homo sapiens
gagagtggtcacacggaatgaatcacaaacgatcttcaaaggacaaacgtggtgaatcctcgaactggcaaaggaagaagtaaactctgcccccgcaagctcgcgcgacgcgacaccgcggc

SEQ ID NO: 416334 - DNA, 122 bp, Homo sapiens
cataatattttattgtgttacgtcctttaatggctttgggtttgcactacaccagcatagcgcaccctagtactgctgattttcaatgactcaacaggttcagactcatagacaagaatttc

SEQ ID NO: 416335 - DNA, 122 bp, Homo sapiens
ttagtggcaacaagtgctgagatcagcgggctcagtagcaggaacacaagcacccccttgcggtgtctggaggaagcggcgcggacagtctcccgctccaccgtgtcgggcctgaagaggcc

SEQ ID NO: 416336 - DNA, 122 bp, Homo sapiens
cggggcgatccagggaaaatcggcgcctcacctgctcctcttgaggcagctgctgccactcgctgaggggacaacatggagcctccgccttcaaagcagaagcagcaggggtgcagaggaga

SEQ ID NO: 416337 - DNA, 122 bp, Homo sapiens
gggccgggctagcctccggccccaacgcgcagcaagccttttcctcgggtctggcccgcacgcctcgcccagtcaccagaaccccgccatccatgtagtgccagtttgtgcacacggctggg

SEQ ID NO: 416338 - DNA, 122 bp, Homo sapiens
cttggaagtgaaatgagggcagccgccactgaagcagagttggggaataatggcagagcccggattttcccagcagggtagcctgcctgggaagcaaaatggatccctttcagcttcagctg

SEQ ID NO: 416339 - DNA, 122 bp, Homo sapiens
tcgcctgcggatcacggaagtggctgcggtcggcgccatgttatgttggggcagaagggacggggaacttccggattggaagccccaaggattctgagagccccgctaatctggggatgact

SEQ ID NO: 416340 - DNA, 122 bp, Homo sapiens
gttgggccccttataacgttctctgggtattgcaggtaaagtttccattgtaattattttcgctttggaagatgtggctctacgcagagattggactacatggggccttgcgatttatttgg

SEQ ID NO: 416341 - DNA, 122 bp, Homo sapiens
tggagttcagaacagggctctggggaggaggtacaaatttgggagtagttagcatagaggcggtatttaaaattcagggagtgaatgtgtgtagagaagagaagaagaccaaggactgagca

SEQ ID NO: 416342 - DNA, 122 bp, Homo sapiens
cgccgtcacgctgaagtctctttcttcaattaggttgcttgtctgtcactcaagaaggggcgggcacagctgccggtagaggggaaaaacgccggccgtccccgcccccctagtggaggcct

SEQ ID NO: 416343 - DNA, 122 bp, Homo sapiens
gagtagactcttcaggtggtggtgcctgctttaggctggctctccccgggtcaaaagggacgtgataaagtgttaaagtgatgttaaggatcaagtgggcaccaactgcgactcccctccca

SEQ ID NO: 416344 - DNA, 122 bp, Homo sapiens
tgtgtgagtgcacgtacatgcaggtgtgtgtatgtgcccatgcctgtggacacacacacgcgcttgcagccatgtatgtgtctgcacgtgtttctgcatgtgtgtgtttgcacccgtgtgag

SEQ ID NO: 416345 - DNA, 122 bp, Homo sapiens
ctgctgttaacttccggatttatctctgagagcagtgaataaacgcgtgatatggaggggcgtactctccgcagtcctgaaacttctggatgtgaggtcccgccaccctgtggtagagtggg

SEQ ID NO: 416346 - DNA, 122 bp, Homo sapiens
cgacgcgcgggtcctcacgcgctccctcacttcctgcggcttttggtccctcccgctcgccgtccctttagttctgcccacttcgcctccgggttgtcagggcaaccgtagcgacgccggcc

SEQ ID NO: 416347 - DNA, 122 bp, Homo sapiens
cctgtttttgctcagctttttgctcaaaggcctcagctgtgaatacagcgcttgggggggcgggggaggctgtaacttgcgcaagcgcactcaggcagtctccgagcccgcgggcgcaggcg

SEQ ID NO: 416348 - DNA, 122 bp, Homo sapiens
aacacgtgtttccgagcatcttctatgtgccttttctctatcatcagatgggggcccctgcggtgggcagaataacggccactgcaaagatgccaaatcttatccccagagcttccgcagag

SEQ ID NO: 416349 - DNA, 122 bp, Homo sapiens
aagtaccatgatcctgatgatgagcctgactgtgccccgccctttgactttgcctttgaccgcgaagccctcactcgggagcgcattaaggaggccattgtggctgaaattgaggacttcca

SEQ ID NO: 416350 - DNA, 122 bp, Homo sapiens
gctcaagtgggagtggccaaggagagtttaaaggaagggttagaaagaagtgagccggatcgggagaccattatgggatggggaagcctttaccatacctaggcctgggaggttgagtggga

SEQ ID NO: 416351 - DNA, 122 bp, Homo sapiens
aatgtataccaacggagagaaaatacgatggctcctggtggatttattacactgctgcagcgatcctcaaactgaggccggcctctgtggtctctatgcctactccttccatgaaccccacg

SEQ ID NO: 416352 - DNA, 122 bp, Homo sapiens
gctcctggggccatggatgaaggtagagaactggagcccactgtcaaagctgggctggctcgggtaggtagcctacctggaggtcaagggttctgtcaaaatcaatgcttctgtttataggg

SEQ ID NO: 416353 - DNA, 122 bp, Homo sapiens
ctcccgcgggcccagccggcaggacgcggcctcccccgctcctccagcccgcggccgcggcggtactcacagacctgttctgcagccgccgccgccgctgccgccatcttcccgcgcccgcc

SEQ ID NO: 416354 - DNA, 122 bp, Homo sapiens
cgggagtcaactgaaatcccgggatggggaggggcgtctggaattatggggcgggcgaggcgcagatactttgatgaaggggcgtggctcttagctgctccgagaggtacagggcggggcct

SEQ ID NO: 416355 - DNA, 122 bp, Homo sapiens
tccgacaacatggcggcccactggggactgggttggcgcggtgcatcctgggataggctccggccccggccccggcggtggcagcggcatgtgcggagaaggctggcggctctggaacaggt

SEQ ID NO: 416356 - DNA, 122 bp, Homo sapiens
tggccaaggctggagccggctccctcagcttgcagggaggtgccgacgaagaggcgcaggcgggaatcgggggctgcgcccggcgcttgcgggccagcgcgagttccgggtgggcgtggcct

SEQ ID NO: 416357 - DNA, 122 bp, Homo sapiens
gccttctttgatggccgtgccccgcagggaaacgcgctgtggcccccgggttactgcttgcgggggtgatattaaaggtcaaaggttgtctaaaagccacctgggtggtgtggaggtgcagg

SEQ ID NO: 416358 - DNA, 122 bp, Homo sapiens
cctccccggccagctgcggtgttcgcggccagtgttgccgggcacttcctggttcccgcgcgccccgggtgcagctccctgcacccagtgctggcgctcctcagaagggagggggccagagg

SEQ ID NO: 416359 - DNA, 122 bp, Homo sapiens
ttagtttaaaattccttaatacaagaaggtgttactccttaaccactgctgcagcctcaccggaccctcctgatgtggatgaagcaggcggggtggctgctggtcggctgtggaggcacctc

SEQ ID NO: 416360 - DNA, 122 bp, Homo sapiens
gggcggaacccactacagggctttgaatgttacccaccaaccttcccagggccccgctgccgcctctcaaggggaaaccaggagcacaaagctccacttaccgcaacttccgcggagctgag

SEQ ID NO: 416361 - DNA, 122 bp, Homo sapiens
gaggcacagccagtacggaggccccggggcaggaccgtgtctggagagctgggatcagcccgggcacagcaggaacatcctgtgcagagcacagccagcccccgcttcccctcccgggcagt

SEQ ID NO: 416362 - DNA, 122 bp, Homo sapiens
aagaccacagcagccaaggtgagcattaagcagggcagctttgcccctgggtggttgaagcgccaggctggaatgagtaaggtctccacaagaccctgctgcctgcctcccatactcccatc

SEQ ID NO: 416363 - DNA, 122 bp, Homo sapiens
ccgaggcaggcgtaggggcggggccaaagcgcagccaatggccgaggccgagtccctgggcgaccgcgagcggcgggacgggggcggggctgcgggaggcggagccgtggcccagctccgag

SEQ ID NO: 416364 - DNA, 122 bp, Homo sapiens
cttagctgttcatcaagagagggcggattaaaatgagtcatggccattcctataaaggaacgctttctaaggggaatgctgtgggtttgagctgctgatgaggaaacatctccaagcaacat

SEQ ID NO: 416365 - DNA, 122 bp, Homo sapiens
gccaggagctccgttggcgctgcaaccatcttgacttggaatcaaccaccctataggccacgctgtagccttagatactctaactcgtgaaattttcatcgaccgtcgtccatagggcaagg

SEQ ID NO: 416366 - DNA, 122 bp, Homo sapiens
atccccgcgtgccccttcctcactaccctccaaatcccgctgcagccattgccgcagacacgatgccgaaacgaaagaagcagaatcatcaccagccaccgacacagcagcagcccccgctg

SEQ ID NO: 416367 - DNA, 122 bp, Homo sapiens
ccacctggccatagcatatggttgctatccagttctctccattttgacccaaaatggtgccgatgtcaatgctattaatgaagccagcatgacaccccttcacatggccgcaaacatgctga

SEQ ID NO: 416368 - DNA, 122 bp, Homo sapiens
tcctcatgaagagggacagcgattccgagggtgactgaggctacagcttctatcacatgccgaactttcttgtgacaaattgtctggattttttaaaaaaggaaaaagcaagaatgaatcct

SEQ ID NO: 416369 - DNA, 122 bp, Homo sapiens
ccaacagatggactgacagacctcagcctggtctcactcattccccgacaggaatcctggcgctgactcacaggctgggtgattcacacagcttgcatctgtgtgcctgtgtgtgtgtgtgt

SEQ ID NO: 416370 - DNA, 122 bp, Homo sapiens
cagacaactgaagaggcgtcttgccggcgtgtcccaataaaacccggtgcgattggctcccgccttaccccatcgcttatgcctattggcttactttgtcaaaccgggcttatgaaccaata

SEQ ID NO: 416371 - DNA, 122 bp, Homo sapiens
tattcgattggatagtcggaatgctacttttcacggtgcaaagctatgattggctgcgcgcggcagggctcgcgcagttaccaggcagcgggctagactgaggctagttaccacgtcagtga

SEQ ID NO: 416372 - DNA, 122 bp, Homo sapiens
atgtgacagaggcaattgcttgcttggataccatataggtaaaagtaacagttttcaactcgactcttgactacaccctgtacattcttggccggtgttggttttcttaggttatggatcat

SEQ ID NO: 416373 - DNA, 122 bp, Homo sapiens
tctccctcctcccgccctcccctagccgcagcgttcgctgaactcaacccgcgggtaggacggagctcagaccagctgaacctcttgttggttttatactgagtcgacgtcatcctggattt

SEQ ID NO: 416374 - DNA, 122 bp, Homo sapiens
gcctggactcaagaggatagactgggcaaaagcgcttctgggaatcgtagtttagggcgccgacctcaagatccaggctgggcacgctacccgaccaactccttacttgagctcttcagccg

SEQ ID NO: 416375 - DNA, 122 bp, Homo sapiens
tttgctcagctatttcccgggaagagggtcggaccctggcacatcggtgtctcggcttcacgccatgcaagtccacatgctccacgtttgaccccagggttgattccactgcaccgccccct

SEQ ID NO: 416376 - DNA, 122 bp, Homo sapiens
tcagaagagattatgatcaggtagtccaagaaacctgggttggtgaaaaaaacaggttcccgatagagattcagtgtctacagttgagataagccaggagtcttctaggcacctgtgtatgt

SEQ ID NO: 416377 - DNA, 122 bp, Homo sapiens
gaagcggccgggccgcagctattcctgcggggcttccagggcggaggacacgggctgacacgggctgtccctgggaaggaacttcaagtcatggagctgtcaaagtagaagcagcttaatga

SEQ ID NO: 416378 - DNA, 122 bp, Homo sapiens
tcgtgcagcagatagacggcagtccgggctgtggcaggtgacagcccagggcccagacaccggccagcctcatagtgctcgccgcacgctcagctcaccagtgcggggagactggagcttcc

SEQ ID NO: 416379 - DNA, 122 bp, Homo sapiens
agagctccccattttcttagcgttagacagtgcaacatactccacctggcagggcacagccgaaggacatgggatcatggcatgtatgtgctgaattagcgatacctggaatgataggacat

SEQ ID NO: 416380 - DNA, 122 bp, Homo sapiens
gagtccgggcattctgcttgatctcccgggcatccacaaagaccttggcgaagccgatgccgtagcggatgtcggcagagcagccaccccacttccagccctcgtcccggtggtactggcct

SEQ ID NO: 416381 - DNA, 122 bp, Homo sapiens
tcactgttcctcagctactccgcctccccaccccccgagcctgggaaacgagccctggaccgcgtctaggaacagccccacttctgtgccagcctccggctgatggccccactcatacacac

SEQ ID NO: 416382 - DNA, 122 bp, Homo sapiens
tccttttttgcctgcaattttgcacaatcaaatgcacaaaaacaatgggaaaggggattacgtcaaatgtacgaaagaaatggcaggaatccagtgggaaagacatgccctccacatttggc

SEQ ID NO: 416383 - DNA, 122 bp, Homo sapiens
aatggagggaggtaaacaaaaaataaaattaaaaaagatgaggtctgataggggagcagccggataagaaaatcaaaaaaggaacagtaatttaaagtttattccagctataatgcaggtta

SEQ ID NO: 416384 - DNA, 122 bp, Homo sapiens
cttggtcatggcacagcacgggtagtcacggtgcagaggagggagactctgcagacagagcgcctagcttgggattcagattccaccacttactaactgcgacaaggtgaaaattctccagt

SEQ ID NO: 416385 - DNA, 122 bp, Homo sapiens
tccaggagttcattcttcttatcaaccagattacggccaaattcaagagacaggtatctccgtttttacaacagatgttcatgcccctgcttcatgcaatttttgaagtgctgctccagcca

SEQ ID NO: 416386 - DNA, 122 bp, Homo sapiens
gatctcagcggcggccgcagagcgcagaggtagggagagaaaaaggaggcgtcggcggggcgcgagcgaccagggcgctaagtgccgcctcacagtcctgccagagacaggagacgccgggc

SEQ ID NO: 416387 - DNA, 122 bp, Homo sapiens
agtggaaagagggaagcatttagccataggttcctgtcctctgttggtcaagggtagctccgtgggggataaccctgcacagttctaggatgcagagtgataagtgtcagtatcacaaggct

SEQ ID NO: 416388 - DNA, 122 bp, Homo sapiens
acccagagcaccacctaccggcggcacggtcggcgcagcaggccccagaagggcggggaacgctgtcaagcccaggggcacttcggcgaggagccccacccgccctccagctgaccctcagc

SEQ ID NO: 416389 - DNA, 122 bp, Homo sapiens
agctgggccttgggcttttcaccgtaagcctctgcctggccaaaaacaaatgtacatacacgaggcgcaggtccttctcaagttcactcctttgcaagccaactcgtcttaagaaccagccc

SEQ ID NO: 416390 - DNA, 122 bp, Homo sapiens
gctccgccccattgggatatatttgcatatttctctgaggaaccctgcccaggtgccagccgcagaagctcctcccctttcgaattcccgctagcgcccctagagggcgtgtccgttgccag

SEQ ID NO: 416391 - DNA, 122 bp, Homo sapiens
tttaggaaagatttgcttatatgctcggaaaacttccaaatgcgcgaataccagcaatcccgctcgccttcaacgcgtggggtaagggggggtggggaacaattactgagtgacgctaatat

SEQ ID NO: 416392 - DNA, 122 bp, Homo sapiens
agctctgggaggtcaggattcaattggtcaaatccacatctgcagtttccctcctcacgccggggaccagcctgggaccttggaggctgtgaggtctcagacccctcccccagcaaccccct

SEQ ID NO: 416393 - DNA, 122 bp, Homo sapiens
aggcagacctcacctcacagagaggcccggagaagccctgggggcagtggcagtggaagccgtcggccaggtcctcgcagaggccgccgctgtggcaggggctgctggcacactcgtctcgt

SEQ ID NO: 416394 - DNA, 122 bp, Homo sapiens
cacccggaaggctcaaggaggcgccctgggcagggaacttccggttgcggggaagggcggcgtcctctcctagggacttgtcgcacgcggcttctcgtcgcgttccgtcttgcacgcctcgc

SEQ ID NO: 416395 - DNA, 122 bp, Homo sapiens
ctttgttcttctttcttttcctgcctaaatgtttatcgagtccctcctgcattaagtacccgtgctgtgcaacaaattaccttgaacttggtgacttcaccaccactgcatgtcagcgccca

SEQ ID NO: 416396 - DNA, 122 bp, Homo sapiens
gcgtcacctaccgccccggcaaactgtgtgtttttaaggaagatgattcaactagtgtttcgagggtgaaagaatgggccaggctggagaagtacaatagcactccgaatcaaagggagaag

SEQ ID NO: 416397 - DNA, 122 bp, Homo sapiens
ctgaaacctcgcgcaggagttccttgggagaggtggattacaaggactcttcctcccacccgctgtgcaagagccatgggcggccggtagtcatttttgaaggacctggcaagcactgtaca

SEQ ID NO: 416398 - DNA, 122 bp, Homo sapiens
tgtggggagaggttggcatggcctcctgatgggccctcacacctgctttcctcccacaggcgaggcggtggccagcgccatgcattcctcccgctacccgagcccagcagaactggacgcct

SEQ ID NO: 416399 - DNA, 122 bp, Homo sapiens
gcttataaaagtggggaagaatagtccaaagtgacttgtacttatgggtatgaggcagaacgctgacccttaagaaaacgtgactgcatattgagaatacagaataaacagaaggcagcaag

SEQ ID NO: 416400 - DNA, 122 bp, Homo sapiens
cttggccttcttctccttcctgtgcaggtatctctgctctttcgagtacagcaggggtgtcgaccccttggtgctgggtgctcagggctgaaacgaaggcagctgggtcctgtgtcaacccc

SEQ ID NO: 416401 - DNA, 122 bp, Homo sapiens
catcaacagtcctgggcccaagagatccatggcaggaagtcaagagttctgcttcagggtcggtctgggcagccctggaagaagtcattgcacatgacagtgatgagtgccaggaaaacagc

SEQ ID NO: 416402 - DNA, 122 bp, Homo sapiens
cctcccggacccctgctctcccggacgcgtggactccagctcccgcctgggtccccaaagcgctgaacccatggtcacttctatgcgtagccctggtgcccgccgcccacagccggaccgca

SEQ ID NO: 416403 - DNA, 122 bp, Homo sapiens
tttttgggacagtgcactgggtgctgtagccaagtcccttcattttaactttctctatctcgcctcctgggtgttcctctatccaagccgtttacttatttgcttttaacgtttctttcact

SEQ ID NO: 416404 - DNA, 122 bp, Homo sapiens
aaaataaaaggacgttggaatgggggatatctttaactccagagacacccgtttggtgcccgccgttttaagcattggctctcatttccgtccgcaagctatttcgctgaacttaacgctct

SEQ ID NO: 416405 - DNA, 122 bp, Homo sapiens
atcacagctcactgcagcctcgacctcctaggctcaggtgatcttcccacctcagactcccgggtagctggaactacaggtgctgcatgccaccacgcccggctaattttttgtagggacgg

SEQ ID NO: 416406 - DNA, 122 bp, Homo sapiens
gcagcgtcccacccacctcccgctcccgcgctggccctacctgccctggaccctgtgacgcgtcgtgggctgggacactcctcggctcacagaattcccatggttcccatcccacccagagt

SEQ ID NO: 416407 - DNA, 122 bp, Homo sapiens
gcccacggcggcaccccccgggggtctctgggaagaacacctgctgtccatccatccgcgcgtccctgggtctgagggtcagtgtccaggccgtcctgtttgttgtgataaacaccagcacc

SEQ ID NO: 416408 - DNA, 122 bp, Homo sapiens
aggggccgaggaagtcgagggtctggacattcgctgccccggagccgcgtgagcccgccccgccctggaacgtcctcccaggcgttctcgcctttgcagcccccgcctgactgcggaccctc

SEQ ID NO: 416409 - DNA, 122 bp, Homo sapiens
gcactcgcgagcagcggcggccccgccggcggccgagttgggagaatgcggcggcgctcgcggatgctgctctgcttcgccttcctgtgggtgctgggcatcgcctactacatgtactcggg

SEQ ID NO: 416410 - DNA, 122 bp, Homo sapiens
tgaaaaacaagcgcgtccagtaacaccagaaaaacacgtggcgggggtggggcatctggtcgcaaccgcaggtgagactctaagtcccatcattcccttcggcagccaagccaggctgttga

SEQ ID NO: 416411 - DNA, 122 bp, Homo sapiens
atcaaaataaagatttaagacctatgttcaaaatagaatcgcaagtcactgtgacctgatcgaggacctgggaactgactggtttcctaacacattcctgtcctgtgtacttctctggaaag

SEQ ID NO: 416412 - DNA, 122 bp, Homo sapiens
tggcctcctctcctgcgtggattcattctacggcgcactggtgtattggattaaatctcacgtccgcgtagtgttgacgaggaaacacactctgatgtgtttatagcaaggacgtaggtggg

SEQ ID NO: 416413 - DNA, 122 bp, Homo sapiens
tgggaacgtcctcccgacagctcctgggaatatcctggcactgaggtcactctgggctcccggctgacactcgtgccggaggcaaaggtgaggaaaggccggaggaatgtgtggtctcggcg

SEQ ID NO: 416414 - DNA, 122 bp, Homo sapiens
ccaatcacccaggagtggttccacttcacacacgcccggcacgcaaaccatgtctccacacgtctcaaacggtagcagagggagtaccttggctgctggcgaaggagtaagccacgcgggct

SEQ ID NO: 416415 - DNA, 122 bp, Homo sapiens
tgaggccggagggcaggcgggccgcctttcaccgccgcttccctttcatctcgggctcggcggaggcgctcaattaaaagcctatcagtttgtaagtaaatcaacgcctatcagagttgtca

SEQ ID NO: 416416 - DNA, 122 bp, Homo sapiens
ccccgccccgcctccccatccccacaatcccaaggctccaggctctgcagggaaccgcggcgggaattttccagcctcaaatacggggcggactaattttcaggtccactccaacccagaga

SEQ ID NO: 416417 - DNA, 122 bp, Homo sapiens
acacagcctgatgttagtaaacttcaacagctctgaagtgaactcctgcctgaaggctgccggagacgggagtggcctgaccgagcactgcctcaggacccggcgcccagcacccagcgccc

SEQ ID NO: 416418 - DNA, 122 bp, Homo sapiens
tggtgatgccatctgcgcttctgattcacacaagaggcgcactgcaaggaggccagccaccgctggtgcttgttggaagcacacagcgagtttgtgtttggcagccatttttcaaaggccgg

SEQ ID NO: 416419 - DNA, 122 bp, Homo sapiens
agcgggcggcggggcccaggctgtgcgcttggggagcgcggaatgtgaggcttggcgggccgcagcacgctcggacgggccaggggcggcgacccctcgcggacgcccggctgcgcgccggg

SEQ ID NO: 416420 - DNA, 122 bp, Homo sapiens
tctctctcccttcccaccctacgcttaggcagtggccttcgggaacggagagtggaggttcgcgcagtagagtgcgcctgtgtgggccgggccgccgtgcagggggccgcctccaatccctc

SEQ ID NO: 416421 - DNA, 122 bp, Homo sapiens
gtactgcccgtcatttttctcggctgtctctgtgccttctagatatttccgtgtcctccgcgcgcttcatttttatcaggctcctgggtgtgtgcagggagggaacgcaggcacggaacgca

SEQ ID NO: 416422 - DNA, 122 bp, Homo sapiens
tgagttctgccagtcttccagagaccccgcccctcgccgaacggcttccccgcccgcccccgccccttcaggagcccctccgctggctcggccccgactagcctctcggggcctcgaggcgc

SEQ ID NO: 416423 - DNA, 122 bp, Homo sapiens
gctttaattgcctgtcgatgacagatgccaagggaatgaaaatcccgtccggttctggagcgcctgcccggggatgggggtggtgtggggagtccgagctggctgggcctctagggcctcac

SEQ ID NO: 416424 - DNA, 122 bp, Homo sapiens
ggccacagtcctggtctttctttcccacagcagtgctgctgaaaggcagttctctgccttcgtctttgtacctccaccatgtagaacggtacctgatacataacgttcactgcaccgaaggc

SEQ ID NO: 416425 - DNA, 122 bp, Homo sapiens
agcgaatgcgggaggcaggcgttggctgcaatggggctcgggagccaggaggtgccgctgcgtccccgcttcctggcgcctgacccagcgtgcaaagttgggctgggagccgcggggggaag

SEQ ID NO: 416426 - DNA, 122 bp, Homo sapiens
tgtgttcagctccgggcctcttttttcaggaatccttgtttcgggacacccagtggacagcgaaaggagagagaccaccacaggcaaacggccggaaagccgcgcagtcgcagcccgcgcgc

SEQ ID NO: 416427 - DNA, 122 bp, Homo sapiens
gcgtgagacggtgagagtgagagccacggcctgtgcacctgctgccgcggcgccctgccacggagaggtagggtctgagtccagggtgttcgggaccctcacccaggccacgtcagtttggc

SEQ ID NO: 416428 - DNA, 122 bp, Homo sapiens
aggtctgggcttctcgaagtgtcaaagctcttctctccttctctcttctgtccttctcatcgcttgcaacatggggagtgagggggtgtttcagccctgtttgtgttacagttctttcagtc

SEQ ID NO: 416429 - DNA, 122 bp, Homo sapiens
ccccacatcctgcctcacctgctcagttgggtcctagcatgcggctggcagggcctgtcccgctgcccactggaggcagctgtggtggccatggctggtgtcccaggcagctcctcataggt

SEQ ID NO: 416430 - DNA, 122 bp, Homo sapiens
caggtccatcttgagtggcctcttcccacccagtggtggctctgccttcatcctgggccacgacgtccgctccagcatggccgccatccggccccacctgggcgtctgtcctcagtacaacg

SEQ ID NO: 416431 - DNA, 122 bp, Homo sapiens
tcctgggttttccctgctgcaaattgccatttggcgtcgtccccaatttccggccaaggccgcgtcgtcgtgctgctgtgtaatttgatgtgtggagttctagataccaagtgtctgtcggt

SEQ ID NO: 416432 - DNA, 122 bp, Homo sapiens
ctgtgtagccaacacagtagctcctctacattacaaggatatgattattcctaaacttgtcgatgatctaggaaaagtaaaaatcactaagtcaggatttctcacttttatggacacttgga

SEQ ID NO: 416433 - DNA, 122 bp, Homo sapiens
gagaatgtacactccttcgtagttcatctggacagtaatcaggagctgacccagggtgggcgtttggaaggactcagcctccgtcctgcctggtgctgggatcagcttacacagctcctgtg

SEQ ID NO: 416434 - DNA, 122 bp, Homo sapiens
acaaggggcgtcaaaccacctgctaaatttgagggaatgttatcctctccccacctcccccggccccggatattagagacaataacacaagggtgatgtacacccactgctttattgggagt

SEQ ID NO: 416435 - DNA, 122 bp, Homo sapiens
catactagtaggaaattattatgttcattccttgagtctcgcggcgtcgggaggtcacggcgtcaggcttcccagacagtcgtaaacgccatgtgtttacgcgactggagcaagcggacgcc

SEQ ID NO: 416436 - DNA, 122 bp, Homo sapiens
ccgccagagtgggttctgtagtcgaggtgagacagggttcgggctcaaagaaatcctctccggggacagcagcagccagtccaccgacctggaaacctaaatccctccgaaacgggcatgca

SEQ ID NO: 416437 - DNA, 122 bp, Homo sapiens
ctgggttcgggtcccgggctaaggcggcggcaaagggagcggcagatgagcaggaagtctcgcgacagcagtagcacagcagaagggtaaagcaaaagtcgcgagaacagccctgctgccac

SEQ ID NO: 416438 - DNA, 122 bp, Homo sapiens
tttcgtattccccgagctcctaaaaacgaaccaataggaagagcggacagcgatctctaacgcgcaagcgcatatccttctaggtagcgggcagtagccgcttcagggagggacgaagagac

SEQ ID NO: 416439 - DNA, 122 bp, Homo sapiens
cccggctgccttccctagaaatcccagcaaaccaaaccaaacctctgtgaggatccctgacgaggccccggtgagggaggacccgaggcaggacacactccaccgcccggccgctcctcctg

SEQ ID NO: 416440 - DNA, 122 bp, Homo sapiens
taatcttccaatcccctcctatcaattcttttcttaaaaaattatattatcagccaggcacggtggctcacacctgtaatcccaatactttgggaggccaaagtgggtggattgctggagcc

SEQ ID NO: 416441 - DNA, 122 bp, Homo sapiens
ctaaatcagatcccagatccacagccttttgagcatagcccaaatattcttgtataaggacgctgtggaaatattgtacctaagactgcaagcaaactttcatctccccaaagagtttgtgc

SEQ ID NO: 416442 - DNA, 122 bp, Homo sapiens
gccctacgtgggtccctcggggtcacggcggaggcagtgggttgtgcattcatgggggtccgggtggtagcgtttctgtggagccggtggtctccttgtcatccatgagggtcctgccccgg

SEQ ID NO: 416443 - DNA, 122 bp, Homo sapiens
cgcgcctggggccggagaccttccccatccctgctctgctcagctttgacttggggcgggcgcgacgccgcgattttacaaacccaagtaataggcgtccccttaaacttcattagacactg

SEQ ID NO: 416444 - DNA, 122 bp, Homo sapiens
tgcagcctccatacaaacccataaactaagatgtttgggcagcttgcgggctgttgaacacgtggaggtgccaggatagttgtgcaaagtgccgctcctctccctcacaccttgccctatgt

SEQ ID NO: 416445 - DNA, 122 bp, Homo sapiens
ccttgcctgcccctagccccctgcccatcctaaaaggaaaaccgaggcacagagggtgagcgtcttgcctgaggcagcttgccctgacggctggccagtccttcctaggtcctgacaacagc

SEQ ID NO: 416446 - DNA, 122 bp, Homo sapiens
tggggcgctcctgccagcgcatcggggaggggtgctcctgaaggccaggcatggccaccacgtgacgctgttcttagttcactaatgttagccttatttaggacaaagtcagccagacacct

SEQ ID NO: 416447 - DNA, 122 bp, Homo sapiens
acaaaagttgggggagttctcgtagtagaccaggtccctctccgtgggtggcttgaagagcgagtacttggcccggagggtctccacccagcctcgggactcacggtgcttctctactacca

SEQ ID NO: 416448 - DNA, 122 bp, Homo sapiens
cagcaccatgaagatcaagctcattgtgcccccagagtgcaagtactctgtgtggatcagcggctccatcctggcctcactgtccaccttccagcagatgtggattagcaagcaggagtatg

SEQ ID NO: 416449 - DNA, 122 bp, Homo sapiens
tccagaccagggtgaggcatggaggaggctctgcacagccatttgcagctcagccagcaccgggtgatggcagggaggcctgggcttctgcactggcttctggcctcttctgggcacccacg

SEQ ID NO: 416450 - DNA, 122 bp, Homo sapiens
ctcctggcggtggactgcgccctcacagccctacgctgagagagaatcggcgtgagtctccgccctcagagcctacgacaactctccagactccgccggagcaggcgcagggggcgtggcct

SEQ ID NO: 416451 - DNA, 122 bp, Homo sapiens
cccagaaatctctgcgtcgaatgacagcgcgtcagagccaatgagggctcaaaataaaggcgtttccgcggaaacagtataaaggtgggacttccggcgtcctctactagtggccattttga

SEQ ID NO: 416452 - DNA, 122 bp, Homo sapiens
aggaacctcagcttaaatagtgtggagcggccactggtttccgcggctcgtagtcgcgcccgcgaggaaacgccagggaggcttcctgccccgcccagcggtggcccagggcacagggaacc

SEQ ID NO: 416453 - DNA, 122 bp, Homo sapiens
gcccagcggcccgaacgtcattactgactggtgacactgcagtaagtaaaccttttttgccgaacacttcataagcacagtcaggtactccgtgggtcatagcccagcggacaatttaagta

SEQ ID NO: 416454 - DNA, 122 bp, Homo sapiens
tcgagtccgtgagcgaggaaggttaacagggccttctgcccaaggtcaaggcaccgaagtcgggagagcctgaagacccagacctcatggctgggggcacctcgcagctggcgggctctgac

SEQ ID NO: 416455 - DNA, 122 bp, Homo sapiens
atgtaatccatttttacttcagctcatccaaaagcagccagcagaccggttgactgagaccggtctgtggctgtgggccccttggtgacccgctgctcttttggaaatgggtgacctgaagt

SEQ ID NO: 416456 - DNA, 122 bp, Homo sapiens
cctgtctggcccctcccgtctcttgcagttctgggaggtgatctctgatgaacatgctatcgactccgctggcacctaccacggggacagccacctgcagctggagcgcatcaacgtgcacc

SEQ ID NO: 416457 - DNA, 122 bp, Homo sapiens
aggaaattccaattccagggctactagtccctgtccaatttgctgtccatggtttgaggacgagatttctcttttttccaatgacagtttatgctggaacagcacattaaatggatcccctt

SEQ ID NO: 416458 - DNA, 122 bp, Homo sapiens
atccagtacctgggtgtagaggtggatgactttcctgaggtggacatttcccagcatttccggaaggcgtctgagttcctggatgaggcgctgctgacttacagaggtgagagggatctgcc

SEQ ID NO: 416459 - DNA, 122 bp, Homo sapiens
aacaacttcagcaaactttcagcatacaaaatcaatttacaaaaatcactaggccgggcgcggtggctcacgcctgtaatcccagcactttggtaggccgaggcaggcagatcacgaggtca

SEQ ID NO: 416460 - DNA, 122 bp, Homo sapiens
tcttgagctaaaatcacaatgttagctccaccaaggtaaggactgcatttgcctaacttacggctttatgcacagcaaccagcacgtctacctacacacataggggtcacttaatcatatgt

SEQ ID NO: 416461 - DNA, 122 bp, Homo sapiens
ccagagcccccgagcaaacccagcgcctcacaggagcccgggaatgtttaacatctggggcgccctgctcagcttttacaaggggctccctgtcccttttttcggaggcaaagtcaacaaat

SEQ ID NO: 416462 - DNA, 122 bp, Homo sapiens
cgcaagaacacacagaggttctgcgtgtcacccatgaaaatgtgacagcacccgggaagacgtgggcagcacagacaaacccagcccaaccgagacaccacccagcaggaggcctggcgggg

SEQ ID NO: 416463 - DNA, 122 bp, Homo sapiens
gtcaccgtaccctcagaaccgagggtgcagaagtcacaccggcctgcggctatgcgctggcggagggtcccagagagaagaaggcccggctgcgtggcctccgccgcccagcttgtgtggca

SEQ ID NO: 416464 - DNA, 122 bp, Homo sapiens
cttaaggagtgcattgtaaacaaaacttctgtaccttagtttctctagggagacaaaaaccgtacatagttccttctagaaactgaacagaatagcaagtagtccacagtgggactaaagcc

SEQ ID NO: 416465 - DNA, 122 bp, Homo sapiens
ctcggggccaggccagggcggcaaggatgggggtactgcagtgtgtctacatggctcaaccggagccctgtgtggtggggaccccgggggtctggggcggagaagaccgaggctcggagcct

SEQ ID NO: 416466 - DNA, 122 bp, Homo sapiens
ggcgggggtcgacgcaagccggggccaagagggtcgggctctgagtgaggcccacttacccggccccgggcagcagcggcggcaactcgcgctgcggcttctccagagactcgcgcggaagg

SEQ ID NO: 416467 - DNA, 122 bp, Homo sapiens
tggcaaatcaggggaagagttggagcccagcatttggggacacacacacacacacacagtcgtcttgccttgcagaaattgggttgcattactccagtctgccactgagtggcacctttggg

SEQ ID NO: 416468 - DNA, 122 bp, Homo sapiens
gcgggagccgaggaggaggttccggacgctgcttaggaaccggggactcaggagtgcccgcgccctgagcgctcagctccagaggcggtgagaggggcggagaggagacatgtcgcggggaa

SEQ ID NO: 416469 - DNA, 122 bp, Homo sapiens
gccggccgccgtgcgcctgcgtggcagaagcccctgctgagcatgcgcactggtgtgacccgcgtctcctccgtttgtgaagtctggcgggtcgcgtgtatactcagccgttctctcttcac

SEQ ID NO: 416470 - DNA, 122 bp, Homo sapiens
cccccgactccccggaaaaatacacgtattaaactgcaggagtccccagccctaggaccgcgaactggtacccgtccatggcctgctagaaactggaccacacagcaggaagtgagcggcag

SEQ ID NO: 416471 - DNA, 122 bp, Homo sapiens
taaggtagaccttggcaaggcccctaatggtccgtccagcagagtgatgctcgtgtccctcggctgtcaggtgagcgtgggtttgtgaatcagctttggataggatcatttctcttggattt

SEQ ID NO: 416472 - DNA, 122 bp, Homo sapiens
ggatgctaccacacctgcagaagacaaaaatgtaccaatacgtagtgcactcccaacgctcgaatatgaagaaggacagggccacggatgcactacagtgagccccaatggcttgggaaggc

SEQ ID NO: 416473 - DNA, 122 bp, Homo sapiens
cgtggaattgtcccatgttccacagcacgatacacatttaacacccctcatccaagaccacgcgagggcttccctgctgccccggttccccatgggtcttggtgaatcctcaaatctcattt

SEQ ID NO: 416474 - DNA, 122 bp, Homo sapiens
aagtgagaccctatctcaaaaaataaaagaaaatttgttaaaatggccccaccagattcacgtgaggtaggtcactgtcaaacaccaagagttacttaacagcacaagacatcggccataat

SEQ ID NO: 416475 - DNA, 122 bp, Homo sapiens
cggaagatttattttattaaatggtccacacctgaaagtaattgagtctcggcgtgggtgcggggactgcggagggagggtccaggcgcggcagcggcagtggcggcggctctcagctcctc

SEQ ID NO: 416476 - DNA, 122 bp, Homo sapiens
ggccagcctgctggtggccaacctgctggcccacatgaactactccttctggatcgaggccgtcaatggcgtgtccgacctgagccccgagccccgccgggccgctgtggtcaacatcacca

SEQ ID NO: 416477 - DNA, 122 bp, Homo sapiens
gcactccagcctaggcaacagagcgacaccctgtctcaataatgataataaaaggccgggcgcggtggctgacgcctctaatccaccactttgggaggccgaggagggtggatcacgaggtc

SEQ ID NO: 416478 - DNA, 122 bp, Homo sapiens
gggcttcctgcaaccaggccgggtctccccgggcctcggcgccaggagcggggctgggggcggcgccatggggcctcgcagccccgatcggcggccgccaggtccctggagccgccgcctcc

SEQ ID NO: 416479 - DNA, 122 bp, Homo sapiens
ggaggctatatgatcaaacagcaaattgtttatcatgaatgcaggatgtgggcaaactcacgactgctcctgccaacagaaggtttgctgagggcattcactccatggtgctcattggagtt

SEQ ID NO: 416480 - DNA, 122 bp, Homo sapiens
ccaacggtctctccggatctgggactgctgatctccctgggacaactgccaacagagtgtcgtaggcgcggccctggcaggcagggaggcgcgtccctcaccgctggcccagaggttgcact

SEQ ID NO: 416481 - DNA, 122 bp, Homo sapiens
tgttctgcttacagggggccttgtgtgccgggctctgctttctgtcatggatgatcacaacgtggattctttcatctccctctcctctccacagatgggacagtatggaggtgagtgggcac

SEQ ID NO: 416482 - DNA, 122 bp, Homo sapiens
gcaggtgggatggggctgggagggctggccaagaaccctgtgctcaccaggctgcacctacgtggtgcacagtaggtcttaggcattggacagctatggtccccatgccagaaactgggtgg

SEQ ID NO: 416483 - DNA, 122 bp, Homo sapiens
ttagaagccagaggggctgccccagctgtggagctcgggggctgcgccgggaagggcgggcggtgaccctagccgcgcgcacttctaaagtggaaccctgtattgcatagaacgtccccacc

SEQ ID NO: 416484 - DNA, 122 bp, Homo sapiens
ctctgaagctagctaggaattccttctcggctggtaagcttccggccttctcccaagcggcgcacggcgctcggccagccccctgcccagccctgtctggtcctgcccgccgcccctctgcc

SEQ ID NO: 416485 - DNA, 122 bp, Homo sapiens
cactgagctatgggggcggcgtgggcctgggctgggttcttgccatcctgggcagcttcccggcgtgggtgactgagcccgggtcctggagtccgcggtcccagcgtctccacttctcagct

SEQ ID NO: 416486 - DNA, 122 bp, Homo sapiens
ccgattgcagctggcggggcgaggcctggcagggcgaggcctggcgggggcggggcctggcgggggcggggccggcggcacctgggtgaggtcgctcggccccgccccctcgcacttccgtg

SEQ ID NO: 416487 - DNA, 122 bp, Homo sapiens
gcacagctggactggcctgctctcggctgctccagaaatccccaaaccctgtgggcatcccgtcaccgtggagaccgagtcaaacatccctgggccccgtcctggcctgctgagtcagctcc

SEQ ID NO: 416488 - DNA, 122 bp, Homo sapiens
cggcaggaaagaactcggccttaaagccgatcctgcacgcccgggggtcttccccaaacccggacatgcctccgagtgcagacctggacaaactgctgcactgtagcctgcgaagtgcccgg

SEQ ID NO: 416489 - DNA, 122 bp, Homo sapiens
aaagaggccaaatgctaaaggataaaaactgcatcatttcttttatatacatttcacaaacgaggcaacacttgcagtaaaaaggcagattagtagttaggacagagatatctgattggaaa

SEQ ID NO: 416490 - DNA, 122 bp, Homo sapiens
gcacctgccagggctgagggttttccaaagcttccgcgtttgtctgggacacattctccccgtccccccatccccccatccccccatccccccatccccccatcccacggggacacccgggt

SEQ ID NO: 416491 - DNA, 122 bp, Homo sapiens
ccccggccgcatgcgcagtctgagcgcgcgcggggtagggctcttggcctggggtgggggcgcgggcatcagcagagccaggcggcggtgtcggggcgcgaaggtgcccgtggtgttccggt

SEQ ID NO: 416492 - DNA, 122 bp, Homo sapiens
aagagcagattcaggcgtggatgagagagaaacagaacagcgatcactaaaccgttccgccgcccaccctctgctagacacagccaaggccaacgaggcaagcagaagcagcggccgcagcg

SEQ ID NO: 416493 - DNA, 122 bp, Homo sapiens
cacacacacaacccaaacacacacaacacacacacacaaaatcagctgggtgtcgtggtgcgtgcctgtagtgccagctacttgggtacttgggtggctgaggcgggaggatcacctgaacc

SEQ ID NO: 416494 - DNA, 122 bp, Homo sapiens
catgacctctggtaaactacttaacatttctagctcagttttctcatctgtaaaatgtgtcggcacagaccaagcttcaataaatgtcagctgttattactggtatagaggtgatgggaagc

SEQ ID NO: 416495 - DNA, 122 bp, Homo sapiens
agcccgacagactgaggctcccacctgcctgggttacatatcaggcttctctccgaagctcggctaaggcaacgtgcatccctctagagacgcactccggaaaccagccccgtgtgcggcgg

SEQ ID NO: 416496 - DNA, 122 bp, Homo sapiens
gacgcgggtgttgggctttttcagggcctctggtccccaggagggtgaaactcacggatccgggcagatcctggcacctgggggcttcctccagctcgggctccggcttggggagcggagaa

SEQ ID NO: 416497 - DNA, 122 bp, Homo sapiens
tgaagttgaaattttgtgccccagaacatgagtttcagccactagggtcccgctcagggtcgggtctgatcacagggaagggtacggggagccaaacaggtaatatcacgggtagcagccaa

SEQ ID NO: 416498 - DNA, 122 bp, Homo sapiens
gtgcccacgcgctaggcgaaagtgcgagtcggaagcacttcattccctctcttcgctagccggaagtcgcgagatctgaatgagtcaaagccggcggcctcggctcctcagctccacctgac

SEQ ID NO: 416499 - DNA, 122 bp, Homo sapiens
gaggtagggcctcggcactatgggcggggcctgggcggggttatataagccagcggcgggcggaaggcggggcgtgggggtctgtggctgctgggctggcggggcgcaggccgcgggacccg

SEQ ID NO: 416500 - DNA, 122 bp, Homo sapiens
atcaaactgataggacacagctaaatccctgacacggatgaaaattaaagcagagaaaaacgaaggtccttccagaagctggtggcaacttcactggggagatattgcaaagttagtggtaa

SEQ ID NO: 416501 - DNA, 122 bp, Homo sapiens
acccacagccacgccgccgcagcggagtctgcgcgcccccagccctagaccgccaggccacgcccccgtcacgcgccgccagcggccatgtgccaggccacgcccagccccccatggccacg

SEQ ID NO: 416502 - DNA, 122 bp, Homo sapiens
agggctaccccttcgaaccccacttactgaccaagcaagagcaggagagcgtgcctaactcgaggtccccaggtgggcagcgtggagccccacagacttccaaccagcgatggactgggcaa

SEQ ID NO: 416503 - DNA, 122 bp, Homo sapiens
gggttggcagcagggtctgccgggaacccccttcccacatccactccacccaggccccaccgaaaggtctgctccttctgccggtcggcttcccgcagctcctccacccagtctggggccca

SEQ ID NO: 416504 - DNA, 122 bp, Homo sapiens
ctctcgtccctcaggaaacgtatggactacaagtcccgaaatgcctccggcacttagctacgactgcacgtgcgcgcacagctgcccgccggaagaaccgagcttggctgtgtttatctcgt

SEQ ID NO: 416505 - DNA, 122 bp, Homo sapiens
gagggaggcacgcagttgtggaatttgttcccctttttgcatactgaccagccctggcaacggagctcaaggcatctttgtgccactgctcaacagtgagtgatgtcatgggcacggccagg

SEQ ID NO: 416506 - DNA, 122 bp, Homo sapiens
tgtctcattcatatgggtactctcagcacccaggcattgcagtaattggcacagaataggcgctcaataaacgtctattaattgaatacatacaagagaataagtgaattatacttcctaaa

SEQ ID NO: 416507 - DNA, 122 bp, Homo sapiens
gacacctgacaaattcactggcccaactctatcacgttgcagagccccttagaggtgaagcgaagcgcccaagggcagcaaacactgattgcatcagcccacactgtgtttacctccattgc

SEQ ID NO: 416508 - DNA, 122 bp, Homo sapiens
gcctgggtgaagcctttgggacagggctgtgagggcactcaaggggtaccaggtgggccccggcaggcccaggatctggccttccaaatcacaaaatgacttttggtgttatgtaactccat

SEQ ID NO: 416509 - DNA, 122 bp, Homo sapiens
ttccaactttacctagaaaagaactaaccagaaccttagcacttgtggtcagcctgcttccggctgtggcttcagttagtttgtctgctccgagagaggaagcacttgctgtgacgggaact

SEQ ID NO: 416510 - DNA, 122 bp, Homo sapiens
tggatgggtgcgagggaaggtgtcagattgggctgtggacgctgaaacgtgttggagtcccgatttacacgctggaaaacctaacctaaaacgtgttcctgtccaggtttctatgtcggaga

SEQ ID NO: 416511 - DNA, 122 bp, Homo sapiens
aatcccttgccagtaagaggtaggctacatttaaaataatttctgactgaagaagtcctacgtaccgcttgtcatatacatatgtaaagataatttaaaaccctagggtatacccttttcaa

SEQ ID NO: 416512 - DNA, 122 bp, Homo sapiens
gtcctagtctttaatgtttggcttccaaaagggcaaaacggaaaatggagaggaaaaaggcgctggccctttaagtctcctggcagttgcttcagcctgagggggagggacttgcctgccac

SEQ ID NO: 416513 - DNA, 122 bp, Homo sapiens
ctggtgcacatcagacactgcagaccaccgtgcatcgcagccaagtccaggaaatgaagacgaaagaaaaagcatccattcctgagcttatgccaagtctcaggcactattagttgacaaag

SEQ ID NO: 416514 - DNA, 122 bp, Homo sapiens
ctgaagtgctgtccacgcggtgttcagatggggctctggaggccatgccatgtgatccctcggtgaggaaaggattccctggccagccatggggaatatgaactcctgaagatgaacaagag

SEQ ID NO: 416515 - DNA, 122 bp, Homo sapiens
gcgggagggaggtggcaggtggaatgaaatatcgggcagtttcatgtgcggagctgatgtcgccggcataacaagaaagggttgcacagaacaaatctctattgttccctgtcatctttaaa

SEQ ID NO: 416516 - DNA, 122 bp, Homo sapiens
tccccttgcatggcggcagcggcagcggcgtggagaggatggggtatcttgagaggcaggcgcggttatttccggggacggtggccaaagtaccctcacacccagaggcgatgacagtcctg

SEQ ID NO: 416517 - DNA, 122 bp, Homo sapiens
ctggggacagggattaataaaaattgacatcactgtaggaatatattttttaaaagcccacgttttgtgaaaagatgaattaaaaaacccaagacccagcattcgggattgaaagtgcccgt

SEQ ID NO: 416518 - DNA, 122 bp, Homo sapiens
tgtgttggaaaagtctgggcgggactcactcttcccctttcccccaggtgccactagaagcgccaggctggggccgcctctgagcgccccgcgggggccatggatggtgaaacagcagagga

SEQ ID NO: 416519 - DNA, 122 bp, Homo sapiens
gggctatacttgggccacacagccgggaagctgaggccgcggggcaggtctgcgtggcggcgtcgagtccgagcggggaagcccctttgcgggaactctggggcggggcggggcggggaggt

SEQ ID NO: 416520 - DNA, 122 bp, Homo sapiens
tcaccttgtggagccctttgaactcgtaacgcctgtcccggaaggcacgcacggtgtccacgtagaaggagttttcccgctggcagatggtggtgagacgctcttccaccttggtgatgtgg

SEQ ID NO: 416521 - DNA, 122 bp, Homo sapiens
tggctgccccggcaaatcggagtgtaaagccgccccggattggctgaaacacttcctgagcgattatctttgtgaggctcgggtgagcaagagccatcctgtgcatagaaaaagacaggcta

SEQ ID NO: 416522 - DNA, 122 bp, Homo sapiens
tgcccttgccagacagctgctgtttgaacccagttctgaccgtaaaatcaaaagtgggtccgagggaagcggtaaacactgtgcaatgagccttttgaaggcagctgatgcctcatttgggg

SEQ ID NO: 416523 - DNA, 122 bp, Homo sapiens
tgggaccgctgcatcccagctcttgcaccagctgaggccaaggtgggtgaccttagggttcgaatgtgaatctggctcagggcctggaagaaataactgaccacacatgggaatgaatgggt

SEQ ID NO: 416524 - DNA, 122 bp, Homo sapiens
ttccccccacttcccccccgtcgcagtgccctgctcccattggccttttcgtacattgcccgccctgtcattggctaatccggagcgctcggcccgccccccaggcctggcaactctccggt

SEQ ID NO: 416525 - DNA, 122 bp, Homo sapiens
gtctctccctggtgagagctgagctgtgagcttccggggggcagaggcctcagtgcagggcgaaaatgaccactgctgacatgcggcacagccccgggccgtctggcaacactggggggctt

SEQ ID NO: 416526 - DNA, 122 bp, Homo sapiens
gttcctgaaacatctcaaagtgccttcagcacatcctgtctttttcaggtactatttcagcgaaggaagacattgataggttgaataatgattcacaaaaagtttgattaaacagaaaagtt

SEQ ID NO: 416527 - DNA, 122 bp, Homo sapiens
gctttgcggcgccgcccacaggtggcgctgggtcggcccgtccctgagggaactgcgttccgggtgatttctcagaacaagcaggtcggtggagctgggctccctgcaaccccaaatgcatc

SEQ ID NO: 416528 - DNA, 122 bp, Homo sapiens
gaagctacgtagtttctgggaaacagtgggaagatgagggtttctggaaatctgagggaacgacaaagactaccttacctgggaagatcggcaggagttcccatgggggctcagaggggctg

SEQ ID NO: 416529 - DNA, 122 bp, Homo sapiens
tgctgttggggccacgttggggatacctctgcctaagaagcattctgatgctgccacccacgtggctgcaggctgctggggactgtgggcagcttttggggctgggtggggggtcgtccttg

SEQ ID NO: 416530 - DNA, 122 bp, Homo sapiens
cttctgcctccccctctatcagatcggcttcctccagggccagcacctcttggtgctccgcggcttgaactgctgtaggaatcacgtgaagaagggtaccccctttctacagaagggggaag

SEQ ID NO: 416531 - DNA, 122 bp, Homo sapiens
gccgacagtctttcttctataatacgatacaaactagtaaagattttctttttcccctggcggaaaagagctgttaggcttccagatttgtttttgtgggttattagacctctacttttctt

SEQ ID NO: 416532 - DNA, 122 bp, Homo sapiens
ctgtgagcgttttttctcgcctcacctctaggaaaacaacaaagaaaaagagtaaatgaccggctcctgaatcaggcttcttacatcctttaggcgtgacttgaccccaggcagggggcttg

SEQ ID NO: 416533 - DNA, 122 bp, Homo sapiens
ggcgggcgggagggcgggcacggagaggcgggcgccgaggaggggcaggtagggctgggacgcaggggtaactggatcccccgacttcagcccaggccctggtctgaccaccctgggagcag

SEQ ID NO: 416534 - DNA, 122 bp, Homo sapiens
ttaagttgcatcataaatacctttatcattggagctgccttggccaaaatggcaactgctcgaaagagagcccaaaccattcgtttcagctactttgcacttataggtatgagagatgggaa

SEQ ID NO: 416535 - DNA, 122 bp, Homo sapiens
agccaagagctgagtgcatgtcatccccactctggagcccagagtgtggctttgatcacgcggaggcagctggcctggcctgcaggaaacaccacactctcccctgttgagagcctgggagg

SEQ ID NO: 416536 - DNA, 122 bp, Homo sapiens
gccgggagaagtgccgctgcgtgttccactggtgctgctacgtcagctgccaggagtgcacgcgcgtctacgacgtgcacacctgcaagtaggcaccggccgcggctccccctggacggggc

SEQ ID NO: 416537 - DNA, 122 bp, Homo sapiens
tgcctacaggaggggctgcccggcgctgtggcgtggggatccagggtggggacggccaggcggttcccccacccgctagcgagaacgcgggcggggactctgccgattcgatccttgtgggc

SEQ ID NO: 416538 - DNA, 122 bp, Homo sapiens
tgccgcggtgacctttccgacgcccctgaccccgcatccggaggcggccggaagtgtcgccggcctcctcccggcgcagcctccgggcctccagtgcaatcactacgccctggggcccggaa

SEQ ID NO: 416539 - DNA, 122 bp, Homo sapiens
gacctacctgtacagcttggtgtcaccaccttgatttgtgctcaggcactaacagtttcacgtgaccaccatagatttctgtaccaatatgtaaataatacagtgaaaaaggcaaataacat

SEQ ID NO: 416540 - DNA, 122 bp, Homo sapiens
atatgtagtcaagatttttccaaatgacatgatgagtaagagtttttcttttgcttattgcgaagtatagttggcaaacattatctccaggatgtgagttgcaccgattgacctgcagaggg

SEQ ID NO: 416541 - DNA, 122 bp, Homo sapiens
cgcgggaacgcatctgcactgcgaaagagatgccaggcagaagcccgagactgcccgcagcggcgcttggtcctgtctgtgacccggagggtccgggctgagatctcaggggctcgcttggt

SEQ ID NO: 416542 - DNA, 122 bp, Homo sapiens
gctagtctcgtggggttccgcggtgtcgtcgctggctgtgcgcgtcatttccgggcgtcacgtaacggagtggccaacggcctgcagagcaacatgcccaagtgagtggggccccgaaatct

SEQ ID NO: 416543 - DNA, 122 bp, Homo sapiens
gatccagctagccgggcggtgtggggtgcgcatgcgcaatgtccgcttcggctctaggaccgcgcgggcgacagcagggccgcggtgcagtgtccgacccgagagttgcggcctgagtcacc

SEQ ID NO: 416544 - DNA, 122 bp, Homo sapiens
gccaagtgcgtgggcattgatctacacgcgagtttctccacctctgccgaatggctacttcggggtgggggaggggccctcccgccgtggattgcaaggtgtttagcagcatctgtctcctc

SEQ ID NO: 416545 - DNA, 122 bp, Homo sapiens
tcaacttcttgggtgggttttactgtctctgggagaggaaggatgatgaggaggtgggggcgaagagggggtaaacaagctggaaagaacctagaagatagcaccactttgcatggtgatca

SEQ ID NO: 416546 - DNA, 122 bp, Homo sapiens
gcactgcttttgatagatttgggagacactatctatcagacttgttaaattttacctgttcgttttatttcaaatccttcatttagaactgttgtaaacaagctttttgtagtatccttgga

SEQ ID NO: 416547 - DNA, 122 bp, Homo sapiens
cttgctatttcttggtggctttcctgggttgggtcccagggatggtggatttagcaccgtcgctgtcgccctttctcctgcccatctggaagggctgggaaaagcaggccagggtgtgggca

SEQ ID NO: 416548 - DNA, 122 bp, Homo sapiens
ggcggccggcggcgagcgccgcggcaaggcacccacggactgcgcgtctggacccgcggccgcgggaatcaagaagccaaaggccatgaggaagttgagctttgccgatgaggtgaccacat

SEQ ID NO: 416549 - DNA, 122 bp, Homo sapiens
atccacaaaccgagcactagcacaggctggcacgaaacacagcttaactttcatttcaggcgttgtaggggcctatctctcttgctgacagttacgggtgcagtttaagcacaatctattta

SEQ ID NO: 416550 - DNA, 122 bp, Homo sapiens
gggtccagcacaggcctgggcctggctagggtgcccgatgacattgctggggggatacagcggcaagcgggtgtcagaatggcccctagcccgggccaggcctgtagcgggggcgtgtggcc

SEQ ID NO: 416551 - DNA, 122 bp, Homo sapiens
aagtgtctgagtggctgggcggggccggcaggcacagggaggaggtacagaagccggcaacgcttgctatttattttacaaactggactggctcaggcagggccacggctgggctccagctg

SEQ ID NO: 416552 - DNA, 122 bp, Homo sapiens
tcggtgagtgtgcagtacacgctcaccgaggaaccaccgcccggctgctaccccggggcccgggacctgagccagcgcatccccatcattccagaggatgtggactgtgatctgggcctgcc

SEQ ID NO: 416553 - DNA, 122 bp, Homo sapiens
ccgccagttccctgttcaggagagtgcagccgtgattggcgcgttcactcaggccaggggcgccccaggtctcaggtgctaggagcgcggtgacctaccaccctccgggcacgcgttctggc

SEQ ID NO: 416554 - DNA, 122 bp, Homo sapiens
gtctgctgaccgcacagcagggcccgccagagattcagttctgggtggtgaggggccttgcgaggaccagggccaccgatcgccgcctgcccccgcggaaataggtccaaggccgcgtttcc

SEQ ID NO: 416555 - DNA, 122 bp, Homo sapiens
ccctgcagtggggccaggcggggcggcggctagagtggtgtttcagcagggaccaccaggcggcgctgcagcctcagcctaggagcccggcagagcccaaaggttccgtggttactcccagt

SEQ ID NO: 416556 - DNA, 122 bp, Homo sapiens
cgggaataagcgatggaggggggtcgggccgggaaccgcagggatcctgggtgcgggttgcgattgcaaatgggggcatcgggtaaacctcgctgagtaagtgacatttaagcagcgaccac

SEQ ID NO: 416557 - DNA, 122 bp, Homo sapiens
gagcagtttgctgaggaagaagatgctcccggaggcctccctgctcatcgctatcaaacccgtgtgcccgaaggagctccgggatcaggtgacgatctcagaaatctaccagccccggggat

SEQ ID NO: 416558 - DNA, 122 bp, Homo sapiens
cctgaacttcactgagactccccacagaggggctacagtgcaaaacagagaggtccaccacgtcggtatacatacagtgtaatatcactgttgcatatttttttggtataatggactcatct

SEQ ID NO: 416559 - DNA, 122 bp, Homo sapiens
aaaaatatgatgcgtcattatttctctgccatttgcaaaataaagccagcctgaaggaaacgcacaagggatggtttcttcattcactcagaagacacctgccgtgagacaggcagtgtgca

SEQ ID NO: 416560 - DNA, 122 bp, Homo sapiens
ccgcggtgctgacaggggctccttgtccttcaggggaaatagaagaggaaatggagaacccggaaatggtggacctgcccgagaaactaaagcaccagctgcggcatcgggagctgttcctc

SEQ ID NO: 416561 - DNA, 122 bp, Homo sapiens
gatcatttggtatggctgactgttatctcctccttaaacatcttctaggattttgacctccgtctgccttatttctcacatcatgcactatctctttgtgatctcgttcacattaaggctta

SEQ ID NO: 416562 - DNA, 122 bp, Homo sapiens
ctcagctcctttcaggaacgctccgatggctcccaggtagccttcgtgcctcagaaacagcgcctgcacttccccctgccgtggccaaagcacacgtgctgctgttggccccacacaacacc

SEQ ID NO: 416563 - DNA, 122 bp, Homo sapiens
ccgctccgccccggagggatcctcaggccgggcccagacctaggagccacctggggatcccggggtggctgcgcgccgagggggcgccagcggggacgtgagctggcgccgagacagcctcg

SEQ ID NO: 416564 - DNA, 122 bp, Homo sapiens
atcactctggctgctaagtggagagtagatggcaggggcaagggcaagaagcagagactacgtggaggctaccacaatgtcaggttcacgactgagccaaatgtcatgcttggggtcaggtt

SEQ ID NO: 416565 - DNA, 122 bp, Homo sapiens
aaaaaaaaacaatgcaaaaacaatccctgtgtgcaggatgctgtgctgtcctgcactatgcgagcctggttagaagagctcattagatagcacctttcaatccctccttgttcagaggccca

SEQ ID NO: 416566 - DNA, 122 bp, Homo sapiens
cttccctcacagaccgctcgggcctgctgtgtgtggacaagatcgagaagagtcaggaggcgtacctgctggcgttcgagcactacgtcaaccaccgcaaacacaacattccgcacttctgg

SEQ ID NO: 416567 - DNA, 122 bp, Homo sapiens
aaaaaaaaaaaaaaaaacagcagacccacctgtgtctcagttctgttacctgatttagcacgagttttccctgctctaacaggagaccatatgtccttctcaaggcccacctggataccaag

SEQ ID NO: 416568 - DNA, 122 bp, Homo sapiens
aggcagcggcgcggcgcctttgtggtagcagtggccccgcgcggaggaagttccggtgtccgcggcgctgggtcggtggcggaggctgaggagaaggaggagcgggccgtggaggcttcgcc

SEQ ID NO: 416569 - DNA, 122 bp, Homo sapiens
agagcccgcggccgtcccgcctcccgccggcgctcccggcctttcccatccggcccgcgacgctccgcccgccccgtcccacatgacgccgcctccgccgcaaactttttcctccccatcct

SEQ ID NO: 416570 - DNA, 122 bp, Homo sapiens
ttttaagttgggtgataaagtagatataacctgagatgatagatttaaacaggatatttacgttctgctacaattgactgataacacttgaagtgtagtctgaacagtaattttgttaatca

SEQ ID NO: 416571 - DNA, 122 bp, Homo sapiens
agatgtgattgtgatccagatagagccacgtgagctgcattaaccccgtgaactggccggcgcgcagctccgagaggctgttgtagcgcagggacaagcccagcaggccggacaggttgtgg

SEQ ID NO: 416572 - DNA, 122 bp, Homo sapiens
tgatatgaaagagctttggttaactggtttaaaaataagtgcttatatcaaatattttgtcggaaaagtaaaaagtataatgcctttaatttatgtgatttaagtaatctttgagaaattga

SEQ ID NO: 416573 - DNA, 122 bp, Homo sapiens
ctcacggtgcctccctccgcaggcagtgatggagaacatgcggcggaagtgcaagtgccacggcacgtcaggcagctgccagctcaagacgtgctggcaggtgacgcccgagttccgcaccg

SEQ ID NO: 416574 - DNA, 122 bp, Homo sapiens
ccagaaaagtgaataaaccacaaatggttgatttatttctgactctcagcccgtctctcacgaagacagagcctattgaccaaaaacttcaggatctgcatctgagcagatcccaggaaggg

SEQ ID NO: 416575 - DNA, 122 bp, Homo sapiens
gcctcccactttacatatgaggaaacctggggtgacttgcacacggcttggcagctgggacgtggatagggaatgtacacccaggcagtctggctcccgggctcctgctagaggatcctaca

SEQ ID NO: 416576 - DNA, 122 bp, Homo sapiens
cagaggaggaatacaagcaccagctctttctttgagaacatgggtggctcttaaaagagccgttagggttgagagtttgcaaccaactcactgtttacttagcgctggtgtacttggtgacg

SEQ ID NO: 416577 - DNA, 122 bp, Homo sapiens
ccggccctcacccgccccacgccgctcagctggctccccggcccgcgccgccaagggtcccgtgcccccagcagctgctccagccccaggtccccccgctgtccccgcggggctggccttgt

SEQ ID NO: 416578 - DNA, 122 bp, Homo sapiens
caagtgctacgcggaggattagagcaggcggtgcgctgggggcgggagcagcgcggagcccggctcggccacaccgatcgcccgccgccatgggctcctcgcaaagcgtcgagatcccgggc

SEQ ID NO: 416579 - DNA, 122 bp, Homo sapiens
atttacactctaggactctaggtcatagagtatttgttaaatcaacttggggagggctcacgaagaaagaaagcagcaagacaactgagagatctcgtaacacccgctcctccccacccaat

SEQ ID NO: 416580 - DNA, 122 bp, Homo sapiens
gctgaaggctctgttccatattttctcactcaaggactcaggctgatggagccactaccacgtggtgtgcttttacttctgggaagcgaaatgagagaacatggtgaactgcagaccgtctc

SEQ ID NO: 416581 - DNA, 122 bp, Homo sapiens
ggacttcagagtacccagtccagacttctgggcctccctgtgaagttggctgtcaccctacgggtgcaaggagtcatcagaattgactgagagagacagacaggctgttctgcgcatcccca

SEQ ID NO: 416582 - DNA, 122 bp, Homo sapiens
tgggagattcatgactagcggtgacaagcctaccaagcctggtgatagttggttgtccaacgtggaatcttagttcaactttaaacttacccacagaattatttactctccctgtaaattta

SEQ ID NO: 416583 - DNA, 122 bp, Homo sapiens
ggacagaaaccttatatcccaggcaaagccttagcaatgctgctgatgtcatatgctcatcgttgtcaagaattgaaaattaagatagtgatgaggtggtggcaggacaaatttcttctttt

SEQ ID NO: 416584 - DNA, 122 bp, Homo sapiens
gtccgcaggccgtgctgcctgcccgaggacaggtgttccaggatgcggtccctccgcacgcgcacgggcagctcgcaggccctgcagtaaagggtctccaccacagacgtgtccccagagtc

SEQ ID NO: 416585 - DNA, 122 bp, Homo sapiens
gcgtgctcaggccccgctgagcggtcccggctccgctcgcgccctgtggggtccacggcgcgctcttccagagcctttgggacccgtgcccgctcgcgtcctcaagtgcacgcgccgtcccg

SEQ ID NO: 416586 - DNA, 122 bp, Homo sapiens
atgcagcacccaggcctggattccagctagcagtatcagccttctctcactttcgggcagcgacaccgctggtgtagaccgtctcaggtgcgtcttcgttcagctctactgtcctcagcccc

SEQ ID NO: 416587 - DNA, 122 bp, Homo sapiens
aaaagcatgaaaatacaggtttttagcatgcacacccagttggaaaaggacttgctcctccggaaacaccattcattcgctttggcagagctgagagcacctgtgcatgtgaacaagcaggt

SEQ ID NO: 416588 - DNA, 122 bp, Homo sapiens
tacagaatacaaacgaactggatagaactggcctgcagtgtgagacatctatgaagagcacgtagatcgctcagaactgtgcccggcgcgtgttctcattccagcctcagtcctgtgaggct

SEQ ID NO: 416589 - DNA, 122 bp, Homo sapiens
aatgtactctataaggaaaacaagattcaattgtaaaggccagagggaatattaaggaaacggactcagttaacaatttgaaaggcaatatgctaagtaccttaatgttgtactttttgtat

SEQ ID NO: 416590 - DNA, 122 bp, Homo sapiens
gatgggtgatggaggcgagtgggaggtgcccgatgacaggtcttggtgcaggcagctgcacgctgaagacgcagaagagagtgggttctgcgagggtggccagaatgtggcggcgggacggg

SEQ ID NO: 416591 - DNA, 122 bp, Homo sapiens
cataggttactgctataatctccttctggtctcaccagccccaggctgcttccttgtgatcgcttctctactctggctgctgggtcttctttctaaatcctgatgtgaccacataactcccc

SEQ ID NO: 416592 - DNA, 122 bp, Homo sapiens
gcggagctcgcagaccaggcagcagtagggtttctcaccagtgtggacgacctaggggtgcgggaggaagggcacaacgtcagggctgagaacctagcccggacaacggattcctggactcc

SEQ ID NO: 416593 - DNA, 122 bp, Homo sapiens
ggatcagtttacagcacaaagcagccccaccgcggagggagagttccccagggcccagaacgagcacttggcagacagcagaggctcagagattgtggagtgagcagagcgaacatggagcc

SEQ ID NO: 416594 - DNA, 122 bp, Homo sapiens
ggtgaacttcagttgtcccttcccttccagggacgctgagctggccagctgggagtgtcacgatgttttccaaaggaagaagaaaagaagaagaatgtgaagtctgttcagaaaacgcgaga

SEQ ID NO: 416595 - DNA, 122 bp, Homo sapiens
cactaattgaaatgaaaagcctgtgctttttctcttcgaatttctcattctaggtaactacgactaagataccttgcatgttggattctacccatcttttcaataaaaagcattcttttaaa

SEQ ID NO: 416596 - DNA, 122 bp, Homo sapiens
gctgcttcctatattgtttaaaatgcgtgttctggcccctgaattctcctagcgtgaaatcgccgttcgtgggcccacggctgcaccccgagatagaagcggaataaagggacgacgttacc

SEQ ID NO: 416597 - DNA, 122 bp, Homo sapiens
agcggcgtcagcactctcctgagaactgcctatttcgggttgggtttctttggactggtgcggggttgactctggatgatgaattatcatgaaggctgtggccagatttttcacggcggttt

SEQ ID NO: 416598 - DNA, 122 bp, Homo sapiens
tcgttcttagctggcgtgtgctcactgaattaggaggcacacgatgtcgttcttagctggcgtgtgctcactgaattaggaggcacacgatgtcgtcgttcttagctggcgtgtgctcactg

SEQ ID NO: 416599 - DNA, 122 bp, Homo sapiens
ggggcagggatggtgagaccacgggcgttcctgcattatcctggtggcccgctacaatcacgcgggtcttcacacgtcagaaagggaggcaggaaagtcggctagagatccgaagatgtgcg

SEQ ID NO: 416600 - DNA, 122 bp, Homo sapiens
gctgccttgagaaagtgaaaagtccttgatctgtacgcaggggttgggacttaggaaacccgctgagggtgagaagggcgcagatggagaggggagactcctccctgggtgcaggtaaatcc

SEQ ID NO: 416601 - DNA, 122 bp, Homo sapiens
acagtgtgcttcagcccagggagtccgttttggacatcgcatctccggacggatatagatcgctttagacacccagtgtgtggtcaccggcacggcaggggtagacacaggtgcagctcaca

SEQ ID NO: 416602 - DNA, 122 bp, Homo sapiens
ccagggagaggttacagaggagggagtcagtccttctctgagggtcgtaggtgagaaggacgtcttgacctaacgaaccagaaagatgaccagccacctattggatgctgaactcctattgc

SEQ ID NO: 416603 - DNA, 122 bp, Homo sapiens
gctagccagcgagcgacgcggggacagagggagggagaggggaggggccgggcctcaggccgcggtcggcgccccccgcccgccccctccggacaataagctgccttttaaagggccactcc

SEQ ID NO: 416604 - DNA, 122 bp, Homo sapiens
tagaagtccagggtgagaaattggttccgaactcaaaggaacccagtgccgggccacagccgggtcacgtggccggcggccccccatgacgtgctggctgcggggcgtcacggcgacgttcg

SEQ ID NO: 416605 - DNA, 122 bp, Homo sapiens
tgcggtccaaaggtagatctggtgtatggctaagttcaggctctcaaatcccttcagctccgaaacagacttagaaagtagaacccaatggggttggttccagaaagctgcgactgcggggg

SEQ ID NO: 416606 - DNA, 122 bp, Homo sapiens
gccctgtacccaggtgctctgggccggcccccacccatgcccccaatgaactttgatccccgatggatgatgattcctccttatgtggacccccggctcctccagggtcgtccccctctaga

SEQ ID NO: 416607 - DNA, 122 bp, Homo sapiens
ccgtcggaccctgagcaggagacgcgaaccaacatgctgctggagctcgcaaggtgggtgcgcggggcttggggatagggtccaaccagcaggtttctgggctggggctggctggagaaggc

SEQ ID NO: 416608 - DNA, 122 bp, Homo sapiens
aatcgggccaagaaagcaggtgagctggggcccgctgctgggtcacggccaggtcacagacgttggtcacatatactgacctctgacacccttagggaagtcagtgggagtggtaaccacca

SEQ ID NO: 416609 - DNA, 122 bp, Homo sapiens
actcgctggtatataagtcggcgtggcgccgcggtgggtgttgagaggcccgcgaactgacgggccagtgagcgggcgtcgggagtgggcggatgcgttggggttcgggtcgtgggtgttga

SEQ ID NO: 416610 - DNA, 122 bp, Homo sapiens
ggagatggaggccaacggtgtggaagtgggtaagcccctgagcatgaccaggccttgccccgggcgggcgggggggaccctgggcccagcccctctccatctttttttttttttttttcaag

SEQ ID NO: 416611 - DNA, 122 bp, Homo sapiens
gtctcatgcggaaagtccaagtcctaaccgactccagtgaccaatccaggaggggccgggcgccagggggccacaccccgcaaaggcagctctctgggatcccggaccccagacctcgatct

SEQ ID NO: 416612 - DNA, 122 bp, Homo sapiens
gggcggccgcagagggcagagctatcgatgcgttccgcgctcgattcttcttcagacgggcgtacgagagggagcggctgagggcggtgtgggaagagggaagagggggaggcagcgagcgc

SEQ ID NO: 416613 - DNA, 122 bp, Homo sapiens
gggctaccgttctgaattcatgtgcaccgactgcgtcccctgagctacgcctgcattcaccgcactgattcaagacagccgcatccattcaccaggctctgtgtcatcaacatcaccctgtg

SEQ ID NO: 416614 - DNA, 122 bp, Homo sapiens
gaggaggaaggctccgaatccgaatgtgagtcccgggggggttcaggacgccggggttcacgctggcccgagagcccccaaggccccagcttttcacagccctcccggctcccagacgcccc

SEQ ID NO: 416615 - DNA, 122 bp, Homo sapiens
gggctcttctcctttcccttttattttttttcttgagatccatcgccgtcttcagctcaccggttcttcacagcagctccggaggtgcccagtttccccgctctgtaccaggcgtgtggagg

SEQ ID NO: 416616 - DNA, 122 bp, Homo sapiens
ccggcacggcccaggtgcacaggcagccgccccagccttttccactcccagggaattacgcggcaaagaacaaataggaaccctgtggcttcctgctgggcccacgtgaacagccttggaga

SEQ ID NO: 416617 - DNA, 122 bp, Homo sapiens
ccggtggccatgcaggaggggcagtccggtggctgggcaggaggggtggtccggtggctgcgcaggagggttggtcgagcggccgcgcaggagggatggtggagtggccgcgcaggatgcct

SEQ ID NO: 416618 - DNA, 122 bp, Homo sapiens
gtgtagctcttcctagggccccctcccctttccgggccgcgcgtccgccccgcatcgcggcggctcctcggcagtgtttgtttttattggacgcacagtgaccgtgacgggcacggggcgcg

SEQ ID NO: 416619 - DNA, 122 bp, Homo sapiens
gctcagggaagacaaaccagctcctgtcccactcctccatcctggggacccccacccccacgctagactggggtctgcccacaggcctgcctactttccccagctgaggagaggacaggtca

SEQ ID NO: 416620 - DNA, 122 bp, Homo sapiens
ggcgggcctccgagcagtgccctgtcccagccacagccttgcttcttttgatcctcatcacgaccgctctccgggccaggccgtgggtgaggcccccaggccttcaggggagaagccggggt

SEQ ID NO: 416621 - DNA, 122 bp, Homo sapiens
cagctctgcacagccggggctggggaagggccgcgtggctgcccagagcccaccctcacccgcctcagccgaggccctgctgccagccctgcccctgaggaatttcccacagcgggccagct

SEQ ID NO: 416622 - DNA, 122 bp, Homo sapiens
ccttatgagcacagagcaaaatgtcctcattttacctggtttaattttttttttcttccacggcctcttttactgggagacctctgagttttgatgtgtcatgacagataggagaggtcata

SEQ ID NO: 416623 - DNA, 122 bp, Homo sapiens
cagcgctggagggcggagcgggcggcagacccggagcagcatgtggactctcgggcgccgcgcagtagccggcctcctggcgtcacccagcccagcccaggcccagaccctcacccgggtcc

SEQ ID NO: 416624 - DNA, 122 bp, Homo sapiens
ggcctgagccttctctccaagcagaactaagcaaggatcttgtgtgcactccaccttacacgccccatcagccaggaggctgtgccttcctcttcagcctccatgagcccttccagacccat

SEQ ID NO: 416625 - DNA, 122 bp, Homo sapiens
ggtgacattctggatcagcagggatgcattggaatatactgtttctcgtccactgtatgccggtccatatataattatttgaccgtctactacatatgatgtaatgtaatggtagaggtccc

SEQ ID NO: 416626 - DNA, 122 bp, Homo sapiens
ccttcctaatttggtgtgcattcgcctcgccagtcctcattggccgtggagtggctggctcggtgtaggccgggctcgcccagggcccctcattcccaggagtcgggagtggcttgggagcg

SEQ ID NO: 416627 - DNA, 122 bp, Homo sapiens
ccagtctggaaggtggggagcgtctctgcccagccaccatcccatctgggaagtggggagcgcctcttcccagccgccctcacatctgggaagtgaggagcgtctctgcccggccgcccatt

SEQ ID NO: 416628 - DNA, 122 bp, Homo sapiens
ctcaaaccctctatatgaaaagaatggctccaaagcctgtctcattcctggggctccacccggggccctcacagcagttacaagcgcccccataacagatgaggagggtgtactcagagaca

SEQ ID NO: 416629 - DNA, 122 bp, Homo sapiens
acctcaggtgatccaaccgcctcggcctcccaaagtgctgggattacaggtgtgagccaccgctcccggccttgcacaccatcttaagtgtgacgccacactgcccttcacagccttggggc

SEQ ID NO: 416630 - DNA, 122 bp, Homo sapiens
cctgcgagctgagtccccgctgcgcgtcttcaggcctttgtaagttgtcaaatttcccaccggcccagctcatcgagcttcttcccagctgtgaacaggagggcctgttccctaattcttgc

SEQ ID NO: 416631 - DNA, 122 bp, Homo sapiens
ccactggtgagggcgtggggagcagggggtggcagagggcacccgggcggtagtccgggacgcgcaaggcagagccctgacgctccgggtccccgtgcctggctcttcttgcctcgccaccg

SEQ ID NO: 416632 - DNA, 122 bp, Homo sapiens
ccgcgggcagccggagcctgcctggggtggacgtcagagatgagagtgtcctggcccgcccgtgcccttagtcaaggcccagcttggtggtttggagatcccaggactaaaggaaatagcca

SEQ ID NO: 416633 - DNA, 122 bp, Homo sapiens
aaaagcatgaaggaattagaaatctaagccagaacccatgcctattaatgtagttgtcttcgtgttaaaatgagtaaaacataaactgaagcactgaggtaagaggaatattagttgtaact

SEQ ID NO: 416634 - DNA, 122 bp, Homo sapiens
cagtccccatctggtccaggtgacactcaccattcatctgggagggtgacagcgagtagtcgcggtcggtgtgccgcctgtctggcttcaagttgcggctctgtcggccggaaccctccagc

SEQ ID NO: 416635 - DNA, 122 bp, Homo sapiens
cgcgcctggctgaagagaggtatcattaaggacgagacccccttggccagggaagccctgcgtaagcaacgcccctctcttcaaagggatgccccgctccctccgcccactcccagccttcc

SEQ ID NO: 416636 - DNA, 122 bp, Homo sapiens
ctccggctgtttcactgcggacggctggggctgctgcgcgttaccttgctgcaagcggggcgccttccacctggctgggggtctgcgccacagtttggtccagaggagggaggaggaaggga

SEQ ID NO: 416637 - DNA, 122 bp, Homo sapiens
ctccccgcccccccccaggacgtttgccaccgtctgtggaaacatttgtggttgtcactccggagaaggggtggtcctggcatctggtaggtaggggccagggggctggtaaatgtcctgca

SEQ ID NO: 416638 - DNA, 122 bp, Homo sapiens
cgattaggttgggaagcctgcgtttagggtggggcacctgcgattaggttgggaagcctgcgattaggttgggaagcctgcgattagggtggcactttcgagcgctctggtgtgaatttcac

SEQ ID NO: 416639 - DNA, 122 bp, Homo sapiens
gcagatgggacaccgtgtgcagggccgtcatggtagtaggggccgcctgccctcgggagacgcacgcgtgaatgcggagcgggctgagccagtcggcgccggcgcgggcggtccaggcggag

SEQ ID NO: 416640 - DNA, 122 bp, Homo sapiens
ctgccccacacattcccgaggacctgagcgtgtttaaacagggcgtgtgtcacatcaaggcggaggatgggagagcgggtggctgctcgcttctgccacatttagccccatgagggtctgca

SEQ ID NO: 416641 - DNA, 122 bp, Homo sapiens
gcacatccctgaatggccgcagggcaggcgaaggagactgccgggtcccaggttgtgggacgggcccaggcgaccgtgaccacacacggcagacaccccgcctccatgaggggcaacacccc

SEQ ID NO: 416642 - DNA, 122 bp, Homo sapiens
gcatgaggtttctcatgcttgtggttggttaagtaatacaatacagcccaggttcctgaccgggcctccaccaaagtaaggtctgggttgggatccaagggacaaatgatgtcgagggaact

SEQ ID NO: 416643 - DNA, 122 bp, Homo sapiens
agagggaactcagcaggacagtgaggtgaccttcgctgtggctgttcctggggactctgccgccacctcttcccctaacgcctccgcgtgtgaatcctctggcaccaccacttgccccatat

SEQ ID NO: 416644 - DNA, 122 bp, Homo sapiens
ccaggctccattaggggtgtccagcgccttcttttgccctaggcagcgccctgaagaacgcgtcggggcctcggttcgcggacttgaggagtggaccgaccgagcgctgtgcgtaaaaggac

SEQ ID NO: 416645 - DNA, 122 bp, Homo sapiens
aaatgtcccggaaagtcttactggcaggcaagtttgagaaacatggttctagggtttcctcggtccccacgcttattccccgcgggcagctcaccgctcgcgggacagtccggtagctaact

SEQ ID NO: 416646 - DNA, 122 bp, Homo sapiens
tcctgcttgcaggcctccaccccgtctcctaacatcccatcttaggccctatgaccgggccgtcacttggtccatctgagttggtacaatgaaagatacatggcagacagccccaagaggga

SEQ ID NO: 416647 - DNA, 122 bp, Homo sapiens
aagtcggccagacctcccttcgtgccacttcgactttcaataacagtggccgctaggtgacgcccgaagacaaccgatgcttgcaagtgtgtgcacggaaaagaagcgaacaaaggatctct

SEQ ID NO: 416648 - DNA, 122 bp, Homo sapiens
ctcagccatgaaaaggagtgaggctctgacccaggccacggtggggatgcaccttgaggacgccatgctcagtgagagacgcgacacaaaaggccacactgtatgaccccgtttctttcttt

SEQ ID NO: 416649 - DNA, 122 bp, Homo sapiens
ctgacctctatcacgtgcttgttatatgttaggcatgatatgccagctccttttattcggcgtagcaatctctgaagtaggtgctatccccatcgtacagtggaggaaacgaggcttggaga

SEQ ID NO: 416650 - DNA, 122 bp, Homo sapiens
gccggttctgaaaccaaatcttgatctgtctttccgtgaggcagagcgtgtgcgcgatctcgatgcgccgccgccgcgtcaggtagcgattgtagtgaaattctttctccagctccagggtc

SEQ ID NO: 416651 - DNA, 122 bp, Homo sapiens
gcaggggacggcagggtggcctcatgagtgctttacgaggcccaaacaggaagcacccagcgcaggcccgacaggcccacagcactccggaactgtccgtggaccccgcgtgggagtccggg

SEQ ID NO: 416652 - DNA, 122 bp, Homo sapiens
ggagcgggcgtgcgtgtgtgtgcgagtgcgaatgcgagggaggccggccttgagtgaaaccggagctacaaagaaggggagagtccgggagcgggagggcgcgagggaggagcggcggcgcc

SEQ ID NO: 416653 - DNA, 122 bp, Homo sapiens
ctgcctcctggctgggccctacacaagccatgctctccctggcagacgaagctgccttcccggtccaaagttctgaacccggacaggactcctctgcggaggataccggcctgtggtcagag

SEQ ID NO: 416654 - DNA, 122 bp, Homo sapiens
aaaatgtcaggccacatacctgtgaaatgttaaccctacaaggaataaacagaaacagaacggcctttatcctctgaaaagaatatatgtcatatatatatgtcaccaaaccgaacaagtga

SEQ ID NO: 416655 - DNA, 122 bp, Homo sapiens
tcacagtggctgcaggaaggctcctttttccccaaggtcccccttatggggtataagcctcgtcccagtctcaggaagccagctttgttgtcctccactgatgtggcagtccccacatttcc

SEQ ID NO: 416656 - DNA, 122 bp, Homo sapiens
caggatcggagctgtgggccaggctgtgtccaggacggcgtggtcggccctttggctggccgtggttgctccaggtggctattttgggtttctgtgttgcgttctctccagagcttctggca

SEQ ID NO: 416657 - DNA, 122 bp, Homo sapiens
tgaaagaggtctgctgtgtatgctgcagccaataatagcggccgaaggaagtgacgtttgcggaagtaaggcttccgtcggaaaagctcgataattacccagcctaaccatttctcaggtgc

SEQ ID NO: 416658 - DNA, 122 bp, Homo sapiens
ccgcccgggagggtcttctcgctctagagccgggggcccgcgctgagagatcggggttaccgcgcggggagccgcggccgcgctgggatccgttccctctcgcgggagccgccggccgggga

SEQ ID NO: 416659 - DNA, 122 bp, Homo sapiens
ttcttcagaagagtcccccgagtccccactgccattcttaaacatgtatacgtggctggtcggagtcccacacacaacagctgggccttggaaggtcttggttaacaattcctcgtgcctca

SEQ ID NO: 416660 - DNA, 122 bp, Homo sapiens
attttattggctgaaactcagcaattggtacaagaataggttacagcttgtttacacgtccggagattaccattcactatgtacagagaaacctttaggccaaactttaaaaatgtaacgag

SEQ ID NO: 416661 - DNA, 122 bp, Homo sapiens
gacctttgggaagggtagcagcctaagccaattcataagtgtggggctggctaagtagatcgacgtggctatttctgagctatcgtcccaggcaaaaggtttcttatttgggtgtccagccc

SEQ ID NO: 416662 - DNA, 122 bp, Homo sapiens
ttgtcaaggattcataggagccctcacagactctgccttaccaaacatgtaaaaagtaaacgtggctggaagaacacacaccaaaagatcaacagcgattactccggggaggtaagcaggat

SEQ ID NO: 416663 - DNA, 122 bp, Homo sapiens
cggttgccggggcgccagggccctggggccttcttggcattcgctggaggttgtgagttacgaggcccggatgttgatcttttattactagcaacactggacccctgactcgtgcccacgcg

SEQ ID NO: 416664 - DNA, 122 bp, Homo sapiens
ggtcccgagccctgccccgaggggaggcagctaaggcccggtgagaaatagagcgcagcgcgggtcggcccgcactgctggaggacccagtacaccctctgcagctgctggcctgggtgcta

SEQ ID NO: 416665 - DNA, 122 bp, Homo sapiens
ccagccagacttgcccatctccaagattgatcagtggctggaacaatacacccaggccatcgaggtatgacctggctcccctctgctgtcaggtccctcctgcatcctggcaccattccttc

SEQ ID NO: 416666 - DNA, 122 bp, Homo sapiens
agtaaggaccttacctgggataaggtgagctctcataggtttgggaggttacccagcgggcgacccagtgtggacagaagaaggtgcttttcaaggccacccaactcttattctgtactact

SEQ ID NO: 416667 - DNA, 122 bp, Homo sapiens
acctcagcagtcagtctctagcagtaccagtagcaggcaacacttgtagcgtggatgtggcggcaacaacaatgggaatgtgggctcccagattttttagtgtcctcaggagtaggagctgt

SEQ ID NO: 416668 - DNA, 122 bp, Homo sapiens
cttaattccaaaattaagggattctttttcatttcgctttttacatgatatcgagaggtacgtgattgttgttccctccaaaattagcattcaaccagtggtgcttttggttttttcccgtt

SEQ ID NO: 416669 - DNA, 122 bp, Homo sapiens
tctgtcctgaggctggcagggcggctgcagccttgaatcttggacatactgccctacctccgccctctgcttagacccacagctgtgtgagctttgagtagtagcctcctcccaacaaatgc

SEQ ID NO: 416670 - DNA, 122 bp, Homo sapiens
tatgatagaggctatgattcccggataggcagtggcagaagagcatttggcagtgggtatcgcagggatgatgactacagagaaggcagggactgctatgaagaccaatatgacagacggga

SEQ ID NO: 416671 - DNA, 122 bp, Homo sapiens
caactgagctgtaaatactgtttaaccttctcccccctccccccgccaccccctcccctccgcactataaaaacacaaatatgccataactcagccgcccggccgcccagcctccaacatgc

SEQ ID NO: 416672 - DNA, 122 bp, Homo sapiens
acaaagtcccacaatacctcgcttcgtcactgccaaatcagactcagggtgagacgcttccgcccggatgaaggtattgtcggggtgatagtccttgcttccggaaaggcgagctgagcatt

SEQ ID NO: 416673 - DNA, 122 bp, Homo sapiens
tttcattcatgcattcaacaaatattttactgaatggctaccctgactgggtatccagcacggtagtgtctatacggtggcctagtggataccttttttgggtctatctagcattcattccc

SEQ ID NO: 416674 - DNA, 122 bp, Homo sapiens
cagaaaagattgctgctacatacattaggatgttaactgggtacactgatcacagggcttcgataacccaagtaagtggcaaggtgttgatacacttgcagaatatcaactgagcctagccg

SEQ ID NO: 416675 - DNA, 122 bp, Homo sapiens
tacatgtaggaccttcacaacttcatgcactcagaaacatgcatgaagaggaggagaggacggcccagggtcaccatccaggtgccttgagaacagagaatgcagaagtggcactgttgaaa

SEQ ID NO: 416676 - DNA, 122 bp, Homo sapiens
cgccaccaacgcgcccttcagctgctcccttgtcctctacccccatgtacctgtttcctgcgctgccacgtgctccttgccccgtgacccctgttcctgcttggccctcactcacctcactc

SEQ ID NO: 416677 - DNA, 122 bp, Homo sapiens
cccctctgccgccgccgcgccgccgccgcccgagccacagcagcagctgccgcagctgcccgcccgccgagagccatcccgagccataagaggctccatgtgaccggctgacatcacggccg

SEQ ID NO: 416678 - DNA, 122 bp, Homo sapiens
cgacttctgggcccgcctccatggccaggtcccgggactgctggactgggacatggggaacgagctctttctggccttcaccacatctcacctccccttagcggagcagaaacgtgagtagc

SEQ ID NO: 416679 - DNA, 122 bp, Homo sapiens
aggcggggagctggggacccgggacagccccaccccctgcatgtggaggtagctcagggtcggggcgcgtcccgcaactcacccacaaaccgcaccgtacgccgcaggaaggagttgaagtt

SEQ ID NO: 416680 - DNA, 122 bp, Homo sapiens
cgtttggaccaaccccgacctccctttctcagggtatctgctgagagggccgcaaccacacgtccttctgtctgttcccgatgtctgtgcatttcctgtgacccaggagggtctttctcggg

SEQ ID NO: 416681 - DNA, 122 bp, Homo sapiens
ccagggcaggcccacagcccatctggaccggggagtctcctaggccagagcccttggggccgaatggagctccgaagggtggggcccaggatcccggagccacccctgccgagggcctcctg

SEQ ID NO: 416682 - DNA, 122 bp, Homo sapiens
ttcatcattgttccctcctcttcctcgtcttcccgcctcatcatgtcacctcttctacagcgttctttatgatgtgcttagatgtgagccaaaagcttatttgaaccacaagattaaatata

SEQ ID NO: 416683 - DNA, 122 bp, Homo sapiens
tatcgataggtactaatgtattgctatgtctgaatgcctgcgttccccaaattcatgtgtcgaagtccttgcccccagtgtgagggtgttaggacgtgaggccttcggaaggtgattagttc

SEQ ID NO: 416684 - DNA, 122 bp, Homo sapiens
tttctgcttttcccagaaagctggagctcagtatgaagcaatgtgcttcatctctgagaacgctgctctccttgggtgagaagaacaggattttccagcttgacagtaaataactttctgac

SEQ ID NO: 416685 - DNA, 122 bp, Homo sapiens
catagacaaaagagatgctggtaaatttgggatgtaattggaggattggaccggtctccccgctccctcgaccaatggctgtcacgcggtccctttaagaaaccaggaatccgcccggagtc

SEQ ID NO: 416686 - DNA, 122 bp, Homo sapiens
ggagacacgcgagtgccgcagaagcgggagaaagacttcaggccttctttgcgtagcacgcgtcggggttctaagtggattaggcaccaagaacacaaaactgggttctggtctctaatcgt

SEQ ID NO: 416687 - DNA, 122 bp, Homo sapiens
ctcgctgggctgcgcgtacaggatgacagcctctttctggttatgcataatgtgcacgtacgtctccttgtaattccagctgtgcacattgaggctgaagaagtagatgccacgcaggggag

SEQ ID NO: 416688 - DNA, 122 bp, Homo sapiens
ttcagcttctctctgaatgtggataagctcttaacggagtgatctttccagtggttctttcgtgggaggtaaaatggcaggtgaatttgggccttgttatacgtaggccagagcaaatagct

SEQ ID NO: 416689 - DNA, 122 bp, Homo sapiens
tggccgccccacggccaggcaaagcaggttcacattacctccctcattcaccatcacaggcgacgagatgttcacaacgcgggcagggacgtggacaatgaggtagacctgagtggtgtacg

SEQ ID NO: 416690 - DNA, 122 bp, Homo sapiens
gcctagaggtaaattggaaggaaaaaaccttttccatacctgtctgctctggcatttcaccgcagtgctgcaggttgccacctgccacacatcagtttacagaagtgtttggtgttttcctg

SEQ ID NO: 416691 - DNA, 122 bp, Homo sapiens
tctctctgccccgggccacgtggttgcgggtggggcccaccggagtctcatcttggactgcgtgctccgcatccctggctggctggtgacggtgtggggaggctgctggggggcttttgggg

SEQ ID NO: 416692 - DNA, 122 bp, Homo sapiens
accccagagatgggcgatccagatgaagcagagtaatctcagccttgggagctgagacagcgagagaaaaaggaacaagcccaggcttctgtcctgcatgtgtgcagttttgagtgtgaggg

SEQ ID NO: 416693 - DNA, 122 bp, Homo sapiens
ttctccttccgtccagggcaccctcttatcaggccatggccctgagacgcgtagtgcagacgcccccggcgctgaggctgaggaggcagatggcccctccccgcactgtgcagggcacccgg

SEQ ID NO: 416694 - DNA, 122 bp, Homo sapiens
gggccgcctacctgccctgcagccttgggggactcgggcgactgaggtggctgtcctggacggggcacgctagggtgggcggcacctatcggaggggaacagcaggcaacctgtatcgctct

SEQ ID NO: 416695 - DNA, 122 bp, Homo sapiens
tcgatgcttcatgctgatgtgttgaaaacatttaaaaaatttctcagagtttgatttccacgggaacattgtggcatgtgtctcagtgtctacagttgttatttttcacgaatgcagccgac

SEQ ID NO: 416696 - DNA, 122 bp, Homo sapiens
gggttaggggccgggccgagagggacggcagcggggtccggggcgggggtggggaccgagcgcagcgcgtgacgcggcggcggggcccagcgacaacgaagccgaggccgtaggctcgggcc

SEQ ID NO: 416697 - DNA, 122 bp, Homo sapiens
ccaggaagctctgagagtgggactggaaggtaactgaataaaaccggtgacggggagttacgacgaagcaactaagggcactgctgttgccgacagaatccctcaccttgacatcgagctag

SEQ ID NO: 416698 - DNA, 122 bp, Homo sapiens
tttccgcccaggctaacctctagcgcattttgctaatttgggtctgaatcgccatcaccgcgggcagcgcagccttagccgccagccctacagccgggagggaatgtaatgtaaggtttggc

SEQ ID NO: 416699 - DNA, 122 bp, Homo sapiens
ggccgggccgtcagctccagcgatggagcaggctccggtgtggaccccagataccctttgcgtcttccagctccgcacccccaggctggaccagacccggctcgggggagacagggcaggaa

SEQ ID NO: 416700 - DNA, 122 bp, Homo sapiens
ctgtggaatgtccagggctctggtccgctcctcgggatggggggtgcctaatcctagagccgcattccaggataaggggggtggggagaggctgggccgggggaggggcaggaaagagggct

SEQ ID NO: 416701 - DNA, 122 bp, Homo sapiens
cccgtcactcaccggcagggggtgggccctagggaactacccagtcaggacgggcgggggcggggccgagacaagtatccaatgagggacgcccaatcggaatccggggaactgcccaattt

SEQ ID NO: 416702 - DNA, 122 bp, Homo sapiens
agctcagctgactcttggctttgggtgccacccatagtggtcagcccagagctcatctggcgctcttgtggggatgccccagagagaaggaacagatgctaggtgggcctctgcagccctgc

SEQ ID NO: 416703 - DNA, 122 bp, Homo sapiens
acaacacggatggtaccatggtggccattctgacagaggaaggtgccttcctgaggtgcccgaagggcaggcaggggaaaaggcggggcctcccactgcgacggaagcacagcggttaagat

SEQ ID NO: 416704 - DNA, 122 bp, Homo sapiens
ctgctgtgtccactgcatcctgtcctgcctgttctgcgagttcctgacgctgtgcaacatcgtcctggactgcgccacctgtggctcctgcagctcggaggactcgtgcctctgctgctgct

SEQ ID NO: 416705 - DNA, 122 bp, Homo sapiens
gggccgccgtcaaagggagcgcgctgctccctccgcgccgatatccttccgccgactccccgcccctcccgtgcagctgcctctggattgtgggagaagaaaaccgctgcatgagcgcgctc

SEQ ID NO: 416706 - DNA, 122 bp, Homo sapiens
gtgtccgagccaggcggggagagggtgagggaggacgggtcggagttgggtgggatgtgccgcccctgccagcatgaaagggaccagcccagcgaaggcctcaccttatcctggtcccagtc

SEQ ID NO: 416707 - DNA, 122 bp, Homo sapiens
cctgggcgggtgagagctggacctgcctggccgggctgatgggatagcggcggactccgccgccgtcggcccttgctgcagcagggcgccatgtgctggagcgcgcctgcgcgagggatcct

SEQ ID NO: 416708 - DNA, 122 bp, Homo sapiens
cccaggggaggaacaaaccatgcaagactcgtctccaacagcgacaccgtgtggcagctacgccagctgcaggcgtgggccgctcaggctcgtatctggctcagccggaagaggcaggactg

SEQ ID NO: 416709 - DNA, 122 bp, Homo sapiens
gggagagactgagtcactgagaatgcagctttctttcatttggtcacttcacctcttcatcgaccccagagagggagtggggaccctgcatgctgccccctccccgcccccggggtcttctg

SEQ ID NO: 416710 - DNA, 122 bp, Homo sapiens
catcccgcacgcctccaccggctgcagacccatggccgagcgcggggaactcgacttgaccggcgccaaacagaacacaggagtgtggctagtcaaggtaatgttcgcgagtctcccacttg

SEQ ID NO: 416711 - DNA, 122 bp, Homo sapiens
gggtggtcgcaaccaccagccgcgaggagaggattgcacctctcccccccggccggcatccgaacagagccagtctccacccctgcagtggcgaagtgtttacaaagtccgcgccgcgccgc

SEQ ID NO: 416712 - DNA, 122 bp, Homo sapiens
tagcataccccattttgtggatgggaagtctgcctctcagcaaggtggcctcttggaggacgctgtgcccgcgtcaggcgatcctgtcgactgccgccaagacccggcttccggctttgagg

SEQ ID NO: 416713 - DNA, 122 bp, Homo sapiens
ggggacccagactgccttcatctctgatggcagtctgatcactgtggccactgtgcgagccgtggaccccggccaggaaccactcctgttgtacaaagctcacacccaccgcccaggtctta

SEQ ID NO: 416714 - DNA, 122 bp, Homo sapiens
tataccagatcctcatataaacagcatggattacattaacaggcctccctgggtgagtagcgtctctttcgcctaccttacgctcaccccatggttatataaccttttgaacggaatttgga

SEQ ID NO: 416715 - DNA, 122 bp, Homo sapiens
gctcagatcctggggcagtggctggacagggacacgtgaccccgctgcgctgtccagcagcggcggcctctgcggcgtgggcagaggtaacttggccgtgtgcaagcccgtcacctgagggc

SEQ ID NO: 416716 - DNA, 122 bp, Homo sapiens
ctcccttgggccccgacttcttccggctcttcacctcagacatgtctggagaccctaggacgacaagcccagggcagcttcttcaccagggggagcaggacgtggccgccttggcgttcgtg

SEQ ID NO: 416717 - DNA, 122 bp, Homo sapiens
agacaaaataccagacagggcacagaaaacccttggtaatcacactgtcccaagagcaggcgagtcccagctgttctcactgcctttctacccttcccctttgccctattaagaagctcagg

SEQ ID NO: 416718 - DNA, 122 bp, Homo sapiens
ggccgggccgccccccgctcgccgtccctcgcgccgcgccgcccgccgaccttgccgcggcgactgcgccgcccaacgtgtcctctaggtctgcgatggccacgggctcccacgggttgcga

SEQ ID NO: 416719 - DNA, 122 bp, Homo sapiens
acaaaagcagtcatgtttgagtttaatatctctcaaatttagcattttagctaagatgcccgtttttatttcttgcaggtctgctaaaaggtcagagtaatgcagaatgcgtgccttcatct

SEQ ID NO: 416720 - DNA, 122 bp, Homo sapiens
aaataaggatcttacttggaactagagcgaaagccacctttgttacgccttagcaaacaacgtggctgcattctgtccatgccctagagataccacgccagggtgtctggcggaagaaattt

SEQ ID NO: 416721 - DNA, 122 bp, Homo sapiens
ccttactggggctgtacctagagcctagggacgttttgcgggggcagtgtttggtttttacgtgcaaagggtcccggcgacagactgtaatttgtacatacaaagataatctgtgaagatca

SEQ ID NO: 416722 - DNA, 122 bp, Homo sapiens
caacacaacacagtgctggaagctctggccggtgcacacagagagacaaagaaaccctcgcgttcaacacaacacagtgctggaagctctggccggtgcacaaagagagacaaagaaaccct

SEQ ID NO: 416723 - DNA, 122 bp, Homo sapiens
agctcccgctgctacccctgcccccagtgctgccactgctgacccctccatagccactgccgctgccgccactgactccatagccactgctgctgctgctgctgctgccgcctttgtagcca

SEQ ID NO: 416724 - DNA, 122 bp, Homo sapiens
gcgaccttcaagatctgatgctccattccaaggcgacagagaatcaaccacagatgggcgcgagaacagagtcagatcaccggccaaggtaaaatgaagacgatcttctggattggggcttc

SEQ ID NO: 416725 - DNA, 122 bp, Homo sapiens
gataagggccctgaagggccatgctggccaccctgcagcctgaaccacctggggaggaggcgggagagggagctgccatctctaggcacctcaagccccctgaccccattccctcccctccc

SEQ ID NO: 416726 - DNA, 122 bp, Homo sapiens
ccagctaattttcgcatttttagtagagatggggtttagccatgttggccaggctggtctcgaactcctggcctcaagtgatccgctcatcccaaagtgccaggccctttttccaagtgctg

SEQ ID NO: 416727 - DNA, 122 bp, Homo sapiens
cacggtggccgaggggcacagcagtgcctccagggctgtcacagtcactgtggtgctgggcgagccaccctggaggctctcgcacacaggtgccatgcggggctccccagcacccacgctgg

SEQ ID NO: 416728 - DNA, 122 bp, Homo sapiens
gatcaaagaacccagcaatcagagcacaaatctcaaatatttgaagaatcgagttgttttcgacactctggctccccgctgctatgtgcaggttgctccataaatacacatacagctgcctg

SEQ ID NO: 416729 - DNA, 122 bp, Homo sapiens
cttgaagcccattggtcaatgagaaagatgaaaggaaaaggaggtgtggccagacagcagcgtgtcatgaaggacctgtgttgtcacaaggaaagctgcctatgcaaccgctgtccccgccc

SEQ ID NO: 416730 - DNA, 122 bp, Homo sapiens
tggggttaagtttatcagttagcacctccaccagccaggaaaccatcttcacttatggaacgagctattctatgcagcagggtccccaaccttttcaaaggtgaggactcttcatggatccc

SEQ ID NO: 416731 - DNA, 122 bp, Homo sapiens
gatcctcctgacttggcctcccaaaaggctgggattgcaggagatatgagccaccgcacccggcccttttataagttttctaaaggaaaggaacatgtaccatcgtgttttattttaatttt

SEQ ID NO: 416732 - DNA, 122 bp, Homo sapiens
tgaagcactctcgagatgtttcctatgttttaattctttggcaaatgccagtttcttatacgatataggagaaaagaattgattaaaaatatgtgttttgaatcaaaactgactcagttaaa

SEQ ID NO: 416733 - DNA, 122 bp, Homo sapiens
agaaagggagacgatgtgtctgccttgacatgggctcaggccttcctactcagacgggggcgcattttcccccaagccctcttcacgcactgctccattctgcagaattaatgagcaggata

SEQ ID NO: 416734 - DNA, 122 bp, Homo sapiens
atctacttgaggctaagtcgagctaacctttgcccctgagggctgtgtctgcgttaacatcgccagcaaacagttgtataaaccaccgtgcaaatttcgttccaggacacattggcgtgaga

SEQ ID NO: 416735 - DNA, 122 bp, Homo sapiens
ctcgccccagggtgcccctgggaaagcctgaggctacttgtacgcgttggccttgtgcttcggcaagaaggcgaagctggggggcactggcccaaggagcatctcgctgtgggagagcaggt

SEQ ID NO: 416736 - DNA, 122 bp, Homo sapiens
tgagtttaaatacttatttttagcttcactaatactgtttttaacaaaaaaaaaaatgagcgtaacgtaagtcttaaatgcccacggacctgctcgctgccggctccaccgtcagtgcacgg

SEQ ID NO: 416737 - DNA, 122 bp, Homo sapiens
gctgcctccccaaccccgcggggccctctgctccagctggcatgcctcaaggacgcttcgcgcctgctcctttggcccccggctcgcaagtagcggggccagcacgtgacccgagggggcag

SEQ ID NO: 416738 - DNA, 122 bp, Homo sapiens
tcgcggcggttggaaggctctcgcgagagcgtcttgagaattctggccgggggcccaagccgctcggtctcctgtcttcagcacgggagttgctgagtgggtctaacctaggcgaagtggct

SEQ ID NO: 416739 - DNA, 122 bp, Homo sapiens
catcttcgaatttttatgcagagcccatggaagcgcctggtcagagaagcgggaggaaaccgaacctaagaaaggggcttggagtcagcagtgaagaatctattgtttattttagttttgtt

SEQ ID NO: 416740 - DNA, 122 bp, Homo sapiens
atgtaggaaaaaggacttcaaaaggctgcggtatcaaagtggcagttaaagagaaggcaacgctcagagttgcaggtggagcagcggcggctgcatcagcgtctcaaattgcgaaaacattt

SEQ ID NO: 416741 - DNA, 122 bp, Homo sapiens
agcctttgactattaaggccactggagataaaatgcacttctgagtgaggttagaggcatcgcagaagggtgatgaaggagaccaaagccagggagaagaaagttccagaggattgagtggg

SEQ ID NO: 416742 - DNA, 122 bp, Homo sapiens
taatcttgtcccgagttttcgcagaacacgttggcgatacagaagcttcgaagcagcatgcggtgggtcagcttcatggctgcggctggggaaggcagcggcggcacacggccaggcggtgg

SEQ ID NO: 416743 - DNA, 122 bp, Homo sapiens
tggccaggcggtcgttaaggaactgcatggtttccttctcattgccattgaaggccccttcgctgtaccagctgccggggcccatggagccggagatgccactggctgcctggcaggaactg

SEQ ID NO: 416744 - DNA, 122 bp, Homo sapiens
ccagcccctttcttgaagcccggtgggcccagttcatgtcattgcttctcaagatgaatccgcaggctgcacatgagagtctcaggacacccccaaccccaccacagctgtaccaagtctcc

SEQ ID NO: 416745 - DNA, 122 bp, Homo sapiens
aaattcccaaaccgagaggctgagcttcgcgtctgtagttactgagcaggagcttctgggcggaacttctaagggccccgcccgccccgtctgccctgaccctcgcccggactcgcctcgcc

SEQ ID NO: 416746 - DNA, 122 bp, Homo sapiens
gagcaagaaaggtctatgtcagcatcacagaaatgctgtgactgtcccagatcgaggggacgaaatgcaggagtcacctcagagctgctgtggcttgtgcatgagctacggagaaacagggg

SEQ ID NO: 416747 - DNA, 122 bp, Homo sapiens
aggggaaccaagcacaccgcgggtgagaaggagagggattgacaagagccaaggggcggacgtgggagggatccagatgaccccatttactcagagggaggacagacagctgtactgattgt

SEQ ID NO: 416748 - DNA, 122 bp, Homo sapiens
ggcgctgcccctcttccgcgagtacgggagcacctcgtccatcgacgtgcagggcatgcccgagcagagcttcttcgacatcctgaacgagttccgcagcgagcagcccgacgcccgagggt

SEQ ID NO: 416749 - DNA, 122 bp, Homo sapiens
cctatagcagagaagagcgggtcacaagacacgtgtggagtgccgttccacctggtcacacgcgctaggccagagcacacagtcacacagtgacgctattctctgaatcaaagtctcaatct

SEQ ID NO: 416750 - DNA, 122 bp, Homo sapiens
ccacccatttttgtaaatgaagttttatgggaacacagccatacccactcatttgcatagcgtctgtggctgcttttgcacctggctgagttgagtagttaaaacagagacccttaaggtcc

SEQ ID NO: 416751 - DNA, 122 bp, Homo sapiens
accttctcccgcctgcggggccgggagaaacttccccggaaaaagtcggacgccaaggagcgcggtaagcggagatcggtggggaacagggggcgccgagccccacccggcctgggagcggg

SEQ ID NO: 416752 - DNA, 122 bp, Homo sapiens
tggctagcagtgtgacagacagaccagcgcacgggcagggcctctggcaactttagctaccgccgctgtcgctcccgctgccgccgccgcccagacgcactctgggaaagcgcggcgagcac

SEQ ID NO: 416753 - DNA, 122 bp, Homo sapiens
aaggggctgaggactctggcccatcctggggcgagggaggcacccacggggtgggccatgcggggctgggagccacggcccccatgcaggtcctaagtggacatctgtctggtcggtggtca

SEQ ID NO: 416754 - DNA, 122 bp, Homo sapiens
gccccaccccttacagcacccccttcgtcagggcggtgtaggcggttaccatggcgatgacgtccagagggcggggaggggcggggctatggagaggaggaggaagatggcgggcgggctgc

SEQ ID NO: 416755 - DNA, 122 bp, Homo sapiens
taccgggtgcatctgacttttcttggcttactgcgcgcccgcagcactgaagtttttttccgcgcgttcgtgatagggaaatggcagggcaggatcgggtgtctcccccggccccggctcca

SEQ ID NO: 416756 - DNA, 122 bp, Homo sapiens
cagcggagtgcccagacttggcagggtcagagccccccagcgggatccagagcccgccgccgaggccccttttgggatttctcaggctcggcagcctcagcgcaggcaggggcggggctttc

SEQ ID NO: 416757 - DNA, 122 bp, Homo sapiens
agatcatgcctgagctgtaacaacgcccttcccagcatacaaaagcgtgtaacagccactcgaattctatcttccaagtgtctcctgttgcccaggctaacctagagctatctaaagatggc

SEQ ID NO: 416758 - DNA, 122 bp, Homo sapiens
gctgggccatgtgggtgtgcactctgtgctgtgttcatccaaggacgaaattgccaacaacgcgtttctcagagtgtacccttgtcattaagcgacacgtgactgtaactgctattataaac

SEQ ID NO: 416759 - DNA, 122 bp, Homo sapiens
tctcgggtgggcacgcacctctttccgtggaaggaggctcccccacgcaacacggccacgcggggcttcccaacctgcaccccttctgaggcaccacctggagggcccctcccccggtcccg

SEQ ID NO: 416760 - DNA, 122 bp, Homo sapiens
cttgggtaaaagacccctggtctgactctgacccccgtcaggaccgctgatcacggcttccgtctggcgttcaattgtgtcaggctaagcgcttcaggtatatgaccagtgaaatggcaaaa

SEQ ID NO: 416761 - DNA, 122 bp, Homo sapiens
gggagccccacgaaggcctgcgcgccggccagagcctgcctgcctgccagggtactgggacgtcactctcaaagcggcgggacccagccgctgatcttgctgaggaggcccggtctcagaaa

SEQ ID NO: 416762 - DNA, 122 bp, Homo sapiens
caagctcccctgatcctatggcctcattccagtcacagatcttcctgtctggagcatttccggcccttctgtcctttggcttggagagttcagctcaacctgggaagggacagaagactttg

SEQ ID NO: 416763 - DNA, 122 bp, Homo sapiens
ttcgctgagggtctcacggacccagctcacccctaacgccagccgcttgtgctaagagcccgtgcgcacctgcagagcactgggtggggcatccctgggtctcaggcccctccctgggggcc

SEQ ID NO: 416764 - DNA, 122 bp, Homo sapiens
aaaactgctccttgcagattgagttaaaggacaaaggaacagaacaaagagtactaccttcgcccatgggcaataactgtcttccaggattgtgaagctgattgacaataatgtatgtaatg

SEQ ID NO: 416765 - DNA, 122 bp, Homo sapiens
tccttcacgacacggtcagcctcttctcttttacccacccctctctgcccagctgacttacgccaatggtgtggagcccagctcatgaggaatacagggtgtgctcctgcatcctgctctcc

SEQ ID NO: 416766 - DNA, 122 bp, Homo sapiens
cctggagtgagagtccccagcctaggccaggacctgctggtggatcttgagcccctgctgcgagcttctccgggccttagctgctgcactcccctgcctcagcagggactggccggagtccc

SEQ ID NO: 416767 - DNA, 122 bp, Homo sapiens
gtgtacgccccggaaaccctgcaaaccctacatccgctccaatggccggaagttcgagcgcgcgagagaccgaagggccagccgaggatacaaaaacaaaccgtggagcctaccctcttatt

SEQ ID NO: 416768 - DNA, 122 bp, Homo sapiens
cccgcccgactacttcccagccccgccccggcctgccggccccgccctcgccctatgccgcgttagttgcctccaggccccacccactcaactgaggccccgccttgctacagtaaaacccc

SEQ ID NO: 416769 - DNA, 122 bp, Homo sapiens
acctcccctactcccctcgcccagacgttccactgccgccccttcccacctcaatcccatcgtagtccccaacccaagcgctttcggcagcagctgtcgaatttcagggaggcctgaggccg

SEQ ID NO: 416770 - DNA, 122 bp, Homo sapiens
tgggatccaggtaagcaattgcatgacaaaatggaaatctttgggcacggggctgcttgccgccctgagcgggatattaaatatgatttattttgtgtaatctgtgatcttgattattgcca

SEQ ID NO: 416771 - DNA, 122 bp, Homo sapiens
ctccttccctctgaccccagtccctgcagcttgccctccacgaggcctcccgggctctcccgctccccccaacctgctcacaggccttcctggagcccattcaccgtggcggcagagcgctg

SEQ ID NO: 416772 - DNA, 122 bp, Homo sapiens
tgcttttatcctggctgtcataaggcaagttttagggagcaggaaggaagaaatgctgaccgctatcagaaatttggcctagtggcctctcatcagggaaatgagcttggtctgttcggttg

SEQ ID NO: 416773 - DNA, 122 bp, Homo sapiens
tgcagaatttaagcatttacataatgcattagcacggaactcagcacccggtggggacatcgcgtgccaagcctggcgcggccaacgcttcagcggctccctcacccggcagctccctagga

SEQ ID NO: 416774 - DNA, 122 bp, Homo sapiens
tcaggggctttgaaatcctgggctcccgagcccaagctgggcatgaatattcatcgggggcgtggccccgccagcgcgcagggctccaagcagctgcgactagcggaaagcgcgcgccagct

SEQ ID NO: 416775 - DNA, 122 bp, Homo sapiens
atgtttttgcagctgtggagccaggaaggacagaaggaaacgtataaaactggtctccaccgagttcttaaatattctgacacccaagaagtaaattcataacaaacgggtaaacacaggga

SEQ ID NO: 416776 - DNA, 122 bp, Homo sapiens
tgatttctggtggtggagggacacaacccccaagggcttaaacaccaggtgaagatcccgcgggctactctctagagggccagcagtcatgagtcccatcagggacgctgaggcaacgggag

SEQ ID NO: 416777 - DNA, 122 bp, Homo sapiens
gcagacgtgggccgcttttgctcgcggtcacttcatcttaagttgtatatatgtgcagagcgcggcgcgggtggtcacctccgctgctgccgccacccgcccggcctgcctttgaccctatg

SEQ ID NO: 416778 - DNA, 122 bp, Homo sapiens
cggccgccagaggagagaggatcagggcgggaaacacagctcaaatcctacctgcatggccgagctcaccggggtgcgtctaagtagctcgcctttgcggcccacccaaaatatctggataa

SEQ ID NO: 416779 - DNA, 122 bp, Homo sapiens
gacgcctcccgctgacaagaatcccaaagttgcctcagcttcctcctctccttttcttcccgcgcccaaccctgacatcaccacccctccatcccccaggtatcttcctaaagccgtgtcgg

SEQ ID NO: 416780 - DNA, 122 bp, Homo sapiens
ttgggtgttggtgtaaagccgggaatgtagtgtggcggtgatgccctagatccctggggccgcgccctgccgcccgtcccccaacatcaccctactgtggagcgacgtggctgctaagaggt

SEQ ID NO: 416781 - DNA, 122 bp, Homo sapiens
gctgctctggtgaggcattccaccggggcaatttcctacccgggagtgctctttggatcgcgtcactcgggctggccggagtccgcctcagggatgctccacaggggaggcctaagccgcct

SEQ ID NO: 416782 - DNA, 122 bp, Homo sapiens
attcccgggctgtttgctggtgagaaatctttgctgcagcgaggaccggagtcccccgcgcgcagcccagtggcagaagagggctaggctgagagggaagccaggactgtaggagagggagg

SEQ ID NO: 416783 - DNA, 122 bp, Homo sapiens
gccactcactttcacctgggccacgtacctgaataaggcttttaggttctcaggcagctccgcgcgtccggcgtacccagggttcatggtgatgaagataccgacggtgggaatgaggccta

SEQ ID NO: 416784 - DNA, 122 bp, Homo sapiens
gcgggtgagtcttgagctgtatgttttgcaaagtctaagcatttgcatgataagtagcaacgcttagaatcaatctctctttgtctgtatacctcacctttacttgaaaatgttttaagctg

SEQ ID NO: 416785 - DNA, 122 bp, Homo sapiens
ggggaatgaactggagctgcccggagcggggccaagtgggcggggcacgggagggttgagcgtgggccgaggctgccacctgctggacaagccgaacccaggcgcagaggaggtgaagaggg

SEQ ID NO: 416786 - DNA, 122 bp, Homo sapiens
ctaaacccagccccacccctcgggtcccacgcgcgccaccccgtgcgtcacagaatggggcgggatgttccgctggccacgccccttaaataacactctgtgaagccgtggtcttcttgcgc

SEQ ID NO: 416787 - DNA, 122 bp, Homo sapiens
aagccacagcagagcatgtttattgatgttaggttggtcattaagaatagtcaaaatcagcgtcctctgatttggtgcgctgggatgcacgtaatccactgaggatagtatccatgaaaata

SEQ ID NO: 416788 - DNA, 122 bp, Homo sapiens
ctctccatttccacaactacccatagccctttgtggagccactggctctttgaaggacatcggagaatttgtttcaggtttgcaggtatgaggccaaagcctgctaacattcctgccccaga

SEQ ID NO: 416789 - DNA, 122 bp, Homo sapiens
cttaatgtttgtgaaaaacagttccaaaagaactgcgcctactcccactgcgcatatgagcgcttccttcgcggatcaggggttggcagccttacaccaggaacgcacctgggcgcagcctc

SEQ ID NO: 416790 - DNA, 122 bp, Homo sapiens
cccagctgccccgggccccgcggagactgtggcgctctagcgcctccgtgtggcttaaggcgggacatggccctgggctgggctgcttgcctaggaacaactttctcccgtctttggtgagt

SEQ ID NO: 416791 - DNA, 122 bp, Homo sapiens
tctgccggctgagggtgacacaaccctgttccctgtcgctctgttcccgcttatctctcccgccttttcggcgccaccaccttcttggaaatgagacagagcaaaggggagggggctcagac

SEQ ID NO: 416792 - DNA, 122 bp, Homo sapiens
tgatccccgcagccacgcgcggccgcttgcgggaagcgccagccctggctgggctcctttcgcgtccgctgccttctcgaatccgcacagtcccagttcagagatgttacgcagcttgcccg

SEQ ID NO: 416793 - DNA, 122 bp, Homo sapiens
atttttcctcctacaacgtgaaaatgatcacagggtgccatcaggtgactatgcacacttcgtgctgagctggcagaggagggtctagagtgaagcccatctcaagccaagtggaactggtc

SEQ ID NO: 416794 - DNA, 122 bp, Homo sapiens
tttttctctcttctctccgccgttcgaactcctcaaaggagattttcccttccaagtagtcgatgagttccggactgaaccctgacatgtttacagggtctgtctgtgcaaccccaggaacc

SEQ ID NO: 416795 - DNA, 122 bp, Homo sapiens
ttagtttgtgcttttgagggtggaataataatcccaactatcaagatggctgtatcttgacgaactcagaattaacttgagaaagccaatagaaagtctcatacagattggcaggaactctt

SEQ ID NO: 416796 - DNA, 122 bp, Homo sapiens
cttcaattccatccatcatctacttttaggccccattatttaaaatgaaatacataagcacgtgaatcttcagaggatgggtaatttcatgttccaacggaacaataaaaaactcataatcg

SEQ ID NO: 416797 - DNA, 122 bp, Homo sapiens
aataactcacttctcgcagtttactcctggggccgagacctgggaaacatcccctgctcgcgctctcggcgctcggtctcccgtttcggcctccctgggcttcgctccccaccgcgttcatc

SEQ ID NO: 416798 - DNA, 122 bp, Homo sapiens
gggggcatggagaggagggaactgggcagctgatgcaatctgcaagagaagaaaaccagccgaggtaggatgactcccaagtttctagcaccaagttgggtgactacgtgcctgacagccaa

SEQ ID NO: 416799 - DNA, 122 bp, Homo sapiens
ggagcccagaacctgctttcatgtggcatggagcagtcctggcagcttaaaggaattggtcgggaggactgtaatagatagaaaacagactaggcagaaaagccttacgtcaccttagagct

SEQ ID NO: 416800 - DNA, 122 bp, Homo sapiens
tatacttgctcagttccgattctgacaacatgacttatttcaaaaacaaatagctcactccgtgaagcaaaccctgtatcactctcctctggtgacatttcgattctgatacaatgtggtgg

SEQ ID NO: 416801 - DNA, 122 bp, Homo sapiens
ataagatatggtcccagggagtgaggttgaagaggtagaccactgcaggccacttagatacgtcatgagagaggaagcctaaggtgcttcaagaataagcaaagatagcacaaatgaggggc

SEQ ID NO: 416802 - DNA, 122 bp, Homo sapiens
tggagtcggaggcgatatttctaggggtgtacttgttggggtcagggtaaggctgcggagcgcggtcaccggacgtgaaggatttgaagggcgttgtaggggccagtggagagaggactgga

SEQ ID NO: 416803 - DNA, 122 bp, Homo sapiens
aacgccaccagcgccatcctccgttccgcgcctcagcagcctctgggcgccgccatcttgcgtgacccttaacaccagtcctcgccggaagaggctacggccacttttactcctggttgaag

SEQ ID NO: 416804 - DNA, 122 bp, Homo sapiens
aaaaaagaaaagagatggctcagagatcccttgtagacttcccgggtacccatgtggtaacgttgcacctgtcaatggagtacagcagttcaaggggatgttgacaccaatgtgctccattg

SEQ ID NO: 416805 - DNA, 122 bp, Homo sapiens
ccttggccccgaagtctagaaccctgggccggccgcaaaggaaggtctgccgcgcatgcgcgccccggcgcagcctatccggagcgatccatctcgttacgtcaccaccagcctagctcgga

SEQ ID NO: 416806 - DNA, 122 bp, Homo sapiens
gggggtcccacgtgctggagcgccggcagccgcaacccagcacctacaccttcgcctctgcggtcctggcggcgccggcctcccactgcccaccccaagctcctacctgaaggggaaattca

SEQ ID NO: 416807 - DNA, 122 bp, Homo sapiens
actttacatgtgaggaaggagcacagcgtgcccagggtcacgcctagtcacacagggagccgagaaacaaatccaggcaacccggcttttttttttttttcccccattacacctacagtact

SEQ ID NO: 416808 - DNA, 122 bp, Homo sapiens
gcccttcagcagtcattttcacctccagggcatctctaaaccatgagttgaacaacaaggcgagtgagtaaggtacactttcagtcagaaatacagctttggctagatggaaaaaaaaagag

SEQ ID NO: 416809 - DNA, 122 bp, Homo sapiens
ggttgcccgtgaaaagaaataaactaaaacctcttgccctttttcgacagcacttatctgcgggactccagcttcgcctccaggctattcagaaccacgtgaaccaccacagcctaaggacg

SEQ ID NO: 416810 - DNA, 122 bp, Homo sapiens
actgttgataaggtttgattgccattcagaaagtttgtttgacctctttccaagtaaccacgaccttacctctctcttttgagcttatcacaattggtgactgtacacttgtttcatagact

SEQ ID NO: 416811 - DNA, 122 bp, Homo sapiens
aaaggtgaggactcacagccaggccagcccgcctccccgccaccacgccaggtaccgccacgctgcgggtctggctgagaaggcacctggaattctgtcccagatgctgtgtttcacgccag

SEQ ID NO: 416812 - DNA, 122 bp, Homo sapiens
atgaaaacaaagaaaataatgcagagaggcacatgactcagctcgcaatcagcggccccgcgagggaggcagcctgtgcactgggcacgccgaagcccctccggcggcggctctttgttccc

SEQ ID NO: 416813 - DNA, 122 bp, Homo sapiens
atcagtcatgaaaatggctgctcagctccgatctgcccttccttccgcaggactcagggacgcacagctccccagggctggtcacccaaacaacagcattcctttctcctcggcctctcccc

SEQ ID NO: 416814 - DNA, 122 bp, Homo sapiens
gagccggcgcgccggttccggggacgctcgggcggcagcagcttggccatgagggcagttcgagtagtctaactcgcggctgtcaccgccactgcagcggagccggccggccgggcgctgcg

SEQ ID NO: 416815 - DNA, 122 bp, Homo sapiens
aaataaaatccaattctccatcaccaagagagccttccgaaagaggcccccctgggcaaacggccaccgatggagaggtctgccagtcctcttctaccccacccacgcccccaccctaatca

SEQ ID NO: 416816 - DNA, 122 bp, Homo sapiens
gctgcgggcgcggggctgggccgctctggctggcgggcgagcagagaggcgcctcggtggcggtgcgctgtccagcatttcagcaagcggcggcagcacccgcggggaggcagagggtgcgg

SEQ ID NO: 416817 - DNA, 122 bp, Homo sapiens
gtctagagagctgagtgggttgcctcggatcggccaggcctggatatcagcgaacagatgcggatttccaccagggggcgctaggacgccacgacctttcactatgtgcaccagggggcgct

SEQ ID NO: 416818 - DNA, 122 bp, Homo sapiens
cctgtgcatttccacccaccaggaccccctttcctgcacctctccccttcctgagccccccggctgtcctccaccacagccagagggaactgggcctcattagggggacagtttgttcctca

SEQ ID NO: 416819 - DNA, 122 bp, Homo sapiens
aagacagatacaatgccctaggagggtgcagggtcaagaggaagaggggagcccacgtgtcgaggcagcaagtctaggcggcagtggcaaagcctactctgttgttgcccaagtcgtagacg

SEQ ID NO: 416820 - DNA, 122 bp, Homo sapiens
gtaattaggaaagcatttgaggcaaaagtagcaacgcccacagaacgcctcggaagacagcgatcagcttcacaaggaatctgaggatcaggaggtagagtgtgaaaacatactggaaagag

SEQ ID NO: 416821 - DNA, 122 bp, Homo sapiens
cccttcctgccttttcctcccggacacagagtcacaagtgtgcacagggaatgacagactcggcgtccagtggagccatcccctggcctcggagtaggaggcgcgcccaggccaggccagac

SEQ ID NO: 416822 - DNA, 122 bp, Homo sapiens
agatgagactgttctgggaacctgctttgctgcttgagtagctgatcgagtcattctcaacgacgtgggcattacaggctgcacaactgtgggaaaaaaaaataactacatcaaatgtccct

SEQ ID NO: 416823 - DNA, 122 bp, Homo sapiens
agtggtcttccaccatcccaggcagcagttgccacaggaccaagaaaaaccactaaaaagcgttttcccatcaaaagaggttttagcagctggagtgcatgtgtaaaggtcagtccttcact

SEQ ID NO: 416824 - DNA, 122 bp, Homo sapiens
tggggtgtatgaaggatactccatcttccccatcagcccagaggttgtcagtctctgaagcgtcgccccctggaagtggagagtgatggagagtttgactacaaaaatgggggatgggggag

SEQ ID NO: 416825 - DNA, 122 bp, Homo sapiens
gcactagaccacacgaagagtctgagtgctaaggtaagagcctagcattgaacacatcaacgcttgcaaagaggctacctcttgttccctcacttctgcctgcatttgaggtcaggagccac

SEQ ID NO: 416826 - DNA, 122 bp, Homo sapiens
agcttgagctctggccctgggttgagacagacaagggctcggatcttgattcttactgatcggctgtggaattatgagcaagctactgtacttccctaagtctctgtcagccccctcagctg

SEQ ID NO: 416827 - DNA, 122 bp, Homo sapiens
caaaaccagggctgtggtttccttcagctgacaggttgtgcaatttctcagggcaggccccggatatgaccttgaagattcaggggccaagatctcacacccacacctcaccccaggcctgg

SEQ ID NO: 416828 - DNA, 122 bp, Homo sapiens
aaagagacagcgatggcggcagaggcttcgaagactgggccttctaggtcttcctaccagcgaatggggaggaagagtcagccctggggtgccgctgaaatccagtgcaccaggtgtggaag

SEQ ID NO: 416829 - DNA, 122 bp, Homo sapiens
tagttgctatagtgacacagccttgtcattttctcctcctggggaagaagtgccaggagacgcaaacaggggaaaggggccctggatggctcactttaaaatgcatgctcggtggtctgcga

SEQ ID NO: 416830 - DNA, 122 bp, Homo sapiens
acagaattctgcactttcaacttaagctaattttctccttgtcttcaccacaccaggtggcggtgttgcactaaaggtgtttagaaaagatgtttgcctccctaaaaagtctaggtagaaac

SEQ ID NO: 416831 - DNA, 122 bp, Homo sapiens
tgttttgtgacaagctgacaacactgtttttcttttttttttttttttcagacaaggactcgctcttttacccaggctggaaggcagtgctgcaatcacagctcactacagcctcaaactcc

SEQ ID NO: 416832 - DNA, 122 bp, Homo sapiens
agaatggagaaatgaccgcctaatgagcgcaggctttccttttggggtggtgtatgcatacgtccagactcttcaaaatgtgtgtattaaacaatgtacaatttatgcataccaattttcat

SEQ ID NO: 416833 - DNA, 122 bp, Homo sapiens
gttctgtttcccatctgcttgagtatttacttttatatattcaaaaaagaaaaacaacagcgctttcattcaagaagtttggggatcaaatgcctcttgttttctgaagatggtccctggta

SEQ ID NO: 416834 - DNA, 122 bp, Homo sapiens
acgccgggaggggagagcgcgctccgagttgggcagaacctggaacggtcacaggaaacccgggcgcggggtagtcgggccgagggggacctttgcccacggtccagagtggtctggactcg

SEQ ID NO: 416835 - DNA, 122 bp, Homo sapiens
cgtcccgtccctgccccctcctagtgggacgcagtgggcgcgcacgcgcagctccgcttccgggagccgctcctcgctacccactatgctctgcgacatcgacctgtcgcaaaggccgcgtt

SEQ ID NO: 416836 - DNA, 122 bp, Homo sapiens
gccgggccggcagagcagggggccgaggacaccaggtgagccggggatctggccttatggcgtggaggaggacgctgcgggtcgtctgcctcgccgcgcagctttgtcctgccctgcactga

SEQ ID NO: 416837 - DNA, 122 bp, Homo sapiens
cgctctctgtctgcagaggctctcgtgccagccgaattcaatcaataaacctcgaacccacggccgcacgttttaggactttgaagactcaaccagctccgctcggttctcgagccccaata

SEQ ID NO: 416838 - DNA, 122 bp, Homo sapiens
gcccgcctcccagccccgccccgcccgggccggtcccgggaagggtcaaatgttctcttgcggtggtcatcccacgccaccaggcaggtcacagccgggggagtcacttttcctcggcaatt

SEQ ID NO: 416839 - DNA, 122 bp, Homo sapiens
caaaggccgcgccaaaagcggaaagccgtcctcgtcgctccagctgcgtgcctgattggacggtttccagcccagcgtctctgattggataatgctttaggtcccgcccctcaggccctgag

SEQ ID NO: 416840 - DNA, 122 bp, Homo sapiens
tagcctgtcccatctgagggtcctttacatgattagatactcaatatctcagttccacaacgttatttacagacatgttttcaaatattttgtgtaaatggcagaagggagctgggagcagt

SEQ ID NO: 416841 - DNA, 122 bp, Homo sapiens
gcttggggtaacatttctgtagattttccctgccacctgcccgccatctctaacccagcccgggcactccttccgaagctgcttaagatgccggtggttagtctctagagacggcgagaagc

SEQ ID NO: 416842 - DNA, 122 bp, Homo sapiens
caggggaggaggggagaaggaaaaaaaaatgagattgcccaaggattgtgaataatgtttcgtatactgacatctttaagtgactcaactgtggatactgtatgactcactggctccctgaa

SEQ ID NO: 416843 - DNA, 122 bp, Homo sapiens
tcactgcaatcccagccaagcccaggaaggcattctgcagattatgtcaactgagtctgacgttctatggaaaggcgaaagtcctcgaacagccaacaccgtgaggaagaacagagttggag

SEQ ID NO: 416844 - DNA, 122 bp, Homo sapiens
ccgcctgctgctttctgtctgacgcccccagctgcatacgcttgcctgtgttgttcataacgcccggtgctttgctgggtaacgtcgccaagggttctccaaaccttcagaagtgccctacg

SEQ ID NO: 416845 - DNA, 122 bp, Homo sapiens
agaattggaaaggggagccctccaggtatgtaatctaaactaccacccaatataggtatccgaatacagatgacattaacctgagactctggcttagtgttcctagtaatgtactttacact

SEQ ID NO: 416846 - DNA, 122 bp, Homo sapiens
ggagggtggggacgggagaggatcctggtgctgggctccacagtcgaggaggatgattgacgcccccactcaagagcccacatcggctccaaataccatgaaattctccttgtgatacgtct

SEQ ID NO: 416847 - DNA, 122 bp, Homo sapiens
tggcccgcagcggaggtgggactggggagcagggcctgggactccgctggtgggggtacacgcaggggcactggcgggggcggggggcgacggcactcagaattgcgctgaggcaaattccc

SEQ ID NO: 416848 - DNA, 122 bp, Homo sapiens
caagcaagaggtaactactgaagtgcccgaataaaaagaaactcgagtccctgctcctgtcgtggtccttttcaggtgaaatgagttgttatttttacgcaaaaatcacgttatcatcctaa

SEQ ID NO: 416849 - DNA, 122 bp, Homo sapiens
acttttacccacgccgtttgtcataatctgacactgctaaggagtgtccacagggccgtgcgtctgcaagaatcggactcatccgcagtccaccagccagctggtcctcggaaaccatccac

SEQ ID NO: 416850 - DNA, 122 bp, Homo sapiens
tagtgtgctcaaagttgaaaccgcatacagcacaactcaagtttgcatcagactgggaagcgaacttaagccagcggtgcgtggcccaggagtgggaaaggaaatggatgcctgaagtggaa

SEQ ID NO: 416851 - DNA, 122 bp, Homo sapiens
tgctcggattctattggcccacagagtcggtattcttcgcgggcgaatcccagaatgcaccgctctgagagggctccaggtccggggcggggtggggggggggggtggttcgttcctaccct

SEQ ID NO: 416852 - DNA, 122 bp, Homo sapiens
attttttcttgacttgacttttgcttccaaatagataacaaactcaagacacaggacctacgcctattcagcttcaaactgcccactgtctcagcaatgttgttgcttctcattcttctgca

SEQ ID NO: 416853 - DNA, 122 bp, Homo sapiens
cagtattgggggatgtgctggttccgggtgatgctggcatagttgacaccatccacattgcgccagtcccagctcttgggcagatccgctggggacaggtactcatgaggccgggggtatgt

SEQ ID NO: 416854 - DNA, 122 bp, Homo sapiens
agtctctgaatgtccctggagggcttctccctcagctgcccagaggcatgatgacgcaatcgctcaccttcggcctcgccagagcccaggttggaagccggggccagcgctcttgagaagaa

SEQ ID NO: 416855 - DNA, 122 bp, Homo sapiens
tttggtagccagcagtaactgctgaatttcaaggagccattaggatcacctacattctcccgactccggaaccccagaacttggaaataggaagaaagttctttgtaagctttaaagcgcag

SEQ ID NO: 416856 - DNA, 122 bp, Homo sapiens
tttttatagcagagcaggcatctgtgtggcttttgagacttggatctggcctgggtcttccgataagtctttctgcctgctcccaggttcatcagcccttaaactgatggatgggtggggtg

SEQ ID NO: 416857 - DNA, 122 bp, Homo sapiens
atcacaatcccttactaacaggatgtgtgaacctattgggtactgtacaacttcaagcctcgaaatcagataggcaccaccaacctcatttcctgtttcaccttgattttctgtgataccaa

SEQ ID NO: 416858 - DNA, 122 bp, Homo sapiens
aggccatccgcgatctctcccaccacggcgtgctctgcccacaggaagctctcggcgtcacgctggcaccccgacagccgctgaacagctcgctctgtcaatgcagaggaaagacgtctcac

SEQ ID NO: 416859 - DNA, 122 bp, Homo sapiens
gagacttatgggggccggcatcgagcctctgctcagagcactgctggcagactctatccccgaggataccctgtgctggtgagtccaggctgtgccccaaaagtgacctggtggggcaggag

SEQ ID NO: 416860 - DNA, 122 bp, Homo sapiens
ctggaccctgaaccccggcgtgcgtgggccgtgggccctcggggaaaggttccgtgcactcggggactccggtgaagcctgttcagccgtctgtgtcatgtggccatcttgagtctactctg

SEQ ID NO: 416861 - DNA, 122 bp, Homo sapiens
tggcgagggcggggccgggctcggcgacggcgcccgggactcccccacgccgcccgcggccgcgctcccgaggagccaagcgctgggccccgccccttccgagccccctccgggtgggggac

SEQ ID NO: 416862 - DNA, 122 bp, Homo sapiens
atgcctgtgagtataacaaatgtgactatttaggacttatatagctctaatttgtctacccgtgctcatttacattgtctttacagaagcctatcagaccaggctcagtttctgtgacaggt

SEQ ID NO: 416863 - DNA, 122 bp, Homo sapiens
gcctgccttgaggccagcatcagggaagggtgttcccaggtgcagaggaagtgtccttcacgtgttcctggaggactttcggctcgcaagcgcttctccattctcccagcgtctcgggcctg

SEQ ID NO: 416864 - DNA, 122 bp, Homo sapiens
ggtcacagagctcagaaccagcaggcagaagctggagctatgcaagcctttattggggtccgcggggtgtggggtgagtggccaagactggcctctgtctagaaccctggagtctcactgga

SEQ ID NO: 416865 - DNA, 122 bp, Homo sapiens
aaaaagggggcctcggagttgggggtaatgtgcccaggagcagaaatctggcgaccgtggcgctgcaatcacagctttcccgtggtttcctaagtggtggcggtgatttgtttgcgggaagc

SEQ ID NO: 416866 - DNA, 122 bp, Homo sapiens
agacttccagcaaagggagagaccgcgggtcaggggatggctgtgcgactctgcgaagctcgaggctcccttccaccctggagatttcgagaactcattcaaaacttaaagagatgtcttgg

SEQ ID NO: 416867 - DNA, 122 bp, Homo sapiens
aaggtttccccaagcctcactcctcctgaagaaattgtacaggagtgaacaactgcatcccgcatttgtgctctgtttctttcccttctcccctatgttcctgttcctccttaacccaaatg

SEQ ID NO: 416868 - DNA, 122 bp, Homo sapiens
cacctccttctcctcctctccctccctagctttctgtctcctgcgctttgacaggtttaacgagagaataaaaagctctctctataaagtgtccatctcctgggggggaaggggagtcgggg

SEQ ID NO: 416869 - DNA, 122 bp, Homo sapiens
ccctgaccacatcctgtgcagccaggcccggctccctccagggctggtgcaatgcagtggcgcccaccagcggccgccctccggggcccgcgtgggcactgacctgtgtgcgtccgctggtg

SEQ ID NO: 416870 - DNA, 122 bp, Homo sapiens
tttccttaactatgggatcttccccaccagtcactgaacatgtatgaggggctacagtaacgctgatctttaagttcctcaggcatccccatcttgctcccacctcgaggtccttgctcttg

SEQ ID NO: 416871 - DNA, 122 bp, Homo sapiens
gggcagcatagagtcccttgtggagtgccgcagattttggaggcaggatcccattcctgtcgcagaacccagacctcctgcctcccagcccttgggcaagggcagggggctgattgccacga

SEQ ID NO: 416872 - DNA, 122 bp, Homo sapiens
caaacagtgccgtgaaattctccatcgtaccctccgccccggcgctgtctccgtgtctgccgttggtaattttcattggacaatgctttcaaggagtacccccccgccctttctcaaggagc

SEQ ID NO: 416873 - DNA, 122 bp, Homo sapiens
atattgatgtaatacattttcattaatctacccacatttaattggatgattgaaaggacacgttgaagtgtttttcatgatttttgctacggccccagcttttactggagtttttaatgcct

SEQ ID NO: 416874 - DNA, 122 bp, Homo sapiens
tgtgggcagcatcagaaccctggctttgtgggcgagtgaaagtccaggcccacgtgtggccgggaagtggcaggcttgggcttggaccccggaccccagacccacgtctctgcccctggaga

SEQ ID NO: 416875 - DNA, 122 bp, Homo sapiens
gggccttaaaggaatgtaggctgggtgaagttggcccagtgacacctgcgttcagaaaaacgttctttccgctcccaacgccccctctccaccgccacccgacccccgaaatagttttcccc

SEQ ID NO: 416876 - DNA, 122 bp, Homo sapiens
accttcagggtgagggtgaaggcactgccacctttataggcgggcttgtacgtgtggccacgcctccttccctggagcgagctgagatggagggagaagcagcctgaaccgggctggtctct

SEQ ID NO: 416877 - DNA, 122 bp, Homo sapiens
cttccgagaccgtccccaccttctagcgactccgggcctcccgccgggatccgacgcgcccgggtgaggtctgcctgtaaatgacactgtgaataaacccgttaccttacctggccttccat

SEQ ID NO: 416878 - DNA, 122 bp, Homo sapiens
agccgtggcggccgccggggaccgcaaggggcggaggaaaggagggggccggtcccggcacgcagaggagcagccgaccatgccccgagacaacatggcctccttgatccaacggatcgccc

SEQ ID NO: 416879 - DNA, 122 bp, Homo sapiens
cctctgcctagactccttccagcttcacctagtcatctattgtcctttcagacttagttccggcgccggcttcttcaggacaccgggcctcagcctcagcgtgggttaggagctcgtggggc

SEQ ID NO: 416880 - DNA, 122 bp, Homo sapiens
aggtgagactggctcatccctgagggaggccaaagtggagcgggtcaccggggctcactccgggaggcaggaggccgtgtcactcaaggtcaacttccatgagtcgactgagctccaggcca

SEQ ID NO: 416881 - DNA, 122 bp, Homo sapiens
tgaaaggtctgatctttaggagtttcaccagactgtggaaggtgcctctgggaatgagtacgtttccaactgcacttcattctctttttttttttttttttttttgagacggagtctcgctc

SEQ ID NO: 416882 - DNA, 122 bp, Homo sapiens
gccttccctcctgcgccccattgtgtcactgtgatggcgcgcacgttcgcccgtgctgtgcgtggatgcacggatggatgtctaatatctattcatctaggtatctatttttgtatccacga

SEQ ID NO: 416883 - DNA, 122 bp, Homo sapiens
ggattgccacccaggacgatgagcggctgagatggagacgtctgcctcagccactgcctccgagaagcaagaagccaaaagtgggatcctggaggccgctggcttccccgacccgggtaaaa

SEQ ID NO: 416884 - DNA, 122 bp, Homo sapiens
tgtcatcgccattttctcaactatcaagacgccaaattctaccaacagactgtggctcaccgtgctcctggccttagaacaataccagacactcccaccaagtaggcccgagggaggcgacc

SEQ ID NO: 416885 - DNA, 122 bp, Homo sapiens
aggagccggtaccagacaggccgcggcggggcaacgggaaacgcattgtcaggagccggccgaggactcctggggtccttggggtgtttgctttgttttgtttgtttttccagagagagagg

SEQ ID NO: 416886 - DNA, 122 bp, Homo sapiens
ggggtgcgcgagcgagcgaagcctggtgtgtcgggtcctggcgaagggaaaaggccccgtcgtctcctgtagtcaccccgagcccagcgccaccatcttgggagacacacggatctcgcggc

SEQ ID NO: 416887 - DNA, 122 bp, Homo sapiens
cgcatccgcggccgcccccaacatctccgcccttgcctctcttcccttcctcgcagtggacgaggagtttgagacggtctccacgcagctgctgaaacgcacccaggccatgctcaataaat

SEQ ID NO: 416888 - DNA, 122 bp, Homo sapiens
actgcgccgccgccggtgcagccgccgacgctgaccgggaggaggaaggaagacgccgagcgggagagctgaagagccgacagccactcggaccgattgcctgcctgcctgccagactgacg

SEQ ID NO: 416889 - DNA, 122 bp, Homo sapiens
tggacacaggaggcatctggcaaatacgcgctgcatgaatcaatgactccagtgcccacgcgcaaggggcccctgggctcagaaaaccccaccaggcgggcccctccgagctcggcctgtcc

SEQ ID NO: 416890 - DNA, 122 bp, Homo sapiens
gaaaatctgctgaggcagaggtcattaagaggtctcctgcagacttgctcacgcaggaagcgagggaggaattgagccaagaaatgctcttgcaggaatggaaactctgttccccgttcccc

SEQ ID NO: 416891 - DNA, 122 bp, Homo sapiens
gcagttgtaaacacgtttccctccatgtctgttttcccttctctctcaccgtggccattacgggctgctgtttacaaaaatcctgcaggcctttgacaccccgtcctcccttcccccggcat

SEQ ID NO: 416892 - DNA, 122 bp, Homo sapiens
tgttgaccagaaggggtcactgcagagcaagtagcgctctcaggcactcaaataagcggacgcaggcgtgtcgaacacacacacttcaaacgtagataccctttggggcgggtactcattta

SEQ ID NO: 416893 - DNA, 122 bp, Homo sapiens
ctcccccaacagacgccgaagtctttgccgtggcacttatggggtgctctaacttctcagcgctggccgtcaccaacgcaggccggcagcaccctggaaaggcccaggtcccgcagctctcc

SEQ ID NO: 416894 - DNA, 122 bp, Homo sapiens
acttgcagaaaccagcttgccaaggaaaaacgctcccagtgcgttcaatgaaaaagcaggcgacccagctaaatgagtaaactgacccaatcggggggatgaaagggaacgtatatctatgc

SEQ ID NO: 416895 - DNA, 122 bp, Homo sapiens
cggacggaccgaggtgattgataacacgctgaacccagacttcgtgcgcaaattcgtcctcgactatttctttgaggaaaagcaaaatctgcgcttcgatgtgtgaggccccgcctggaatt

SEQ ID NO: 416896 - DNA, 122 bp, Homo sapiens
cagaacagcacaactttgtaagacccgcgctgaaggaggcagcatttgtgtgagagcgcccggcgctgcccagaagagctggaacgcccaaggaaggccgctgctcagcgcaggacccctgg

SEQ ID NO: 416897 - DNA, 122 bp, Homo sapiens
aaaactgataggtagtggcaccaggatttggggaccatcgggcagaggatcttccaaaaccggcttttaaagagccacaaaaagatgtagccgggttcttggcactacagtactgctttata

SEQ ID NO: 416898 - DNA, 122 bp, Homo sapiens
tgccacgctgcagccaggcgccgggtgggctgggtgggctgggggcgggggctgcggcagcggcggggcgggccagggcgccctatactccattcttcatgatgtttggtcgaagagtcatc

SEQ ID NO: 416899 - DNA, 122 bp, Homo sapiens
gcgcaagtgggaggcagaagaatttgcagagcagatcagggcctacctggagggcacgtgcgtggagaggctcgcagacacctggagaacgggaaggagacgctgcagctcacgggtaccag

SEQ ID NO: 416900 - DNA, 122 bp, Homo sapiens
aaccttctaccgtgtgagcccctcccgtgggcctctgtcagggggcacctggattggcatcgagggaagccacctgaacgcaggcagtgatgtggctgtgtcggtcggtggccggccctgct

SEQ ID NO: 416901 - DNA, 122 bp, Homo sapiens
ggccccaagacctgcagggacccagccggagctcggcgcgcccaggccccgccccctccgcgaggcgccaatcagagctaagcacaatgcagggggcggggtccctctgcagctccgcaacc

SEQ ID NO: 416902 - DNA, 122 bp, Homo sapiens
caggaccagcacactgaccttaggctcaggaagggacttactggtcaattgcttcttttgcggggcctgtcaggatttgaaatgaagcagaagctcttataacattcagccataaatctaaa

SEQ ID NO: 416903 - DNA, 122 bp, Homo sapiens
ggaaggtcagcccatcctcgctcctgggaggctcaaaggctcaaatgccattggtggaatcgctgacagctcatcctccgtcccccgcagggggcgttaataacagagtccaaatttccggt

SEQ ID NO: 416904 - DNA, 122 bp, Homo sapiens
cataagttctgcggttgagtgctcggtctggttttgctcttgaggagtctcctcccttcccgattccttcaggtcagtgtgagcctcttgttcttctcgggctcccgatgggttgactgatg

SEQ ID NO: 416905 - DNA, 122 bp, Homo sapiens
tggcgcctgcgggccagcagtgctgggggacccggcgccccctccgcagctgctggcctgcgtgctaagccccttactgcccagggccggcggtgccggccagctgctccgagtgcggggcc

SEQ ID NO: 416906 - DNA, 122 bp, Homo sapiens
aatgagctccttgcttccaattttcttgcttgtcagtacccatatcatacccagaaccaacgtagccacgaggaacaccacacatgcctctgcctagcaatgcatcctggaaggccaataac

SEQ ID NO: 416907 - DNA, 122 bp, Homo sapiens
gaggagaagcccaagttccgaagcattgtgcacgctgtgcaggctgggatcttcgtggaacggtgaggctcgcccacactcagcctccctctgcctttagctgtgcccctctttcccagcca

SEQ ID NO: 416908 - DNA, 122 bp, Homo sapiens
cactaggccccgcctctacctggtgcccaatgctcgagtgcctcctcgaatcctgcccctcgcgagacccgcccccagcgggcaccgcccctaactgccgacctcagagccccaccccccca

SEQ ID NO: 416909 - DNA, 122 bp, Homo sapiens
gcccctcacctactgaggctgccgggttgacctggggaagcagtttccttccccagtaaccgtaggtcatggtcagagcagggaaaacacgttctgtgagattttgtagttctgtctgctga

SEQ ID NO: 416910 - DNA, 122 bp, Homo sapiens
ttcgtcagtgtctgaatcacctggaaattgggtgcgccacatcaggaggtaggagacgttcgaggcacaggctgagtgagcctgatggagctacactaagacagactcagcaaacattagag

SEQ ID NO: 416911 - DNA, 122 bp, Homo sapiens
agattctgctattataattagctttctgcggggcaaggtggctcacgcctgtcagaagatcgagaccatcctggctaacacggtgaaaccccgtctctactaaaatacaaaaaattagcctt

SEQ ID NO: 416912 - DNA, 122 bp, Homo sapiens
agagatcgggctgtgggtgattctgcgtccaggccgctacatctgcagtgagatggacctcgggggcttgcccaggtaagcggggctacagtcccagagtcgtggttctagtgaagtatttg

SEQ ID NO: 416913 - DNA, 122 bp, Homo sapiens
gacaccaacgggactgtgtgctcttgcgttatgaatcccacgaaaataaatcttgtgctccgtgtaacatgactttaacttgcagtaatatcctttcatcatttaatatttattgagcgcct

SEQ ID NO: 416914 - DNA, 122 bp, Homo sapiens
cccagggccctccaagggagtgggctccacatccatgggcccgaggaatctgcggagagacgggaagagcaggggacactcacagggcgggggtccaggcgggagtccagtagtcctcgtgg

SEQ ID NO: 416915 - DNA, 122 bp, Homo sapiens
atcaggacttaataagacaggttgatagcgaacacacttccaggggaaagtgccctatcccgggagtgactgtgtgtgggataccatgggaacattcttggaaagtgacttgaatggatttg

SEQ ID NO: 416916 - DNA, 122 bp, Homo sapiens
ggcccaggggctggcttttgagctgcaatttttatcaagttgtgtctgcaccatgccttccgaattgtgttgcctcatttggccatcctggcaaaccctctgaagccctttcatgtccttcc

SEQ ID NO: 416917 - DNA, 122 bp, Homo sapiens
actaggagcaagctgtttagctaaaacacccaacagctggctctcagtcacaggaacacccgtctccatgggaggtgatttacagatacaactactcacaaaaagtcacagaaagaaaacac

SEQ ID NO: 416918 - DNA, 122 bp, Homo sapiens
ctgtccgcgctcgggcagggtggggcgcagcgggcgtctgtcctgctagcggggatcgggcggctggacccaagagcagggcacgtgcgcagcgacgcggggcggccccgccaggagccccg

SEQ ID NO: 416919 - DNA, 122 bp, Homo sapiens
cagcagcgtcaggctccgggagacctcgtgaactcagtgatttcaagtcccgtttcagaccgtgcctttccttccagtgccctgccttaagggagatcgcaattgacgtgccaagagaagga

SEQ ID NO: 416920 - DNA, 122 bp, Homo sapiens
aggtaccaaggccataggcaaagttctaaaggaggccccaggggtagaagcctacgctcacggatgcctgggaaggctgcacaggacatccacgggatggtgggggtcgggagacaccagag

SEQ ID NO: 416921 - DNA, 122 bp, Homo sapiens
cagacactcctaaagccattcccaattcccctttcccttgctacctcccaataaataggccggaaagccaaatacctgttagcctagtctccctgcaactagtagtcacatgaccaagctct

SEQ ID NO: 416922 - DNA, 122 bp, Homo sapiens
ccagtgcatacacaaagctccttttcatctgccattagcacagactttgcactttcggcacggacgttctcatccttaaagcctttcggactctaaaaccaacgtttccctgtaagcctgga

SEQ ID NO: 416923 - DNA, 122 bp, Homo sapiens
tttgcacattacgggtcaagctgtgtttgtttctagccaaggtttatcaatttatactctcgattgtgagatttaaacaaacagtatttaagtgattttgaaatgtgcaaaatttaaaagga

SEQ ID NO: 416924 - DNA, 122 bp, Homo sapiens
cagagaagtaaaaaaagcacctcacctttgagtcgccaaaattatgcttcctggaatgaccgcataccatgtagcaggtttattttagtttgtttacagaaaagtgtagaccaaagtccagt

SEQ ID NO: 416925 - DNA, 122 bp, Homo sapiens
actgaggagccgggtatttagaaaacagggctggtaccaagcgcgccatctgtggccaagcgttcccggcccaccgcaccatattgtgcaaggcgcgggctgaaggaaacagcgtcccgtgt

SEQ ID NO: 416926 - DNA, 122 bp, Homo sapiens
aggcaggagaatcatttgaacctgggaggcggagtttgcagtgagctgagtttgcaccaccgcatgccggcctgggtgacagagcaagacactgtcccaatcaaccaatcaaaaaataaaca

SEQ ID NO: 416927 - DNA, 122 bp, Homo sapiens
agatgttcacttgtagaagtctgagagctggccacagggctgatctgtgccatgcagatacgtgaagcagctggctctgggggcagagcagcccccacatgtgctgtgggggctccagctct

SEQ ID NO: 416928 - DNA, 122 bp, Homo sapiens
agggacctcattatttcaagaggaacccaaagtccagcctcctacatagatgctgccccacgaaggacccacaaaactaacctagttcagggttctcaggcaggcagttctgcttcagctta

SEQ ID NO: 416929 - DNA, 122 bp, Homo sapiens
ggctccgggcggaggaagaagaggaggcgcccagactggatacccgcctggacccggagccgcggcaccacccccagcccgccccacgctcgccagcctcagacggccgcgccccgccccgc

SEQ ID NO: 416930 - DNA, 122 bp, Homo sapiens
cgccttcacgcccgcgaaacgcgcgccccgggtctcggccccacggtgcgactgcggctgcggggtcctcacgttcggactttctctccggtggctctcggacaaacacgcttggccaatcc

SEQ ID NO: 416931 - DNA, 122 bp, Homo sapiens
gcttgagccagggtcctgagccagagtccctgccagggctccgccaggttcagacgctcacgggtggggtgacctcgggcctgatagccaggcctcggtttctctgtctctagcatgagggt

SEQ ID NO: 416932 - DNA, 122 bp, Homo sapiens
ctcctcgggcagtgacgacgaccgagacggtgagggcggccaccgctggggagggaggcccgggctcaggcctggaagctccctattggatcaggactgcaggcctgacagtgatgggttaa

SEQ ID NO: 416933 - DNA, 122 bp, Homo sapiens
gtggacgttcccaggtgatgctgccgcgcggctggggtcagccgctgtgcggctcccgcacggcttctctgaaggacagtgacttctccatttagccaagagaggaaatgagggaactttca

SEQ ID NO: 416934 - DNA, 122 bp, Homo sapiens
tagagaactaggttagaggaaaaaaagtctccgtctcatcactgtgactcatcctccccccgggactggcagaatgactcaggctttcaagtaggtgacaatgcttatagaaaaatgtgacc

SEQ ID NO: 416935 - DNA, 122 bp, Homo sapiens
gacacagagtcagagggactgtgcttcctgcctgggcacagttgcactgaggcccgaaaccgtaccatgccacatgtgctgtcccctcacctgggatattgttccttgccccgcccttcccc

SEQ ID NO: 416936 - DNA, 122 bp, Homo sapiens
tccacaaatgtccccaggggccagaatcatccccagttgagaactttctgttctaccttccgctgtcagaaaatttgaattttgttgctgctgcttaaataattttctagattaagaatctg

SEQ ID NO: 416937 - DNA, 122 bp, Homo sapiens
tcgccgagccccgccagccccggcgcgagagaagttggagaggagagcagcgcagcgcagcgagtcccgtggtcgcgccccaacagcgcccgacagcccccgatagcccaaaccgcggccct

SEQ ID NO: 416938 - DNA, 122 bp, Homo sapiens
ttttagagtgaaaaagggagaatcaaccacgaagggattcgaaccctcaatcttctgatccgaagtcagacgccttatccattaggccacgtggtcccatggcttagcaactgcaaaaaata

SEQ ID NO: 416939 - DNA, 122 bp, Homo sapiens
acacggtcaggatgctgtgggcgaagtaccggcctggggcctggggctcaggcattggggcgctggtcacatacttctccggggacaagggctgccccctctgcatccactgcacgaagacg

SEQ ID NO: 416940 - DNA, 122 bp, Homo sapiens
tggagtttatttagttggtcttactgatatcgtgtattgtgtgcctagttttgttctaaacgagggccagcaaatcatggcctatgagctgaatccaggcctgttttggtaaataaagtttt

SEQ ID NO: 416941 - DNA, 122 bp, Homo sapiens
actcccatatgctgggccttcagtacgtttgtctttatattgggagtcctctgtggcctccgctgagggcgctggggcgggggttggggttggtggccagctgagcctggttgaagggcggc

SEQ ID NO: 416942 - DNA, 122 bp, Homo sapiens
tcatattttctcatcattctcagggagttgtccaggtaacaatgaccttgtgtaaaccagcgtccctgcctgagtcctcttcacctgaaaccaccgccccacgccaggctccacctccccac

SEQ ID NO: 416943 - DNA, 122 bp, Homo sapiens
ctaggcgccggcagggcaactgggcatgctcagaagccgggcaggttttggtctcaagcacgcagcctgtgcattacaccagctctctcagtccggggaggaggaggagcaggaggaacgcg

SEQ ID NO: 416944 - DNA, 122 bp, Homo sapiens
cgacagccccagcaactgcctctgccggcgcctcccgcaggccctcgccaactcgccccgcgcaccatgctgactcccggcctgcggaactcgtagtgcagcccctgtcgcctccccggccc

SEQ ID NO: 416945 - DNA, 122 bp, Homo sapiens
tgttctctccagaagacggatgtgtacaatgagatctacctcctcctctcctgctagccccgcactgtggggatgggggcatggctcccaatgctgccttcacaacctcctagaccccagcc

SEQ ID NO: 416946 - DNA, 122 bp, Homo sapiens
acctaaaagggtctaagcaatccactcatccctggctgactaggaggctgtagacaggcacgtgggaaacctaagaaggtaggtaaaagtttaagctgactttaaaactgcttttaatgtag

SEQ ID NO: 416947 - DNA, 122 bp, Homo sapiens
ttccagaaggccattcagttggaaccaaatactatgtagccctttcagactgccatcttccgcttggcaatatccatttaaggttcctccatgtcttctcatgacttgatagctcatttctt

SEQ ID NO: 416948 - DNA, 122 bp, Homo sapiens
tcaacaaacccaagaatctctcctgcctgacttagttttaacttagtttcaacaggcccacgaccaacgtagaaaaatcttgcagcgcccgggtttgggctcagccggagtcggcagaggcg

SEQ ID NO: 416949 - DNA, 122 bp, Homo sapiens
gctctccagctgctaagctgtccctttcatcaatctaaaatgagtcatcattgtttcacccgtctaaagggcaaggcaaaaacagtgaaattaagaaactccatggaaaaaagaatggagaa

SEQ ID NO: 416950 - DNA, 122 bp, Homo sapiens
cacgttgtgtgtctgccctactctcgtggaaccaaggtccagtggagagaggaacataagcgaatgaagaaagaagcaatagagtctcagtgataagttcttggaaaaaagtaaaacggaag

SEQ ID NO: 416951 - DNA, 122 bp, Homo sapiens
taactggaactatgaagctgtgatgttcgagacacacacatacatacatatatatatacacgtatatatatatatatacgtatatatatatacgtatatatacgtatatatatatatatata

SEQ ID NO: 416952 - DNA, 122 bp, Homo sapiens
ctgtcctcttcgggcctcagtttccccttccgagctgatgggtggctggccccaaagtcccgacaaggtccccgaagttggagggccgggggtcccgcccgctctgcaacgcgcaaggcgac

SEQ ID NO: 416953 - DNA, 122 bp, Homo sapiens
taagaggaagctttggaacacagtacatttcctccacccatcctgcctttcatttgttagcgctcttggctacagagtttcatacaccgtgcctcctttcctccttcctctctttgtccccg

SEQ ID NO: 416954 - DNA, 122 bp, Homo sapiens
tgtctgggcgcgcgtggctggcgggtggccggcggtcgagaggctgcggcgggcgaacgccgctggagtcgcccagactgcctcggatttcataatgaatctgaggaaggacaaagggtaca

SEQ ID NO: 416955 - DNA, 122 bp, Homo sapiens
gtaaggtatacagggaacagcactctagaagctatgactcaattgagactacaagtaccacggtgctacttgcacagacccctttggttaaatgtaaattcttgtacaattgaaggatacgc

SEQ ID NO: 416956 - DNA, 122 bp, Homo sapiens
cggcgagtgcgggagcggcagggcagggagggtgcgtcggccggggccggtgtgcatccgcgaagactgggtgcatggcctccatgcgaacctgagctattaatatttgttactattttgga

SEQ ID NO: 416957 - DNA, 122 bp, Homo sapiens
cgccccctgacgtgtgtgcctcaggcttataatagggccggtgctgcctgccgaagccggcggctgagaggcagcgaactcatctttgccagtacaggagcttgtgccgtggcccacagccc

SEQ ID NO: 416958 - DNA, 122 bp, Homo sapiens
ttcggcggctgtagcggcgccatcttgagccccaggcccctgcggcgccagggctgtccacggcgcgcctgaccaaaaaagccccgcggggcccgctattactcatttgcatattatttcct

SEQ ID NO: 416959 - DNA, 122 bp, Homo sapiens
cagctgggagcggcgccaccccggccccaacccgctcgacccgcaggaccccagccccgacgcctactgcaacctggtcatcctggctgtagccaacagggtgagcccgagggcagcctgct

SEQ ID NO: 416960 - DNA, 122 bp, Homo sapiens
ctgtccccgtgtgagcagctggtgtgagtagagcgtagggagcttatttggcaatctcttcgatgatccttgtgcgtgtctaatgacctgtgtttggcacacgacgtaaatggaaacccaga

SEQ ID NO: 416961 - DNA, 122 bp, Homo sapiens
agatcttgggagaagcacggacatctctgtttctgcttttggtccccgaacgcagttacgcgcccactggctccctgtctctggcgcttctgggcacgggggagctggggcggccccgcctg

SEQ ID NO: 416962 - DNA, 122 bp, Homo sapiens
ttctcctgcatgcagagccccggatatctcatcttcatgcagcagaagtgcatctaaatgcgatgcactgtattccctacggcccggtcacctgcctgttcttgtgacaaatgccaagatgc

SEQ ID NO: 416963 - DNA, 122 bp, Homo sapiens
ccgggggagcctccaggagggaccctgcccgggaggacgaggcctcctgccgcagcctcgcggacagctcagctcgccctgctcagaaagacacagggacgggtttttccaaccaacagttt

SEQ ID NO: 416964 - DNA, 122 bp, Homo sapiens
attcccagattctttgcatgtgagtacagtctgtacatttaaaaacatgtccagcccaggcgcagtggctcacgcctgtaatcccagcactttgggaggccgaggtgggcggatcacttgag

SEQ ID NO: 416965 - DNA, 122 bp, Homo sapiens
ccagcccgccgagcgcagggcagcggggagctggtagcgagacacgagtgacgactgcaccgaaggctgcgtagctctgcagctcccggtcacgtgagggccgtgcgtcaccgccaagctca

SEQ ID NO: 416966 - DNA, 122 bp, Homo sapiens
gggcggaacttcagaggtccacgctggcgcctgcgcgtgtggttgaggatgggctggcggcgggtccgggtccgctgcctggcgctgcgggcggcgggccatggtggtttggattgagccgg

SEQ ID NO: 416967 - DNA, 122 bp, Homo sapiens
aggcgcgaaccaccaagcgtggctccaagctccacggggacgctggtgtcatcgtggccacgactgcttgtactgttgtggtgcgttctcttttgtatactaagtgctgtgtgaacacagaa

SEQ ID NO: 416968 - DNA, 122 bp, Homo sapiens
ggtcaaaatctggtttcagaatcgaaggatgaagatgaaaaagatgaataaagagaaaaccgacaaggagcagtcctaaaccctacccagcctgctgcctcagcacagccaagggaaaaaca

SEQ ID NO: 416969 - DNA, 122 bp, Homo sapiens
cgccgagcggtctaagcgactgcgtctgatggggcggggagccgccgggttgagcctatccgctgcggggagggcgggacttcctgcgcgggggcccgagccgctcagtctccctgctctcc

SEQ ID NO: 416970 - DNA, 122 bp, Homo sapiens
ttctcgcttctgggcctcacctcagcccaggttctctttgcccactcagtccttatttcacgcttccgcctccagctcaggtgccccgagcctggctacccctatgcaagacgagctcaggg

SEQ ID NO: 416971 - DNA, 122 bp, Homo sapiens
tcctaactgcagctgcaccaagacagcactgggacagagaggccagaccggcgatggggacgcccggcgatggggacgcccggcgatggggacagggcaccaggaagcaggttgggatttgg

SEQ ID NO: 416972 - DNA, 122 bp, Homo sapiens
caggtcctcccaggccaggccttccccggcactgcggcccctccccacccgggccggcctcggcgggcttagcacccccatgacttacccgtccaggccacgagcccctgccctgccctgat

SEQ ID NO: 416973 - DNA, 122 bp, Homo sapiens
cttggagtgttttgtacatgtagtggggcagtgcctggcctcctgtgagagattgatcatcggtaaacaatccacacgaaactcacttgccagtggacggggaggatcgctgccatcctttc

SEQ ID NO: 416974 - DNA, 122 bp, Homo sapiens
cgcggctgaggggacgtgtacgccgtagatgtcaccagtctcgggggctgcctcggactgcgcagctgctgcaggaaggcggcaagcgagcggctcttgctgatgggggagctcatggcagc

SEQ ID NO: 416975 - DNA, 122 bp, Homo sapiens
ctggctcctggctcgggaaagaccccggcaggcactgacccgtctgtgggctgcggagcccggacgggccccaatggtcctgcccccacccccaagtccggaattgcgtctgggtgggaggg

SEQ ID NO: 416976 - DNA, 122 bp, Homo sapiens
gcaccagaaaatatgtggaagtgtcttttccctgcagccttccagcggcggatggccacacgtagacatttccactgctcaggcgagaaagaggatctcagcatgttttcatttacactttc

SEQ ID NO: 416977 - DNA, 122 bp, Homo sapiens
ttaaaagccattgttcgaagaagggtgcccagggtccagctggtcgccgaaagcttgctccgcaatacaggctaaggaccagcttctttggaagagaacagatgagggaagcaggagagaaa

SEQ ID NO: 416978 - DNA, 122 bp, Homo sapiens
ataatcttgtggtgcgccgttttttaagccggtcagaaaagcgcagtatttgggtgggagcgacccgattttccaggtgcgtcggtcaccccttcctttgactcggaaagggaactccctga

SEQ ID NO: 416979 - DNA, 122 bp, Homo sapiens
tagagacattgattttcttgtagataccggtgctgaacatacgctagtaaccgccccggtcgcccccttatccagaaagactcttgacatcaccggagccacgggggcttcagcaaagctag

SEQ ID NO: 416980 - DNA, 122 bp, Homo sapiens
cggcgggatccgcagctctcggggtgggtggtctccagccggccactgcgggaatgccgccggtcctggaaggacacccttctattcaaactcaagggagaaagggatcatttaaatccccc

SEQ ID NO: 416981 - DNA, 122 bp, Homo sapiens
tccccgccgcaccctccccgccgcaccctccccgccgcagcctccccgccgcagcctccccgccgcagcctcaccgccgcagcctccccgccgcagcctccccgccgcaccctccccgccgc

SEQ ID NO: 416982 - DNA, 122 bp, Homo sapiens
gcatgacctttgctgagctgctcgccctgcgttctgtcgtttgttcatcattcattcatccgaaatgctcgggactggaagcacagtggaaacactgccccaggttctgtgctcggcattga

SEQ ID NO: 416983 - DNA, 122 bp, Homo sapiens
aggcggggtaagaaggcgagggagggagtcgcgggggagcaggaaaaaatgaagcgtgtccgtaaggctacccactgagacctgggcaggggctccggcccaaagccctcagaaaacgaact

SEQ ID NO: 416984 - DNA, 122 bp, Homo sapiens
cgccggttggggagagaagctcctggagcggccagatacctgttggctcctgagcagcatcgcccagtgcagcctccgtcaggaaaagcagcagaatcgacagccccagggggcgagcgggg

SEQ ID NO: 416985 - DNA, 122 bp, Homo sapiens
atggaatgaaggaggccagacggcgggggccaacaggggcactcccaggtgggagctgcacggcgcaccatgggcacccaatgcccgcagtgcttgcaccgccacacgcgcctactcgctgc

SEQ ID NO: 416986 - DNA, 122 bp, Homo sapiens
gtagtgtgtgtcctggttaaccgcaagggcgccagagtcagataaccaaggctggatatccgcttgctaactggtgaggagaccacgggcatgttacttatcctgtgcatcaagaggagact

SEQ ID NO: 416987 - DNA, 122 bp, Homo sapiens
cacctccccagctccctcccaggatccttgatctgatctgtcagcctttaccactgagcacggaagcaccaggagacatcaggatcaagaaattacttggttccagtgagtcccccttgctc

SEQ ID NO: 416988 - DNA, 122 bp, Homo sapiens
ccttatcaggagcaatttcagagaatgtttgggtggacgtctaactacagtggagtcaaacgtgaatcaacggtgaaaaaaggacaatagccaatgtgtacactttttataaaaaccaccct

SEQ ID NO: 416989 - DNA, 122 bp, Homo sapiens
ggtctcttaggagcccccctgctgaactgaggaggctgaggctgacccgtgtgtctcagccgttcccctttgtgagcccctaagtgccttacagaccatgtatttattagtggtctattgtt

SEQ ID NO: 416990 - DNA, 122 bp, Homo sapiens
ccagcaagtggggcccagctgagctctgaggcctgtggccggctggtcaaccttgaggtgcggtccagggcacagagccctcggggagagctggggcacaggccgggtggtgcacacagccc

SEQ ID NO: 416991 - DNA, 122 bp, Homo sapiens
aaatatttgttaaaatagtggggataattgcacaacattgtgaatataattgaatgcaatcgatgacatagtattgtacacttagaaatgattaagatgggtggggcatggtggctcatgcc

SEQ ID NO: 416992 - DNA, 122 bp, Homo sapiens
tgtattcaagaggagacacaaatttcagaattgagagattgaagggtctcaaggtcacttcgtcaggtaattgagaagaaaagaaaatcaaggacaagctctcctgagtcacccacatggta

SEQ ID NO: 416993 - DNA, 122 bp, Homo sapiens
tcctatgcgggccgtaaggactcttcccctccccctctcccacttcttctatcccaaagtcgctcttcccaattcagggagctgggaccaccctgagccagcggccctgcgcatgctcaacc

SEQ ID NO: 416994 - DNA, 122 bp, Homo sapiens
gaggacccgccacaccacgcccccacgctgcagctccgcgtcggatcgccagtgggtgcgcgccctcctgtccacaatcccagagcctggggaaaggagcatcgcggccagcccaaggcgtc

SEQ ID NO: 416995 - DNA, 122 bp, Homo sapiens
agaggaggcacgagtgcctccaataggtggagcgcagcagcaggcactgcggtgctgggacggcccctccccacggcaggggcgcgatggcaccgccaccctaggttcacagtggcccgtgg

SEQ ID NO: 416996 - DNA, 122 bp, Homo sapiens
catcaattctcctccccctagtaacggctctgaaaacgcggagacacggagagcagaaaacgaaattttaatgtactgtggcgtgaacttctggaaaagggtctccagcacaagaactcagt

SEQ ID NO: 416997 - DNA, 122 bp, Homo sapiens
tggcccacataccacccttaacacacagctctccaggcttacacacacagaaacagttctcgcacataaccttatgtgcacccagtgtttacaaatagtgactgagagtctgtacattccag

SEQ ID NO: 416998 - DNA, 122 bp, Homo sapiens
ggactcttcccgaaggacagcggacgggaggtggtttctgtaaaataataccgagggatccgagagccgacacttcagagcccccagaccccctgtccctgggaagaccaactagcaggaag

SEQ ID NO: 416999 - DNA, 122 bp, Homo sapiens
atttgtgtcctggggtcccctatcacacacagctgtgagcccagtcggtggctgctgggccggcaccattgtctccagtttgcagttgtggaaactgaggctcagagggtcaggggcctgct

SEQ ID NO: 417000 - DNA, 122 bp, Homo sapiens
ctgctgcagcctcggtgttctgggctcaagtgatcctcccgtcccagctactcgggtgcacgcagcctcggtgttctgggctcaagtgatcctcccatcccagctacccgagtagctgggac

SEQ ID NO: 417001 - DNA, 122 bp, Homo sapiens
cgccgcccctgtcgccctccggtccggaggggccttgccgcagccggttcgagcactcgacgaaggagtaagcagcgcctccgcctccgcgccggccgcccccaccccccaggaaggccgag

SEQ ID NO: 417002 - DNA, 122 bp, Homo sapiens
gaaacgggccgggcaggcaggggcggggccgggcgggtgaggacatggcttctgtgcgcacggcccggcgcgatggctggtgtggacccctacctttggaacacgtggggccaggccgaggg

SEQ ID NO: 417003 - DNA, 122 bp, Homo sapiens
ggggagagcgtgtctgtctgcgctttcctctcccgggttaatattaaccggcagctcctgcgttccggaactgctccgaaagttccactggggacgatctcgccatggttgagggacttggg

SEQ ID NO: 417004 - DNA, 122 bp, Homo sapiens
ttccaggagcggccagcgcaggtgctgctgcgtggtcagcggcgccaggggcactcggggcgtgggcacctccaggtcatgcttgcgtttctccagggcgatctcaggcttccacagggtct

SEQ ID NO: 417005 - DNA, 122 bp, Homo sapiens
cgcggccggggccaggggagggcaaggcctgctgtgccctttgaccccgtgcgaaaacggcgaccctctgactataggggtgtggcccagagccacttggccagttaggggtgggggccggg

SEQ ID NO: 417006 - DNA, 122 bp, Homo sapiens
gtagggacctttgaggagttctacctgcagggctgcctgtggggtgtcaagtgctccctgcgcctgagcgcgcgggtcagacccggtgtcgcacagctttgatccccagcgcggaccccact

SEQ ID NO: 417007 - DNA, 122 bp, Homo sapiens
aggtgcagttctcgttcaggcagcaggaggcgctgtctctggaggcttagattcattccccgccctccgcccgctcccgcccgcctctggtgcgcaggcgcggcttcgcggattggccgcgc

SEQ ID NO: 417008 - DNA, 122 bp, Homo sapiens
cgcccctgcccctcgggagggagctccctccgcggtgaagtcgggtcccttgcaggggaccgcgcctgagctacccaaggcccagtaaatgcaaccatagaggatgatagggtcgctaagaa

SEQ ID NO: 417009 - DNA, 122 bp, Homo sapiens
ggtgttgtctgacctggtggtttgttttgggttgttgatcaagcatgtcttgagtttggtcggtggcgccagttagtctgcagcgagaaggttcacacaccccctctattcattcctcttcc

SEQ ID NO: 417010 - DNA, 122 bp, Homo sapiens
ggtttgaggtcacaggacccttcctccaggaagccttgccttgtcccttcacgtggctgccgctgacttgccgtacgctgagaccatctcccatcaagccctgattcctctgagctgtcgtg

SEQ ID NO: 417011 - DNA, 122 bp, Homo sapiens
agggggagtcacggcccgggggggtcacggcacggggggagtcacggcacgggggggtcacggcacgggggagtcacggcacggggggagtcacggcacggggggaatcacggcacgggggg

SEQ ID NO: 417012 - DNA, 122 bp, Homo sapiens
ccgggggaagcgggagctgggtgggaccgcggcaggagccgggagccgggggagcggaggcggccagctctcggcctctgttgaaaagtcgtcctctgcacagctaggctgggagagacgtt

SEQ ID NO: 417013 - DNA, 122 bp, Homo sapiens
cattataaaataggaagttgatgcggggtacagttactcccggaccggcggcgtgaaagtcgtgatatcatcgttgaactgtgagcggcagtggcggcggctggggggaacccggatgggaa

SEQ ID NO: 417014 - DNA, 122 bp, Homo sapiens
tactgttcttactaagattcaatcatttttctttaataaatgtttgtcattgttgcaagccgttggttaatttctagagttctgaaaatactgattttggcaattctggcctgcattcacat

SEQ ID NO: 417015 - DNA, 122 bp, Homo sapiens
cagcggggccggggcacagacgttgtaagccgctggaggggcgggtctctcggccctctccgcgggcgcctcggcttctacgctgctccgaggcgcccgggcggcaggaggcctctagagcc

SEQ ID NO: 417016 - DNA, 122 bp, Homo sapiens
ctcacctgcgggcttgggagaatcatcagtgtcctcgatttcgcttccctcggtcccgtccgcgtcacttttcactgtgttcttcccgaagctgcccttgttttgtggtggcggcacaggaa

SEQ ID NO: 417017 - DNA, 122 bp, Homo sapiens
gatttgttgtagctgaggcgaacggggcgaggctgtgaggacgggttttggagcgccgctcggccgtcctcaaaactttggacacaccctccgtttctgtcagtcaagagttcttcatgcct

SEQ ID NO: 417018 - DNA, 122 bp, Homo sapiens
ccaactcctgacctcaggtgacccgcccacctcggcctcccaaagtgttgggattacaggcgtcagccacggtggcaggccagttgatttcttaagatcaccttgaggggttcggttttcag

SEQ ID NO: 417019 - DNA, 122 bp, Homo sapiens
tttgtctctgtgaaaaggacgctattatcagagaggctggatgcaggcggagggcgggcccgaggggcggcttgggagggggaggctcggaggagcgaaggggctcaggcaggggtgggggg

SEQ ID NO: 417020 - DNA, 122 bp, Homo sapiens
gtgcatgtcagcgaccctggcccgacaggccacgtcctgcaatcggcccggctgcctcttcgccctgtcgtgttctgtgttagtgatcactgcctttaatacagtctgttggaataatatta

SEQ ID NO: 417021 - DNA, 122 bp, Homo sapiens
aacctggaccaaagctgacgaggctgggccaagccagggatggggccacagccagaaccccgagccctacttccaggttctggttagctcagccccagcccagcccagctgctctgcccaga

SEQ ID NO: 417022 - DNA, 122 bp, Homo sapiens
tcggcccagtgagggctgaactgctgctcccaggaaccgagcggggtgggctcggtccgacgcgcatcatggccgagtgcctaggcctgactctgagcgcaggcctagcgtggatggcatgg

SEQ ID NO: 417023 - DNA, 122 bp, Homo sapiens
aggcttacttttatcataaagtacttcagcaaagaagagaaactggcattcaaacatggccggccaatcattgccaggctaattgcacaagagcttctccaagcaaatatttctcacctatt

SEQ ID NO: 417024 - DNA, 122 bp, Homo sapiens
gggcagaggttgcagtgagccgagatcacgtcactgcactccatcctgtgggcaacagagcgagactccggctcaaacaaacaaacaaacaaaaaaaccagagcgactccatcttgaatagg

SEQ ID NO: 417025 - DNA, 122 bp, Homo sapiens
tgcgcgccaaccgcaccgcccccttgaaggtcggggccctatctccgggaatggtgacaacgttcgctgtacggacagcctgtgcccctgaatgtgaatgtccacacttgctatttgggggg

SEQ ID NO: 417026 - DNA, 122 bp, Homo sapiens
gactctggccctcccttcaacccgttctccacacagcagccggggggagcttttaagatgcgaaagaggaggtgtcacttcggtctccagtgactccttggcccctgaataaagcttaagac

SEQ ID NO: 417027 - DNA, 122 bp, Homo sapiens
tctcccatgttcgcgacccccgcgcgggttcccgggacgcgaagggagcggccgcgcggccgagcccgcagcctgcaccgtggctcgcgaccacctattgtttaccgggccgggagccgtag

SEQ ID NO: 417028 - DNA, 122 bp, Homo sapiens
tggtatcatttctttattagcatttaaaataccatgttcactaattatccattccctactcgtattccactgctaaattgctgctatgcttggaggctttaggagtcttcttgcaatttcag

SEQ ID NO: 417029 - DNA, 122 bp, Homo sapiens
cgaagtttatattgggtcctctatgttacatcacagctgctgcactggcggattaagagccgctgacaagtctctttcgggaaggggtaagaagcgcagctggcccagagccatggagagag

SEQ ID NO: 417030 - DNA, 122 bp, Homo sapiens
cacctgccctgcacctgagaacccggaacatggaagtgcgcgacgggtgcgtgttgaacacgcaggtgagcgaagccaccatcccctacagacctgagctcctgcccctgcgcaagctacac

SEQ ID NO: 417031 - DNA, 122 bp, Homo sapiens
ctcaactttgacacagcagcagactccctctctcttgatcccctctgtcaagttccaagacgtgacactgctggttttcctcctcctcccttctcaagctctcctatctgctcctccagctg

SEQ ID NO: 417032 - DNA, 122 bp, Homo sapiens
agcactcactgacgtgggtagcgcccagggcctgcggggcgcaggagagctggagtcaggcggagaccgcaggctgaccccgcagcggccgggctgtcgcggcccccacctcaggtcagtag

SEQ ID NO: 417033 - DNA, 122 bp, Homo sapiens
cccctcgcaccctctccccttcccacccgcgggcggcgctccctcgcgggtgctcaccaccggtgatccgctgcagccccagcacgtcctccggcccgatcggctgcttcctctgcagcggc

SEQ ID NO: 417034 - DNA, 122 bp, Homo sapiens
ctcagggtgtggtccttggattatggactagttataactaagccaggggatcaacgagctcgattgggcagatagcggtgagtccaggcattcacctaaaacggttccaccccgtcagtgcc

SEQ ID NO: 417035 - DNA, 122 bp, Homo sapiens
atgctgagcggagctgggccaagttggtaagaactgctggtggtaggagctccagcatagcgcacagggcgggcccagagaaaggcgggcccattgttgggggattcggcttccggaggagg

SEQ ID NO: 417036 - DNA, 122 bp, Homo sapiens
ccgggctttgggatgcgccgcgctcgtctcgccgcagtagtagtgctgttctcgcgcctccgatgcctcaactctccagtctggcagtttccggtgcacctgtccccacacgtccctcgccc

SEQ ID NO: 417037 - DNA, 122 bp, Homo sapiens
ctacgaggagagaggccaggatggactctggcatcaattgccacgagaaaccagtagcaacgcttcaacttctgtggttcaacccttgactctcagtactgaacacacctgacatataccct

SEQ ID NO: 417038 - DNA, 122 bp, Homo sapiens
ctgacctgtgcgcacagcacacagcattgatatttgatgtgagattaggtcagagtcagccgggaagccttctaaagcgtggcatacagccaacaaaatgaaaaggctttattctgggggga

SEQ ID NO: 417039 - DNA, 122 bp, Homo sapiens
gggggggggggggaagtgacggggcgtggccggatgacggggcgtggccgggtgacggggcggggccgggtgatccgggctcccccgcctttccccgccgccgctaggacgcacggcggtgg

SEQ ID NO: 417040 - DNA, 122 bp, Homo sapiens
acccgccagaaccagcccggtcgcaggataagaccgagatcaggctggagcctcgggtgccgagaaagcctcgcctgatgggccacccaagcccctgcagatgactgtcacaccccatgggc

SEQ ID NO: 417041 - DNA, 122 bp, Homo sapiens
tagcacagcccctcagactctgttcttcttatatttgcttcaatgagagattttgcaccacggttgctgagagtgcgggttcaaggccctgctgtgccatttccaggctgcgctcccctggg

SEQ ID NO: 417042 - DNA, 122 bp, Homo sapiens
ccctactccagacaactaggacatccctgaattctgtatgttcatgcctctgcctgggctcggctttctttgcctggaaacctcccagtcaacttgggaacctgtttgtcattttaagtcct

SEQ ID NO: 417043 - DNA, 122 bp, Homo sapiens
cgatgcttctgctggtcgtccgatcccaggcttcaagaaccagtacccactttgtgaggccgaggtgggaggattgcttggatccttgagttcgagaccagcctggccatcatagggagaac

SEQ ID NO: 417044 - DNA, 122 bp, Homo sapiens
gccaggtgcccctcgaaggccaggatctcctgcttctcccgctgggcggtctgcagctcacggttcagcatctccgtccgggtctcctcatccgtcagggtgcacggtgggtaggagtagtt

SEQ ID NO: 417045 - DNA, 122 bp, Homo sapiens
ccacaagtccaccagctgcctcgagctcaccaaggacctggtcgtccagcagctggtcaacgtgagccgcgggaacacgtccggcgtgctggtggtgctcaccaagttcctccggaggagcg

SEQ ID NO: 417046 - DNA, 122 bp, Homo sapiens
gtcagcctaacaccaccagggataaaccagtagtctgataaaattaagtttattgacccacgccagtgagagagagtgcaaacaagagggaccacagggcttcttaccaaatggagttacag

SEQ ID NO: 417047 - DNA, 122 bp, Homo sapiens
ctgggcccagtaaatcaacacagttctaatgatctctctcacttgacccttctagcgtgacggtgttgcatggaaacaaacgtacaataaacttcactccatctttagctccttgctgacag

SEQ ID NO: 417048 - DNA, 122 bp, Homo sapiens
ttccgtccaggagttaaggtggccgctgcccgcccgggacactttctcagtccagcccatcggcctttaccccagccaacgacctgttgcctttggccgcctgccaagtcactctcattaca

SEQ ID NO: 417049 - DNA, 122 bp, Homo sapiens
aatagccattcttctacctcaagacagacaagtttcagccagataagatgatattttagccgtgtgtttctcaatgggaactttattggtatttggaagaagggaattcttccttgggcaga

SEQ ID NO: 417050 - DNA, 122 bp, Homo sapiens
gaagctgcagacctttgcggtgagtgttacagctcctaaggcggcgcgtctggagttgctcgttcctcctgtccggagttgttcgttcctcccggtgggttcgtggtctcggtggcctcaag

SEQ ID NO: 417051 - DNA, 122 bp, Homo sapiens
atgatagcacagatgatagcaccgaactcataatcccgatgtttctggcttgcagttagtcggcctcagagttctgtgggtcacccatggctcgggccatcgttgtgtgtctcctgtgcccc

SEQ ID NO: 417052 - DNA, 122 bp, Homo sapiens
ttactcattaagtggggggtcattcctgctggacgcctgtctagggtccttgtttgggggcggtcaaaggagatcagagagcacagacgggaatgtgctttgcaaacatgaaagagggctag

SEQ ID NO: 417053 - DNA, 122 bp, Homo sapiens
tgagatccatccgctaaaaaaatagtcccagtttagatctatttgtaattggctttggtacgcacaccaatgagattggaactgagcctagaaaagtagtatcaacggaaggtgcaaatgaa

SEQ ID NO: 417054 - DNA, 122 bp, Homo sapiens
gataggcatttaggttgattccatgtctttgctattgtgaattgtgctgcagtgcacatacgcatgcatgagtctttataatagaatgattcacattgctttgggtaaatacccaataatgg

SEQ ID NO: 417055 - DNA, 122 bp, Homo sapiens
ctgcagagactagataataacagttggaagatgtctttcttccctccttccttccccttgcgcccgccccctccccaaactagaaagtgatgggatctttgtgtcatttgcatgatgacttc

SEQ ID NO: 417056 - DNA, 122 bp, Homo sapiens
cctagcgcagcaccccaactgtgcaaacagaccctggagggctcgatgcgcctgcgggggcgtggctggggacctgggcctgggccaggaggggcctttccctctcgccagccctcttttct

SEQ ID NO: 417057 - DNA, 122 bp, Homo sapiens
ggccgtgggcttcgccagaagcctctggaaacagagctgctcctttccagcaggccaggccgaccggggaggctgcggcccatcgtgcgctgggggaaggtgagccaggctcccatcacgtg

SEQ ID NO: 417058 - DNA, 122 bp, Homo sapiens
gtgcgctgaatgacatgtactccacctgcatcttgacctccagctacagaggccacggggcgtggacagtggttaccaccaggaggtgcccctcggccctgccagcccagtgcggggtcgag

SEQ ID NO: 417059 - DNA, 122 bp, Homo sapiens
acaggcagggcgggtgctgagcgtggaaacggggctggaattggccgagccatgcctttccgggatgcccaccgccagtcaaagggttgggggtggtctctgcaccttaagtactaacctgc

SEQ ID NO: 417060 - DNA, 122 bp, Homo sapiens
aatacacattttctttcttattaacagtggttcagcactgagtcatgcttgcttctgctacgcactgatttgttctattccagttttcacgtacatcgttttggtgacatctctgcgttatc

SEQ ID NO: 417061 - DNA, 122 bp, Homo sapiens
gtcgaccttgctactgtgcaatgaaagttttaaatgaatgcataatcattaggaatgtgtcgcctccaactaagctattagagtacaggcaggcttcttggtaggattatcttacctacaac

SEQ ID NO: 417062 - DNA, 122 bp, Homo sapiens
ttctgcttctctgccacctaggggctcctctggagtctggctgcgctagccaaaacatcccgctcagcacatatttcacaagcaactgaccagttcctcctggactttgtttatcctccagc

SEQ ID NO: 417063 - DNA, 122 bp, Homo sapiens
agcaccaagcactgtatctgatataaccaaagcttcaaaggagggtgcaggcccaggagtcgtgtggccactgccaggagagctaaagccataagagtgagtggggaaggggaagagttcca

SEQ ID NO: 417064 - DNA, 122 bp, Homo sapiens
agccggccctggaagcttcgccctggactagactggcaccgacgccgcccccagcctgagcgctgagagggaaaacgagagctagaaaggaaagaaatcggactggtgactgcctggcaggg

SEQ ID NO: 417065 - DNA, 122 bp, Homo sapiens
ctgtacttaaaagttctggtctccttagaggcttctgtttccgcagccaacgacagggtgcggggcgggggccgggaggcgagggccagcaggaccggggtccagtcactttcacgggtcct

SEQ ID NO: 417066 - DNA, 122 bp, Homo sapiens
agaaggcactcagcacacgaggagcaccccggcatgcacgaagttctgacttatcacacacggagcagtcgtagaccacatggcccaatatatgcctgacacaaagggcacaataactgcgc

SEQ ID NO: 417067 - DNA, 122 bp, Homo sapiens
tgtgtgtgtgtgtgtgtgtgtgtgtgtgtgtgcgcgcgcgcgcccgcgcgcccgtgcgcgcgcgcgactagtgtgcgtctccaaagtggatctcactcagagctgggaagcacaggaggaaa

SEQ ID NO: 417068 - DNA, 122 bp, Homo sapiens
gtagggcagagtggctcaaacatataatcccaccactgaggaaggtcaagttgggaggatcgcttgaactccaggcgttcaagacctgcctgggcaacatggtaagaccctgtctctccaaa

SEQ ID NO: 417069 - DNA, 122 bp, Homo sapiens
gccctcgcccagaagcgagggtccgagtggccacgtgtccggcagggaagtccgaggtagcgagggagtccacctggccgcccgctccccctcccgggtataaatcttggggaccggaaata

SEQ ID NO: 417070 - DNA, 122 bp, Homo sapiens
agtggacctctctagacccaggcgtgcggtgggtgaggaggaagagaggccagatcaggccgcctcgaagacgttggcactagggagtcactgacctgcttgccacgggcagagtgaccctg

SEQ ID NO: 417071 - DNA, 122 bp, Homo sapiens
acacagtcctcgggcgccaggacagtgcacggcctcccggtccgccgggctgctccacgacggtgtccccagggctgcgccacaacagtgcacgacctccccgtaactcgggctgccccacg

SEQ ID NO: 417072 - DNA, 122 bp, Homo sapiens
gtgcaacagagtgagactccgtctccgaaaaaaaaaaagaaagtaacatcaccatggtgacgggcatcattgagttacatcacaaagctccatgtaggcagggtccagagaaaaggtgttac

SEQ ID NO: 417073 - DNA, 122 bp, Homo sapiens
ctcgagaggtgcttgcagtgcaggacccagattctcttgggccaggctggcaggactccgcgggggtggcgggcggtgcgaggatgcagggctttgttcctttgcaagcccccaaaatgttt

SEQ ID NO: 417074 - DNA, 122 bp, Homo sapiens
gcaatgagctggaaagggaaccttcaagggccaccgaaatcccaggaaaggcgccagattcgctttctcccggcctcaggcagctctccctacgaactacctcctccagcgcgccaagccgt

SEQ ID NO: 417075 - DNA, 122 bp, Homo sapiens
ccgccgccgccgccgcccgcaacccgcctctccctacgggtcccgactgggcaccacttccggtccgacacggccacgtgttacatctaaatggcaccgtcccccgagtgcgccgaccttgt

SEQ ID NO: 417076 - DNA, 122 bp, Homo sapiens
cgggattccttgatactagtagccaatcacaaagtcaaactagtgccccagaaggcgggacgagtcgccttaacaaccagagcgtctgccacagctcccgaacaggagggatggggagtggc

SEQ ID NO: 417077 - DNA, 122 bp, Homo sapiens
tccgcagggtccccggcgtccgccgaaaggtcgccgcggcaaagccggcttctctggccgcgggatacccacccggccgcactgctctcgccacgatccctcccggccgcagcgccgacgcc

SEQ ID NO: 417078 - DNA, 122 bp, Homo sapiens
cagattctgtggtgtgtcggtgcagtgctcagcatcagccgtgacggtcacactggcactcgctgtctgtgtcacgcattcgcatccactgtcagcgcgtcacagtggcgttcgcggtgagg

SEQ ID NO: 417079 - DNA, 122 bp, Homo sapiens
gccgggaggcgccgcggaggggagtcgcatcccggtgcggacagtgcccaccgcgccctgcgaggaccggcgacccaccggcctcttccagggccagcgcagctacccgcccaacttcatcc

SEQ ID NO: 417080 - DNA, 122 bp, Homo sapiens
gggcgcgctcaggcgcccggaacccgagcgggggagggggaggcggcggcctgttggccccgggacctccacgtcgcgcgcaggccactaacctgtcagcaagaatgtgccagtggtcgcgg

SEQ ID NO: 417081 - DNA, 122 bp, Homo sapiens
gctttcaggacagcaggaaagcaatgatgatagccatgcaacaacagtaacaacagaaatcgtgccagcaaaaatttattgagcatctactacgcaccaggttctgtgctaagcactttagt

SEQ ID NO: 417082 - DNA, 122 bp, Homo sapiens
tgaagaaaataacattcatgtttttcaaacactcatgaggaatcttaattttgacagccacggacagcatttagtgcttttactttctggaagaagaaatgtgtggaaagtaagtaaataaa

SEQ ID NO: 417083 - DNA, 122 bp, Homo sapiens
gaagtcacccacaggccttataaggcacgggagtctttcacctattctacttacggtgaccgaaccgcgccctttcctgtccatcttggagcctttgggagaatttcatgcaacggaactca

SEQ ID NO: 417084 - DNA, 122 bp, Homo sapiens
tcaaaacaacagggccaccagctcctcaagagtccaagctatagtttggcccaaatgtcccggccagggtggctctgtgtcaaaggccctgcagctcctccctcctgtttctctgggccctc

SEQ ID NO: 417085 - DNA, 122 bp, Homo sapiens
agagagagccgccggtcctcgccttttttctgatgcatccagggatttgtagttcccttacggccaccaagtgcacttagggcaggcctcttactacgagtcccgtgatgacccgaggccgg

SEQ ID NO: 417086 - DNA, 122 bp, Homo sapiens
atttgggggaaagttttcaaagggggttggggttgggggcggtaagtcgagcagcaaaggcgtttagggggcagcaccgggagtcgttttcatctccagcgtttccaaaatagaaatagaag

SEQ ID NO: 417087 - DNA, 122 bp, Homo sapiens
gtcctctgtccctatcctacatatccccttggtggggcccaacgtcctgcgtggtgtgaccgagctctttttttctggcccctccatgtgccagctctttggccttgttatcgctgtggctt

SEQ ID NO: 417088 - DNA, 122 bp, Homo sapiens
aagtccccggaaagggtgtgaaaaagtatcgaatttgggtgatgcctcctcctcgtccagcgcctgacagggcccagctcctggcccaggtgcccaggaggcaccgatccccgcagccggcc

SEQ ID NO: 417089 - DNA, 122 bp, Homo sapiens
ctgggagctgatcccgacagttctgctttctgaagtcctgggttgtatcagaatgagattcggctctgctcagcagaagccccagtcagcccaagagtgttgcttaactgcttcagccctgt

SEQ ID NO: 417090 - DNA, 122 bp, Homo sapiens
aacaaaatctacgtgatcgccttggagatgccggggatcgaacccggggcctcatacatgcgaagcatgcgctctaccactgagctacatcccctggcacaagtcggttgtaacggagaatt

SEQ ID NO: 417091 - DNA, 122 bp, Homo sapiens
ggaggcaggcacaaaggagggcagtgccaggcagctgtggccgacgcaggcatcgctgcccgcctgcccctagccggcctccccgccgaggggaggacgcgtgtgcaggggcccgggcagga

SEQ ID NO: 417092 - DNA, 122 bp, Homo sapiens
caaggcttctcccccgtctttgtgtctccggagccttgcacgtggtaggtgctcggcattcgttgactggatcaagtagggcgagggagcgcggcccgttccggtttgaaactgctctggac

SEQ ID NO: 417093 - DNA, 122 bp, Homo sapiens
gctgaggattgggggagggcagatttgggtcagagtcagcagctgcaaacatgaacaaatcgctgcctcttctgtggcagtttttctatacacatatttggaatccagccacttcctctgca

SEQ ID NO: 417094 - DNA, 122 bp, Homo sapiens
cccacttgtgcaggcggctgtagagtgggaggccctggttctcacggtacaagtagacgccggtgatggcattccactgtggccgtggctgcgtgccttccactgggaagttggcaatcagt

SEQ ID NO: 417095 - DNA, 122 bp, Homo sapiens
cctggcgcggggacccgtgggcggggatggtggtcgtgtccccaagccctgcgtttgggccggtgcttcccacagctgtgcgttatcagccccatttcacaggtaaggaaactgaggaccgg

SEQ ID NO: 417096 - DNA, 122 bp, Homo sapiens
atttccttttggttggaagagatctggccagttgtgctgggcccctgggtgtaatttttgcgtatcttgttttccaggaaattcaaagaaataggtagggatcgttctgtttctacggaatt

SEQ ID NO: 417097 - DNA, 122 bp, Homo sapiens
agttgtcagaggacctatttccatttcaataattactcttgtgattcatgtctggattctcggctctggcacctccacagccattttaaactgaaccttaaaccccaaatctcttaccttat

SEQ ID NO: 417098 - DNA, 122 bp, Homo sapiens
cccttgcctgcctcccatattcttacctcacatagatttctaaggagatagctggggccccgcccatagttagttcataatcagtggtggctgtctgagttctgtgtgcagagctcttttgt

SEQ ID NO: 417099 - DNA, 122 bp, Homo sapiens
tccaggtcatcctgctccgtgccctcgccttcctggcctgcgccttcctactgaccaccgcgctgtatggggccagcggacacttcgccccaggcaccactgtgcccctggccctgccacct

SEQ ID NO: 417100 - DNA, 122 bp, Homo sapiens
ggctgtaagacatttctaagactttgacttttaagactttcctgcctcattctgaaggtacgtagtcgttttctgtgcccaatgtctgtgctcctaaaaatttccccttgctgacctctgtg

SEQ ID NO: 417101 - DNA, 122 bp, Homo sapiens
gagccagcccggaggagctagaaccttccccgcatttctttcagcagcctgagtcagaggcgggctggcctggcgtagccgcccagcctcgcggctcatgccccgatctgcccgaaccttct

SEQ ID NO: 417102 - DNA, 122 bp, Homo sapiens
gtagctgggactacaggtgcccaccaccacgccgtactcattttgcctttttagtagagacggggtttcactgtgttggccaggctggtcttgaactcctgacctcaggcgattcacccgcc

SEQ ID NO: 417103 - DNA, 122 bp, Homo sapiens
atttcattaagcctttttctttttccctaaaaaaggttatggttttggaaatactttccccgtggggttgttgtgagagtccagtgaaataataaggagtggtgcttattacaaaatcaaac

SEQ ID NO: 417104 - DNA, 122 bp, Homo sapiens
acacccatggcaaacaaggacgcgttgtccacccactaataggacctcaccacctgcaggcgggcagatcccaaggtttcctgatattccctactgctgcagtctctgcttgggacaaagtg

SEQ ID NO: 417105 - DNA, 122 bp, Homo sapiens
aaccttggtgacagcagcgcagtgccaatgctgatcacactgcatgggagattttgttaacgtctgccacccccactctcacccccaagctctaagcccccgggaggcctggactgtcttcc

SEQ ID NO: 417106 - DNA, 122 bp, Homo sapiens
aggtgggtaagaatcacccgagagatcggtttaaaatgtagactgcagggagacactccccggtaaacttttggttcaataccccagtagcacccattttaacaaacttcccaggacgacag

SEQ ID NO: 417107 - DNA, 122 bp, Homo sapiens
ttaagcgggtgtggtggtacatgtctgtagtctcagctacttgggaggctgaggcagaagcgtcacttgaacccaggaggtagagattgcaatgagcagagaaggtgccattgcatcctgcc

SEQ ID NO: 417108 - DNA, 122 bp, Homo sapiens
agaacagaagacacagacacgtacgtctactacccttgttagaaggaagctttggatcttcggtgggtaaggagatctatctagctattttgtccagaaactgtgagaaaaggaatgatcat

SEQ ID NO: 417109 - DNA, 122 bp, Homo sapiens
gagacgctaggcagggaaccgtccaatcaggcacgcaggtgaagcggacagggcggcttccgggtttggcggggcctttgtccctcgctgtggcctgagctccaggtctcgtcttcagcgct

SEQ ID NO: 417110 - DNA, 122 bp, Homo sapiens
cccttctgctcttcctcttgtctgactctatttcggggcgactgcctctttcctctccagcgttcggattctaaatctgtcttccaagagagacccgtgggaagcaggcagtgcctaattgg

SEQ ID NO: 417111 - DNA, 122 bp, Homo sapiens
acacctggaccgctgggcggcggcagcccccttagtgcggcagcctagcgttccccttaccgctgtaaggaacaggaagccccagaaggctggcgcttctcggagatctctccaccctgcac

SEQ ID NO: 417112 - DNA, 122 bp, Homo sapiens
gacccagcaccctccgcagctgctggcaccggtgctaagcccctcactgcccggggccagcggtgctggccagccactccgaatgcagggcccacccggcctgcgtacagccccggttcctg

SEQ ID NO: 417113 - DNA, 122 bp, Homo sapiens
taagacgccacttccaatggtcatatcgtgaaggtttcctcgaaggatcgtgaaattccacgaagtccgcttgctttcctgggtgaataaacaccaggccgctccctggactttccttgtcg

SEQ ID NO: 417114 - DNA, 122 bp, Homo sapiens
gatgtggcttgcttccatgtaccagtgggattctgattcatgcttcagaaaagtgacaaacgtttatgtatcccatattttcagtactcagggaagcaaggcactgccaagatactgccaca

SEQ ID NO: 417115 - DNA, 122 bp, Homo sapiens
ttacgactcgtgaaaaaactcagaggctcggctgactttcccatcatcctttgctgtacacgatgctgtttgtaggtttcctgagcactgcctttgttcaagctgtgcgccacctctcttgt

SEQ ID NO: 417116 - DNA, 122 bp, Homo sapiens
atacaagccagagataatatcctcccaaataggtttactgaagtcaacccattacaagtgcggacatgcttggagataacagaagcctgcgagttcttaatatcctgcctggcatgcgggag

SEQ ID NO: 417117 - DNA, 122 bp, Homo sapiens
ggggaagggggctgggccttgtggacccggtgaccagccagcccacggtgacagagcccccggcgcccttgccttcccgcagcatgtggtcctgtacccgctggtggccaagagtctccgca

SEQ ID NO: 417118 - DNA, 122 bp, Homo sapiens
ccgccacagccacttcccaccggttccaaccagttcctcccctgctctcgtgatgtccgacggcactcaccatttctaggcttccaggaggtcctggcgtcttagctgtggatctcccaaaa

SEQ ID NO: 417119 - DNA, 122 bp, Homo sapiens
atcctccagcctcaacccaaagtgctgggattacaaggtatgaaccactgtgtccagcaccgaatgctttttaatatgtttgctgatgtggagtggagcctccaaacgaattcttgaaatca

SEQ ID NO: 417120 - DNA, 122 bp, Homo sapiens
agatgcataatatgtatcagaaaacacgaatttgtcctccacatgtttggttccctatagcgcaaattcaatttttaaagttttctgaattgctacggttaccacaagatggcccccttgtg

SEQ ID NO: 417121 - DNA, 122 bp, Homo sapiens
tctctcccgccggccccatcctgtccatccgcgtgtgccgcgatgtagccacccggcgctcgctgggctacgcctacatcaacttccagcagcccgcggacggtgagccccggggatggggc

SEQ ID NO: 417122 - DNA, 122 bp, Homo sapiens
gaggagtggggagcggcagggcctaggcgtcccgagtggaggatgagccggagacgcctgcgggtccggagctgcaccgcgcccgtgcggcccgcgccgcccgcctcccgcgctctcccttt

SEQ ID NO: 417123 - DNA, 122 bp, Homo sapiens
aaaaaaaaaagtggggaagtgaaacaaatgttaaagtcagaggagaaagaaaggcccaaccggaggccccaaatccacccagagcccagaagcccgggtttcccaccgaccggctgcggtct

SEQ ID NO: 417124 - DNA, 122 bp, Homo sapiens
ttttacctcaatttaagaaaaagatgtcgtagggccgtttgaaacgcacatcagaaggagcgaatttcctgcagagctgagcctcccagggcggccacaccttccccacacgttccctcggc

SEQ ID NO: 417125 - DNA, 122 bp, Homo sapiens
tcagaggaggagggagaatctaacctgtcagcccttttactcagccacagcctccggagccgttgcacacctacctgcccggccgacttacctgtacttgccgccgtcccggctcacctggc

SEQ ID NO: 417126 - DNA, 122 bp, Homo sapiens
gggctagagattgcggggtggaaaagtgggaggacatcttaaagtcagaggtcaaagcaacgtgtattaactccatcatcaggtagcactcttaacctgggccaggcaccatgaggccaggg

SEQ ID NO: 417127 - DNA, 122 bp, Homo sapiens
cgcattcttcctcctcactcaccacagtcgtgggggctgaattcccgaattactaagactcgcctctctcggggaactcggtcgctgtccttaccacctctccgatggctcctcccatccct

SEQ ID NO: 417128 - DNA, 122 bp, Homo sapiens
ctggctccgttttgtattttttatacacatgggcttacaccatgttgccgagactggtctcgaacacctgagctcaggtgatacttcagtttcagcctcctaatgtgctgggattagaggtg

SEQ ID NO: 417129 - DNA, 122 bp, Homo sapiens
actggttcttttctttgggcatctgctgaaagaacatcacatgcccacctaaatagggtacgcctctctgtattctatcattaggagcagcaggacatctggggatgagaagatggagagat

SEQ ID NO: 417130 - DNA, 122 bp, Homo sapiens
ttttggttgcaagctgatattttcataggtctatgctaccatcctcactaggctgaggatcgctgggaaattcgtcttatcaacagagctcagaaacctcagaaatgggcaaggtgagacac

SEQ ID NO: 417131 - DNA, 122 bp, Homo sapiens
ggagtaaattaattatttccagcctcacctgtagcccctaacatctcgaatcctccctttcgacattagaaaagtgaaatgattgttctgtaggataatctgtggcccttccagctccagag

SEQ ID NO: 417132 - DNA, 122 bp, Homo sapiens
cctagaccctgcctgaggtacagctcctgggtcacctcatgcaaccaaaggtgggcgtctcggggaggttcccaccagcgcagggaggtggcttctgagcaacctcactaaagtctccacca

SEQ ID NO: 417133 - DNA, 122 bp, Homo sapiens
agggccagccgtccccactgggagctgggagcactagggccctctctggctctggcctggcgcagctgactgtgagcgttgtgagtgccgggccgcaggctcaagactctccagcccgcggt

SEQ ID NO: 417134 - DNA, 122 bp, Homo sapiens
tgtcagtcggcggcgcctcctcggaacccgggggagtcgccagccccgcgccgctcggctcggtggcttttttggaaacttgcaaatgttttcgtagagagaaaagggggagggagggagcg

SEQ ID NO: 417135 - DNA, 122 bp, Homo sapiens
tttacatttttcgcaggtgttctgggatgtgaaggggacgtgtccaacgtccaggtccttcgtcacagccataaaggaggccatgcgtgggacacgccctcattccaggcaatgtgagagac

SEQ ID NO: 417136 - DNA, 122 bp, Homo sapiens
atggtccctgagccccgttgccaggcaaccaccgggtgcacccaggcaaccgccatcccgcgtctggcctgggcttcgtgtttccaccacgtcagccccagtgcccggagcggcacccagct

SEQ ID NO: 417137 - DNA, 122 bp, Homo sapiens
atttgacgtcttgacaaacgagtctgttctcttctggtttcacagctggagttgtgggcacgtcccagcaaagggacaccgttcacagaaatagcataaccttcccagcacgggtgccccag

SEQ ID NO: 417138 - DNA, 122 bp, Homo sapiens
ttgcatatcactgagggcaacatgtctcttgctactgtctacttaatggaggttttaagacgttaaatccccttaatctctaggtcatggaaggcttgggggtattgtgtcctcttattctc

SEQ ID NO: 417139 - DNA, 122 bp, Homo sapiens
catgtatccctatgtacacatacgtgagagcgtaggtacattgaatcaggcatgtgaacacgcatggatgtgactacacacctgcctgcctctagggaggtccatgtgaaggaatgggtgtg

SEQ ID NO: 417140 - DNA, 122 bp, Homo sapiens
cgcgctgggtgcgggaagggggctctggatttcggtccctcccctttttcctctgagtctcggaacgctccggctctcagaccctcttcctcccaggtaaaggccgggagaggagggcgcat

SEQ ID NO: 417141 - DNA, 122 bp, Homo sapiens
aaggataggaaaaaaaaatcttaattcacttttatcccggaacctaacataagagtcttgcgcgtagttagtgctcattaaaagactgttgcagaaatgagcagctgttaaactctgagcct

SEQ ID NO: 417142 - DNA, 122 bp, Homo sapiens
aatctcccgtgatttttgtaaaccaccttctttttcagagcggacaaaattaaaagactgcgagtacccgctgatttccagaatcctgcatgggccatgtgagaagatcgccaggatcttcc

SEQ ID NO: 417143 - DNA, 122 bp, Homo sapiens
ggaccaagactcagggaacattgagacagagcgtttgtcacaggaggagcggggtcagggcgaagtcccagagccccaggcatggctctcagggtctcaggccccgaaggcggtgcatgggc

SEQ ID NO: 417144 - DNA, 122 bp, Homo sapiens
agtcgcccggactggaaggcagtgcgagcactgggacacagcctccgagctcgagcgtgacgggaagttggggcaatttgttagttatccgccgccaccaagacgcggcacggcgcctggac

SEQ ID NO: 417145 - DNA, 122 bp, Homo sapiens
agggaagaatagagaagcgctgccgccccgcagccccatcatgcagtggaggctggaaagcgctccacccccagggccagtgctaatcctgcagagctgcccagcggcctctcaggcagcca

SEQ ID NO: 417146 - DNA, 122 bp, Homo sapiens
gtcttctagtctccgggattcaggtcctcggctggggtttgcagagcagtcagtctgtggcgccgacagaaaccagcaccagcttcaacctccctaagagagggagagaggaagagcagtag

SEQ ID NO: 417147 - DNA, 122 bp, Homo sapiens
ctcgcctgtgacgtaggtggagcgcgcactgcctccgggcccgtctttctcaattgggaccggaaaacgttgtcgctcatcctatgacgcgaaagtaaccgagactatcaggatccggagac

SEQ ID NO: 417148 - DNA, 122 bp, Homo sapiens
catttcacaaacactgaggccctccagttgtttattcttctgggccaattagggtcttggcgacataggcactcagatggaaaacaaaccacatgacgtgctgtgaaaatcaaaactggctt

SEQ ID NO: 417149 - DNA, 122 bp, Homo sapiens
caccgggagcttcactgagtcaccaggcttgcctgcctccccgaccccaaagcagttctccgggtctttcacaaatgtcttaacctggaaaccccgccccctggactcaggggtcccgagca

SEQ ID NO: 417150 - DNA, 122 bp, Homo sapiens
gatggctcccgttgcgggttgaatggcgccctcaaaaacgtatgtccatgtcctaaccgccgggacctgtgaatctgacctatttagataaagggtctttgtagatgtcattaaggatctga

SEQ ID NO: 417151 - DNA, 122 bp, Homo sapiens
gccctgccagactcctgatgagcccgctgcccgcatgaattcctgaacagggttacataacgcctcggctgccctccccatggcactgtctgacaatgccatatttactaaacctcttgagg

SEQ ID NO: 417152 - DNA, 122 bp, Homo sapiens
catggcagagccccatggtggggtggggatggctttgcttatcaaaatggcttgggaatccggtattccgcgggcagcctagcacctggactcttcagaactgcgttgtctgtggcctcccg

SEQ ID NO: 417153 - DNA, 122 bp, Homo sapiens
tgtggcttcaacatcaacgttcggggtgagaggcttgtacgcaggggtcctggcggagggcgcagggtcggaagcttggggaactcaagatcggttgggttgaggaggggatcctagagcag

SEQ ID NO: 417154 - DNA, 122 bp, Homo sapiens
aacggaaagatagctgtatgacactgggataggggatgttttctctaacaaagtataaaacgtgcaaaacataaaggaaaagatggtatggaccgggcgcagggactcacgcctgtaacccc

SEQ ID NO: 417155 - DNA, 122 bp, Homo sapiens
gaaaggagaaaggcaggaatgaagcgggtggggggacagactggggagcagtttgatttacggcaattaattacagcaaggagactctttcggggttttgtttaggatccggtggccagtat

SEQ ID NO: 417156 - DNA, 122 bp, Homo sapiens
catgcattttgccaagcgctggtctcccctggtgtcctggcgtttgccatcccagggccccgccacactgcctgggcctacctgggtctcctctcggagcaaacccacagccacccaagtca

SEQ ID NO: 417157 - DNA, 122 bp, Homo sapiens
ttaatggggtagaggggttccccccacagtgcttctgaaaggggttgcatggggggtcctcgtccctagcagcctgggccaatcccatctgctccagcctctgctgtgtctccctgcctgca

SEQ ID NO: 417158 - DNA, 122 bp, Homo sapiens
attaacctgttaactcttccgctagtcagaaaattgacatgtaaaatattctttgaggaacgttacaagtttgctgttgtattcgggcatcctgttattcatcagcttagttagcatctgtc

SEQ ID NO: 417159 - DNA, 122 bp, Homo sapiens
atcatcagctgagcgatgatgccttacaggttgcatagcactggaactttcctagagtaacggctctgctgccagggtttctctgggctcattcttccactgacttaattatgatctatgcc

SEQ ID NO: 417160 - DNA, 122 bp, Homo sapiens
atcttgcccagcctctctgctccacctcccagttttctgatttggtatttaggatgatggcgggagagactatgaattttggggtgggcataatgtctttctattcatatgtaactaatata

SEQ ID NO: 417161 - DNA, 122 bp, Homo sapiens
ccctggacccgactgtattgcccaatcatttcctttcatttgtcatcaccaccttggacccgccccctcgtctcaggccgtcgcacgcgttttgcgtcagttggcaaggcactttacggccg

SEQ ID NO: 417162 - DNA, 122 bp, Homo sapiens
gttgtgaaagagaattgcttttaaataatgcattcaggttaaaagaaagggcaaataccacgaatggtttccaaaacctcggttaggtccttcctaatgtttcagtggatgagaacaaagaa

SEQ ID NO: 417163 - DNA, 122 bp, Homo sapiens
cgcaaacgctcccgggaggtgtagtttgcgcctatttcgcgcaggcgcgctttcccgcagcggccgcctgctgctctttgtggcagtcgcagtccttttgtgggagtccggtctgtccactt

SEQ ID NO: 417164 - DNA, 122 bp, Homo sapiens
gctggatgtggagctgacagccacagccacatgctgcctcctgacgctttcctcatgactcggcagcaagtccttccttgatgtgggatctgggtcgtccagtgtcatgtcttcctcagaga

SEQ ID NO: 417165 - DNA, 122 bp, Homo sapiens
gcggggctgccgaggtggcgcagagctcccctcccccacgccttataatttaatcacacgcgatattaaattatcaagctgctcattaatcatcacgcgagttattgggactgaacacgccg

SEQ ID NO: 417166 - DNA, 122 bp, Homo sapiens
agggtgccccaaggcccacctgtaccaccgtgatgttcagtcggcccacggtgcccactgcgcctccgtactgcagctgctgggccgcctgggcgtccagctggacctgccgctgctgctgt

SEQ ID NO: 417167 - DNA, 122 bp, Homo sapiens
ttggggtatgtgtgatattttgacccctgtacacaatgtgtttgatcaaatccgggtaatcgggaaacccatcgcttcaaacatctatattgtctttgcatttggaacattacaattcttct

SEQ ID NO: 417168 - DNA, 122 bp, Homo sapiens
ccaggaaagggaagtgagttaactgcaattgggtccctaagaaagggccctccccaaccacgcaccagggaaggatatggtagaaatcccagacacactgggagatctgagagcagagaaga

SEQ ID NO: 417169 - DNA, 122 bp, Homo sapiens
atggcggctgccccctccgcgctgcttctgctgccgccctttccagtcctctctacctatcggctccagagccgcagtcgtccttccgccccagagaccgatgatagtcgagttgggggcat

SEQ ID NO: 417170 - DNA, 122 bp, Homo sapiens
tggctgaagcaggaggacggcgtttggagggtggggtgggcgcgtcctctcggcggcccgcgtggactgacagccaccactgcccccacgctgccctcgtgcccgcggttctaagaagtcga

SEQ ID NO: 417171 - DNA, 122 bp, Homo sapiens
cggaggctcccgcagccccggcgtccgccccgctgccccctcccccgggggccatgggggcgcccccgggctaccggccctcagcttgggtgcatctcctccaccagctgccccgcgccgac

SEQ ID NO: 417172 - DNA, 122 bp, Homo sapiens
atcgtctgtctgtgcaagtccttcgagttaggtaagtaatacgggcaagtgtcccgcggccgtcagctgtccgagtccaaatcgcttttaccttcctcttccctcttctccggtgacgcctt

SEQ ID NO: 417173 - DNA, 122 bp, Homo sapiens
gtctgagctatgcggaggacgcggctgagcacgagaacatgaaggctgtgctgaaaacctcgtccccctccgtggaggacgccacccccgcgctgggcgtccgcacacgcagccgagcaagc

SEQ ID NO: 417174 - DNA, 122 bp, Homo sapiens
tgggttctcatggcattcagtaccattgtggcaagggctgcagatgagagagtgagaggccgcaaagcccatgaggccaacacctgatacagctctttaaacacagcccgaatgccggcggt

SEQ ID NO: 417175 - DNA, 122 bp, Homo sapiens
atggtggaatgaaaagagctttggagtccaccaggtagagtcccagctctagacaccaatcgtgtgatatcctctccaagcccactttcctcatctgtaaaatggagctgataattcttacc

SEQ ID NO: 417176 - DNA, 122 bp, Homo sapiens
tggcaggctctgctcaccccaagctttccattttgatcagtttaattccctaggagccgacgactgccatcggaaggaagagaaattgtgagctcgcgctgggctgccggggaggggagggc

SEQ ID NO: 417177 - DNA, 122 bp, Homo sapiens
gcctgccctgacaatttcatgctcctgtcaagaagcgtgagctcctgcatccacacacagcggttctcgggaggaaaagcatcacaggcaaggcaagggagaggaagaggaaggtacatttt

SEQ ID NO: 417178 - DNA, 122 bp, Homo sapiens
caacggggccccggagtcgaagacagttctagggttcagggagcgcgggcggctcctgggcggcgccagactgcggtgagttggccggcgtgggccaccaacccaatgcagcccagggcggc

SEQ ID NO: 417179 - DNA, 122 bp, Homo sapiens
agaggccggagggggtggggggcaggccgacggggtgggacaggaaaagcggagagaaaccgccctctgcaggtccccttggctcccccgggaggaaaggcagcctgcccttctccgattgt

SEQ ID NO: 417180 - DNA, 122 bp, Homo sapiens
aggggaggggtgaaagagccttttcttcctaggacctttgacaaattctggcagtgtccacggcactgtaaaacaaaacaagagaaaattcaagctcatgctgccagttcagtttatttcgg

SEQ ID NO: 417181 - DNA, 122 bp, Homo sapiens
tgctccgtggaagggcaccataaagtcacacgcactggtccttgctatgcattcacctcccgactctctccaagcccagctcaggattgctctccagaccctaggagcctcccagcctttta

SEQ ID NO: 417182 - DNA, 122 bp, Homo sapiens
agtgaggaaggggagacagttaaaaagccaataaacacaaatatttcaaatagtgaaaagcgcttcaggatagtgagacagaaggtgactaggagtggggaagaagctttactcctagtgtt

SEQ ID NO: 417183 - DNA, 122 bp, Homo sapiens
tgtgcttgcacggggtgtggatgtggtttgcttcaggcacttccctttgacagagagggacgcccaaggatcctccaggctgttctgcaaccccctgggaagcacagaccctggggcagagg

SEQ ID NO: 417184 - DNA, 122 bp, Homo sapiens
tccgggcacgttggacctggaggcccgcaattatgacggtaagcatttaccgcggggcaccgctgggctgtccagcggacctggagtccatcagcggccgcaaagcccgggcctaggtttca

SEQ ID NO: 417185 - DNA, 122 bp, Homo sapiens
cccagctattcggagtccaaacggctggaattcgtggcagccagactgggcgcggagctgcggaatgcctcgctgaggatgttcgggttgcgcgtagaggatgaaggcaactacacctgcct

SEQ ID NO: 417186 - DNA, 122 bp, Homo sapiens
agcagctccgagtctccacagcgcgacccgcccccgccgccgccgccgccgccgctcctccgactgccgctgcctccaccccagcagcgcccgaggctccaggaggaaacggaggcggcaca

SEQ ID NO: 417187 - DNA, 122 bp, Homo sapiens
gtcctggggctgagatggaacaggtcaggatggatgggacaggacccacagactggatgccgcagggacagacctggtaagtgacttatgtgggagggaggggccaaactgctgtagggggc

SEQ ID NO: 417188 - DNA, 122 bp, Homo sapiens
cagccatctccgtattttacatagtaatccatcacttaaggtctacaacaaaacctctttcgcaaattctctggcatcttcctcctttaagcttctttttaattttgcactcccttttcctg

SEQ ID NO: 417189 - DNA, 122 bp, Homo sapiens
gccaaatgacagaattttcacccaagaaggtgacttcctcagaaagtatggatatgaacacggttggtaattctgagggaagtgggcagaacacatgctatattagtctggacttgggataa

SEQ ID NO: 417190 - DNA, 122 bp, Homo sapiens
tttctctgtagggagaatagttcattccaataatgaatcttcattatcttgacacctcggcgaaaggatcattgtctaactatttaatcaaggttaaattttgttgtttctgtgggatttat

SEQ ID NO: 417191 - DNA, 122 bp, Homo sapiens
ggaagggagtgccgtgagctgctgggccactgtgggctttttatcttttcccaactgggccggctccccagctccacagacactcctgccccatcgccccaaggggagagggaggggtcctt

SEQ ID NO: 417192 - DNA, 122 bp, Homo sapiens
cggctgagatttggcgcctctgtccccaagcgggtgggtttggatatatacctgcacaagcggtgcaaggtgatgagaatgagggcggaggggcggtggggactcgagtggaagggagtgtg

SEQ ID NO: 417193 - DNA, 122 bp, Homo sapiens
agcgggaagaaaggttccgcagacgctggttccgccccggctctgaggcccttcgggctgcgttctggggtcctggagggactcatgcgtttacttaaacagccatagccgttgaacggaac

SEQ ID NO: 417194 - DNA, 122 bp, Homo sapiens
tgcacagagggctgggtccgcaggctggctaaaaggacctagcccaggattgcgaggcagcgccctccctgcagctggacagactcgggcgcccggcccaaagcccggcaggggcgtgtccg

SEQ ID NO: 417195 - DNA, 122 bp, Homo sapiens
ataggcactagtgggaggagaataaaagggagatgcattaattcctggtatgacaaactacgtgatagaactagagcagtggtctgaaaactttttctgtgaaaggccacatagtaaatatt

SEQ ID NO: 417196 - DNA, 122 bp, Homo sapiens
ggcagccggggatggagcggacagaccgctggtgctcttgatagattctcgcagcacttgcgtccccagggcagccccaggatgggtgctgggcagggtggtgcccagcctggcaccgcggc

SEQ ID NO: 417197 - DNA, 122 bp, Homo sapiens
ccaaaggctgtcaccgctgctttttctcgaaatgcccgcccgggtcctgtctggggctcccgcctacgcgctcatcacgtgcacagcccaaacttttcagagccggcccgaggcctgcgggc

SEQ ID NO: 417198 - DNA, 122 bp, Homo sapiens
aggaaacatctcagccctgggctgagaatctgcctttctctgcagaccgtgatggctgaacgtacctccgaggattcccactttgtccagaaacttgttagagctcccttctcctcccctat

SEQ ID NO: 417199 - DNA, 122 bp, Homo sapiens
cattctaattgcagcacggcagcatgccaatcaattacatctaacagaccccaacgtacccgttggaacacaggcggttccatccaccgatccagagtgggattaccaagttgggcaagcag

SEQ ID NO: 417200 - DNA, 122 bp, Homo sapiens
tgtcagcctgggtcttgagtgatactggagcagaactccctcaaattgttccttctgccacgctaaacttgttagatattagcataaataagaaataaaccatttagactgatactttggga

SEQ ID NO: 417201 - DNA, 122 bp, Homo sapiens
tctggggaaccagcatttaactctgggaagtccaaaataaccttttcgggttcaggtcggcggaaagccccgcccgaaggggctatggctccgcccacgagcgcaaaagacccgccttccgc

SEQ ID NO: 417202 - DNA, 122 bp, Homo sapiens
gctggtcagaaggtctgtggcggcaggtgccctgcgaatgccaggcgccatggagaaagccgaggtgtgtgcgggaaccccataaaagagatcaagctatttaacagccacccccgatttcc

SEQ ID NO: 417203 - DNA, 122 bp, Homo sapiens
tacaagcttttgtttctcaaagcataaaagtatcataaatattttgctgggatgcttctgcgtttctctcttaacctcatgacatgttttttttcttcttccttcttcctttttttttggtg

SEQ ID NO: 417204 - DNA, 122 bp, Homo sapiens
ggtgacaaagaagccacggtggctcctgtcctcagggaagccgtggtctcagaggtcccacgtagcagaaatttcatggttggaaatggtgcgaaggggacgtgtgtcttaagaccgtgttt

SEQ ID NO: 417205 - DNA, 122 bp, Homo sapiens
ccagagctggagccaaccagggaacttccacacagggacaagctcagcaggtgattcttacgcatcaggttacccgcgcatgggcagaccagtactagaaaggcacattcatattcaaaaga

SEQ ID NO: 417206 - DNA, 122 bp, Homo sapiens
acccggtcctgtcgaccaatcacgaccgcacagcgggacggagtgacaggccacttacgacggtaggcggggcttagcgcttcaccctttaacaaaacccaaacaaaccaaacggcgactgg

SEQ ID NO: 417207 - DNA, 122 bp, Homo sapiens
ccctttgtatccgcaggtttcccatcctgcctccgcatttggtaggggttaaagaacccgcggatacggatggccaactgtattttatttttcgaaggccacttataagtggatggatgcaa

SEQ ID NO: 417208 - DNA, 122 bp, Homo sapiens
agacacatggtccgaaccattactgatagttttggagggggagttagtttgatctgcacacgagagtagtgtaaacaccgccaacacttatgaagtgtcccttctaatattgtaatacaaat

SEQ ID NO: 417209 - DNA, 122 bp, Homo sapiens
gctgctggtgactcaaggccgggtaaccagcgagccctgaccgtccctccgtgcaggactcgactcgacaaggaatccagggaattgctccgacaacatcaggcccggactcttatttgttt

SEQ ID NO: 417210 - DNA, 122 bp, Homo sapiens
ggggacacatagacccctctccaaagttaattcctgtgcctttggctgcggaggcgcaggcggtaatgactccgtgcgcaccggcagtgtttgtgaaatggctcttcccgcagacagcagag

SEQ ID NO: 417211 - DNA, 122 bp, Homo sapiens
cgggtcggtccggccgccaggtctagtgagggcgttggcggagccggggcactgccctggcggggaggagccggcgcggcgggggcggcgcgttaaccagctcggggcccgggagcgcgcgc

SEQ ID NO: 417212 - DNA, 122 bp, Homo sapiens
ggacccgtcgggtggggctgttacctttccacacggcccgttggcgcagtgcacacggtccgccagcgtatttaacaggccgcccagagcctcttgatccagagcgccctggccagaggtga

SEQ ID NO: 417213 - DNA, 122 bp, Homo sapiens
tttttttttaatccgccggcaaatctcgttaagtttcttctgataagtggttccagcacccgcgccttctccccgtcctggccgcttcccagtccccgtccttccgaacgccccactcctcg

SEQ ID NO: 417214 - DNA, 122 bp, Homo sapiens
accctgaactcagactctacagattgccctccaagtgaggacttggctcccccactccttcgacgcccccacccccgccccccgtgcagagagccggctcctgggcctgctggggcctctgc

SEQ ID NO: 417215 - DNA, 122 bp, Homo sapiens
ccacctgcaatgagaagccctgcacaaattgtcttcattgtacaactcccctcgccagaacggttccatatatatactcaagcttgggccaccatgtccctcatactcagcctgttcacatt

SEQ ID NO: 417216 - DNA, 122 bp, Homo sapiens
gcccttctgcttccgtgtcctggctccattcctcttctcacctcatcaagtgctgtttttcgtcatccaagtgtcatgaggggtggtgagttgcagtggaaggaggctctcatcctgtccaa

SEQ ID NO: 417217 - DNA, 122 bp, Homo sapiens
ctgggcgcagaagagggaggccacgcgggagtcgaggacctctggtcgccgtccgaggagcgcgtcccggcgcggtgtcctgggtgcgctacgctcgttgggaggaggacggggcgcctcct

SEQ ID NO: 417218 - DNA, 122 bp, Homo sapiens
atatttagggctgtacagagcaacatgtccttgtcatcaggagcaaggacacacatggagcggaatctgactgatgggtacacattgtgctttctgcccgcttctgcaacggaagatgctgg

SEQ ID NO: 417219 - DNA, 122 bp, Homo sapiens
gagaggggaaatacgttgacgttgaggctggtcagatgtatctttcttgctgtgtgtggccggggctcctgcaggggctcagccaggacagcgccgggcagtcaggcgtatgcggctgtcct

SEQ ID NO: 417220 - DNA, 122 bp, Homo sapiens
ctgacctgctgaccgctgtgtagtcaccaagattacctccaaaatgctgagtgctgggaacgtgacaaatctgtgaatagcacaaatgggaaggggtgggggggctccagctgtcaaggctg

SEQ ID NO: 417221 - DNA, 122 bp, Homo sapiens
gcagcgaggtggagagcggtgagttgaaggccgggtctgggtatccgctgggcgggccggcgcggggcaccgagcgccctccgggtcgcagcttctgaggccgcgggcacgggccaggccta

SEQ ID NO: 417222 - DNA, 122 bp, Homo sapiens
ctgaccacaggtgccgccaccgcctgataatacgagtgtgtcagcttccgtctgactgaacgcaggtttcatgggtgcctgacagaccaagactgctggatctgtcagcctggccgcagctg

SEQ ID NO: 417223 - DNA, 122 bp, Homo sapiens
caaagcccacttatcagtctctctcaagcaatgagatcacaaggcggaggaggatgtgggcgcactggtgatgttgttcacacgtcatcctcatccctgcgctcctatgctgggcataagag

SEQ ID NO: 417224 - DNA, 122 bp, Homo sapiens
tcaaaaaataagagtataacaaaaaggaggagagcagcgaagaaaagaagtaatggaagacgctatgaggacaagagaccatccctagattccaagctgcttggttcactgttccttcagag

SEQ ID NO: 417225 - DNA, 122 bp, Homo sapiens
cttagcaaagcgtctagtatatagtaggtgcctacaaaatattttaaatgagtaaatgtgcgattttccccaacgaccagcaggaagccgcaatggctccaactctgaactgagagagttga

SEQ ID NO: 417226 - DNA, 122 bp, Homo sapiens
cctttccataaactcctgccatctcttacgactaattccattttaactacaaccatgctacgggttctatttttccctctctgtctcaagcactcctgctctccctaccaacctggatcaaa

SEQ ID NO: 417227 - DNA, 122 bp, Homo sapiens
tgcccgcctcccctcccccagcctctgagcggggcctgcggttgctactgcgacgtggggcgccaggggttgcaaggagaaggatgcaacctgttaaaacagacttctcacttaatctctca

SEQ ID NO: 417228 - DNA, 122 bp, Homo sapiens
cccacaaaaattcagcatcagataagcttagctatatctgtatcagagtgttagcggcagcgaatccatacaggtctacaggaacctcaattcttgccttctcagaagaatgaatttgacta

SEQ ID NO: 417229 - DNA, 122 bp, Homo sapiens
gaggaggaggaggaggaggaggccggtgaggtcgccctggagctggcagcgctgcagttacggcccccggcgccacagcccccgtccccgttcttgtcgccttcctcctccccttctgtctc

SEQ ID NO: 417230 - DNA, 122 bp, Homo sapiens
agaattggcagcgcctgcctaagtaaaaggcctgctttaatgaggaggctgtggctctgccgtgggcgcaggcgctgggctgagcccggcgcgggctggagctgaggggtcacgtggccacc

SEQ ID NO: 417231 - DNA, 122 bp, Homo sapiens
atctggaagcccacttcctgccccacacggggataccggggcagcaccacactccctagccgccctgcctactgtgggataagaaaacgggctcgactgcctggacctagacccggactcgg

SEQ ID NO: 417232 - DNA, 122 bp, Homo sapiens
cctcggccccgtgtctgggtgcttcctccataaaccactcctgtcagcgtcaacgggaggcgcacggtgctcctcctccactcatccctgctgggtccctgtgcctgaaaatggagccgaat

SEQ ID NO: 417233 - DNA, 122 bp, Homo sapiens
atatcctacaacgtgctgggatcaggaggcagtggtgggtccatggcatctgacccagcccgacgcccttgtggtctccaggcggtcatgacccatggcctgacccggcttggtcagcccgg

SEQ ID NO: 417234 - DNA, 122 bp, Homo sapiens
ttcaacttttgatgagtttattgggtcataatccatggtagttcaaggggcatctgtattcgataaggacttccttacagttttgtattgctgttgagcacatcaggacttccctgggcttg

SEQ ID NO: 417235 - DNA, 122 bp, Homo sapiens
gcggccggggtggtggacatcgccctgtgcggtgactgtagccatgcgtggagcgtgccccgtctcacctggtgtctctggctttagcattggacgagccagtgcccgatgaccgttatcac

SEQ ID NO: 417236 - DNA, 122 bp, Homo sapiens
taaacatatgtgtgcatgtgtctttatagcagcatgatttataatcctttgggtatataccgagtaataggattgctgggtcaaatggtatttcgagttctagatccctgaggaatcgccac

SEQ ID NO: 417237 - DNA, 122 bp, Homo sapiens
tgtcagtgtcaatcactttaatgtattttgctggtttagtaagtgtgtgacagtgatgtacgttgttttactttgcttgattatgaatgctagtagtggtgaggcttttatccatgaagact

SEQ ID NO: 417238 - DNA, 122 bp, Homo sapiens
ggcttagagggctggggctgcgcttgcaccctgaggtcagatttgtgagtcgtgggaagacgcagatggatctggggcagaattagaacctgttccaaagttgatccatgcgctttgtaaag

SEQ ID NO: 417239 - DNA, 122 bp, Homo sapiens
tgacctcccgggctggctggccctggatagggccaggtgatgtcccagtgctgtccggggcgcgactggactgccaagctgtccacgcacagccccactgggacgctggggaaactgaggcc

SEQ ID NO: 417240 - DNA, 122 bp, Homo sapiens
gcctctaaggactctccatctcaatcagcaggaccctcacccagtcagcaatggatcaaacgtcccagcttctggggccaaagacaggcctctgcctccatgctcctagtcccttccttgaa

SEQ ID NO: 417241 - DNA, 122 bp, Homo sapiens
gctgctgaaccgggtaccacactaggagaatcactgctatgccattcattccccaccacccgctaactgtagaagtggggagaggatctcccgcagggatcccaaagacagtgctagtgctc

SEQ ID NO: 417242 - DNA, 122 bp, Homo sapiens
caccatatcggctaggaaaaccaaataggaaccacagcctcagggctggaccatagacaccggataccccaacgctacagggtgaggagaatgtgttcccccaaactactgggcaaaccagg

SEQ ID NO: 417243 - DNA, 122 bp, Homo sapiens
agccagcactgctggcccaacatgtctgtgagagaacctaaaggcgcctccaggaggaagcgtctgcatcttttccttgttttttttttttttttttttggaggcagggtctcgctctgtca

SEQ ID NO: 417244 - DNA, 122 bp, Homo sapiens
agcggaggcccatccagtgggccctggagattgtgtctggaggccggattctcctccacgcgtggaggactggacgccctcagggctgcgcggggccgcaggaccgccttggtggttagcga

SEQ ID NO: 417245 - DNA, 122 bp, Homo sapiens
tatttgcacagacttggagttctgggaaacagatgaatggggagaagtgaggcacagggacgtcctgcctgagtatgcggccctggcctgtcctcctgtctgtgggtgacactggacactga

SEQ ID NO: 417246 - DNA, 122 bp, Homo sapiens
tacaagtgtaataaatgtggcaagtttttcagacatcattcataacttgcagttcattggcgatcttatacaggagagaaatcttacaaatgtgatgattgtggcaaggtcttcagtcaagc

SEQ ID NO: 417247 - DNA, 122 bp, Homo sapiens
cagggtagtgcagaatggccactgctttgcgatctttcaccgcaaggttggagtaggccacggagctcatctcttggttggcatcctagaagacagagaaaagcacaccatagtaaccctgc

SEQ ID NO: 417248 - DNA, 122 bp, Homo sapiens
agcgcgtaaatggttaaactcctggcctgggctgggctggtgcacagcctgggcccggcgcggcgggggttaaggtgggcgcccgcgccccgcgccccgcgccctcccgccgggatgagagc

SEQ ID NO: 417249 - DNA, 122 bp, Homo sapiens
caggggcggcagctcgcctcggaatgacctctgacggaagaaataaaacggggcctgggacgcttgcacgaaagaacccgacaaaaaccagagcccgcactcactctcgtactggggaggtg

SEQ ID NO: 417250 - DNA, 122 bp, Homo sapiens
gaactctaaagacaatgtattcctaaaaggggccatctgggcggtgtcctcttttcccagcgccctgatttctattcttagatctggagataggcggctttcatttttcctgctcccagttc

SEQ ID NO: 417251 - DNA, 122 bp, Homo sapiens
gcaggtcccctccagcatgtcaggagaggtggggcctccttgggcaagggagcctggcatcgcggccctgagcccaggagccagtcggcctcgcctctcaccaggtccttcacggtgtccaa

SEQ ID NO: 417252 - DNA, 122 bp, Homo sapiens
tccagtcccttctgtgattaccactccagctgctgggaacgggcgagaaagaggaggaggcgagaaactcccaccgacccacagaggtgagtcccgggcagagcatcctccatccctgcctg

SEQ ID NO: 417253 - DNA, 122 bp, Homo sapiens
gtctcaaactcctgaccttaggtggttaagtgctggaattataggcgtgactcaccatgtcgggtcctgtttttgcacatgaatgaggtttagggtgaaggacaaggaacaagtattcatta

SEQ ID NO: 417254 - DNA, 122 bp, Homo sapiens
cgcgcgcgcgcgcactggcagccaggtgggctcccggggtcggggctggggtccgggggccgggagggtccccagtgggggccggcggggcgtggggaaccccgagcgctggggaggggagg

SEQ ID NO: 417255 - DNA, 122 bp, Homo sapiens
tggtgaagcaagcagtgtaatcaatgattcttatgtgtgaggagcaactccaagtagaggcgttcatgtccctaatgcttttttatttttcctcatcagcaaatttaaactacaactttatc

SEQ ID NO: 417256 - DNA, 122 bp, Homo sapiens
cctcctaccctgggcaggtccccagtgccccacttcccatgcaaaaggcttaggtgcctgcgcttctctagtgcaagagcttggtggtcaggccagcatattttctgcttcaccaggcacag

SEQ ID NO: 417257 - DNA, 122 bp, Homo sapiens
gggtatgcacactctcccaggagggtatgcacactccccctggagggatggctgcacaaacgcactgccctaggggcttttcttccagcactggcgctccggaaaatgttgggggtaggggg

SEQ ID NO: 417258 - DNA, 122 bp, Homo sapiens
tatagcgtagccctgcatgtctgctgtgtgaaggaagaagggttgagaggagttggggagcgctagagtgggggctgtctctagggccttttttacagagtaaaaggaggggcaagggaagg

SEQ ID NO: 417259 - DNA, 122 bp, Homo sapiens
aataagcagggtgcagtggtgcgcgcctgtattcccagctatatggggagactgacgcggcgagaggatcgcttgagtccgaaaggtggaggtagcagcgagctgagaacgcgccactgcac

SEQ ID NO: 417260 - DNA, 122 bp, Homo sapiens
gctcctccgaggagctgcatgcttcgtgggctcctttagttcttctcggatcccctcttccggctgtttcccctcctcacccagcacacccacagaaacactattttgtttttctgttgttc

SEQ ID NO: 417261 - DNA, 122 bp, Homo sapiens
cagggtcatgactgggcgcggggcagggagccggggcaccaggacaggctgttcgggtggcggcagccaggacagcgttcccgcggcgcccaggccagactggacgggacggggcgggtcgc

SEQ ID NO: 417262 - DNA, 122 bp, Homo sapiens
gtatccaccacaaggaagccaaggatgcacccggctagggcactgatctgattatcaactcgtccagatcaaccccacacacacctgactgagacctaaggggtccacacatcctaacacca

SEQ ID NO: 417263 - DNA, 122 bp, Homo sapiens
gtgtgaatgatggtgccagggaatccgtggcttggtacacactgtttcatccagtggccacgtggaagctttgtagcattgagcagatagtaaaatatcttagaattaatgatctctttgga

SEQ ID NO: 417264 - DNA, 122 bp, Homo sapiens
ttaaactccgaacagcaaatgcattttccgaaaagctgctggataaatgaaggcaggacgcgcctggcccgccggtgccgagcgctagaagcccgcgctgtgtgtggtgcggcgaggggtgg

SEQ ID NO: 417265 - DNA, 122 bp, Homo sapiens
tggaattcccgaagacctcggctgcaccagccacccggtgttcggatgccagcaccgctacgaccagcagctgcaggaaccccattgctgcctgggccgggctgggcccacgccagggctgg

SEQ ID NO: 417266 - DNA, 122 bp, Homo sapiens
ctgcgcacacaccacacacacacacacgatcacacacacacccgcgcgctcgctcccacccggcagtcatccatcaatcgaaaagcacacatccagggccaggctcctccccgccctccccc

SEQ ID NO: 417267 - DNA, 122 bp, Homo sapiens
aggttcgggcaagcatcgcgcgccagcggccccagctcagtggctgccgcatctccacgccgcttaattcgtccgttgcccaaatgacccctccgcgctccagagcggagatcgcggccgta

SEQ ID NO: 417268 - DNA, 122 bp, Homo sapiens
gggttcctgaaaaggcagcgtgtgctgcagcctggcactgactcccccgaggagctatggcgggcgggtgggtaacggtctcaccagggcgtcaaagatccgctaggcccagaaagccaagg

SEQ ID NO: 417269 - DNA, 122 bp, Homo sapiens
agcacgcagtggggcctctttaatgagaacagtgccaaatgacacaaaaatacacagggccgtgggagaggagggacagagacaggccccccgctgacgccgtgtgtgaggagggggcgctc

SEQ ID NO: 417270 - DNA, 122 bp, Homo sapiens
aacagatacctccttgttggattagggttaaaggagggctgtgtgcccagtgtctggcaccggtaggtacttggcaaatgggacctgctttgcgctgttgcattggacaggtcactcggcct

SEQ ID NO: 417271 - DNA, 122 bp, Homo sapiens
ttctcacaccatgcaggtgatgtatggctgcgacgtggggcccgacgggcgcttcctccgcgggtatgaacagcacgcctacgacggcaaggattacatcgccctgaacgaggacctgcgct

SEQ ID NO: 417272 - DNA, 122 bp, Homo sapiens
cggcgggaggcggctctccgctacctggagcaggataaggagggtaagggcggacgaagacgtaccgacactgactgtgagcagcgcttccaccagcccgtagctactggaaggtacacacg

SEQ ID NO: 417273 - DNA, 122 bp, Homo sapiens
tatcacccaggttaacatttaactctacctgtcttgcctctttcccctcttaaagccatgcgactttcaatttttaactttgcccaaaatctttagtgcacattccacacaaatacaaactt

SEQ ID NO: 417274 - DNA, 122 bp, Homo sapiens
cgaactcctgacctcaggtgatccaccagcctcgccctcccagagtgctaggattacaggcgtgagccaccgcacccagccccaagatgtgggtcttgataatagggatcccactgccctcc

SEQ ID NO: 417275 - DNA, 122 bp, Homo sapiens
tgacaatgtttcgcatgagtagcatgaacgcatttttggctgagacacagaaattcttcccgtagatggcgatctgagggaggtggaaaggtcagagttaccaaggcgagctgcctggacca

SEQ ID NO: 417276 - DNA, 122 bp, Homo sapiens
gggaccctagctttggaagacttcatggataatttgcaccatttaaaattactcaggctccgtcgaccttttttggcttaccaccagtaggaagaagcagaggcaggaaggtgtagaggaga

SEQ ID NO: 417277 - DNA, 122 bp, Homo sapiens
cctgggcagcaagtgggcagttaggaaagtgcactaactctactggagtcttatcagtaacgtttacttaccacagcatatttccataagcactcagattagaattagagtgtgacaacatt

SEQ ID NO: 417278 - DNA, 122 bp, Homo sapiens
ttacctatggcctccgggcagcaagaacattttctagtactggtccacctattctccagccggctgtatttacctgctaggacaagctggatggataaaaatgatattctgtgcttgctgtg

SEQ ID NO: 417279 - DNA, 122 bp, Homo sapiens
tttctgcagcaccaacaagcctaaattaccaacccattactccacagtgggaaatacaaacgtggagcacagcacttgctgtggtgtgtccagtccctggtctctaagttgggcccctagca

SEQ ID NO: 417280 - DNA, 122 bp, Homo sapiens
gcgcacggaaacgcaggggagcctgcaccggctgacggcggcggaaaagggcgaacgaagcgcctgagggccctggcagcactcaccagggtcgttccagcccagggcagggcccgcggtca

SEQ ID NO: 417281 - DNA, 122 bp, Homo sapiens
cccttaaataaattctgaagtaatcacgtctttgctctcctcctcacgcacacgcgcccgcggatacactcgtctcccccagagccgctcccgggctgccgaggctcgctctgctcccagtg

SEQ ID NO: 417282 - DNA, 122 bp, Homo sapiens
tttgatgctccaaatggtctagggcaggggggcttcagagccttggcagcagaacgtggtcgcgtagatgtttatctgattttctgttgcgctgctgctcaaccgccactacggaagtgcac

SEQ ID NO: 417283 - DNA, 122 bp, Homo sapiens
gcacccaagacatggtggctgctagtgaacatgatcatggtttacagacctgcttgctcacggatcactttggaccagtcaagcatttttttctctgaaagttttcctaactcagactgatt

SEQ ID NO: 417284 - DNA, 122 bp, Homo sapiens
ctgctgcaggctggacgggagaactggcctgggccagtgtggagccgtgccaggctcttccggctcggttaggccgaaccgcagaggccctggcccggcgcccagccaccttctatcccctc

SEQ ID NO: 417285 - DNA, 122 bp, Homo sapiens
aggtgcctggctgaagcctgaaggtgacccgaaaacaagtcagagcccgagagatccacccgcgcccgcgcgggggaccaagggcccggatttaagaagagtgtgcctacaaggcggttgtc

SEQ ID NO: 417286 - DNA, 122 bp, Homo sapiens
cccgggagtaagaggaagtaccgcttctttacaagcacgacttggcacggaagaacttcccgctgcgcctgcgcctgtgcgtatgaggtcgacccggacgagattcttcgtcgccttggccc

SEQ ID NO: 417287 - DNA, 122 bp, Homo sapiens
ggtcggtcctcaccgcagccctgtgtcaggccgtcacacggcggcctccagagtcgaaggcgctctgaggagatgcaggttgtgtccaaaacctcccacctcggggtctcctgaacgtccca

SEQ ID NO: 417288 - DNA, 122 bp, Homo sapiens
aaggatgctctggcctgggtggcactggctaagcatccccatttcagggacttggtgacccgctttttgcggaaggggcagagtctgcaggattacatcgttggaggtttgcttttgcaaca

SEQ ID NO: 417289 - DNA, 122 bp, Homo sapiens
cgtgacccacccaccttggcctcccaaagtgctgagattacaggtgtgagccactgtgcccggccaaatatttttaaattaaggtatgtacattagttttttagacaatgctattgcacact

SEQ ID NO: 417290 - DNA, 122 bp, Homo sapiens
gcgcccactcacccgctcattcattcattgcgtggtcgggagctcacgcgcccactcacccgctcattcattcattgcgtggtcgggagctcacgcgcccactcaccccctcattcattcat

SEQ ID NO: 417291 - DNA, 122 bp, Homo sapiens
agcctccaaacggaacgtcaccctatcagctgggagacagcgccgcactgactgacaagccgcgcatatttatcctcgcgcgcggaggggagactctcagaacgctcctcgaccagcagcga

SEQ ID NO: 417292 - DNA, 122 bp, Homo sapiens
ctggaggcccgaactccaaaaccaaggcgccagcagggccacgcttcctccacggagcctcggggagcagacggtcttgagacgagacttgctcccgcaaccctttcccagctgcagctgcc

SEQ ID NO: 417293 - DNA, 122 bp, Homo sapiens
gccggtgaatggtcagtgctggagtttgaacagggccctgaaccatctcaacgccatttgcgctcccggcccccacctccttcctccaacagccgctcgctccgtcactccgcttcccacag

SEQ ID NO: 417294 - DNA, 122 bp, Homo sapiens
cttctctttctgggagtcttcagacagcaggcagcgtttcctgcagcagcggggagaccgcgcggccctccccacgctcccgcctgggccctggtgggggatgcaggcagacacggcgacca

SEQ ID NO: 417295 - DNA, 122 bp, Homo sapiens
atgtaacgtctgccttagagccatgaccgaaacttgatatttttttctttcatgagtgtccggcatctgctggtcttcattgtgaaacgtgccagtcgtgctttgtgaaaaataacaaagtg

SEQ ID NO: 417296 - DNA, 122 bp, Homo sapiens
gcttgtgtcaagctctgcattttgccccgcaggggaacctctataccccgcgattgaactcgaaagactcctcccggcggatgaaagccgctactccctggctggctgagctacagctcccg

SEQ ID NO: 417297 - DNA, 122 bp, Homo sapiens
ggatgttgctgatgaattgggagaaaacttgggagaggggaagcaatcttagcctcatggcgtgtagcaacagaaaacgatgttgaaaccaaagggctgtgtcctgtatacattagatcatg

SEQ ID NO: 417298 - DNA, 122 bp, Homo sapiens
gggcgggcgcgagtcggaaagacaccgaccagggaatgggcgacgaggcttgccttaattcggaggaaacccaggacttgagagagccatacaatttgaaagacgaagcaccgtgaaatgca

SEQ ID NO: 417299 - DNA, 122 bp, Homo sapiens
cgccagacccgagaaggtcctcaagcgagggtgacctcagggccggattggaccctgcttcgtgggaggcgggactcagggcttagcgggcggaggagtatttaagaccgggcggagttgga

SEQ ID NO: 417300 - DNA, 122 bp, Homo sapiens
cgtgccctgagcacccccaaaatgacatcacacaagggcagaaaggagctgaagggggaacgtgaaaggcagaaagggagccgtggttgccaggcaaccagccctagcccacctttgtttgt

SEQ ID NO: 417301 - DNA, 122 bp, Homo sapiens
tgtcctaaggcttctgtgtccctgggtatcggggagtgtgggcttcactgaaaaggccaacggggtggaagctgagggggagtcattgcacaaatcagatttgcacgaagcctggcacggag

SEQ ID NO: 417302 - DNA, 122 bp, Homo sapiens
tgcagagcggtgggcggggcctgcgaagaaggtgtgccgggggctggttggaggcgcgggcggcggggccaatgtggcggtgacgtcacggggcgggcggacgctggcgcgggtaggtaaga

SEQ ID NO: 417303 - DNA, 122 bp, Homo sapiens
cgcgcgcccggccgccgcacttccagactccgcggactccggcgctcggccgccaccctccgcctcaggccctcaaattgacacataagggagagcggcggcccgcagagccaatgggaggc

SEQ ID NO: 417304 - DNA, 122 bp, Homo sapiens
ctcgatggcaatgtactggaattgccggtccttctccgtgcagaagtagcggatcacgttcgggtgctcatccgattctcgcaacagctggacctcacggtctgcgaagctaaaacactcgg

SEQ ID NO: 417305 - DNA, 122 bp, Homo sapiens
gcgtgttccagtcctggctgcatctgagaatcacctggaaactttaaaaacgcgggtgcacggtcccgcggggcttctgattcactcagcctggggtgtggcctggccatcaggactttaaa

SEQ ID NO: 417306 - DNA, 122 bp, Homo sapiens
ctcagcctgctgagctgcgcgtgagctgctgctgtaacgctctaacgttagagcagctaacggctctgctcagaatttctcccgacagaggccggagtgttcaagagcttggcgatacagaa

SEQ ID NO: 417307 - DNA, 122 bp, Homo sapiens
ggtagaacagccagaactagatttctgtcattttggttctgcctgaaccaaaacatggcccgagaaggactgcatgatatgccctatgaacttcattagggattgatgggttcaataagctc

SEQ ID NO: 417308 - DNA, 122 bp, Homo sapiens
ggtttgaggggtctgaggagcggctcccctggatcctttcctccccaggagcccacctgccgagctgtcagcgtcagccccacatctcaagatgaggaaatggaggtcgaagccatgcacac

SEQ ID NO: 417309 - DNA, 122 bp, Homo sapiens
aagctcacccggctgacggagggcgaatcggggcggccaggctggaaagccgttaggtgacggggaatgcgttgaagaggtgcatctccccccccgaccccgggttaattctacctcggcca

SEQ ID NO: 417310 - DNA, 122 bp, Homo sapiens
gttgcccagcacaaaacaggctgtctgggagtgtttgctgaggcttccgggaagcaaacacggaagggaagggaagggaaggggaggagaggggaagggaagggacgggagggaaggcggtg

SEQ ID NO: 417311 - DNA, 122 bp, Homo sapiens
aggatgtgccatctccatggtgaccgctgtcctggaaagcccagcaatgtgaaggctcagcgccggcacgggcaggcagatgagtttaacgcagcatccctccggcccgccaaccacaaact

SEQ ID NO: 417312 - DNA, 122 bp, Homo sapiens
tgtcctttctggaatacatattccctacttcccccaacataaacacatacaggtatttatcgtttccttatttatttaccctcagcttgtaattcactttagcaaatttactttgcccattt

SEQ ID NO: 417313 - DNA, 122 bp, Homo sapiens
cctgacatttggaggctgttgggttgggtccaggcggaatccttcctgggatggaaaccccgggagatgattgacagcctggaggctcccccgtgtttaccgacagatccgagtcttatttt

SEQ ID NO: 417314 - DNA, 122 bp, Homo sapiens
gacccgggagacatcacagcgctgggctaggggcgcggcttgaactcgcctaaagagctgcgccctctcagtaagtccccatggccccctgcccccccgcgctccgtcctcagtcaggcccg

SEQ ID NO: 417315 - DNA, 122 bp, Homo sapiens
ttgggggtgtcgtttctcgagtagcgcctcggtctctaaaagccactgggggcgagcctccggtgtggcggtgtcacaagttagctgtcctttctgagtcaaacccaacaaaaaaggcaaga

SEQ ID NO: 417316 - DNA, 122 bp, Homo sapiens
tttcccaggacaatcccagagtactatctgagattaccccaaggccacatgagtggcactcgaaaactgcactagacattgtagcgaaatagtttttcagatatgactgatttaagattagg

SEQ ID NO: 417317 - DNA, 122 bp, Homo sapiens
gttcgcgcgacacagaaaccggggcccagcggttaccttcggcagggaactcttcaaactcgtcgtcttcctctaacagacctaagtctaccggctgctttttctctgacatctcgactgtc

SEQ ID NO: 417318 - DNA, 122 bp, Homo sapiens
ggactcagaaccaccttctccgcatccgtaaaggtccttagactcaccgcggggaggaagcggaccaggcaactccacagcacggaaacacagcgccacgagctccaggcggatgctgagag

SEQ ID NO: 417319 - DNA, 122 bp, Homo sapiens
gtgggccaggcagaccagaggagcaaacaaacttacttgccatctgctaggctgaggcctcggaagactggctgagagggaggttgaggccgcccagtctggtcttcatacaggaagcggac

SEQ ID NO: 417320 - DNA, 122 bp, Homo sapiens
aaactgagaatcaaggaggtgctgccgaaagtatcgctcagcgatctacagagaagtctgcgggagtttgacggcggcggcgcagggtagcgcagtctattccagagatatcgataggcttg

SEQ ID NO: 417321 - DNA, 122 bp, Homo sapiens
gccgtttcctcaaaccttcagttggtaacaaacacattatgggtgaagtggaataaatgccgtcttctagtgaggcgtcctgaccaccctgctctagactgcacctcggcgctttttcccac

SEQ ID NO: 417322 - DNA, 122 bp, Homo sapiens
agtaactagcgagttcagatctgtaacattacaaataatgacaaagtaacaagatactgtcggggtgtgttgaagaataatacctggagtgttatgagcaagcctaacaaaacaaattgtgg

SEQ ID NO: 417323 - DNA, 122 bp, Homo sapiens
agagctcctggatgggtccgggaactcgcccgggcacaaggtgccaaaaggcaagcagcccgcctcgcggcctggggaaagaaccgacaggaggccgcagtgagcgcccgggcgcccggcag

SEQ ID NO: 417324 - DNA, 122 bp, Homo sapiens
aaaaaaaaaaaaaaaaaaaaggacagatgggtttagaaaatgttgcagtgaagactggaacgagatgagctcatagcaccagcctgtcttttgtggacccgcacaatgatccctgagccaga

SEQ ID NO: 417325 - DNA, 122 bp, Homo sapiens
cttcattaaccccattattaatacagcaaatagccctcctggcgaaatgtggacagggaacgcgtttacacagccacccaaggacaaaattgggggcgggggtaagccttccattttatcac

SEQ ID NO: 417326 - DNA, 122 bp, Homo sapiens
agtgattctcccgcctcggcttcccaaagtactaggattacaggtatgagccaccgcgcccggccagctcttctgttttaaggacggtgcttgctgcacttgagctgtgggaaggcagggct

SEQ ID NO: 417327 - DNA, 122 bp, Homo sapiens
gcagagccgcccgctgtggccgggaccgagggtggcggcggcgggtgaggttgggggccccggggtaagggtggcagcatggggcccccgggtcgtgaggcccccgggtcgtgagccccgtg

SEQ ID NO: 417328 - DNA, 122 bp, Homo sapiens
aaaaaagagagattggctaggggccttagctccttgagggcagggacctgtcacattgatcgcggtatcagcacccaggtacttactattcaaaatgatcagcatacggatgatcatttgtc

SEQ ID NO: 417329 - DNA, 122 bp, Homo sapiens
catttttgctggggcaatcagggaactgcgtctgcggatggctgccctcgggggaccattcgccggggcggcgcgccgctggggactcggcgtgaaccgggcagcgggcgcgcggtctcgga

SEQ ID NO: 417330 - DNA, 122 bp, Homo sapiens
ctcattagcagaggttggggaagaaaaaaatacccacatccgcacacgcacgcgcgcacccgcagacacacacaccacaaataagccgacgcgtgtgtacacagttgctgcacttaccttct

SEQ ID NO: 417331 - DNA, 122 bp, Homo sapiens
aggatgtcgcagataaagtttctgccttcaaagagatggtaatctttgctgtttaccccacggtggctgaaatttcctttacttccttgtacagttgttaagcatttactgcataattgtgg

SEQ ID NO: 417332 - DNA, 122 bp, Homo sapiens
acacgccgcctttaagaactgtaacactcacgcgagggtccgcggcttcattcttgaagtcggtgagaccaagaacccaccgattccggacacaccagcacccggatctcagacctctggcc

SEQ ID NO: 417333 - DNA, 122 bp, Homo sapiens
gcggacgcccgaggcctgcaggagacccggggcccagggctcggagtccaggaggtgattcgggagggcctgggacggccccggggccaggggtcgagccgagaggcggccccgcgccgctc

SEQ ID NO: 417334 - DNA, 122 bp, Homo sapiens
gctggaggcagcagtgtcagccgatgccggtgccacggctcgaaacaccggcgcctctcgcggtgctaaaaggatgggcgcgcaccctccttccggcatccgtagaacccccgcctttgacc

SEQ ID NO: 417335 - DNA, 122 bp, Homo sapiens
gtgtgagccaccatgcctggccattttttatcttctgtagattcatggtttttaaaaatccgttgtccattttctcacagagataagcagtgatgtccttgcgatgaacaaggggtcttgtt

SEQ ID NO: 417336 - DNA, 122 bp, Homo sapiens
aggtaaggtgggggtgggcaggtggtgatggcagctgtgctcgcccctctggtaggggttcggggcaggccaatggaggagtcaggttgcatcagaattccagctagctcccgtgtaacatg

SEQ ID NO: 417337 - DNA, 122 bp, Homo sapiens
agggggcagggctgggcggctcaggtgttttgctttgctttgctttttttcttttctgcacgtctgggtcatcatcaccaaaccctttcctctatatctgtggtgagtctgaaagtgaattc

SEQ ID NO: 417338 - DNA, 122 bp, Homo sapiens
acgtattcagttgagaacggcaatttctcttaccatttctcctgagcacggcaggccagtcgtatgtggagggggggcatgcaagtctgactcgcccttacatcagtagcagcggctgatgg

SEQ ID NO: 417339 - DNA, 122 bp, Homo sapiens
ttggcccaaaacagggctgtgttgacccaacagctgggcattggcatcctgtcaatctgccgagagcctagaaatagtgcgggggcagtctgctggtctcattgtgtcagaggaagcaacca

SEQ ID NO: 417340 - DNA, 122 bp, Homo sapiens
acacttccggcgccgctagcgctgcgagatattcagggcagaagttacgataactcggggcggaaatagcttctgcccagcgactgggaagaggggatgtgacgctatagcggaagtgaagg

SEQ ID NO: 417341 - DNA, 122 bp, Homo sapiens
atccgaggaggaggacctcacagccagccagatcctggagcactcagacctagtaagtagcggctctcccactctaagaattgggaggcttattttttgtaactaatgcaggaggacagttt

SEQ ID NO: 417342 - DNA, 122 bp, Homo sapiens
cacttctaggccaggaaagcgctaaccagggccctgtgactctacgcaggttccagaacacgccttctacatttgttactgaaccgatcagcgaacacagacaaacgtgccaacacttaagt

SEQ ID NO: 417343 - DNA, 122 bp, Homo sapiens
aagggataaacacatacgactgaaaaagagtttcgcccttgataggcagtgtatggggtgcgcagctgcaatctgcaaacccttgcagggcgcggggtttcgtacacccgctcaaggacgca

SEQ ID NO: 417344 - DNA, 122 bp, Homo sapiens
gcttacagtcttacagttctagcagtctttcgggggataccgccaatggccctgaagttgcgtttacttaaagtcgctaaatgtacaagaaataaccacttgtcaaaatggcgtcaaaagat

SEQ ID NO: 417345 - DNA, 122 bp, Homo sapiens
tcgtcccaggaaggccaagcaaataaaagtccggggaaagttcctttaacttccttcctgcgccctcgacaagggctgcgaagaggaagaggtcatttcccagggaagcaccgggcaggggc

SEQ ID NO: 417346 - DNA, 122 bp, Homo sapiens
aataggggttacaaattccccggtgctcttcaggtccccaggcacttttcaaagggtccccgagcacttggctcctgcactctggaaacagcttgcggcccggcctgggctgctccggtgca

SEQ ID NO: 417347 - DNA, 122 bp, Homo sapiens
tccttagaagctgccactgccttggtgataagctcagatactgggggtccggatgctttgcgtttcccagcagttgcgcctgccttcttcgcctttttcttcacaggtgttttttctgcggg

SEQ ID NO: 417348 - DNA, 122 bp, Homo sapiens
aaagttgtggtttctgtggagaaaatatttctttggagtcaaaagactatattaaaagctcgtcttccacagaatataggtcacattcctggtaaaagtttggatgcctgttttttaaaaaa

SEQ ID NO: 417349 - DNA, 122 bp, Homo sapiens
ataaaccaggggaacaaataatgataaaaaagatactcatatttgttgagcacttactgtcggcctggctctttgcaaggattacttaatttgatcatctgattttgctgtcccaagttgta

SEQ ID NO: 417350 - DNA, 122 bp, Homo sapiens
gcggctgcgtcgagtgacaaggtaggcatctcagcgcggacatttgcaatggcccgacggcgcaaatgacactgaaagtccccttgttttgagtatgaggtgtttgtcgctgtccctttgta

SEQ ID NO: 417351 - DNA, 122 bp, Homo sapiens
taacagaacttgcctctgctgatgggtctctttccacattctctgtccagagaaaatgcacggttggtttcatccaagattagggttgtgtgtggagatacaatgcaaaaacaacagagagt

SEQ ID NO: 417352 - DNA, 122 bp, Homo sapiens
agaccaagtggggccctgtcgttccttggggtccaggggacgaggctcttcgggggcctgcgcccccatgggctggctctgtccatcctcagcgtcgaacctctggctctacaccagccgct

SEQ ID NO: 417353 - DNA, 122 bp, Homo sapiens
ctcgcctggcgctaaatttaaaaacgtaacacgagcagcaggctggtctcggaaacgaaacgaaattcggtccctgggcctcctcccgggcgctgccggtccctcagcgcgccgcgccaccc

SEQ ID NO: 417354 - DNA, 122 bp, Homo sapiens
cgcagcccctctccaccccgcgactctgggaatctgcgctccttggggtcgccgcgcccgcgagagacctcccgagcttctcaagtgggtccggatctagatccaggaccagggacaggaaa

SEQ ID NO: 417355 - DNA, 122 bp, Homo sapiens
cgctaacgtgactgactaactaaccaatccaaagtctcaatctccctgagaggggcggagcgtacccgggccagccctcgccgccgattggtgatcgacctcagggttgcaggggcggtgcc

SEQ ID NO: 417356 - DNA, 122 bp, Homo sapiens
atacacctgggtgcttctgggatcggagaggcctccttgaaaggcttccagcatttcatgcggtcttgcttctcccctcggcctacctcaacgtctccctgagtctctgtggccggtccgca

SEQ ID NO: 417357 - DNA, 122 bp, Homo sapiens
gtttggaggtgcaaagtcggcccaaatcgggggtacccagctggaagatcttgatgcgcccggggtggacaggttcagagtccttggtgggtgggtttggagcagtggaactaagggcaaag

SEQ ID NO: 417358 - DNA, 122 bp, Homo sapiens
gtccccagcgtggcctgtcctttgttctagcaaacgccaaacacacgaggacccggcaaccgggggaggaaggtggtcaccagggccgtcctgctgccccacctgccacagggctgtgggct

SEQ ID NO: 417359 - DNA, 122 bp, Homo sapiens
gctggctcacttagagcttggagttcgctaaagcgaataaatttgaacctggtttgaatacgtggccacctgtgattgactgaaacttggctgccctgattggctgagactcagttatctgt

SEQ ID NO: 417360 - DNA, 122 bp, Homo sapiens
tatgatgtgtgacgctggaagcaaagcagcccaaatctcagtgcagagacagtggtaatacgaagaagatttctacacttaggagttttcctagacagacttcaaccaggacccacgcctac

SEQ ID NO: 417361 - DNA, 122 bp, Homo sapiens
tgaggaagccccgccctccctgcacctgctcctgacccggcctcgggctctgtggcctcgcgcgccccctgttggtcctgagcagcacctgtgcccgccccctctgcctatctgtagggagg

SEQ ID NO: 417362 - DNA, 122 bp, Homo sapiens
cgcttgttgccctggcaccaagccaaccactcagcatccagcgcgtcctcacctcccctccggggtgaagcggaaacaagggtatgtgccaaaactggcctgctcaccatttcccagatttt

SEQ ID NO: 417363 - DNA, 122 bp, Homo sapiens
tgaattgtcagaacgtactcaaaagccaaaacataccgcctggcccaaagcagtaaaagacgaaaggcagggacccagcggtccccgcacccaccggccactgagcatagagcagtggcaag

SEQ ID NO: 417364 - DNA, 122 bp, Homo sapiens
tcttcccccaagcctcaagattgtcctccaggcagagtcagaggagtgggactgtggacccggtgcagggagagtcgtgggaatgggactgcggacccggtgcagggagagtcgtgggaatg

SEQ ID NO: 417365 - DNA, 122 bp, Homo sapiens
agaatttctccccaccgacaagcaagcattcagctgtacagcagacaccagctgggtatccgcttcaatcctgcaccgtctacctggagatagcagcagatcacacaagttgaggactctgt

SEQ ID NO: 417366 - DNA, 122 bp, Homo sapiens
ggctggaccgagctgcagagttggccggacactgactgggtcaagtgaccttgggctgaccgcacccccacccccggtcgccccgggtcgctggtgcactgcgcctgcgcgcgtctccccga

SEQ ID NO: 417367 - DNA, 122 bp, Homo sapiens
gtatgagagtgtgtacacgcgcctacacacacacacgttgtgttaccggcgctcggccgccgggggaagacccaggccaatgccgccccccaccgcccccagcagtgggacctcagcgctgc

SEQ ID NO: 417368 - DNA, 122 bp, Homo sapiens
ttggccaatgaaatgcagagctccttgagggcaggagacatgtattcaccaaccttctcgcgcccacagccccagatctgtggccaacaagtatctatgatgcacttgaaaggaacgagcga

SEQ ID NO: 417369 - DNA, 122 bp, Homo sapiens
ccgcagcggttactccgcagagccgccaggtacaacagtcaagacatgggaaaacctcaacgcccaatgatggatcaagggatggggaaagtgtggtgcacacgctccgtggtgacccccgc

SEQ ID NO: 417370 - DNA, 122 bp, Homo sapiens
gttcagcctggaaagcccagggcttaaaacaacaacaacaaaaaacacaatatgcaggatcgttcggcttcagcagaacccaccgcaaagatggcggtgggacgaagccccttctcccgccg

SEQ ID NO: 417371 - DNA, 122 bp, Homo sapiens
actgagcgtttcttggagtgacctaatacgtagtaacatcccacagactaaaattaacctcgtgaacagttttcagttcattgctttgggccccaggaatcaatgagaaagaagacggctgc

SEQ ID NO: 417372 - DNA, 122 bp, Homo sapiens
atgggctttctgagggcttgtatcacatccatttctattgaaagttgacagaaacaagatcgtattgcacaatgtcttcttggctctcacaagttaaattcctaacaatgcgatgtgccatt

SEQ ID NO: 417373 - DNA, 122 bp, Homo sapiens
cttcaagaaaggcagagtggagttaactatccaagtttcagccaccctgtgttgcgtcaacgaaggccaacagtcgggttaaaagcggtgccaagagagaaacccaggcattccctcttcca

SEQ ID NO: 417374 - DNA, 122 bp, Homo sapiens
ttaaggaaaaacagtcttggcaggtatataggaatagtggtttccagactggttgatgaccgtaatcaccaagaacagtggttctcagtcttggctgcacattgcagtgatctggaacttaa

SEQ ID NO: 417375 - DNA, 122 bp, Homo sapiens
acaccatctctactaaaaataccaaaaaaggccaggtgcggtggctcacgtctgtaatgccggcatttttggaggctgaggcaggtggatcacctaaggtcaggagttcgagaccagcctgg

SEQ ID NO: 417376 - DNA, 122 bp, Homo sapiens
gagggctccgcggtctggaggggacggcgtcagcgcccgcgggggttcgcagggcagccccggggcgacccccacccccgccacggtcaagtgtcgatacagtgttgccagccgggtgccaa

SEQ ID NO: 417377 - DNA, 122 bp, Homo sapiens
tgtggactatgagcccaggcctgtgggtgtccagagctgcctcctggccctaccccggcccggccccgcccaccagcctggtccctctggctcctgccctgggtgccctccactcccttccc

SEQ ID NO: 417378 - DNA, 122 bp, Homo sapiens
ctactgcactggggttaataatgtatccggtcccgaccagatcagcttgagggctcctgtcggacgagccccggcctctgacttgcttatatagggctcaggggctatataaagctgcacgg

SEQ ID NO: 417379 - DNA, 122 bp, Homo sapiens
tgtatctgccccattccctcacagtcattcagagcagagggatgtccagccttgtcagaccgcagctcctgaagtcatttggcccaaatggaccaatctggccttcacagcagccccaggaa

SEQ ID NO: 417380 - DNA, 122 bp, Homo sapiens
ttggcagtttgtattgaatctgtttgtgttattaacagaagagggagaaatgtcatgagacgttggacaggcaggattgatgatagcatgaccatagctttgctggaatactgaatgcaggg

SEQ ID NO: 417381 - DNA, 122 bp, Homo sapiens
aaaatggttctgtgaatttcaaatttaagaaaagtcttaaacgccatccacggggtaaaccggagtaacgacaatttggaatggagactacaaaacagcctgggtggcagagaacagggcct

SEQ ID NO: 417382 - DNA, 122 bp, Homo sapiens
ctggggcgaatgggcggggctggtcatgcaaataaaggcgtttgattggctggggccaaccgaggcccaggtgccgaggtgagccgcgggaaggcgcgccctagcctgcgggccagtggagt

SEQ ID NO: 417383 - DNA, 122 bp, Homo sapiens
ggcagctccccctggcggcagcagcgggtcttcgtggagtcagcccctccgctgcttggccgctgggtttgtcccttattttaatggatgcgcgttggctaggactgcaacattgtttcttt

SEQ ID NO: 417384 - DNA, 122 bp, Homo sapiens
caaacctccacggtgggaattactgcaaaggcatcggctctcccggcctagaatatctcgcgggatctcagctgtccttgggccccccccctcagcgcaactaccaatcccaacatgcaacg

SEQ ID NO: 417385 - DNA, 122 bp, Homo sapiens
ccgcccgggagatgcttcctcgcgcggcgcagcgctgaggccgtgcgtgcgccccggctgcgctgcgcgctccccacatacacaagctctccatgtgagctgacaggcgagtggaaacccct

SEQ ID NO: 417386 - DNA, 122 bp, Homo sapiens
accccaccggccgtggagcctcacggctccacatggctccacagggcggggtgggggccacgctgcagggaaacaggaacagacacagttagaggctcagagaccccgagacagagatggca

SEQ ID NO: 417387 - DNA, 122 bp, Homo sapiens
acccatttaaaaggacataattgtctttcatcaaaaccagtagctgcctcctttgcccttcgacattttggtaattgtactgtcatcttccacagctgctcaaatgtgaatctttgagctat

SEQ ID NO: 417388 - DNA, 122 bp, Homo sapiens
aattccagttgactttgctatttatatcttgtaatggtctaaaagtatgaaaaaggttagcgaacattttttgggaagcttaaattttgcactatctgtaggttaatcttgatgacggtaat

SEQ ID NO: 417389 - DNA, 122 bp, Homo sapiens
ttcctcttccctccctcccaaccctgcataagctggcggccagacaggagtctgggcgagcgccccaacccctgaccacaactgcctccggccccgagatgcttggctgaatctcggtagtg

SEQ ID NO: 417390 - DNA, 122 bp, Homo sapiens
gccagacctgaaacacttccacacaggcttttaggccagccacaatctctgtgttgcactcggatggttaactgtgcaagtaacatcatttggacttcctggctccctaggcagaggaacct

SEQ ID NO: 417391 - DNA, 122 bp, Homo sapiens
gggctgccccgcgcgaggccgtcgattcgctcgcggctccatcgcggcctggccggggggcggtgtctgctgcgccaggttcgctggccgcacgtcttcaggtcctcctgttcctgggaggc

SEQ ID NO: 417392 - DNA, 122 bp, Homo sapiens
actcctgcggggttggggtggtctgtccgcaacgggctactaggggaggcgcgctgtctgcggcgaaatgccaggtctttgttgtttggtccgaaatgtctcttcagtcccttagtttaatg

SEQ ID NO: 417393 - DNA, 122 bp, Homo sapiens
ggacagcagagcaccagaacgaaagtgctcccaggcctgccaggggctgcctgagggggccgggcagaagcccagcaggtctggccaattcatagctcagagagcccaggcctccacggagc

SEQ ID NO: 417394 - DNA, 122 bp, Homo sapiens
aaaaggcaagagagacaaagagagaaagagactagcagtgggacaaagagaagagagagacgtccacagagacaggagatggagacaaccacacagagagatgagaagggcaggagggtgga

SEQ ID NO: 417395 - DNA, 122 bp, Homo sapiens
tgctcccctggtcgccctttcctggcccctttgttcctgggaaagctgacgccccctcggcggccgcccttgccaggtgccttccccagcgccaactctcccaagcaacttttagcccacat

SEQ ID NO: 417396 - DNA, 122 bp, Homo sapiens
tacggcgcacagacttgagcgccatgcactgggaagccaggcgtcccatcagccgggagacgaggagctgtaaatccagcccccaagacacggcaacatcgggcagcccacaggcagtgaca

SEQ ID NO: 417397 - DNA, 122 bp, Homo sapiens
gacttttacctgcgggcggggtctgcctgagtctctcccggtaaatgcagtgacccacggcgcaggacgggggttgagaggaaaagctgagagtatagccttggtccctaaaacccgtttgc

SEQ ID NO: 417398 - DNA, 122 bp, Homo sapiens
ccccgccccgccctcgccccgcacaatctcggcgctgacagccgagcaggtgataaatgccggcgacgcggggaaggaattgcgcaaaataaagaagcatgttccaacaagtcctgtcagga

SEQ ID NO: 417399 - DNA, 122 bp, Homo sapiens
ctctcccgcttgctggtcccttgctgccatcacgtctctaactggacaggtgctggaaagcggggttgggggagtgggggaatgcaccctccctgctgctgccacttcacttcccaccgatg

SEQ ID NO: 417400 - DNA, 122 bp, Homo sapiens
gacaaagtagcagggtgggcgccgggggctgggagtggggcacggggagctcgtgttgaacggggaccgagtttccgtttgggaagatggagagtcgcagacatgctgcacagtgtggatgt

SEQ ID NO: 417401 - DNA, 122 bp, Homo sapiens
cccactcaacgtaagctaatctagagaacagacgcccaaagcacactgtcacccaatacacgagcgcacacacacacacagtggccagaggacagagcaaattcagaaacccagagctcagc

SEQ ID NO: 417402 - DNA, 122 bp, Homo sapiens
acgcatggggagatcagggttccacattttcgggtaagcattagccgtcctggcgctgcacgagcgtattctacaattccgaaaactactaacttttccgtctgcaacctttaataattgag

SEQ ID NO: 417403 - DNA, 122 bp, Homo sapiens
caaccctgaaagaagaaaaactcacccatttgagctttcttttgtttccactgagcaatacggaagaaattcaccgctggttataggtcttcagtgctttcttcagagtgggattgtttttt

SEQ ID NO: 417404 - DNA, 122 bp, Homo sapiens
ccgcactggcggtccccggctccaatgcacccgcggaaaccgcccctggcccgggcgccgcggtggaaccaccagccccaaccgctgccatgttggcatctgcccggcccgtcccctcggca

SEQ ID NO: 417405 - DNA, 122 bp, Homo sapiens
ataatttataaaaataaaggaatgacatggatcctgctctcaaggagcttacaacttatacggaaagacaagattccacacaaaaacaactgcaaaccatatttacatagtaacatacataa

SEQ ID NO: 417406 - DNA, 122 bp, Homo sapiens
tgtgcacgcgccgagtctcctccccgaactgcaggaacagcacccctgcgaaggagacgccgccctcgctgtcactgctgccgtctccacgccgccctccaggagagcgcggggagcttttc

SEQ ID NO: 417407 - DNA, 122 bp, Homo sapiens
tctaggcccgggctccctccagaggcagcgttgcaccctgaccctaacttccgcctgcggcgttcagatgcggaaagcagggagcctgaacccaaagctgcgatcagagaatcgtgtgtgtg

SEQ ID NO: 417408 - DNA, 122 bp, Homo sapiens
ctagcggtctgctctgagcgtgcgctcaactgcactcaccctccggttccaaggccctcacggcccgggcgcccccgcccacagccctctgacaggtggctccgcttgtcttcgctgctgca

SEQ ID NO: 417409 - DNA, 122 bp, Homo sapiens
tggcactagaagagaagaacttcgtttccaggtgagccatcaagaaagtgttgacatttccgagcagcagaatgacatcactaaggtggtttttcattagctttctctggatcttgtatccc

SEQ ID NO: 417410 - DNA, 122 bp, Homo sapiens
gctgaccccggggagcgtggactacgagttggcgcccaagtccagaatccgcgcgcaccgcggtaagctgcgccttttgaaaaggctatctgtactccttggaacaaaccaccccgggcaaa

SEQ ID NO: 417411 - DNA, 122 bp, Homo sapiens
gtgctttagccccagtggtggtggctcttgctcagctcacacttcagttccagcagtggccgcccacactttgtttgtgcttcagccctggcagtggcagcccacaatttatcatgcttcag

SEQ ID NO: 417412 - DNA, 122 bp, Homo sapiens
tcggagaggtgcggtaacttgcccaaggtcacagcgctagaaagtggcggagccgggattcgcagccaggtctctctgactccaagtccggtgctctgcgaagcagggactcggcgcgcggc

SEQ ID NO: 417413 - DNA, 122 bp, Homo sapiens
gcggcggcggcggcagcagcattggtgctgcggtccgctgggaaacgcctcctccgagggcggggcccggagcgccactgtcagagtgcccgccccaccctcagctcccctctccgcacact

SEQ ID NO: 417414 - DNA, 122 bp, Homo sapiens
ccgcaggcggcagggggtggggcgagggcagccggggagactggagaagcctactctgtgcggtggagcgaccctggataacagctccagggacactccttgctcaagacgctggggttaga

SEQ ID NO: 417415 - DNA, 122 bp, Homo sapiens
tctgtgggttccacatccatggattcaaccaaccacaggatcaaaaatattcaaaaaatacggtgtctgtactgaacacgtaaactttttttgtgtcattattccctaaccaatacagtgta

SEQ ID NO: 417416 - DNA, 122 bp, Homo sapiens
gagaagctgtgtcctgttgtctaacactacagggccaaggctgtgaggagaggagggggccgagatgacacttctcattcaggaattctcaaacttgagcacgcatctgaataaccagaagg

SEQ ID NO: 417417 - DNA, 122 bp, Homo sapiens
gtgggctgtggtgcggtatttggtttcacagggcaggtggtgctgatttaggccagtgaccgaaaaaaaaaaaaaaaaaactcccgaggtgcctgggacattgcccacctgaaatcccaaaa

SEQ ID NO: 417418 - DNA, 122 bp, Homo sapiens
ggaaggaggaaggagataaagcctaaaaccttaatacagcttggaccccagagtactaaacgatcggagcaaaggtgaatgagaagtaaatcctctcctttagaaaaggatcaaaaagaaat

SEQ ID NO: 417419 - DNA, 122 bp, Homo sapiens
ctggcatgaataattgagcgccggcaagctgactgcaccaaagagttgcattatgtaaaccggcaggcgacgtgtgtgcgtgtgtgcgcgtgtgcgtgtctgcgcgcaagaggggtgcgtgt

SEQ ID NO: 417420 - DNA, 122 bp, Homo sapiens
agccaagcaaaggtcgcagagccaagtctagctgctacaggccagccaagccgttacgcacgtgcagtgtgcgcatgccgagtgttacaggccagccaagccgttaacgcgcgtgcagcatg

SEQ ID NO: 417421 - DNA, 122 bp, Homo sapiens
agagtgatggagttctagtgtcagttcagttatatatgttcttatatatgtcaatgaaaacgtaccacaatttgcctaaagaaaaggcaagaatttggtttcttgggtttctgcatgcttgg

SEQ ID NO: 417422 - DNA, 122 bp, Homo sapiens
catttcctaaattcatggaaaacctcgacagtgttcaggactcccaaagaaggtggtgggcgggagggggaggagcataagagaaaagtagtgagtacgggcccaaagacccatttcgtgga

SEQ ID NO: 417423 - DNA, 122 bp, Homo sapiens
ctgcaccgtctggagatgagcaatctttcatccagcctgagctaggtaccactactttgtcgccctgtgctttttgagcaacttaagctaggctctgctgctcagaggtgagagtgtctctc

SEQ ID NO: 417424 - DNA, 122 bp, Homo sapiens
ctggggtcagggagtgtctcggggtgcctttgggggcagcatgagctccaccaggggccccggcccccacctcagcctatggcccttccccatggctaaggtcatgccttttctgaacagct

SEQ ID NO: 417425 - DNA, 122 bp, Homo sapiens
tttactgttaaggaagctcataaggacttccaaaaagaagtgtaactcggcctcactagccggcggaggatttcccaggagaaacactcagaagggaccggaagagaaatgaaggaaagaca

SEQ ID NO: 417426 - DNA, 122 bp, Homo sapiens
tgacctcgtgatttgcctgccttggcctcccaaagtgctggaattacaggcgtgagccaccgcgtccagccccattgtacctccatgagagcctagtcttgcttttaggcagcaactaaact

SEQ ID NO: 417427 - DNA, 122 bp, Homo sapiens
gtggggaatggggacatggaggccaccctgcggggatgggggtccttgggcatcagggagcggcggggcggggagggaccgggactcaagctctgctcctccaggtgacacctacttcttca

SEQ ID NO: 417428 - DNA, 122 bp, Homo sapiens
tctacactatcttcctgccaccattctctttcaccatctatttacactcttttggatatgcgcactctcgctccctgcctcccctggccctctctctctctctctctctctggtttcttctc

SEQ ID NO: 417429 - DNA, 122 bp, Homo sapiens
ccgtgctgggctctgtgccgagccctattcattgcatatcccagtttctgtctctgggtgcgtttccctggccctggccacttcccctctttgagcgtgggcactgtgtttattagttcatt

SEQ ID NO: 417430 - DNA, 122 bp, Homo sapiens
tgcgcaggggcgctgcaggaggccggggaaggcgaggtcacaacaggcacaatagggagtcgttgccaggcaacctctctaggcttctgttgtgattctgctttagttgggtctgggggggt

SEQ ID NO: 417431 - DNA, 122 bp, Homo sapiens
gttaaagaaatgctgagaatttctagcatgtgaagcacttgggggcagcaggccttggcacggtgctgcatccttctactgctccctccaggtctgggggcttttatccaccttgaatccct

SEQ ID NO: 417432 - DNA, 122 bp, Homo sapiens
ttaaagaaaaagcataaaattgcttaaatcaccctgcaataaataaaaccaccattaatacggactaaaacaatttttcagaataagaaatcagtcaaataaaaccccaccatctaaatatc

SEQ ID NO: 417433 - DNA, 122 bp, Homo sapiens
gtagggtctggagagagctcccactgtggcgagtcctgtcgttggattcccgcggcgccccgtaaggctccgccccggcggtgctaccaaaccctgttcgattttagaatcgtacattccca

SEQ ID NO: 417434 - DNA, 122 bp, Homo sapiens
ccgccttgggctgcccgtccccattcttaaactggaccaagaaatggtcaaactggccctcggggactgtccaggagaggctgagggagtcggaggtgatgtctctcactgtcatctgccct

SEQ ID NO: 417435 - DNA, 122 bp, Homo sapiens
ctggttacttcacattttctcctgtacttaaattgttactcctttcatgttaagcactcacggatgtataaaggaatggagcagtggcattaatttgcatcgttaccagtaagattgaatac

SEQ ID NO: 417436 - DNA, 122 bp, Homo sapiens
aagtgtgtgcatgggttggcggggtggctgggagctgaggccagagaactgctccccagtcgaccggcaggggccctgcagcggctgctgcgcggcgcagggggtggtggtgagagggcagg

SEQ ID NO: 417437 - DNA, 122 bp, Homo sapiens
tcaccgtgcgggggccagtgctggctgcgcacagggagagaatgagcaaggacgctgccacgcctcaatcatcatcggtttaatgaccacgtggcatgactctctggctatgtacatatata

SEQ ID NO: 417438 - DNA, 122 bp, Homo sapiens
agccgagcgccgggcgcctggagggcaggtcgggcctcttgccgctaaggtcagcggctgcggtttgagaagactgcagctgcttcctgtgttacgctgtcgcagacaagcagaagttaaaa

SEQ ID NO: 417439 - DNA, 122 bp, Homo sapiens
ggctcaacaccgcccagcagggtgggttcgggtgccgtgagggcccacaggcggccgccgcggccctccacggcccacacggcccccgcagggcacagccttacgcagcccttgcgttgcac

SEQ ID NO: 417440 - DNA, 122 bp, Homo sapiens
agtgtttcattcctgaatggtgaagagcttgatacagagaccctggagaccgttcagatccgcagaaagcctaggctgggcgctcacaggccttcgtgcaacttattgccatagcactcatt

SEQ ID NO: 417441 - DNA, 122 bp, Homo sapiens
taacacccatggccaggcccactgctcagcccagctgtatgtagaagagccccggacagccgcctcaggccccaggtaccaccggggccccaaatgatgctggggctgcctgtgaggggcca

SEQ ID NO: 417442 - DNA, 122 bp, Homo sapiens
tagttcacgacccactctgggaaaaaagaaaacagtgcaggctaaggagattattttggtcggctcatcagaccgcctaacaaggcgaagactttcctgagagtccctaaagccgcggcccc

SEQ ID NO: 417443 - DNA, 122 bp, Homo sapiens
accggcgggcgggcgaggcgaggcgcacggtgggctgggaggctccgctccgcgccggcgcgatctggcccgggtttccgcgcccgcccagcgccccgacctccccgccccccgcgccgccg

SEQ ID NO: 417444 - DNA, 122 bp, Homo sapiens
gaccgcgaggaaagggacagagttcgcgccgaggcgccggggccactctggctccgccgacgccgctcgccagggcggcagggtcttttgttgtcccctctgtgcaaataaatgcagatgtg

SEQ ID NO: 417445 - DNA, 122 bp, Homo sapiens
gccgccggccgcagcccaggctatataaggaattacacgtacatttcggaccgaggggctcgctttggttcctgcgttatttttaaaacgacttttaagagaggggcaataaatgcgtctat

SEQ ID NO: 417446 - DNA, 122 bp, Homo sapiens
agcgaggaaactaataccccacgtagctactctcccacctcgctcctggcgcgggggtctcgagcctccaggaggccaggagcagagtcgctcagcataactcaccgttccgccccgccctg

SEQ ID NO: 417447 - DNA, 122 bp, Homo sapiens
agttgaggagctcttgaagcacttaaatattgttaaccaattaagctacatataaacattcgccttccatggctaaaggccaagtggaagctaaggtcatcagaatagaagcagattcattt

SEQ ID NO: 417448 - DNA, 122 bp, Homo sapiens
gagagcccagcaaggcagctggccagggggcggcactgccctccggggagcaccggtgcccgggactctgcttctgaggctggcctgtacgatgattttgtataaatatctccaatcagaac

SEQ ID NO: 417449 - DNA, 122 bp, Homo sapiens
cctcgcctcaggcgactgcgggtcgttagccagtctccccactattccgaaaagtggcttcgctcgccctgaataaacaatcccgagcacctcgacaccatgtaccagattcaaaaggaaaa

SEQ ID NO: 417450 - DNA, 122 bp, Homo sapiens
caggcgtttctctgttgcaactccagggttaggcactgccctgcctgggaacaagctgtccggttctctgcacactacccattctcctggcagaggctaagaccccaaataagtgagaatgc

SEQ ID NO: 417451 - DNA, 122 bp, Homo sapiens
acagatgacaaaacagccttagagaaggagccaagactgggactcggaagcccagtgacccgtccactagactcggctgcactaactccacccaggaggaggcagggaatggaaccaggcat

SEQ ID NO: 417452 - DNA, 122 bp, Homo sapiens
tcaaaattccaaaatggaaaatgtacaaactcggtcccccagcagctctggccccgagaacggacagtcccgggcccggcgccttcccgctcgctcgtctcctgcaggtctgggatggggat

SEQ ID NO: 417453 - DNA, 122 bp, Homo sapiens
ggctgtgggcccgcccggctacctcctccaacggctgacaaagacgttcagccactcgcacggcacccagaagagcagccaggccgccatgccccaccctgaggacctggaggacgagtggg

SEQ ID NO: 417454 - DNA, 122 bp, Homo sapiens
ttggtgattatttcataagggcctatcttgctattctctagcaacatgtcacagagggcacgcagtgtttgcttagggctccaagtcagatggaacaaaaaaggaaggatggggaaattcct

SEQ ID NO: 417455 - DNA, 122 bp, Homo sapiens
actcgcgcttccagcctgggccaaccaggctgcttgaggctcgaagcgcatgcgcggtctcgccctccgtactggccgagccagcaaatcgcattgcgcagacgaccagcgggcgcctcgga

SEQ ID NO: 417456 - DNA, 122 bp, Homo sapiens
cctgtctgggatgtgaggagcgcctctgctgggccacaaccctgtctgggaggtgaggagcgtctctgcccggccgccccgtctgagaagtaaggaaaccctccgcctggcaaccgccccgt

SEQ ID NO: 417457 - DNA, 122 bp, Homo sapiens
taataaaaatgacaggttgggtgcggtggctcacgcctgtaatcccagcactttgggaggcggaggtggacaaccagatctcaggagaactctatcatgagaccataacttaagggcatggt

SEQ ID NO: 417458 - DNA, 122 bp, Homo sapiens
aggaggaagagggccaggctgctggtagtggctggctctattgtattggcggagcggcagcgatcagccggagacatgcaggggagccatcttgccacttacccagcagcctgtgtgtgcgg

SEQ ID NO: 417459 - DNA, 122 bp, Homo sapiens
ccccctcaggccccggtagtggcggcggtcgggccattgtgcggtgcattgtgggagccgcgcgagcgggcgctcgggtcgtggagggggcggtgccgcgggatctctatggtcccgcccgc

SEQ ID NO: 417460 - DNA, 122 bp, Homo sapiens
actgcttttatgagctgtaacactcaccgcgaaggtctgcagcttcactcctgaagccagcgagaccacgagcccaccgagaggaacgaactccagaggcgccgccttaagagctgtaacac

SEQ ID NO: 417461 - DNA, 122 bp, Homo sapiens
gtgtggttggggcttattgaatctgcgggccggagatcgctcgctccggagacgtttctccgttctggggaagcagctttcccaaaaccgtccttctgcagatggctcttagaacacaacca

SEQ ID NO: 417462 - DNA, 122 bp, Homo sapiens
tagactaaacccggctgttccagacatagtgctagggatgtaggcagcactcatatttaacgcaatactgtaccaaaggctacagcagaatggtgaaaggagaaagcagtaaacttggagtt

SEQ ID NO: 417463 - DNA, 122 bp, Homo sapiens
gagtgtctagttgcaggaaaacaagctcagggttcccactgattctatgggaacagaattcgttatggtgaattgtataattatttcattacatataacaatgcagtaataaaaataaagtg

SEQ ID NO: 417464 - DNA, 122 bp, Homo sapiens
gagcagcccgttgccgtgagggttacacggcaggaggttcatggcgccgccgtgctgggtcgccgctcctcagcgctgcatgcctctcgctggggacggcggcctggtcccttcgggccggc

SEQ ID NO: 417465 - DNA, 122 bp, Homo sapiens
gtctgtcccaggcattaataaagttggctctattttgctttgtttaacgatgcttttagtcgcgtgtacaagtaagctatagattgtttaactttacacagttgtctaacctcgaattcatg

SEQ ID NO: 417466 - DNA, 122 bp, Homo sapiens
tcactttttaagtttttaactcattttaaatgatgtgtatgcagagttttaaaataaattcgtctaacaataacttcctttggtagttttggtagtctaatgtcaagtagcttgtagtgggg

SEQ ID NO: 417467 - DNA, 122 bp, Homo sapiens
ttggagggggcacgatggggcacgggcagtgggcactctgtacacggtgcagggtgctcacgctcgcagcgacggccacggggtagtgtcgtggtgagagggatgcagggcgatcttggggg

SEQ ID NO: 417468 - DNA, 122 bp, Homo sapiens
cgcctcggcctcccaaagtgctggaattacaggcgtgagccaccgcgccctgccaagcaacgtcacttattacccctgctgacttgggagcaaatgtcacatataaattcccccacgtgcgg

SEQ ID NO: 417469 - DNA, 122 bp, Homo sapiens
tatgacaacccacctccacagaggcagtttgagaaaaagctttaggcaaggaagaatgcacgggttcaagtcttggctctgcttctgaaacgttttgtggtcttgagcagcactctgtctct

SEQ ID NO: 417470 - DNA, 122 bp, Homo sapiens
catgcccgagcggcccacccccgccgtgatgtgctcctgcaccgcccgagcctccctgaccggcaccgccccctgctcaggggcaccgggtcccattgaccacccatgggctgaggagtgca

SEQ ID NO: 417471 - DNA, 122 bp, Homo sapiens
tctgaaggcacttcaccttgaggcttggctggtggaagcgatcttcggaagccgagtgtacgtcacatgtcctgcttcgagtgaatcggtgggacccagaaagcgaggctgagatcttgata

SEQ ID NO: 417472 - DNA, 122 bp, Homo sapiens
gaaacatgaggcccggcgcggaggagatggctctgcgccccgggactctgcgcgccgcgccgccgccaccagtggctttgttgggccggccagttgccttggaaacaagagaacccaaggaa

SEQ ID NO: 417473 - DNA, 122 bp, Homo sapiens
gatagaaactggtatttgctaagtgcaattttagatggggttttctaggaagtgctgtgacgtcatcacttgctttaaaagaggccaggcgcagtagctgactcctgtaatcccagcacttt

SEQ ID NO: 417474 - DNA, 122 bp, Homo sapiens
aatcctttggatgctctggacaagggtctgtggtctcctcttacctgcatcaatggcacacgggtaatggtatcggaaggagcagcctttgttgtagcagcccaaggtggcgcctgcctcct

SEQ ID NO: 417475 - DNA, 122 bp, Homo sapiens
tttctcaagtcaggagattgatttgtatttgaatcctcaatttacaattcactaattttgcgactatgcagatgtaagtcattaactgctgtaaagcttcagtttccccgtatataaaatgg

SEQ ID NO: 417476 - DNA, 122 bp, Homo sapiens
cgcccctcccagccgtttgaagcggctcgggctgcggctggctcagagtggcgcggggggcgtggggcggtgctgaggagctgaagccgtggccagctcgacgccggacagtccagcgagca

SEQ ID NO: 417477 - DNA, 122 bp, Homo sapiens
agttgtctcttaaaaaaaaaaagcttttccgccatcttcccacgacgccaccatggtgtgcgtgaacgtcctggccgatgctctcaagagcatcaacaatgccgaaaagagaggcaaacgcc

SEQ ID NO: 417478 - DNA, 122 bp, Homo sapiens
ttttcaacaaaatttgggtctgttgaaaaagaacacgcagatgccagccttgatgtcaaacgggcccaaacttggacagtggtaaactaatgagcaatggtgcacagagtcagggtaaaagc

SEQ ID NO: 417479 - DNA, 122 bp, Homo sapiens
ccagcagagccagtggagggcgaggacagacagcactccgtggccacgtggggcccctcccgtgcactccctgagcatccacagacgcagcctgaccgtacctccccaggcagccccccttc

SEQ ID NO: 417480 - DNA, 122 bp, Homo sapiens
agcccctgccctgggtgacggccggagctggtctcggtccgggtgcgaggggcggagcagcggccattactgcgcagcctcttccgcctgagcccgcttcgctgcctcgggtggcaggcggg

SEQ ID NO: 417481 - DNA, 122 bp, Homo sapiens
acgggcaacaaggctccagaaaatcaaatataatatccacccagcggggcttataactctcgagaaagtcaactcatgagtatccctgagacatttaagaatatctgagaaggcttaaacac

SEQ ID NO: 417482 - DNA, 122 bp, Homo sapiens
cattcctattacaggcctcctcctctccccactgtgagcctgggagggagtgcacatgggcgtcttcaaggtttctaagtaggctgctcagcagtgggctcctctggcagatccccagcaac

SEQ ID NO: 417483 - DNA, 122 bp, Homo sapiens
ccgcgtctccaatgtggaggggggggggaggggatgggcgggagcgcagatctcgtcaaacgaccaaggtccccaccgtgggaccttgttaatgctcctactatgttataaacttaagcaag

SEQ ID NO: 417484 - DNA, 122 bp, Homo sapiens
tagggaatttatttacaagaagagatttaaaagtcataaagctatacacttggattggtacggttagtatactcttgctttgtagctgctccacattgaaacttttatttattattcctaaa

SEQ ID NO: 417485 - DNA, 122 bp, Homo sapiens
cagcggcgccagccggctgctcagagtgcgggcccaccgagcctgcacccacctggaactcgcgctggcctgtgagcaccatgtgcagccctggttcccgctggcgcctctccctccacacc

SEQ ID NO: 417486 - DNA, 122 bp, Homo sapiens
ttcagcagcctgtcggtgtgctccccaatgccgtaaaaaaatcagaattataaatatattcgtatgagcagaactttacatggaaaacgaaatactaataaaatgggcttgttattctgttg

SEQ ID NO: 417487 - DNA, 122 bp, Homo sapiens
ggaggctgaggcaggagaatcgcttgaacctgggaggcagaggttacagagagctgagatcgcgccactactctccagcctgggcaactgggcaacaagagggaaactccgtctcaaaaaaa

SEQ ID NO: 417488 - DNA, 122 bp, Homo sapiens
ggtgggtgcaggcagaggtgtgggttcaggtgggttaaagccactaggtggccccataaacgtgtcagggccactggatgactcccgaatgcttgaggcaggagccagcaaagcctagagca

SEQ ID NO: 417489 - DNA, 122 bp, Homo sapiens
gcggtccagttatgtaagaggcagtttaacccatttgagcctatcaggccgaataatcggcgcatccgagtcaaggcagggcagagttaaggggtttaacgagtcgcagggttgtatttctt

SEQ ID NO: 417490 - DNA, 122 bp, Homo sapiens
ttggtcgtggcagcgtgctcgtggcatggttggggggcaccagggtggaagggctggctgcggtcaggctcgttccctgtgagctgcggccctcggctgccgaggctgtgggggctatggag

SEQ ID NO: 417491 - DNA, 122 bp, Homo sapiens
cttcctggcgtcaggtgttctcggcggcctctcggtaacagcctggcctttgcttctgtccggggcgcgtggcccaggctgagcagtgcactcggctgcctaggtggtgtgaggttctgtga

SEQ ID NO: 417492 - DNA, 122 bp, Homo sapiens
ggcaaatcagatctgcttggaagcagattcctgatgaagggcagatccggggccagggagcgggtgggagaggccccagatttgccccagacctgaccctcagtcccccagctgctcctccg

SEQ ID NO: 417493 - DNA, 122 bp, Homo sapiens
cacactgggagggaagacacgtggtccgggcggaagtgtctgtgctgcgagtgggcgctccggctgggagggcagacacgtggtccgggcggaagtgtccgtgcagcgagcaggagctcgcg

SEQ ID NO: 417494 - DNA, 122 bp, Homo sapiens
tcaccccagtgtattgtgggaagggtagtcccatgttccagtcgcttgagcacagaaaagcgcgtaggaaactacaactcccaagaggtaaagaagcgggactatttcccagtctggcggta

SEQ ID NO: 417495 - DNA, 122 bp, Homo sapiens
gaggactgtgtgcccgtgtccgagctggggctgcctctgggcgaaaactctaccgacaggcggcacgcattccgcgcccgctctgcctacttgaggagggggtgtcactcctgcccgcaatg

SEQ ID NO: 417496 - DNA, 122 bp, Homo sapiens
gaggccgagagcttgctgagatcctgtaccttcctgcagggctttcctctgaatctcctgcgcctagcagggcattcccaccccgccaagtgctccaccccaccccgcccctcctccaggct

SEQ ID NO: 417497 - DNA, 122 bp, Homo sapiens
tgaactaaattgccaagtttgcaaggactgggaagagaatccccactttgcaagacaatacggtgatggctgaagatggcaagcatttggcaaaataccatatttgacaagctcttagatca

SEQ ID NO: 417498 - DNA, 122 bp, Homo sapiens
ctggcggggacagagtgggtccgaggagccggggaagccaggcctatgccccccagccctcgccgtggtcccgcccggcccctcctcaccactcaggcacaggaagcctagcagggccccgc

SEQ ID NO: 417499 - DNA, 122 bp, Homo sapiens
ggaagtgagaagcaagagctgtcaaagggaagtgagggattagctcctccacaggttgtgcggggtaccttacagactagctatctccattgtacatcctggcccatgtcaccctctgcatc

SEQ ID NO: 417500 - DNA, 122 bp, Homo sapiens
gctccgcccacttctcaaagccaatcagcaaattgaaaagaatgagtcaatttctctccccgcggccgctcttgattggtcacagcgggggcctgctgattccgcagaacctaggcagcctg

SEQ ID NO: 417501 - DNA, 122 bp, Homo sapiens
ctcctcctccctccgcgggtccggccctcggcgcctccccaccctcgctccccacccggccggctcagctgtccctgcgcagggctactgacgctcaaggttagttggccttaacccctgcg

SEQ ID NO: 417502 - DNA, 122 bp, Homo sapiens
gatgttgaagccgagaggcagcccagttggaaaggagcctggccttccagggaaggcccccgcgccgcctgtggtgctttgcgtggcgcactccctccttcgctccggtcaaggctggtctg

SEQ ID NO: 417503 - DNA, 122 bp, Homo sapiens
ctttaccgcctttgccgcgaccagacatgtctaaccagctgacaacaaaaaccaggtacgcgaaaagaaagcaagccacgagcatttatacacgaacatcggaccttattgagaactgaaag

SEQ ID NO: 417504 - DNA, 122 bp, Homo sapiens
gcccttctgaagactctaaggcccgccctcaaggaccctcaccgccccccacctgccactcggcaccccaagggagccgctccagctgcatccgctcctcccggcacccccatctaaaaatg

SEQ ID NO: 417505 - DNA, 122 bp, Homo sapiens
gtcgtgacgtcacacagggcctctcgaagtgggcttgtgaatggctagattgggaagcaccggcggggtgtcgggaagggtggtgacgcaacatagagactccgcccccttccttggagcgc

SEQ ID NO: 417506 - DNA, 122 bp, Homo sapiens
agcaagaagccgagcggaaaagttagcgcaggtactgtgatctcgggtctagagcgcccgcgccttcggggccccttcgcagggagcgccctccccactccctggcttcggaacccacccgg

SEQ ID NO: 417507 - DNA, 122 bp, Homo sapiens
cagtgagacttgcgtttcaggggaggggcgtatgtgcatcctcggtctcagttatgtaaacggtctgatctgtaaaatagtggtagcacatgccatgtgggatagttggtggagatgataga

SEQ ID NO: 417508 - DNA, 122 bp, Homo sapiens
tccccgaccaccaacatcccacagcagcctggtctgtttgctgcagttgaagaactgatacgtcattatcaccacaagtctgtggcgtaccttagggttcactcaggtggtgtacatcctgt

SEQ ID NO: 417509 - DNA, 122 bp, Homo sapiens
tcagggacagccactgagtgagaccgagaggaaagatccctgctccctggactgctggaccggctcgcaccacagaagccagatgtggcccctgtatagatagattcttttttttttttttt

SEQ ID NO: 417510 - DNA, 122 bp, Homo sapiens
atctatctatctatctatctatctatcatctatctatctgcagcttcacccgcctcactacggctctgggtgcgactggtcttatgatgaatgttgtaggatgagtgacatcttaggagtaa

SEQ ID NO: 417511 - DNA, 122 bp, Homo sapiens
tataaaatattggcaccaacggactgcactagagccccacccaacgatgagtgtttgtcacggtcctagaacagaacagcacatgttaaggaatgaagagtgtacccgtgtcggcaatggca

SEQ ID NO: 417512 - DNA, 122 bp, Homo sapiens
gccctgaacccacgatcgtttgagcgcctgctgtgcgcctccgccgcgagtcgcagggcccgagataaacaatgggtctgaaaaaggagggagtttcaccatcctctctgcatcatcctcct

SEQ ID NO: 417513 - DNA, 122 bp, Homo sapiens
tgggcctggagggagacacaagggaggctgcgcgcgggtccagtcccccctgtgctgccccgaccacctggtccccaggcagcccctgcccagttctctggactctctggagccccagctca

SEQ ID NO: 417514 - DNA, 122 bp, Homo sapiens
cagatgtgtccagggaaaccctccctgtgctatggatgaaggcatttcctgttggcacatcgtgtcctgattttcctctattgttagagccactggataaagacagagggtcagggactgga

SEQ ID NO: 417515 - DNA, 122 bp, Homo sapiens
ctgacttagcggcgtacgtgctgagtcatgggatgtacgtgcatgagcttctgtttcaggcgcatccctgggacaggagtgcacccaggcagaagtggtgtttaaccagggaggaaagctct

SEQ ID NO: 417516 - DNA, 122 bp, Homo sapiens
tgacccaggggacatttttctgaaacttgcctgctctgaagcacactctaggaaggctgacgccctactatgtgccaatgctggaggaatttctactgtgtgccagatcctgtactgggaga

SEQ ID NO: 417517 - DNA, 122 bp, Homo sapiens
cgacttccggcggcgccgaggcacgcgcgccataagttggagctcccggggcgcccgggacgagcttcccaggattccccgaccttcccgtgctgctcggccttggccgaagcatgcgcggc

SEQ ID NO: 417518 - DNA, 122 bp, Homo sapiens
tcggctggtgctggtggtagtggctgtgttcgtgggctgctggacgcctgtccaggtcttcgtgctggcccaagggctgggggttcagccgagcagcgagactgccgtggccattctgcgct

SEQ ID NO: 417519 - DNA, 122 bp, Homo sapiens
aactcagaccttacagttcgcaaccccggaccgagtaggctgaaagtggagaccacctcgcgctcctttgctgccgggaaactgagggccagagcgtcttccctggtgtcgggctgcgttga

SEQ ID NO: 417520 - DNA, 122 bp, Homo sapiens
tttactgagtgttagggtaatttgttaatggggtatatttggtgacataaaaccttctgtcgattcatggcagtctggaacggagtggaagcgtcccactcctggggaacccccacacacat

SEQ ID NO: 417521 - DNA, 122 bp, Homo sapiens
aagctcaaatgggttaaagtgctctcctgtcttcctctgtccctgagcacctcaaggccacgatcagatagatgagggtggcctctgcagaagcagggcccctttctgcctgattgcaacct

SEQ ID NO: 417522 - DNA, 122 bp, Homo sapiens
tggcaggagcagaagagcatgcggtaggtgtactcgctgggcacccggtcgaagaactggcgcagggccttgtggcacttgcggcggttgcagcgctcggtgggcgagatctcgcggttgca

SEQ ID NO: 417523 - DNA, 122 bp, Homo sapiens
aagagagagaactaagcaccgtagcaactgttgctatttgtgtactgagcaacagctgtgcgagacagatttattttttaatcctgatctcactgatagcctgggatgtggccttgccacat

SEQ ID NO: 417524 - DNA, 122 bp, Homo sapiens
agaggccacccagccgagagtttcagcagtgccagtgggtcctgctcggtcagggccaggcgtcgtgctgacccgccaggccctgcgacctctgagtgaggcctgaacccatggaaggcgga

SEQ ID NO: 417525 - DNA, 122 bp, Homo sapiens
aggaaggccaacccatctccttaaagggcccttcactggtgcgtgggtgaatgcggtccccggcctcctgggacctcgaggaacacaggacgcagccggtagtacggccagctcagctcgcc

SEQ ID NO: 417526 - DNA, 122 bp, Homo sapiens
cgcaccttttaagtttaaagatgaatatttttagcctaagccacctcgccctgtctttaccgctgtggtgtggttttcactaaacctccctaggagggctcgcgcagtcctcaggctccgga

SEQ ID NO: 417527 - DNA, 122 bp, Homo sapiens
tctctgtcttcaaaggggcttttaaatgtagctggagggcccagaagagaaaaataaaaccgaggaaaaactatttaaagttttcttagtgcaataagcccaggtctggataagcaataaaa

SEQ ID NO: 417528 - DNA, 122 bp, Homo sapiens
ggaaagatggcctttctaataaatggtgctggagcaattggacatccacaggcaaaaagacgtaagtctcccaccttacgcaaactcaaaattgatcaagggcttaaatgtaaaatatgaaa

SEQ ID NO: 417529 - DNA, 122 bp, Homo sapiens
ggccatcgttaagctagctccgaacagccccaatgagggagctaggcagctccgagttcccggggtaggagagccccttttgtcaatttccatagctgtgggtgagccacagcggggactgg

SEQ ID NO: 417530 - DNA, 122 bp, Homo sapiens
tcatttccacaactatattctaaaagcgacaccgaggtgccttagttgcacacatatcaccgtccccgaatcttacagtcctatcagaatctccaggccctccatacagcttggatacaagg

SEQ ID NO: 417531 - DNA, 122 bp, Homo sapiens
caagggagccgctccagctgcatccgctcctcccggcacccccatctaaaaatgtgttcgcgcccgcactttcagcactcccagatgacaaaacgctgtgtttgtgtataagtgaaagccac

SEQ ID NO: 417532 - DNA, 122 bp, Homo sapiens
aggagacatatgacatgcttttgccatgacccttgggattctttggcctggagcaactttcgagttatcaatagggatagatactctgtgcatcccagttcagacactaatcagattggaaa

SEQ ID NO: 417533 - DNA, 122 bp, Homo sapiens
caaaaacttctctaagtcatgacagctttacagattttgctctttactagctactaagatcgagaaatagtaaaatttctgttctttcctctcaaaataactgaaaaaagagttttcatcac

SEQ ID NO: 417534 - DNA, 122 bp, Homo sapiens
gcggtcgctctgataaccgcatcccggtttccgggacgacagcggaagtcacttctcacacgcctttcttattggataccggcttttcatggggccgagcgccgctgggtaggcggaagtag

SEQ ID NO: 417535 - DNA, 122 bp, Homo sapiens
acatggggaggaggtggggatgaggtgcatcaaatggctggaggggttggcaaggattagcgctattgatactacatggaagtaatgatggaggaaagctgcccctctgaaagaggaagaaa

SEQ ID NO: 417536 - DNA, 122 bp, Homo sapiens
ggattaactgatgccctgcatgaagtttgaaaccatatgactttagtgatatcagtctaacgtgatacgtcattttcccttcacaacactcaactacccagctgcaggagttaagcatagat

SEQ ID NO: 417537 - DNA, 122 bp, Homo sapiens
cccgcaggcgcctggccccgcccctcccctcagtcgccgggccccgcccctccccgcaggcgcctggccctgcccggcccggtcccgcccacatcagaaagctcagagcaggctgcgggcag

SEQ ID NO: 417538 - DNA, 122 bp, Homo sapiens
agcaatatttacagccagtcactcctggccggctgagccacttttcaaaacgcccttgcacggctgtgcagagtggctggctccactggcagccggcagagtaataactcacactgtcacca

SEQ ID NO: 417539 - DNA, 122 bp, Homo sapiens
gggctggcctggcgcgggccgtgctcagagggagtggggtgctgggttcggaggtttccacggcggcctcaaaacactgggccattgcttcggcagaaaatgtgaagggtccctgaaaaata

SEQ ID NO: 417540 - DNA, 122 bp, Homo sapiens
ctgacagcagccgctggagcggtgggcccgcccagctctccccgcgccccctcggagttccgcccggtcacctccacgcggccgagctgcaagcgaccctggcagcctcagaacccaggggt

SEQ ID NO: 417541 - DNA, 122 bp, Homo sapiens
ccggcggtttcatccccgtgcactcttgtctgatgaaatataaatagcacgcgatgttttcgagcaaggctagggaagcgtctgtgggtcgtcctcccgcccggcagaggctgatgagctgg

SEQ ID NO: 417542 - DNA, 122 bp, Homo sapiens
ccataaagcgggacaaccttctctctgctgatcccagctttacatactggacactcttgccgttctggccgtgccagccactgatgaagacatggccaacagtacaggtggccacacacact

SEQ ID NO: 417543 - DNA, 122 bp, Homo sapiens
gtcacggcgccgcagcagccaatggccgtcgggaacctctgcccgactgctcggcctcctcggttcaaactgaaagcctgagactttcccaactccgtatggggcagcctgggcccgcccgg

SEQ ID NO: 417544 - DNA, 122 bp, Homo sapiens
tggaacatccctgcaggggactctgaccagctcgagcgaggtggatcctgagagggctcccgggtaagcaattgccccggtggaacgcctcatcagagcagtgtgtggcaggcccccgcgga

SEQ ID NO: 417545 - DNA, 122 bp, Homo sapiens
cagatactttcatatctgtaaaagtgggagctgtgatctgtaccctctgccaaacgtttacgtgggaggcgggagcgggggctgagggcttcgtcttttctcccctctgctatcaccggttc

SEQ ID NO: 417546 - DNA, 122 bp, Homo sapiens
caccgacagctctgtcccttcttttatctggagacgctgagcctcatcaactctcacctgcgtttcaggaaaaataataataataataaatgttccacggacacaggatttcggccaaatgc

SEQ ID NO: 417547 - DNA, 122 bp, Homo sapiens
ttctcctcgggggcgggggcaaccgcagccactccacgccctactgcgggcttcgtcgggcggtgcaggtgagcactccctggcacagctgggaggagttagcggacaaagattcctgcccc

SEQ ID NO: 417548 - DNA, 122 bp, Homo sapiens
taagacagagggaaagagctaactcagaatatgcaaaagggggttatagtgaacaggtgacgactttcagagcagaacctcagaaataaagggaccaaaccaagggtttgttgacagggtat

SEQ ID NO: 417549 - DNA, 122 bp, Homo sapiens
tcggggcattggcgcattaagaatgtccctctaaaggcatatgtaagataaagcacacttcgcactttaaccagtgactaagggagatcaaaagcaggggacaatacccacccggaatttgc

SEQ ID NO: 417550 - DNA, 122 bp, Homo sapiens
tcgtgggaggactacaacccccagggtgcagtgggacaggcgttgccgggtcgcaggtcccgccagtgcgagcgcaacggaggtcgaaggcgttcagactcttagctgaacgcggagctgcg

SEQ ID NO: 417551 - DNA, 122 bp, Homo sapiens
gggaagagtgggtggggattctgggccggtggaggagtcactgtcgcttcagccaggctgcggagcggacggacgcgcctggtgccccggggaggggcgccaccgggggaggaggaggagga

SEQ ID NO: 417552 - DNA, 122 bp, Homo sapiens
ccggcaaccccgccacctggcctagtcgtgctcggggcgcagggggactggtgaccagaccgggcggggtggggggtgggcagggaaagcacgtggtgacctcctcgcggtcccgagctgtg

SEQ ID NO: 417553 - DNA, 122 bp, Homo sapiens
atgagccccatgggcctgaagaggccactggcaggcgggagctgggcctgcccaagcggccgagaggcaggagctttggactcgggaggccgcagtgaggtgagagctagctgggcgtggag

SEQ ID NO: 417554 - DNA, 122 bp, Homo sapiens
ccctcccgcgcgggccggttaattcctaggtacacggccggctttcgcggagaaaccgagcgcgccagcccggcttctcggctggcgggcgggcggtgggcgcgtcctcccccagcaccgaa

SEQ ID NO: 417555 - DNA, 122 bp, Homo sapiens
gtcccctcctgggcctctcaaagtctgagccccgctccgctgatgcctgtctgcagaatccgcaccaaccagcaccatgcccatgactctggggtactgggacatccgtggggtaagcgagg

SEQ ID NO: 417556 - DNA, 122 bp, Homo sapiens
gggcctctgggacggggctggacggcttgttgacggaaacgagcccttgacgctgtggcccggaagtggagcggctgtcgcagtgcggctccggcagtggcagcggaggcctgtgtttgcgg

SEQ ID NO: 417557 - DNA, 122 bp, Homo sapiens
ggcgtgctgtcctcacgggtcgggcacgcggtcctcacgggtgtgtctgtgtctgtgctgcgttgccagctggcagctcgtgggtcccactgaccttccctcctccacggccacctgggcac

SEQ ID NO: 417558 - DNA, 122 bp, Homo sapiens
aacacacagggcggcttgtctccagcggtatagcctctccacacccccaaaccgtttgctcgaaacttgatctccttggccctcagagtcacctcagtggagaagcctgcacagggctttga

SEQ ID NO: 417559 - DNA, 122 bp, Homo sapiens
gccatcgcccggcacgggacacgtctcagggggaaggaacacgttttctctcagactgagcgctcgctgaccccggctcccaggcaccacgtctaccacgtgactggattcctgcggccgcc

SEQ ID NO: 417560 - DNA, 122 bp, Homo sapiens
aattggctttaaagataaacataaaaattaggacattttgggtatgcagtgataatgactcgactttgcagggctgtgtaagcatataaaattgctggaaatggtgtagtcagggagtgatt

SEQ ID NO: 417561 - DNA, 122 bp, Homo sapiens
ggcgtcgggacctaggcggctttggattcggcgggcgacctcgctttgaagctgatcacccgctcaaggtgatcacgacgtgccgacccagtctagattttgagttctgcagaaaatgcaat

SEQ ID NO: 417562 - DNA, 122 bp, Homo sapiens
ctgggggacacgcctggtgtctcttactccgacattgctgcacgagcctatggttgtggccgcacggagctggccatcaaggtgtgggtgcccagccctccacagacactctgatgtggttg

SEQ ID NO: 417563 - DNA, 122 bp, Homo sapiens
attacttctaaatgtgcaggcatcatttcatagctatacaagcaggctataaaaggaatacgttttccttcagttcaggacaactcttccaaatagacaccaaatatgtaataagtggcttc

SEQ ID NO: 417564 - DNA, 122 bp, Homo sapiens
cactaacttgattccaacactgtgacaagtaaatgatttttgccagcacagttggccctccgtatccacaggctctgcatccgtgggttcatccaactggggatagaaaatattctaaaaaa

SEQ ID NO: 417565 - DNA, 122 bp, Homo sapiens
catgcaatattagcatacagtcaaagtgcagaagaacttctgaggcgtagaaaagtccaccgagaagttatatttaagtacttggcaacacaggggattgttatacctccagctactgaaaa

SEQ ID NO: 417566 - DNA, 122 bp, Homo sapiens
gctgtgttttgtgtgttgccttcacgttgtggaagctcctctgagaatgtgtggctgtcacgtgggtgcggcatatactgcccttagcttggcagtgctgccaacactgcacctgttctgtt

SEQ ID NO: 417567 - DNA, 122 bp, Homo sapiens
taagccacttgagggcaccctttctgctctgcatatctcaatagaggctctacttataaacgttttttaaaatctctgggctttaaatttctttatgccaattttcaaacagattattgaaa

SEQ ID NO: 417568 - DNA, 122 bp, Homo sapiens
gacgcagcctcggagggcggcgtggtggtggcatcaacggaggctccccatgcgtgccctcgcctcccagcgcgcggcccggcgcagctgacaacgcccccgggtgggagcagctgccggcc

SEQ ID NO: 417569 - DNA, 122 bp, Homo sapiens
attgcccaccggctcagcactgtccgtggggcccactgcattgtcgtcatggccgatggccgtgtctgggaggttagttgtcctgggggcgtggatcagtgggttgaggatggcttcatcac

SEQ ID NO: 417570 - DNA, 122 bp, Homo sapiens
cagggttgtttctgctagtgctgcgaaaaaccccgttgtcattttcctagggacttaccacgctgaacctgtaacggctttgggtggcacggacgtgttaactgtcttctcgaccatgagca

SEQ ID NO: 417571 - DNA, 122 bp, Homo sapiens
agggcagcttcggacggcttataattggttccagttaatctctgccgccctgagaactgccgttcaaacttgagcagcatcatgatcaatggaagctgacggcggctgaagcagtattgact

SEQ ID NO: 417572 - DNA, 122 bp, Homo sapiens
cctccggagaagctgtcgaaattcaagactggcaagagaagcaaattcaacctctcacaccgatcatttctcattccctgaaaagaagagattgtttccccagggaagtgaaaataatgaac

SEQ ID NO: 417573 - DNA, 122 bp, Homo sapiens
ccgccagcgttcggccaagtgtcagccggcagcgacggcgctagagctgggagctggggacgcgcgcgccggaccttccacagcctccgcccagagcctgaggcgccggggccgggggagcc

SEQ ID NO: 417574 - DNA, 122 bp, Homo sapiens
ctctgcctaacacccactttccacagggatctccttcacccccaaggaggtcggggagcacgtggtgagcgtgcgcaagagtggcaagcatgtcaccaacagccccttcaagatcctggtgg

SEQ ID NO: 417575 - DNA, 122 bp, Homo sapiens
acggaccgacgtcctgcgtcgcttcccagctaccccctgggctccgcccccaggaccgcgcgcgccaccacgtgctcacgtagttggcaggcatccgcctgtcagagcctcggaggtactgg

SEQ ID NO: 417576 - DNA, 122 bp, Homo sapiens
acttgtagtccgggccgccggatgggcccacgcactcgtatacacacgtgcgcgcccgcccgggctcccagtgtcgcggatggagccccgcctgagcccttcgacttctcccgtggccgcca

SEQ ID NO: 417577 - DNA, 122 bp, Homo sapiens
ctgggtggagggagacgccgggctagagcctttgggatcgtcctggattcactggctttgcggaggctgctcagatggcctgagcctcccgaggcttgctgccccgtaggaggagactgtct

SEQ ID NO: 417578 - DNA, 122 bp, Homo sapiens
ggcgctcacgatccctgcccgggagattacgctcaaagcaaagctgtatcaaaagccaggcgagtcaacgcaagtgagcgccagccttggtttttgttcatctttagtgtggttcacagatg

SEQ ID NO: 417579 - DNA, 122 bp, Homo sapiens
ccccatattctttcaatcgttccttcatccaacaaatatttattgtgcatctattatgtccgatacattcagccacagccctagatatatccattcactcatgaagtcgggtcatttctatc

SEQ ID NO: 417580 - DNA, 122 bp, Homo sapiens
acatgtgtcacggccactcagctctcgcccgcctgtgctgtgggccagggaatccagcggcgtctggcctcctgggcactgcttgcctggcctcgtgcttggattgtcccgggggctcctct

SEQ ID NO: 417581 - DNA, 122 bp, Homo sapiens
tgtggaggggaaatggaagcggggcctaaggaggggcggctggagaggatggggggccctcgtgtcacaggacgtgggacattgaggatcctagggcagtttcctgtgctatgccagaggaa

SEQ ID NO: 417582 - DNA, 122 bp, Homo sapiens
agggaacaaatggctttattttccctcttctaccgcctacttgggcccagtaggtaacagcgcttaaaagcaccggctcattaaaaaaaaaaaaaaaaaaaaaaaaaaaaacacccgcaagc

SEQ ID NO: 417583 - DNA, 122 bp, Homo sapiens
catgtggtcctaagaccaacctttgatttcccaccggtgcataattgctctctactggggcgcgggaggaggggggtgtcggcaatgtcaattaccctctagtggtgtttactcaagacttt

SEQ ID NO: 417584 - DNA, 122 bp, Homo sapiens
aaatcagcatttcccactcagcatcgagccaaaattgactgctgtctctatataataaagcggcatattttgcctctatcttctaattggaagacagaaagtctcaacaaacagaacatgtt

SEQ ID NO: 417585 - DNA, 122 bp, Homo sapiens
agagtttttaagtgatgtgtaaactaaatgctgaaattttaagctaaaatgctacttattcgcttgcatggaaatactaggtaataactgactaagtgctgtgctgactttatgtggaagca

SEQ ID NO: 417586 - DNA, 122 bp, Homo sapiens
gctgatgactggattctgttttctaacatggacatgcaacatattcaacactacgctcaccgcagtttgcttggaaaagccttctgtcatacaacaaaatacattctgtctcatgaatgatt

SEQ ID NO: 417587 - DNA, 122 bp, Homo sapiens
ccgctctttctccctcctagagcctggttgcagccacttgtgcgatcccggaccttgccgcggccgcctggctcctttccgcgccatgagccgcaggttcacggtcacctcgctgccccccg

SEQ ID NO: 417588 - DNA, 122 bp, Homo sapiens
acagagagaaggcttagctcttgtccaacagggccacctagagggactctcaggcttgagcgggagaagcagagttttgaggcagagctgatcaagggaacctcaacaaacaaccccagcca

SEQ ID NO: 417589 - DNA, 122 bp, Homo sapiens
ccaagctattttataagcttcttcaggtctctgatgtttacttttcatgcatgccacgcccgccgcccccatccagtcaggagggttggcctaaaagcttagtctgtatcgaaacacaaaga

SEQ ID NO: 417590 - DNA, 122 bp, Homo sapiens
ggcaaaatcccggctctacacatgtactcccagcaacttgggaagctgaggtggcaagatcgattgagtccaggaggaggaggttacagtgagccaagatggtgccactgtactccagtcgg

SEQ ID NO: 417591 - DNA, 122 bp, Homo sapiens
cttccttccccctcctgccttccttccccctccagtcttcccttcccaccctgttgtgggcgggctgcagtgctgatcccaccgggacgtttggacaggcattgtctgtgacaacggtggca

SEQ ID NO: 417592 - DNA, 122 bp, Homo sapiens
tctttcaaacatgcagcttcctggcctcccccacagccccaggagatgcagaccaaggcacgcaagctctgcctgaggtgtcggaagccaggtccataccacagaggcaggaagagcctggg

SEQ ID NO: 417593 - DNA, 122 bp, Homo sapiens
gccacgggtgcacctggggccaggccgacagtgatctgttgggcgggagcccggcctctccggctatagagctgcagccacggaggatttgtagcgacttgtaaaggcttaaaggagtccag

SEQ ID NO: 417594 - DNA, 122 bp, Homo sapiens
ccggcctcctacccccggctcggctcctcctcaggaccaggctctggaacccagctcccacgtggatccacacgcacagtgggctcagactaccaggagacacggccacagccacgcccgcg

SEQ ID NO: 417595 - DNA, 122 bp, Homo sapiens
cagcggactcagcggggtcccaggctgcccagacaggacggattgctggggggctcaggccgtcctgccccgggctccgtgggcggcggggtggggacagggcgtgggcgcgtcccgggggg

SEQ ID NO: 417596 - DNA, 122 bp, Homo sapiens
agctgcctttaccaaggtttgttttacaattgatggctttgttcttccaagacagttacacgttctgtttgggttcaggtagaagtcttacaaacactaagtaatgatttgttaactaaacg

SEQ ID NO: 417597 - DNA, 122 bp, Homo sapiens
cgatcattcggacgtggaaatccacacgccagctccaagaccaccgccggagccccgccgcgctccaacaggcaggctccacagggagccgcgcggcgcccagccccacccgacccggtccc

SEQ ID NO: 417598 - DNA, 122 bp, Homo sapiens
ttgctccccgggtaataaatgccagtagcactatagagttgctgtgacaaccaaaaaaggcgctttcatacatttatttccaaacacttctcagtggttggtattgccccggttgaatacta

SEQ ID NO: 417599 - DNA, 122 bp, Homo sapiens
ccttgcctgttcctttgtacttccaggctcattttaaagttgtatttaaaggactgccctcggaaatgcttctgtttagcggaacttgtattcagcctgacacgctttgccaggaacaaacc

SEQ ID NO: 417600 - DNA, 122 bp, Homo sapiens
gattacaggtgtgacccactgttcctggcctcattttttttttcagagaatgagagatcacgcattttaatgtgatctctgaacttaggatctgtcttaaaatcaatggcatgtctaattga

SEQ ID NO: 417601 - DNA, 122 bp, Homo sapiens
ttgtcaaaaactccaaaaggaatcaccacgtgacccagcaatgccactgctaggcatacacgagagagagctgaaagctgggactcacacaagtcctcccatgttccaggcagccctgttca

SEQ ID NO: 417602 - DNA, 122 bp, Homo sapiens
gttgaataagctgaccacttttgttgtgtgtggtttctcccccgctccccaatgactttccgaatgcctggcatcaaaacttataccgagtgccaagtagaaaggaaaccacaaaggggaat

SEQ ID NO: 417603 - DNA, 122 bp, Homo sapiens
attgaatattttaatcctcaaaacaaccctttgaggtagcttttataacccacattttgccgaataaatcactgagatttggagagtttataagacctgctgaagctatgtaaccaggaggt

SEQ ID NO: 417604 - DNA, 122 bp, Homo sapiens
ccccacggacagcccaggtcccgggtctgagtctccggtctgagatccaccccgaggctgcgggacctgcccagaccctcgaccagggaagaaactcgggcgcctttacccggtttaatttc

SEQ ID NO: 417605 - DNA, 122 bp, Homo sapiens
agtttgttgccaaggtgagtcattctcagcatcttgatatgcatagtggacattgccaggcgagtaataatacaagaatttgaacaattagaaatgctgaagctcttgaaaatttcaaggca

SEQ ID NO: 417606 - DNA, 122 bp, Homo sapiens
ttttcaaacccggagctgcactgggattggtggactgggcactcacgtggttaacggtcgcgggaagccgcggagcccgaacctgagactggacctgaggagacctcagcctcggtgctcgg

SEQ ID NO: 417607 - DNA, 122 bp, Homo sapiens
acacggaaagcaaggagccaagaaccaaaacagagacccactgagaggagagccaccttccgcccagcagccagctttcctgtgcccactgagcacgagattatgtgtgaggcctcgtgtcg

SEQ ID NO: 417608 - DNA, 122 bp, Homo sapiens
caatgctgggtctgatcagagctcatcctctttcatgctgcctgattttttgagaaataacgcccagggttacactgcatcattgcaaactcaccaggcagccccagtcagagctagagacc

SEQ ID NO: 417609 - DNA, 122 bp, Homo sapiens
ggcctcagtacatttagaaataaataacatgcaaacaatgatgcttccctaccttcctcacgaggttactctgaggagctaatgagattgtgcgtatgaaaacaaaagttaattgactgtct

SEQ ID NO: 417610 - DNA, 122 bp, Homo sapiens
gcccagcgaggacatctggaagaaattcgagttggtgccgccgccctgggacttgggtcccgcagccgggaacccagccctcagctttggtctcctggaaccgtggccggtagggtgcgctg

SEQ ID NO: 417611 - DNA, 122 bp, Homo sapiens
gcagtcgggcgaggtgcacacagtctccttcctgctggacacccaggagcaaatccagaccggaaggcggagcggacacctgagtggcgcggcccgcgcccagccgccgcctcctcctcggc

SEQ ID NO: 417612 - DNA, 122 bp, Homo sapiens
aaaaccctgacctggaaagcaaaggagattgcttgctaattgtaggcacttgaggtgtgtcgaaggccctgggcaaagagaagacgaggaaaccaaagcttctgagggcacctggggaggga

SEQ ID NO: 417613 - DNA, 122 bp, Homo sapiens
agctgcaactttccctggagcggggaggagctggactcttaaaggggccgcacagcgccccgggctccttagcagggggccactcagcccaaaagggagctctgggacccaaagccttgaga

SEQ ID NO: 417614 - DNA, 122 bp, Homo sapiens
caaagaaacactgaattcagggttggggctcccctgtaccttctaaaagatttcgggaagcgccactgagttagtgagcaggtggcacttcggggtgacgtacccggccacccgccaccccc

SEQ ID NO: 417615 - DNA, 122 bp, Homo sapiens
tgttcacctctcagaaagggagcaacccaaagagtagaaaggcctagagagtcatgcatacggcattgggagcagccaagccatgccaattatacagggcatgctgttgaagcagagtggca

SEQ ID NO: 417616 - DNA, 122 bp, Homo sapiens
aatattgattatctgtgatggtaaagaacaacagtggtgccagtcatcaaacatacagtgcgtcctattgagtcactgctaatttcttgagcctggtatttgctgcctattgtatttgtggt

SEQ ID NO: 417617 - DNA, 122 bp, Homo sapiens
gctctggtcagccagaagtttcagcataagccagggctcccaaggcacagaagcctgtcacgtgcatttagtgaagctgtaactacacaatgttctcaaatactcctgaagaggtgacagat

SEQ ID NO: 417618 - DNA, 122 bp, Homo sapiens
ggtgctgggcacagagcatcacccctggcccccccaccacactttccccagaagtggcagcggctgccctcaggaccgacggcaaaccaaccagattctttgtggccttgggacttggggtc

SEQ ID NO: 417619 - DNA, 122 bp, Homo sapiens
gtaagtgaagaagggagaaaacagcaaaacaagctaaaagacctttccccaattgcggagcgtctgggatgcacactacctcagctagctgttggtaagaaaattactaagctatggggtgg

SEQ ID NO: 417620 - DNA, 122 bp, Homo sapiens
caccagctccccacgcagaccagctcacgatttcccagttacaccgggcaggtgggaaaccgttctgctttctgtggaaaagattctaacttggttccctgccatccctgaatacaaacggg

SEQ ID NO: 417621 - DNA, 122 bp, Homo sapiens
accagaattctacggagtttaagaatttcacatgtgcctttgtcgatctttttccttttccgtcacattttcttttgcaattaactccagagacaacacctgtcagggtgtagggggtgagg

SEQ ID NO: 417622 - DNA, 122 bp, Homo sapiens
gctgtggcttatgtccgtgtgaatttatgctcagtcagcacgaatctccaggcttgtcctcggatagtcgcggccattcactttagttggcgtggattaggcaccagcagagggcagggata

SEQ ID NO: 417623 - DNA, 122 bp, Homo sapiens
tttaggcacagggtctagagcaagtgctccccaagctaaacacctctcaaattcatccttcgaaccctactctacaacttttactcctcccctctaagacccctctctcccatttcatcctt

SEQ ID NO: 417624 - DNA, 122 bp, Homo sapiens
tactccagactagaaaatgaaaccaaaaccaattgacctaggcagaaagttaggttgtaacgggtttcctgcagccaaagagccatgagtcacagcagctggctcaaggctgggaggggaag

SEQ ID NO: 417625 - DNA, 122 bp, Homo sapiens
agggtggagggcggggtagcgcctcccgaaaccaggaggcgaggtccccgggagggaggtcgccgaccacacttgtgagggctgtgcagagttccccaccactggctctcccggggcaagta

SEQ ID NO: 417626 - DNA, 122 bp, Homo sapiens
atatacctaagcacaaggctgtgttaataaatacaatactatcaagcttaaggaatgggtcggtgacaagggatgaccagagaaaaagcaagccagtggacacagaaaaagcagggaccttt

SEQ ID NO: 417627 - DNA, 122 bp, Homo sapiens
cacctcaggtcctggaatgtccttccctgagacactcaccattcactccctctctttcttcgaatctctgctcaggtatcccctctttgggcaaggcccttctgaccacccagaattcccta

SEQ ID NO: 417628 - DNA, 122 bp, Homo sapiens
ttataaagaacagctccagaaaacaccccaaaatctgcagaccttcagataaaaattgaacgaatgtttggcagctcttggctctgctgaagtagtaggcatcagcaaaaatgggcggtggg

SEQ ID NO: 417629 - DNA, 122 bp, Homo sapiens
gattatcaagtttaagactgctggtaaggccaaatgacctattagaggatgaattaaaaccgctatatacaaacaggatgccaggcagttctgctgagcacctcaaaattcaaaatgccaag

SEQ ID NO: 417630 - DNA, 122 bp, Homo sapiens
cctccgcacggccggagttgggtggcagccgccgatcgcaggctggctggctggctcgctcgctcgctcgctcgcccgctccctgctgcaagcggcagccccgggggtggggggggtgcacc

SEQ ID NO: 417631 - DNA, 122 bp, Homo sapiens
agttaatgtaggtagaaaacctggcgtccgcccccccaccaccccccaccggaacttttccgttggagcttgtaggtgttcgccaatttcaccattaggtgtgttagttttgtaacctgaag

SEQ ID NO: 417632 - DNA, 122 bp, Homo sapiens
gggctctgcgggcatcggtgcctccgcgggcttggggtcgtgcgtggggctggggacgggcgcccagttggccttgtggtcagggaggaacgcctggttgtcaaagccttggggctggggct

SEQ ID NO: 417633 - DNA, 122 bp, Homo sapiens
cggcgagaagacgcagcccagataggctcgggtgggcggcggtcgcacaggcagagcttccgtcccttgctacgccccacgcacgcacaggcgcttccaagacgcaagaggcggtgctcgcc

SEQ ID NO: 417634 - DNA, 122 bp, Homo sapiens
atcactgggtgttatgaattatccacgtgatttggggtcacttcacctcaaatgcattctcggtaactcctattacctaccttaccgggtcactgagagggagaaagtaaataaaaatgaca

SEQ ID NO: 417635 - DNA, 122 bp, Homo sapiens
cgcgccccgttcccacgctgccgccgccccggccccgcccgctcccggcccgctcgtcggcgcaccagactgagactccccttcaggacgctcttcgcgagcggtacccagaggcgaagtcg

SEQ ID NO: 417636 - DNA, 122 bp, Homo sapiens
agactgagacgttggcgtttgaaatcagccaatggcaggtctacactggagcttcctctccgcctccttcgcctagcctgcgagtgttctgagggaagcaaggaggcggcggcggccgcagc

SEQ ID NO: 417637 - DNA, 122 bp, Homo sapiens
ccaattctccctgccatttgaaatactgtccatctctaaattgggcagcaatagaagccacgagccttcacgacattccgacatcgtcaccttttgtttgaaagaaggcaaaagaagtacga

SEQ ID NO: 417638 - DNA, 122 bp, Homo sapiens
catccacagccccactcccgctggcttcttccagtccctctagttccagaaggatcttcacgcagactccaccttggctggcccttactctaggtcccagcctgggcctctactccttctcc

SEQ ID NO: 417639 - DNA, 122 bp, Homo sapiens
gccagggctctgaggatccctgagcgaccacctgggaacaacttgggtggaggtgccagacgccaagcgctgctgcgccgcaagtccccgagcccgggtcggcggcccttctccggggccgt

SEQ ID NO: 417640 - DNA, 122 bp, Homo sapiens
aaggcatgcgtcagatggggctgttcttggcctcttgggattcttgtttcctccaaagatcgcttgtctcagcatcaggatctggatcagcagcagcccccagaaccgtggcagcagccaga

SEQ ID NO: 417641 - DNA, 122 bp, Homo sapiens
tctgctggcctcgagggccaagggggccgtgggggccgcggggctggggctggccggggccgggacttggggggcggggctggggggcgcacctccgggtaactgtagtggcctggtgctgc

SEQ ID NO: 417642 - DNA, 122 bp, Homo sapiens
ccccacctcgcagacccgaaatgcggaaccaacaaaatctcgcgagctaaggtttcgctgcgccgggagggacttgtcgcgccccctttcgctccgcctcgtcctagaactcggccaatcat

SEQ ID NO: 417643 - DNA, 122 bp, Homo sapiens
tgccatacaggcaatttttgcttgaaatacatctttaccattggtcttcttcccagaagtcgttttcctctgtaatgattcctcaatgatgccaggaggtcatattgtgtgctgtttggtga

SEQ ID NO: 417644 - DNA, 122 bp, Homo sapiens
gctgccacgtttcatgccaccgtctcatgccactgtgtctcatgccaccacatttcatgccgtgtctcatgccaccatgtttcatgctgtcacgtttcatgctgccatgtttcatgccaccg

SEQ ID NO: 417645 - DNA, 122 bp, Homo sapiens
tgctgcgtgctatcattgcaattcctaagaaagatttagtgaaaattctctggctttccacggcaggccttgctcatattgtgagtgtgtttcttactctctggactcatgtcagcaagaaa

SEQ ID NO: 417646 - DNA, 122 bp, Homo sapiens
ggacaggcggccacaggcgagggggcccctgggtctggtggcggaagggctgtgaagtcccgctgctcctccctggcctctgctgtagatctttggatggtttccaccccgctcccacccca

SEQ ID NO: 417647 - DNA, 122 bp, Homo sapiens
ataacaaaagggaactagcttgcagactgcgcatctggaggccagaaggagtttaatagccgtgctcaggagggagaggggaggggctggacgccggctcataaactcttcgctgtggctcc

SEQ ID NO: 417648 - DNA, 122 bp, Homo sapiens
catccgaggctctccgcttcctcagggggacccgagttcttccacgcgactcgtaggccccgccatcctcgctgggctctccctgcaacccttgccgccatccttcgggctggccgatgtcc

SEQ ID NO: 417649 - DNA, 122 bp, Homo sapiens
ttatatttcacatgttgtacatgaatgggggtggatatgggacgtaaaagccaagggagacggggccacagcatctactcccattttggatagtaagagaccatttaataacatacagtagg

SEQ ID NO: 417650 - DNA, 122 bp, Homo sapiens
cggctgcggaggaccaaagcggcgcggaccccggcagggcaccgtcggaaacacgctccgcgggcgccgagcccgagacactgacagacccacggagaacgtttccaaacaggattatagct

SEQ ID NO: 417651 - DNA, 122 bp, Homo sapiens
gactgtagggggcaagggtggaaatggaaaccacacgggaggctactgtaacagtccgaacgaaagacagttgtggcttggactagggtataaagtttctttttaggatggtgagaatgttc

SEQ ID NO: 417652 - DNA, 122 bp, Homo sapiens
gtttcctgaatcccttgtcagggcccgggaggagtggtgggcctggacgcttccgggtggcgcttacacttgggcggactctcgctcaagcagggcctcgttgagcagctggttgagctcgt

SEQ ID NO: 417653 - DNA, 122 bp, Homo sapiens
cacagccactaaaaggaacgtgatcatgtcctttgcagggacatgggtggagctggaagccgttagcctcagcaaactcacacaggaacagaaaaccagcgagaccgcatggtctcacttat

SEQ ID NO: 417654 - DNA, 122 bp, Homo sapiens
cggaagagccagaagccgccttgcctttaacgaggggtatcctggcgagcatgcgcagaccgtccgcgcacgtcgtcgcccgctgagagcaagcgcaacgggcgttttcgtttgtgacgcca

SEQ ID NO: 417655 - DNA, 122 bp, Homo sapiens
aaaagtaacttaattgatgtaaggaagatttagtattccatcaatgtatgtgtcctaacccggttgataataaaatttcaagctggctaaacagaggcaagtgatggtctttcataacaatc

SEQ ID NO: 417656 - DNA, 122 bp, Homo sapiens
cgcctcctcaggtccgggcgggtccctggccggggtagcacggaagggtctcccaggcggcgtagtagggcttccgtgttactggaaacctacttccggctgcaaatgggaaaaggagcctc

SEQ ID NO: 417657 - DNA, 122 bp, Homo sapiens
cagtttcaagcatccactgggggtcttgcaacatacgccctgtggataaggagggactaccgtagatgtctttgtgcccacatgaggggagaagccattcttaagtcagaagttgcccatat

SEQ ID NO: 417658 - DNA, 122 bp, Homo sapiens
ctgcccgcctgtgttggtgtcaggccctcccatgtgctgggtccacgcatgtccaccctgcgcatgtgtgtgcactcctggggccttggccctcggcgcctcatgtgggaaaggccccccac

SEQ ID NO: 417659 - DNA, 122 bp, Homo sapiens
cacacagacaaacagaaagccagcccctgctcagataccagtaccaaatgccacaagcttcgggaatgaggaactgttgggaaatgaaacaaaagccaaagtctctgtggtttaaaccccac

SEQ ID NO: 417660 - DNA, 122 bp, Homo sapiens
gaagagaaggctggtgaactggaggtgagtgcacaccggctctggttctactgccaagctcgtgccaaagagctgctcctttttgaacaaactcccaggcctatgggtggtttctagctgcc

SEQ ID NO: 417661 - DNA, 122 bp, Homo sapiens
ggagagagtgccccctccaaccaagatttaaaacaaacgaaaccccagcagtgtgaggctcggggtaggaggagatgcctttgagaacaaaaccataaagtctgtacataaacaatgcatac

SEQ ID NO: 417662 - DNA, 122 bp, Homo sapiens
agtcgtcaatttggaaatgtatcaattaagcggcccccagagcctctcgcatctcttgcccggccccgagtcaccttcccccaggtgcctccatctcgctggaaacataggaagcccgactc

SEQ ID NO: 417663 - DNA, 122 bp, Homo sapiens
tgcccacagtggggcctgcacgcagtgacgcctacatgcagtgatgcctgtacgcagtgacgtctgcccacagtggggcctgcacgcagggcgtttgctcacggcaggtgcgtgcatggtgg

SEQ ID NO: 417664 - DNA, 122 bp, Homo sapiens
gttctaggaattcaccactttcttgcctttgtttgggtatcttttgtttggagccagagccggctccaaggaggagctgccggagggtgctaggctttttgcagaggaagtgaggagcagag

SEQ ID NO: 417665 - DNA, 122 bp, Homo sapiens
tgctttttcataaacatgccgcattctgaggaatccgaaagactccagcgtaggacagaccgctgttccaagccactgggaaaggggaaactggtgactgagcggcgcccgtcagagccatt

SEQ ID NO: 417666 - DNA, 122 bp, Homo sapiens
agagataaactgcgtcccattcccataactgcctcagtggagatccaagagccaagctctcgtaggcgagtgaattcacttccagaagttcttccaattctgaattcagatgaacccaagac

SEQ ID NO: 417667 - DNA, 122 bp, Homo sapiens
ctctgtcatctgtttattgcatgagtacaaacatcctgcataccattagtgtttactgaacgaacctgcaaactagtcacttaagtcagcctgtcacgtagcagtggggtcaactggtaagc

SEQ ID NO: 417668 - DNA, 122 bp, Homo sapiens
tatggaggaggggctggaaggagacctggtggctggagtgaggagattccacagggccaccgcctaggccttctttgtaacagcagtggggatttttggaaagttttggggagagggcaggg

SEQ ID NO: 417669 - DNA, 122 bp, Homo sapiens
ggatgtatgcatggaggtcgtatctatccagtcttgggaacgtactgggacaactgtaaccgttggtgagtgtttggagcttagaggggtcttgctttgtgagcctgtggctgacagacttg

SEQ ID NO: 417670 - DNA, 122 bp, Homo sapiens
ccgcagggccacagctctcgcgagactcctgagccctctccctcccctggctgcggcccccgggctccgggaagctcagccacctgggcccacgccatatctgggtttttttcccaggactt

SEQ ID NO: 417671 - DNA, 122 bp, Homo sapiens
ggcgcccaccccggcgcccgcctcctcctcctcctgctgcggctccggcaggggctgctgcggcgactcaggctgctgcggctccagctccaccagttgctgctgcttcccaaggagacgcc

SEQ ID NO: 417672 - DNA, 122 bp, Homo sapiens
tcccacctgtgccactgatggtttcagttcacgccacacacaatggcgcactcagcactacgtatggcgccaggaaagcagcaagcaactaggatggggtaaagaaagacatttctctctta

SEQ ID NO: 417673 - DNA, 122 bp, Homo sapiens
ccgggcggtagggcagcagccctgcggcggctcgggaagaacaacttgtgcgaactgggccgcgcttcccccgggcgctgcatccgccttccgagatgctggcagcccgggacggcctagcg

SEQ ID NO: 417674 - DNA, 122 bp, Homo sapiens
tacggttcccaacattctaccaccaagggctaggagagtcatctccctcccggaaacacacgtcaatgggcttggacgcaatttcaaggctgcatgccaacgtgatcacgtggcattttgat

SEQ ID NO: 417675 - DNA, 122 bp, Homo sapiens
aacagaattgcagctatagcatcccagctaggtgtttttcacatctctttttcttcccttcgtcttcttcttttacttccctttcttcttcccctccctcccttttttccttttttccctcc

SEQ ID NO: 417676 - DNA, 122 bp, Homo sapiens
cagtgagactccgtgggcgtaggaccctcccagccaggtgccggatataatctcgtggtgcgccggtttttaagcccgtcggaaaagcgcagtattcaggtgggagtgacccgattttccag

SEQ ID NO: 417677 - DNA, 122 bp, Homo sapiens
ctcatctccatggcccagactttgctttcctcgcagtggctcaagcggctgccaacccagcggagccgcgaaggcccaccagaaatttcctgtcacctggccccaccccagcgaccgctcac

SEQ ID NO: 417678 - DNA, 122 bp, Homo sapiens
gacccccggaaagaatctggaatttccagaattaatgtgttgtccctaaattgggctccacgaggtgcccttcgctgtgttccccaggccaagcagggcagcccctcaaaaggggacgcggg

SEQ ID NO: 417679 - DNA, 122 bp, Homo sapiens
gcgcgattgaataaggggatgcggtgcaaagggtctaggtctgcgtgtggcttctgcctgcgaggagaggcagcctgcatgtgtccgcattttcggtccacgcctgtggcacgacacgaagc

SEQ ID NO: 417680 - DNA, 122 bp, Homo sapiens
ggagtttgtttgcacagatccagaaaagtcttctgtcaacaacctcttctcacagagaatcgtacatctaatgtgtggctaaaaggcatttggatatgtcaagtccaagcaaaccgtaacta

SEQ ID NO: 417681 - DNA, 122 bp, Homo sapiens
tgagatctgatggttttaaatatgggagttttcctgcacaagctctctatctttgcctgtcgccatccatgtaagatgtgacatgctcctccttgccttctaacatgattgtgaggcttccc

SEQ ID NO: 417682 - DNA, 122 bp, Homo sapiens
ggagcaaggctggcgaggaagcagtccgggatgctctaagtcagctacacagggcgcccacgccacagccccaacgctgggcctccagggatggggcagcgctgcagggctaagcctttgtt

SEQ ID NO: 417683 - DNA, 122 bp, Homo sapiens
gcggcggccgcggcggcagcgaaggggaccgcactgggcatgcgttgccagcccgggccccgcccccaccctcagtcctcgtgtgctggccccgcccccacagcctggccctccagttgtgg

SEQ ID NO: 417684 - DNA, 122 bp, Homo sapiens
ggtgccgcccggctcgtccccacctgcggcgctccccacggctccgcctcccgccccgcgcgccgccgtttcctgctccgcccccgcctcccgggggactgcggccaccttccctacctgct

SEQ ID NO: 417685 - DNA, 122 bp, Homo sapiens
cccggcgggaggcagccgggtccgaggccacgccgaccagccccaccagcgccagcagcgcgaagccatggctgggaacagcaacctgcaagtggatctgttcctagctactgctccgcagg

SEQ ID NO: 417686 - DNA, 122 bp, Homo sapiens
cccaggtctgattgtgatctggaaacctccatgcatttttctctttttgagttgggtcggcgagctgataagagtgagtgctgtgttgttgtggaagtgagaaagtcatgttttgtggccat

SEQ ID NO: 417687 - DNA, 122 bp, Homo sapiens
ggaaaggaggggacaggagggagtccgggaagggaagggtagacttggaggcagagctcccgatggccttgaaccagctgactccggtccctggcagcctaggtggagttagggaggcccaa

SEQ ID NO: 417688 - DNA, 122 bp, Homo sapiens
gatctcagccatatcgggtttgtcagacatggttgtggaggaaaagcggagcgaggcgtgcgagaacgagagaagtctggtctgcgcagtggccaccactgagttgtcgcttttgatttttt

SEQ ID NO: 417689 - DNA, 122 bp, Homo sapiens
ggcagtttactgtcctggtctgaggatcttctggggactggtctctcttgctgactctttcgtgtcattttcacaaacaaccttttgaggaaaaaaagtcttaaggacaaacacatgctggc

SEQ ID NO: 417690 - DNA, 122 bp, Homo sapiens
acacggggcgtaaagcgcggcggggagtccggggggctcccgcctggagggctgtgtgagcggcgggccgcggggcggcgcggggggcgctctccactctgcggaagctgccccctctgccc

SEQ ID NO: 417691 - DNA, 122 bp, Homo sapiens
gaaacttatttctcacagttctagagactgagaagtcagaaatcaaggcaccagcagattcgttgactggtgaaggcccatttcctggttcatagatggcaccttctcattatgtcttcact

SEQ ID NO: 417692 - DNA, 122 bp, Homo sapiens
tggctttgggctgtaaaatataggcaatacatagctatgttgctaataacatacactcttcgttagtacaatgactatgttcttgataagcatggagtgagctaataagggagacggaagga

SEQ ID NO: 417693 - DNA, 122 bp, Homo sapiens
cactcagtccacgttaactcacttcctgcccacggcaggggctctctgtcagtgtgtctccgactgcggaccccgatcatctttgtgagaatgcaggttcccaggcccacaccgtgctggtt

SEQ ID NO: 417694 - DNA, 122 bp, Homo sapiens
ctaaaaccaatccaagtctcagttccacccacaggagaagcacagacactgacactgaatcgagctgcaacacggatgaacctgggaaaatgactcatgccacaacatggatgaacctgctg

SEQ ID NO: 417695 - DNA, 122 bp, Homo sapiens
aggcaggaaacaaacaaattaatcagagaaagagagtcaatgatttttggaaagtgtatccgttggacaagtttaaacagaaactctccctggatgatcagactgacatttcagaaaggagt

SEQ ID NO: 417696 - DNA, 122 bp, Homo sapiens
cagtaaacagagttatctcttacccacatctggacagctgtgagtctggcccaccccacccgcctggccagcccccaaggcctctcggggccctcctggtccccatggttctcctgactctt

SEQ ID NO: 417697 - DNA, 122 bp, Homo sapiens
tttctctatacctataaacttttccaggggattgaattatttttgaccacttttgacctacgaatgtgacaatttcaacaactcagtgtatagctgtgacactttcaggctaaaaggttctg

SEQ ID NO: 417698 - DNA, 122 bp, Homo sapiens
ccgggagcccaggtaaagacgagagctgcgcatgcgcggcgctctccgtgagtcggggggcgtggttgccgaaaggaagccaaagtgaagagtgcagggggttgtagcaggcgctgctgtgg

SEQ ID NO: 417699 - DNA, 122 bp, Homo sapiens
ggcgcgcggggtggcgacagtggcgcgggcgcagtgagcgcgtccgagaacagaatgggacgaaacggggcgcttagaggcccgggaatctgtgggtcttttaggcggagaggggcgaagga

SEQ ID NO: 417700 - DNA, 122 bp, Homo sapiens
gcaaattcccaggaaccggagctcacccctgcttcctccctctctgagcagctctgacagcgagacgatgctgtgtccctggcccttggaagttcagaatcacccactctcagagcccacct

SEQ ID NO: 417701 - DNA, 122 bp, Homo sapiens
tgaagcggaggaggacattagtgtagaaacgcacagccttggacaggctcgcctgtgaaacggaggaggacttcagcgtagaaatgcacagccttggacaggctcgcctgtgaaacggagga

SEQ ID NO: 417702 - DNA, 122 bp, Homo sapiens
gctaggtggcgagtgctccaaagagtgtggtgcacgccttccgcttgaccgctctccagacgccacagggaggcacctcgcagctgaccacagatttctctctgtggagcagtgtcttcaga

SEQ ID NO: 417703 - DNA, 122 bp, Homo sapiens
ggagccccagagaaaatacaggatttcaatgatgaaaaggagaagctgttggaaagggaacgtaagaaagcactacttcaagccctggaggagaaatggaaggcaaggcagagatcttctgg

SEQ ID NO: 417704 - DNA, 122 bp, Homo sapiens
cctgaggggtgctagcccacggtgaccccctgtctagactctggatctctatttttaggtcgaagtgctttattcttgactcccgaattcccggaaactattaccaaagcagcttagttttc

SEQ ID NO: 417705 - DNA, 122 bp, Homo sapiens
tcgctcctaatgcaatctttgctctttattttgggaggttgcatttttttctctcgcgatcgcttctcttccccccccttcccttccctccccaccccccaccccatccttgctagtttgta

SEQ ID NO: 417706 - DNA, 122 bp, Homo sapiens
agcggcggcttcggaaaaaacccggggctgggtcaggatgggaaaggcagcgaactgaaccgttttgagccccaagttcggggccgaatgtcttccctgtgcgcagaagcaagggcgggggc

SEQ ID NO: 417707 - DNA, 122 bp, Homo sapiens
ttctaggccaacccaggccaggaactggattccaccccaaagggtcactgtgcacgagggcgtccggggagccgctgacctgcagggtcctcgccagccttcctggctccactgcgccgcac

SEQ ID NO: 417708 - DNA, 122 bp, Homo sapiens
acccacccctgagagcagagggcagctccgtcctcacctggaacatctggatcatgtcctcgcagttgcgctgctgagccacatcgcagagcttggcggtgatgtcgatgcggcggcagatg

SEQ ID NO: 417709 - DNA, 122 bp, Homo sapiens
aacccctgtctgagaagacgcatgtacccacgggggtgcagagatgaacctctgggaaggcgcatgtacccacagggtgcagagatgaacccctgtctgagaaggtgcatgtacccacgggg

SEQ ID NO: 417710 - DNA, 122 bp, Homo sapiens
tgcaggaggcatggaaatgcaggggcatgaaactgtgggcacgtgcagcagagggatcaccgcagacaaaggaaattctgtgtggaaatgcaggggccgtgaagctgcgggcgcatgcagca

SEQ ID NO: 417711 - DNA, 122 bp, Homo sapiens
ctgtttggatctgctttggctcatggatgtgtagctcttatcactaggcttgtttctgatcggtctaaagttccatctctagaactgatttttatccgttctgtttttcaggtcttatctgt

SEQ ID NO: 417712 - DNA, 122 bp, Homo sapiens
gaacagtgagtcaccctcctttcctggagcgccttccctcggggcgcccgccttgcattccgccgctaattccagctaattggggtgcactcttcagctgacttctgttgcgtaggtttcca

SEQ ID NO: 417713 - DNA, 122 bp, Homo sapiens
cgagagcatgcgctgagggggacgtggagcgaggagtggggctccaggctgctgaggctccggaccaagtgccccctgcactttcaacgccgtaggtctcccggcagccctggaaggacagt

SEQ ID NO: 417714 - DNA, 122 bp, Homo sapiens
tcacagtggggaaggacaggcctgcttccttttatctgaaatccagtgacagttttgctgcgagtccaatcagcccccagtagctccctccggcaggagagaaaggacaccgtgagttttcc

SEQ ID NO: 417715 - DNA, 122 bp, Homo sapiens
aggggcccctggcccagcagccgcagctcccaaccacaatatcctttggggtttggcctacggagctggggcggatgacccccaaatagccctggcagattccccctagacccgcccgcacc

SEQ ID NO: 417716 - DNA, 122 bp, Homo sapiens
gggcggggggcggcgggcgacggggcgggcgcaggatgagggcggccattgctggggctccgcttcggggaggaggacgctgaggaggcgccgagccgcgcagcgctgcgggggaggcgccc

SEQ ID NO: 417717 - DNA, 122 bp, Homo sapiens
agaccctgggtgaggctcctgctcttcggctgcagagagctgcctcctggcctctgaagccgatccacctgggccaccctgaggtcacaactccagaagacaggaggcaggaagaggaagtc

SEQ ID NO: 417718 - DNA, 122 bp, Homo sapiens
gatgtggcctgtgggtttcttttaggcatgtctgactcagggaatgaccttatatagctacggcatgctgctcccatgtggggtagaccagttccatggcactgaatatgtgtgctgccctc

SEQ ID NO: 417719 - DNA, 122 bp, Homo sapiens
acagtctctgatgagaatagggaaaatgtgtttagaaatgattttgacagcccctgacctcgatgacaaatcctcagctctgacagcagccccaccttgagagcagaaacagaagagttctg

SEQ ID NO: 417720 - DNA, 122 bp, Homo sapiens
tggcctgcctctgcggccccgggggatgagctgtgggtccatccccacagcaggtcctgacgtctgacttcctccctgctcagtcggcatccaggaaaccacacccaggggagagggtgcca

SEQ ID NO: 417721 - DNA, 122 bp, Homo sapiens
ctcagtgagcccagaagaagatggcgcccactgcccctccggtccggacaaacggacgtacggtttatctgcccatgcgctctgcaggcgcaacccaccaccaagcttgcgcacgcgcgctg

SEQ ID NO: 417722 - DNA, 122 bp, Homo sapiens
agaactcctgggcacaagctgtccgcccgcttctgcctcccaaagtgctgggattgcaggcgtgaaccaccgcccctggctacaggtgccttcttgtctcaatttgcctttgacctttctta

SEQ ID NO: 417723 - DNA, 122 bp, Homo sapiens
gccgtcgctggaatgggtgtgggccccgaggttgcaagggtaggcgcgggtgtgtgtcctcgctctctctgctcccagctcagctctggccgcgcgccgcaggttgaacccactccttgctg

SEQ ID NO: 417724 - DNA, 122 bp, Homo sapiens
ccaaaccgttgagaagggtgaggcgcgcgacaaacccaaaccgtcgagaagggtgaggcgcgcgacaaacccaaaccacggagaagggtgaggcgcgcgacaaacccaaaccgccgagaagg

SEQ ID NO: 417725 - DNA, 122 bp, Homo sapiens
tatgtggattgtgccattacactaatgcaggaggcctggggatggggattctgaactcaacgactaggtcaagcttgtccaacccacggtccaagacggctttaatacaacccaacacaact

SEQ ID NO: 417726 - DNA, 122 bp, Homo sapiens
ccacggacacccagccccagtgcagcgggttctcgccggcgggacctgcagccgcccactcgggccaccgccaccgcctcctgcagttgcggagcgctcagcccctccgagacgcccgctgc

SEQ ID NO: 417727 - DNA, 122 bp, Homo sapiens
agctccactctaagtgacaagtgtccgtcttccaggccctcgtacgaaatgacacgtactcggaccaacactgtcgtgttcgtgaagacgtcatcacactccgctcctcagatatgcccaac

SEQ ID NO: 417728 - DNA, 122 bp, Homo sapiens
agggagccagcgccccagttccagccgagtaggtcggcgtacggtccatcatcagcagctcgtctccacggcccaaccacaccaccgcggggagcagccttctcccgggacctcgcctctaa

SEQ ID NO: 417729 - DNA, 122 bp, Homo sapiens
ccagggcccctcagattcccctgttaattaaatcaattcattatgctcagatctgattagcggcccttcccccccctttgaatcaattattcaatacacaaacataattgcttgggccagag

SEQ ID NO: 417730 - DNA, 122 bp, Homo sapiens
gggagacagcgggctacgtgctctgaaaagagccagccaggggccccggctacccttctccggctcgctattcctctgaagtcctgtggacttggagtctgaaaattcctcgagtggtagag

SEQ ID NO: 417731 - DNA, 122 bp, Homo sapiens
aaccccaattctggaaattctgatttgatcaagtgcccaaaagtggttctgatgggtgtgcgtccttgaccgcattatgtaaagacaatgtcactctaggagaaatgtagtcgtgaccaagt

SEQ ID NO: 417732 - DNA, 122 bp, Homo sapiens
cactgaaggagcacagtttctctctctaggaagaagaggattagcagacataattgtgtgcgtcaagagaaatttgtaatcaaaaaatgaaagtaagacgaatggcccagaaacccgcattt

SEQ ID NO: 417733 - DNA, 122 bp, Homo sapiens
gaggcatgggtgaaatttcacctggttctatcaagctgttatctctccaggccaacaccacggtaacagagcgtagacactagactaccaacttccttccttctgcactgtcagtggcctcc

SEQ ID NO: 417734 - DNA, 122 bp, Homo sapiens
ttctgcacggcaaggccttttggggaagttggtccggttctcccaagacgaggaatgaggcgagcctggctcacgactctgtctctcttggtgccccagatatgcgggcggagatggagcaa

SEQ ID NO: 417735 - DNA, 122 bp, Homo sapiens
cgttcacacaggggcaaggcagtgaaggacctcacctgtgcacctgggggaaggctgccacgtttactctttccttttactctcacgatgccctgtcctgctcaaataccctcggtggcttc

SEQ ID NO: 417736 - DNA, 122 bp, Homo sapiens
acccaacgctttgtgaggactctggcctgaggcagcgcctttatacgacagttggcggaccgaactgagaacctgaaagaagtcggcgggaagtcccgccccggtgggggaggggaaatcta

SEQ ID NO: 417737 - DNA, 122 bp, Homo sapiens
tgttcacctctctcgccagcgggaccctgcacagagagaacactacagtcacggggaggccgaggagacgaggggctgagggtgtctccccttttctgctccccagatctccccatcaggga

SEQ ID NO: 417738 - DNA, 122 bp, Homo sapiens
ggaaatcttaggaggagttctttgctgtctcagaagaaatgccagttcttcttccggaatcgatggggaatggaatgggggtaagagagacacgtcaggtttcaatggcctgtgtatggatg

SEQ ID NO: 417739 - DNA, 122 bp, Homo sapiens
gaccagtgggtccaatcctgcccctgagtgtttgtgaagattctttaatctatgtgaacacgaagcaaatctgtgcagtgaatacataaaagtacaatcatcatcacgtggaatccggaagc

SEQ ID NO: 417740 - DNA, 122 bp, Homo sapiens
cccagagctggcaaggggagtccccacctcggagcctcactgtgagtgtgagccccaggccgcagacccttcctgtccacagcgcttttcatttcaccacttactgaggtaggagtctctgt

SEQ ID NO: 417741 - DNA, 122 bp, Homo sapiens
tatacgtacaatgcataggccaaaggcgaccctatgacccagagattagaaagactcggacgtcttttgactgggttcaggtcacactactcccaaaatacgacacctcggcatttgagaaa

SEQ ID NO: 417742 - DNA, 122 bp, Homo sapiens
accccgaagctcctacacgctcggtcggggcccagtggcaccccgaagctcctacacgctcggtcggggcccagtggcaccccgaagctcctacacactaggtgtccctagtgtccccgctg

SEQ ID NO: 417743 - DNA, 122 bp, Homo sapiens
gggagaaagtgaagctgggagttgccactcccagacttgttggaatgcagttggagggggcgagctgggagcgcgcttgctcccaatcacaggagaaggaggaggtggaggaggagggctgc

SEQ ID NO: 417744 - DNA, 122 bp, Homo sapiens
ctccacgatcgacagctccaatagccaattgcaattactatgcttgatgacactaagttgcgaacctctgatcattcctattggcccctgggtgagaggcgggaggcatggggggactgaag

SEQ ID NO: 417745 - DNA, 122 bp, Homo sapiens
agaggtgggcggcaggcgagcctcctgcaggagcaggcggtcccctgaagaaactcctttcggagttggctcctccccgacttttcagggagggatgtggagcagactctgtgccacctgcc

SEQ ID NO: 417746 - DNA, 122 bp, Homo sapiens
ttaatatgaccccttagaatgagatctattttgctcgcaaagtgggatcaaaccagaatccgtttcttccacattttcttgacatgctttgcatttcatttagcaatttctttgagtttctc

SEQ ID NO: 417747 - DNA, 122 bp, Homo sapiens
ccctcctctacctcctctacctggctgagtgctggcactgtcacgtgcggtcctgccaggcgccacgcaccgacgcccacacggtgctggcgctgatccgccggctgcagcaggcgccgccg

SEQ ID NO: 417748 - DNA, 122 bp, Homo sapiens
acctggaggcagctgtttggtgcttaaaaatcaggctgtgtttaatcactgaggggaaaacgtatcaattgcagtctgatcacagtattgtctaaacagccccgggaattggtaaatgacat

SEQ ID NO: 417749 - DNA, 122 bp, Homo sapiens
gcgacgccggaaggacccaagaggaaccaggcgttgtccggaatcctgcccagccggagtcgtgcagaggcttatggggactcgtagtcccgctcgccggcgttgtccgcaattcctgcaat

SEQ ID NO: 417750 - DNA, 122 bp, Homo sapiens
tccctgttggcaaagtgactccagttcaaacagaagaggatggattctcggctaaattcccggatgcacattggggcataagcactgacaagtgaagtagtgcctctcagctaaaaactaca

SEQ ID NO: 417751 - DNA, 122 bp, Homo sapiens
gggtgggagattcctgctgttaaaaacaaacaaagggcttagacaccggctagtcggctgcgggaggcagcaagagaaaggccgaggggcctggagtagctcctgaaaaccgccgagggccc

SEQ ID NO: 417752 - DNA, 122 bp, Homo sapiens
gatgtgataatggaggaagaagtaggagtgattgaggaaaaggtccaggagccaaggaatcggggcagcatctagaagctggaaaaggcaaggaaacgaattccccctggagcctccggaag

SEQ ID NO: 417753 - DNA, 122 bp, Homo sapiens
acatggaactgcttcgaatcagcttcactgcggggctggctccttcgtagaaggggctctcggccgccgtctttctctgtgggctggagttaaagatggagtggatctttctgaacatagtg

SEQ ID NO: 417754 - DNA, 122 bp, Homo sapiens
cgccactagaagggttgcgcatgcgcgccagcctcctgcgcagccgcagaaaccactcagcgcgcgagtctctgaaaggcctaacgtccattttcaatcctgcgggtcttgcgaaggaaaac

SEQ ID NO: 417755 - DNA, 122 bp, Homo sapiens
acgtgtgtggggaagaacttggagtgccacccccagaatgtggcgtccacctcaccagaccgcacgggtgagccctggactgcaaggtgcatataacacaaggtttggacacacctggagag

SEQ ID NO: 417756 - DNA, 122 bp, Homo sapiens
aagttgccctgggtcatgcacctaggaagcggcacaatcaggagttggggtgattttaatcggtcatcctccggcctaattcccctctaggctgttcttttggggtacattctgcacctttg

SEQ ID NO: 417757 - DNA, 122 bp, Homo sapiens
ctggtgactaagaattagacacctaatgtcaaggtaaataattaagtcccaatccacagacgttatggaaaaccaaaccactttaacaaactcccaatgtcacacgaaaaccaacacaagtc

SEQ ID NO: 417758 - DNA, 122 bp, Homo sapiens
acctcatgatccgcccgccttggcctcccaaagtgctgagattacatgcgtgagtcactgcgcccagccaaggtgtggtattttttattttgccaccaatgctgccagcattaccaagacca

SEQ ID NO: 417759 - DNA, 122 bp, Homo sapiens
gaaattaatgcttaaggtttaactctttaatactgctgagatcctgtcaatttggcttatcgttcttttatgaggatcgattatattcgtcctctatctaatattaatttttcctagagcct

SEQ ID NO: 417760 - DNA, 122 bp, Homo sapiens
gaccgctttccagaactccgaaccctgtcgcgggtccgcgtcgccctcccccgggcagcgcgtcaaatcggcgcatgcgcactcactggattgccgcgtagctctttctccccccacccacc

SEQ ID NO: 417761 - DNA, 122 bp, Homo sapiens
cagcccagctctcgatacgtttggtctttcatgctgaaaaataaataataaagcctgtcccgtgtctactgcctcccccaactgcacagacgccagcctctaggcctgactgccagggaggt

SEQ ID NO: 417762 - DNA, 122 bp, Homo sapiens
ccagagggcccagtcggcttccggcggccgcgggcgactcctggtacccccgaggccccgcgaactcaccttcacaaagctgtcggcgtccgggaagcctggcagcaccatctctccgtcgg

SEQ ID NO: 417763 - DNA, 122 bp, Homo sapiens
aggtgcccaggtgccgggaggagtgcccggtgggccgctttgggcaggactgtgctgagacgtgcgactgcgccccggacgcccgttgcttcccggccaacggcgcatgtctgtgcgaacac

SEQ ID NO: 417764 - DNA, 122 bp, Homo sapiens
tggggctggagtcagagctggatctgttaaccgtttttctaatttcaaagtacagtgtaccggaggccaggcctgatggcttacacctgtaatcccagcattttgggaggccaaggagggca

SEQ ID NO: 417765 - DNA, 122 bp, Homo sapiens
agtagagctggctcggcagttgacagtttaaatcctggcttgcctcggtgctgctggcttcggtccgcagctccctctagccagcccacacccagctggggagccactcagggctggacagg

SEQ ID NO: 417766 - DNA, 122 bp, Homo sapiens
tagttccccagggtcgtcgtgggcggggccgcagcgaaggcgggggcgggaatgctcgggcgcgagtcgtttgctacaacttacctacagcaatgacggcttttgtaaattacacaccattc

SEQ ID NO: 417767 - DNA, 122 bp, Homo sapiens
cctgcttttgagcaaggagcctgagtactcacattccccaggttgaagtcactcattggccggtggtaagactgttgcccatgcccactgggcccaggtgggtacggtgtcccataatgaga

SEQ ID NO: 417768 - DNA, 122 bp, Homo sapiens
aacctaagttgttgcccaccctctccttcaatctccagagggtttaggtgtcggctgcgacgcgttgaccaccctcagggacttcacgctccagacagaatccgtgtaaactgtttttgcgg

SEQ ID NO: 417769 - DNA, 122 bp, Homo sapiens
agcaggctgcctggcatattttaagggtttcataaatgatgctcattattattaagcacgcgtgtcacagcagccagagcactgagcagcgctccttggcagctgcagctccccaaggggag

SEQ ID NO: 417770 - DNA, 122 bp, Homo sapiens
ttggaacggtttctaagtctttgtggatactcttttctgttatcctccaggcggtagttacgcagaggcattggtggttcagtggtagaattctcgcctcccacgcgggagacccgggttca

SEQ ID NO: 417771 - DNA, 122 bp, Homo sapiens
gtggggcggtgcaggtggtcgccttgggaagggagcgcgcaggggggtaaggtggggcggcgggaagtgctagaagtcaccccagccaaactgaaggagcccagtttccagctgagagggac

SEQ ID NO: 417772 - DNA, 122 bp, Homo sapiens
ctcgtgggacctggcgtctggttgccggggcccgggcgtgggagtggggtgggggcagcccggttggcactgaccgtctatgatcagcgaagccctctgggtgggtttcttcccagacttga

SEQ ID NO: 417773 - DNA, 122 bp, Homo sapiens
agataggtaaagaaaacaaagtctgccaaacctgccgcactcccccaagggccaggaggacgggcggggctttcgaaatttccattgcgtaacagcgggccgccgggcgcgagcagcacagc

SEQ ID NO: 417774 - DNA, 122 bp, Homo sapiens
tattgggtctgcaactcatccgatgcaagtatttcatacacctactgtggtaagtaaaaccgcaaaacaaataattgtagcatcaactattttgagggtaagttttcacgagaaccgtacac

SEQ ID NO: 417775 - DNA, 122 bp, Homo sapiens
ccggccactgctgtgccctctggggtagctgtgctccccacacttctgggttgggctccccgtggggctcacctattgggagtggtgggcacctggcatggcattctgcccaatggcttcct

SEQ ID NO: 417776 - DNA, 122 bp, Homo sapiens
ggggcaggacctgcctagcccggcagcggcggctccatggcccgggctccgccagtgccgcggccagtgtagccgccccagtcgcccactgctcggccgcccccgctcctccgagcctctcc

SEQ ID NO: 417777 - DNA, 122 bp, Homo sapiens
ctatgtaaggagaaggagcctttatgcaatccaggaagcccgcgtcaggcccaggaggtgcgccagctctctaggatgctggccaaggtcccccgcacttggccggatccaggcagggagtg

SEQ ID NO: 417778 - DNA, 122 bp, Homo sapiens
ttagcagccgggccagcggctgcggagggtgtactgggtcccccagcagtgccagcccaccggcgctgcgctccatttctcaccgggccttagctgccttcccgcagggcagggctcgggac

SEQ ID NO: 417779 - DNA, 122 bp, Homo sapiens
ctgatgggttttggctggtcggccatggtcagtccgtctgtcactccgtctgtcagttctcgggccgtcctggcttctcagccccagctgcagtgccggcgccgccgacctttcacccactt

SEQ ID NO: 417780 - DNA, 122 bp, Homo sapiens
tcagaagaatggtgtttcctcgcagcgcctctctcaggagcgatcgggaattggcgcatgcgcactacggtggtggtggcgacgaaggcgggggttgcacgttgcctgcctcgagctctagg

SEQ ID NO: 417781 - DNA, 122 bp, Homo sapiens
gtgagttttcagaattttatgaggttgatacaataagcatcagaatcaccatcttctgtacgactgtgagtgactgataaatgtcttgagagtatacagatccctctggtttgccctgaata

SEQ ID NO: 417782 - DNA, 122 bp, Homo sapiens
aggaatcgccggggcggggctgggtgcgggggcgcggcggagagcggatcgcccggggtgcgtgcgggcgggcggggaagcctgcggacgcgcccgggcgcccccgcgctccgggtgaatcg

SEQ ID NO: 417783 - DNA, 122 bp, Homo sapiens
cagttccagaacccctacgcccactccctgacatctgcccttcattacttggttcccgtgcgaccacgacgacagattgtctatcctctggaaaagcttggcataaacgctccatcaaaggc

SEQ ID NO: 417784 - DNA, 122 bp, Homo sapiens
taacagtcccaatttaaggagcattaagataaaaggtggaattgccaaggtcaatccagacgagaaccttctcatagaggtaaccaccgtgtgggtttggatgctgggaagcagggggacta

SEQ ID NO: 417785 - DNA, 122 bp, Homo sapiens
ctgtgctgcactgggcgtgcccgccaggaccttgaggcaagggtggactggctggtcctccgggcggttggctgcagagccagcggcctgggcctttgttccccatcgtccccgacagggct

SEQ ID NO: 417786 - DNA, 122 bp, Homo sapiens
ctccctgttaacttccaggggaagcacaatgactagggaccaaaagcaggctgccatacccgcctggccaagttatccagagagcacagaattataatatgcccagccctggtgactgcaga

SEQ ID NO: 417787 - DNA, 122 bp, Homo sapiens
ttggcttgggaaggggctaggtgagccgtaccaggatgaggtaccgggagcggtactgcacggtgccaaagatgcccaggatgactgccatgatgtgcaggaagttggctaggatgggagcc

SEQ ID NO: 417788 - DNA, 122 bp, Homo sapiens
aataccttaaatccaccaccagtttctccaaaccccgacacttctgcgagactcccgcagcggggcagaagggtctgccttgcagcatgcttaaccatcttgagcccctagaccctcatctt

SEQ ID NO: 417789 - DNA, 122 bp, Homo sapiens
ggccgtgttgcaccagctccacatccggcaatgccttgctcacctccacgccgtgcccctcgaagtccatggcctcaaatagcacgacggccgggtccccgaagtcctgggtccccagggac

SEQ ID NO: 417790 - DNA, 122 bp, Homo sapiens
ccgggccagccaggtgggcaggagctgagggccagcggggcgacggggaatctgtgtacccgagtgagtgtctaactcttatgtgtgtctccctgtgtctgtctgcctgagtctctctgcaa

SEQ ID NO: 417791 - DNA, 122 bp, Homo sapiens
aaccgtgggggcccttgttgaagaagatgaggtaattagccaattcagactgtttgagcacgtattgtttggaaacttttctaattacagtcactataacagatctgctaaaggtagtttca

SEQ ID NO: 417792 - DNA, 122 bp, Homo sapiens
ctcccgggttcaagcgtttctcctgcctcagccttcccattaggggggattacaggtgctcgccaccaggcccggctatttttttttttttttttttgtatttttagtagagacggggtttc

SEQ ID NO: 417793 - DNA, 122 bp, Homo sapiens
ccctacagcactgcttccctacagcagtgcatgctgcacactgcaaaactccaagggagacgcctgcaacactgtctatgtcaggggccagcaaactttccataaagggccagagagtcaat

SEQ ID NO: 417794 - DNA, 122 bp, Homo sapiens
agtggaacgagtggcggtgcctctggtgggtgatggactcttactccgacatgggtaactcggacagctttggacaggacgaggcgggccctggcaggagactgcggatgtccaggtgacag

SEQ ID NO: 417795 - DNA, 122 bp, Homo sapiens
caagtgtcagagccgggactggcctcccagggcatcgcctacagcttgtgctctgagagtcggggtcatcatagctgcgctcttcgatggacactaaatgcgggacatctgttttacactca

SEQ ID NO: 417796 - DNA, 122 bp, Homo sapiens
ctgggaggcggggcaaacccgggaaagacctcccaagcaggttctgcgaaggggccccaccgccttcagcccgcctgggtcagccttataagggggaaaggggacagaagtctgcagaacag

SEQ ID NO: 417797 - DNA, 122 bp, Homo sapiens
attccagttatgaaaagaagtacagccaagttgagactttccataaacataattggtatccgctgccagtttagaatttttagggtttaagtgtaaattgtgattatatgaagtaataaaga

SEQ ID NO: 417798 - DNA, 122 bp, Homo sapiens
tgagatggagagaggtgaagtaatactgctagtaagtggcagaaccccaagatcaagacccggtttggctattcccaaacctggaatctgccccttcagccatattgctaccttgtgagtac

SEQ ID NO: 417799 - DNA, 122 bp, Homo sapiens
cctgtgcctgctgctcaacctctgtgagatggcccacctgggcttgggcagcgcgcaggacgcggtgcgcggccgccgcggccccccggcctccgcccccgcccccgcgccgcggcccccgc

SEQ ID NO: 417800 - DNA, 122 bp, Homo sapiens
ggtgtggagggagaggcataggcaggaaccggggctgtgcgtggtgcttgtgggcctgcgcgagttccgggtaggcgtgggcttggtggaccccacacttggagcggccagccggccccacc

SEQ ID NO: 417801 - DNA, 122 bp, Homo sapiens
gggcggcatcggggcaggtggcaaccccttggacgcaggctcaggacgccagggtcagggcgtgagtgccggggccccctcaaagccgcggggtccaaagaggccgccggccccggccccgc

SEQ ID NO: 417802 - DNA, 122 bp, Homo sapiens
ttacaaacctttagctagacagaaaagttctctaagtcccgccggacccagaagcccagccggcttcgcttctcaatggcagtcgcagcgggactttgtggcacctagcccgggcactctgg

SEQ ID NO: 417803 - DNA, 122 bp, Homo sapiens
atatttgtatttggggaggagcttcagaaatgctgactgttgattggctgggctcagtctcgctttcttttctccttcccggcagggctagggaggggacccagtcccggtgcctgagctgc

SEQ ID NO: 417804 - DNA, 122 bp, Homo sapiens
cctccgagctggttgctaggtgatctccgaaggctgtccgaagtctcgcgagggcggacccgttgcctgatgacgagagttgggagtgtggctggggctgcggatctccagcagtggcgtta

SEQ ID NO: 417805 - DNA, 122 bp, Homo sapiens
ggccaggccttcctgctgagccgccccagtgacacaggcactgattggccactggagaagcgggagtgaatggcaacaaggccaagtgggaagcctgtgtctgcactgaccaccgtgcccca

SEQ ID NO: 417806 - DNA, 122 bp, Homo sapiens
ctgtgcttgaatgtgctgaatcctgattgttgtaggacatttcaacagctctttttggtacgttccccaaaaagccatgtcctagatccccaaggcgtgaaaaggaaaaatatcaagctgga

SEQ ID NO: 417807 - DNA, 122 bp, Homo sapiens
catccacctggaaacagtgtcagatcccacaggtcaaggactcagtccccaagactcccccgctgcaaaatctgatgataatcggaagccacaggttgtttcgcccatgcttctgactgacc

SEQ ID NO: 417808 - DNA, 122 bp, Homo sapiens
cttttagcaaactgagagcattggtcccctgattggttagcttggatctcatgtctattccggagttggagagtggactcctaccagaatcacataacagtagaggggggatggggtccccc

SEQ ID NO: 417809 - DNA, 122 bp, Homo sapiens
gactcagtcctcagcccccagcccccgacccccgacccccggcccccgacccccgacccccggcccccagcgcccggcgccccgcctccagcgctcagcagttaaccaggcaactcgcgcgc

SEQ ID NO: 417810 - DNA, 122 bp, Homo sapiens
ccgagaggggcgctaactattcttagtaacaaattactcacagccgcagcagctgctgggcgcccaccgcgcacagctgggccccacaaacgtgatggcagccacagccctttcaggtaggc

SEQ ID NO: 417811 - DNA, 122 bp, Homo sapiens
tattctgccttctatacttttatccaagacagtcttatctcctctaatggtttcaagtagcggtcatacaggtgatatttctatcggctaaacttctccatgctccagtctcgtttacctaa

SEQ ID NO: 417812 - DNA, 122 bp, Homo sapiens
ggttccaaagcgggtccgagccgccgccgcgcgcgcgccgcgcactgcagccccaggccccggccccccacccacgtctgcgttgctgccccgcctgggccaggccccaaaggcaaggacaa

SEQ ID NO: 417813 - DNA, 122 bp, Homo sapiens
ttttttttttttttttttttggtcctccaattgtcagcgctatttttaccgccggaaagccgccgccccctcccccatgccggctggacctactgtctagccgggctggtggctggggtctc

SEQ ID NO: 417814 - DNA, 122 bp, Homo sapiens
tgggtttgaacccggagacacatgcgcaaaacgggccgcgccgtccaataggaagcaagccgttagtgggctcgccccttcatgctccaggccaacggccctccagcctgcagacccacccg

SEQ ID NO: 417815 - DNA, 122 bp, Homo sapiens
tcacctcctccccagaggagcctcaccatccatccactcagtataactgatgagacaaaccgcaaggaaaaacttctgtagcccatatttatggtattaatgaatagttaaaaaagatttac

SEQ ID NO: 417816 - DNA, 122 bp, Homo sapiens
gagaaaaagctggatgcaaaatccaaagcacctctgggtttatgctcagaaaaactggaacgttcttggtcagagaaaagtgaagactccactgaaggaaccagactataaggcgtaaaaac

SEQ ID NO: 417817 - DNA, 122 bp, Homo sapiens
gaggccaaatgcacattcccatttgagaggcggttgctgctggctggctggataactgctcgttctgaaacccttgaagacattgcttggtctttctatttgctgtgggctggtggagaatg

SEQ ID NO: 417818 - DNA, 122 bp, Homo sapiens
atccggccactgacagacagtacatcaaacaagccatctataaaacagaactgaacttaccgatacatcatgtacaggaggaagaatatgatcttgcaggtctgcacccactgaactcaact

SEQ ID NO: 417819 - DNA, 122 bp, Homo sapiens
tattagcaacaagatcacagaagggaggcccacccggtgcgttatttggcgtaatggcatcgtctacccttggctgttaggaacaacatcacagggggcgtatatgttttctgtgatactgt

SEQ ID NO: 417820 - DNA, 122 bp, Homo sapiens
acaaaagagtacctatataagaagctccacgtagtgcaaatcgacatctggtaggctgctcgcccccaggcagcagctagagtctgtaattctctgcgtcatcctcttctttttcttcattt

SEQ ID NO: 417821 - DNA, 122 bp, Homo sapiens
tgagagacaccgacagaaacaagggagaggcgcacgactggagccggtctggcctgctcccgcggttagtcactcacatctgatactcgtctatcgcctccaccagctggccccaagagtcg

SEQ ID NO: 417822 - DNA, 122 bp, Homo sapiens
atggatagcgtccattccccggcttcggtgatctcagtgattacgagtgagtggggacttcgtgttcctgctagggcgcgggcctgtttcccgcgcgtcagggtagtgggcgtggcctgcgc

SEQ ID NO: 417823 - DNA, 122 bp, Homo sapiens
gggcctggtgagaggacgcttcgccgccaacaattagcaattcggcttctacacagcagccggagatcagctttgctgcatttggtccaggttggagcatctccgcagcagctgcaacagcc

SEQ ID NO: 417824 - DNA, 122 bp, Homo sapiens
tcaaccaccttctcctctaaatcattaccttctataatggaagttctgaacccccacccccgacatcaccgttctatgccatgcctcttccttgacttggtcacccttaaatctctgtcaaa

SEQ ID NO: 417825 - DNA, 122 bp, Homo sapiens
gctggaatgtaggtttcatttatatcaggaaaatcaggctgtggagtctagaaactcctacgtaggttttacctaggagtgtgactaatggaatagagaagtttaatagcaccagcacattt

SEQ ID NO: 417826 - DNA, 122 bp, Homo sapiens
tgagcctggccatctggatataagacctaaagggtgacagaaatgagaaaaaggcagaagcgagaggagcatttaacaaaatggatgatgacatctgttgtgaacctcaaaacacaagaaga

SEQ ID NO: 417827 - DNA, 122 bp, Homo sapiens
gactatctaaaagtcaattggtttaacgcctttctactctctgctaaaaggaccaaagttcgaaacaactaaacccccacaatgagttagacccagagggctaaataataacgtaagtcagt

SEQ ID NO: 417828 - DNA, 122 bp, Homo sapiens
gatcccttagtcttgtagtcgctactttataaccggtccctagaagggggcggttctttccggaaattatgactgcagctgttttcactccgctgtgactcagagcgctccgggctgcagga

SEQ ID NO: 417829 - DNA, 122 bp, Homo sapiens
gaggaactccacatcggcaaagtggttaaagacgtggttgatgcgcccgtgggtcctgggcgtcaggtgccgctgcaccagttcatgcaccaggtccttgcactcatgcaggagattggaga

SEQ ID NO: 417830 - DNA, 122 bp, Homo sapiens
tgtaactcccgttcttttggcctgggtgttcccggtggtgggattgggattgcccccttgcgcgggaggagaagggtggattggcaggaagccgccaagcgccaccagccggtctctcagaa

SEQ ID NO: 417831 - DNA, 122 bp, Homo sapiens
aaggtctggaaaggattgcaaaggaccaagtagagggttggtgactaacgggctgcctcccgagggtagaagttcttgcctttaacttcagccccagccccaaactccttagcagtctgcaa

SEQ ID NO: 417832 - DNA, 122 bp, Homo sapiens
aatgctgctgggcaccgttctgttttctttcttttcttaatcctatccaagtatgcagtacgctcttgggtcgtctcatgagacccaggggcatgttggaaagaactgagagaaagagcaac

SEQ ID NO: 417833 - DNA, 122 bp, Homo sapiens
aatgtctagtccctttgcacctcccagaagctgcagcagcacctgcggagcagacacagacgcagacgcagacgcgactttctctcaagtcaagaccacatcagacctgaaaattcagtcat

SEQ ID NO: 417834 - DNA, 122 bp, Homo sapiens
ttttagtagtaaatactgaaaatattttcgcaaattttgtttatattcaatgtgttatctcgttgggtttcatttcacaaatagataggtcttctgtggcctattcaactgtagagaagcaa

SEQ ID NO: 417835 - DNA, 122 bp, Homo sapiens
cctgagcatgtgcctgaagagacatgcaaggacgctcattggagcattgttttgtaaccgcgaaaaatttgaagcaaccaaaatgtccatcagcaggagaatgaagaaagaaatcatgatgg

SEQ ID NO: 417836 - DNA, 122 bp, Homo sapiens
gtcccgcaggtctcccgcgcccgcctcgctgtccccgcgagcgagcttgggctcgacccccgttccccctgaacgcacctgcaaacaaaggagagccgttccttcgccaacttcctcacctt

SEQ ID NO: 417837 - DNA, 122 bp, Homo sapiens
agagggagtgcagcctgcacatggggtgggtagttcttaaagggagcctgcctccagaggcgccgggggagggggggggcctgcatttagagtgtgtgcgtggagcatgtagcttgttcctg

SEQ ID NO: 417838 - DNA, 122 bp, Homo sapiens
tgtccctaccaaggtctgtgtgtgtctgtggcacgggcctgtccatggactgggcttgtccgtggagtgggtcggtccatggccttagcctgttggtggcgtgggccggtccacggcatggg

SEQ ID NO: 417839 - DNA, 122 bp, Homo sapiens
cacgtgaggaatcacacgggggagaagccctacgcgtgcacgcagtgcggcaaagccttccgctggaagtccaactttaatttgcacaagaagaaccacatggtggagaagacctacgaatg

SEQ ID NO: 417840 - DNA, 122 bp, Homo sapiens
gcacagagccgtgcgaagccccacactggcattcacctcaggctgatgacagtggcagtgcgcaggggcgctgcaggaggccggggaaggcgaggtcacaacaggcacaatagggagtcgtt

SEQ ID NO: 417841 - DNA, 122 bp, Homo sapiens
acgcgctggaggcagtacaaaaatctgacagtgagagccaacgttaacaaacaccgcttccggatctcagaaacctgggtccagagtcccacttttttgggaattggaggctttgggctcaa

SEQ ID NO: 417842 - DNA, 122 bp, Homo sapiens
ggcagaccaggtttaaagcatcgcatgttgcaatccggtgcgtgctgccccggcggccgccgctgaaccttgcagccagggtggctttctccagcagagagaacagaccctgctggatgagc

SEQ ID NO: 417843 - DNA, 122 bp, Homo sapiens
ccgggggaatggcagagatcgccccccaggtctgcccggcgctcagggaattggtggcagcgtctatttcagagtttatggtaagaggctggagccggcacacacagacaacacaccccacc

SEQ ID NO: 417844 - DNA, 122 bp, Homo sapiens
ccaaaagccgggcagaagagagcgccaaggactggcagttccggaacgggcaatcccagccgaggggaccagcggcagagcacgggtggggcttgggagagggcggggcccatagaggggcg

SEQ ID NO: 417845 - DNA, 122 bp, Homo sapiens
atgaaaagttagttctctatttataaatagaaaaatactctttttatggttaaggcttggcgatagttatttttactcaggaatttcaccaattctttgctggactgaggaagaaaattacc

SEQ ID NO: 417846 - DNA, 122 bp, Homo sapiens
tggacaccacttctggggcaggtctagggtgatggcgctcccagcccgcgggggtcttggcgttggcgcagaagtggtttcccagcggcgtgccctgagtgttgggaaaaggccctctgctg

SEQ ID NO: 417847 - DNA, 122 bp, Homo sapiens
gttttagcctcaattcagccacttacaggctgcgtagcctcaggcaagtcaccttaccaccgtttgcctccgtttacacaccagcaacatagcctgagaagacaccttcaagatggttgtga

SEQ ID NO: 417848 - DNA, 122 bp, Homo sapiens
gccgagagccactggttgagctcattcacattctgcagcgggtgggaggcgatcagggggcgggtgggaacagagggacgccccccgctccccatcgcggtggggtctcaccttgcactgga

SEQ ID NO: 417849 - DNA, 122 bp, Homo sapiens
ttattaatccctttctttgctgcagtacctgctgttctctttggagtatttatagggcagcgagcaagaagaacccgtcagcctgtgacaccaagatgtcaaaacatcagaattatagaaaa

SEQ ID NO: 417850 - DNA, 122 bp, Homo sapiens
tggacgagtatgtcttcaaacaaactgacagcatcagaaatgatgtatcagaaatgtattcgaactgatggatggatctagaaaaaggggagtccatgcaagataatcagtgcagattcctt

SEQ ID NO: 417851 - DNA, 122 bp, Homo sapiens
gcacgagggaggtggcagaggcacatcatccctttgggcacgcaactctaccacgtgcatcgctgggagatgggaggactggcatcccccgaacccacgggtccctgcctggagacactggg

SEQ ID NO: 417852 - DNA, 122 bp, Homo sapiens
cgcgccccctgcaggtgggcggtcctcacggtggctcgggctgctctgagtcagagactccgggaaagcctgctctgaattagggaaagcatcaaaactgtggcttcagaagagaaagacag

SEQ ID NO: 417853 - DNA, 122 bp, Homo sapiens
acggaagcacaaataaactgtctcattaaaaagcactttgccttggtccaaatataatttcgtttttatacaattcaaatgctatagaacaaagaaagagaaggaagagggatgataaatgc

SEQ ID NO: 417854 - DNA, 122 bp, Homo sapiens
gtgggtggaagaggcgaggagcactgtgatgggcgctgttcacactccggctccacccagcgccagctgcgacaaagccctttacccctcccaggccaggtgtttcttctgtgtgaaagagg

SEQ ID NO: 417855 - DNA, 122 bp, Homo sapiens
cggatgctcactccaaagtctcagcaggtgcgcggggcggggccggggggcctggcggggcggggtggggtgggggcgaggtctgcgccgttctcacgctgccgggcgggacagggggccag

SEQ ID NO: 417856 - DNA, 122 bp, Homo sapiens
ttcaaagggaggatgttagaaagtctggcggcttcgggggggcccgcgcgaggtgggtgtcgccacactttagggtctcgaggagcgggctggggccagaccggtgggcgtggtcagaaggc

SEQ ID NO: 417857 - DNA, 122 bp, Homo sapiens
ggtatttttggggtatgctgagtggaggtccttttcctgggaacatggaaaacaggtaatcgcccccagttaataaatacctggtttccactcttctagtacttaccactggcagccttgtg

SEQ ID NO: 417858 - DNA, 122 bp, Homo sapiens
cgccagtctgcgtgctttcactcaacagcagctgcaagccctaggccagcgtcgcagaaacggccaggaaccccactttcctacccgggggccagcagcgatcgctggggctagcaagcgtg

SEQ ID NO: 417859 - DNA, 122 bp, Homo sapiens
tctgaagtctgcacgactcctcagaaagcctcgtgatttccatggggccctggaggagggcgccatggaaatggtaatgcggggcattgaagctggctcgtagggaaggaggggggttgcgt

SEQ ID NO: 417860 - DNA, 122 bp, Homo sapiens
tctgatttgtcacaaatcaaacagcatctgggatctttctctgaaaactcctctcattatcgcaagaaattcctgcacataattcaatcctttaatttaacttggcatgacattcatataat

SEQ ID NO: 417861 - DNA, 122 bp, Homo sapiens
ctgctgggcgagggaggcctcgggatctgggccgggagccagggcggggacggcgctgcacggggggcaatgaggtggagacgggaccagggttaaccctggtccaaggccccaaggccagg

SEQ ID NO: 417862 - DNA, 122 bp, Homo sapiens
tgggcacctcgggcggcaaggattccacggtgctggcacacgtgctgcgcacgctggcaccgggcctgggcatcttactgcagctcatggctgtagacaagggcatcgggcgtggcttagcg

SEQ ID NO: 417863 - DNA, 122 bp, Homo sapiens
gagattggaccaggacagcttctagaggtctcctaacaagaacccatttctcctgtagaacgaagaccagaactggtcatttacccaggccgagccagacctatatgatacatcaaaagcag

SEQ ID NO: 417864 - DNA, 122 bp, Homo sapiens
aaaccataaacgtaaataagacactgtcatgggggaacggtagtgaggatgaagggaccgcgaccatcactggaaagcatgtgagccaatgctactggccaccagagacctgcccaacggat

SEQ ID NO: 417865 - DNA, 122 bp, Homo sapiens
tttaaagttatctgaccagatgacatcatcaagggagtaaatgtagataggaaagaccagcgaggtccaatattaagagattggggagatgaggaggaaaagagcaaagaaatgaagagaga

SEQ ID NO: 417866 - DNA, 122 bp, Homo sapiens
gcggggcagaggtcagggggcgggccgaggggaagccaatgacaggctccaattggaggccggaccctggacctttccgggtctgaggccgagccctgtgatgaggggagccaccgcctgga

SEQ ID NO: 417867 - DNA, 122 bp, Homo sapiens
cacttcgagggtgttccttttctctgtcacttcttaatccctgttacagttttggtaatccgtaattggataatttctgtttcttgaacacttctctgaagctaggtcagagccctgggaca

SEQ ID NO: 417868 - DNA, 122 bp, Homo sapiens
acagcgagagagcgagacacagtgagagcgagacacagtgagagcgagacacagtgagagcgagacacagagcgagacagtgagagcgagacagagcgagacagtgagagcgagacagagcg

SEQ ID NO: 417869 - DNA, 122 bp, Homo sapiens
ggggtaagttggaataactggtttaccagaggaataaaaaagaagctggaaaagcagctccgagcgcacttctcttactcaagctctctggaccatgcctgggtttcctggtggagccctgc

SEQ ID NO: 417870 - DNA, 122 bp, Homo sapiens
aaacatggaggccaggccacctccctggatgcctggctgagggcagccacatgtctgcagcggtggcttgtgtccatgactgagatgggcagggtttgcaggcagtggtgatcccatcagca

SEQ ID NO: 417871 - DNA, 122 bp, Homo sapiens
atgcagggctgtggaagcctcatacattctcaaaaattatcttgctaggagaaagcacatcgtttaccaataccaaatcctttattttacatgaagttccctgacactgtgaagctctagta

SEQ ID NO: 417872 - DNA, 122 bp, Homo sapiens
ggcggggccgggcgcggggggcgggcagaggcggggcgtggtggcctgggctgtgctcgtcgccgcgctcgtggaccggggccgggcggactcggggaccggcggaggacgccgggcgcgcc

SEQ ID NO: 417873 - DNA, 122 bp, Homo sapiens
cccaggcgtggatagatcaacccaggcctggtatgaactctacttaacaactatgtgcctcgcagaagctgtgtaccttggagcttcccattagcacatgtttttgttcaatgttcccatat

SEQ ID NO: 417874 - DNA, 122 bp, Homo sapiens
tgcataacaaccccaaatatgttctgtcaacacaaacctgcttttggtctataaacagggcgttacagaatggtacacccagtctatttcttctcagtatccattcgccagttcttcattta

SEQ ID NO: 417875 - DNA, 122 bp, Homo sapiens
ggctgggagctgcactgctgacggcataatttccatttcttaacgcaccgatggtttccacgtggactgcactggagctaacttggactgcgtcttttatcgacaccccctggacaataaag

SEQ ID NO: 417876 - DNA, 122 bp, Homo sapiens
gcaagaagccacctccagccggggggtcaccagccctcgcccggagcagggagagggtctcgcccttcatggcctgcagcaaccgttgtctcgacagcgctggtgaatgaaggagtctgtgg

SEQ ID NO: 417877 - DNA, 122 bp, Homo sapiens
cccctgcttccacactgaccaaaagtggccctggccgttggaaaacaccagcagccataccggccacccctgtggccgtctcccagccaatccgaacagacctgcctccgccacccccgcca

SEQ ID NO: 417878 - DNA, 122 bp, Homo sapiens
cctcccaatagccggttccagcttctggattccaagccagaaaacctgaatgactgtgctcgctggcttttgattaacagagacattttattcaaactctccatttcctgatgaactgttga

SEQ ID NO: 417879 - DNA, 122 bp, Homo sapiens
ctgcgaggcctcggggggcgcagacctgcagagactgcggccaacgggaaggtgagcccgcggggttagcaggcggcgttgtgggggtcggggacagtatgcttggggacagaggaattaag

SEQ ID NO: 417880 - DNA, 122 bp, Homo sapiens
ggctgcgctctacgagggcctggctgaggagctcaagcccgagggccttggcggtggcagcggccaagcccacgagtgcaaggactgcgagcggatgttccccaacaagtacaggtgccacg

SEQ ID NO: 417881 - DNA, 122 bp, Homo sapiens
gcaggcagcctgctcagtgggcacgccccgccttgccttccccagagggacattggctggcgcccggacagcacccacctgctggtcttctccaccgagtcagccttccactatgaggctga

SEQ ID NO: 417882 - DNA, 122 bp, Homo sapiens
tctagtccaaagctgtcactaaatctaggcagatcacatctctttttgtgccctggttttcgtcacccccaagacaagagggttgaacaagagtctctgaggtccctgacagctaaacaatc

SEQ ID NO: 417883 - DNA, 122 bp, Homo sapiens
agggccgggctccccgcgggtgggggcgtgggggtccctctcactcacctgcatgcttggcgcggcggcgcgacgactgcgggcgctcgggactgagcggggctggggggtcgcaggagcgg

SEQ ID NO: 417884 - DNA, 122 bp, Homo sapiens
aggctgtggtttgagatatctcccccttccttgttttacttaaaatcctcagtgggaaagcgtgcatggggaaaaaaaaaaccaccaccaccctggataaaaggtactttggtaacatacgt

SEQ ID NO: 417885 - DNA, 122 bp, Homo sapiens
tacctgtgctggcgcacacacggcagcgtccgtgcagtcgcactcgcacacacatgcacacggagacgtgcccaccggtgcactggtgcctgcacccacacccttcacgcacaaactcaaga

SEQ ID NO: 417886 - DNA, 122 bp, Homo sapiens
tacaaacctatttctgtaacgtacattccccagcaaggtcccgcgggaaggatccactaccgcgagaggcctcccagccaggaaggggtggggctcaatctgcagtagattcccagaagcct

SEQ ID NO: 417887 - DNA, 122 bp, Homo sapiens
gacccgggccaggacccgcagccagagccagatcttgccccaggccggcccaccagaactcggacgccagatcccgcctgaaccctgaccagtccggacctcgactgggccccgaccgtggc

SEQ ID NO: 417888 - DNA, 122 bp, Homo sapiens
cccaagactctacagagacagggaagttggggttggggaggtcacacaggctctgagatccgagagcacgaaatgcaggagcatcatccctggtttgcatagacctgggcacacgcccatcg

SEQ ID NO: 417889 - DNA, 122 bp, Homo sapiens
acctgggccccagaccgtgctgatccttgatgagctctcggattccttgtgcagagtgaccgacttggtaagatgctttgcctcagacttgaagctacctctctttcaacctgttaaaattt

SEQ ID NO: 417890 - DNA, 122 bp, Homo sapiens
gaatggccgcagggcaggcgaaggagactgccgggtcccaggttgtgggacgggcccaggcgaccgtgaccacacacggcagacaccccgcctccatgaggggcaacaccccctgggccgct

SEQ ID NO: 417891 - DNA, 122 bp, Homo sapiens
gggtgggggtaattgtctcttggtgggcccagttagtgggccttcctgagtgtgtgtatgcggtctgtaactattgccatataaataaaaaatcctgttgcactagtgtcctgccatcccac

SEQ ID NO: 417892 - DNA, 122 bp, Homo sapiens
gtgaagggcacgcgaacctttcatttcttagggaggctggaaaatctgtgcctggggagccgggtttcagtcagttaggcggaaaggccagtgagggggtgaatccaggggatcttcgcctt

SEQ ID NO: 417893 - DNA, 122 bp, Homo sapiens
ggccggcagaggtgacggcggccacccacagcagatactgctgaccgcggtttaggtgggcgatccggtagaagagctgctctggactcgtctcgtactcgctgggagcctgcggggcagag

SEQ ID NO: 417894 - DNA, 122 bp, Homo sapiens
atttagcattatagccataggcctgggctggcagtggtaagacttaatgctctatgagctcggatggggtggagaaggtttgttatgtccatgccagctggattccattctaatcaaagact

SEQ ID NO: 417895 - DNA, 122 bp, Homo sapiens
gccgtgggtgctgatgaatgcccctcagcccacaaatccctggcaccttgactgtgacaacgatcgcggctgctttcattatacttaggagttgtgaaccaccgcgtcaattacttttattt

SEQ ID NO: 417896 - DNA, 122 bp, Homo sapiens
aaaataaaagaaagtggagactgcagaacagactccgctgtggctgactgtgccggccgacgctccagctgaggggctgggttggatttttttttttctcccatcctctcgctctctctttt

SEQ ID NO: 417897 - DNA, 122 bp, Homo sapiens
ctctggctctgacaagcctggctccccccaccctaccgggtggcgccgttgctgaccccacgcccagccgttcccactcccgcctgaaactcctccgacagggcttcgcttcgggggctcag

SEQ ID NO: 417898 - DNA, 122 bp, Homo sapiens
gcactgagtgtttggaacctgttttattgcaggcctgctcataggcatgcagttgtatctcgcagtggctttaagttgcatctccgaaaggactaatgatgctgaatatcttttcacgtgct

SEQ ID NO: 417899 - DNA, 122 bp, Homo sapiens
tctccctgtaaatttagctgttagtctaagagggacagctctgtagaccctaggaaacgacgttcctacagagagtaaaaaatactaccaccatagttggcccaaacgcagccaccaattaa

SEQ ID NO: 417900 - DNA, 122 bp, Homo sapiens
cagctcggaggactcgtgcctctgctgctgctgctgtggctctggcgagtgtgccgactgcgacctgccctgcgacctggactgcggcatcctggatgcctgctgcgagtccgcggactgcc

SEQ ID NO: 417901 - DNA, 122 bp, Homo sapiens
acacagtgcatctccttggcacggtgcgtggtcatgtcccagaccttcaccatcttgtcgcgccctccagtggccaaccagcccctgtgggaagaaggtccacccaaaccctcagtggcctt

SEQ ID NO: 417902 - DNA, 122 bp, Homo sapiens
tttgatgcttgttttcttgtaaaaaatacagtcccccagatcgtgtgacgaaacctgcttcggcggcccgaggtgggggttttgagtcggttagtggaggcagtgggagcaggatgggcgga

SEQ ID NO: 417903 - DNA, 122 bp, Homo sapiens
cactccactccctgatcacaccactgcactccgtgatcacaccactgcactccgtgatcacgcccctgtactcggtgatcacacccctgcattccatgatcactctgaggcctccactctgt

SEQ ID NO: 417904 - DNA, 122 bp, Homo sapiens
ccggtttaggaacgaaaactctggaactaaaaacaaaaaataaaactggtgagtgcgcagcgtggtcagtgtttccctctgggtaatgcttggccaagggggaagatcgagtactcccgccc

SEQ ID NO: 417905 - DNA, 122 bp, Homo sapiens
tcctcgcttagccatggtcagtgggactcaatcaagaaaaccctgggatgaaacgggagacgtctcaagggaaacctgttggcaggagggcccagccacgtggagctgcagcaagtggtcgc

SEQ ID NO: 417906 - DNA, 122 bp, Homo sapiens
gtgaaaaggaatccgcaccccgcgcgagggagccgggtcctgtgaactctgcggtggcttcgtggttgcttccctgatccattcgctgcagtctcagagttggagcagcttggcgtttactc

SEQ ID NO: 417907 - DNA, 122 bp, Homo sapiens
aaagctctgcagtggggggctggtggctccggggctgggggatcacaggctggtgaaccccggtgggaacagaggtgaaagcctgccacattccgcctgtctccctaaccctccattgcctc

SEQ ID NO: 417908 - DNA, 122 bp, Homo sapiens
tgtcctcattattccgccccccacacgctttgcccgtgccaagcaaggaccaacacatgccggtgatttatccccaggccactcccgacggcatccaggcttaaggcgctggtctgatttca

SEQ ID NO: 417909 - DNA, 122 bp, Homo sapiens
gctagtatctggcttccgtgattcccttgccttcattttgtggctctctcctgacactgccggctgagtgtcttagttaaccagtaatctggcttttctccctccactttgatcttcctgtc

SEQ ID NO: 417910 - DNA, 122 bp, Homo sapiens
gcggggcgaggccagagagcgctgtgggcggggccagtgtgcggggcggggcgtctgactcggccccgctctctgcccgcagaggaggagcggcagacgcagcgctctaaaccgcagccggc

SEQ ID NO: 417911 - DNA, 122 bp, Homo sapiens
agcactgcaggttcagggcgcatgcgcatttccgctccttgccggttttccggacctctacgagtggctgccccacaaaatgcctgcttctctgcggaatcctactgttcttcacatgctct

SEQ ID NO: 417912 - DNA, 122 bp, Homo sapiens
gctccacccctaccccacgccccctcccgcgcgcgcggttaaatccccgcacctgagcatcggctcacacctgcaccccgcccgggcatagcaccatgcctgcttgtcgcctaggcccgcta

SEQ ID NO: 417913 - DNA, 122 bp, Homo sapiens
aaaagcgcaggacacgaggatgtgctcggctctaaccaggacagtgggcgcatggtttcacggcgcgtgtggcgagggcagcgggcgcacggtttcacggcgggtgtggcgaggggagcggg

SEQ ID NO: 417914 - DNA, 122 bp, Homo sapiens
cttcccggcccccgccccatcccgggcctgctgctgcggagaccgtgggccggcgctggacggcgcggcctccagaagtgatagctaattggggagagaaagggcccaattgtctggcgggg

SEQ ID NO: 417915 - DNA, 122 bp, Homo sapiens
gggggtgggatttccaagacctgcaaggagctgtttctcagcaggccactgatggcatggcgagttccactcctaaagtgaacggtctgtgcccattgttcagtggtgcagctctggcttcc

SEQ ID NO: 417916 - DNA, 122 bp, Homo sapiens
gaaggatgtggttagggagaataaggcaataactttcctttgtctcctgtcctaaaccttcgggtttcatatctattatttgccttccgtgcagtgaagatatattaggcaaatgactgttt

SEQ ID NO: 417917 - DNA, 122 bp, Homo sapiens
agttaagaagtcaccttttctctagcagatttactattatctccccaaattgtcttcccacgttaggcccaaatctccatttagaatgactggctttacattccatttagtcctgaggtaat

SEQ ID NO: 417918 - DNA, 122 bp, Homo sapiens
cactgcagttggagcagcaagtaaaggagctacaggagaagcttggtgaggtgaaggacacggaaacctccaccccatccaaaaagggctgggaggcaggcagcagcctctggggaggggag

SEQ ID NO: 417919 - DNA, 122 bp, Homo sapiens
tttaaaattcttccttaatcagaaaactgttattggctacagcttcatggctctgctgaccgtgggaagtgagcgtctcttttctgttgtggcttttaagtgcccctgcagcactgagaata

SEQ ID NO: 417920 - DNA, 122 bp, Homo sapiens
gtgcatgcgatttacctggggatcttgtttttgaaaatgcaggctatgatttaataatctcgctgatgatgcaggtgcagctagtccgtggaccacactttgagttcaggagtgtagggctt

SEQ ID NO: 417921 - DNA, 122 bp, Homo sapiens
cggaatgaaatgaagtgccctggagaagccaactggaggtggtggccccgagagtagacgcggaggggctgaggccgcaggatcctggagcccaggagctgacggagatcgcccacagctgc

SEQ ID NO: 417922 - DNA, 122 bp, Homo sapiens
tatatccaagagttagctgtgaactttgtttctggtcagtgttgccctcactctgggtcccggcctgatagggcagcgaatatccacatagaacattggtggttaccaagagggaaaaagag

SEQ ID NO: 417923 - DNA, 122 bp, Homo sapiens
gcccaggggaccactaccaccaagacatggagaccgctagtggctccgaacggctggctgcgctgatatttattgaatacaagacaagggggcagggtacggacggtgagtcgtccaagtaa

SEQ ID NO: 417924 - DNA, 122 bp, Homo sapiens
ctgtctgtccgtccgtgggtccgcggagaccgacctgggctaggcaggggtctaggacggcgggaggggggcgcacgaggagaggaacggggccggggaccgccagggggagcccgacctgc

SEQ ID NO: 417925 - DNA, 122 bp, Homo sapiens
gtatgtccctccagtgtctgctgagccactggtacatgcaacagttccattgttaggcagcggaatccagggtaaataaatttagacacaccagctccaccactgactggctgagtggtctt

SEQ ID NO: 417926 - DNA, 122 bp, Homo sapiens
aatgcctggaaactgaggagtgagcattaggaagacttcccctgtctgggctgataggagcggctccagtttggccaacgcaggtcgtgccccgcgaacagcgcgctgctgaacttttcatc

SEQ ID NO: 417927 - DNA, 122 bp, Homo sapiens
ggggcgtgacgggaggacctggctggggagcggcgggttgggagcctgtggctgccccttcggtgacagtggagtcaccgagcctagaaatggggaagctgtgacgtgggggtggtggaggg

SEQ ID NO: 417928 - DNA, 122 bp, Homo sapiens
tagaggcctgtcggtctgtttttccccgccctttttggagcctagggaccaatagagactcgcagagtgccttacctccattaggatttgaccaatgagtggccgaaagggagccgcctacc

SEQ ID NO: 417929 - DNA, 122 bp, Homo sapiens
cctccgtccccgccccgagcggaggtggtccggccgattgggattgtgggagatgtagttcgctagaaggggcgatgtgcgcctgcgcctctcgggagggacttagggggcgtcgaaaatga

SEQ ID NO: 417930 - DNA, 122 bp, Homo sapiens
cccccgcggcccgagaggagctgggcacagcagcgaggctgattcccagccagtgcccagcgaactctgggggtgggggtagggtgccccctacccgcgcctctggaagagcggctgcaaaa

SEQ ID NO: 417931 - DNA, 122 bp, Homo sapiens
tcccaaaccggttcccacacccgctgcccaccacctggcgaggaaggagcgggcgaggttcgctcgaatcgtcgtcacgggtttccgtgggtacagttattactcgttacataatattaaac

SEQ ID NO: 417932 - DNA, 122 bp, Homo sapiens
atgcgctcaatttcagatgtggaaacagaattcctaaacatatattcatttgttcaaggtcgaggtagcagagtttagatccagattggtctgatcccaaagcctgaattttttcctttgta

SEQ ID NO: 417933 - DNA, 122 bp, Homo sapiens
cctccaccagcctcatcactaattaaaacgccctgtggctttgggactgagtaggccggtcgttgaactgtcatctccgccaggatgggaaatctagaacatcccctcttctgcaaaaaagg

SEQ ID NO: 417934 - DNA, 122 bp, Homo sapiens
gtctcctccgcgtgtgctgggaagtcatcagaacagctttcaagcatcctaaggccagcccgcactcccagattatattttgatacccatttaccttctactgctcttccgatcagcattta

SEQ ID NO: 417935 - DNA, 122 bp, Homo sapiens
gcttggtccctccgtaaacagagcccaccactcccagccatctgaccttcaggtttttgacgggcacagctggatctgagaagaaactctggcggaaagtaatctcaattccagcctccttc

SEQ ID NO: 417936 - DNA, 122 bp, Homo sapiens
ctgctgacagccacactctgggctgaaaagggtaccacgcgtactttttttcccagcacgcgtggggccttggaaagaacctttactgaggcctgtggctggcctgtcaccttgtcaatctg

SEQ ID NO: 417937 - DNA, 122 bp, Homo sapiens
gctgatgcgggtgcgcgcgcagctgttgtttactagccggtaactgtttcagagccgcggcgcgcgcagggttcgcgctgccggggctggcgccccctccccggcccgacgccagagcagca

SEQ ID NO: 417938 - DNA, 122 bp, Homo sapiens
agatagtggatatcaggggaaagtggggactgacggctccccttttcacgataagggtggcgtgtttccatttgacgaacggacccccttactaagtacctgttagcgcaggtgacacccac

SEQ ID NO: 417939 - DNA, 122 bp, Homo sapiens
gtgctttttaaataagttccataaccatgtctgggctggagagtagtcacaacatgtctccgtcccagagcttgagttaccatggacctggtcacctgggagaaagctcactggactcacca

SEQ ID NO: 417940 - DNA, 122 bp, Homo sapiens
cgggcggcgcgcgtgtggccgactctgtatgtgtgcgcctgtcagtcaacgctgacaggccgcagcccattggtcaggccccgccggccgtcaccgcccaccgccgccacccattggccggt

SEQ ID NO: 417941 - DNA, 122 bp, Homo sapiens
tcgcaaaggcaaaagcaagaaatggcggcagatgctccagttcccccacatcagccagtgcgaagagctgcggctcagtctcgaacgtgactatcacagcctgtgcgagcggcagcccatcg

SEQ ID NO: 417942 - DNA, 122 bp, Homo sapiens
ttcaccagcgccgcttagcttcgcttctttactgtcattggctgtcgctgttccaggtcccgcccacagcgacctcaatcctgattggatgtcagtgtccttttgttatggcaaaggtggat

SEQ ID NO: 417943 - DNA, 122 bp, Homo sapiens
ccaggaatgttgattccctttgtgtcctttccttgactttacggcccacattgtaggtagcgtaacaacttacagttacttaggtgtttcttctgtcctagtccccaggacaactggttacc

SEQ ID NO: 417944 - DNA, 122 bp, Homo sapiens
actcaccggctgcttgggcagagtgtcctgaaagcagcggcccaggggcttctgggtgggcggccgggggtgcgagggcttggggtgcggcagcaggtgctgggagggggctgcgctctcgg

SEQ ID NO: 417945 - DNA, 122 bp, Homo sapiens
gtttaagtaaaggggaacaaaaaaacgcaatcccatcgattttgatgctgacagtgattgcggtattagtgatgttaacagctttaacagcggagcacccaggaccagaaatcatttccgag

SEQ ID NO: 417946 - DNA, 122 bp, Homo sapiens
tactcaggaggctgaggcaggagaattgcttgaacccaggaggcggagtttgaagtgagccgagatcgtgccactgcactccgcctggcgacagaacgagactccatgaaaaaaaaaaaaaa

SEQ ID NO: 417947 - DNA, 122 bp, Homo sapiens
tatgtatttttacaatttttttatccttgtttaaacctgggcgggaaccaaagagtaaagcgcgtgcggctccctgccccctgccgccaagacgcagtcctgtacagacgcggtcccttccc

SEQ ID NO: 417948 - DNA, 122 bp, Homo sapiens
cccctctctaaccccatatagctcaggtctctgatccagagactgcatcaccgacctctccgactacctatttccagattagagtccctgatcccagaggcattgtctaaaataactagctc

SEQ ID NO: 417949 - DNA, 122 bp, Homo sapiens
gtatgcatacagagagagagcaagctctctcatcttataaggacagataccattcctacccgatagggcccttccttataacctcatttaacttttaataccttcctcaaggccctatctcc

SEQ ID NO: 417950 - DNA, 122 bp, Homo sapiens
tgtcctgtggagagaaaacagggttaggggtcggcagcctgggtcaggagccagaccacgcgagcggccgcacccagggagaggccgcggggcctgttggggctgggtttcaccgccgcaca

SEQ ID NO: 417951 - DNA, 122 bp, Homo sapiens
agtttagccaacctgttcagtctaaagctcctgcctcaaagcctcccccttcaaagtgcccgtctctgtttctgctggagtcagctccccagcctccaggatggctaccttgcaggttgtac

SEQ ID NO: 417952 - DNA, 122 bp, Homo sapiens
acatttagttttgaagatagagagcaaaagctgtgaagaagaatttcctgggggctgaatcgtattaatgatggagcaaatgtttagagttacaggtcatattgggccagccctaaacatca

SEQ ID NO: 417953 - DNA, 122 bp, Homo sapiens
catagaattgctaagacaagccagattactgggggttaagaagaaaaattcgatgtgaaccgaggtgtgggaaatccagtacagcggtgggaggtattccctctgtgctcccggccctgcca

SEQ ID NO: 417954 - DNA, 122 bp, Homo sapiens
aatgaacctcgtgtaggccacggaccgctgtttcctttctccttggtaggggggttgtcccgaacttcctcgccccgctccgccccgccccgcgcggctcgggcctgcgcaggcgccgtccc

SEQ ID NO: 417955 - DNA, 122 bp, Homo sapiens
gcgtcgggtctcagtgccaggcttggccggggcggggaatctctcggcttgtgcttgctccgcggtgggctggatgggcaggtagggggcgggctccggcgctgggaccccactagggtggc

SEQ ID NO: 417956 - DNA, 122 bp, Homo sapiens
ggagccacagaggcacctggttctctgcagcatcggctctgccattggattccagctaggcgacctggagcctggagaggccgagagctgccgggctcacggcactctgcaccataagtaca

SEQ ID NO: 417957 - DNA, 122 bp, Homo sapiens
ctggagacctctctggccacatcagtctctgcttcagagctgggtctgaggctgggacagcgatgggctttagagtaggtggggactggggtttggaggagaagctgagtggacttgtctca

SEQ ID NO: 417958 - DNA, 122 bp, Homo sapiens
gagggcgagggtaactttctgggggcaggggaaggcaaggctgtttccccggaacgggaccggaacaggtttattcggggtcacagaaggagtcacctgcgcagatacatgaggcttaaaac

SEQ ID NO: 417959 - DNA, 122 bp, Homo sapiens
aggagactctgactttaatatggggcttctaagaacacagagaagtcagctctgttaacacgcagcaggcagatggggtcaaagccagagtggagggcccatggggatgcttttgtgggctg

SEQ ID NO: 417960 - DNA, 122 bp, Homo sapiens
cggctgcaggcggatggatggggcttcttcaggcggtggcggcagcagcgaaggtggcggcggcagcagcggcagcggctgtaagtgcagcctccacaagccatctctccccttctattcca

SEQ ID NO: 417961 - DNA, 122 bp, Homo sapiens
tcgacttaaacccacgaagctttggggagcactctagcccctgctactcacccatgcaagcggggtgcgcgctcgcgcacacactcactcactccaagataggggctttctaggaaaatact

SEQ ID NO: 417962 - DNA, 122 bp, Homo sapiens
agtaaaagagcatgctccagtgttgacagaggaggctctgaacacagaactggctgagcccgaagcccatagttccgattgaaggcctatctgggtatgagggtatctgtctcgccttagtt

SEQ ID NO: 417963 - DNA, 122 bp, Homo sapiens
cagctcaccggctctatgaccctgggtaagttacctggcttctctgttcctcagttttctcgtcttccctgacccaggctttcccgactcctctaggggccccttcccctctccatgaacac

SEQ ID NO: 417964 - DNA, 122 bp, Homo sapiens
acaaggctcaggcatcggtccagcctcctcccctgtggaccaagtgtcaactccatccatcgtccttccgggcgcctctcaccttgaggacccagggtcctcgccccctcatcctttgcttt

SEQ ID NO: 417965 - DNA, 122 bp, Homo sapiens
ggatgtcatctgaaggtaagggatgcctctggttaattcagtcgagtgacttgtccaagacggtaaagtcaggactacaacttaagtggtttgactattagtttagaactgttacagcacag

SEQ ID NO: 417966 - DNA, 122 bp, Homo sapiens
atgtttccagcagcacactgtcttgtaatccaaggggccctggaaaaaggggtttcgcagcggcactgtggtctcagagtccatgcgagaggaaacacatctgtccctgtattttccgcaga

SEQ ID NO: 417967 - DNA, 122 bp, Homo sapiens
aagatggggagcggggacaggcgacgcggacgaagcgggaggagccactggcagcctttgcgtactgtcatagcaacgggaagggcacctcgaccaatcaccgcccgggaatacggaggggc

SEQ ID NO: 417968 - DNA, 122 bp, Homo sapiens
tccagttccaaattaggacactttgacaagtacttatgaggacctcagagcatttgccatcgggggtgccctgaaaacagaccaggtaccggccacacgaatagaggcacccagataggttc

SEQ ID NO: 417969 - DNA, 122 bp, Homo sapiens
aggcagttgatggagttaaaccatctgctcttctgctacttcaacattttctagcttttccgtgtatctaaacacaatttgctacacaagtcactgtttttttttccatgcactgtgtgtaa

SEQ ID NO: 417970 - DNA, 122 bp, Homo sapiens
cagaacaattcaacatcaacttcaaaaataaatactggacgtgacctccaagagcatgcacggtttggctcatgcctgcccattggcctgttggctgttggcatctcgaatatgccacactc

SEQ ID NO: 417971 - DNA, 122 bp, Homo sapiens
tatgtgggcgcgaatggatgtggctctgcgctcacctgggcgaggacttctggccggtgccggggcactctgcatgaccctggcagaatcgagctgccctgactatgaaaggggaagaagag

SEQ ID NO: 417972 - DNA, 122 bp, Homo sapiens
ttttcctcaatgcatcactgcttaccctgcagaggtaactgaagacagatgccctctttccgtggctcatctgtgtttctttaccttggctgccctctcttggaagagctgtctctccatcc

SEQ ID NO: 417973 - DNA, 122 bp, Homo sapiens
gccaggcagcagcatgtccagagggacctgttgtgtcacaaggaaagctgtccatgcaaccgctgtccccacccactctgggagaggggaggggctgcccactccgggagaggggaggggtc

SEQ ID NO: 417974 - DNA, 122 bp, Homo sapiens
ctttaaaccctgctttaaaggtaaactaagcgtgcaggcagccaagaacattcagcataccgacagaagacaggtagaaccccacccccacccccacctccacttctgcctccaattctttt

SEQ ID NO: 417975 - DNA, 122 bp, Homo sapiens
gggtgattcttgtgagggcacgcggagccggggcgggatgggggccctaccttgtccaggcgccctctggatccgggtctgcctcgaggcggcggaagccccacggggcgctgggcggcgcc

SEQ ID NO: 417976 - DNA, 122 bp, Homo sapiens
cagagcccggcccgccctgcggatgatgccaacctgaccagaaccccgctgtcccgggggcgcagcaacttggtgaaggggacagggctccggactagacagcacccaagctggccgctccc

SEQ ID NO: 417977 - DNA, 122 bp, Homo sapiens
cgccgggctgcggcggcggagtggtggcgacagcggattccgtgcccggtggccgcgcgccgcccggctgttccgcgtccccttgccggctcacaatgtgctgaccctcccggccccgccgc

SEQ ID NO: 417978 - DNA, 122 bp, Homo sapiens
ctggaaagaactttctgttcttatggtcatcattttcccatcaacactaatagttactgtcggtttcactaaccctgccatgttccgggctgcgaaattcactcctacaagacagagatagc

SEQ ID NO: 417979 - DNA, 122 bp, Homo sapiens
tcggacccctaggaagcttcgcaggccttccaggctgccagacagctgccctggcgttgccgtctgcttcttccctggccccactctgaggggctcagagctgaggcagaatccctttttca

SEQ ID NO: 417980 - DNA, 122 bp, Homo sapiens
atgagagccagagagacagggagggaggcccgggctcctggccttttgggaaaagatgcccgtctcagaccagcaaaaggaggcagctgctttaggagcccgggaaaatgccatcactgata

SEQ ID NO: 417981 - DNA, 122 bp, Homo sapiens
aggagtcttcatgcaaatcagattgtttctcttttagtgtaggcaacagcaagttgttgacgacagtggttaccttaggctcttgacattctgctcccaaggtccagtgtgggaaccctgcc

SEQ ID NO: 417982 - DNA, 122 bp, Homo sapiens
tttgtcttgtgcagtctcgtcacacaaagttatgctaggttcctgcaaagtaggtccctccggctcctaatcccaacagtgcctcgaacagaacccgtgactccttctttgtgcttaccctt

SEQ ID NO: 417983 - DNA, 122 bp, Homo sapiens
ccgtatctggggatattctcatgtaataagtctcatctccctaatattgaagtcagagatcgagtcagagttcagagcgttcaggtgtctttgcagctaagattcagggatgtggtctgagc

SEQ ID NO: 417984 - DNA, 122 bp, Homo sapiens
gtcccccgctggggcttcccaagccaaagaagaggaaagagcccgtgaagatcgcggcgccggagttgcataagggagatgtgagtatccggggaaggcacccccaaactgtccatcgggtt

SEQ ID NO: 417985 - DNA, 122 bp, Homo sapiens
ttttaaaaaatgcaccaatgagccaatatgaaacagcgacatggagactttcccccattgcggctctgggggtagagaatctcttgtagcaatggaaaatgttcagctccttgatccagacc

SEQ ID NO: 417986 - DNA, 122 bp, Homo sapiens
gcgcgagctgcggcctagagcggtaggaaccgacgcgagcagtcctgcagcgtcccctggcggagcggaggctcaacgccagactctggaggacttgggataattttcgaaaactatctgga

SEQ ID NO: 417987 - DNA, 122 bp, Homo sapiens
gccaacttcatgtctgagtgcacgagcagcagtttgccatggagagcttggggctgcacacggtgacccttagtgatgggacaacagcctacgtccagcaagctgtcaaaggtaagtatttc

SEQ ID NO: 417988 - DNA, 122 bp, Homo sapiens
caaattcctgggtgctgctccagacatgctgaatccaaatcactgaggatggagctgggccgtgcacatttaaacaaaccccaggagtgattttgtaatgtcctggtaagtttaagaacctg

SEQ ID NO: 417989 - DNA, 122 bp, Homo sapiens
tcttgaagggttccagtgtgtggtgtttccaactttctcatgtcccctcgggaatccattcgtatcccatgccataagtcgcgctgtctattcttgaccaggcccggcaaactgctccgagc

SEQ ID NO: 417990 - DNA, 122 bp, Homo sapiens
tggaccaggactcagcatgatggacagtggatgggggggcacccacaccttccgcgcagtcgtcataggccttcccagaaggagctgcccagacctgcgtgtcagcccttggtggtggccag

SEQ ID NO: 417991 - DNA, 122 bp, Homo sapiens
actgtggtggcccttgagactccttcctgcctccctccggagcagagagtaaagaggagccggcagtgtctggcctgcatctttccatgtggacaggagccctcccgggaggcctggaggca

SEQ ID NO: 417992 - DNA, 122 bp, Homo sapiens
ctgggtgggacccagcggagacagggccaggggcggtggggaggttcagcctgcgtgtgtcgaggcccccccaggccagaggtcccggggtccatgtcccatgcctgggggccaccccgagc

SEQ ID NO: 417993 - DNA, 122 bp, Homo sapiens
tgacttccaggagttcaaggccagcggccacagggaatttctggggaggaaatgcgaagccggcatgagatgtgcagaatgcggtatctctggaaatttctgcagcatatgcccacgccggt

SEQ ID NO: 417994 - DNA, 122 bp, Homo sapiens
cccacctcaatgcggccggtgtccggctggaagctgcgcgcggggtcctcggtggtgacccggcactggatggcacacccgttgatgcggatgttctcctgccgcaggcccaggtcgggtag

SEQ ID NO: 417995 - DNA, 122 bp, Homo sapiens
cggggagttgggaaaggaggtccaggggccgcgtgggcgggagactaccccagttacaggcggcgccggagctgctggggctgggagagggtgtcgggaccggcccaggacgccaggacccc

SEQ ID NO: 417996 - DNA, 122 bp, Homo sapiens
catgttgacaacaccagttctacgacgaagcgggcgattcctcttgcctggaatttcactcgtccccggtatcgaacccccgccccaattttctacgttacaactccagcgtatttttaacg

SEQ ID NO: 417997 - DNA, 122 bp, Homo sapiens
acatgaatcagtctttatcaaggtgctacctaaatgaaatcctgtcacagctcctaatgccgatatggcactttgcttaagaagcattgtgagaggcaaactttgcatttgcatggaacaca

SEQ ID NO: 417998 - DNA, 122 bp, Homo sapiens
ccaactcctgacctgaggtgatctgcccaccttggcctcccaaagtgctgggattataggcggaagccactgcgcctggcctatagcttatcttttgtaaaaatgtaatacatctgggtata

SEQ ID NO: 417999 - DNA, 122 bp, Homo sapiens
gctcctgccctcacaccctcacaggggagctgaagctgcaaacagcacatgctcatacaacgtcccaaatctgggatagaaagcggggctgtgggactcctgattctgtctggagactggga

SEQ ID NO: 418000 - DNA, 122 bp, Homo sapiens
ggaataggaaaataagatccacaatgaggagaaaaatcatcaaaactgacccagaaataacgtaggtatagaatgagcaaacaagaacgttaaaacagttataactgcatttgatacattca

SEQ ID NO: 418001 - DNA, 122 bp, Homo sapiens
ccagggttccctgggatgcactgtcgtggcccatggccgaggctgggcctggaacggagccgcgctggctagggagccgaaggggcccacacttggcgtaggaaggttccggtagccccctc

SEQ ID NO: 418002 - DNA, 122 bp, Homo sapiens
tcggcgtccctgggcccgggacacggaacacacttgctgcgtgctgtgtacaagaatgaacgaatcggcctgcctagcaccccttggccggctccaggcctccacttgctgtgtcaagtgag

SEQ ID NO: 418003 - DNA, 122 bp, Homo sapiens
ctcgcgctgcgccacctcccgccgcagctccgcgttggccgcagcacgcgcctccagctgcgactccagcgcgcggcacttgctctccagctcccgggacgccgcctctggaacggggcaga

SEQ ID NO: 418004 - DNA, 122 bp, Homo sapiens
gctctcagatgagtcagtttctgagaatggctctcagccagagggaattgtgttgatcaacgtctagatccttcctgggaaaaattctcattgaatgcatgattgagggcagggccagctac

SEQ ID NO: 418005 - DNA, 122 bp, Homo sapiens
cccagcggcctcgagggcgccactgacaggagcgcggggcacaaggctgcccaacaagaacgcggggcgcgaggccgcctaactgacaggaacgcggggcgcgaggccgcctgacaggaacg

SEQ ID NO: 418006 - DNA, 122 bp, Homo sapiens
gtcctgcttccgccctcgccctcatctacgctgctccgctttcctcagacccctttttgccgtgcaaagggaattcttgacattaaataaaaggtatccagattgcagactgcatgttcaca

SEQ ID NO: 418007 - DNA, 122 bp, Homo sapiens
ctcccacattctaggaatgggcccttcagcatacaggctgatgggcaactgtgtcctgggcgtgggcaactctgctgaggagaggtgttgtagctccctggaaatcttccctagcttaggag

SEQ ID NO: 418008 - DNA, 122 bp, Homo sapiens
catgacaaagtcagtcaaacatcaaaggtcatgaaatcatctacttaaaataactcatcgcgcctcgacctcgtgaagcacggtctcgagggtggacgggaacaaaaaacaaacagggcgac

SEQ ID NO: 418009 - DNA, 122 bp, Homo sapiens
tcttgctacatctatatataaggatcacccaaaaagtacaaatacctataggttttttggcggttgcgtggcagagcagaaagttcacagtctagtcctttagtggtggttacaattttgag

SEQ ID NO: 418010 - DNA, 122 bp, Homo sapiens
tgcgggctcccgggtgggggcgggcatcacggggcactgcgtggcggatgtggggagggtcgtgatggggagggacgtgctaggtgtgcacagagatgctggggtgcaggagcgggtgtctc

SEQ ID NO: 418011 - DNA, 122 bp, Homo sapiens
tgaacaaatacccaatgtctgcctcccgggtgctcaacaccatcattttgatgaaccatccgggtcttcccaactcgaattattaaaaacgcctcgatcccgctctgcttctaggcttacgg

SEQ ID NO: 418012 - DNA, 122 bp, Homo sapiens
cacatcagtcagatgtcaaaaggcagcacgtaaattgaataagggaaggaaaatgccgggcggcctcattcacgtccggcatgttccgctattattgaaaggaaattgagaaattagacagt

SEQ ID NO: 418013 - DNA, 122 bp, Homo sapiens
cgcggtggaggcggggcgggcactggccaggggaaagaggcggggccgggggcaggagcgcgcccagctaccccgggaacagaggcagctggagtgggaggttcccgcactgtggcggggaa

SEQ ID NO: 418014 - DNA, 122 bp, Homo sapiens
cagccgcgggagccgtgggggcaggcgggagagagggctgggcccctgtgcttgcgagaacgggtccttcgaagtagaaactggggagaggactttaagccaggtcccctgggagaaggccg

SEQ ID NO: 418015 - DNA, 122 bp, Homo sapiens
gctggcccgcgtcccctctcggaatgaaggtgttccgtaggaaggcgctggtgttgtgcgcgggctatgcactgctgctggtgctcactatgctcaacctcctggactacaagtggcacaag

SEQ ID NO: 418016 - DNA, 122 bp, Homo sapiens
agcggcagtgtgagtgcgagagcgcctccgggtgtgaaccgcagtgtgagtgcaagcaggcgtgcgttcggaccgagtgttccagagacccgcgtgggaagcgcgtccggaggccccagcag

SEQ ID NO: 418017 - DNA, 122 bp, Homo sapiens
gccccacccaacaaccacaggcccaaccccattcagccacaagacagaggtatttataaccgtttttctttattctacttagtggggcacccagaaacttccctgggggaaatgcttgttca

SEQ ID NO: 418018 - DNA, 122 bp, Homo sapiens
atagaggtccgcgcagtgctgtgccccttcccgggaccagaatccttttcgatagaggtccgcgcagtgctgtgccccttcccgggaccagaatccttttccatagaggtccgcgcagtgcc

SEQ ID NO: 418019 - DNA, 122 bp, Homo sapiens
ggcaggcagccccgcaagagaggaagtgtctcagacgccgaccatgctccgaggctttcccgggcctgttgttagctactcggaaaactgggctgcacttgaattccaagaaatatttgtat

SEQ ID NO: 418020 - DNA, 122 bp, Homo sapiens
gcctttctgctcctccttggcctcctctgacacgttgggatagatcaccaggaatgtggccgtcaggaagcccaggaaagagcccacagaggccaccatggggatgacgcggacagtcccca

SEQ ID NO: 418021 - DNA, 122 bp, Homo sapiens
gcaggatgatgaagacagccttgaagtcatagttctcagtgaactccaggtcgcccatgccgatggtgaacttgaacagctccaggcaggtggagtacaggctgttgtaggagctatcgggg

SEQ ID NO: 418022 - DNA, 122 bp, Homo sapiens
tgatcttaagagctttgctataaggcaggttatatcatccccatattgaagacaaggaatcgaagtccaagagaggcagtgtcgttaaagctgcatatttacatggtagggtaggtggtgtg

SEQ ID NO: 418023 - DNA, 122 bp, Homo sapiens
tggacaccggtagctacgcgaggttctggaatgggactcagtcattgattcctgtatgtccgccgctggcatgttatataaaagctggacctggccttgaaggtaaatcgtcacaagccccg

SEQ ID NO: 418024 - DNA, 122 bp, Homo sapiens
aggcaggcaggtccatgtggagctaggcacctccttttgctgcattctctacctcccttccgcatccttcctctagccgtgagtggaggtgtgaggctgggtggctcccggctccagaggaa

SEQ ID NO: 418025 - DNA, 122 bp, Homo sapiens
ggcccggcctggaaccagggacacatgcagtgtcttcttcaccaagtagaaggcagcagccgtgtagctcactcagtcctcccgtggggtgggtcgtgcaaggcagcattagtgagagatgt

SEQ ID NO: 418026 - DNA, 122 bp, Homo sapiens
acaccgaaaagggtttgattggaactctggaagcccggacgcagaaggtgctagggctcccgtcgccgcgagggcgccccgcgcctggagatgggatggtcagttcttcccggcgcgtgccc

SEQ ID NO: 418027 - DNA, 122 bp, Homo sapiens
ccaaatataggttccacacccttttctaactccagccatgtgaatgtcctgataagcacacggcaaaaaataagctaagtgaaatattctcattgcctcatgatctctagagtgtatgtcat

SEQ ID NO: 418028 - DNA, 122 bp, Homo sapiens
ctgccgacctcgctgtgccgctgccgagaacagacgccttaagtatgcgaaagcgagagacgtgcgtgcgtacgtgcgtacgtgcgtacgcgcgacgcggccacgcctctgggggacggggc

SEQ ID NO: 418029 - DNA, 122 bp, Homo sapiens
cattttgtttttgcaccaaggagactgcagtcaaataaaacagatactacacacacttgtcggggcagccgtactgcagaagcacgttgatgcactcctggctggaggcctgccgggcgtag

SEQ ID NO: 418030 - DNA, 122 bp, Homo sapiens
ggaagaaatgtgcagcacacgggggagattccagttgagagccgtggggcgcagtgtgaacgctgttgatgttacttaacaggcagcagcagggttttcaaggggttggctggagccctgtc

SEQ ID NO: 418031 - DNA, 122 bp, Homo sapiens
ttgctcctcacacccatatgctgcagattaaatgagttaagtgcctttgacacattctaacgtcctctgacacagcgtaaattattgtgctcaatagcttaacgtaaaaattgggtgttatt

SEQ ID NO: 418032 - DNA, 122 bp, Homo sapiens
tcagacaccattgaacccctctatggttctcaatctcagttaggattaacaaggccttggcgtccccctgtgctccatttctccagctgtgcttgaatgatcttccccacagccccagcccc

SEQ ID NO: 418033 - DNA, 122 bp, Homo sapiens
cagggctcataatcagacatgccatgttgacgaaagagtaatgtctcatcctggtgagatcgtccacaggacctgtgctgaataattgtcaggcagccatgagaccacagtaagctcccata

SEQ ID NO: 418034 - DNA, 122 bp, Homo sapiens
gccacgcccacaccctttctacacgctttctcgttcacttctcattgcaactccttccgccgcgtggacaggttcagcactctcggagtcgatgtcattattcgccatcgacgcgaacctcg

SEQ ID NO: 418035 - DNA, 122 bp, Homo sapiens
accttggtaatgggagctgtgaggacctcataatatcggggaagctgggctcccaggatgcggcctacaagagaagatccacaaaacagaagttgaaacaggtgacagggaaaccctccgac

SEQ ID NO: 418036 - DNA, 122 bp, Homo sapiens
ggcttccacccagtaggtgccaggagcacccctccccaccaaggtgtctgcagacattgccgacagcgtcccttggggcaaacgccctccactctccacccccgccaggtagagattcactg

SEQ ID NO: 418037 - DNA, 122 bp, Homo sapiens
acacacaccctgtttgcccgtgagcctggggaacttgcagcttaaagccagccacccccacggcaacatgtaccccagcaacaagaagaaaaaggtgtggagagaggagaaaggtaaccggc

SEQ ID NO: 418038 - DNA, 122 bp, Homo sapiens
cccatgcgcctcttttctgttgaatttaccatcagctccaaagaacagcgagggtcccagcgttgtagaagcccagactcaggctcgtgtaccccatgtgtagctgatgccaaacactgaca

SEQ ID NO: 418039 - DNA, 122 bp, Homo sapiens
agtagatcggcaggggcggggctggccggaggtgctggcaggggagcaccccacacagcccgcaccgggcgttgcctacacaagggctccgagatggctggagtgagggtggggctagatct

SEQ ID NO: 418040 - DNA, 122 bp, Homo sapiens
ttctccagcatgtgcaaccctcattagggagagctgctctttgaaacaaaaattaatcaccgtaagcagaaaggcacgcttcccacagtctctcccatgttgcccaacttccaaaatctcat

SEQ ID NO: 418041 - DNA, 122 bp, Homo sapiens
gtgcgtgcgtgtgtgtgtgtgtgtgtgtgcgcgcgcgcgcgtgggtcggggcgggggcgtcggggggccactgggaattcagtgaagagggcaccctataccatggcagtgcccggcgacgc

SEQ ID NO: 418042 - DNA, 122 bp, Homo sapiens
tgtccctttcagggggtctgagagcaggagggtggtctcggggaggagctgatacctgttcgccagtaagatcaccctgttcgtggcatcggcctcttgctgacacttgattttctcagctg

SEQ ID NO: 418043 - DNA, 122 bp, Homo sapiens
atttattcattcagtcagtcagtcagtcactcatcagtcaatcagcctatttcatccgtccgtcagtttatatatagaagaagcatcgccttgtggttaagcactttgtctggattctaact

SEQ ID NO: 418044 - DNA, 122 bp, Homo sapiens
gcagaagcaagacccaagaccagcttggctgctgggaagaagccagtcaggagtcccagacgcccaggggtcggtcgggcaagggaatgggctggttagtggccaaggagccggggcccagg

SEQ ID NO: 418045 - DNA, 122 bp, Homo sapiens
tcaaactgcgctgtctcccgccttccctgctccctttatactgcagaatgttccctcatccgggaactcggattgctcatcccaccaatggctgccacccgccctcgggacgcgtccttgag

SEQ ID NO: 418046 - DNA, 122 bp, Homo sapiens
ggctatcttaaggctctttgagaaaggcaaatgcggataagcagttattaacgctgactccggggttcaaaagaagggaccagtctgctccctggctgagggcagagccctgggggcatggt

SEQ ID NO: 418047 - DNA, 122 bp, Homo sapiens
ggggggggggcggggactgggggaggtacctgtgccttcttctcctctaatgcgagatctcgctccttgccctccaccagccgccgaccatggccgcgctctgaccccctccccggccgcag

SEQ ID NO: 418048 - DNA, 122 bp, Homo sapiens
ttcggcatttggagcagctgaggcagtgtctgaggtggttttctgaagcggtgaaggagccgctctcacactccctgcagtccgtatcctgccccgggcctggacagtcattgtacaagtag

SEQ ID NO: 418049 - DNA, 122 bp, Homo sapiens
cctctttcaggacggcgcgcctgtgcggcgcacgcgcgctcagttacttagcaacctcggcgctaagccaccccaggtggagcccagcaacaacagagccaccgcgtcccccaccaatcagc

SEQ ID NO: 418050 - DNA, 122 bp, Homo sapiens
gagaccatccccttcagccccggaggccctgcccatcccccggcccaggacgccagcccccgctgtgcctgtgggaggaatcctaattgcccagaaagctgccaggaaataaaagacatgcc

SEQ ID NO: 418051 - DNA, 122 bp, Homo sapiens
agtgttgagtactttgcccgtcctgaatgccttcgggaactctgaaaagcgcattatcaccggtggcttatgtacattctttcttaaccccctcctacaattttaaacaagagccttttcca

SEQ ID NO: 418052 - DNA, 122 bp, Homo sapiens
gggctcccaggaataaaatgactagattaaatgatacaggtagtcatactgtgacacagccggggtttcaaaaacaagaagtttgcttgatactgtgtattataaaaacaaaataaaaacaa

SEQ ID NO: 418053 - DNA, 122 bp, Homo sapiens
agccccgggcaggcccggcaggcgcgctcctccactgacctgcgggcggcttgggggcggcgcggaacagctgcatctcgcgcccagctccagcccgcctgccctccatggcgccgactgcc

SEQ ID NO: 418054 - DNA, 122 bp, Homo sapiens
tctaccaccccattcaggacacccctccccaacacatattgggggaaacggggcacggcacgcgttgggttcaggaaaaaaaccgggaacggaaaaagaggctggtttggtcctcagcttcc

SEQ ID NO: 418055 - DNA, 122 bp, Homo sapiens
ccccctgctctggttcactggggcagtcctctgatcactgactgggatcaattacctctgcggtagcccctaaagggaaatgcagaattgctgaactctggaagggaaggagaggtttggtg

SEQ ID NO: 418056 - DNA, 122 bp, Homo sapiens
cttgtgtgctttgtactgtcctaagcactttgcatatacaatattaatatttaatcttcacgaaattcctatgaagttgaggaaagaaagatctctggtctccagtgactgtggggctgccc

SEQ ID NO: 418057 - DNA, 122 bp, Homo sapiens
agccccaggcagctacactgggcatgctcagtagagcctgcggcttggggactctgcgctcgcacccagagctaccgctctgccccctcctaccgccccctgccctgccctgccctcccctc

SEQ ID NO: 418058 - DNA, 122 bp, Homo sapiens
gtactagctcctggacagtcatttgttcatgcattcattcatttaaccatcactgtctaccgaggacgagggataaagcaggaaaaaagacaaccagtagagttcacaggggagcagaaagg

SEQ ID NO: 418059 - DNA, 122 bp, Homo sapiens
tgtccacggtttactcccgcgcggattccacgggaccacctgtcggggacagaaggcctacggcagtgagggaggaccacagaactttggaaaatccaagttttttctgagtatttccatta

SEQ ID NO: 418060 - DNA, 122 bp, Homo sapiens
gggtgcaaagccccttctccaagccgcggggttggccgggaggtgccggctgcacaacggcgcccacgtgacccaggtgcagccccaggcgcgcccaagggcagctcgccttagagaaggac

SEQ ID NO: 418061 - DNA, 122 bp, Homo sapiens
cactgactgtattctgtgagcactgaaagtacttcctctttctaattgtttctgggcaagcgtaagttatttgattagccaattaacaaagtgaaatagggaggctgaggcaggagaattgc

SEQ ID NO: 418062 - DNA, 122 bp, Homo sapiens
agggcgcttagatggagggggcagtgggctctccgcattggtggagcgccctcggtgtgccgggctcagctcttgcccagatctgcccagtccctaagagcctgctcaagctcgccaggagt

SEQ ID NO: 418063 - DNA, 122 bp, Homo sapiens
ccccgcccccctcccgctcccattctctgccgggctttgatctttgcttaacaacagtaacgtcacacggactacaggggagttttgttgaagttgcaaagtcctggagcctccagagggct

SEQ ID NO: 418064 - DNA, 122 bp, Homo sapiens
tgccatgcctgagtctccccgcccccgccgtgggctcttctgcggcctgagcctccctgacgagtgccaccccctgctccacagcgcccggtcccgtcgactgcccaagggctgaggagtgc

SEQ ID NO: 418065 - DNA, 122 bp, Homo sapiens
agtctttgctcagcacatcccggatctggtgggaccagtcgatgatggtggtttcaatggcgtgcaggagcaagttgtccagtgaagaggggatcctgcccagtggaaggttggggcattgc

SEQ ID NO: 418066 - DNA, 122 bp, Homo sapiens
ctgtgtaataatcagagctgcccagcctgtatctaaaagtggtcaagatgcgggctgaagcgtcacgggtcaggaatgctgcacaggagagtctacggacaggctagatgacccttagcatg

SEQ ID NO: 418067 - DNA, 122 bp, Homo sapiens
aaactagaaaataagtgataagtgcttaacacagtatgaagcagacacactgcaagatgccgtaaggttacaatgaaactaattatgcttattaaacattctatgccttctttaccatacca

SEQ ID NO: 418068 - DNA, 122 bp, Homo sapiens
ggtcagagctcacgggctggccctctgccctcctgtggtcacgacggccccgaagctggccgtgctcctcgctcgttcagccagaattctgcagacgcatcccaggcctacgctgctctgcc

SEQ ID NO: 418069 - DNA, 122 bp, Homo sapiens
tttattctagatggccatatccctacctaagacttggagttttctatgactggggaagaacggaagacaagatattgggaaagactagcagcctctactaaaagggtgatctgtgttgatgt

SEQ ID NO: 418070 - DNA, 122 bp, Homo sapiens
caggttcctgcgtgctgggttccactcaaaatgtttcaggatttagggtttctgcctcctcgctgtcattatggaactggacggaggatggcggtgggtgggtaggaagaagcctcaaggcc

SEQ ID NO: 418071 - DNA, 122 bp, Homo sapiens
tctattgggtgtgggcggaacgcgagggattgcggcatcttcgggggctgcaggtgagcgcgcgcacgcgccgcggctgtggtccgctcgggtgcgcgcgcgcgggctcgcgggggaggcgg

SEQ ID NO: 418072 - DNA, 122 bp, Homo sapiens
aaataaagatccagaaattggcccactccacctccatcactactaaggtcacctttcctgcgtgagttgcaacccgtagcgcccctcaaagggatgcaacctccaaaacaggcgcccagagc

SEQ ID NO: 418073 - DNA, 122 bp, Homo sapiens
ctgcaggcccataggctcctgccagcctgtgacgtgcggccccgggaatgccgtggggagcgggcaggctggcatgagctcaccggaggtacccgctagggcttcctcccccggccgctagc

SEQ ID NO: 418074 - DNA, 122 bp, Homo sapiens
aaaatgctgaagttttcaaggtggtgtgtgttgggagtcttggataagtgctctgaacatcgcttgggaggtgctccctgggaagtgggcatttcaaatttggagctttttgtggagtgaag

SEQ ID NO: 418075 - DNA, 122 bp, Homo sapiens
tttgggaagcggggccattcatgaaagcgcagcggagaggaagcgcgggggcggggagcccgggttatcaccgcgccccgccagccccatcacggccgccgtgccttctgccgggccatgct

SEQ ID NO: 418076 - DNA, 122 bp, Homo sapiens
agtaaattactcgatttttctcagtttccatttcctatcaaatgggttgttctgggaattcggggaagtaacagtgccgggaaccgcgggaggaaccgccagctgcgtcctcggacgtcccc

SEQ ID NO: 418077 - DNA, 122 bp, Homo sapiens
agagcagcgcagcgggcaggaagcccaggcgcctcggagaacctgaagggctgcaggtcccggtgtctgcggcagcttccgcatccctgcagggaaccagcggctcgctgagcctggggctg

SEQ ID NO: 418078 - DNA, 122 bp, Homo sapiens
tctgctgaatgtctatttttgtctcctgacgagacgtgaggaccatgcccttgatccctccgatggaccagaaacccccttccttgcaaaaaaaaggcaattgaattaggaaaagatagccc

SEQ ID NO: 418079 - DNA, 122 bp, Homo sapiens
aaacccacttccgagttgtctaggtctgggcaggatggctctctgcatctcagctactaacgcacctcgaggttcccgcccgtcgtggccccaggccacccatcctgactgggtttggcctg

SEQ ID NO: 418080 - DNA, 122 bp, Homo sapiens
gattaacagggccatgcaagaaatgtttgccattggtttgatcttagtcaaagaccagctcgttctatgataccagctgcttccttcacttagaaaggtgttgttttattgccatacaacca

SEQ ID NO: 418081 - DNA, 122 bp, Homo sapiens
ccataattactctttctatagagttgatcagcctgagaacatacctggggtcaaaccattcgtgctggctcaattttctacctcctttcataattccactgagggtggcgggggaacaaaag

SEQ ID NO: 418082 - DNA, 122 bp, Homo sapiens
gctggataataaagcccacttcaactccgtgaatggctgtgatagagactgcctactctacgataaaaagcaatattttctgtatttaaaaaattgaccattgtatggtagctcatgtctgt

SEQ ID NO: 418083 - DNA, 122 bp, Homo sapiens
agccgcgcctccttcggtgggcagccggccggaactcacgaatcagagcagccgacacatcgtccgctcagccaatcgtagcagatgtgtgatcccgccacctccccggaccctggcggttg

SEQ ID NO: 418084 - DNA, 122 bp, Homo sapiens
ggccttccccctgcacctgtttggttgtaatgcatccagttgagcatgatctcaggtgcccggtaccagcgcgtggccacatagccggtcatctcctcgtccgcctggcgcgccagcccaaa

SEQ ID NO: 418085 - DNA, 122 bp, Homo sapiens
atcctggagtccgagtccgcaaagtgggagggagggtgtagatgtgaatttggggaaaaacgaccctgttgaatttctagagtggaagaaacatagaactagcttttctctttgcttagcac

SEQ ID NO: 418086 - DNA, 122 bp, Homo sapiens
ggacgtggccctggcgggccgtgttggtggagtctcatttcgggttgtttgccgacggttcggatttttgccaccctgtttctagtaaagttagtctggtagtcttgcttccgctggttttg

SEQ ID NO: 418087 - DNA, 122 bp, Homo sapiens
ctagcaaggaaagcctctttggtttggcaacaatgcaattaagttttaggggtacgattccgtggcttgggatcccacatcctctccataaagcactgaagcctaggttgcagagatgagct

SEQ ID NO: 418088 - DNA, 122 bp, Homo sapiens
acagattgcattcaatagtagtttgaatagcctctttttataacccttatctctagctggcggcaaataaaatggtggaggaaagaaagaaataatttcctcttgatgtcaccaagagacaa

SEQ ID NO: 418089 - DNA, 122 bp, Homo sapiens
cgcggtgccgcagaccctgtcacacagctgctcccagttacgcagcctctccctgtcacccgcagagagcagcatcggtggccgctcagaagccacgacctacaagtaacccttcagacacg

SEQ ID NO: 418090 - DNA, 122 bp, Homo sapiens
cacagccatgcccagcggtgacttcccagagccatccggcggagggcccggttgaacaggcggctgctgtcctaagtttcacaaattgcaaaacgatgcagaaaagatggccgggtctccag

SEQ ID NO: 418091 - DNA, 122 bp, Homo sapiens
acccattgctggtagtcttgtttctgccccattatctggagaccagaattcacccacacacgtatggaggctggcaaacatcacaaccacctccaggagatggtttgctgaggggccagtaa

SEQ ID NO: 418092 - DNA, 122 bp, Homo sapiens
ctcaaattcagggaaattccacagaataactggcttggactcttcaaacatgtcaaaggtcgtgagagacaaagacgcaagaacggtttcagatgaaaggagaccaaagcaacaatggtgag

SEQ ID NO: 418093 - DNA, 122 bp, Homo sapiens
ggggtttcgtggtggtccatggagggggtttcgtggctttcggtggggaggtgttcgtggcgtttgcaattttcttgtggtttttagatttctttgtgctgagaacacgtctttgcagcggt

SEQ ID NO: 418094 - DNA, 122 bp, Homo sapiens
acagaggcagcccagccccggcctcccagcttacagctgccgcctgcttctcagacctgacggaatcagaaggtaggccacagaaaaattatttccaagccttggccttgttcagctggctg

SEQ ID NO: 418095 - DNA, 122 bp, Homo sapiens
tgcttgtggagtgttaaacaaaattaacacaggagaattctcagggcctggatggaaggtcgtgtgcaaggaggtttgatgacagagaacttctataggcattcacaggcttccagaattca

SEQ ID NO: 418096 - DNA, 122 bp, Homo sapiens
aggggaaaaggtgggtgcacagcgggttctcagagggtgctcctgagccccctggagctccgggtactcggccggccggcggccactcggcagcgctgcgggctgccgggaactgttctccg

SEQ ID NO: 418097 - DNA, 122 bp, Homo sapiens
agggaacaggaagaatgcaggctggctctccggctcctgggctgggtaccacaaaccacccgcatcaggagtatgaagccttcctttcttaacataaaggacttggtgtccaatgcctaacc

SEQ ID NO: 418098 - DNA, 122 bp, Homo sapiens
agatcactagaatttatgatcagctctgcccttgcaacctgccttccctgcagcagcaggcgaggaaggcagagaggctgagaggtcattggctgacatcagcaggtacaaagtatgccatc

SEQ ID NO: 418099 - DNA, 122 bp, Homo sapiens
cccccaccccacctctataccacgacccctctcccagcccggggactgtggtatggaggccgagagaggcccattttaaggaagaagcaagacatatgcaccatcccatccaaggagtaaac

SEQ ID NO: 418100 - DNA, 122 bp, Homo sapiens
cactgctcccagcctgattcatgcattcttaaattctagtcaaagaacattatatggtagcgatttcaaccagacaaaatgagtatattggttgttgaaagttttgactccctttctattgg

SEQ ID NO: 418101 - DNA, 122 bp, Homo sapiens
aagagggctttttattggagatcaggccatcctgctgcaatactgacccagttatatgcacgcattcatgcacttgtaggtatccttagaatataaactccccaagaaggaaattgttacag

SEQ ID NO: 418102 - DNA, 122 bp, Homo sapiens
ccctccctagtcattcaacttactctacttagccagctgtgtgccagatgctgtactaagcgcggtggatgcattattttatttaattctcactaccttataaaatgggtgctgttaccatc

SEQ ID NO: 418103 - DNA, 122 bp, Homo sapiens
aggtgctggggagcgcaaacacctggcctccccaagaggctggaggatgaggagggtcaccgactgagcccacctgataagtgaggccttttattaaacagccccatttgtaggcacttgca

SEQ ID NO: 418104 - DNA, 122 bp, Homo sapiens
gaattagatttttcagaactgcacaaccaaagatttgcacacttatttatagaggtgacccgtgagcttggttgaccctggatgcttttctgcgctataagggaacccgtgggtggccgatc

SEQ ID NO: 418105 - DNA, 122 bp, Homo sapiens
aaagtgtctctttttcacggtgtttccaccatgtttttagtggcatttctaccagcgatgcgtatcttgtatataatcatgaggaaacatcaaacaaatccaaattaatgggcattccacag

SEQ ID NO: 418106 - DNA, 122 bp, Homo sapiens
agtccaccctgagtgacctcctagagcagatggagctcggctcagggaaggctttgtggccgtggctcctgggctgatctctggactaatgttccggggaacaacagtgataataatatcct

SEQ ID NO: 418107 - DNA, 122 bp, Homo sapiens
agttacatcactttataaacgaaaagtactgacgctcgctaggatgtcagtacgtgttggcgaagttgtgtgaaaactgggaccctcataaaccgttggtggaaatgtagcgtgcagccttt

SEQ ID NO: 418108 - DNA, 122 bp, Homo sapiens
tctgctgttgggatcagaccgctgccctcccccatcctatcccatcccccgcccccagcccggcaatgaccacagcagtgctagccacatcgtcaggattcaagggaacagagaaaaagagg

SEQ ID NO: 418109 - DNA, 122 bp, Homo sapiens
gatcgagtatgaccaggatgccgagacgctcatcagcgggctctctgtcaactatgatgacgacgacgtggagatcgagctgaagcgcgcccacgtggacatgtacgtgcggaagctgaaag

SEQ ID NO: 418110 - DNA, 122 bp, Homo sapiens
gctgggctggggtcggggcgggggcggtgcggcgggtgcggggctgcggagggggcgtggcggccgcccgcgggcggagagggggcggggcggcggcaaggcgcgcgggcggggcggggcgc

SEQ ID NO: 418111 - DNA, 122 bp, Homo sapiens
acaatggcattcttgtctcacccagtgagagacaaagcaccccaaagccacagcatccaacggagatgccacaaaaaaggatgcccacccttggcttagctcatctcatacataactcttca

SEQ ID NO: 418112 - DNA, 122 bp, Homo sapiens
gtggaatcaaataagcaatgattatcagtgactggaaaagaaacagaacttgagttatttcgctttgccatcccctgtgaccacctggaatttctaaatcagtgtttaaaatttaaactggt

SEQ ID NO: 418113 - DNA, 122 bp, Homo sapiens
tagaccagcactatgagacagtccataagctctctgtgatcatggaaacgttctataatccgtgctgtccaaaacaatagccactagccacttgtagctactgagcccttgaaacgtggctt

SEQ ID NO: 418114 - DNA, 122 bp, Homo sapiens
gggcacccgaacacacaaatgccgggggagagctcctgaccatggggtcaggccctgtgccggatggcagatgcctaacagagatcacatcccgatgcccccaccacaggcaccagcagcgg

SEQ ID NO: 418115 - DNA, 122 bp, Homo sapiens
ccccaacttcgacgcgcaccacactgccatgctgacccgcggtgagcaacacctgtcccgcggcctgggcaccccacctgcggccatgatgtcgcacctgaacggcctgcaccacccgggcc

SEQ ID NO: 418116 - DNA, 122 bp, Homo sapiens
gctgtggagaaatagacgccttagaacagattctggccttcctgtttctctgttcctgatcgctccctttcagtgaaatggagtacagagagacagctgcacgctccatcgaccaggcatat

SEQ ID NO: 418117 - DNA, 122 bp, Homo sapiens
cgtattttagctagcttcgagatccgagtgtctgcgtgcagtcccgacggggctgctaggcgcggggctgcccagctagggacaggacgcggcgctctccactgcccgcgcagccgcgatca

SEQ ID NO: 418118 - DNA, 122 bp, Homo sapiens
caacagggacagaaggcaggtcccagaaagcaggttcccccaaaactggcttccctagcacggagttaaggctgcagccggctgcctagagagaagggtgggcagggagacaacgcggtgag

SEQ ID NO: 418119 - DNA, 122 bp, Homo sapiens
tagctcgttacccagaatgcccaccacttccggcgcttagacttcctcttccggtgtgggcggacgccagctccgcccctacccccgccagaggagatggtttctcccgccagcaggcgggg

SEQ ID NO: 418120 - DNA, 122 bp, Homo sapiens
aaatgcaggttcagaagtgttccactctgtaaaacaacaagcttcttattagtgatgctccgaaattccaatattatagttacagaattgttattatagttacagaattgaagtttccctac

SEQ ID NO: 418121 - DNA, 122 bp, Homo sapiens
acataggggcaaatgccagttggtccctgggccaggcagcttgctggaaagaggtgctttcggctggctaccggtgcgcggggaccacactcacaaaccgcattccggtcttcccgcccgaa

SEQ ID NO: 418122 - DNA, 122 bp, Homo sapiens
ggtctgagcgtctgagcccagatggtgcgcttgctccagagggcgggcggctccagtggccgccgcgggacggtggggccagaggggcccgtgggggtgggggagccgcccgcaggagaagg

SEQ ID NO: 418123 - DNA, 122 bp, Homo sapiens
cccaatgagaatgccttgcaggcagccctaagtacacctgcaattacaccattactagcgcggcagcacacatggccctgacttagtttaaataattacgtaagtcaaccatgattgtttgc

SEQ ID NO: 418124 - DNA, 122 bp, Homo sapiens
ctcccttctagcgtgagggagccgggaggcctccttctggcccggcagtgagagcgtcgccgcccgaccctcccgttgcagcaccggtacagacacgctgaccccgcggccttgtcgctggg

SEQ ID NO: 418125 - DNA, 122 bp, Homo sapiens
ggcgggcctgcggaaccccgaggccgttcgcgaggccccgccccgcgcttcccggggccgcggattggcaggagcgcagcccccacccccgagggtgcccccgcccctgcggcgccgagctg

SEQ ID NO: 418126 - DNA, 122 bp, Homo sapiens
cttccccttgcccgcagccaccaccaacccctcccctgcctctcggccctccccgccgggcggggccagcgacgccatcgtgacagctccttaaagggccagtgcccagcacagggttcggc

SEQ ID NO: 418127 - DNA, 122 bp, Homo sapiens
tgaggctttcctccagcccctggcactccatcgttgcccctaaggcgtcccaagtgcttacggattattgctccagcctcagcagctctctgctaaacaggctggtgtacagaagcagcccc

SEQ ID NO: 418128 - DNA, 122 bp, Homo sapiens
ggttttacattaagaagcagcaaattcattgccggggtgagcctgggagccaggcccgtgcgccggctgcgtcctcccaggcaggaaggtgaaagatgacccattcctcacgcggaaggcgc

SEQ ID NO: 418129 - DNA, 122 bp, Homo sapiens
tgccctaggatgcgccgcctgaacctcttttccctcgcgggcagcgtccgccacattccccgggttcctcggaaactccaatcattctaccaggactattggggcctggggtagcccctcgg

SEQ ID NO: 418130 - DNA, 122 bp, Homo sapiens
cctagagattgcagctgtttgtggtgaccaggaaatgcaccactcagatctcaggctgagcggaatggaagtgacatgactccagcttctgcattctgaaaccccactgtgttagtgctgat

SEQ ID NO: 418131 - DNA, 122 bp, Homo sapiens
aagcaccactccacatgtggacgcacaaagctacctgacgtctggctcaaggtgttcactcgagtccaggctgagctcatcttctgctccttccaccgtgaactccaattctgtgaactgcc

SEQ ID NO: 418132 - DNA, 122 bp, Homo sapiens
tccgggacccgcggtcctgagagcaacgagaacacgtcccgtcaactccccagcccctcacgcctcggttcgcccgctccccaagaaaacaaaagcgaattcagcagcactgacctctgacg

SEQ ID NO: 418133 - DNA, 122 bp, Homo sapiens
agtacactcaataaagattctcctgcttcaacctgaggtctccctcatactcccgaatcccgcaacaaggtgagtgtaatagttagagaaagcataggcctgaaaggagcaagctttgagaa

SEQ ID NO: 418134 - DNA, 122 bp, Homo sapiens
ctccccccgcctctctctctctctctttctccccctgataccttattgcactatagtaaccggttttcagaccacacttggccttgggtaaatgaaacacagaaagcaaaaccgcagatggg

SEQ ID NO: 418135 - DNA, 122 bp, Homo sapiens
tcatataagtgtcacaaaagaccagctacataatttgggcagccaagtgcaaaataaaaacgtggggccctttgttcaaaaacaactaaaactttgaagatagcaacaccagcgccttcttg

SEQ ID NO: 418136 - DNA, 122 bp, Homo sapiens
attgtagttcgatccggtcttctctgagcctcggagcgccttcagggagcgggtctgcaacgcccccggccacttgcaacgcacccgggcccactcacctgtcccgcggggcgtctcctcgc

SEQ ID NO: 418137 - DNA, 122 bp, Homo sapiens
cggcagtcagattctgcagtgaagtagaggcggtaaacttgaatgcaacgatcttcataccgcatcccacaaagccacgtaaatccaaaagcagtccgactctcgatagtgaaacacatgcg

SEQ ID NO: 418138 - DNA, 122 bp, Homo sapiens
tccggagcggggaggaggacgaggtcgagggaagcaggcgctgacggcgagccaccttcgcgccgcgctgagaaagggaagctcccggcacccgcccggccaggctagggccggatggtcgt

SEQ ID NO: 418139 - DNA, 122 bp, Homo sapiens
aatgctggagtaagaattatggttacttcatgcagtaactctcggccactagaggggggtcgtgaccaagcttccctctccctggccagctcctgagaccatcttgcaagatttgccgggct

SEQ ID NO: 418140 - DNA, 122 bp, Homo sapiens
tggggccaacttgggtagacgagacagtagaaacttctgttttctgggagctgcatgtgtcggattcatctgtcatggccttcccacacaccatcttcatgatgcaagcttggaactggaga

SEQ ID NO: 418141 - DNA, 122 bp, Homo sapiens
gatctcacaatcacataaatcactgccagcccccttgagtcaattcatacttctgtagttcgttagtggcacgagaggaaattgcatttattataattgcctctaattgcaccagattagtg

SEQ ID NO: 418142 - DNA, 122 bp, Homo sapiens
ttcgaagccccacaatcgcgacccaaggctgtcttcttttcgggaagaaagggcaggatccgtgaaaagaaaacaacacggtctgaacttgcctctgagaacccgcagggccgtaaacctga

SEQ ID NO: 418143 - DNA, 122 bp, Homo sapiens
tgcacacaaaaggttaattcaggcgctactgcttccacacagggcggccatctgcagcttcgggcggggcggaaggggaaatggtctcttttattgttcactaggtttcgccgtgcagcttg

SEQ ID NO: 418144 - DNA, 122 bp, Homo sapiens
cggtggtaccggctgcaatggtgtccaatcccgtgcatggcttgccctttcttccgggcacgtcctttaaggactctacggtgagcagttatctgccagactcccacctgtccccaccttcc

SEQ ID NO: 418145 - DNA, 122 bp, Homo sapiens
acagttgtacttgcaccaaaacagcatagaaaaccagagtgtggtgggaggacccgaagccggttgggggaggatgtgagtaggggcctggagggtgcagggtcattaatctgcggggagaa

SEQ ID NO: 418146 - DNA, 122 bp, Homo sapiens
caggaggaagtcagcggccaccaggctgaccaggaacaccgtgttggaggtccagggccgcgtgtggatgcagaagatgaagagggccaaactgttccccaccaggcccaggacaaactcca

SEQ ID NO: 418147 - DNA, 122 bp, Homo sapiens
ttcgtcactaggcttaaaattttccattgggaggccctggctttgttttgacacatgatccgttattaacacaccactcattttgggaggggaatatcatcaagtcccagccaggatgtaaa

SEQ ID NO: 418148 - DNA, 122 bp, Homo sapiens
ggttaaacctgaagtcctcctctactttctgggggaccctggccgtccttgctgagcctccgttgacttctctaatggggacggtaatgcctacctgaccacaagctgatgagtaaatgagc

SEQ ID NO: 418149 - DNA, 122 bp, Homo sapiens
acatctgcgagagctccatgttggtggaaccactgccacctcagctagtgagtacgcgggcgcccgcacggctctgccgggccgcgcacgcacgcgggggcgcggcctggccgttggggagc

SEQ ID NO: 418150 - DNA, 122 bp, Homo sapiens
ccgttcttgatggttgctgtctcttcggagctgttgggtacacttcccagacggggcgaccgggcagaggcgctcctcacttcccagacggggcagccgggcagagacgctcacttcctaga

SEQ ID NO: 418151 - DNA, 122 bp, Homo sapiens
gtctcagatgtggggagcgcctctgcccggccgcgaccccgtctgggatgtgaggagccccgccgcccggcagccgccccatctgagaagtgaggagcccctccgcccagcagccgccccgt

SEQ ID NO: 418152 - DNA, 122 bp, Homo sapiens
actgcgcccactttcgttggccccgccccctcctcacccggacagccttttgggcagcgtcgctgctgcctgccacaacagtgcgaggtccccccatgccgcagagaccgcgcaggtgggag

SEQ ID NO: 418153 - DNA, 122 bp, Homo sapiens
cggggcgacgcgaccggattggtgcaggcgctctgctgatcgctgtggaaactcgggcggcggggaacgcgggaggatgtggaacccgaggcggggggagccggaggggcgggcagaggagg

SEQ ID NO: 418154 - DNA, 122 bp, Homo sapiens
cctgaaatctccccacttacccaactagcctcagcgcctcctgtgtgctgcagcagatggcgcgctgcagaccccagcctggtgcctccgcgactcctccccaaccatgatttacaggcggg

SEQ ID NO: 418155 - DNA, 122 bp, Homo sapiens
gcacgagcttcctaaaaagactggtctgggctatgtgtgtgctaccccagaggcatggaacgtggtttagtcctcggttgactggcggaatttcctttactctgaaatttgtgtaatttgat

SEQ ID NO: 418156 - DNA, 122 bp, Homo sapiens
ctggggcccgtctttgtccttgaactggaccacaaaagagtcgaactggccctcaggaaccgtccaggagaggcgcagtgagtctggggtggggtctgtcacccacagctccccaaggcggg

SEQ ID NO: 418157 - DNA, 122 bp, Homo sapiens
ggattggggtgggaggcatcacaggcattcacaaggtcatgtgccagagcccactgtgtgcgtgtggtggtccagggtgggaggtgttgggagggaataaaagcaatttagcttggctatag

SEQ ID NO: 418158 - DNA, 122 bp, Homo sapiens
gaagaaagcaaaatttgttaaaaaactattatacagtggttaagaccataggtttggaatcgtagtttgtgtttagatcccagtatactttacttacgagctttttgatggtgggcaagtaa

SEQ ID NO: 418159 - DNA, 122 bp, Homo sapiens
ttatatccgtgaattggccttctttctagaaaagaatataaacatcttaaatatttaatacgtatgattccatacaagagtcatgtaatgcatttctgggagtatgatttattcataacagg

SEQ ID NO: 418160 - DNA, 122 bp, Homo sapiens
ttgcagggattttctctcctgcttctcccagtcccttgctgtcgcatattcataagaaggcggggtcgcttcccatcgcctttgaatcttccaggcttgtgggtgagaggaaaagatctggg

SEQ ID NO: 418161 - DNA, 122 bp, Homo sapiens
gaacctgctcctaatcagagccttatgcgttcccaaccctgaccccgccatccatccctccgtggggctgtgttcccagatgtctttggattctgtttaaaatgtccttgttaagacattcc

SEQ ID NO: 418162 - DNA, 122 bp, Homo sapiens
ctcattgagaactgcccgcgcatccctgacggtgcccaggaaggcagagtgggggagagacgacccgcactcagcctgtgtttagggaggactggacccagtgcggttcgcaagaggttctg

SEQ ID NO: 418163 - DNA, 122 bp, Homo sapiens
tcaaatcggcctgcgccggagaggaccgtggttgggttgagtaaggggccaaacccctggcgggcccccagtgtccgcacagccttcaccactgagtagttccgcgccttggagaccgtctt

SEQ ID NO: 418164 - DNA, 122 bp, Homo sapiens
gacaccaatctgatactggaaattggaaatcacctcgcaacatgtaaagtgtcctaaaaacggataatcaatggtatctctgtaagggtcagttagcttttccccattccatagtcacagag

SEQ ID NO: 418165 - DNA, 122 bp, Homo sapiens
aaggggcaggtgaactgggtctcgagggtgcctgtcatcttcttcttgggaggcggctttcgttttgactttctgcgccccatgtctgcaggtggatgagcctgtggggagtggcagatgtc

SEQ ID NO: 418166 - DNA, 122 bp, Homo sapiens
tgctgtgtggagactgctgtactgggaccatcagtatgaatactttcttctttcttcaagcgcacatttgtaataggcaggaccaagtccctttctacttggaattgccagcttgggctcat

SEQ ID NO: 418167 - DNA, 122 bp, Homo sapiens
ttttcacctgggcctccctggggggctgggggctgcctgactcttccctcctttggtttgcgcaagttttcccgcgcgggttcggatcaacacgccgggggagcccggcttacgtccctcct

SEQ ID NO: 418168 - DNA, 122 bp, Homo sapiens
cgccctagaaggagcagtgcatgctgggggttgtagtcacccaggtggccaccttgtcctcgcttgcttcgctttggtcaagggaactttctgttttagttctgtctattgaagaagggaca

SEQ ID NO: 418169 - DNA, 122 bp, Homo sapiens
tgcacctctgccgcagcctcgaggtgggcaccgtcatgactttgttctactccaagaagtcgcagcgacccgagcggaagaccttccaggtcaagctggagacgcgccagatcacgtggagc

SEQ ID NO: 418170 - DNA, 122 bp, Homo sapiens
gggaggtaggatggggcatatttccaggggtccgggcaggttgtgtggcttggaggcctccgagggccgtcgacgtcagccatggtccgggcagagccccgcaaggtgccacagtatcgggg

SEQ ID NO: 418171 - DNA, 122 bp, Homo sapiens
cccaatgggggaggcagagtatgaaaactcgtagtgagagcaggctgagttgggagtcgccgtgccagcctcaaggtctctaggagagaggggtcaacaaccatcccctcgccagctcagct

SEQ ID NO: 418172 - DNA, 122 bp, Homo sapiens
agttttaaaacaaagaacgccgagctcagggttttctctctgtccagacagaggatggggcgtgtgacccagggacccagagtatgttgttggatctcaaatgcctacaaaaatgacagaag

SEQ ID NO: 418173 - DNA, 122 bp, Homo sapiens
tttctcttaaaaaaaaagtgcatacattttctgcagactgagagggcatgggggataagacgcaggtggatttcagataatcaaagtcaccctgcatctcctattaagcagcttgaacttta

SEQ ID NO: 418174 - DNA, 122 bp, Homo sapiens
atcacctcttgaaatacacaaaactcttctagtttcctggttgaccgacccagggcttgacgactccttttgagccacctgacaattcagtccagcacagcaactgaaggaaggcgttcccc

SEQ ID NO: 418175 - DNA, 122 bp, Homo sapiens
caaaagactagtaactaaaatgagatggaaggtcatttttctcccatgttcaattctggtcgggacagcccaaggctggtatgatgttctatggcattaggaacccagttgcttcacttctg

SEQ ID NO: 418176 - DNA, 122 bp, Homo sapiens
ccagagcttggggcacacaggtgtccaggaagctggtgtgtgtggctccagagtgccaggcgggagagccggaggcggtgaagggtcgggcggcggccgcggcgtgcttggggctgctgtgt

SEQ ID NO: 418177 - DNA, 122 bp, Homo sapiens
tagaatataatcctggggcaaagttggaagatatgaaatctgggttgataaagcttcagacggtgaactctacagaaggcaaccatgacccagaattgcaggttgcaaaactctctaagttg

SEQ ID NO: 418178 - DNA, 122 bp, Homo sapiens
aaaatttcagtcagtaaggtgaaaatggaccttgagtacccctgcctgttccaggccctccgccgtgttcccctagaggcagatgctgtcatcagtgtggcatgccttcttccaggctggtt

SEQ ID NO: 418179 - DNA, 122 bp, Homo sapiens
tcacagccgcgccagtgtgaagagcactagggcgggcgcgccggaaatacgtcacgggaacgccggcagcgcgtgaagttggtgaggcctgggccgcggcatacttccggcctgagtccggc

SEQ ID NO: 418180 - DNA, 122 bp, Homo sapiens
ttttttttttttttctaagcagcaagccacgcacctcccgcgctggcgaaatccgagacccgccccttccggaagttttgacactttgtgcgccccgggcaatgcgattgagagggtaatca

SEQ ID NO: 418181 - DNA, 122 bp, Homo sapiens
gaatctcctgtcgaacatgcttcagacaccctattgagaagcttaaacataagaaacatacggagaaatgaaagaataaaatccagaagattccacaaaacgatctcctttttgcaacaaat

SEQ ID NO: 418182 - DNA, 122 bp, Homo sapiens
ctggtatccttgaatattttcagctttatgtgaaagctgcctttcctcagagtctcagtccgtctctctctctttctctctctctctttttctgtgtctctctctctcgctgtctccctgtc

SEQ ID NO: 418183 - DNA, 122 bp, Homo sapiens
gccagacactccccaggcagccttcctctcctggactgggacgcccccacagagccacaccgtgaccctcggaggcaccctgaagcataactgggccaaccgtgcctgcaggaagccccttt

SEQ ID NO: 418184 - DNA, 122 bp, Homo sapiens
cccgggggccagaggctgttcagttgtgaaacgaaagctcagggtttcgccagggctgcccgggaagcggtgggcctggaagccatgtgccagaggatctagcaccgccatgagaggcctct

SEQ ID NO: 418185 - DNA, 122 bp, Homo sapiens
gactcggaattactgccccgcgggtctgcattttcacagcggcaggtgtgagttccccgccgctggagaccagaagcctgaaggcagctccgcccaccccagcccacagcgccgttattccg

SEQ ID NO: 418186 - DNA, 122 bp, Homo sapiens
cctgtgcatacgtatgtccatccaggcatgcatgcgtgtttgtatacacacatatgcacacggaatagccatgtacattgaagcaccaaactaggcagctggataatgggagagtcggctgg

SEQ ID NO: 418187 - DNA, 122 bp, Homo sapiens
ctggagatgcccaccaggcccaggtgacgtcagagtcagtctgggaacaaggcagagggccgggcaccttcccaaacacagccccacccccgcggcctctattgggcagaggcaggaagtcc

SEQ ID NO: 418188 - DNA, 122 bp, Homo sapiens
ttgatgctgaagtcttttccacactggggacacccatagtgtttctcccgagtatggattcgtttgtgtttgcttaggtctgagctccgactgaaggcccttccacacttgctgcactcata

SEQ ID NO: 418189 - DNA, 122 bp, Homo sapiens
ggcctgcggaggtagtttcccctgtgaagccagggactcagccaggagcgtgaggggacccggatcctgagtctccaagccgcccactaccctctgctttaccggatggaactcatcagtaa

SEQ ID NO: 418190 - DNA, 122 bp, Homo sapiens
ggaggggattaatgagacagtgtttgcaaagcactccgaggctcgctgagggaaaaggcacgttagtcatataaatgtggatatctggagttggcactcgtttgtccctgtgtatctatttc

SEQ ID NO: 418191 - DNA, 122 bp, Homo sapiens
caccacaaacctattgaatcagcatctgtgggcctggggtcctggcttctggctgtgtaacgggctccagccggtttttatatggccagtgtgtcactgatatctccagacccacttaccta

SEQ ID NO: 418192 - DNA, 122 bp, Homo sapiens
agccgggcgcagctcaggctcccgcatccgctcggcctccgcccgtcccccgccttcctccgggcactgccttgtgcattcattggctcatcctggtatttagcagtcgtgggctgggcacc

SEQ ID NO: 418193 - DNA, 122 bp, Homo sapiens
ttcatctcatgtattcgtgtgctctctgctccccctgactctagacaatgtaaatggactcggtgatgggaggaggcatttatcagcatgtgagatggataagggtgtttgaaggtatccgc

SEQ ID NO: 418194 - DNA, 122 bp, Homo sapiens
tgctaaaaaaaaaaatacctctgctttcttttttcctttcactttttgaaacgaagagagcgcgataggaagtaggaaagggtgggcgaggggccctgggcggctgctttcgctctgcgcga

SEQ ID NO: 418195 - DNA, 122 bp, Homo sapiens
ggcggggtagagcgccggaaacggctttagcggctttgggaattgcgggcgaaagttaaacggagagatcttagagatttgcccgcaaatcgaaacaaaactgcccctactaactctgtgcc

SEQ ID NO: 418196 - DNA, 122 bp, Homo sapiens
cttcagcggcatagtacctgttgcccgccatctgagggaggtgcaggtgccaatccttcacgtgacgtgacgtggctcaccacagcctgtgtacatgtgagcagccgcgtgcagaggggaag

SEQ ID NO: 418197 - DNA, 122 bp, Homo sapiens
tttccatgagggcggtggtggcccttaaaagggcctttgtggtggcatggggaggcctggcggccggccgcggcgcgggccctcttagtactcctgggaggcctgggtggccttcttgccgc

SEQ ID NO: 418198 - DNA, 122 bp, Homo sapiens
cagttattggagaattcgccacggattaattctccggatcgagttacgtgcggtagtgagcggacaaactcaagcaaagcactgtttatgaagctatttttgtgtcttgagtcattcataaa

SEQ ID NO: 418199 - DNA, 122 bp, Homo sapiens
acgcccggccaaggggcgggcgtcacatggtgggcgctgtggctgcggctgcggctgcagcggccccaggtgcaaacagactgccgccgaatgtgagcagcgaggcgaggggtcgaggtagc

SEQ ID NO: 418200 - DNA, 122 bp, Homo sapiens
acagtgatttctggcataaagtcataactttatgcctcagttccctcattagtaaaatggcgatgagagacctacctcagtttgtttgtttatttattttagacagagtctcgttctgttgc

SEQ ID NO: 418201 - DNA, 122 bp, Homo sapiens
ggccggggctggggagaagtgcggcggcctcccctccgcctggccgacgcccgggaaaggcgctgctgaggtggccgcccaccgcccacaagcagcccggcccggcctttcctaaaacggag

SEQ ID NO: 418202 - DNA, 122 bp, Homo sapiens
gggcggggcggcggcggccgtgagcgccgtgcgctcctggagacgcggtgctgacgcgcccggctcctcctcgctgcattttaattcctggccactgtggccgctgcacaccgagcgggaag

SEQ ID NO: 418203 - DNA, 122 bp, Homo sapiens
aaaatcctgatgatgacggcattggcgggcccagcacgtgcagcaacaattcagctctcacgtcgtcttccacgcaaacgcctcatccgcgaggacctgcgccagcctagcgttgaagggcc

SEQ ID NO: 418204 - DNA, 122 bp, Homo sapiens
gcgacgggaactccagaacagccaaggaaacgcaggtcagaggaccaggagaccaatgcacgggagaagccacaggcgcccctgcacactcccagtgctgcgcgtatcagagcacgggtttg

SEQ ID NO: 418205 - DNA, 122 bp, Homo sapiens
tgtggagctaaaaagaactcccttcactgttccagcaacattgagttctgtttgttaattcgccaaatgaaatgatgtttctgtttacaactttgtctttaattttgccctgtggataattt

SEQ ID NO: 418206 - DNA, 122 bp, Homo sapiens
agatcattcgatcttcagtccggactctaactcaagcccaggatgcaggccagggaggcccgggcatgtgccgatggggcaggctttggggaggtaggtgggaggagagaggttgttggtga

SEQ ID NO: 418207 - DNA, 122 bp, Homo sapiens
ggacatgaggttggcagagggcaggcaagctggcccttggtgggcctcgtcctgagcactcggaggcactcctatgcttggaaagctcgctatgctgctgtgggtccagcaggcgctgctcg

SEQ ID NO: 418208 - DNA, 122 bp, Homo sapiens
cggcggacgggaaggacttcttttctgctgaagctgcgaagcctgtgtcgatctctcattcgtggggctcccggggcgcggggtgcgggtggggccggggtgcccgcaccggccggggggaa

SEQ ID NO: 418209 - DNA, 122 bp, Homo sapiens
gcatggatgggattggcgggcatcccctgcagagctcttcctgagtcctgtctgttgcagcgctggggcccatccctggtcaccgggcagcagaggcagcgttctcaggcagaatcgcaggg

SEQ ID NO: 418210 - DNA, 122 bp, Homo sapiens
gtgcatgtatgcatgtaagaaagagaagagagagagagattgtgagaggcaggagagagacggggagaggccatcagaacttggggagagcagagcccgcctgcttcctgagtgaagcattg

SEQ ID NO: 418211 - DNA, 122 bp, Homo sapiens
aatatgtaagccacacatggtctatgggatgggcctttaactgggaaactgccataaatccgtgaagtcaggtaggacagagccagcaggagctcatgtcgtgtacaagatttcttcctgtt

SEQ ID NO: 418212 - DNA, 122 bp, Homo sapiens
cagttggagcaagggctgcaagccttgaactgcagtgagtggggagctggcctaaaaagacgggaaaatgctggggggagggtgtttgtccccacgcaggggctgagaagactcctgacaga

SEQ ID NO: 418213 - DNA, 122 bp, Homo sapiens
gcctgcgtgtccagcggaacccttcggccgggtagggtcggagtgggccaggccgggggtcgggacagggctggggccagaccgggcggctgggggcgggagggaggccgcttcaacggccc

SEQ ID NO: 418214 - DNA, 122 bp, Homo sapiens
tgggccaggagagctcttggcagctgtgtcatccctcctgggtgaccctggcttctgttccggggaagcccccatccctctcattcaccccatctctgctgggaccctgtggctcccgtagg

SEQ ID NO: 418215 - DNA, 122 bp, Homo sapiens
gcctgacgggagaagggacacagacggagggtttaaggccactgagctctcaggacggcccgagtacccgagctctgagccagcaggagcaggagggctgggctgcgcctccagccccgggg

SEQ ID NO: 418216 - DNA, 122 bp, Homo sapiens
gaccccagcagggcccctgagctccatgattctgcactgcctgggccttcccgccagagccgaccctggcccccaacaggaggccgagctgccctcaggggcctcttcacggtgggcaggcg

SEQ ID NO: 418217 - DNA, 122 bp, Homo sapiens
cattaccacaagatgaacaggagcctctccttcattcatttcacagcaacacagacttggcgagcttaaacaatacacaggccgtctggctcatatgcaacaaaattaagccattaaatagg

SEQ ID NO: 418218 - DNA, 122 bp, Homo sapiens
ccaagatcctggggatccaggacctggaatcagaactgaggctggcgccgtgggtgaggccggtggagccgaggaccctggggctgcagccgggggttcagttcggggaagtggagctgtcg

SEQ ID NO: 418219 - DNA, 122 bp, Homo sapiens
ggtgctacaccatccccatttgttggggtgctgcctgggggagctgggtctccaggttctcggacgccaggctccctgcctctggtcttggcagcctcaatgcctttgactcgtcgggcgtg

SEQ ID NO: 418220 - DNA, 122 bp, Homo sapiens
ctgtctctatcaagaggggctgtcctaaggcctggccccttcaggccggttccccggagccgggagcccagtagcaaagagcacacttgctgggagagggtttctaaatggggttgtgccct

SEQ ID NO: 418221 - DNA, 122 bp, Homo sapiens
cttggggtacacgcccacgtgtaagagtaagcaaccacagctctctagacacactcatgccgccaatctcatgaaataagaggtaaggaccttgcaatgattccgttttcgtcactcacccc

SEQ ID NO: 418222 - DNA, 122 bp, Homo sapiens
catgtaaaacggcagtgacgtctgagggtccctggacgtctttcacacccagcctcaaagcggagcctttccaggcagagcagcagctgccgccactggattgacagccccagagcagcggg

SEQ ID NO: 418223 - DNA, 122 bp, Homo sapiens
cagggcttgcgcggcgtctgggaagagtgcaatctggggggacgcctcccgtccccccagcgcagatgcatgactggggtaggaatgatctttgctgataagcctttttctgtttgcttcaa

SEQ ID NO: 418224 - DNA, 122 bp, Homo sapiens
ctcctttatttgccaccaatctcctaatgttctttctggtgttccctggctctactaacccgtggaaacctccaccatgtcagctgaagctacagctgaagtgaagcaggtgtatctcaggg

SEQ ID NO: 418225 - DNA, 122 bp, Homo sapiens
cgcggttgctatgggagacctggcgcccggcctgggagcgacaggaaggcgagctgtggccgcgacgccttccgagaaagcaggtcgctctcggaacggacgtttgtgtgtggtttctgtgg

SEQ ID NO: 418226 - DNA, 122 bp, Homo sapiens
ctgcctcgtgggtttgggggtccagcctcacatctcctgaggcctgcagggaggggccgccgccgcagctcccggtgaagcttacccggatgggggctgccagacaccccagcttcccacca

SEQ ID NO: 418227 - DNA, 122 bp, Homo sapiens
ggaggctcaaaagtccagaagatcccatgttgaagagaggccagcctttctggtggttcccgaatttggaatgctcagctgctgcaccttggatataagaactggagacaagccagccaccc

SEQ ID NO: 418228 - DNA, 122 bp, Homo sapiens
cgccccccgggcccgagtggcccggcatctgcgggcgctgggggtcgggctggggaaaagcgcgcgccgggccgggtgccgtgccctccggcggggccggctcgtcgcccacgccggcggcg

SEQ ID NO: 418229 - DNA, 122 bp, Homo sapiens
cccagcgaccgcgcaggccgagccgaaagggagctccctgctggcggctgtggggataaacgcccggcctgcctggcagcgccagtgcgcgccgccagacgtgggccaggcgggccgggcgc

SEQ ID NO: 418230 - DNA, 122 bp, Homo sapiens
gcatggagtgggcttcaggcttgactaactctatggactggaaaaaggcatgggatttgtcgtcatttgctcctgcgatacattggcttcttccagatagaagctgccatgctgctagaagc

SEQ ID NO: 418231 - DNA, 122 bp, Homo sapiens
atcttaatcacatttccagttcattaaagaagaccaggcatcttccctggagacatcaggcgggtgcaggggaggaggagggaaagcaagcacatctcagtggcaggcagcaggaggagaga

SEQ ID NO: 418232 - DNA, 122 bp, Homo sapiens
gaggccaagggcttgtgtcaagctctgcattttgccccgcaggggaacctctataccccgcgattgaactcgaaagactcctcccggcggatgaaagccgctactccctggctggctgagct

SEQ ID NO: 418233 - DNA, 122 bp, Homo sapiens
gaaccttgtaccaagtttctatttttaagtattaacgagacataaacactgttttgtatacggttaacccaaacgagttagctgtgcctgtgttttgtgtgattctattactttaggaagat

SEQ ID NO: 418234 - DNA, 122 bp, Homo sapiens
taccatttggggacattgccccaaaaggacgggctttggcgtgaaagaacatttctaccccggctgtttgtgtgctgtcatcccaggtcagggctgaataatgaccacttggtagacctggt

SEQ ID NO: 418235 - DNA, 122 bp, Homo sapiens
aaaacatcagctctcttctacttctctcaatcccagctaattctgataaggtcttggaagcgcaaaatgatgtcttctggaacgttctgaaagagaccaaaatctacccacacagcttcatg

SEQ ID NO: 418236 - DNA, 122 bp, Homo sapiens
aacagtcttcttcccctgacctggcagatggggacgctgccccttagaagcctttttccccgcaatacgggacgccgcagaggtgaaagaccaagaaggtggagcaaacttttagggagcgc

SEQ ID NO: 418237 - DNA, 122 bp, Homo sapiens
ttcattcagtaagaaagcgccccgtcccaaatctaaataaaccttacatagatgaggctccggaaattatcagcttgattctttatgaagatagttagaggtggataaatcaatagactcgc

SEQ ID NO: 418238 - DNA, 122 bp, Homo sapiens
ttcctttttccgcatctccttccttttcctgcatctccgttctctaaatacagaacttatcgagctggaagaattctttagatagcagccagggtgcaaaaaccgcttgctcgttttcaatc

SEQ ID NO: 418239 - DNA, 122 bp, Homo sapiens
cagccctaggctgctgcccaggctgctggtgtcgctcctgagtccagctgtaaggggcatcgagtggattctcaggccccgtggtgcctgggcttcggcaggtgctggttcgtgtggagcat

SEQ ID NO: 418240 - DNA, 122 bp, Homo sapiens
ataacccatagagggcagctgctctcactcatggggtattaggaggtggagtgaccctctcgctagcatgggacagaagcagcccaggccagagccaaccacgggcactatcctcacttctc

SEQ ID NO: 418241 - DNA, 122 bp, Homo sapiens
agcccaaggagcccatgattgctggccttcctgtctgtcatccctttacaaaatcctctccgcaaacctgagcggcatgctgtcagagctaataacgtcttctgaaggggctggggggcggg

SEQ ID NO: 418242 - DNA, 122 bp, Homo sapiens
gttcccatcccgggcttcgctgttccatgctcacaaagcctcttccgaaaagaaatccctcgcttaaaagagcagcatctcttcatccagggtcagagtcagactccgccggcgttcagttt

SEQ ID NO: 418243 - DNA, 122 bp, Homo sapiens
acgggctcctgggcccctggatctgtgccaccagggacaggaccgcaggccgaggccccacggcaggtgctttgcatcaggctcccacccaggagtggtcgagtgggcctcccgtcagcctt

SEQ ID NO: 418244 - DNA, 122 bp, Homo sapiens
ccactctgcagcgcttccctggggttattattccactaccagctgcataattatttcatccgtaattattggactcagcccagctcacttctgcccctggcctttgcacttgctcttcccag

SEQ ID NO: 418245 - DNA, 122 bp, Homo sapiens
cgtggaaactgagtcccgtgtggctctgtgcgtgggggctgagtcccgtgtggccctgtgcgtggaaactgagtcccgtgcggctctgtgcgtgggggctgagtcccgtgcggccctgtgcg

SEQ ID NO: 418246 - DNA, 122 bp, Homo sapiens
tgagtcgcggggttcgctcacccaaagccacagcgaggagcagagacagggacttcatggcgctgcgacctcctcagccatgaagcctcctcttcctcctttcactttcactttcctccaaa

SEQ ID NO: 418247 - DNA, 122 bp, Homo sapiens
gcagacgcatggtggtcttcctgttcctgcagcattactcccaattcagtcttacctcagcgcctttgcatatgctgcctgtctgcccaggtcttcgcatggctggctttacaacagtcaat

SEQ ID NO: 418248 - DNA, 122 bp, Homo sapiens
aagcgtgccaggtacagcacatgctcaggagtgttcctgtctcctcaacttgggttcatacgacacggatggggcgcaggtaccgtacggggtacagagagggacagaaagcagggtttaag

SEQ ID NO: 418249 - DNA, 122 bp, Homo sapiens
ttttgctagagaggccctgcggttttccacctggacagatacttcaatgaagcacaacttcgttgccacgtctcccgtgaggttttccccgtgatattagactctggagccaagcagcctgg

SEQ ID NO: 418250 - DNA, 122 bp, Homo sapiens
tctgcagctgatattggtgccacggtttgggcagcggagttccactcttacctttcagtccgaatgaggaaaacagatccatttgaaatatgtatgttttcggcttttgtttctgctgtcgt

SEQ ID NO: 418251 - DNA, 122 bp, Homo sapiens
tggtggctacaggcccccagggttcttcactcctgcaaagtggaggctctgtggtggagacggcataaatcagagatgctggttccagctgcagggaggggccactgtccctgctttggccc

SEQ ID NO: 418252 - DNA, 122 bp, Homo sapiens
cgggcaagaagctgctgcccgaggcgtcccggctgaggtccaccgggtatccgtcgctgccggtctgctggcgttagtgaagaacaggcacatgcgtctggttgctgttttgttttatataa

SEQ ID NO: 418253 - DNA, 122 bp, Homo sapiens
catcgacatcagcaatttcaaattaaaagagggcttatctctcagggcacaatttctaagcgtttcaaaaatggtttacatggcaccagaagagggcaagccattagcaaatcacttctgag

SEQ ID NO: 418254 - DNA, 122 bp, Homo sapiens
gtgagagaatgtcccatagccttgagggttggaattgtgtacattgacagcatagtgccacgatacaggctagcatgagttctggaggcaaacttggattcttactatttttaaagatgcag

SEQ ID NO: 418255 - DNA, 122 bp, Homo sapiens
acagcaaatgtgctgaggtggcaaatggctttcaagtgtctcacatgtgcccttgaggggcggaggtggggcttatcttgagcatctcctatgcatcaggtattcctcctacaatgtttaat

SEQ ID NO: 418256 - DNA, 122 bp, Homo sapiens
gctcctccccccgctcctccccgccccacagagtcgatctctcctctcctagacccaccccgctcccccaggctccacctcggcctctcagaccccgccccgtcagggccctcccggccttg

SEQ ID NO: 418257 - DNA, 122 bp, Homo sapiens
aagcgatctggaagcagaggggaagcactgggagaggggatggtgtcaagggcagaaagacggaaagagccacaaagacaaatgcatgaggacagaaaaactgagggctgtgattcaggcag

SEQ ID NO: 418258 - DNA, 122 bp, Homo sapiens
tccatcaacagagagggggagaaacaacaggaactctatccaaaccttagaatagcattccgtaggccaaaggtgcaaactacggacacgcgccccaacacagatgagcctcaaaaacattg

SEQ ID NO: 418259 - DNA, 122 bp, Homo sapiens
caccgtgtccagccccaaataatttatacttcctaaggaatgaaaagagggttctatatacgcaatttatttgtgacatatagtacatttgcattttgtatgtgcaaacgtaacattaatta

SEQ ID NO: 418260 - DNA, 122 bp, Homo sapiens
tccacggggttattttgcaggtcgtgtcctgccaaggcagattcagtaggacggaataagcgaatgggatgcagacctttcccccgtcttactgcttctaagatgaatagcgttatgtggac

SEQ ID NO: 418261 - DNA, 122 bp, Homo sapiens
cagcccctacgtggggccgcgggaatcctggcatccctggttcgcatgcacagtgcgtgtcgtgcccacgggggtgcaccccaaagtggcaagaaggcacaaaagaggagataaggtttgaa

SEQ ID NO: 418262 - DNA, 122 bp, Homo sapiens
attgtcttcaatatggctgctggctctgccccgatgcagctccaccttcgtgctaccatccgcatgtgagtggtaaggaggcagaagcatcactgggttcagtctctgcccaaagtgtgaga

SEQ ID NO: 418263 - DNA, 122 bp, Homo sapiens
ccgcagccgccgagcttgaagcacatctgctcgcacatctgctcacagggaggacgcaggcgggagccggccggctgggggactggggcgctgcctcgccatggtgcacaggctgagctcaa

SEQ ID NO: 418264 - DNA, 122 bp, Homo sapiens
tgcagagcagagtgtggaagagccacatccttgctggagcagaggcggctgtgtgggagccgaggcgagtgcgacacatgggccgtggcccactcagcttcccctcagccaggaggccagga

SEQ ID NO: 418265 - DNA, 122 bp, Homo sapiens
cacgtgcttctgacgtaccggtgggtggggtacggggaggcgccatacctggatgtacatcgtctacccctgtgatgaaagatcctttctgatgctatgaaggggcacaggcccccaaggca

SEQ ID NO: 418266 - DNA, 122 bp, Homo sapiens
tgcccctagaaggtggagagggtgatccaggacctctaggacactggtcctagggaatcccgacagtcttccgtgaacatttacggatgtctgtactgactgaccctccaggaaggccattc

SEQ ID NO: 418267 - DNA, 122 bp, Homo sapiens
gaatcaggaattcaggagaagagcttgaacaaaaagggcaaagacagtacagacttaccgcggggaagtacaaaaccattctagaggaccacgtcgaagtccacatggacagaaacattagg

SEQ ID NO: 418268 - DNA, 122 bp, Homo sapiens
gggctcggtgcagggaaccggcttccatagggacggccggctcgggtcgctggactgggacggggtgcactggcgggagccccgcgatttcctcggtttctgagcaagcggggccacaaggc

SEQ ID NO: 418269 - DNA, 122 bp, Homo sapiens
gcaggagggttgctgcacctgcagcaccaactttggggcgctgcctgggggctgcggaggcggggcggccccgccccacctttttccctccaacttggcgtaactcccccggtggctcggga

SEQ ID NO: 418270 - DNA, 122 bp, Homo sapiens
gagaatcagtaccatgagaaaactgtctggagtaatcttgacttggctgctatgattttacgagttatttctagggagtagcctttgtaaatggccttggggaatcacagcaccatcaccga

SEQ ID NO: 418271 - DNA, 122 bp, Homo sapiens
agatagtcattcactcaagtggaggtgggtccgcataagaggacctctaaagacccctcccggtcataggacctggggctcaggggccagactgctgacctggtcagttcctctagggctgt

SEQ ID NO: 418272 - DNA, 122 bp, Homo sapiens
atctttacacagcatttctatgcaacggaccacacacaaaacacgcctgcagtcatgtaacggcggtaacatttgttgaattcttactatgtaccaggcgtgctttcaagctctgtgtgtgt

SEQ ID NO: 418273 - DNA, 122 bp, Homo sapiens
gccgtgctcccctcgctagccctcagtcgaaagcctcctcgcttcggctcagctcaaactcgatttggggctccacccaccgcaagcgaagccccgcccctgcccctcgggagggagctccc

SEQ ID NO: 418274 - DNA, 122 bp, Homo sapiens
gaaatgcaaagcattggtggccctgccatgggaatacaggtttctgttctttggaggcaccggagaaactaggagttcggtcagcaccttaaggcgctaaaagtgtacgtgggggtggggcg

SEQ ID NO: 418275 - DNA, 122 bp, Homo sapiens
cccactacaatacatatagacttttaggagcaaaggattctcctatcttagctagaattgcgaccttaattatccatccaaacccccctaaccaaaagttataaacctgtgatcctcccagc

SEQ ID NO: 418276 - DNA, 122 bp, Homo sapiens
ccgcccaggtacgtgtcgggacagcgcaggggactggcttggggcggcggtgggtagcggcgcccgcgcggcgctggaaacggccccgcttccttggaccccggggcttgcagggcgggccc

SEQ ID NO: 418277 - DNA, 122 bp, Homo sapiens
gttgacttccagaacccttccaaatgccagcaggtggcatctggatgtctgggggcacatcgtaggttttcgggtcctggaattattttcaatatagagatggaatctcactatgttgccca

SEQ ID NO: 418278 - DNA, 122 bp, Homo sapiens
aggtgacggccgtcgtgagggaacacgggacgcccacgtgccctccaccacctcctcccacggcaaccctcgcagagtagccaggaccacattcggatccggactctgaaatgacagtccca

SEQ ID NO: 418279 - DNA, 122 bp, Homo sapiens
aacgcttctccatccacctcccttcctgaccctgggtttggaggtctcctgcccccaggccgagagtaggtgctcccaccgctacctgccgcatcccgcacagccccctgcccgccctgcga

SEQ ID NO: 418280 - DNA, 122 bp, Homo sapiens
atggcaggcctcgtggaagtgtttagttagttctcccctcactgatgctgatccaggatccgtctcttcctcacctggaagccgagctgcacgtgccccttgtggtctgtagcgccacgcac

SEQ ID NO: 418281 - DNA, 122 bp, Homo sapiens
ccttaaaagaatatggaagaggctggccaatcacgtacgttattcggcttcgagaccccgcgccacgctgaggttaatttatcgccgtggcgaacactccgcggtttggaactctgattggg

SEQ ID NO: 418282 - DNA, 122 bp, Homo sapiens
cctgggctcaagagattctcccaccttggcaccccaaagtgctgggattacagccttgaacgactgatcccagcctatttttagagatgggggtccagtctgcccaggatacagtgcagtag

SEQ ID NO: 418283 - DNA, 122 bp, Homo sapiens
gctgcagcaggagtaggagcagatgaggcgtcttgccaggaacctcaggaggagggggcccgggacctgtgtgggacctgtgtcctgtggtggccgtttgcagtttctctctgtgttgtgat

SEQ ID NO: 418284 - DNA, 122 bp, Homo sapiens
tgtattatgtatggatacatgttgtgtttttaagaaggaaataattgacaactgtaggtccgaccgtcattgctcaaagagagtgataagaaattgtgcaattgctggcatttcacattgtt

SEQ ID NO: 418285 - DNA, 122 bp, Homo sapiens
ccccacggtaaacaatatggaaatcttaaaaatagcgatcttcctgtgcgtgtccacctacgcgccccggggtgacctggcggggctgtcgccgggtgactcacacccctgaaccgcgaagc

SEQ ID NO: 418286 - DNA, 122 bp, Homo sapiens
ctttgcacttaaaaggattgcctcactataaatctgaagattagctttccagccattgaacggtgattttgagccactgtttgccaaatcagacaggcctgagttagtgcttgctgttgggt

SEQ ID NO: 418287 - DNA, 122 bp, Homo sapiens
ttatttaagcattccagtgaactttaataacagaaatgctgagagaagggtttgttctagcgaactgagaattaagaagaaaagtcctgcattgttagatcttaatgaagtaaagtttaaat

SEQ ID NO: 418288 - DNA, 122 bp, Homo sapiens
gcccagccgggacgaggccctgcctccagccaacgctccgcccagaacgaagccccgccccggaacgaagccccgcctccagcaactctctgcccggagagaggcccgacagctgcgacccg

SEQ ID NO: 418289 - DNA, 122 bp, Homo sapiens
aggtggggttttccttttgattcagttataggaagtcagcacaaatcggccttagtttcccggcctccacaccctattctcctgtctcactgtggtttctttgttcacctttatctgtttaa

SEQ ID NO: 418290 - DNA, 122 bp, Homo sapiens
cagtcaccttggagggtacggcagcccaggccgggaacgtgccgcgatcgcgggtgacagcgacccctgtgatttggcttcttgctgggaagccacagcagcctccaccaccctcagttctt

SEQ ID NO: 418291 - DNA, 122 bp, Homo sapiens
tcgttctcttcttgaaggccgctctccttaagcacgtaacccggctactttccggtactgcgatctcattggctgcatgttctgtcagttccagaagctggccaatgagatgccgctgctgg

SEQ ID NO: 418292 - DNA, 122 bp, Homo sapiens
gatcgtatttgaagtgttggtgccacacacaccttaacacctgcacgctggcaacaaaaccgtccgctctgcagcacagctggggtcacctgacctttctcctgtcccccccacttgagctc

SEQ ID NO: 418293 - DNA, 122 bp, Homo sapiens
accctgggcgaaattttcaagtgattacatcattgcccttctgagatcgcgcacacacaccgccaagcaggcatgcgcacatccatgtgctcaccctctgcgggacccagccgctccccaca

SEQ ID NO: 418294 - DNA, 122 bp, Homo sapiens
tcatgttacatctggacctgtcacatagccacaaccgtaactgtacatggagaatcatgtcgtgtgtgctgtggacaagccaagaggtggctttgtgtgctcttctgccacacagaagagct

SEQ ID NO: 418295 - DNA, 122 bp, Homo sapiens
gctgagcctggacagttccaagactgccggctcagtcagttatacagggttatcaagaggcgcatggcaggccccggtgagcctcccagtgactcctcaggaccggggagagctgcctgcag

SEQ ID NO: 418296 - DNA, 122 bp, Homo sapiens
acgggaagcaagaggcgccccacgggggtggagcgccggctctcctccgccagcagccgccgcaggaacctgccacacatcctgttttggagcagaggacaagagatcagtgttgttcactg

SEQ ID NO: 418297 - DNA, 122 bp, Homo sapiens
aagggccaagctagtggctgaataagagctctgtgctaagagacagagaagggagagagacggttctgcaagaaaaagagagattgaggagagaggtcctgctgtctccggggctctccctc

SEQ ID NO: 418298 - DNA, 122 bp, Homo sapiens
tgcagtcttggatctttcgcatgaggaagagaaatgctaagagtagcagaattgtgaccacgatgccaagtatggccagggactccagaatgatgccccatggcccctcggcgtcacagaga

SEQ ID NO: 418299 - DNA, 122 bp, Homo sapiens
ggtatataaacaacgtctaccattctacacattaaccagaaccttaaatctgatgattgtcgtagcacttctaagatttcttagatgtgccaataggtggaaggtggcagccctcttcaagg

SEQ ID NO: 418300 - DNA, 122 bp, Homo sapiens
tctcctgccagtttagagctggggacagggcccagccacaccacaggccttcccaaaggtcgcgaataggcctttactactaggcataggcgcttctcctttaccctccggagttcggattc

SEQ ID NO: 418301 - DNA, 122 bp, Homo sapiens
cgtcctgggatcgcgagaggtgtatatacagggaggccaggcagcctggagttagtcgaccgttgcgagacgttgagctgcggaagatgagtccaaagccgagagcctcgggacctccggcc

SEQ ID NO: 418302 - DNA, 122 bp, Homo sapiens
caatttcaggaagcaggaggctagctctgcagggtgggggcgcacctgggctgggctgcgcggaggcggcggaagcactaggcgcggcgcccacaggcggacggctggcgctgagcgcgggc

SEQ ID NO: 418303 - DNA, 122 bp, Homo sapiens
ggctgcctggggagggaggggttcctatggggcgtggcgaggctggcccagccctctccccgcccatatatgtagggcagcagcaggatgggcttctggacttgggcggcccctccgcaggc

SEQ ID NO: 418304 - DNA, 122 bp, Homo sapiens
ctcgctccagtatgtaaatgtgtaatagaagccaaatatggagcagttggctgccgccgccgcagctcaaggatccgacttcatgggggtggggggcaccctctggcgggcggcccggcgag

SEQ ID NO: 418305 - DNA, 122 bp, Homo sapiens
atacaggccctcttacccatgatgactgaataccttagggggttgcagatggccacatagcggtcatatcccatgactgtgagcaggaagcagttgttgatgccaaaggtgagatagaagaa

SEQ ID NO: 418306 - DNA, 122 bp, Homo sapiens
cgccgccgccgcgggaatatatacgtcggggagggagcgcgcagtaatccccgggccgggcgtccagtccacgcgggttaatcccgcagcgccggccgcgaacgcgctaatcctcgactgcg

SEQ ID NO: 418307 - DNA, 122 bp, Homo sapiens
gtcaccggcagcaccaacgagacgctgcgggctggcggacccgagcgggggcgaccggcacgcagcctagaaggtccctttggaggactttgcagtcgggagcagtgagcatgcgcagacgc

SEQ ID NO: 418308 - DNA, 122 bp, Homo sapiens
aggtggtaggaaaaatggatggagacaaaaatgtagcagacaacatgaacagtttgatcacggttacaagagccagacctgtaatgacagaaagaggacaggaacaaaatttacatctctct

SEQ ID NO: 418309 - DNA, 122 bp, Homo sapiens
gcacaggcggcgggggcttgcccgccccacccgacgacttcctgccgccgccgccaccgccgccgcccctcgatgaccctgagctcccgccgccgcccccggacttcatggagccgccccca

SEQ ID NO: 418310 - DNA, 122 bp, Homo sapiens
agctcagcggtgccccttctgcagctttgccgccgggcacatttttatagcagcggctggcgtctgtggccctttaaaggcgctcgagctggtgcagtcaccgcggatcgtgtgaaagcaaa

SEQ ID NO: 418311 - DNA, 122 bp, Homo sapiens
cagggtcacaagaggatgcaggaccgcccacgcttgatcggcgtggggttgagcacagcccggacagcctcggcgaacacttccttgacaccatcctgttgcagggctgagcattcgaggta

SEQ ID NO: 418312 - DNA, 122 bp, Homo sapiens
cctccactctcacgcgcccctcgcccctcgcccctcgcccctcgcccctctcctgggctccggctcccacctcatcggcccacccgaagatgtccattcacccagtgccgcggccggagccg

SEQ ID NO: 418313 - DNA, 122 bp, Homo sapiens
cccgtcacgggcagcgccccgaaccggggccggacacctcggccgctcgggccgcggcggcggggaccatgccgaagaaagtctcctgagcccggcaacttcggcccctccccgcccccacc

SEQ ID NO: 418314 - DNA, 122 bp, Homo sapiens
gtaaattgccttgctgagaaggaaaaaagaaaattttatagttgagtgctatttcttttgcggcaccaaaactttatttataatgctggcaagcctaaaatttgtaggtcaagttagagacc

SEQ ID NO: 418315 - DNA, 122 bp, Homo sapiens
cacactgctgaccacctggctgacagagctctacctgagccggcttggggctctgcagggcgacccagaggccctgactctctaccgagaaaccaaggaatgctttcgaaccttcctcagca

SEQ ID NO: 418316 - DNA, 122 bp, Homo sapiens
cactgtctccccggcataaactcagggccaacatagacatgctccgtaggttggatgacacggagccactttcccgcgagtggctcaaagctactcgccaagcagctcctgcagcagtgccc

SEQ ID NO: 418317 - DNA, 122 bp, Homo sapiens
accacaggaagagaggggaggcaaacctcccttcccgctgtgtcccgcctttcctcctggcggttgcgtttccacgtgtcctgcctgctgcccgccccagcccacactgagcaggaaggtgg

SEQ ID NO: 418318 - DNA, 122 bp, Homo sapiens
tccagccaccatgactggggggcttcggcagaaccctgcaaggtgtggggcagtgaggaacggtggcagagcttgaatgtggaagactgaggaactggcgggggtgaggggacagcaaccca

SEQ ID NO: 418319 - DNA, 122 bp, Homo sapiens
cagttccattcttttcccatcctccaccttggctaactgaaccttatcgataggatgagtcgctgcggcagtctgctcggtctgcgcggaaggcagggagcctcgcagagttttaaagatgc

SEQ ID NO: 418320 - DNA, 122 bp, Homo sapiens
tgctgtcggaagcggctgtgaccgggcagaggtgctatctgggactctgggttctcagcccggggacagcgaaccgaggggcagatgatccatcagaaaagagccggcactgcccagccccg

SEQ ID NO: 418321 - DNA, 122 bp, Homo sapiens
aggtggccgagagactggtactgtctgcaggtgtggggacacggctcagatgcttcccagcgctcactaccggtgagctcgagaaagatagccttgagtccaggctcagtccagggctgaga

SEQ ID NO: 418322 - DNA, 122 bp, Homo sapiens
tcaggggccgctcgcggttgccgttgaggaagatggtgctggtcctggaggcaccggctccgttctgcatctcctccccgcagtccctggggaaggggatccgcagcccacctgggagagga

SEQ ID NO: 418323 - DNA, 122 bp, Homo sapiens
ctacgcccattggcttattcaattcacgcaggaaccaatgggcggagacggcagccgcgccgtctgacggcttagccgcggtgcagactgcggcggcggtggtctgaggaagttctatcttg

SEQ ID NO: 418324 - DNA, 122 bp, Homo sapiens
ggtgtctctcaaggcttttggagcaggggtctgggggcagcccaggctgagacgtcttcccgcgggtgggccagggctggcagcaagggcggcgctggaatatttggggctctctatttgga

SEQ ID NO: 418325 - DNA, 122 bp, Homo sapiens
tctgcattctccaggtggcaccggggacctgaggaggccccagcttgctgccagctctctcgagcagaatgcagacacgtcccagaagctgaaagaaagagcctcgactgcatcagttggtg

SEQ ID NO: 418326 - DNA, 122 bp, Homo sapiens
tgtgagccgaccccgggcctggccagagaagagggtcgcggtgtccgtgcagggattcaccgagagtccagaccccagaggggcaagcggtcagcaccacagtctcgccccgcagcgctgac

SEQ ID NO: 418327 - DNA, 122 bp, Homo sapiens
tggagtcccccgcgattttttcctccggggtgggcgaggaggctgtgcggccttccccagcggctgtagcaggagacctgcggctgcatctcccagggccttccggcggggccgagggtagg

SEQ ID NO: 418328 - DNA, 122 bp, Homo sapiens
acgcgtagtgaacaggctcaggacctcgggatctgtcagctccctcctaagttctgtttgcgggggctgctcaggtggggcgtatacttgcttttatttgtcttttttggtacttgcagaac

SEQ ID NO: 418329 - DNA, 122 bp, Homo sapiens
cgagagtttgtggaagatggcgcctgttgtgacagggtaagtctgagggaatcggagcgccgggaaccgggaaagttgcgggcgtctggcagctcacggcgggcagcgggttcgggggccgc

SEQ ID NO: 418330 - DNA, 122 bp, Homo sapiens
ccgtggccgcctcttcccgactcagcccgcggtgggaaccgagagtagccgcgccgaacccgagggtgggtggttcattcgctctttggcttcggataaaacaatagggccgaggagtgcaa

SEQ ID NO: 418331 - DNA, 122 bp, Homo sapiens
aagacacatagcctacaggtcttgtgtattttagagaactttggtgtttatattaccactcgcagcccctttctcagttggccttgaggcttgcccattagctggtaaacgtttgaaagggt

SEQ ID NO: 418332 - DNA, 122 bp, Homo sapiens
catcttttgggagtggtgacagagccacagagggctgtgagcttgcccggccccaggtaacgctggcggtgggtgggcctccagcttggagcagagaccccccgaggcatctgcagacagaa

SEQ ID NO: 418333 - DNA, 122 bp, Homo sapiens
gccgccgccgccgcctcgccagccagagttgggctccgtgggcttcccccctcgcagcctcggtccttccccgctgcctgcaagtcagcctggctccgagtcacgtgtcagtgcctgaggca

SEQ ID NO: 418334 - DNA, 122 bp, Homo sapiens
ggcgctgcgtgtgagaagctgctgcctccccagcgggatccccagctctgcccgcgccctcgtaggtgatcactcgaccaatcatgtcctgagcagcaccagatgggctgggccactcacac

SEQ ID NO: 418335 - DNA, 122 bp, Homo sapiens
actctttttaattcttgccctcagctcacgccaggccctgggtggaaagctttctttgcccggaaactggctttctgaaaccaagggcttttgtgtcacgttcatggagagatggcagtgcg

SEQ ID NO: 418336 - DNA, 122 bp, Homo sapiens
tttggtatccaacacccggccgagaatgttccctttcctgatgctttggccaaccggcctcgataagccaaccagcccagaaccaggggcgctgggctgggtgttcctcggggacggcgccc

SEQ ID NO: 418337 - DNA, 122 bp, Homo sapiens
tctcggccaagtgagtgtccctcctcctaacgacccgggcagagaagagctcctttaagtcgaactagcgtggagtcagaacctgcttggctcccggtaactcctgtgggggtgtgatatat

SEQ ID NO: 418338 - DNA, 122 bp, Homo sapiens
cccgctgggagaaacttactgcgaggagcacggcgagaagatctacttcttctgcgagaacgatgccgagttcctctgtgtgttctgcagggagggtcccacgcaccaggcgcacaccgtgg

SEQ ID NO: 418339 - DNA, 122 bp, Homo sapiens
tcggtacgtgagtaaggaaaagcaataacctgctgtccggtgagcacaaaattcctgctacgaacagtgccttactgctgcttggagactgcaagtcgcagatcacactaggtattgactga

SEQ ID NO: 418340 - DNA, 122 bp, Homo sapiens
ccacttctttgtcctgttgtgttggtcctgactgtccccctccaatgggacatgggttcacgctccctggccagaatagggaccaggtccagcttctcagcagaccctcccagtgttcgact

SEQ ID NO: 418341 - DNA, 122 bp, Homo sapiens
acgcaaaatgtgacacgaaggtaggtcatggctgcggcgagcgggggcgcgggcgaaagacgtgaggatgtacgggggcctggcagctgctctgtcccacccacgcccggccggaccctcga

SEQ ID NO: 418342 - DNA, 122 bp, Homo sapiens
gaagcccacctgtcagagttaccggtcagccgggcgggcgccgccggggtctggggtggacgccgcgagcctgcacgttgcgccgggaccccggggctgtgcccaggtgggtggtggggcac

SEQ ID NO: 418343 - DNA, 122 bp, Homo sapiens
aaatgctctgcccagtctgatcccagacatccttgtaacccaatatagttacagctccgacgccatgttcttcctgggtccagctccaacgccatgtccttcctgggtccctccaaagtagg

SEQ ID NO: 418344 - DNA, 122 bp, Homo sapiens
aattctctctcctttccaggtcttttcctgatccaggagatattcaactgagtctggcaccgtttaaggtctgataggagatatttaccacctattactctttctgaaggctgctaccagaa

SEQ ID NO: 418345 - DNA, 122 bp, Homo sapiens
tgctaagatggcggctcccaagagacacgacatagcgcagccatattcctcgcctgacaacgccactcatggaccaagtctccgccgatccgtaacagcgctgtgttcagtgagtagactac

SEQ ID NO: 418346 - DNA, 122 bp, Homo sapiens
gggcgacgcactccggccgcgttgcacgctcgccgcttccctcagtcccgcgtgcgcgcgcgcgctcgccccaagtcccgcggagtttaacacaatgccgacgcctacgccgtgcgcaacgc

SEQ ID NO: 418347 - DNA, 122 bp, Homo sapiens
cccccgggacacctgcccagctgcggccgaccccggggcgcacaccctccgggatgaagacggcacgcctgctgcgcacggtggctgtgctgtgctttccagagacaccaaagatccagcaa

SEQ ID NO: 418348 - DNA, 122 bp, Homo sapiens
ctaacagtggactcggaggagcccagcttcaaggcggggcctggggtcgaggatctatggcgcctcttcgtgccagcgctggacaaacccgagacggacctactcagccatctggaccggtg

SEQ ID NO: 418349 - DNA, 122 bp, Homo sapiens
tggtcgaccgtgcaaggggtacagtcatagcacttacctacctcaaaaggtgctgcgaaacgttaagtgcaggcacagcgatgccctgggccacgtgctgggttccatgggccccagcgagg

SEQ ID NO: 418350 - DNA, 122 bp, Homo sapiens
ttcagtcccctgtgccaagccctctgcactgactctcagaaacattcaaatagaggaagtcgctcttggaaagaccggcagccgggtaagtggaacaagtatgcatttggaatacaaaaaga

SEQ ID NO: 418351 - DNA, 122 bp, Homo sapiens
atcagaaaaaccggtgtcggggttctcgcagggatgtggggccagactactgggctctcccgtgcaggctgcgatgcagggatggaggaaggaggagcaggtggctggccccgaggggtcgt

SEQ ID NO: 418352 - DNA, 122 bp, Homo sapiens
tcagtttggggatgtggctgcataccaagccatacggagccagcagcatccgtgggacaccgtcagccgaatctctgccgtcctactacaggcaaatacggtgatgctggggatgtgaaaga

SEQ ID NO: 418353 - DNA, 122 bp, Homo sapiens
actgcggctctgtgctggtcggcttcatccccacgcccaggggcactggcaccgtctcggcgcctgtgcccaagaagctgctcatgatggctggtatggatgtctgctacacctcagccagg

SEQ ID NO: 418354 - DNA, 122 bp, Homo sapiens
acaggactgaggaaaatgagccggagttcccatgctggcctgaccataataatcactcagcgggacttaattgtagcaatttctgggatctcccaaactttctaaatccaagtctccagata

SEQ ID NO: 418355 - DNA, 122 bp, Homo sapiens
gaaattggccacccagctgacaggaccggtcatgcccatcaagaatgtaaggagaaagcccgagtcatcactgagaagtagaggaattgcaaagctttcgctagtctccgcatggccggtgc

SEQ ID NO: 418356 - DNA, 122 bp, Homo sapiens
tgcaaaacgaccgactctattgaagacacactgggtggcgcgggaggttcctgccaatgccgggaggaagagcaacccaggacgcctgtgcctgggagggatggaaaggccaggggagggtg

SEQ ID NO: 418357 - DNA, 122 bp, Homo sapiens
cggaccagggccagggaagcgaagcacagggcggccaacacgcagaccagcacgaggctccggcaccaacaggtgctgccgaggcagcagcagcgccagtttctcacctcagccacgccgac

SEQ ID NO: 418358 - DNA, 122 bp, Homo sapiens
ctcgtgtgtttcaagctgcccacacttcacaggctgcttcgaagccctccctacccaccccgtgagaaacgcccctggggagaggcagagatgggtcttttagtcttgcagcccttgtttgt

SEQ ID NO: 418359 - DNA, 122 bp, Homo sapiens
acttctatctggccattgttactacaattgatgaccgttatttctaccttggacctgcttcgcttttatattcttcgtttccatcccaccccgttattgttatttcaaaatccacatacata

SEQ ID NO: 418360 - DNA, 122 bp, Homo sapiens
aaacaaccgttcaattgcacctcccaggtgcactcccaggcttgccaggggctttccagtcgcagaccccgcgtgttcgcagactctgccgccggcgaaactacatttcccagcgggccgcg

SEQ ID NO: 418361 - DNA, 122 bp, Homo sapiens
tagccgcaactccccgcctgtcccgaggagagaagtagggcttccgagacaagtagtttgcgcacataggtgttctcctagcgtgacagttaaattggttatagagggatggttgggacccc

SEQ ID NO: 418362 - DNA, 122 bp, Homo sapiens
acagcccatgggaggcctgttgtctgtgggatcctccagcatcagagacactggggccagcgtctgcctggtgaggtgcaggcctggcaggcccggtcccccacctgcttgagcacccacgg

SEQ ID NO: 418363 - DNA, 122 bp, Homo sapiens
ggctgggcacagtggctcgctcatgcttgtaatcccagtaccttgggaggccgaggtgggcggatcatctgaggtcaggagtttgagaccagcctggccaaaacagtgtttagtagaaacac

SEQ ID NO: 418364 - DNA, 122 bp, Homo sapiens
gagcccgccgctgccgccatcgcctgagggaagcgagaagaggccgcgaccgggagaaaacgcagagtcgtcaccggagagaagtcgactccctagcagcagtcgacgccagagggccgccc

SEQ ID NO: 418365 - DNA, 122 bp, Homo sapiens
agtttccatatctgtatctgtgtcacagtaatctgcataccatgatacagattatagggacgtgaaacccaggctgtctttttgacagcatgctactctaaggaaagccagttcttccctgc

SEQ ID NO: 418366 - DNA, 122 bp, Homo sapiens
gctgtgtgactttggataggttacatgatctctctgagcctcatttccctcaatgtaaaccgagaagggtgatacctattctggagttcttttaatgaggatgtaagcagagctccagactc

SEQ ID NO: 418367 - DNA, 122 bp, Homo sapiens
tcccgaggtgggaggcgctggccagcagccggcaggcggccaacaagcagcttgtgggggcgggtttatggggccgtcgccatggcgccacggtgcaggctccaaacacacacacacacaca

SEQ ID NO: 418368 - DNA, 122 bp, Homo sapiens
cctgtggccttgattcagattagctgtggttcaagactgcctgtgtggcacatgtggatacgtgcaaggtcgctgaggcagtgctgtgcccttaaagtttatctgcttttccaacccaaaag

SEQ ID NO: 418369 - DNA, 122 bp, Homo sapiens
ccggcaccaagaggcctacggctcagcccagcacctgccctattcggaggtggtgaccagcgctccggggaccatgacgcggcccagggccggggtgcagtgggtgccgacctaccgcccag

SEQ ID NO: 418370 - DNA, 122 bp, Homo sapiens
cgggacattccccgcgccgggaaccccactgggggctgggcggccggctcaggggcggggcgcagtagaagggcctccgacggttggccatcatccttgtcactcaaaagtccccgccttcg

SEQ ID NO: 418371 - DNA, 122 bp, Homo sapiens
gggcagatgatcagaggagctgcacttttccctcccgagtaactcagactgaagtagggccggacaggcccacaaaaggtagcatgagagaaagtgaaggtgtgacacctctctgtcacgtt

SEQ ID NO: 418372 - DNA, 122 bp, Homo sapiens
attattgcatcgggttccaagccaatgggaagcccgggggaggggtttggcatgaggaagcgttggttacagcagctgattggctgcagccaagactgtgaaaggataaagaggcgcgaggc

SEQ ID NO: 418373 - DNA, 122 bp, Homo sapiens
cacccaggtgctcagagaacaaagttcagttgttggaagttaaaccttaaccgagggaaacgtctgaagtaggccatcgtgtcattgatctttgagttctcgtttcaaaggaatggtgctat

SEQ ID NO: 418374 - DNA, 122 bp, Homo sapiens
gttctgctgtcgccgcccggacaggggctcgggagccgggctgggggcaggggctggagccgcgggaccagcgcctgaggtgggtgcggagcgggaggccgggcgggcgggcgcctggggcc

SEQ ID NO: 418375 - DNA, 122 bp, Homo sapiens
cgggaggccagcgtgggcggccgcagagatggccacggggctcgtggcggggatggccggcgactggaagctgtccccatccatcagtcagcagtggcagctcccggggacctgcagccccc

SEQ ID NO: 418376 - DNA, 122 bp, Homo sapiens
gcggcagcctcagggttaggggactggcgggaagcgtgggccggtcgagtcaggagcgagcgctctcctgattggctgccggtccccaccgacctgagtcgccccctttgattggccatccc

SEQ ID NO: 418377 - DNA, 122 bp, Homo sapiens
cctaatgaagtcttctcagtgctttagacctcagtgagatctctggatgcatatcgctaacgcctttttatgctcaatcacatgccacagtcaacatgcaatactcaagacagaaatagatt

SEQ ID NO: 418378 - DNA, 122 bp, Homo sapiens
ctggtacctggaaggagtcttattcagggattaggttacccaggttgttcatggagttcccgctgtacggcctataactggatggcgcaattttcccacctgaaactcttagtgcagggcct

SEQ ID NO: 418379 - DNA, 122 bp, Homo sapiens
tgacactacggtaggtgtaggttaggatgtgtcttctggtcgtggtctactagttggggccgagggaagaagatgacgattccaatttcagtagccactctctaggcttatgaactgaaaga

SEQ ID NO: 418380 - DNA, 122 bp, Homo sapiens
gagcaggaactatgactttccgtctgagcttccaacccatttgggtcaaggttggttggtcgtgggccttgggttgtgtgggataatcctgtcttattcctattgttccaatgttccatccg

SEQ ID NO: 418381 - DNA, 122 bp, Homo sapiens
tagaggcagctaagtataatttgacgcagaagattgaagtagatttttaagtcaactattcgctagttcagagagtgcatttcacttctttgagtggtcatgctttcactggtaacatcata

SEQ ID NO: 418382 - DNA, 122 bp, Homo sapiens
ccaagtgtctgccacagcccattaaactcctgtcgaggccacctcggcagccccgcagcccggctgggcgtattttacttgagcacgaagcttcctggcccagctgtggacttgaacctacc

SEQ ID NO: 418383 - DNA, 122 bp, Homo sapiens
gagcaggtttgggacacactgatccattatccctgtattttacagattaagaactggggccgagagtgtttatttaactagcttgcagacattggctctctttgccctgccatatagctgta

SEQ ID NO: 418384 - DNA, 122 bp, Homo sapiens
atgggcgcggggcgctactgtgcaggttcaggcggggcgggctctggggtggaaccggggcgggcgccagagcctccctgggccccgcggcagcccgggcgggcagctttaattaccgctcg

SEQ ID NO: 418385 - DNA, 122 bp, Homo sapiens
ccagggctgtactcacctggatgccggacccgccccctagagaccccgccccctggcgttcggctactaaagggaaggggattcccagggggtcctcaatcctggactctcccgacccctag

SEQ ID NO: 418386 - DNA, 122 bp, Homo sapiens
cctggaggtggctgctgctgttggatcttctgcttctgttggaatttctctagcttctcccgtttctttgcctctttcttgagctgagcagctgtctttgggagggcaggagcctcggggcc

SEQ ID NO: 418387 - DNA, 122 bp, Homo sapiens
gggcacactcggaaggcgtagctgctccatccctgggaggaacctggggagccctcctggcggccccgcggaccctcggccagtgagggctggttcccggagcctagggcacgtaacccgtg

SEQ ID NO: 418388 - DNA, 122 bp, Homo sapiens
attccaagcctttataaagtttaggctaccatattagaatataaaagctgtatgtaagtccgatttttattcatttaatagtgcttcaggtgaatttaagggtactgttaggtggatccttt

SEQ ID NO: 418389 - DNA, 122 bp, Homo sapiens
agagctagcagtgtccagatcaaaagcccccacatggtgaccagcctggagaggggtcctcggggtctcccttccctccgccctgttttataatcctggtggggtccgataccccgtggctt

SEQ ID NO: 418390 - DNA, 122 bp, Homo sapiens
tttccagaaggttctaggtcccagggactccaacccaaggatagagatccaaggtcctgccggggcggtcaggaggtcttacatgccctgtcctgtggcttccttctcagctgagctctgtg

SEQ ID NO: 418391 - DNA, 122 bp, Homo sapiens
ctgtgggctccgccatggtcgctggcgcgggccctgtgcgcgcggcgcagcgagccggggcgggcaggctcctcccagtcacgtccacgatttccagcgaacagcccggggatgggcctggg

SEQ ID NO: 418392 - DNA, 122 bp, Homo sapiens
tggtaacctgtttctgagaacacctgaaatcaatggctatacattccaaaccaatctaaacgctatttccttttggtgtgggtttggttttgttcattttgaaatacacttttgaacactga

SEQ ID NO: 418393 - DNA, 122 bp, Homo sapiens
aggtgggaaaggttagagtgtgggaagaactttctccatgctggtggaaactctttccttcgtaactctttcttcctgtcagcccacatttgtagggttcaaagtttaaccttgttatactg

SEQ ID NO: 418394 - DNA, 122 bp, Homo sapiens
cactagccattgctgtttatgcctcttgttttacgtatttttttcatctttgcagctctgcgtattttagaatatgagtacaaaattctcagattttatttgtttatctgacttttttgttt

SEQ ID NO: 418395 - DNA, 122 bp, Homo sapiens
aataaaagaggtagcaacgttggtgcgggagttaggcgagaaggtcccttctggaggaatcgttttgtatctagaacaccagggaattatgctcccgaaccatgcagccaacgtgaatcttt

SEQ ID NO: 418396 - DNA, 122 bp, Homo sapiens
cttacatgatcttttcctacagaatccatagatttgggacatctcctttatttactgtttcgatgcttaaacccctgtcagtgggaagaccagtgttgcccgtgagagcccctgccccacca

SEQ ID NO: 418397 - DNA, 122 bp, Homo sapiens
ccgctgcgcaaggcagacgcacatcagatggagagccggtacagctgctcttgatgaaaacggcagtggctctgaaaagagcctttagatcgaccacttaaaaatatgccttaggcccgctc

SEQ ID NO: 418398 - DNA, 122 bp, Homo sapiens
ccgccccgccctcctgcccaggcgcccgctaggtggtgcctggctgggcccgactccgcccgcctccccattcactgggaactaacacccggcgccgctcagacatctctattcccgcctct

SEQ ID NO: 418399 - DNA, 122 bp, Homo sapiens
actgtgtcacacaactggactgtgtggaactgcacgtccctgctgtttcagacatccatccgggtgttagtgtggttgctaggtttgctctacttcagctccttacccttaggaatctactt

SEQ ID NO: 418400 - DNA, 122 bp, Homo sapiens
tccttcccgacctcaggctgcagaggaaacctgggggcgggggtcgaggaagccgagccccgaggctcccagcgccgccccaggaggaatcttgcgggccactagaagctgtgcgcgcggcc

SEQ ID NO: 418401 - DNA, 122 bp, Homo sapiens
tgcacacaataggctgcaaaggagggagctctggaggaagaatacacgcttaggccagggcggcctcatggccagatagcccaggctctgtttcacccacattgaggaactgtgaaatcctg

SEQ ID NO: 418402 - DNA, 122 bp, Homo sapiens
agacatctggcagggtggaacggagggaacaggtgtggcagagagaatatctgagaagctcgcaggattcccagaaggagcactgggagtagattgcctgttttcccgaaggaacggcaagt

SEQ ID NO: 418403 - DNA, 122 bp, Homo sapiens
tatagtcctgcccatcaaaatcccacactccattttaggaatagagcaagtatacaaatacgtggtagaaagagttggctgccgtgtcaaaagtcaggcaggctcatagacttgtactttct

SEQ ID NO: 418404 - DNA, 122 bp, Homo sapiens
ggacgctcaggcctgctgcctgtgggctggctctcgaacttccccgggcctcagcctcctcgtctgtgaaacggggtcacacgagctgccaggcaggccacagcgttcacccggcagctcaa

SEQ ID NO: 418405 - DNA, 122 bp, Homo sapiens
tcttcctgaggttgttcctttcttcccacagaacatgtcccaacaggaaataacagattacgtagtagatgccaatgaatctagcatatactcagctatttgtattttgtagaatcgaacaa

SEQ ID NO: 418406 - DNA, 122 bp, Homo sapiens
cactttgattgttgcttcaaggtaggattttacacctctatctgctgtatacttaaccatcgagacagacttgtcagcctcagaaaagcagaccaatgtacacattccctttacctaatcag

SEQ ID NO: 418407 - DNA, 122 bp, Homo sapiens
ctcccccccaccccttccccaccccgccgcagcctgggaccctccggcctgcccgacccccgccctccccgggaccccggcatgcccccaccccagtccgcccgccccattcccacgccctg

SEQ ID NO: 418408 - DNA, 122 bp, Homo sapiens
gaaaacacttgctcacagtccatgggtaatagttgcagagtcagaatttgaagtcaggagcgaatgaggtcattttgcaaggttgctcatgacctagtgtctggttcattatgggggttcag

SEQ ID NO: 418409 - DNA, 122 bp, Homo sapiens
ctctccactggcggcagagccagggtgacacggggtgggtgacgggaccctccccactggcggcagagcccgggcaccgccgtgggcggacagcccacttctccctctctgcagaggataag

SEQ ID NO: 418410 - DNA, 122 bp, Homo sapiens
ctcccagctcctccctgctggtatagcagctctgggcccaaaactcctgcctggtgtcctcgtcccacccttccacttactcttcctccctcccgttccttttcctccttccggttcttcgt

SEQ ID NO: 418411 - DNA, 122 bp, Homo sapiens
ctcaaaccccgaaaggaagaccgtgggcagctcgtgcgcgcgtgcgtgtgcgtgtttaaccgagtgctggaggggaaacgtgagttgcagtcaaccggttatcttcctcttataggaaggag

SEQ ID NO: 418412 - DNA, 122 bp, Homo sapiens
cgacgcccacctgcagaacgggaccggcggagcgccagggctagagacgggacgtagcgacgtactgcgtgcgtgcgtgcgcacaaacgagggcgcgcatgtcgggacggaactagaaaagc

SEQ ID NO: 418413 - DNA, 122 bp, Homo sapiens
gcagcggcgcaggtaagcccaagaccggccacctgtgcctctactgtggcaagctgtactcgcgcaagtatgggctcaagatccacatgcggacgcacacgggctacaagccactcaagtgc

SEQ ID NO: 418414 - DNA, 122 bp, Homo sapiens
agcgggggcggggcacggggtgtggcgaggcgcggggcggggcataaattgcgccaggggcgagggcggggcacgaggtcgtgccgagagactgggagaggcgtgagtcgcgcggaggcgcg

SEQ ID NO: 418415 - DNA, 122 bp, Homo sapiens
ctgccccatgcgcatgagcggccgccgctcgccctcagccaggcccagcgcgccccgacgcgtccccacgcctgcgtgatccaccggaacccaagcccaggcaggcggtgagagggcggggc

SEQ ID NO: 418416 - DNA, 122 bp, Homo sapiens
ggctgagtcgggctgctttctcctcgcgtcccggggcgccctcgggaactcgggagcgcgcggcgagctgaacaatggcctggggacacctggcaggtcgcaggccccaaatcttccccgcc

SEQ ID NO: 418417 - DNA, 122 bp, Homo sapiens
taaaagcacatacaggagtttggaagattgaactgcaccttctacacaggttaaatttcacggctctgaaaatgtcctttttggccaaatcagtaacaatgcttgatttgcagcatttgttg

SEQ ID NO: 418418 - DNA, 122 bp, Homo sapiens
ccagtcccctggggcgtgtttctgggctttcccattatcaattagttggaaattgcacatcgtgtcctggccttacaacaaacacctgttctgatctacagcctcttgctgaaggaacaaca

SEQ ID NO: 418419 - DNA, 122 bp, Homo sapiens
aacatctcccaaatctttaattctgccttatcctcacagccaggttctccctatctcttgcgcagactttgcagtctccatggcatttcctgtctccattctcaccctttccagtcaccttc

SEQ ID NO: 418420 - DNA, 122 bp, Homo sapiens
aaggccagatgcagggccgagcccacctgcccacagggtcacccgtgttgtaggggacgccggacagttggcaaggaagaggcgcataagataattccagagtaaggagcgtgacaatcagg

SEQ ID NO: 418421 - DNA, 122 bp, Homo sapiens
agacggggcgctgcgccaagttatcaaggccgcgatcaaagtcggaccaaggcagcgagtcgacagcaggtttccagaagtgccctaacaggactgactagcagccaggaggcgcaggaagg

SEQ ID NO: 418422 - DNA, 122 bp, Homo sapiens
tccagatagggcttcacacactccagcgtgctgagtgcctgtcccccagtcctccccacacgaagtgtgtgcagggtcttctgatcgatgaccctggagttgaacaggtctgcagctgtcac

SEQ ID NO: 418423 - DNA, 122 bp, Homo sapiens
atcctcaagcccttcatgattccagaaggttggactccagactggaaactccttaacatgcgcttcctgatgctgcactcctgtctcctctcccctccaccacccccaagctgtgacctggg

SEQ ID NO: 418424 - DNA, 122 bp, Homo sapiens
tggcgtcccgcttcctagtctcagcggcgggaaggaggtcccgtggcgagagactgcgcacgcgctgcccgtcttcggctgcctggtgatctgggcttgtagctccgccccctctttctccg

SEQ ID NO: 418425 - DNA, 122 bp, Homo sapiens
agtagtgcaggcaccgcgacctcaggccttgcgtgtcagaagatgctaccatacactgcacggaatgagccgagagtgacaggctcttggctccagtcactttcaggcagggctttctgtct

SEQ ID NO: 418426 - DNA, 122 bp, Homo sapiens
tttgcacagcaactctttgtaaatgtccgagtcctctcggaggaaagatcgttagggcgacgagaacattaagaggggacctggagggcagatatcctcgatcccaagagagcaactttgtc

SEQ ID NO: 418427 - DNA, 122 bp, Homo sapiens
ccctcggtgttagaatccatgagactggcgtgtccttcggtgacgaggccgcccacccttcggtgttagaacccatgagactgatgaccctgagagttgaagcttcacagaaaggaggcctc

SEQ ID NO: 418428 - DNA, 122 bp, Homo sapiens
aagcaccctaagttaaaatcccccaaaacaaaggaaattgtcactagaagacaaggaggccgaggctctgaccctcataatggaggaagcttttagaaaggagccagtgagacgatgatgaa

SEQ ID NO: 418429 - DNA, 122 bp, Homo sapiens
aaaaggggagacaattgactaactttgagtaggcatgtttgaaaagaggtggattgctaacgtgcagtattttgtccataggatcaaatattttaggaaaatacttcttgttttctgatatt

SEQ ID NO: 418430 - DNA, 122 bp, Homo sapiens
ttgccatggatatctcatttgaacaagaagtaaccccccccccagaatctcagggggtctcgttaccacagcataacctaacctttctagaaagatacactcctctatccagcatgcctaga

SEQ ID NO: 418431 - DNA, 122 bp, Homo sapiens
ggttggccggggccagaagcagggtgcagggcaggcgcggggcggtcacgggggcggggccggtcgcggggcgcggggcgggcccgagctaccggtagtctgcctgccgcagtccgagcgcc

SEQ ID NO: 418432 - DNA, 122 bp, Homo sapiens
tacagtggtaatccaaataatcaactatttggtttccccagaggtctctcctgctcccagcgtctgtcatttcagggcttggaccacttttagaagcacatgtatcttttgaggcaatctta

SEQ ID NO: 418433 - DNA, 122 bp, Homo sapiens
tccgatgcaccgtgctttggagaaagtttctggcagggccctgctccctcccacacggggcggtctggccatgccagctaggctctgttttctggaacttggcccttcccttccgcaggagt

SEQ ID NO: 418434 - DNA, 122 bp, Homo sapiens
tgccggacctagacgaggtcccctggactctccaggagctggaggcgctgctgctgcgttcgcgggatccccgggcaggcccggcggtccccggcggcctgcccaaggacgcgctggccaag

SEQ ID NO: 418435 - DNA, 122 bp, Homo sapiens
taacattggatcttttatcttgatcagcaaagttttatatttaacttttttcccccaagacgttttagaggtactttatttttttctattttctagagtgtgaaacatggtatcttaaaatt

SEQ ID NO: 418436 - DNA, 122 bp, Homo sapiens
ttaaagactgctgtaatccaagtggccacagtgtattcaatcaatatgtgttatggtaagcggtggagaacataaaagctgactcctgttcaacagcatttaagttgttttgcaacatctgg

SEQ ID NO: 418437 - DNA, 122 bp, Homo sapiens
acacacacacacacacacacaaaggtgcaatggagccaggggaggcgcttggcagcagcccgcgccaaccagcattcctgagatgtttgagaattctggaacgcgcagacagagccgacgtc

SEQ ID NO: 418438 - DNA, 122 bp, Homo sapiens
cgcccgcccccggcccgccccccgcaccgccccccgcaccgccccccgcaccgccccccgcgccgccggcccgccccccttaaagggcccggccccgacccccgcccaccgcgcgcgaaccc

SEQ ID NO: 418439 - DNA, 122 bp, Homo sapiens
agactgtgaaaagctgggccgtccttcttgcctcagtctttccttttctctcagattgaccgattgggtcctaaatcacctgcagtgccttggtgatcaggaacagcagatggcaactagta

SEQ ID NO: 418440 - DNA, 122 bp, Homo sapiens
agaaaatctcacagagacccaagagcagctgcacagctgagcttcacagcttctgtaactcgttaattggctcattcatggcccttcctaggcccatgtcatttaagaaactttttattgtg

SEQ ID NO: 418441 - DNA, 122 bp, Homo sapiens
caggctcagttttcttttaagtctccaatctcagctaagtgacaaatgaagctgctatagcgaccacactcctgctggcttatggccaaactcacgttttctttttttcttttccaacatca

SEQ ID NO: 418442 - DNA, 122 bp, Homo sapiens
aaatagcttcagcaggccccacgggacgctcgagaacctcatctctggggtgtgtgggaacggaagagcttcagttgaaataaagatgcaaacaaaccgaattggtccccagacatcacgct

SEQ ID NO: 418443 - DNA, 122 bp, Homo sapiens
agagactcccagctctgacaccaattagctgtgtgatcttgggcaagtgacctagcctcgcggagcctggctacatcatctgaagagctgggacagtactagtgcccacctcacagggctgt

SEQ ID NO: 418444 - DNA, 122 bp, Homo sapiens
atgattcagaatatttgtcctgcactctgcaggtcatcataacacaagctcattcatcagcgagtgtcttaagagtgaagagtcatggctgaaagcagaaggatgaatcagtggtttctaaa

SEQ ID NO: 418445 - DNA, 122 bp, Homo sapiens
aaaccaaaaggttgacaaatgctgctccataatggggacttccgtgggtccccatggggacgtcgcctccataaaacccaggatctcccttcaccccagggaagccccctcctactgcccaa

SEQ ID NO: 418446 - DNA, 122 bp, Homo sapiens
cagctgcagcggcccgcagcgcgtgcccggaggggctccccctacctcgccggcacccagcgctgtgcagccaagcaaagaaaaggcgggggacaggttcccaccatctccccgacttccct

SEQ ID NO: 418447 - DNA, 122 bp, Homo sapiens
caaagaagaggagatagtgcgtgtgaacgagcagctctaggcaccgcaggtttacctcggcgaggtacgccactccctggtgctgggggagaaggggctcttctcacgcttctggctacgcc

SEQ ID NO: 418448 - DNA, 122 bp, Homo sapiens
cagagagagacagaggaaaggaaagagatgcaatctctgatgaaagatttctgtgtctgacggggagccaaggaatgagggtgattctggttgagctggacttgcatcatctcactttccct

SEQ ID NO: 418449 - DNA, 122 bp, Homo sapiens
agacttggcatctaacttgagccctgcaaaccaaggaggcaccagggtagagtgggcctccgtggtgttaccataagtgcatccagcagagaaaatagcaaaatactgcaaacattccctga

SEQ ID NO: 418450 - DNA, 122 bp, Homo sapiens
ttccaatagcaccaatcctcccatctgtccctgagcgtggggacgatcgggcaggagaaccgtgagactcatcattgagtatttcattgaaccttctcagcctcagttccccatctgcagca

SEQ ID NO: 418451 - DNA, 122 bp, Homo sapiens
cactcttcacaggtttccacatagaacatcacatatgtctttgtcatttaaaacaatcaacgtttccagtgtaaaaatacgtgggcttattgcatctaccccacggatggtttatctttttc

SEQ ID NO: 418452 - DNA, 122 bp, Homo sapiens
cagctcatgctgctgctctgcaccttcctcccgtcttgccttctccctcgagttgggacccgggaagaaccatgaagtggctgctgctgctgggtctggtggcactctctgagtgcatcatg

SEQ ID NO: 418453 - DNA, 122 bp, Homo sapiens
tgtggtgagaagtgggtgaactccagatagatgcacttttaagatggagtcaaggccgggcgcggtggctcacgcctgtaatcccagcactttgggaggctgaggcaggcggatcacgaggt

SEQ ID NO: 418454 - DNA, 122 bp, Homo sapiens
aatcctagagatcccccatgtggcaacccctatacttcacatctcctgaccacacacatgcgagtgccatctttgggaaattctatagactttggaactttactgagttccttttcatccca

SEQ ID NO: 418455 - DNA, 122 bp, Homo sapiens
gaaaaagagtttagaatttccctgccatttccatgccgtgctgggaggaacatttgaaatcgggcctggcggggtaccagcaggcagcaatagcaagcggggtggagaggagcagggccagg

SEQ ID NO: 418456 - DNA, 122 bp, Homo sapiens
tgcttatatgtttgaagattccaaactgaatggggaggtggcgaaggccgcgctggcgaacgaagactgcccccacatagaccaggccctcactcccgatgagggcctgccctttacgcgct

SEQ ID NO: 418457 - DNA, 122 bp, Homo sapiens
gaggagagttagactgagcaaaagcaggatgtgtgtggagcagcctcctggcctctctcccgcagaggcacttcctggtactggagggcaaagcggcccggggttgggaaagagaccggtgc

SEQ ID NO: 418458 - DNA, 122 bp, Homo sapiens
ggtgtccgagtgctccgtgtgcccctgagagcgggtgggagcggaagcctgagcggcctgcggcctccggcgatagtgtgctatctgccgctgcagcgcgcgtccgcgcggcctctgggcta

SEQ ID NO: 418459 - DNA, 122 bp, Homo sapiens
cctagcaagtagaattacccgcggggcagtctcagtctattaaaacaattcatgcccaatcgtatcctacaaaccagaggaaggcgtctcacctgccagcggtggcaccatttcttccacgg

SEQ ID NO: 418460 - DNA, 122 bp, Homo sapiens
cgcggcctgctccggcttcgccattggcccgcggcgccccggtcccttcactcccgcccccggcccggcaacaaggagcccggctcccacccgcagccccgtatcactcaccctgcagggtc

SEQ ID NO: 418461 - DNA, 122 bp, Homo sapiens
gcctttctttcaggcgcacagagataaggtgggcagagggcactggagccagcccaccggcggttttactcctggtgtccacaaggtggcaggccaggcacttggatttgcgcagccaaggg

SEQ ID NO: 418462 - DNA, 122 bp, Homo sapiens
ccccctcttctccaccccctttcctcctcctcctcctcctcctcctcctcctcataaccacggccttttcagtttgatgtttttagatatcaaaggaagttctccaggaaccctgcaactaa

SEQ ID NO: 418463 - DNA, 122 bp, Homo sapiens
cgtgtcacagcgcctcggggcccttgcgcgcccactgttccggcgagcgcagctctcccacgggccacgtcctcccaaccctgcttgccctgctccgcacctttggggagccgggccgtctc

SEQ ID NO: 418464 - DNA, 122 bp, Homo sapiens
aaaaggtaacatgtcttatccatggcagcaaaattttgttatggggctatggggagaaaccgaaagagagcagattttgctataatatctataatattcttggtagttggcatagtggtgat

SEQ ID NO: 418465 - DNA, 122 bp, Homo sapiens
gacattgagctgctgcccacagacatgagacaccacggtacagcatgcccccgcccggcgcggccccccgcccgtccagccccgctgtggtcaggagacctcatcccttttctggggctgat

SEQ ID NO: 418466 - DNA, 122 bp, Homo sapiens
aaacagaacagcatgaaccaaggtgtgaagctggaacaaacagtgattattgggggccaacggtgggccagccagaccgggaaagtccttatcattagaactctgtcgtggtgagtctccct

SEQ ID NO: 418467 - DNA, 122 bp, Homo sapiens
gcgcaggccgaaggagttccagttgtagttcggcaggtccttctcccgctgcaccagcaccgcgccctggggtgcggggatctggcggctgtggggggcggacaggcccggctgctgggggc

SEQ ID NO: 418468 - DNA, 122 bp, Homo sapiens
gttacctcccgcgcatgctctatggggtagagacgctaggccggcactgcctaggtgggccgggcggtgcgagggtcgcctttcagcctttacctctacccactgaaatggagtaggtcggt

SEQ ID NO: 418469 - DNA, 122 bp, Homo sapiens
ctagaagtggacagacatgcgaaatgccatactgtatacgtacaatgcataggccaaaggcgaccctatgacccagagattagaaagactcggacgtcttttgactgggttcaggtcacact

SEQ ID NO: 418470 - DNA, 122 bp, Homo sapiens
ccctctgtctcagttcacaaatgtaacctcataacctctgtctctgtctctccagggtcccgaggtctctaggcatttaagtcagatgaaaatgccctcctttggcattccttctttgtaaa

SEQ ID NO: 418471 - DNA, 122 bp, Homo sapiens
ggcgccgcaacaccaaaccggggacgccgcgggcggcggcgacacagatactggctcctccggcgactccgagcctcacagccccacttccggccaactgcccgctacttccgcctgctgcg

SEQ ID NO: 418472 - DNA, 122 bp, Homo sapiens
tttctttgaagaatgagcaccttcagcaatggaaacctgtttctgaagctgcttctgtggcgtttcacccatgaggacttaggactgagtagatccaatgagagggagtggatggcattgtt

SEQ ID NO: 418473 - DNA, 122 bp, Homo sapiens
cgagcttcactccgcactcttaggctgcgtgtgaggcctgcgagtgctcgggagctgccgcggtcacaagagaaagcctagctgtcaatgacagccccagagcatctgggcgccttgcgata

SEQ ID NO: 418474 - DNA, 122 bp, Homo sapiens
tgtgttcttggcttgtggcagcatcactctacgctgtctgtctccacgtggccttgcctccgtgcctgttttccctcttcttctcctatgtgaacaccgtcactggaattagagtgcaccct

SEQ ID NO: 418475 - DNA, 122 bp, Homo sapiens
gagcgtcggcacggctagaaatgcctgattctcggtgtgtgtgtctaccccaggcagcaacggcaaatgcccttctcgccacggccgtggtcccagtgtgtgactgggtgatggtgacggga

SEQ ID NO: 418476 - DNA, 122 bp, Homo sapiens
ccgcgcttgaaatcagatctgccaggccttgtttggtttcactttgccgctcctaagagccgggtgctcagctaagaactgggaatttcatggccaccttggggtctccaggagactggcag

SEQ ID NO: 418477 - DNA, 122 bp, Homo sapiens
ttcgcgcatgcgtggtcctagagctacggtgacacttcgcgtgcggtgtaggcgcatcttcgctctgttggccgtggctttagtaagcacacacctgcctgctactctggttatcgtggcga

SEQ ID NO: 418478 - DNA, 122 bp, Homo sapiens
gggagacgcccgcccggtgcccgccctgggcccggcgggtgccccctgcccgccgcctgacgcaatccgaggcgcccttgctgcatgccggcgctggagaaacctcccctgccgttgcatca

SEQ ID NO: 418479 - DNA, 122 bp, Homo sapiens
caagacgcaatgtttccagctttccataggttccctcgtgccccacccctcagaagtaaacgttattctaactcctatcactaccggtaagttttgtagggaattattttggaggaagtgga

SEQ ID NO: 418480 - DNA, 122 bp, Homo sapiens
gtgtgtgtgtctgtctgtctggggcttgggcatggaccacacttccgtgtttggggtgaacgtgcagcccctgccagctgcgcccttcagcctgtctgcagctccaccttgccctggacaga

SEQ ID NO: 418481 - DNA, 122 bp, Homo sapiens
tgtctattgccctctcatttccactttctgcttaggccaacaaatgggcactttgattttcgacattttcaacaatttattaatccccaggatggccaatagagggcagacgatctcttctt

SEQ ID NO: 418482 - DNA, 122 bp, Homo sapiens
tgatggaagagggaagggaaggagggacagaggctgtgggggttttaggaggaagcttcgcgctgtctgtgggagctagaggtggataatgacagcacagtcattgccacggtcctgccgtg

SEQ ID NO: 418483 - DNA, 122 bp, Homo sapiens
ggagcggcaggggcctagccctggaagcccagctccttgtagttggaggccatgtccttccggaacagctccagggccttgttcatggccccctgggcatcagcaccaaagtccccgggatg

SEQ ID NO: 418484 - DNA, 122 bp, Homo sapiens
ggttgtgaaagtaaagtaaaatagtgtatacaatgcaaaagcagactggttcttactcaccggtgactcagggaacgcagctgtgacggaggccttcctgaaggagggtgctcctgcggctc

SEQ ID NO: 418485 - DNA, 122 bp, Homo sapiens
gtccgcgaccagcgtctgacctctcactcagagtccccagtcctgccttagtttccccagcgaccctgaatttggagttgctgtctctaagtgaaagctgaacctgcaaccccttgagggtt

SEQ ID NO: 418486 - DNA, 122 bp, Homo sapiens
gggcctcccaccaccgcacccagaggccgggccagccgggcgtgcaccccaggggcgctccgtccccggcggcctgggactccccagtcaggacagtacaaaatctcttcattgctcatttt

SEQ ID NO: 418487 - DNA, 122 bp, Homo sapiens
gccccaggactgcagtggggagtctttctttgccgatggacttcgaaaatcatcaccccccgcattttttgtggttaaccacagctagccaggaactcagggcttctcatcagcagaggcct

SEQ ID NO: 418488 - DNA, 122 bp, Homo sapiens
acacaagcagcattgctataaactccagtggaaaaaggtgatattatagggaaggaaaaccgtattgtcatattttcatggaattcagtgaattgcattttgaggaccagtgccattttgat

SEQ ID NO: 418489 - DNA, 122 bp, Homo sapiens
ccccaacctgcagggaccctaccagggctcaacagcccgctgggcagagctgggggggatcggagggccccatgactacagcggggcgtcccacccaccctacaggggcctgtgcagctgcc

SEQ ID NO: 418490 - DNA, 122 bp, Homo sapiens
ggccacggcggggacggcggcagccggccaatgaggagcgcggctgtggtcgggggcgggcgcacccggtcctccgcgtcgctcccggatcgctacctcccccgcctcgagctccactaggc

SEQ ID NO: 418491 - DNA, 122 bp, Homo sapiens
tttgggaatcttgctctctttccattgtaaactgtaaaaaatgctacccagaagctaatccgaaagccacatggccctagaggggtctgtggtaagtaaagggaaatgtagtctaatatgta

SEQ ID NO: 418492 - DNA, 122 bp, Homo sapiens
cgatgcccggcagcatcgagacagcgggcgaacgggcgtccggggacagggtgggggcggcggggaggaggcgtcggagactctgaaccccagaaaagttcaaggtttgtgcaggttccccc

SEQ ID NO: 418493 - DNA, 122 bp, Homo sapiens
tggtggacgttaaggaaaattaccagagcaccctgcccaaagctgaggctccccgagagccggagcggggagggcccgccaagtcagcattccagccggtgattgcaatggacaccgaactg

SEQ ID NO: 418494 - DNA, 122 bp, Homo sapiens
gtggttggctcagagaggccgaggcaggagcagctccgcgggccttgagggcgtgtcaggcggctgtgttccttcgccacgcaggcgccccgcgccttttcccgcagctctgcgccactccc

SEQ ID NO: 418495 - DNA, 122 bp, Homo sapiens
agccagtgtcaccatcgtccctgggggccactgcccccacacaggctttggtgaggcctccggagctttgtcctcagcatggggcctggccaacagcaactcatcataagggacacggctgt

SEQ ID NO: 418496 - DNA, 122 bp, Homo sapiens
ccgctccgggagcagcctcacaaaagtttgagccgcaggtgcgagcggagttggcgctgccgccggcgggtcccgggggcccagcccaccccccgataccccctgaacccctcatctgctcc

SEQ ID NO: 418497 - DNA, 122 bp, Homo sapiens
ggccctggtgtcctggatggaggagcagaggcctggagagctgactctgtggacagcccccggcctcactgcacaccaaggacaacttcacactaacagcatccgtgcagggccgcccacag

SEQ ID NO: 418498 - DNA, 122 bp, Homo sapiens
cacttacctagcgctctctcagcacaggtcccaggcagtgctcaagtccaaagtcagaagcgcccctcacagtccctaggagaaagccgctgacgccatcatcagtaggggatttgcatttc

SEQ ID NO: 418499 - DNA, 122 bp, Homo sapiens
ggtcgggggtggggcccgtgagtccaagttcaaggaacttggtttctggccagtccctgccggggaggccccggcagccttgcctcccacagctgataactctggtcccgaaactgctcact

SEQ ID NO: 418500 - DNA, 122 bp, Homo sapiens
aggagcagtgttcaggcagaggcactcaggcgccggcagggcccacagcacatgcatcatcgctgccagggcaacggtgcaggctggctccgggaggcgggctggagcaggctccaggtcag

SEQ ID NO: 418501 - DNA, 122 bp, Homo sapiens
gctcaggggcccgcccgcgggggtcccatccccgggaaggacgcagagttcacgcactcccggctcctggattcatggccagaggtcacaaggtcaccaagcggcttaggtctttccccacc

SEQ ID NO: 418502 - DNA, 122 bp, Homo sapiens
cccaaatcccagccccagcccaacgatccccaccccaataggcccagtccccaggtagtccgggtacggggccctggacttcggatagtctccctaatctcaaatcccaccccccgtcccca

SEQ ID NO: 418503 - DNA, 122 bp, Homo sapiens
tttgtgttgatccccataagaggacattgaggatcaccactcccaaaacctcatcacctacgctgccttttagagatggagttggcaatttgcccatttactgtcagtaaacttgcatgact

SEQ ID NO: 418504 - DNA, 122 bp, Homo sapiens
ggcttcctttggcctgagacagcgtcttcaggcgggtcggctcggacctgcccagtggggcgcccacctgcacccgcacccgcacccgcacccgcgggaaggggcggcgctggccggactct

SEQ ID NO: 418505 - DNA, 122 bp, Homo sapiens
gggctgaggggaggcgtggggcgagtgcccgttgctcgctctctagctctcttgctcttacgctctctcgctcgcagccgctcgcagctcggcggtgcagctgtgctggatccggcggcgcc

SEQ ID NO: 418506 - DNA, 122 bp, Homo sapiens
gggtccgttcatagttggttgaaacaaggaaggagtctcaggggagacccaggaggtgggcgtctcagggtgtctaagtctgcgtgtcagctgtagtgacatatggcaggttctatgtgacc

SEQ ID NO: 418507 - DNA, 122 bp, Homo sapiens
ggagacgccggcaagagctccagctcgggagcgacgccaagcctagcgggcccgccctctcgcgatatcttaccttggtttaaattctatcacattggcagctggttctcattcccctttgc

SEQ ID NO: 418508 - DNA, 122 bp, Homo sapiens
accagggactctcaccagctagtcccaaacatgtcccaggaatgaagccgatttacctcccgattaaaatataactatctccctcaacctggggcgggaaaggtcatcactgaacaagacat

SEQ ID NO: 418509 - DNA, 122 bp, Homo sapiens
caggaagagcgcgccgccgagcgccgccgcgccctcttcagctctccaaagcttccacatcggcccgagctggaggtgcgaactccacagcagccctgagacccaggcactccctccagccc

SEQ ID NO: 418510 - DNA, 122 bp, Homo sapiens
gcaggccttcccctccgagtcccggcacgccgccccctctgtcccacacggagcctgcagcggtattttaagatctctgtggtgaaccgagactagaaatgaatctgtgaatccaccaccga

SEQ ID NO: 418511 - DNA, 122 bp, Homo sapiens
aaagtaatttgttttcatcttttataggaggagaggcagttgaagcatatcaagtaaagccgtgtgtgggtggtggttttctgattacaatccattaaggctaggctgtgatttccaaacct

SEQ ID NO: 418512 - DNA, 122 bp, Homo sapiens
cgcttgcggaggcccgagaatgcgcgccacgaacgagcgcctttccaagcgcagatatttcgcgagcatccttgtttattaaacaacctctaggtgaatggccgggaagcgcccctcggtca

SEQ ID NO: 418513 - DNA, 122 bp, Homo sapiens
tccaccgcggctatgaggccagtataaggcggtaaaattacgataagatatgggattttacgtgatcgaagacatcaaagtaagcgtaagcacgaaagttgttctgcaacataccactgtag

SEQ ID NO: 418514 - DNA, 122 bp, Homo sapiens
gtggggcggggcgggagaaagtggccgcccggaggacgttggcgtttacgtgtggaagagcggaagagttttgcttttcgtgcgcgccttcgaaaactgcctgccgctgtctgaggagtcca

SEQ ID NO: 418515 - DNA, 122 bp, Homo sapiens
gcgggcccctgctcctccatgcccccagctctccggctgggtgggcttggccatggtcagcgtgaacgcgcccctcggggctccagtggagagttcttacggtaagtggggctgggggaaga

SEQ ID NO: 418516 - DNA, 122 bp, Homo sapiens
cggggacgggggagagggtgaagaagagcgagagaaggagggagagaaccgggggagcgacgctccctcgcccactgggtgtctgctgtggccaggctgaggcacctagggagttgcccccc

SEQ ID NO: 418517 - DNA, 122 bp, Homo sapiens
caccctcccccggcgtggacgctccccatttttcctggtgtggacactccgcattcttcccggcatggacactctgcaccctcccctggcgtggacactgcgcatcctccccagtgtggaca

SEQ ID NO: 418518 - DNA, 122 bp, Homo sapiens
cagctcgcaaattaattggcaacagccgggtgaatcacccagggacttccttcttgttgccgggcaactgcatgcacttggcagtgggacattaaacacagaggggaatgctgtgaggcatt

SEQ ID NO: 418519 - DNA, 122 bp, Homo sapiens
gccagtgtgcgtcagccaggtccccagcccccagtgtgctgaagctcaggcccttcccaacgccctggtctcctgcactgaggtgtggtgagcacaaccaggtcccactggatgcatgcaca

SEQ ID NO: 418520 - DNA, 122 bp, Homo sapiens
agacaggaagggggacagtaacacatgaagagggagaggagagagggatcagagccttagcgagatcaagatggaagtacaaagagaccagagaggcatagagaaacacacacacagaggaa

SEQ ID NO: 418521 - DNA, 122 bp, Homo sapiens
cgcgcggggccggggatggccgggcggacgcgggccgggggtcgccgtcctctcggatctcggggggattctcagaggagaaatgaaaacaaaaacacactggaaggcgggggagcctgtct

SEQ ID NO: 418522 - DNA, 122 bp, Homo sapiens
cttgcagagtaacttccaggctctgcctttccttaggtgttaatgcccatgacaccctttcgccaaaggccttgggagaaaaatctattaccccactgccattttgttaagtgtttgctcct

SEQ ID NO: 418523 - DNA, 122 bp, Homo sapiens
gagtcgggcgggtcccggcgccggctggggcggggaccagggactcggagaacgcggggacgccgggacccagccctgaattggggacagtggcccagcaatctcctggcgccccacgatgg

SEQ ID NO: 418524 - DNA, 122 bp, Homo sapiens
caagaaaacatactcaaggcataatcattcctaaaacagactggcacaaaacttgtaccacgagagaatacatcttataacagttattttttttctttttttgagacagattctcgctctgt

SEQ ID NO: 418525 - DNA, 122 bp, Homo sapiens
tggggaaaggtggcaggctttttgggacaaccatggaggggtcctccgtctcggcctcttcgcatatccccctccgtgatcctgccttccccccccaccgagcccatcgcaggcagagacac

SEQ ID NO: 418526 - DNA, 122 bp, Homo sapiens
gggaagatgcgctcccccagggggccaggcgcctggaaggcgtaaagcaggtcgagtgagcggccgtcgtagaaggccacgcggccccgctcccagtccaggtccacgcgaatgcgccgcgg

SEQ ID NO: 418527 - DNA, 122 bp, Homo sapiens
ggtttgggtcttgcatgtgagcctggtctgtttggtgaatctgcagagtgtgagagctggcggcccacttctgttccacgtgggcgcatttcccgaactgcgcgtggaaaagccgggctgcc

SEQ ID NO: 418528 - DNA, 122 bp, Homo sapiens
ctcatcatcaatcatcaacattttatctctcaggaaggttctgaaaactatccaaaatatcgttgaataaccccaaggctaccgcaaatacttaatgagatctttgaggaatcttttgaaat

SEQ ID NO: 418529 - DNA, 122 bp, Homo sapiens
gggcgggcgggggcttagagtctccctggaggcgaagcgaggatgccggctttaggtctccgtcttcccccaccaccagggccggggggcaggggaagcagttgaggaggctgaaggtgctc

SEQ ID NO: 418530 - DNA, 122 bp, Homo sapiens
tttgggcctgcccttcccctagcatccctggttggaagggtgtcctcacagggctgtgggcgggccagggctggctgctggttaaatttagtgtggggggtggggcagctgcccaaggtcca

SEQ ID NO: 418531 - DNA, 122 bp, Homo sapiens
tcacgttccatccaagggtactgctggaagaatttggggtgttacagctacaaagcagcacgcaagcttgttctggggtgagtcacatctcccttctagcaggaaaataaacacatctaccc

SEQ ID NO: 418532 - DNA, 122 bp, Homo sapiens
cattgctcatctcctttgttggctgcttccccacaggtggtgccatgtctcccagctactcgccaacgtcacctgcctacgagccccgctctcctgggggctacacaccccagagtccctct

SEQ ID NO: 418533 - DNA, 122 bp, Homo sapiens
atgaatcccagttgaaaagtcatcgatctacaaatacatagagcaatgtggtgaatctcacgtgcttaatttttttttttcagtattgatgagatacttttggtaataacgagatactactg

SEQ ID NO: 418534 - DNA, 122 bp, Homo sapiens
tgaaatggaagtcatttgactagcttctcatctgaccttactaaataagcagtaggcaaacgcaaacctcagaatgctaatatggcctttactgagtgaaaagagctaatttggacaatgat

SEQ ID NO: 418535 - DNA, 122 bp, Homo sapiens
cccgccatgccccctcctctgggaaagccgcctggagtgtccaccgcagaacgagtgctgcgctcagcagcaccaggacccgcagggcccgcactcccctccgcacgaagctcactgtccac

SEQ ID NO: 418536 - DNA, 122 bp, Homo sapiens
aaaacggactaatacagcctcccaaagtcctggggttaccgttgtgagccaccacgtgcccggccactgctgagtaatcttaaatagagaaaatccattatagcctatgctactcaaatgga

SEQ ID NO: 418537 - DNA, 122 bp, Homo sapiens
aatcattgtagtgagccttattgcaccctttccagactcattaaagatgttttaaactcacgtttttctcaacttttataaagttactcttcagaaaagatacttagagcccttaaaatttg

SEQ ID NO: 418538 - DNA, 122 bp, Homo sapiens
tggacacgcaggggggctggacacagcagggggctggacacgcagcaggggggctggacacgcggcagggggctggacacgcggcagggggctggacacgcggcagggaggctggacacgtg

SEQ ID NO: 418539 - DNA, 122 bp, Homo sapiens
aaagaaaaagccgattgcttctagaacctgaagaaaatataaatatagtatgataccttgcgattttcaagaggaaaacaggttgaacttgcaattaactggaattccaattcagacaactc

SEQ ID NO: 418540 - DNA, 122 bp, Homo sapiens
cctttccgagtcaaagaaaggggtgacagacggcacctggaaaatcgggtcactcccatccgaatactgcgcttttccgactggcttaaaaaacggcgcaccaccacgagattatatctcgc

SEQ ID NO: 418541 - DNA, 122 bp, Homo sapiens
tggaggcgaagcaggggccagaaactggacgccagtcccgaagcagccgtccttggagcccgcagtctagagccaagacgcctctgggtggccccgcgggaccagaaacatcatcacctgct

SEQ ID NO: 418542 - DNA, 122 bp, Homo sapiens
gaagcaagagagggaaactgaggaagccagattctttcaaacaacctactctcttgagaacgatttcattcctggagtgagggagccaaaactcattgactccagcaggaaagcattaacat

SEQ ID NO: 418543 - DNA, 122 bp, Homo sapiens
ccccaggagaggccagaggaagttttggaggatgggaggggcttggaccaactattaccacgtcctccaagaagggaccccctgaagagagagaaaaggccgtcagagcaccgcgcagctga

SEQ ID NO: 418544 - DNA, 122 bp, Homo sapiens
ggctgatgttacccacgtgtaacttggttgaagctttgctcttattcttgctggcttccacgttgatgttcaccccatgaagcttgtaatggtgcaggttgcgtatggcatcctcagctgcc

SEQ ID NO: 418545 - DNA, 122 bp, Homo sapiens
ctgtgtctatttctcagctcctgctatgctaggtctgggcttccgacgccggccctgctccggcgattgaaaatgactgcagcctcgggtgcagccttgtcctcagcgttcaacacggggtg

SEQ ID NO: 418546 - DNA, 122 bp, Homo sapiens
atggggtgctcctgtcaccctgtggctcggcctcctcatccgtcttcccaaggccaaggacgccgtgtcagtgggccagcctcctgtcctcggtcctgcttccggcaccgcccgtttgcctc

SEQ ID NO: 418547 - DNA, 122 bp, Homo sapiens
cctgggccttgggaggaggctctgagtagggccgcctggggcgcgtcttcagggtcctcccggcactggggtgaccgccgagctagacgcgcctgagggctgagccccagggctcgtgatct

SEQ ID NO: 418548 - DNA, 122 bp, Homo sapiens
aggagaaaaaggaaacaacaatcagaggctttggaatgctttctcttcatgtgcctggaacgctgggcgggcggtgacccggggctcggagccccaccctggccacacctgctgtcgcccac

SEQ ID NO: 418549 - DNA, 122 bp, Homo sapiens
acagccacttaatgtccaaaccaaacccggacccctccaacttcccccactgcccccagtcgtggcctctagtgtggcctgctttgaacactggggttctttgaacaatgccatttgcagga

SEQ ID NO: 418550 - DNA, 122 bp, Homo sapiens
cagcttttctcttcctcccaagagccagaggaagagggaaaccgcccaccccccttcacgcgcgcacacacccctcccgacacatcccagcacccgcccttggctgagttcgcccccagccc

SEQ ID NO: 418551 - DNA, 122 bp, Homo sapiens
ggttctgctcttaaaggccatagctttatgatgtgcttcaaccatagataactcaagtcccgttatcaatattcttaaatttatttttttttttttttgtacagatggcgtctcaagtgatc

SEQ ID NO: 418552 - DNA, 122 bp, Homo sapiens
tgtcaccgtggttacgagcatccaccgtcagcacctggggagtggggtgagacggggctgcgttgatatccccattctgggggtagacagccaaaggcttgtagggacagcaggtcaaaggt

SEQ ID NO: 418553 - DNA, 122 bp, Homo sapiens
gggcggcacaggccgacactgaggcctggaaactaccaatcccagaatgcatgacttgagcgccggccccaggctgcggggtctgccgggcaatgtggtttgccagacgttagcgtccggga

SEQ ID NO: 418554 - DNA, 122 bp, Homo sapiens
gggcaatccgggcttgcagacgaggtaaggtcgattccatttggcccggggatggtcacacgcgcgggggccggaactgccgtcgccggcgcggtcgttgtcgcattgctctcggccgcact

SEQ ID NO: 418555 - DNA, 122 bp, Homo sapiens
ctggagaaaagatacaaaggcaacctctaaggggcatgaagggctcttttgtttgcagctcggggtgcgggaggcggggagattctcaccactgaagtggacgtaaacacacgtcagacgcg

SEQ ID NO: 418556 - DNA, 122 bp, Homo sapiens
gtgacagctgtggactggccagacagctttctaacaacgcctcctcctctagggaggccccgcccaaagcccctccctaccccaattaccggtaggatctgaaactctggagttggcatttc

SEQ ID NO: 418557 - DNA, 122 bp, Homo sapiens
ggtaggtgataagtgctatgggaaaaagaaggtagagcagggtaagggtggtcagagaggcgtagatgaagaattgaagaaggtgacagagttattatagctgttagtagatacttgggcat

SEQ ID NO: 418558 - DNA, 122 bp, Homo sapiens
ttgtgctcagggctaagagtacaacccaggaaagcctgactcttacctctaaaagcccaccgtggagtgtcccatgagcttggacttacaatgctacccagtgagtgctatccagaagtaga

SEQ ID NO: 418559 - DNA, 122 bp, Homo sapiens
atccgtaagggcagtccaaatctaggaatcagatctcgaagaaacacacgggttacttcacgagctttcttagttcgtgttggataagcctccacccacccagagcaggtacacccaagaac

SEQ ID NO: 418560 - DNA, 122 bp, Homo sapiens
aataacccaagagaaaaatcaccaacatcccccacccactaaattctctgctgaaagacacgcagacaccgggacacttccttcacacgcgtctctccctgtcagagtccgctaccctccat

SEQ ID NO: 418561 - DNA, 122 bp, Homo sapiens
caaatcagcttcactcattaagaagctggggaatctcccatttgcaaggcctggaaacctcgcgcctgcccctggcttgcgcagtggggagtgaggtgagcatcccctgtaacatctgcagc

SEQ ID NO: 418562 - DNA, 122 bp, Homo sapiens
atacaagtaaaggcgggcggcacggggcacggcccacccggggaccccctggatgcggcacggcccccgcaactcggccgccctcctgccgcctcccgtaaccccgggcgcccgccagcggc

SEQ ID NO: 418563 - DNA, 122 bp, Homo sapiens
gaggagacatctctggtgttcccaccaccctagatgaaaatccacagcacagacctctaccgtgtttctcttccatccctaaaccacttccttaaaatgtttggatttgcaaagccaatttg

SEQ ID NO: 418564 - DNA, 122 bp, Homo sapiens
cagaaatgggcacaggtgggagcaaagccagcttacccttgcccagtcctgagatggcatcggtgatcaccaccactttgttctgcacagctgactttgaccacagcctggacacctcttgg

SEQ ID NO: 418565 - DNA, 122 bp, Homo sapiens
ggctggagaagggatgcagagggagctggtcaccaggccatggctgggagagtccaccctcgtggaggaatcagcaactggggccaaggaagccaagggggaaggtgggctgggcagggtac

SEQ ID NO: 418566 - DNA, 122 bp, Homo sapiens
tcacatttacaattaaatgagggacttatccttttgcatccctggattctacaggtggctcggtgacagtcatctcttagtgtttcgattttagagcggctgttaagagccagctaagcagg

SEQ ID NO: 418567 - DNA, 122 bp, Homo sapiens
cgagggagggtggagcaggttatggtgaactggaaacctagaaacgggcctctccaacttcgaagttcccagagtcgggggcgccgggcgcgggcgcggcgggcaggctggggtggggggcg

SEQ ID NO: 418568 - DNA, 122 bp, Homo sapiens
actcccacctcccccaccaggaccataaggcagagcaacagggttgccctggggctcctccgctgttcccaggagtccatgctggggccagctccacacccaccatctaaagagccagctcc

SEQ ID NO: 418569 - DNA, 122 bp, Homo sapiens
ctgtccttcagcatttcccagatctgaccctcaggactcaccaagacagaagagggcggtcggggatggagacatggttcctcagccctgtcctgagctctgtggccagggagggaagtggt

SEQ ID NO: 418570 - DNA, 122 bp, Homo sapiens
cacccgcagagctgcccgagcctctgggaggtcacggggaggaagggaagacggaaacaccgtgacggccacttctgcctaaatcgttaggaactatttcagagtccctgcaacctgaaacg

SEQ ID NO: 418571 - DNA, 122 bp, Homo sapiens
ccacctcacccttacacccaccccctcggaaccgacctccttccacaggggcacagtcagcggcgatagctgaggctggcagcctttgctgggtgagtcacagaccagaagttccgtcgagt

SEQ ID NO: 418572 - DNA, 122 bp, Homo sapiens
ccacttctattcaacattgtattagaggttctagccagtgcataaaggcaaggaaaacaacgacgacgacatctagattggaaaggaagaagtaaaactgtgtatttgcagattgtatgttt

SEQ ID NO: 418573 - DNA, 122 bp, Homo sapiens
tcctatcccgcaccaggccttctcgtttttttttttttttctttaaaatggaagcggcatcgtgaaaggatgatttaactcgaagcctcctttgagggaagtgttggcttttacgttttgga

SEQ ID NO: 418574 - DNA, 122 bp, Homo sapiens
gcgactgagatgggggactgctcttctccgagtgagctggctgagtgtgaccgtgagtcacgcccctgcttccctggagcctgtcccttgcctcacaggcctggctgaggtgggggtgggca

SEQ ID NO: 418575 - DNA, 122 bp, Homo sapiens
acgcaggaggacatctacgtgggctccattgagacagaccggggggtgcgagagcaggtgcgtttctatgacacccgggggctccgagatggggccgaactgccccgacactgcttctcttg

SEQ ID NO: 418576 - DNA, 122 bp, Homo sapiens
ttggaagcagtgagggcgcagagtggggctccatctggggagaggcctctctctgtcacccggccccgtgcggcagttcagggtcccagcatctcccctgcactgggaggcggcagccgtgc

SEQ ID NO: 418577 - DNA, 122 bp, Homo sapiens
cctctggccgggaggtcggggcaaggagaatccctcaaccgagaagatctggcaagtccccgatcccaccggggccttccgcctcttttccctcatcccctaggaggctttatcaggttcta

SEQ ID NO: 418578 - DNA, 122 bp, Homo sapiens
atggatctgatggagagcgtgtggctttgggaggagcgtgccgccttccacagtgagcagcgaggctgggacctgcagggatgaggtcccgggaggggatgcggcagcccttgagtgctggt

SEQ ID NO: 418579 - DNA, 122 bp, Homo sapiens
ccagatggccggggctcaacccggagtgcacgccttgcaactcaagcccgtgtgcgtgtccgacagcctcaagaagggcaccaaattcgtcaagtgggatgatgtaagtattggggcggccc

SEQ ID NO: 418580 - DNA, 122 bp, Homo sapiens
aggggaagagaaacccgactgcgggctcggagccgtttcttgcaagggcgagcgtcaactcggcagggattatattaaccaggtcagcgaaatgagtttgaacccctccgaatcacagtagc

SEQ ID NO: 418581 - DNA, 122 bp, Homo sapiens
ttgttgcctgcagtaattttacggtccagaagtgccttgctgtagcattgctggtaggcacggcagtgcggctcagctgcctgagacagggtcatgggcctttgcccagctcgtctccaccc

SEQ ID NO: 418582 - DNA, 122 bp, Homo sapiens
tcccgcccgctcaggcaccgcccagttgccttggtaaccgtgtacgcgggctcggcgccgcgttctcggaaatcctcgcgagcagtacattctccggctgctgcgggtctctcagggccagc

SEQ ID NO: 418583 - DNA, 122 bp, Homo sapiens
tcctccccagctcggtagacctttgggaggtggggaggagacagggctgatcgcatcacacgcccagccggtccaggaaagggccagaggctcacagcttctgtctcctggctcaacaggtg

SEQ ID NO: 418584 - DNA, 122 bp, Homo sapiens
gagggtacgtgaggtgaagtgaattaaacgaattcctgtggagagctgtttgccctccaacgtactctgcactttcttcagaggcgatctttcttcaggggagaaagaaaagccctttttag

SEQ ID NO: 418585 - DNA, 122 bp, Homo sapiens
ccggtgtccccaccgccatccctgacccatggcgctgaagaggattcagaaagtgagtgccggggccgggcctggggctgcggggcagcggccccctgcccacgctgactcggccagtggtc

SEQ ID NO: 418586 - DNA, 122 bp, Homo sapiens
aattgtttttgcccaaggatggttctgtgtctccgccaggcggcatgtgacctgctcgggcgcgggtggcccttcacccctgtgagtgtggccagaagtacctctcacctggacctgcggac

SEQ ID NO: 418587 - DNA, 122 bp, Homo sapiens
aggaacagctgggcctgaagaggcccccatgtgggaggcagaggccgggcctcctcaagtcggcctctccagacccacttgcagcctcccagcgtcctctccgggcccagctcttcctcccg

SEQ ID NO: 418588 - DNA, 122 bp, Homo sapiens
gtctcactatgttgcccaggctggagtgcagcagctcttcacaggtgcattcttagcgcacgacagcccaggagtcctgggctcaagcagtcctctgacctcggcctcctgagttgctggaa

SEQ ID NO: 418589 - DNA, 122 bp, Homo sapiens
tctctcacggacgccgcggcccgcagggggcggattggcacctgcacccgtggatgggggcggcgtggccagccttgggtgcctcctgggctgcacctgtgccaccttggccgcccggagga

SEQ ID NO: 418590 - DNA, 122 bp, Homo sapiens
acctggaggtcgacagaccgggaggaacgctcgagggagcaccaggcctgttacaacgagcgcgcgccgacgcacgtctccacccacccggcgcaaccgccagagcgcgctcccagcaaccg

SEQ ID NO: 418591 - DNA, 122 bp, Homo sapiens
caaagaaagatggacaatagcgagtaacttcacagggatttcctaagagctccattttcacgtcaattcctcgttagtatagtggtgagtatccccgcctgtcacgcgggagaccggggttc

SEQ ID NO: 418592 - DNA, 122 bp, Homo sapiens
caggagatttacgtagacctgatagaggattcttgtttgggattctgctttgaggtgcaccgggcagtcaagtgtggctacttctacctggagttcgcagagactggtagcgtgaaggattt

SEQ ID NO: 418593 - DNA, 122 bp, Homo sapiens
aactcctgcaggctcaagggatcctcctgcctcagcctcctgagtagcttggactaaagacgcgtgtcacggttcctggccaatgagtttttacttcatttactgtttgaacactgttctgg

SEQ ID NO: 418594 - DNA, 122 bp, Homo sapiens
aattttgcactcttcatgcctggaaaatagtaagcattcaataaatgcccttcaaattaacgagaggataatgagaaaaagactgctctttaaaaaaaaaaaaggatagatatgtctgtgtt

SEQ ID NO: 418595 - DNA, 122 bp, Homo sapiens
gggatgcaggtggtgtctcatggggatgagcggcccgcctggctcatgtcagagaccctgcgccaccttcacacacactttggggccgactacgactggttcttcatcatgcaggatgacac

SEQ ID NO: 418596 - DNA, 122 bp, Homo sapiens
caccgcgcccggacgcagatattttctatgggcatctggaatggcgtccccaaagcttggcgccgtgctatggtcaagccgggtcgggggctcgggccagccttcaacaccgttggcagcaa

SEQ ID NO: 418597 - DNA, 122 bp, Homo sapiens
gcagacacattatccctgccaaaggtcatttgaggggcactcatacgtcacctaggtttacgttttccttttcaacatctgcaaagtaatagtgacctgtggggttaaagtgacctaggcat

SEQ ID NO: 418598 - DNA, 122 bp, Homo sapiens
ctagagtgttactgggaatccttttaaaaattgtttttgtaggctgtgcgcggtggctcacgcctgtaatcccagcactttgggaggccgaggcgggcggatcacgaggtcaggagatcgag

SEQ ID NO: 418599 - DNA, 122 bp, Homo sapiens
ctacaccacgggtgactggagctcaaacttgctgggaacctggggagccacggggtaacacgccgcggagtatcccccttaggaagagggagtgggggtgtctatccactgcttgagggctg

SEQ ID NO: 418600 - DNA, 122 bp, Homo sapiens
gagaaagaaaagaatgaagagaaatacaaatgaggaagaagaaagcaatgaggacagacacgagcagtgtgaggtcagatgtaggaaaggcggcccaaagcctgaggccaagccaaggaacc

SEQ ID NO: 418601 - DNA, 122 bp, Homo sapiens
atgtcatttctgcctctgttaacaaacagaaagcactgcttatgaaatgggttctccattcgtgttccaggaatagcctttattccaggtcctcaccggaaccttgcaaagtgggaaccgct

SEQ ID NO: 418602 - DNA, 122 bp, Homo sapiens
gaacaaagaccttagattcgtttccactcacgtccattactgttctcacagaagccaggccggaagaggggtgggcgctcgcctgggggcagcggcaagccgggtctggggccgccctgaac

SEQ ID NO: 418603 - DNA, 122 bp, Homo sapiens
gaagttaacgcgcgtggcccgcgtgaagggcagcagcactttggggatgttgagcttggccgcagcggcggaggggcccgccgccaacagcaccgacagcgtcagcagcagcagcccccggc

SEQ ID NO: 418604 - DNA, 122 bp, Homo sapiens
cccaggcattctgtgtgctggggcacacagaaaatgaagcagacaggctccctgccccaacgggctcacccacacaaatgcccacagggcctaggaagatccagcctggagggaagccagcc

SEQ ID NO: 418605 - DNA, 122 bp, Homo sapiens
tcaagtgttcatgaacaactctgatgccactaagtttcgttcacaaacttgcacctcggtcgttcttttacaaaaaaaaaaaagaaaggttattttgcaaaaggcaatagatttaatcttgg

SEQ ID NO: 418606 - DNA, 122 bp, Homo sapiens
atcactcagacattgctagtgtcagtggccgctggtagcagcaccctcttggcacatgcccgctgactaactgtaaagtggacacaggagatgtatgaacagccttcacagcacaccatcct

SEQ ID NO: 418607 - DNA, 122 bp, Homo sapiens
gggttttcattgtggaatttcttatttcttgttagtatcttcctttgaagcaaatcccagcgccaaacatgtttcaaacagatagggaacgtatccttaatactaagtagtaagtaaaagga

SEQ ID NO: 418608 - DNA, 122 bp, Homo sapiens
tgtatgagcacgagaaggacctggtgtggaagctgcggcatgaagtccaggagcacttcccggaggcgctagcccggctgctgctggtcaccaagtggaacaagcatgaggatgtggcccag

SEQ ID NO: 418609 - DNA, 122 bp, Homo sapiens
ctctgaacaaaccataaagaaaattagtccacccaagattcagtgagactatattcaaggcggtacaatttttagtactttattctaatatcagaggaccagaatctaatctatagttgtgg

SEQ ID NO: 418610 - DNA, 122 bp, Homo sapiens
tcgatgaacaccatgaccgtgacacccgatgaacatcccgacaatacattcgatgaacaccgtgactactgacatttgatgaacactgtgactatggacactgaatgaacagcatgactaca

SEQ ID NO: 418611 - DNA, 122 bp, Homo sapiens
cgccttcctcgatgtacttccggctggcctgggactcaggctgaacattggttctctgtgcggggcggtggcggggattggagggcgggagctgtgctgacttaggattggcaaaatcgcta

SEQ ID NO: 418612 - DNA, 122 bp, Homo sapiens
ggccagcgcccggcccgggagtgcaattgtccacccttcgtgccccgccagtccattggccgtcttggacaggggcttgtggtgggaaccctggagtttcccggctctccttggccagtaaa

SEQ ID NO: 418613 - DNA, 122 bp, Homo sapiens
gacccaggcggcgcccaaagcctgggcgtccctccgctgcagtgaaagggaaaagaaaaccgggctgcggtaatgcctggagccaaaatctcagggagaagcccagctcccgacacctaccc

SEQ ID NO: 418614 - DNA, 122 bp, Homo sapiens
tcagagggtgggcaggatgtggaatgtcagttcatgaaccgtgtagttatatggagaccccgccctggaggccttagctgccagggttacaagtaggtgtcctcactctcttgggacgtcaa

SEQ ID NO: 418615 - DNA, 122 bp, Homo sapiens
gtaacagcccacggtgttctggcaggaaaacaccaggtaagaaaggaaactgggtcctaacgcttggacttctctaacctttgtagaccagcaagacagaaacaactggttcaggagctctt

SEQ ID NO: 418616 - DNA, 122 bp, Homo sapiens
cctgcggaggcagtgggcggggctgaagctgcaggtctggcagagggcgggctgcggcagcgcctccagtggggagggataattctacctctcccccaagcttttgccaagaactttatggg

SEQ ID NO: 418617 - DNA, 122 bp, Homo sapiens
ttaagagctgtaacactcaccgtgaaggtctgcagcttcactcctgagccagcgagaccacgaacccaccagaagaaagaaactgcaaacacatccgaacatcagaaggaacgaaatccgga

SEQ ID NO: 418618 - DNA, 122 bp, Homo sapiens
tgtttgaggaagtgtctgacctgggcctgagagctggagaaggtgcagattcaaagtgagcggctcctgaggagagccgccaaggctgctcgccttctccgtggcttccgcagctaccgtct

SEQ ID NO: 418619 - DNA, 122 bp, Homo sapiens
tggtctcccaccctgagagggtgatccccccgccctgccctgcccagcacttaccgtagccggacttagctgagccccccctgctgtaaccctcagcaccgagagaaaaggagggaggatgg

SEQ ID NO: 418620 - DNA, 122 bp, Homo sapiens
tcctccagagctagatagctccttggttgcggccagcaagcgaggcttgtttgggagttgcggaggacttcttcactggaagtggggtgcctcagtgaggccaaggcagagtaggagaagag

SEQ ID NO: 418621 - DNA, 122 bp, Homo sapiens
atgctcacggatgtcacgcagcaggacctggcagggctggcctctgcttacagaggccgacgttccctcgccctgagacatcaattttactccatctcttcttgcctcaaactttccatatc

SEQ ID NO: 418622 - DNA, 122 bp, Homo sapiens
aggagggtggggcggccggcacaggccgcgcccccagcccgagccccccagtccccttcgcgctggcgctctccaggcccggctgacgtaatgctccgagccctagggaccgtccggggggc

SEQ ID NO: 418623 - DNA, 122 bp, Homo sapiens
aggaattggacaacagcgatgaggatgtggtgcagcaccaggaccatgctcgcagccgcccgcccgcccgccggcccggccgctgcgctcggtcagcgcgtccgcgacagcttcgcctggtc

SEQ ID NO: 418624 - DNA, 122 bp, Homo sapiens
ccgcctgcgtcctactagcctccctcaccgctttgatcacaggtactgcccgcctctcctcgcccccaacccgctgccttggtggtggtggggggatggtttctgcctctctggaccagggg

SEQ ID NO: 418625 - DNA, 122 bp, Homo sapiens
gcaccaccccgtccctgaaagtggatcttttcctctgaaaaaacaggaatgagaactgcccggaagcctggaacattccaggttctgatgactcagcggctgaaggcaggatttgtgtcacc

SEQ ID NO: 418626 - DNA, 122 bp, Homo sapiens
caactccactttcctcggaatcctataataaattgctgttttcctttgtttggtgatgtgcgtagctcttctggtgggtggtgtccctcactgaataggtcaacaaacctaactttgttgga

SEQ ID NO: 418627 - DNA, 122 bp, Homo sapiens
taaccaacagagttgcaacacctgctccatgcaaggtgctgagtgacacagttctacacccggagagatcctgcgctggcgggggagacagatagagacacaaatacatttcacaccaggca

SEQ ID NO: 418628 - DNA, 122 bp, Homo sapiens
gtggtaggcaagtacgggtcccagatgagtcccctagagctcacaccccaactggatcgccgtccctgaaacccccatgtccccgtctggagctgcacgtccagcccagcacgttagttggc

SEQ ID NO: 418629 - DNA, 122 bp, Homo sapiens
tgcagccccaccccccaacccaggcccggctttctgggactcacaagctatggtcaggagcgagacgccgaccatggggaaaaacagattctgtctagacccggccgggagctttcccgaga

SEQ ID NO: 418630 - DNA, 122 bp, Homo sapiens
agggtggggccggggcgggtgggagtgggaccccggggcctgtgggcggtacccaaccgacgcctcctgggacctcggtcccggtcccgtcttcctccatccaggaccaacctgtgccgatg

SEQ ID NO: 418631 - DNA, 122 bp, Homo sapiens
gctttagtaggtgccgcggacactgtgcccggctttagtaggtgcctcggacactgtgcccggctttagtacgtgcctcggacactgtgcccggctttagtaggtgcctcggacactgtgcc

SEQ ID NO: 418632 - DNA, 122 bp, Homo sapiens
cgggctcctcggagccacccagtggggatgtgtgggtgcctcggggccggccccctgcagcggccgcagaggtgttggtgtgctggaccgggggcagctgggtgtggcgtgagtggggccgc

SEQ ID NO: 418633 - DNA, 122 bp, Homo sapiens
agtgcctccttttggggccagactcctgggaaaaccccactcctccagtgacctgcatgtcggggagggagccacttaagtcccggcctctcctgaatggataaccagtgtatcttggaaga

SEQ ID NO: 418634 - DNA, 122 bp, Homo sapiens
tctttaaaaagtatattttgagggatgtaatactacctattaggtacaaggtgcactgttcgggtgacaggcacactaaacgcccggacttcaccactatgcaatatattcatgtaacacaa

SEQ ID NO: 418635 - DNA, 122 bp, Homo sapiens
tcctcccctgcagcttccatggcctggggctgtgagaggcccgggaaggcactgtctttgcgcctgcacatgtgtgtgtctggagtgtaggatggcactggtgccgggcctggatttactca

SEQ ID NO: 418636 - DNA, 122 bp, Homo sapiens
acctaatattattttacttttaaaagggctcttcataccccaactgtaggagcctcaggtcgggaaatcatgggtcctgatgaagagttcagggatggtttatgtttagatcatgacaacat

SEQ ID NO: 418637 - DNA, 122 bp, Homo sapiens
agccgactcatcgtgggctgagcattgaacttcttctgttttacgctcccctcataactgcgccctgggcccgctcctcagctttttcctctccagctgcaggagaggaggatctatttgct

SEQ ID NO: 418638 - DNA, 122 bp, Homo sapiens
tgggactcatagcacagagaaacagacggcctggctcatactccgttgtcaatttctggccgtgtgacctccataggcgtcttcagcctctgggcttggctttcccaatctgtaaagtgtag

SEQ ID NO: 418639 - DNA, 122 bp, Homo sapiens
gcccccaggccatggacagccagaagcagttcagcggtccagaaatccagttcctgctttcgtgctccgaagcggatgagaacgaaatgatcaactgcgaagagttcgccaaccgcttccag

SEQ ID NO: 418640 - DNA, 122 bp, Homo sapiens
gtgtttagacacatctgtacagtgagactcaagaacagtgaggatgtgattcacgcaagacgtggggcaaaggtgccctcaggtggggagggcattgctacgaggaagagaagggctctgaa

SEQ ID NO: 418641 - DNA, 122 bp, Homo sapiens
ataggtgcaggatggtaaagtggccaccgctcagaaacactgtggagacctccgtgcctccggccctttatgggcctggatatgacacaaacagctgaagtgcaagccccggcgtgtgggag

SEQ ID NO: 418642 - DNA, 122 bp, Homo sapiens
attccgttgtgtgttcctctggggtaagcaagtagcatttcctcccccagagtccgcggtcgggatgctgtgcaaacttgcctatctctgaaaacagacgtttctgcggtacccgcaccctg

SEQ ID NO: 418643 - DNA, 122 bp, Homo sapiens
gcagggcggtgccctcctctgcaggcactgtggctacagcaaggccttccaggactcggacgaggagaagatgcactatcagaatggacagggtgagtgcaggggcccggtggtctggggca

SEQ ID NO: 418644 - DNA, 122 bp, Homo sapiens
ggagggcgtgtgtttgtgtgtgtacgttaacgtgaggatttagtgcccaggggaacgtttcgtgttttgttttttgattgtatgtggggttgtgtacagcgatgtgtgtgtgtaactgcgtg

SEQ ID NO: 418645 - DNA, 122 bp, Homo sapiens
accagcagtgggggcaggttgaggtggttcaggctgtctttgaggggtacaatggcggcccggctggcccgagggtcgacctcgctgacttccaaggcgtccagcccagaggcccccagagc

SEQ ID NO: 418646 - DNA, 122 bp, Homo sapiens
gagctggaaacggggtggaatgggacgaaaatcttccgcgggagtctggccatccctaatcgaactcctctctgaccatagtctctgacgtccagcctcttctcctctggttgttcaaacgc

SEQ ID NO: 418647 - DNA, 122 bp, Homo sapiens
ctactttttggatttttcgtagaggcggggtctcgccatgttgcccaggctggtatccaacgcctggtatatagaaagtgccttcgtaggaaccattattaatgcttctcagagagacctgc

SEQ ID NO: 418648 - DNA, 122 bp, Homo sapiens
ttgactacttattgaggtcacacttttaatgcagtcttataaaagtttcacatgctataccgtcttcatctacaacatcatttataaggcatcctagagtttcatagggtgtttactaattc

SEQ ID NO: 418649 - DNA, 122 bp, Homo sapiens
gtctccgccggttgaaagcgcgtgtctgcgtcgggttctgttggagtgcgttcggtgcgccgtgggtccgcgctgcttccacccaacttcctgttaggtaagaggcgcgtgaggctcctgtg

SEQ ID NO: 418650 - DNA, 122 bp, Homo sapiens
ctattacggctcctaggctcaagtgaacatcccagtagctgggatcacaggcacgggtcacggtgcccggcttttaaatttttggtcgagacggggtctcgtcatgttgtccaggctggtct

SEQ ID NO: 418651 - DNA, 122 bp, Homo sapiens
aggagcatgcagacgggcaggtgcagaggccgtggggagcgcttctgggctctgacctcacggcagcgtctagggatggctgtctgtgactcccgaatccctagtgggcgtctcttacagtg

SEQ ID NO: 418652 - DNA, 122 bp, Homo sapiens
tgccagaggtcagaaggctaagccaggtcaggcaagccatgaaagagaccaccttgtcagcgttcaggcaggacactcagggagatccaggacagggactcatgccttggacatagatgctg

SEQ ID NO: 418653 - DNA, 122 bp, Homo sapiens
ggaggtggacattgcagtgagctgagatcgtgccattgcactccagcctgagtgacagagcgagacttttgtctaaaaaagaaaaaattgcagacaccagcacgcatccatgtcctgagaag

SEQ ID NO: 418654 - DNA, 122 bp, Homo sapiens
cgaggtccagagacttatccaagaccccagagtaccagtggaaatcaagaccaaaccacacggtggagactggttccgacgtatcagactcagtgcttccggcatggcgctttagtgtcagg

SEQ ID NO: 418655 - DNA, 122 bp, Homo sapiens
aacgtgcagccctgatgcagccgcctgagacccgcctttgcagcagcctgccaggaggtgcggatgctgccggcgcctggaccgcgcgttgagcagtgcaggtgaacagctcgcctaacgca

SEQ ID NO: 418656 - DNA, 122 bp, Homo sapiens
gcgctcctcacttgccagagggtgggcggctgggcagaggcactcctggggcggcaggggcggcagctgggcagaggtgttcctcagttcccagacggtgggcggccgggcagaggcgctcc

SEQ ID NO: 418657 - DNA, 122 bp, Homo sapiens
cggctgatgcatgcaaagcgggcatctccttgcccagccgcctgaccgccctggcgcggccgaatctgaaagctaatgacattattgtgcagagacacaatgtctgtgggcatttgctgacc

SEQ ID NO: 418658 - DNA, 122 bp, Homo sapiens
tggaagagaggaggccacaaacaggagtcccatatccaactccaaatctcaggccctaaacgtgacaggggctgcaagttgcaagatgttcatgggctgttttgataatagagagaacacgt

SEQ ID NO: 418659 - DNA, 122 bp, Homo sapiens
tgtgagactggcccaggctcgccacttgcccctcacccggggttgccttcccgagggccgcggacacctgagcagtccccatgccactgcattgtggcagggacacggccgcccatccctcc

SEQ ID NO: 418660 - DNA, 122 bp, Homo sapiens
tgttggatgccaacatcagttgacttggaagtagtgggccaactattggctaaagaaccacgcaagcattactccctgaagaatttatttgtgaaccttagtggaatgtttactggtctacc

SEQ ID NO: 418661 - DNA, 122 bp, Homo sapiens
tgtgagtttttactcgcttcaaactattacatgccaaggcattcccaagggcgatgttcccggtagtactccaagtgcacttaacacgtgtggacaagatcttagtccaggtagcagtaggg

SEQ ID NO: 418662 - DNA, 122 bp, Homo sapiens
gtctgccctgctggccccgacgtgcctgactctgtgcggtgatggccacggcccctttgccgccccatagccccccatggtgcaatattgctcagagtctacagcaggcgctccctcagtgc

SEQ ID NO: 418663 - DNA, 122 bp, Homo sapiens
cacctccaccttatcctggagaatcccagacagatctgcaaccccccgcaggtgcacaggcgctgcagccttctgaggaaggaatggagacagatgaggctgtatctggcatcctggaaact

SEQ ID NO: 418664 - DNA, 122 bp, Homo sapiens
caggccagtgacggccctccctgtccttcagtccctccctgccaccacgaagatgggaaccggtacagcaccctgttcgcaagcttcgtaaagcaagtccacccagccctgccctgggattt

SEQ ID NO: 418665 - DNA, 122 bp, Homo sapiens
gtgtgtccatcaaagagcatgttagctcctgagcagcagatgctctgtgaattttagctccgataatgaccttggccacgtgaacaccatcctaaaaggcctgagcggccaccatgaggcgg

SEQ ID NO: 418666 - DNA, 122 bp, Homo sapiens
cataaggaaattctgtgttaagctaggcagtcatgtgctcaccttgcagtaagctgttttcgcatgagctttaagaagttaaagacaagaatgctaattgtacctcacaaaagcatcctaaa

SEQ ID NO: 418667 - DNA, 122 bp, Homo sapiens
tgtgcttgcgccctcgaccgtctcgcccagggctccccgccccacccctcgcccggccgccggctctgggcacccgactctgccctaataaggaaagtgggtgtgccgcccaggagccccgg

SEQ ID NO: 418668 - DNA, 122 bp, Homo sapiens
gaaggtggccaggtaaggctgactccatgtgaagaagagaaggaaggaaaattgaatgaacgcattcttgaccaccagtgcagtctaataaagtttcagcaagatcattaggtaaatcccca

SEQ ID NO: 418669 - DNA, 122 bp, Homo sapiens
ctgcttcccagcttctagcaattctcctgcctcagcctcccaagtagctggggttacaggcgtgcaccacgcctggctgattttcatgtttttagtagagactgggtttcaccatgttggcc

SEQ ID NO: 418670 - DNA, 122 bp, Homo sapiens
gccccgctgtttgctagagagcctgagagatgagtcattggtttctagcctggagaaagacgcctgcgaggcgagactgtcagggtctctgccgccctccccaggagctgtgtccctgaggt

SEQ ID NO: 418671 - DNA, 122 bp, Homo sapiens
ggatgtggggagaccaacaatgttattctccctcacactacacacaaaagtaatttcagccgcattacacaccaaaacttaaaagttaaagatataaagcatttcaaggatagtttgtgact

SEQ ID NO: 418672 - DNA, 122 bp, Homo sapiens
tttgagacataatgagtttgagatggctattggaaggaatccaagagatgtcaaacaggccgttagatacatatgccttgagtttggaaaaaatttgagtagtaatttaaatgtattagtca

SEQ ID NO: 418673 - DNA, 122 bp, Homo sapiens
acatgatgaccagagactacctgtcggtgaaggtgtgggacctcaacatggagagcaggccggtggagacccaccaggtccacgagtacctgcgcagcaagctctgctctctctatgagaac

SEQ ID NO: 418674 - DNA, 122 bp, Homo sapiens
cgggcacgtgcccgccttagagccaccgggcatgcgtccgcctctgaaacaccgggcacgcgtccgcctctgaaacaccgggcccgcggctgcctctgaaacaccgggcacgcgcccgcctc

SEQ ID NO: 418675 - DNA, 122 bp, Homo sapiens
aaatatatcaatcaggggaaattatagaggcaagggatatgacagcagctgtgtggtttgcgtaatgattctggactcccaacatttctcagcttggtagtacagaggatgaggactaggaa

SEQ ID NO: 418676 - DNA, 122 bp, Homo sapiens
cttagtgcctaaagtgtctgcacatggaaatccagaggtagacagagagaaactgagttccggacaatgcattcactagtgagtaggggatgcttctttctactgaaattatacccatattg

SEQ ID NO: 418677 - DNA, 122 bp, Homo sapiens
gacgtctgcctccaggccttctcagtgttgttgcctctggctccagcgaaccacatttttcgtcagagcgtggttggttcagttgaccctataggattgactcctgtaggaagcctacccag

SEQ ID NO: 418678 - DNA, 122 bp, Homo sapiens
agcccctttgggcttccctcttctctggtcaccgtgtcttccaacccacttgtccagggccgcctctcgccttggggagcccaaaacaacagccaccaggcctgatagagaagaaacactgc

SEQ ID NO: 418679 - DNA, 122 bp, Homo sapiens
caggagatcccttcaggctgccagttttctcctccagcaatcttgcttgtccttttcaggcgcatgaaatatttctcctggacctcttgtcctttacaggccctggggggctcaggctgtca

SEQ ID NO: 418680 - DNA, 122 bp, Homo sapiens
ggctccaggctgcgaggtgcgtaatccccagccggcccctcgcgcagcgggcacggccagcgctgccacaggtgacttgatttctgcgacggtagcttagccacccggggccaatctcgaaa

SEQ ID NO: 418681 - DNA, 122 bp, Homo sapiens
accaagggccgcgtcgcccggaggccgcccctgagcgggcctcgcagccccgccgtccagcgctccctggccctctcccgcagccaggctgccaactcattcgggagcccggggcatgaacg

SEQ ID NO: 418682 - DNA, 122 bp, Homo sapiens
gccagccaagctccagtgttgtcggtgtcacagccaccactcggaggtcctggggcccatcgatcactagccaggttaaagaggaggactcaggtgggtgtctggttcttcaatcatcatct

SEQ ID NO: 418683 - DNA, 122 bp, Homo sapiens
ggctgcttcctgtgaagggtgtggctgcacagctgcaaaccatcccatccctgcctcacccgcacaggtggtcgctgccacctaggacagcctggactttgccatctccttcttgcggagta

SEQ ID NO: 418684 - DNA, 122 bp, Homo sapiens
agtgtgggtttgagaggcgctctgaggcccgacagcttctgatcccggatggggattatgcggccggtgcctcggctggctcagccgtgaaaaataaaacagggtggattccaaacgagacg

SEQ ID NO: 418685 - DNA, 122 bp, Homo sapiens
tggggtgggggggcgcggccggggcgagtgcgtccagttctccttttggttttcctagagcgttgtttgtgatgtctttattggtttagggagtccgagaggctctatgctggctatctcgg

SEQ ID NO: 418686 - DNA, 122 bp, Homo sapiens
cggttatggaggtaccgcctgcgggattggagtgccccttgcggctgtgggaggggcagtcgggggctggggggacgcaggtacgcctgtcgccaggacgcctctaccctggacggtaggag

SEQ ID NO: 418687 - DNA, 122 bp, Homo sapiens
tgccatcttgagtgagggcacgctctccttagaggggcggaacagtttttggcaccttatcgcgagcggcagcttatgcaagagtgatttaaaaaagaaaggcaggtccggagccaggggct

SEQ ID NO: 418688 - DNA, 122 bp, Homo sapiens
gtgtgtgtgtgtgttgaagtctcgccctgttgctcaggctggaatgaggtggcacgatctcggctcactacaacctctgctccctgggttcaagcctgccacaacctccagagtagctggga

SEQ ID NO: 418689 - DNA, 122 bp, Homo sapiens
tgaattcctgacctcaagtgatccatccacctcggcctcccaaagtactgggattacaggcgtgagccaccacgtctgctggtcttatatttttagatatcatatggtctcaggaatttgag

SEQ ID NO: 418690 - DNA, 122 bp, Homo sapiens
ccaccaactcaggagaccccgccatttttcgtcggaactgtgggcggggcactctgggagcggaaaagcgggttcacactggtgtaaccagcatgcatccggctggaaactcaggacgctgc

SEQ ID NO: 418691 - DNA, 122 bp, Homo sapiens
gaaagtcccaggaacaggctgatcctgcgctggcgagaagctcagccatttaggggaaagcgaaatcgaaagcggccgcctgctcactagataacgcctacttccaaaagtggcctgcccag

SEQ ID NO: 418692 - DNA, 122 bp, Homo sapiens
ccaggtgtcaagtgatcctctcaccttggcctcccaagttaatttttttttttttttagacgtgatctcactctgtcatctgggctgcagtgcagtgacacaatcttggcttaccgcagtct

SEQ ID NO: 418693 - DNA, 122 bp, Homo sapiens
aggtggttgtgaggtgtccgcacctgcaacatcttagtgaccctgaggcggctgtggcaccgggagacaatctgtttacctcgtagcctccacgagggtgctaacggtcgttcccagggtga

SEQ ID NO: 418694 - DNA, 122 bp, Homo sapiens
agggctccttggtcaagcggtagtgccagtgtttgggaagacgcccattacttagcagaccgcgaaagggagtcacctttccttggaggagtcagggaacactccgctccaccagcttcttg

SEQ ID NO: 418695 - DNA, 122 bp, Homo sapiens
cctccttccctcccccaccctaccgccaccctcaccctcctcctccttctcctcctcctccgccccttgccggatttttgtgcaaagtttgcaggcgtccggccacgcagcccggtgcggag

SEQ ID NO: 418696 - DNA, 122 bp, Homo sapiens
tgtggctctgcctttgcttgccagtggcctgtgggccacagctgcctactcggaaccctgcggagtgttctgtctctaatgctcacaagtgcctggcaaccaggatagaagatcagttgtgc

SEQ ID NO: 418697 - DNA, 122 bp, Homo sapiens
ccctgggccctggcggttcaggtgttgactggttctgtccgggggtagccctggccttgccgggaggcagcgaggccacagcttaggggttgagcgaggtgtccagggctgaatcctggatg

SEQ ID NO: 418698 - DNA, 122 bp, Homo sapiens
cccagctcctgcctggcgtaggcccctgggggcacggcctctgccccacagtggcccctccgggcccagctcgtgcctcggcttggccgcctcaggcccagctcctgcctgtgggcggcctc

SEQ ID NO: 418699 - DNA, 122 bp, Homo sapiens
gctcacaggccgggggtgggggctctggaccgaggggcggcgcggggcggcgcggggcggcgcgcgcggtcctggagcgctagtacttgcttctcgactccccggccgccgcctccggccgc

SEQ ID NO: 418700 - DNA, 122 bp, Homo sapiens
tttaggccacttctccgaccgccgcgccgcttccgctgcccgaggaagagccgcagtcgacgagcgaaaaaccagcaccgcccaacgaacgaccaaaccgctctgcgctccaagcccccgcg

SEQ ID NO: 418701 - DNA, 122 bp, Homo sapiens
tgtcctagaaaagctgccagctcaggctcaagcagctgtgggctcccagcttctctctgccgacccccatcccactttgcctgctgcctgtttcctccttgacctccaggttctgtgtgcct

SEQ ID NO: 418702 - DNA, 122 bp, Homo sapiens
gccagggactcccagggtagctccgtccactaagggcggctggaggctggggagtcccggcgacggcggcgggggcatccgtggattaggatgtggattgcaggacagacctttgtttggtc

SEQ ID NO: 418703 - DNA, 122 bp, Homo sapiens
cacccgggctcggcgggggagcgactcatggagctgccgtaaggtgtggctcttggccttcgtcggcggggtgccgggagcgggagctggagagtgaggagcaggcggccgtaccgccagtt

SEQ ID NO: 418704 - DNA, 122 bp, Homo sapiens
cctcttcaccatcctacggagcctcgaggagccagggaggatgtgggcagagggtggggccgcctcctgcggagagcagccagtcacggggctgtgcagtcaccctgcccccgtcctaacca

SEQ ID NO: 418705 - DNA, 122 bp, Homo sapiens
cttttagagagtaccacattttccataccagacagaattcctgattatctctgtggggatcgatcacaaactcagttgcattaaggggcccagcaggtctcatgattgtgaatctgctagtt

SEQ ID NO: 418706 - DNA, 122 bp, Homo sapiens
ctgccgggtcaccacaggcgcacgtgttccggcagggcgcggcttccggtgacccagctccgccctaagccccatcccaagccccgccccttgactgttctcgcgttcgcggacggctgtgg

SEQ ID NO: 418707 - DNA, 122 bp, Homo sapiens
gctcctgcagatcggggtcgaggtcaaagacctcattatccagcagccttcgcagcgtcacgtcggccagctgctccatgaccttaaacacctcatccaggttcaggaacatggagaagtca

SEQ ID NO: 418708 - DNA, 122 bp, Homo sapiens
gcgtcgctctcattaacccccaatcagttcacctaataccaggtcgaaatctgagcgcagcgggagggcgtggctgcgcctgccgctaggctccagccggctccgggggcggtaccccacag

SEQ ID NO: 418709 - DNA, 122 bp, Homo sapiens
ttcaagcggcccctagcgccctcaggccggtctccagtggaaggcctgggcagggcccatcggagccctgcctcaccaagggtgcctccggtccccgactacgtggcacaccccgagcgctg

SEQ ID NO: 418710 - DNA, 122 bp, Homo sapiens
ggggcgggactaaaagggcgtaggtagatcgccgggggctgacgagtgcaccatggccaccgcggcaacctcacccgcgctgaagcggctggatctgcgcgaccctgcggctcttttcgaga

SEQ ID NO: 418711 - DNA, 122 bp, Homo sapiens
tcttggcacatccctggcctcaggccctcacctaacagtgaggcagcagctgcccagccccgcaatgtgcctgctgtcaggcagctcttgcctgaaacttacttccacattctttcctgatg

SEQ ID NO: 418712 - DNA, 122 bp, Homo sapiens
cctgaacatacagcagtgcacatgtgtcacatgtgtactgcacagacggtaattcactaacgtctccggaagacttaagccttcctcaggtcagaagaggtaaaaagaaatggaggctagga

SEQ ID NO: 418713 - DNA, 122 bp, Homo sapiens
cgccccaggaccgcgcggtgcaacctgcgcatgcgcacccgcgtcccgctgctgtttagccgtttccaaggctacgaagcccatcggccggggataagagagcaagaaaatgaagctcaaga

SEQ ID NO: 418714 - DNA, 122 bp, Homo sapiens
acgacatggggatcataaagccgggatgcagttgggaataaaaccggataaagctcccaacgaaccgcgggtttcataagatcagggcagggactgggtaaaaggtttcaaagactcctgca

SEQ ID NO: 418715 - DNA, 122 bp, Homo sapiens
agcccctttcccacgctgtcatgtggcatgaggacactctcacaaccacagtcacacacccgggagccctgcctggcttcagctgcccgacatccctcgggagtcagagcagaggcgcacac

SEQ ID NO: 418716 - DNA, 122 bp, Homo sapiens
tattttcagagaactacattcttggtttcaacctgatgtcataggctgtgttctttgcaacggaagaagcaaagacttcaaagggagaaatcggaagatttcttttttcatcgtagggactt

SEQ ID NO: 418717 - DNA, 122 bp, Homo sapiens
ttggtgaaacattgtaaactctcagaagctgccgtttccagactttgagttcattcttgtcgaatccccagcttgttttctcagcccggggtgaaatgcgcagccaaaaggcccaatgagcg

SEQ ID NO: 418718 - DNA, 122 bp, Homo sapiens
tgccatggaagtgtgtggacagccccattcatgatgacatgtgacactactggcttttcccggcagtcacaccccctgacccagggcctgccagcttgggtaagtggggcccatgcttgacc

SEQ ID NO: 418719 - DNA, 122 bp, Homo sapiens
cagacacaacggcgcagcgcagggcacgcgtcacccaatgggcgtgaggttcggacacgacggcacagtgcagagcacgtgtcacctgacaggggcgtgaggttctcctgcacagagctggg

SEQ ID NO: 418720 - DNA, 122 bp, Homo sapiens
aatactttagtgcaataatgaaatcaactaaacgtcttgtgcttaatgtttctttccccacgccactagaattgtatgcataatcattctatgcaacatattgaagaaaccaaaatgtttgc

SEQ ID NO: 418721 - DNA, 122 bp, Homo sapiens
tttctattaccttttttaaaaatttcccttgcctctgtacccctattatcttgattactccgcttggtacctcccactctccctccttctgagaactttacagtctcattagttgtcctctt

SEQ ID NO: 418722 - DNA, 122 bp, Homo sapiens
ccttttacgccctcattccttccaggtacaaacgctatctgggctaggccaaatgtggctcgcagcgggtccgggagcggggcacctaccggcagctcccgcagcggaggcgcgtcccccgg

SEQ ID NO: 418723 - DNA, 122 bp, Homo sapiens
gtcagctaagaggcgggtgcccgtctgagagggacccttttcccaaggtcagctaagaggcgggtgcccatctgagagggaccctcttcccaaggtcggctaagaggcgggtgaccgtctga

SEQ ID NO: 418724 - DNA, 122 bp, Homo sapiens
caggccaggtgcataaacaaggatcgggtgacgatggggcgtaaaagcgaggaacgtcggcggctcccactacatggaggctcttcacttggcatgtttttgttttgtttttaatagaccga

SEQ ID NO: 418725 - DNA, 122 bp, Homo sapiens
tggctgcgccatcgcccgtcagacaaagctgaacgaatacaggcaaccattggataatatcgctgccactccagccaacggaaagccgcctttaagtagggtcgcgaaggaaggcgctgcct

SEQ ID NO: 418726 - DNA, 122 bp, Homo sapiens
agaggtttcccaccagatatactatttcactatctatgccaggaaagttacgtaaaaccacgcagaattttacctgacaacgaaatagaccttttcgttagatcctccaccccacctaaagc

SEQ ID NO: 418727 - DNA, 122 bp, Homo sapiens
gacgaggcaggagtgaagtatttcctggagatgtgtcaggacctgcagctcactgacttccggattcgggtaagttgcaccactggggtggaaagtggacaggagatgagacagagactacc

SEQ ID NO: 418728 - DNA, 122 bp, Homo sapiens
ggtgtgaggccacagcatggtgcgagcggtggggtgaatttgctcccagacatcagcaggcgtatggggccttttaaccatgtccgggtcctggttgagtttggtttctaaagccccacatg

SEQ ID NO: 418729 - DNA, 122 bp, Homo sapiens
gtccagctcgagacctgtgcggggacaggaggtgcccggtgacagcgccaagctccaccccgaactctcccagaagaactcctcccagtaattcctgggaatgtggtggtctctccaattca

SEQ ID NO: 418730 - DNA, 122 bp, Homo sapiens
acacaggtgtgggctatggttctgagacaccattcatctcacacgaggtacggcgatacgcgacaccacccagtacaacagctctctctccacctggaacccggacccagcttgattcgcgg

SEQ ID NO: 418731 - DNA, 122 bp, Homo sapiens
tgcccaccctcaacttctcgccggagcaggtggccagcgtctgtgagacgctggaggagacgggcgacatcgagcggctgggccgcttcctctggtcgctgcccgtggcccccggggcgtgc

SEQ ID NO: 418732 - DNA, 122 bp, Homo sapiens
agtttctacagatcattttgccttttatatctttttctaaaatgttgagttgtgtttcttcgaagtaacataaaagtagcatttgttttttggactaagattgtttgtgtgtgtgcatgttt

SEQ ID NO: 418733 - DNA, 122 bp, Homo sapiens
ggatgaagtgatttaaaggcagagaaaaaggatgaaaggtaaattgttgccagattgtagcgtcctctagtggcagtctaaattcggactttattctgtgtcggaatcttccagaagaggag

SEQ ID NO: 418734 - DNA, 122 bp, Homo sapiens
gaaggagggcctgacagagggaggagccaactgtgacgcagtcttcatggaagctccagtcgattctgtagggagttctgcaggttgggtagttctttggagtggtcccaagcagagtgagg

SEQ ID NO: 418735 - DNA, 122 bp, Homo sapiens
gctttttcttagatgcaactcgctggttcccgagccttccgcggcttggttggggcttctcggtcttaacgtggttaccggtgcactgaaactctcagcagcggttggagggcgaggtggtt

SEQ ID NO: 418736 - DNA, 122 bp, Homo sapiens
gtttctacaatgggctcaggattatgcagacaaattacataagaacacctgcttgatatgcggacttacgcctctttccagtggctccagcctccagtggtgggtatcctccttccaaggtc

SEQ ID NO: 418737 - DNA, 122 bp, Homo sapiens
ttgcagacaagcaggataaggccctgtgggtctggtgaaaatcctgccaaagaggactgccggaacagcaggggtatgatctcaacaaaggggatgaccacccgattctcagaggctgaaag

SEQ ID NO: 418738 - DNA, 122 bp, Homo sapiens
gccaccaaaatgcagattttcgtgaaaacccttacggggaagaccatcaccctcgaggtacgggccgggtggtcatgaggaagccaaggtccgaataaggtcctgaggtggattttaggacc

SEQ ID NO: 418739 - DNA, 122 bp, Homo sapiens
gaaatttgaaaggttttatttcctaactacaggcagctttaagaggctgattatctgccacgaccccccaggctgggaggcggcagcagggcaggggagagcaaggggctttggggtcgacc

SEQ ID NO: 418740 - DNA, 122 bp, Homo sapiens
ggaacttccttatcctatcgtttccacacggaaagattttaattcaccggaatcgactggcgttaaagggcacagtgaaaaggaagttggtatcaacgtgatctcgactaagggaccgagcg

SEQ ID NO: 418741 - DNA, 122 bp, Homo sapiens
agatttgacgtcacagacagcaggcagcacagaggagacatgccacctgttggtgccaagcgtgtcctaccttggaaacatgagcaatcaatgtgctgacctttcttcctggagagtttgag

SEQ ID NO: 418742 - DNA, 122 bp, Homo sapiens
accccgcctcctccttgcctgtgtgcgcccccaccctctttatcccgggggagcgtgactcggcctcagggcacccacggtcctgggagctgacagggaattcctcttgtgcccgacgaata

SEQ ID NO: 418743 - DNA, 122 bp, Homo sapiens
ccagacaaagatgtcacaagaaaagcaaatagcagaccaataatctcttgggaatacaaacggaaaaaatcttcaacaaaatactagtaaaccaaatccagcaacatagaaaaaggattata

SEQ ID NO: 418744 - DNA, 122 bp, Homo sapiens
tcgccaacaagcggtgctaccaggagaaacgcctgcttttgaagaaaacagccaggaacgcgactgaaagacacttgctcccaggaagaattggcatttgttccaaaacacagctggataaa

SEQ ID NO: 418745 - DNA, 122 bp, Homo sapiens
gggccagggccagggccaggaccagcgacagggcagggccggcagtttcgctttggtgggcgcggagcagccgcctgggccgggcaggagtaggagcgggaggaggaggaggaggagccggt

SEQ ID NO: 418746 - DNA, 122 bp, Homo sapiens
tttacactctcctgggaacccagtggaactgtagctcatttttagctccctccctagctccgtattttctatccacccaggctggatgggagtgaaagtcactttgctattgtcagctgcat

SEQ ID NO: 418747 - DNA, 122 bp, Homo sapiens
gggtctcagattttctgaactctaatgtgatattggtagagatcctaaacattaaccatccgtagttatttttgagacatggattaaaactattgttttcttcttgttattaacctactgta

SEQ ID NO: 418748 - DNA, 122 bp, Homo sapiens
cacccagccttctgccagcatctctttgtttattctgcttgtcctggttttgcgttgacacgagcaagccgagtctaaaaaacacagagctacagaatttataaaatcaacaaaaacttaaa

SEQ ID NO: 418749 - DNA, 122 bp, Homo sapiens
tcagtttgcgcctttgtttcgtttgacagccctccagggagtcatagtgattgctggagacggtgaactaacactgtggggacccttgtgctaaacgtgtcaagtggcacaacaaggatagg

SEQ ID NO: 418750 - DNA, 122 bp, Homo sapiens
aaaacgcgaaggaggacaggaggtcaggccggaaggtatacttcggcatttgacagttgacgacaccagcaacaacattgaaatcctattaaattgcgcgtgggagtttaaatgggtaaaat

SEQ ID NO: 418751 - DNA, 122 bp, Homo sapiens
ctctcacggccttccttccagtaacggctgagaggcagtacagtggagtgagtggcacagcgtcccctcagactgcccagagcaaacccaaggtgtctactgtccttgggaaagtttcttac

SEQ ID NO: 418752 - DNA, 122 bp, Homo sapiens
ctgagcccaggagagatcatggctgcagcgatctgtgacaatgccactgcactccagcctcggtgacagtaaaaccctgtctccataaaaaaaacttcgaacaatctgaccgtaacttattt

SEQ ID NO: 418753 - DNA, 122 bp, Homo sapiens
ccgggctctagcatttgggaaagagggaaagaagtgcacaaaagagaaggatagtgactgcggaggaagccaacgccagagtctcaccggatggattttttaaagggaggacggggagaggg

SEQ ID NO: 418754 - DNA, 122 bp, Homo sapiens
tataaatattagcataaattaataaaagcctaaaaggcagtgttaacaaatggtagacaacgtggatcaatggagagaacatctcaatgtttttctgtgctttctactcttcagaatggatg

SEQ ID NO: 418755 - DNA, 122 bp, Homo sapiens
cgcgcggggggctgcggggtccgtggaacctttccgggaggcgagccgcgggctgctgggcgcggaggctggagccgcgagaggttcggctgctgaagcggccactgcctcccagagccagg

SEQ ID NO: 418756 - DNA, 122 bp, Homo sapiens
gctgtagctggcttctctcggtgcaatctaaaaggcggagctcggagtagcctgtgccgtcgggacgggaagatgtcagcgggcgttgtcctgccactcgggcgctctgggcgtgggccttg

SEQ ID NO: 418757 - DNA, 122 bp, Homo sapiens
cctaggataccactttctaccaaactgttacttggttggcattttctagtgttaggtcatcggttttctttggctttctttctctttcttcccccgggtgtttatccaacctgcctttcact

SEQ ID NO: 418758 - DNA, 122 bp, Homo sapiens
attgtaccggttgtcaaggcccgggtgaaattttaaaaataaaaaaaagagggcgtgcaccggcgtcgcccctgctccgcccccaccgggtacctaaatgcagcctggcctgaccgcccaag

SEQ ID NO: 418759 - DNA, 122 bp, Homo sapiens
gaggttgcagtgatctgagatcgcgccactgcgctccagcctgggcgacagaggagactccgtctcaaaaaacaaagtgtgtaaacagaaaaggattaaagtgagggctcttaggccagagt

SEQ ID NO: 418760 - DNA, 122 bp, Homo sapiens
gggcgccaagcctggtcctgcgggccgggcgttcaccccctggggccttctcatccccagcgagggcctggcgtccccaagggcacccttgttgacgttattgttgtagccgcgaccatatt

SEQ ID NO: 418761 - DNA, 122 bp, Homo sapiens
agagaaaggtaaacttcccggcaggggacagtgaattgcttttaattacctgctgtggctcgtcgccgtggatattggactgacatttaagatagatttgtcaaaaaaaaaaaactctaaga

SEQ ID NO: 418762 - DNA, 122 bp, Homo sapiens
ctaaatagaccatgaaaaggacacttgtttacactatgtaagctgaaactagaatgtgcacgtcagtagactcacatttttcaccattgtgcacatgtctgcaatgacagtggaagtgctat

SEQ ID NO: 418763 - DNA, 122 bp, Homo sapiens
ccgcccgctcccttcagacgggcgtagctggcaccttcctgagatatgcctgcttgcccccgatttttttctccttgcagtgagaacctcctcatgtggcatctttacttattctcttcttg

SEQ ID NO: 418764 - DNA, 122 bp, Homo sapiens
aatgaggctgggaaagctgatgcctgtaagaccgacaaagacggtgcaaggtgaggtgaacgccgctgtgtctgggtgccgggctcccttgtcgagttgaccctgagtctgcatcagctcaa

SEQ ID NO: 418765 - DNA, 122 bp, Homo sapiens
atgcagaacgtgccggtttgttacgtaggcatacatgtgccctggtggtttggaacatgccggtttgttacgtaggcatacatgtgttatggtggtttggaacgtgccggtttgttacgtag

SEQ ID NO: 418766 - DNA, 122 bp, Homo sapiens
agtttctattgctgtgactgctgtgtgggtggaccgatgggccacactgcttatgactcccggcactgggtcgggatgatgaaccgcctgctccacagaaccccctactgtgaccggggtca

SEQ ID NO: 418767 - DNA, 122 bp, Homo sapiens
ctgccctctttctttcttgtttgttgtcttttcattattttctcctgggttttctaacaacgtctgacctttatccattaaagtctaccagcttggcactgtctgaagatattgatctagag

SEQ ID NO: 418768 - DNA, 122 bp, Homo sapiens
ctcccggaggaacctgcgcgcggcttgcgcgctttggatccccgcaggggaacctgccgccgggctgcaccccgggaacttgcggagaatatgggacctcgcctgccttctcctcttcccgc

SEQ ID NO: 418769 - DNA, 122 bp, Homo sapiens
ccggacagcatcatcgtggtttccaggacaacaattcccgaccaatcagagggccggaagcgggcctgcgattggccgacggcgccaggggcggggccggaccttccgccttcgatttaaaa

SEQ ID NO: 418770 - DNA, 122 bp, Homo sapiens
gctgcggcgggcaccggtcgaggctgcggcgagccatcccagaccatggagacctaacctcgggaatcaggtcccgggaaaaaagcactttccgttctgctcaccaaaaaatcttgtcctag

SEQ ID NO: 418771 - DNA, 122 bp, Homo sapiens
aaataatgttttcagatatgttcagggtgaatttagagtgagctttcttccagcactctgcgatccactggtagtctggcatgtttagggcctggacccttgggaaaatgttcacttatgta

SEQ ID NO: 418772 - DNA, 122 bp, Homo sapiens
tggagtccgaaccagcgcagcgcggggcggggcagcgggaaggtagtcggaggcgcagggcggagcggagcggggcggggcccgcgagccgaggtgggggcggggcacgcgcgaggggcgct

SEQ ID NO: 418773 - DNA, 122 bp, Homo sapiens
cgtttcctttcaaaaatttacaggattcttaatcacgctgctcatttgggtgcgcagcagcgaggatggcgaaacacaaacagggcacgttcgtttacataggaacacctgcttagcatgat

SEQ ID NO: 418774 - DNA, 122 bp, Homo sapiens
agtataactcttggagtccaaagacctagatttaaatcccagcccatcacttactagcaacgtgactttgatatctcacttgacttctatgaatctcatatgcgctgtctctaagcaagggg

SEQ ID NO: 418775 - DNA, 122 bp, Homo sapiens
cttagttatcagattgaaaaagcatgggaaatataggattcagcactgtgggcagcctcacgcattcactggaggtcttagaacatgtgtgtcacagataaggggggactattgtatcacac

SEQ ID NO: 418776 - DNA, 122 bp, Homo sapiens
ttgcttcccacgccttccatagtgcactcactgtctgcatttggaacaccttgactcctccgtgtccctggtaagacaagggcactgtgtggtcctgtggccctgtcctcggccaggttgga

SEQ ID NO: 418777 - DNA, 122 bp, Homo sapiens
cgctgccgggctggattgtcctccacttgtgcttatctggtcctcgatgccgcgctccgacgtcttatctgagggagccttccgttaatgaaggctctataaacatctgacaaacacacagg

SEQ ID NO: 418778 - DNA, 122 bp, Homo sapiens
gtgtgcgccggctccgcggaagatgccggaccaagccctacagcagatgctggacaggtacgggcagctgtgggggggaccgggagccgccgaccctcgctctggccctgcccgcgcccgcc

SEQ ID NO: 418779 - DNA, 122 bp, Homo sapiens
agaaagtcagagcatgcgtactctgaacttaaagtagccaatcccagggtatgctttaggcgggaaaattagagtctccacccccactttgagaaggtgctgtccctggaggttggactgac

SEQ ID NO: 418780 - DNA, 122 bp, Homo sapiens
ttttagactcattgtgtcaattcctacaaaaaagcctgctgcgattttgactggcagagccgatgttttaacaggattgagtcttttcatcacggacatgctgtctctcttcatccctccgc

SEQ ID NO: 418781 - DNA, 122 bp, Homo sapiens
cttcagtctttttgattctttgagaatctttgaaccacgcaggatcctagccctagggtgcggtcggacttgccgcgacgccagccgccggggttccttcccgaggcgccgccatgggatcc

SEQ ID NO: 418782 - DNA, 122 bp, Homo sapiens
gagggacattgttcctcccagggaatgtggcagaggacactgaagcccagtggggacttccgggggctcctcggtgtggacggctaactacacttgtgggcacacacatgagtgggtcctgt

SEQ ID NO: 418783 - DNA, 122 bp, Homo sapiens
ggggatgagcggaggaagggagcccagcacctagggggctctgggcttggaggggtcacacgagccgagggcggggcgcggcgcttggggactggaagggtgcgccgcggggcagacgggac

SEQ ID NO: 418784 - DNA, 122 bp, Homo sapiens
agccacgattatagtgatgctgtgacgattaaatgggggcaattcacagagtgcttgcagcgggggacagcacctgctggggctcagcccctctgcttcggcctcaggaagcctcttggcac

SEQ ID NO: 418785 - DNA, 122 bp, Homo sapiens
ggcacacctcatgcaaggacagggtccaaattcctttgtccttggatcccacttggctgacgtcaccttcctgtactcagggagtttccccagccagctgtcccgagtctggactttccctc

SEQ ID NO: 418786 - DNA, 122 bp, Homo sapiens
cccacctctgccagcctctcacctacttaccaagggcatgctctcattccttttcatcttcgcctatctgactgttgcaaagagtatctgcatacctttagaagtgtatttacataaaacaa

SEQ ID NO: 418787 - DNA, 122 bp, Homo sapiens
cccaccgagtgcaggtgaaccagggaggcgaagtccatagaaacagctgtcttgggggtccgggaagagtttaacactggaatcacatctgcggaaaccgggaactggaagcaaattgagga

SEQ ID NO: 418788 - DNA, 122 bp, Homo sapiens
ctgtcttttgaattaaaataaaaactgtgtctccctacagccaaggtagggctcaacaaacgaaagctgaaaggtgctggaagcctcctgcactttgggaatatacagtcaggaacaattgt

SEQ ID NO: 418789 - DNA, 122 bp, Homo sapiens
aaaaaaaacacacaattaaaccagttatttaatagaattacaagcgacacttggcctctccgtgggctgacccttggggcctcactgaagaaagctttgcacagtggtgtggtgtagattgg

SEQ ID NO: 418790 - DNA, 122 bp, Homo sapiens
cccggtgcagtcccgggccgctccccgggagagccgagcccgcccgtgcgtcttcccccgcgcgcccgcccctgcgccctgcgcccgccccagcccagcccagcccagcccagcgcggtcgg

SEQ ID NO: 418791 - DNA, 122 bp, Homo sapiens
ccttccgagagcgaatggcgatcactctttccggttctctgcgaattccagctggaacaccgtccctttccgcgccccaactcagcggaggccatgccctgcacctgagcgccccgctccgg

SEQ ID NO: 418792 - DNA, 122 bp, Homo sapiens
agggccctcaccctgaggactggccaggtctaagactcttccccccgctaacttgattcgcgcctcctcacaaatgccttcgatccgtcagattcccaagatggccgtcgggaaagcacatc

SEQ ID NO: 418793 - DNA, 122 bp, Homo sapiens
gtgagtaagacaccctgtgtgacgtgctcagcatagtgtctggcacatgctgggtgtgcacgggtgtgatttctgtgacttggctgttgagcggcctgcagtgcacattgccccaaccaaag

SEQ ID NO: 418794 - DNA, 122 bp, Homo sapiens
atcgggcccgggcttttcaggttcacgtgtgagcattctgagcgataaggcctgtagggacgctggagagctcctgctggtctaacggggcagttcccactggactccagacattgttttct

SEQ ID NO: 418795 - DNA, 122 bp, Homo sapiens
gtaaccatcaggctacacaaggtgatgattctggttaaccaccagatggcagtcactgttcgagtaccctcactctggttcctgaagaaaggaaagcaattaaacctgttaaacaaaggcat

SEQ ID NO: 418796 - DNA, 122 bp, Homo sapiens
ctaggcagagacgaaatatctggaaaggagccatcccaagagtatggaatgtggctcctacgcacatatgctcatttaacaagtatttattgagcacttgctatggcccaggtatgataggt

SEQ ID NO: 418797 - DNA, 122 bp, Homo sapiens
tttcccgaacgggcaccctgaggctcctggcccggggcatggtgttagaaatcatagctgcggagaagcccttgtgacaccttgctgcagattgggaagctgcagatgattgggaaggtgga

SEQ ID NO: 418798 - DNA, 122 bp, Homo sapiens
ggtaatctgttacacagcataagctaattgatacagcatatttactttgtgtgcacctcccgcctcaacctccccaccctaaccaggaaactactgatgtgttacaagaacactacaggatg

SEQ ID NO: 418799 - DNA, 122 bp, Homo sapiens
atgtcagaagtgcatttctacattgacattttaatagattgtatgacaaattgtatgttacgggacaattcttggaaaagtcaaacaaaccacataatctatagtttccttttttactgaat

SEQ ID NO: 418800 - DNA, 122 bp, Homo sapiens
ccaagcaaagtacctcactgagtaggtatcaagacccttcaggcagaattccatcattctcgcaattagtgacagggacgctggttgtggaggagtatttggagtggtggcagaaaattgca

SEQ ID NO: 418801 - DNA, 122 bp, Homo sapiens
gcagacgaagaccgagagaatggattaggtggcgtgactctgatgacgcaacgcacggggcggagctcagagaccgggttcccgctgcgcgtgatcgggccgtggtggttgtgtgcccacgt

SEQ ID NO: 418802 - DNA, 122 bp, Homo sapiens
cgcgccaggcggaagcccggctccgggccagcatccgagagcccggactggaggtgagttcgcagccggaacgttgcaggcacttgtttcctcagtggatgcctttcggcgcgccgccgccc

SEQ ID NO: 418803 - DNA, 122 bp, Homo sapiens
ttctctttatcataaatatataaattatgctaattacgggcattgcatattaaccaaacccgaaacctcccctgcccggccccctccccctccgtgcaaacccctccccgccccggaccccg

SEQ ID NO: 418804 - DNA, 122 bp, Homo sapiens
atgatactcacacaacgcccctcctctcccacctggtcagtacccagggagaaaggaacccgggtgtcagcttgattttctgccagtacattgaaaaaacagctggccagcagcactggtgc

SEQ ID NO: 418805 - DNA, 122 bp, Homo sapiens
cccccctcccaggcctagggagcattcgggttacagatgcaaggtgcctggcccactcagcgcttaataaatgtttgttgagttcggctgtggccccccagagtcatggcccaatggcagca

SEQ ID NO: 418806 - DNA, 122 bp, Homo sapiens
ccatgttgtgacattagctgagtcaggcttcattatgttcttctcatacagacttggcagcggctgacgtgcgtgcgcagctcccctgccttcaaggtggacggcgtaggcttcctaaaaca

SEQ ID NO: 418807 - DNA, 122 bp, Homo sapiens
ctttctctctccttcttaaaagattttggagccgggaagataagatatgcaatcctctatcgggaatcctgtgatattaaagatcaaacgtagcatcaatggaagaccaaatgcagggggaa

SEQ ID NO: 418808 - DNA, 122 bp, Homo sapiens
tggtgcagttgtagctcactgtagccttgaacttgtgggcttaagagatcttcccacctccgcctcgcaaagtgctgggatttcaggtgtgagccactacacccagctcgatgttcttattg

SEQ ID NO: 418809 - DNA, 122 bp, Homo sapiens
tctgtcttaggctacatcaaaggtgtcaattaagcctcttgccaacagcaacccccatcccgacaccactcccttccggaagccccagtgctgtcagtactttgcactgaatcataatgaag

SEQ ID NO: 418810 - DNA, 122 bp, Homo sapiens
aaccgccgcgagccggaggctgggacgcagctggacgcagctgggcgcggaagcttggggcggaggcgcgtgcccgccttcccagctcagccccggcagggctcccggctccagcccactgg

SEQ ID NO: 418811 - DNA, 122 bp, Homo sapiens
ctccggagtggggactcggctggacggcggcggctggagggaaccagtgggcgcggagcgcgtgctgggtaggctcccggggcgcgcgggcgcaggacagggactgagaggcagtggcgcgg

SEQ ID NO: 418812 - DNA, 122 bp, Homo sapiens
tcagggggcacttccagcctcaccctctggttgccggcactgacgtaggacaccacaaatcggtccacctcagcctggggacgcagccagccaagctccagtgttgtcggtgtcacagccac

SEQ ID NO: 418813 - DNA, 122 bp, Homo sapiens
aactggcacgtagctgtgacggcgagagcgctctggtttaagtcattgttgtgaactgcccgtgaccactgcgcctgacttctaggcccagtcataattacgcgtggcagtaaggtcagacc

SEQ ID NO: 418814 - DNA, 122 bp, Homo sapiens
gagggctacggagcctttcacatggcaaggcaccaaaacgcgggacatggtgacagcagccgcaactaagtgcaaccgccgctctaggcccccgaccaccagcccttcccggcatcctcagc

SEQ ID NO: 418815 - DNA, 122 bp, Homo sapiens
ttcttcctgttgcaaaaggggctacctgggggaaaagtgagcagtcagaatctctgcaggcggagttttctatatttgatgtacatctgggaaacaccctctagacactcacctgtcttata

SEQ ID NO: 418816 - DNA, 122 bp, Homo sapiens
ccaactgccccattattaacgccagacggcgctgtgtcctcactggctctttaaccaccacgtcgggctcacagaaggctcaggtttcctccagtatagttcaggggatggtgaacgcttcc

SEQ ID NO: 418817 - DNA, 122 bp, Homo sapiens
ttgacagtgtgcacgtcagcaagtgtgggatggctggggggcatctgttacggctgcacacgtccccaggaggcctgcacacccttcactcccttcagtttcccttcaggtgaaatctgcaa

SEQ ID NO: 418818 - DNA, 122 bp, Homo sapiens
tctgggcgcggcgaggtgggcgctgttgcctgtgggggctacctgtctgctggtgctgtgcgggcttgtgcggggctgtgcggcagctgtgtggggcccgtgaggagctgtgcggggggctg

SEQ ID NO: 418819 - DNA, 122 bp, Homo sapiens
agacgtaaaagtaggagtttcaagaataaaatgaattctctcctccagcttcggtgacttcggcagagctaattctacgcacgctcactcgcgccaccaccactctttgctagaaagctgtg

SEQ ID NO: 418820 - DNA, 122 bp, Homo sapiens
gacaggatctgacagctttgtattgctggcatccctgggggcatgagctgttcagtgacacgtcagcctccatctgcctctgtgcagcactagatttgggagggaggcttctcagatctcag

SEQ ID NO: 418821 - DNA, 122 bp, Homo sapiens
gtgactctgaccatcggtgacccccaggaatgtgttccagtgccccaggcagaatggtgccgtgtctctgtgtgtgtgtgtgtgtgtgtgtgtgtgtgtgtgagagagagagagagagagaa

SEQ ID NO: 418822 - DNA, 122 bp, Homo sapiens
cccgagcgtctttgtctccacggagctgagggtgaggcggagtctcgcctgggagggcagcggagctgctgaaagccgtagaaggctgtgcaggaagggttatgcccagaggtagacgttta

SEQ ID NO: 418823 - DNA, 122 bp, Homo sapiens
tccacagctttccctcctgcctttcctctggttctttatttcagtcttttttgcatacatcggtagagatgcagaaatagaacaaagaaacgggcaaatgggctaaattatagtgaaccaaa

SEQ ID NO: 418824 - DNA, 122 bp, Homo sapiens
cccgcctcccagattgtctcgccggccctgccccaccgctttttataacgcgaggccgagcgccaccagtccccgcacgtccagagtctaaaggagtggcgggggcagtatctgaacagccc

SEQ ID NO: 418825 - DNA, 122 bp, Homo sapiens
ctctgctttcaaggctccggtcttattttagcaccctgcagcctcgcagtgggcaggagacgccccgccgccccgagctgagttcatcttcccgaaacccccggagccgcgggcatctcacc

SEQ ID NO: 418826 - DNA, 122 bp, Homo sapiens
aattaggacaacagacccatcatctccagcatgtattctaggagccaacatcccagggttcggtgatggatttaagtcctctcctcattctttaatgctattcgttccctgtgaatttggca

SEQ ID NO: 418827 - DNA, 122 bp, Homo sapiens
ctgcaagttcagagaggggggagtaaggggtctggaaaggaccagggaggaaaccatgctcgatggtgacagcactgatgagacagaggtgtgaaacaggctcaggctcaggcctgagccta

SEQ ID NO: 418828 - DNA, 122 bp, Homo sapiens
aagcaaagggaggaaaggaaggctccttttgctggtcttttccctgctgccagcagagggcgcctccgcaccacgattctgcccaggtgggtccagcctccagtggggccacagccaacctc

SEQ ID NO: 418829 - DNA, 122 bp, Homo sapiens
gaggaggagctaatttcacattagacagttaaattcaactaagcagcctggtgtacctagcgtggggagggggaagaggctcaagagttagcacatctgaatttaattccaattttaattgt

SEQ ID NO: 418830 - DNA, 122 bp, Homo sapiens
tgaatctgctacatcaccttcacttttgaattcggctctgatgttccaaatgttcttggccgttccttcgtgtttctcctgtacgaatttcagcttctttttgccaagtatctccccacccc

SEQ ID NO: 418831 - DNA, 122 bp, Homo sapiens
ggctctaagctgatgctggactctgccctagtgtatccttaaaagctgatgttcatgtcacggcaacattccaatccacaatggattgagttttccagttcatcaacaaaatctcacttact

SEQ ID NO: 418832 - DNA, 122 bp, Homo sapiens
cttacaaggaaataaaagcctggaggtgaggtaccttgtgtaactcagttgcgcatacttcggacagccagacagctgtggagaagttcaagttcccacccagaagtgctcccattctcagt

SEQ ID NO: 418833 - DNA, 122 bp, Homo sapiens
aatggcggctggagcggcgggcgcgtgggtcccctcggggaggcgccccaagccacggtccgctcccaaagagaagcccagactgggcccacagtacccgggaaggtgagtccttactcggg

SEQ ID NO: 418834 - DNA, 122 bp, Homo sapiens
ccccgccccgcacgccggcgccgggcgggcacactggaccagcgttcccagaacactccgcgaaggtgttcctgaacttcatttcccagaggctttagctaacgtgtactttcgccctgcga

SEQ ID NO: 418835 - DNA, 122 bp, Homo sapiens
aaggggtgacggatggcacctggaaaatcgggtcactcccaccctaatactgcgcttttccgacgggcttaaaaaacggtgcaccacccacctggcttggagggtcctacgcccatggagtc

SEQ ID NO: 418836 - DNA, 122 bp, Homo sapiens
aaccagagaccccatttgctcacacgatacctgctaggaactcgtggaccaagtggtcctcggagcacattttggaaacactcaggtaaatggtttctaacatcccctcctgtggcaatgcc

SEQ ID NO: 418837 - DNA, 122 bp, Homo sapiens
agtggcaaaggcggcggcggcggcggcggcagcggcagcagcaggtggagcgagctacagcgtttggcctgaaacccactgctgcagccacccgggctggagttggcccgttgggtggagcc

SEQ ID NO: 418838 - DNA, 122 bp, Homo sapiens
aggattttgttcgccaagaggtattattccaacttccacaacccaaatagcatctctgcacggaaatgaagctgcaacagctccctgtcatggatggggcacttcccagttctcagacttca

SEQ ID NO: 418839 - DNA, 122 bp, Homo sapiens
cgcctgggtggagtctttcttgtcgcttccccttttctccctctaggaaatgagcccactcgcgggcttcaaagaccagaatcccagtttaggtcaaaataaatgcaccccgccccatcgct

SEQ ID NO: 418840 - DNA, 122 bp, Homo sapiens
ctgtcctggcggcgtcagggaggacatcgtgcccagagctcggacccagcagcccggccccgcgccctccctgtcccgcggcccgcaggcccagccctcaagcgcccagcctccgcggcctt

SEQ ID NO: 418841 - DNA, 122 bp, Homo sapiens
caacacagtgagacgccatctttataaaaatacaaacaaaactggccaaggatggtgatgcgcacctctagttccagctactcagaaactgagatgggagtatcacttgagcctaggaggtc

SEQ ID NO: 418842 - DNA, 122 bp, Homo sapiens
caccagggggcgccattctcacacattccagagcaaacggtgctccttggagttgagcggcgcgacggtcctgcagcagctagcctgggatgtacccacagctcaccggggagtccgggcca

SEQ ID NO: 418843 - DNA, 122 bp, Homo sapiens
aaagccacagctgtgagacagaaagccagggtgaggggccacgtgcagctttctgcctcccgctgcctttggaacaggagtttcaccacagcccctggtggccaggtgggtgctcctccagg

SEQ ID NO: 418844 - DNA, 122 bp, Homo sapiens
aggccaggacgaagtagggggcgggctcatcttgcaggagcgtccacgtattggtggagccgcggacttagagctgcgattcgctgcgcgaaattgccgaaagccctcccgcggagggagaa

SEQ ID NO: 418845 - DNA, 122 bp, Homo sapiens
aggtggagcttgcagtgatcgtgccactgcactccagcttgggcgagatcgtgccgagatcgtgccactgcactccagcttgggtgacagagcgagactccgtctcaaaaaaaaaaaaaaat

SEQ ID NO: 418846 - DNA, 122 bp, Homo sapiens
agtctgtttttcttcctaaaatttggactcttgtctgcacaaactctggtctgttttgcacggtttgtgtgcctttttttccctttatgcaatctttttcagctttagcagcagaaatttgt

SEQ ID NO: 418847 - DNA, 122 bp, Homo sapiens
gaggaagggttgcccctattcttccagctgttgtgaagagtgagttgaaggacctgttggcgttatctcctgttcttctttctgattttgaaaaggcatttgccaaaagatttggacgatca

SEQ ID NO: 418848 - DNA, 122 bp, Homo sapiens
cgggttcggccctggtgaactctcacccgagcggtttctctttccgggacaacatggcgccgtccacgccgctcttgacaggtgagttctgaagaagcgagggactctctttcttcagacta

SEQ ID NO: 418849 - DNA, 122 bp, Homo sapiens
atccgggaagacattcattacattctaggtcccgagaaacgggagacatggcatgctctgcggggccgcacggggaaccctgggaacccgggaaccgtgctctgcggtccgcacggggaacc

SEQ ID NO: 418850 - DNA, 122 bp, Homo sapiens
cgggtccgggaggtgtcgcgcgcggccgccagcgagcccagccgctccccgaggcttgcgcgcctgcgccggagcctcctgggtttctgcctctttaaacactttgaaatgcaattccaccc

SEQ ID NO: 418851 - DNA, 122 bp, Homo sapiens
tgccccagcggacacgctggctcccaaattcagagatcagaggggcggctgagaacggggcgtccgctgtgtgtgacccctgaccgtggaggaagggcgggagccgggagtaggcggtgggg

SEQ ID NO: 418852 - DNA, 122 bp, Homo sapiens
tgcagatgtaggtggcatccagaaacaaagatgctgaagtgaaatatgaaaccaaactatcgcacctagcaccagcaagacatggggaatgaagaaatgtgctagctgaaagagtgtttctt

SEQ ID NO: 418853 - DNA, 122 bp, Homo sapiens
cggtgaccaggggaaggcagcagggagttctgagcagatctagggctggccaggatatcacgtggaaagagattctgggtccaagcaggggactctggaagtggacttttagaaccaaatct

SEQ ID NO: 418854 - DNA, 122 bp, Homo sapiens
cccacctaaagacgcgaccctcccgtaggaggggggcagggcccgggggcgggagcacagcggggccccagcctcaggcggcgcgtcactgagcacaaaggagacaacagcgaggcggcagc

SEQ ID NO: 418855 - DNA, 122 bp, Homo sapiens
aggctggtcaagaactcctggactcaagggatctgctcaccttggccttccgaagtgctgcgattacaggcgtaagccaccttgcccaggctaagaattttttaaaagctgataagaactta

SEQ ID NO: 418856 - DNA, 122 bp, Homo sapiens
attctctgactgcagacccatattctttcttccctttctaatgtcctacaatatttactacgtaagatgccaaatctcacatttttgccaatttctatcttctgtttgcaacatgactgtca

SEQ ID NO: 418857 - DNA, 122 bp, Homo sapiens
catgactgtggaataagtcatgtggggcgcggggataagcgaatctctcaaattccaccacgtatgccctcattcaacctggatccttagagtggcctccagggcactctgctcaggactca

SEQ ID NO: 418858 - DNA, 122 bp, Homo sapiens
atccacctgaagagccagaagggagactgagacccacagaagaatgatttcatactccagcgctgtgacatcacaacccaggctctggcataggaagggaaccagctgaaacgtgggttggg

SEQ ID NO: 418859 - DNA, 122 bp, Homo sapiens
ttgggagggagagcaaggagcagaggctgaaaaggtgtgaagggaaggcagagctgtcttcgtttgatgcaagggtcagaagcccaggtttctgggtcccatgcccagatgttggatggggt

SEQ ID NO: 418860 - DNA, 122 bp, Homo sapiens
agggaacgcgcgctattagatatctcgcggtgctggggccacttcccctagcaccgcccccggctcctccccgcggaagtgcttgtcgaaattctcgatcgctgattggtccttctgcttca

SEQ ID NO: 418861 - DNA, 122 bp, Homo sapiens
acaaacctgattacaaaagtcagatttctttatttcgtcttgggcacgtcattttaaccccgctcagcctctcttttgtgtatgaaactgaaagtaatagcttctgctgtgcaaaatgatta

SEQ ID NO: 418862 - DNA, 122 bp, Homo sapiens
caacatcctgggatcaagcaattttcccatctcagccttcagattagctgggaccacaggcgcgtgctaccacacctggctaattaaaaaatttttcttcatagagatggtgtctcattttg

SEQ ID NO: 418863 - DNA, 122 bp, Homo sapiens
cttgtgtaaatctcttcccaggctcagcaggagttgatgaagcagctctccatccttcctcgtgacaactatagtctcctgagctacatctgcaggtgagaggcccctggtatcaactctgc

SEQ ID NO: 418864 - DNA, 122 bp, Homo sapiens
tcatggaagcaagtttagcctaccatatcatgacaggagtagaattcctaaataatagggcgtggaggatctgtattcccaaagcgttgctgagtctagcagacaacaacatgaaaccccaa

SEQ ID NO: 418865 - DNA, 122 bp, Homo sapiens
cctgctgcagcaccaccccatgcacctgaactccaggcacgtcacatcgtccagcccgggcgagctgctggccaggccccctgcttccgcgggcatctctgtccaggtcagacaagggtgcg

SEQ ID NO: 418866 - DNA, 122 bp, Homo sapiens
cggcgggggtgggggaggcggctcaggcatggccagctgtaagttccgagtcctgccccgcgaggaggcagctgaggcccaagaatttgagcgcagcgccagcgggccggcactgctggggg

SEQ ID NO: 418867 - DNA, 122 bp, Homo sapiens
aaacgggtcctcttcgccgaggtcccaagtacgacccaacccacgaaactccagcctgtgcggaaaccacgaacgaaataaaatgctgcggctcggctttgccagcgggccgggcctaagcc

SEQ ID NO: 418868 - DNA, 122 bp, Homo sapiens
agctcacccctcattgggtctctcgttggtcaggagggcgcgggtctgcacactctcactcggtgccggacatcagttcctgcggctcttgctgtgggagctgcccgagagccagagcagtg

SEQ ID NO: 418869 - DNA, 122 bp, Homo sapiens
ttcctacttctatcaaaaaaccccacttgaacttagtacagttgggtgagggagataactcgtgctcacaggaagccacgcacccttgaaaggcaccgggtccttcttagcatcgtgcttcc

SEQ ID NO: 418870 - DNA, 122 bp, Homo sapiens
gaaagagagctggcagtagcagtggcggtgtcccaggagaacgatgaggagaacgaagagcgctgggttggacctttacctgtggaggcaacactggccaagaagaggaaaggtagctgcag

SEQ ID NO: 418871 - DNA, 122 bp, Homo sapiens
ctcttatacaccatccactggctttcgaatcccagcagacagcacttaaaaagcaagaatcggccgggcacagtggctcatgcctgtaatcccagcactttgggaggccgaggtgagaggat

SEQ ID NO: 418872 - DNA, 122 bp, Homo sapiens
ggggtccagaaacaatccctgtccctggataggtcagtttagctcacctgtactttccttcgcccgtccacagcgccgtccaaaccgtaccagcatctctgacgaggtgtccatgatgctcc

SEQ ID NO: 418873 - DNA, 122 bp, Homo sapiens
gtcccccatggagggggacatgttccggaaaacgccaccacagcctccagacccctccaacgttcacacctaaaccgggagtggaggagctgcccgagcatccccacgctgcgggcggagga

SEQ ID NO: 418874 - DNA, 122 bp, Homo sapiens
gccaaatttgacccaagctcctttagaaaaccactgtgttgcatttgtctttatatccctcgtatctagcccagagccttgtacatagtaggtgctgaataaatgcttgttcagtaaacatc

SEQ ID NO: 418875 - DNA, 122 bp, Homo sapiens
agcggactacccacctaccttgttctaaaatgctatatttccattgagacgtctgacccccggcacactctcaggattgatttgttaataaattttgcaatgtaccactctgttagcttttt

SEQ ID NO: 418876 - DNA, 122 bp, Homo sapiens
gcaggagcccaaagcgccggaccctcccactgccggcctggggcctggccgagggcacggcgaggaagtccctcaaggcagaacccaacttgaatgggtgttttctttgcctctgcagagca

SEQ ID NO: 418877 - DNA, 122 bp, Homo sapiens
agccctggttactgatgcacagttaccttttccggccactaggtgctgttttgtgcgtgccggagacctctccacattggtgattggtttctgctcctcaagaaattatatcccttgggggg

SEQ ID NO: 418878 - DNA, 122 bp, Homo sapiens
tggagaaaattttaatatcatgaaacctagaactcttgaacttcaaaagaccttacaatccgcttgatggtgatatttggaatctcagatatagtattgaaatatcataggatagaaaggaa

SEQ ID NO: 418879 - DNA, 122 bp, Homo sapiens
cctggacgccccgtggaggcaagtgcagggaggggaagcccaggcggcacgtctctcccccgctctccaggcagatctggagtttcctaatgaaccagatacagtcctccttcgccctgcca

SEQ ID NO: 418880 - DNA, 122 bp, Homo sapiens
ccaggtctggacgcagggaggggtgaggtaagctctgatgccccacgagccagccaggtacgagtagagggggaagaggaggctccagaactatcctgagccgtaaccttcccttccgccgg

SEQ ID NO: 418881 - DNA, 122 bp, Homo sapiens
tcggaaattgaagactagatctgggtctggttccgtacccatgccctgtgatgacagacccgtgatctctcttctgagagggaaacaaagacctcacgtttgacggggccaagaggcagccg

SEQ ID NO: 418882 - DNA, 122 bp, Homo sapiens
cgcaggcgcatgcaatatcctcagaccaccgacccctcccggcacccatcccggtgcttgcgaagggccagtgaagctgaggtttctaaggggacgactaaggaatccacgcatcactaacg

SEQ ID NO: 418883 - DNA, 122 bp, Homo sapiens
gagacaaatggtggggagggtttcccctaaatttggacatctccagattaagacctccgccgaatccgtgaggctttccctctccaaggagctcctaagagaatttcccagtaaaatcgcct

SEQ ID NO: 418884 - DNA, 122 bp, Homo sapiens
tgtgtgtccaccctcacagctaagctgtcaatgccttgagtgaaggggttacagctcattcgttttgcatctacagtgacaatgaataggcactcaatacatacttttttttgcatgaatga

SEQ ID NO: 418885 - DNA, 122 bp, Homo sapiens
ctgcgtgcttacacccttccgccgcgaccagtcgcgtcagcgcgcgagggggcctagctccgcccagtttcgtgccccaccccgggcacacgaggcctccactgcggttgcgcagcctgccg

SEQ ID NO: 418886 - DNA, 122 bp, Homo sapiens
tgtgctctggaaaacacatcccatcagagctgaatcacccacatggactgttagctcaggcggggaaacattcaagtcattcaggcccaaggaataatctatagaagtcaaaggcaagagga

SEQ ID NO: 418887 - DNA, 122 bp, Homo sapiens
ctctccaaggtgacccatttggcacagctgaaataaataaccccgctcatgcccagagagcgggggaactgtcagaaacatttacgctagaatatcttgaaattgcaaatccttttatgggg

SEQ ID NO: 418888 - DNA, 122 bp, Homo sapiens
catcttgtatcatcttatattttattatttcaggttttatttctaggatatattcctgaccgtggaataattagatcaaggaatgagaacatttttaaaggctctttaagcatattgcaaaa

SEQ ID NO: 418889 - DNA, 122 bp, Homo sapiens
gatagggatccagagtcttggggatccagagtcttggggctccatgtgagtttgctgtaccggttgtcccggtcacggcatggggcgagcggacactccacgacaccccccgcccccggctg

SEQ ID NO: 418890 - DNA, 122 bp, Homo sapiens
tcgcgcgcacgctccacgttgcctggggcacccgtgatctcgaacacggggtcgcggtcacggcttggtgtgataatgtatgtgttggtttgctgctggatgcgcttgatggttgccccttt

SEQ ID NO: 418891 - DNA, 122 bp, Homo sapiens
tccaatttgtctgttacacctagagtcagccactcttggattccaagagaaagccctcatcgtaaataatcatttgttcaaccaaatgattctggtggttgcaattagtcgcaacccaaaga

SEQ ID NO: 418892 - DNA, 122 bp, Homo sapiens
tgggtctgttacaggcctcttgaacccttctcagggacctggaggacttaaccataccctcggtcatccattcaccattcctcgccctcctccataacacacgcggagcgcccacgaggagc

SEQ ID NO: 418893 - DNA, 122 bp, Homo sapiens
tattaaactggaatgtgaaacacggggacttccaatgcctgccattacttggtataaggacgggcagccaatcatgtccagctcacaagcactttatattgataaaggacaatatcttcata

SEQ ID NO: 418894 - DNA, 122 bp, Homo sapiens
ttacaagcatcattctgggaggtgggaggctgaagcacaattgaaggagataacccagggcgtcccatgaacaattactgcaacaatccagtggaggatatcgattggggcaatgaggatgg

SEQ ID NO: 418895 - DNA, 122 bp, Homo sapiens
ttttcgctggtgtctctgcctcgttctgagtagaccccctagacctcaccgccgcccctgcgttttacctcagtaagctcgtctggtctgttctttctgtggggccggctcagaccaggcaa

SEQ ID NO: 418896 - DNA, 122 bp, Homo sapiens
tgcacaaatgttctcaggaccacacatatgacggtattgcccatctccacgcccaaggtccgatctccagcgggtgagcacatgccctacacggtgctgaccaagggcaggcacacacactg

SEQ ID NO: 418897 - DNA, 122 bp, Homo sapiens
gcctgtgttggctgcagcatccaggctgccagggaggccgacttccgatgcccagggtgccgggctggcattcagacctaaggtccactgccaaggcaccatcggacacacctgcccatgag

SEQ ID NO: 418898 - DNA, 122 bp, Homo sapiens
gtaccaggaaggtctcccccgggcgagctgatggagccgattaagcagccaattggtattcggagcagccagaggcccctctctgtctctgtaattaatggagtggctttttaaaaggattc

SEQ ID NO: 418899 - DNA, 122 bp, Homo sapiens
cccaactcaaccccttttggaactatgtgtggtggttgggaccctgtggcgcatccttgtcgctcgtgtccttctcatgcccggcgacgcgtctttgtggtaacgccctgctgccatctctt

SEQ ID NO: 418900 - DNA, 122 bp, Homo sapiens
cagccgctcgcgaagggtctccagcattgccgccgccgccggtctcctctcctcaggcctcgggctgctgctgcctctgtcgccccctgggtcccacgccgccaaccccgcgctgtcaccgc

SEQ ID NO: 418901 - DNA, 122 bp, Homo sapiens
gaggcagagcttgcagtgagccgagatcatggacactgccctccagcctgggcgacagagcgagactctgtctcaaacaaaaaagttcacagggaaaggtaagtatatagtcacattcataa

SEQ ID NO: 418902 - DNA, 122 bp, Homo sapiens
acttcctggtgagtaaaaatcaactggcacaaattttctgagcaactacattttaaaaaacgctcttatggaaaactgttaaaacatctccaaaagccaagagaatagtgaaatggattcaa

SEQ ID NO: 418903 - DNA, 122 bp, Homo sapiens
gatagcttttcttccgacaccataaactgttgtgaagagcttccattggcatagggtgttcgaatgccaccatttgcaaactgggaatgtggggacttgtctgaaggctgactgaataatca

SEQ ID NO: 418904 - DNA, 122 bp, Homo sapiens
gtgcttcttcttggtcttggtcttgctcgccaggacagaggaccctaggttgccgggggtcgccatggccgcctcctatgtcccctccaccgccgtgctcccgaggccggggacccgccctc

SEQ ID NO: 418905 - DNA, 122 bp, Homo sapiens
gggcataggtttctgccctgctgcagctgcggcgctgactgcctgaattaggcgctgaggcgacgttgtccccggtgtcctggctcttggtggtgcatgcaaagtgcccggttgctctgttg

SEQ ID NO: 418906 - DNA, 122 bp, Homo sapiens
taccatagtccaacaccagtagtcctcgatttatagaaattctactcacctgatggactgcgacacactcccagagtcacacagagttccagagttcattggcacagtgactaatgagtatt

SEQ ID NO: 418907 - DNA, 122 bp, Homo sapiens
catgcgataaccactacctaagcataaggtatgtttacatgcactggttgtttaccacgacgcaccagcattcattcaagttattttcttccagagtctgcctggaatgtagaaccggccag

SEQ ID NO: 418908 - DNA, 122 bp, Homo sapiens
ttttgcctgagcgtccgggggtggctttgaggacacctgtcctccttcacaggggcactccggatgtagtagcagggagagggtggaggggcggccaagggcgtgagggagagggtggaggg

SEQ ID NO: 418909 - DNA, 122 bp, Homo sapiens
aaagaggagccttcctccaaaagggagcatcaggtacggaggagcgccgggcaggcttggcggcccgcgtgggctcctccccgcggcgctggctcagtgcgaacccggcgagggcggctggg

SEQ ID NO: 418910 - DNA, 122 bp, Homo sapiens
agaaaacaaccggagaagcattttcaggaaatggagcacaatttttcgaagcttggagcccgagcggggagtgcgaagtcagcagaagaggagcggccggggggaggcggcgccgcagcgaa

SEQ ID NO: 418911 - DNA, 122 bp, Homo sapiens
ccggtgcgcaccgggcccgggatccctggctggtgtggagccttggtcaccggaggcccccgcggagcaggccccacggcgccttgtgcgctctcggaggccgagctgcgcgcccgcgtcag

SEQ ID NO: 418912 - DNA, 122 bp, Homo sapiens
gggggcggggcctggggggccgtacctttgcttaccgcgagtgggcggggcaggttttaccgccgcggcccatcagcgaagatcgctgagcggcgcccgccttgcgggcctccaggacccgg

SEQ ID NO: 418913 - DNA, 122 bp, Homo sapiens
ccgcccctttggcttgtgctgactagctgtttatattttagtaagggccaccctttaactcggcagcttgatgactataatgggcccagttgtctgcgggctgcggggagctaagtccccag

SEQ ID NO: 418914 - DNA, 122 bp, Homo sapiens
tcattagcgtagccccctaagtctgctcacagatggaaccataggcaatacttcataacgcgctggagaggacaagtcagacgcaggaaggggttgggtgggaagggaaggctggagtctct

SEQ ID NO: 418915 - DNA, 122 bp, Homo sapiens
tttgggcgcagagcgcaaggtgaggctcctccctctgcctgggcccaggttgtagcctggcgaacccgaggctcctggtgccctccgggcagagctctgtgcgctcccagcggccggtgatg

SEQ ID NO: 418916 - DNA, 122 bp, Homo sapiens
agagaagcctttagacaggcaactgccatcccccctgaaacctgagacctgtagtgcactcgaccgccctcaggtgttggtgaaacagagctgcccccaggctcgctgggcataggcttcct

SEQ ID NO: 418917 - DNA, 122 bp, Homo sapiens
aatgtctgtgtcaggcaagaattagagacaagcggtcagcagagcctcagtgctgatcgtcggagcttgggagcaggaagatgtcgaatgaacttgagtgagtaaacatcggtggatacctg

SEQ ID NO: 418918 - DNA, 122 bp, Homo sapiens
tgtatttgtgtgttgtgtgtgtgcacacaggtgcatgtatgtgcttgtgtggtgtatgtgcgttatgtgtgcacatatgtgcatgtgtgttttgtgtgtgctgtgggcatgcaaatgcgcgt

SEQ ID NO: 418919 - DNA, 122 bp, Homo sapiens
aagctcacaatcagcccggtccctccggcttccaccccgccccctgcgctcacctgcccgcgcgctcgccttccggggacccggggcccatggacacatacacccagccctgctgtcccgcg

SEQ ID NO: 418920 - DNA, 122 bp, Homo sapiens
gttgcagaccccgagccgggaggggcgcgagcccaccctgaagcccaggacccaggagggcgcttcctcccggaagtgacgcgagctcaatcccggccttgctcttcccaaacaaaagggat

SEQ ID NO: 418921 - DNA, 122 bp, Homo sapiens
atcctatcctgctgtggaccggggcgtctcctggaaggcccgcgatcgagatgaggcttccgagccgcccagaagggacttcgaagtgtgcgcagcggactccgcggttcccacgcgccccc

SEQ ID NO: 418922 - DNA, 122 bp, Homo sapiens
ttcaattgctactaaatcacgagaagactgatttacatagtctccttttatctcccttggcgggtaagtactcagctctgctcgttactaatattgaaacaacagcccttgaattgagtgat

SEQ ID NO: 418923 - DNA, 122 bp, Homo sapiens
ctgactcccagaacatccaagaattcaattaactgataaaatactgtggcgagcaatatccgcagttcccaggaattcgtccaattgataacgcccaaagccccacgtctatcagtttgtaa

SEQ ID NO: 418924 - DNA, 122 bp, Homo sapiens
gctctccctcatttgccgtccccttggctgtggagcagaatctccatcgagcagttgctccgctggacaagctcgttctggatggggacatgaatctacgctactaccaggacttccgtggc

SEQ ID NO: 418925 - DNA, 122 bp, Homo sapiens
gccagggacaggggctccgccaggagcagcatgatgtgccatgcggagcactctcgagcacgcccatcatgcttctgtctttccacaaacccgggggttgccagcttgttgtaggagaggag

SEQ ID NO: 418926 - DNA, 122 bp, Homo sapiens
ggaggagtggagggattggatttacaccctcttttccctccgaagcctccttggtgggggcgaagaaagaccatccaaccctgccaaaggcaaaaggattaaggataaatgaaagcaagata

SEQ ID NO: 418927 - DNA, 122 bp, Homo sapiens
ccgccacggccgccgccgccgccgccagccccccctaccaccctccacccctcgcgcgtgcgcctcccacaatcccccccgcgggactgttccattcctgtcggctgcaggggcaggagagg

SEQ ID NO: 418928 - DNA, 122 bp, Homo sapiens
tgtaaagagtgttagtctggagccatactttccctgccctgttcaagctccctggactgtcggaagcggagttgtttgtaaaggcaaatgcagacgcctcctcctcctgtcacttcgggaca

SEQ ID NO: 418929 - DNA, 122 bp, Homo sapiens
cctgcccttgctctccccagagaacagttctcacagggattagcctgaggcccagtcgcccggtctctcacggggaagcgcacatttcctttcctggctctctgcacctacctgggaaggcg

SEQ ID NO: 418930 - DNA, 122 bp, Homo sapiens
tgctgctgttactgcagcttccacttcatattacgggcgggatcggagccccctgcgtcgcgctacagccccagtccccactgttggagagggctacggttacgggcatgagagtgagttgt

SEQ ID NO: 418931 - DNA, 122 bp, Homo sapiens
agaggaagtcaaattgtccctgtttgcagatgacatgtttgtatattcagaaaactccatcgcctcagcccaaaatctccttaagctgataagcaacttcagcaaagtcttaggatacaaaa

SEQ ID NO: 418932 - DNA, 122 bp, Homo sapiens
ttgcggcccgccggagacttcggctcgaccctcccggcttgcgacccgggagcccacgcccgcagcagcaggaatgtggttttatttgggtggcgacttctgcggacccctcagtctcaaga

SEQ ID NO: 418933 - DNA, 122 bp, Homo sapiens
ctttcccccccggccggtccccgccgagctccctggcggcgcagcgcggcgatcctcacccgctgcagcccctcagcagccgtgaggcatcccacaaaaggtcctccagctccgcagagacc

SEQ ID NO: 418934 - DNA, 122 bp, Homo sapiens
cggggcgcgtgcgcgcgcacctcgctcacgcgccggcgcgctccttttgcaggctcgtggcggtcggtcagcggggcgttctcccacctgtagcgactcaggttactgaaaaggcgggaaaa

SEQ ID NO: 418935 - DNA, 122 bp, Homo sapiens
taagagcatgaggatgaagaggtaatactcaaacagctttggaaatggagaggaagctggcgaatgacacaaaggacagctggaggatgaaccagtttcccaaggggcaaaagaaacaatgt

SEQ ID NO: 418936 - DNA, 122 bp, Homo sapiens
tgaatccctgaaacatctgaactgttttgtaaatcatcttatccccaacctcagtaccaccggatcttcacttctcagtgggattttgtcctttgcatgaccctactttcagcagggctttg

SEQ ID NO: 418937 - DNA, 122 bp, Homo sapiens
caccaagcaagacttcttatccctcagaaaatccccagatgagacatccagcctcaggcccgggagtgcccaaacaggttgtagtgttctttgctgcttgaatgtgggcctcccaccagcag

SEQ ID NO: 418938 - DNA, 122 bp, Homo sapiens
cgtatcaaaaatagaagccagatgacaatggaacaaaatgtttagcagataacaggcactcggcaaatgagcaataaaccttgctacacctctcaaaaaaaatgttatggagagataatcaa

SEQ ID NO: 418939 - DNA, 122 bp, Homo sapiens
tttcctggaccacatgcacactttcactaatttatttagcaaacattgactgattatctacgatgttgcaggcaccggattgttgcttgggcaatggtgctgctgtgtttctccccaagtct

SEQ ID NO: 418940 - DNA, 122 bp, Homo sapiens
gtgcggagaaggatgctctgagtggagctgtgcggcagcgggaggcagacctgctggcggcgcagagcctggtgcgcgagacagaggcggcgctgagccgggagcagcagcgcagctcccag

SEQ ID NO: 418941 - DNA, 122 bp, Homo sapiens
aacttgacttgagtgagactatacatttcatttatcttagtgtgatattcataattgttccggaaaaaaaagttgactgtgggtgctgccccagatagtgaggaatgtcacataaagcacac

SEQ ID NO: 418942 - DNA, 122 bp, Homo sapiens
tgccacctgctggacaatcacacgaaaggcaggcgggctgtgtactgggccctgactgtgcgtccactgctgtcttccctacctcaccaggctactggcagcagcatcccgagagcacatca

SEQ ID NO: 418943 - DNA, 122 bp, Homo sapiens
tgcctctctgttgctgggcacctcgtcattaaatcagagacgggagaggcattcgatcatcgagatcatttctttgccaaggcagaattgatccccggaggatgttatgtctttgcctggtc

SEQ ID NO: 418944 - DNA, 122 bp, Homo sapiens
cttacggtctttatttatttatttcattccagggaaagttacagagcctgcgggaagctccggctgcaacttcagttctgaccagaggttctgtgaaccttcaggatttagcaggtttccag

SEQ ID NO: 418945 - DNA, 122 bp, Homo sapiens
ttagtccatatttcaagtagtgtgatggtactgcttaacaatgaacagacattgctgttccgggttaacaggactaagaatttgttcccacattcggtcagcaccaaggctaaggaacagct

SEQ ID NO: 418946 - DNA, 122 bp, Homo sapiens
gttttgttatgaatgccttgagactttttaatcctggaaggaaaactcacaggatggtaacgcagaggcctgatcagcttggcgggagcttgtggtttccaggctcttgtggctggaatgta

SEQ ID NO: 418947 - DNA, 122 bp, Homo sapiens
gaatacggacgaaattggagcagggtttgggctctccccttcgcagataatgggaggagccgggcccgagcgagctctttcctttcgctgctgcggccgcagccatgaggtgagggcgagct

SEQ ID NO: 418948 - DNA, 122 bp, Homo sapiens
ttttcccttgggttgggaatggcatgttctgagcttcttttgacttctagtcctcgctgccggtgcagttccaagtagagtcaacataaagccaggcacttgtgagatggagaccggggcga

SEQ ID NO: 418949 - DNA, 122 bp, Homo sapiens
cgatgcttacggcggtgccttcccatcttttttctggtaataggatgctgtgcaatccatcgccatctgcgtgactttggctgactgtgtaacgctgccacttctcagtttcctcattagta

SEQ ID NO: 418950 - DNA, 122 bp, Homo sapiens
tatttatttattgaagcaagaaacatttattgagaatttatgaagcaccaggttctatcccggatatctgatgagaacatggataaatataacacagccactccccttggagtcttaccatc

SEQ ID NO: 418951 - DNA, 122 bp, Homo sapiens
gggaaaaaaacatcccggcaaccaactgctaggcgacggacgctaagcacctcctccccgcggacgtcagcacccgccttttcccgaagtcgcaacacgcaggcgcgctccggctcgctcac

SEQ ID NO: 418952 - DNA, 122 bp, Homo sapiens
atgcaccgctccctcacagagcctggcaggcgctaactggggctgcagagacagaagcagcgaatgaagccagggaagaacccgggagcgactcccctccccttccccgtgtccggcccccc

SEQ ID NO: 418953 - DNA, 122 bp, Homo sapiens
tcggtcgtgatgcggccccactgggcactggactgagatgccgtggccttggcccggcagcgggacaccagggccttaatggtggccaggttgcaggaaaaggtgactgtcagcgccaagag

SEQ ID NO: 418954 - DNA, 122 bp, Homo sapiens
tttagtaagactatatcggtgtaggctatgattaaaaaatatatcatcttggaattgttgcgccacccacatccttattgggtagggggttaaataagtagcttcagttgtccttcaagaaa

SEQ ID NO: 418955 - DNA, 122 bp, Homo sapiens
cacacaccccaaaccaaatattcactgttcctggggggagactgcttcttcctccctaaccgtgaaccgctgtatattttccaattttgtgattttcctttttctgctatcacattaacctc

SEQ ID NO: 418956 - DNA, 122 bp, Homo sapiens
taatcacaccccgggttatgcacaagggcttgctcctggactcacaggcaggcatgttcccggtcccagcaacaagcgggagaggagcatgtggccgcaacacaaccacaaaatgtggtgct

SEQ ID NO: 418957 - DNA, 122 bp, Homo sapiens
cctggtatatcatggagagtggctcgggccacttgcacacatgccttcagcccctggtaccgtcttctctccccgggtcgcgacactgactcgtcaacgttaatgggggtccgcgactgctg

SEQ ID NO: 418958 - DNA, 122 bp, Homo sapiens
cgcactcccgcccgagagccgcgagagcttccggagggaaaggtcagagggggcaccgtgcggacaaatctggatgttttgctgttgctcacttccgggtgtcttttctcactgttgcttcc

SEQ ID NO: 418959 - DNA, 122 bp, Homo sapiens
aatagcatttttacaatcagttctgaaccattcatattcataaagagtggcacagatcatcgaacacagccaataatttttaaataattagtgttgggctttggaaccattaatttattcat

SEQ ID NO: 418960 - DNA, 122 bp, Homo sapiens
cgggggtgtgtgtgggacaggatgtggtttgagttctgtgatcctcaccccgacctcatgcgtcgggaatccttgcagccctgtgactggcctgtgggggcttgggctaagtccctgccaag

SEQ ID NO: 418961 - DNA, 122 bp, Homo sapiens
ccccctccccagtggatatatttataattgcatctggagggacccgttgggaggccgggccgaatctagtcatgaaagaatgaagcctaggcagtcgctgctgtctagggagggatacactt

SEQ ID NO: 418962 - DNA, 122 bp, Homo sapiens
aaggccagtggacaggttaccaaagattcagcaggtctgctttttatgggccagagatcacgttacaaagttgatgattaattcaatggtgctgtcatgtgttactatatccaggggatttc

SEQ ID NO: 418963 - DNA, 122 bp, Homo sapiens
cctcccaggtctgggtcttggcgggctggcagctcccctgcccccacccagctgcctgggcgccactgcgcagctgtcccagtccgttgccatagcaactggcagcagtactacactaaggg

SEQ ID NO: 418964 - DNA, 122 bp, Homo sapiens
gagcctaacctcatcccccgggtaagaatactagaatttctccttggaggctaaagaagacgttagtttctctgccgccgcctaaggctaccctggccacaacagcctgagccacagccact

SEQ ID NO: 418965 - DNA, 122 bp, Homo sapiens
aactagggactctgggaaaaaaagctgggagtcatatatgaccaccaagcatcctcactgcggttaattagtcaaactgcaattcttcagcaattgtaagttggcagactttcttaaatgta

SEQ ID NO: 418966 - DNA, 122 bp, Homo sapiens
ctctcacctggattattgtacagctttctgtttcttcattaaccatccctaagctaacggcggtgacgatggtttacagagagggtctttatctagtaagtgatcaaacaagaacaagggta

SEQ ID NO: 418967 - DNA, 122 bp, Homo sapiens
tgttcagggctgcagggagccgtgatgccatcattgctctctggcctggatgacagagtacgtccctgactcaaaaaaaaaaaaaaggagaaaaaaaatctctatctcttcctcatgctaga

SEQ ID NO: 418968 - DNA, 122 bp, Homo sapiens
agcttgctgcagagtgtgaggaacaggcccgctctctgggcttggggttgggagcctgggcgggggtgctgtcgggtgcaggaacggctccttctccgagtttggacagccaccctctccgt

SEQ ID NO: 418969 - DNA, 122 bp, Homo sapiens
agtttctgcaaaggaactttttgagcctgtaactagagcacaagctgcttccggggaaggcggagggaacacgtgggcacattgagttgcacgtggacgcggagtgcgcaggcgtgcgctga

SEQ ID NO: 418970 - DNA, 122 bp, Homo sapiens
accacctggcggggtccgctggacgcttgagggtcccccatgcggaccaggtgcagaggtcgggcctgcggaggagtgggaagtgggcgggcggaggggtctccgagctcacctccgagggt

SEQ ID NO: 418971 - DNA, 122 bp, Homo sapiens
ggatggggcacatcctgatcatgataattctgaccacacaggagcacttgggagccaggacgactctggatccttcatagccagggaccatctgtgccttcgagaaactcccccaccccacc

SEQ ID NO: 418972 - DNA, 122 bp, Homo sapiens
aataccatgtctttcttcttcaaaggatcaaaggcctttaggacccacagctgaagaaggcgcctgctgccagcatgtccctcccccacggccaccacacacttcaagtttacaaaaataaa

SEQ ID NO: 418973 - DNA, 122 bp, Homo sapiens
cgtggataatttttttgttgatatctggctctcattgcctcaaccccttttcccctcccgcggacaaaaagttcttgggggagggagaaatccagaaaccagccgagcgggctgtttggaga

SEQ ID NO: 418974 - DNA, 122 bp, Homo sapiens
taaatagataactgaaaatagtggtcatttttggagaaacaaagaggtctagaactgggacggggcacacagaagcctcctttgatgactagtgaagctctttctatgtcttgacctgcgta

SEQ ID NO: 418975 - DNA, 122 bp, Homo sapiens
tgcacccagagtggcattaccaatccttgctacgtgctctgctttcttcacctcctgctccgcacgggtcttgaaacggcttgacgtgtacttgtacatcctgatcagtagaaaaagcaagc

SEQ ID NO: 418976 - DNA, 122 bp, Homo sapiens
ggtgggcgggcgtggggaggccgcgctctgctggataattgaaccctgggactattccctcgtcagcccaagctctttatcttaagccgtcctttcctcttcatcgtatttaaattttaccc

SEQ ID NO: 418977 - DNA, 122 bp, Homo sapiens
atgtcttgtttcttccatccagccctcctgctctttccattaacagtccagaacatgaaacggttattttgacatgatcattcttgccaggggtcttaaaaagttatgtttctttacatctg

SEQ ID NO: 418978 - DNA, 122 bp, Homo sapiens
ccccaccctcaggcgggagattatcgggtttggccggagggccgaggggccctgtggcgtcgggggtctttccctgcagggtgggtgggggctgtcaccacgtggcttctcctttttttttt

SEQ ID NO: 418979 - DNA, 122 bp, Homo sapiens
agggccgggctgcctagcgagggcttcttttgagtgcgtaggggtggtgggtggcatggacggtttctctgagtcgtcagcgaatgccccccctagaatcctgcttttcaaacactttggtg

SEQ ID NO: 418980 - DNA, 122 bp, Homo sapiens
tgggcaacttgcctaagcttgccacaatcggtaactgatcttggggctcagttttaactccgagctctttctcctgcacgtgtcaggggtgttctgctcctgagatgtgaggcgggaggtct

SEQ ID NO: 418981 - DNA, 122 bp, Homo sapiens
gaacagcgatggccagcagatggcgccaggccccaaggcatgacccgctggccgcaggcgcgcctaggagtggccgcgaagctagtccccaaacaaagctggagccaatgcgctctctgggg

SEQ ID NO: 418982 - DNA, 122 bp, Homo sapiens
gctgcccatccaggccgaggccggtgggcacctgcgtggggctgagcaggccctggggcgcgggggtcctggcgggcagcccggtggggggctccggcggcggcggcgctggcggttcgcgg

SEQ ID NO: 418983 - DNA, 122 bp, Homo sapiens
gaggggagagcgcgcgcggctgagggcggggctggggagctggaagctgggactggaactcgcgggagtcggggaaggagccgggagccagggggtggggccgcgggtggggccgtaggtgg

SEQ ID NO: 418984 - DNA, 122 bp, Homo sapiens
ttattccttctgatgttcggatgtgtccggagtttgtttcttctggtgggttcatggtctcgctggctcaggagtgaagctgcagaccttcgcggtgagtgttacagctcttaatgtggcgc

SEQ ID NO: 418985 - DNA, 122 bp, Homo sapiens
acctgtgcaaggatacacggctgatgagtggcagggctgggatgtgaacctggagctgtccgattctaaaatccacactcctaaatgctactgagatcccaagttctaccacaaggcaggag

SEQ ID NO: 418986 - DNA, 122 bp, Homo sapiens
ctaaaatcaaatccctactttgttactctctgtgtaatgtcaggcaatttatatagcctccgattttcttgtctgtaaaagtgagataacaatactcatcttacaggattacataaaagaac

SEQ ID NO: 418987 - DNA, 122 bp, Homo sapiens
ccgctgcagttgtttcccattagtaactcgatctctcagagcagtaagattcgccttctacgcctctttttccctccgcccgaattgtttgttttctgcacatctccttcagggagccgctg

SEQ ID NO: 418988 - DNA, 122 bp, Homo sapiens
tgtatttttagtttttggaagaacctccacattgtttcccatagtggttgtactagtttacgttcccaccaacagtgtacatcctcaccagcattccttatttctacatcctcgccagcatt

SEQ ID NO: 418989 - DNA, 122 bp, Homo sapiens
gatgttgacgtacaccctctcgcccctccggagctgcaccaggccgccgaaccccacgctcgtgtaccagagaggcccgtacccttgtctcctggccgggtccagcactggagtcaccgtct

SEQ ID NO: 418990 - DNA, 122 bp, Homo sapiens
gtggcggcagagctcaaagaggagtctgttctggggaaaagacggcgtctgcctctctctcgaaccagccctgatcaactcccaagcagccggtccttagataacacggctgagaaacctga

SEQ ID NO: 418991 - DNA, 122 bp, Homo sapiens
agtttatccatgtattctctctctcctcctattgaagtgccctagccctcaagtcctcctcggacagagcttttggactcctaatttgcacacaagtctaacaagccacatcatcttgcttt

SEQ ID NO: 418992 - DNA, 122 bp, Homo sapiens
agatcctctcctccgtccccgcctccactgcccacacccctgcctccgcctctgcccacccggcccaatcccttacaactgcccaggactgctcctgagcagccgctgggagacagacggca

SEQ ID NO: 418993 - DNA, 122 bp, Homo sapiens
caagtgctctttgacaatgcttaagggcaggatctaataatctctctggggtaatttgggcgaggactttcctagaggtagaggttggactgggtgccctctttcttctcttggctttgaga

SEQ ID NO: 418994 - DNA, 122 bp, Homo sapiens
agcccaagtagaaagtcaaatctgccattgccctgaggggcacccattgtgtaaataaaacggactttcacttctatcaccacttcctcccaagaaaagcaaggaactgtttttagacttct

SEQ ID NO: 418995 - DNA, 122 bp, Homo sapiens
tctcaggtcgagtccttgggaagggaagtcaggagcgtgttgctgggttcctcactccaccgggaagtcccagactagcaaggagggctgcctctagagggcggttcttaaacccctgggaa

SEQ ID NO: 418996 - DNA, 122 bp, Homo sapiens
cttattattattattattatttttaaatcccccgcggaggagctctgggcaaatgaataccgaggcgccgctctagctggttaggcttgggatgcgataactcagtgccctcttgcagactt

SEQ ID NO: 418997 - DNA, 122 bp, Homo sapiens
attaaagggcctgctccacctcgaccgttaccggggatagggtctcggggccaggcacggcgttcgaggcctcccacccagccgaccggccttggggacccttccccgctggcccgggccac

SEQ ID NO: 418998 - DNA, 122 bp, Homo sapiens
gctccggcggccagcgattgggagatgcaaataccggcttctctgcccagcaacgggtgacgcggcgcccgagcgcgaggcggggcccggccgcagcccaagcgggcacctcggtgtttaca

SEQ ID NO: 418999 - DNA, 122 bp, Homo sapiens
atgtccagctgctgcaagccccagtgctgccagtctgtgtgctgccagcccacctgctgccgccccagctgctgccgcccctgctgctgcctgcgtccagtctgtggccgagtctcctgcca

SEQ ID NO: 419000 - DNA, 122 bp, Homo sapiens
atgaccctcaggccgtctgggaccggaccagccctgcagcgtcagcggtgggctcaggggcggctgccacgtgcacacggtgaactatagcagctgtggcagcccccaaccctgtgcaagcc

SEQ ID NO: 419001 - DNA, 122 bp, Homo sapiens
ggatacagcacatccagctcaccgcagggcctggcgacctcaccccggacctgcaccatccggatacagcacatccagctcacagcagggcctggcgacctcaccccagacctgcaccatcc

SEQ ID NO: 419002 - DNA, 122 bp, Homo sapiens
ccatggcttgtgaatggagcatggcctccctttcagcccctgacccctcctcccaggccacgtcaggcagggcactctggtgtggggtgcagtcctgtgacaatccctgcatcagtgtgggg

SEQ ID NO: 419003 - DNA, 122 bp, Homo sapiens
acgtccgtgggagacccttattttttccaccgctaaggttaagagattctggaatagaagcgtcgaaggagatcaagtgaaccttctacaactcctcggatgtcgccagtctccctttcggg

SEQ ID NO: 419004 - DNA, 122 bp, Homo sapiens
ggccactggtgacgccaggtgtagcagtagaggaccttcgccgctgccgcaggaggaaatcgtgtgaagctccatccatggcgtagaatacattagccgaggctgggatagtcagctctgaa

SEQ ID NO: 419005 - DNA, 122 bp, Homo sapiens
gacgagaaggatgctaaagatgaggagccaggagatgacatggagcacaaagcagaggagcggcacccaggtggcccatggctcagcccgagcctcccacaacacagggcctttgggtatgg

SEQ ID NO: 419006 - DNA, 122 bp, Homo sapiens
tttgggtctcaacttgtgcaatatcccctagcctgatatggcaagttttgataacagtaccgttttcttctgaccatgattacaaaaatcttttcagttaaaccactctcaagttattcact

SEQ ID NO: 419007 - DNA, 122 bp, Homo sapiens
aaaataggtttaattatggaaatctcaaatatattctaaactagagactacagtaataaccgcccttaacccatcacccacctttgacaattatcaatcccagaccaatcttgttcatctct

SEQ ID NO: 419008 - DNA, 122 bp, Homo sapiens
cggggaggcagatgtggggtgcaggccttgggcggggaggcctgagatgggatctcagcccggggatgggatctcagccttgctggcggactgtgtatgagctacttaatccccaccagtct

SEQ ID NO: 419009 - DNA, 122 bp, Homo sapiens
tagcaggtactcaaataatgagtgagggtatgtaaaagaaaagtagaacattgaggtgatcgtgagttaaagtagccaggttttgattttaattttgtgagtagaattctgacttttgcaca

SEQ ID NO: 419010 - DNA, 122 bp, Homo sapiens
gactcgctcgcatctcctgagaggcaagtttcttcgcaagcgttagccacctgtgtgaggcgctctgggtgggaaaggtggcgtgggagaagcgacagctcggccacaccgctcgggagctt

SEQ ID NO: 419011 - DNA, 122 bp, Homo sapiens
aactcttggtcacaagcattccacctgcctcagcctcctgagtagcttcaaccacaggagcgcgctgccacacccagctaatttttcgtagagatgagggtcactatgttgcccaggctggt

SEQ ID NO: 419012 - DNA, 122 bp, Homo sapiens
gcgtagacccagaggtgcttccctctagcgcacagtgctgctggccccgctgtgggcccccggcctcaacccagagagcttctccaaatcagtggctgtggccccaccgtctcccgagcgcc

SEQ ID NO: 419013 - DNA, 122 bp, Homo sapiens
gggaggccatctgcttatgggtggacatgggcacaggggcttctcagatgagctaggagccgtcctgagggggtgaccggtgccttgggtccagagttccggacccccaggaaatcgcaggt

SEQ ID NO: 419014 - DNA, 122 bp, Homo sapiens
acattgaggatcctagggcagtttcctgtgctatgccagaggaaggtgcggctctgttaccggagagaactctccccattcttacttctctgattccttattgaggccacattttaaaagcc

SEQ ID NO: 419015 - DNA, 122 bp, Homo sapiens
ttaaatcctagtagctggaaaattagatttaggtctttactgcctatctgattccatgtccgatagggttatggctcccagaatcattactgttatggaattcacatctttatcccatttgg

SEQ ID NO: 419016 - DNA, 122 bp, Homo sapiens
ccgacaaatgtgggtgaagaacgcatggcgggacggcgtggctgagaagcagaggagaaccgtgccccgcagttctccacgggttcaaacaaccggatgttacctgtggcctccgtggatca

SEQ ID NO: 419017 - DNA, 122 bp, Homo sapiens
caacatgcatttgcaaatgaaatattaaattgtctccaaattttggcaacactctgtgcacgctgagattttgtggacccaggggtctatctctccaatttctgactaaaataacggatcgg

SEQ ID NO: 419018 - DNA, 122 bp, Homo sapiens
ttcttagaagctgaaggtgacaccccatgagtcatggccaacatgaaaaaatgtcagagtcgaaagtgaaagatgagcaccacctagaaacttcctttcatcacaaatgcaaattaaaatgg

SEQ ID NO: 419019 - DNA, 122 bp, Homo sapiens
gcgaaaaaaaggccccaacgcagcctatttatagggtgggactgcgccgtgattggtgcccgtcagtgcccgcccctcgcgccctagcgccccctgcgcgctgccgagggtttcgcccagtc

SEQ ID NO: 419020 - DNA, 122 bp, Homo sapiens
cctttttaagaaacaacacaggcagtaggaaatcatactggtcagggcttgttttcctggcgtggggcctcattccaacctgttgcaatcagctctagagtgtctatagggacaccctggtg

SEQ ID NO: 419021 - DNA, 122 bp, Homo sapiens
cagatcccgggaggggtgcagacaggctctgtaaactatgggaaggcttgcagacagtgccgggtgctgtccctcagaatgatgaggtgggcttttcccagggcctttgctctcagcacccc

SEQ ID NO: 419022 - DNA, 122 bp, Homo sapiens
gtcaagctgggagcctagggcaggccttcaccctctgtggcatagagaggacccctccagcgtgagacccacctccctgcgctcagtagagtggagctgggagcccggggcaggccttcacc

SEQ ID NO: 419023 - DNA, 122 bp, Homo sapiens
accattgatgatgctgtcagagcaattcataaagctatcctggagcagaagtacctgacgcgagtgcctggagtcagaccacaggcgacaggtgtaatcgttcttaaaatccatcactgagc

SEQ ID NO: 419024 - DNA, 122 bp, Homo sapiens
tcacacaagagggtgtccctaagatgcatcacgtccgtggagaaaacaaagcaggacacacgtgtgagtcgtcacacccttggtcacccggcttggccgtcacacatgcctcctgcccagga

SEQ ID NO: 419025 - DNA, 122 bp, Homo sapiens
atttaaagtattcagcactgacctaaacaggcctagacataaaatgccagtccagacagacgtttgtgaatatacacacataacacattgcaggaagaacttggtgcctttttccaaatatt

SEQ ID NO: 419026 - DNA, 122 bp, Homo sapiens
tggaggttcgggcggttccggggctctgcaggagcctccaggcgtgataaagagcgctgccggcactcccggggtctcggcctctttggggcccattgccaagccccttccctcctcgtgct

SEQ ID NO: 419027 - DNA, 122 bp, Homo sapiens
agcctgcagagaatgcacgctggagacatatattatacccagagctttttatcttgcacacgtgaccctgcccatcatgagctgtgcgttttattcttgctggtgggacaaaaaccacctcc

SEQ ID NO: 419028 - DNA, 122 bp, Homo sapiens
agggctacagcggcgtccctaggccgttctggaggtcgcctgtccagccctcggctgctgcgagttgtggcacccaccttgacctttgctcagaccagcaggtgtaggaacgtgtgggagga

SEQ ID NO: 419029 - DNA, 122 bp, Homo sapiens
gcacccgggccagcagctgcggagggtgcgccgggtccatcagcagtgatggcccgcctgcgctgcgctcgatttctcgccgggccttagctgcctccccgccgggcagggctccggacctg

SEQ ID NO: 419030 - DNA, 122 bp, Homo sapiens
aagccctccaccatccgcagagatgcccccgctgaccgcaaagtgggtctcattgctgtccgccagactggacgtctccggggagccaagactgtgcaggagaaagagaactagtgatgagg

SEQ ID NO: 419031 - DNA, 122 bp, Homo sapiens
aggaaaggcagcctgtggcagccaggcggggccagcgctgcacaccggggaaaggctcagcgggaacgtgttcccagcactttgtctccccaggcctcagtttctgcatctgtaaacgggca

SEQ ID NO: 419032 - DNA, 122 bp, Homo sapiens
attcctctctaacatcatctccactttgcatctgtctctcttagtctgctttttttccaccgatgtaacagacctggagccagcaggactcagaggaaaggacttaatcaggtttatgtgtc

SEQ ID NO: 419033 - DNA, 122 bp, Homo sapiens
ccctaggacattgaaaagcaggggacaagattcactccatatctttttaagtacttgaatcggtacccaaatgtcagctgactgtgaataggaatatgaaactggaaattgcatttcacagg

SEQ ID NO: 419034 - DNA, 122 bp, Homo sapiens
cgctactctgtcgccgccgtcagaccggaattgccggtgccgccgccaccgctgtctgtgcgcccacctctgctgctaccatggggatcttagagaagatctcggagatcgagaaggagatc

SEQ ID NO: 419035 - DNA, 122 bp, Homo sapiens
aggagaaatgtaaaggcttttactttgcataaggatgggggactggggaaaaaggtgaagcgaagcccaaggacaccatgctaagggcaaaagtaagagacagtctcagaactgagagaatt

SEQ ID NO: 419036 - DNA, 122 bp, Homo sapiens
atagccttgaggaaactgtccaactctcagctagctcagaaagacctgtttggaaagatccgcctgattttcttgcattctgcatatttcataaggaagcccacatttaaccaccggctgct

SEQ ID NO: 419037 - DNA, 122 bp, Homo sapiens
ttgccatgtttagggactaaaatcttttgatgacaattttatgactgagtgacctcatcacgtgcaaaaagtgcatttgtacacagcaatcaatgattagactcttcgaaaattaaaaaaca

SEQ ID NO: 419038 - DNA, 122 bp, Homo sapiens
tgcgctgagctctaggtgcaggcggaagctgggtcaggtgcgcggccgcacttctggttgcgcggcccacactggccgccattgtggtggaagtcggagcgagtctcctgggcccgaaccgg

SEQ ID NO: 419039 - DNA, 122 bp, Homo sapiens
tttctcttccgggccactcgcgtggcacatgtgtgccgccggctaaggggcggtgagaggcgcccagattcacctccagagtaggtcatcccgggctgctgctgggctcttcggagaacttt

SEQ ID NO: 419040 - DNA, 122 bp, Homo sapiens
ggcctcatcacccatgaaaagaaatcacaatctcaactgcgcgtctatggttattaagctcgaggttattacaagaatataaatgggaaaccatttcaaagtctaacagctgggtagattga

SEQ ID NO: 419041 - DNA, 122 bp, Homo sapiens
gggtgtatgctttctgtcagagggggcttggctcctgtttccagccatcggctctgcttacgtgattccccgcctccacaggaggaactgaggcgggagcgccacggacaccaggtcctgga

SEQ ID NO: 419042 - DNA, 122 bp, Homo sapiens
aaaaagaaatgtgaaacgttcgtgatcgaatgcttccccctgtgttgtattagaggaacccgaagcaaagcctccagagggtgctggagaagctgcggctgcagagcagtgacccgaggcgg

SEQ ID NO: 419043 - DNA, 122 bp, Homo sapiens
cataggacagacttctttgttctgtccgttttatgaacctaggaagctcataaatgggaacgaaagctctggtatccacttagcaagccagaaccaccactcacacttggtctcctgctgac

SEQ ID NO: 419044 - DNA, 122 bp, Homo sapiens
tgcgcccgcagcgcccggcagctggggacccgggcttagccacatcgaccgcaacgttcgcgcgccaccttgtgtccattcccttagcctccagggacaacccggaaaccacatttcccagc

SEQ ID NO: 419045 - DNA, 122 bp, Homo sapiens
gcaccttggctctgcggccctcgggtctccggcgccgggcctgggctcgcctagcgtgggcgccccaggatcccacctccaggtgtcctgggcaaggggagctggcagcccaggccacaaca

SEQ ID NO: 419046 - DNA, 122 bp, Homo sapiens
cgggaagcgaggacgcgaggcggcgcgggcacggccgccccgagggcctggctttgcgcccgcttcagggaaacggcgccggcttttttaaatctgtggacagacaagcgtgtcctgagagc

SEQ ID NO: 419047 - DNA, 122 bp, Homo sapiens
gagccgcggcggttgtcggctggggcggggcactccacgactttcccggccagacacggtcgccttcctaggtgtcttggcctgcgaggcactcgtagcccgcccctctcctaggtgacgta

SEQ ID NO: 419048 - DNA, 122 bp, Homo sapiens
gcaagtgacaagtgaccacgccttttcccccgcgggtataaattcagaggcgctgcgctccgattctggcagtgcagctgtgggaacctctccacgcgcacgaactcagccaacgatttctg

SEQ ID NO: 419049 - DNA, 122 bp, Homo sapiens
ctgggtcacgacgtctcccctcttttcccagagggtccgatagtgtcgttaagtcctctccgtcggcccgggctcctgccttgggggtgtcccctaggtagagaatgcgtcggggagcgctt

SEQ ID NO: 419050 - DNA, 122 bp, Homo sapiens
aagagcgggagaaaaccgggaaaaagctgcctttccgtggggcctggctctgggaggctacggtggggaagttggggggggtggtggtgggagagctgtcacgtgactcgtgcaggggctgc

SEQ ID NO: 419051 - DNA, 122 bp, Homo sapiens
gagcgggagactcgacttgcactttaataggctctcccaggagccgttgtccagagggagcggggttcgcggggctggcggggacgtggcggggcggtggaggggtgagggggaggggaagg

SEQ ID NO: 419052 - DNA, 122 bp, Homo sapiens
ttgaaaggttggctgctgaggaattagtttccagggtcactgaacccctgtgagcagcctcgcctctgaatgccacagagggtgctcattctcaattcaaaggcttgtctacttagatctct

SEQ ID NO: 419053 - DNA, 122 bp, Homo sapiens
ctcatctttaggccactgaagtagtcccggagggcctgggtccgcgagcctggtgaaaagcgatgctccgacctcatctgtgactctcgagggctcctcgtccactgtggcgagtgcagagg

SEQ ID NO: 419054 - DNA, 122 bp, Homo sapiens
ggcagcgcgccggaagccccgcccccggggtcgccggggcccgtagtccttctgcgagggcgcgaggactccaggagccgtcctggttcgagcatttctgaagaaactgagttcccggcgtt

SEQ ID NO: 419055 - DNA, 122 bp, Homo sapiens
gaaagaaacagtcgatttagattgtcacagtacttcgggtagaggactttgatctggaatcgggataaagaatggggctataccctaaaaattcatttaaagctggtaggtgtttttcttta

SEQ ID NO: 419056 - DNA, 122 bp, Homo sapiens
ccggctatgcgcgggagtgcggcgcatgcgaggggagtgcggcgcatgcgacagcgcctgcgcagtcatgtcttaagaatcctttgcgctctcggtgcccccctccacgcccaggagcgtgg

SEQ ID NO: 419057 - DNA, 122 bp, Homo sapiens
gggcaggtgtaggatcgagccaagcccactggccctgcagtaggcacagaatcggagccgcgggaactagatcgtccttgagcacttgagcagcagcctccagcccagtctccagacccgtc

SEQ ID NO: 419058 - DNA, 122 bp, Homo sapiens
caatcttgtccgctcccaagcgactcaggctcttggcaggacttgctgtagagtcccagacggagttagccactgagtccttcagcgacccaggaaataacaacactgttggcaggtggggg

SEQ ID NO: 419059 - DNA, 122 bp, Homo sapiens
tctcctattccctctgttgcttttaaccatgatgtgtcagtttacatgacaccagaatatcgagcactctttccacaggtcaagattgtacttgggacttttgtgcaaaaattcagagtact

SEQ ID NO: 419060 - DNA, 122 bp, Homo sapiens
aaggctgtgcttgtaccaattgaggaaacagctaatccctgaaggatgtgaggtatttgccgggggaaattgtttcccatgaggaaagtggaggtcttctaacccaactcttttctgaactt

SEQ ID NO: 419061 - DNA, 122 bp, Homo sapiens
cctgagacaccctgagttccagcgctggactctggaactgagaggagacacctctgctgccgcgagctgcccagcaggtggtactttcacagcagccccaggaaactaatacacaaagccat

SEQ ID NO: 419062 - DNA, 122 bp, Homo sapiens
agtgcacgaggggatggaggatggagtctagacaagccaaatgtaaaaagatattgtccacgtattttgtgctttgtctgtgttacaatgcgatgacaagcccagtgtgctggctcacacct

SEQ ID NO: 419063 - DNA, 122 bp, Homo sapiens
tgccagctacaggaggtaagaaatcaaatgagtctccagagaggatgggattttattggtcgctcgctcctttggcgctagaaggtgcagccccagtgcagtggccacgctgtcccatcttc

SEQ ID NO: 419064 - DNA, 122 bp, Homo sapiens
agctcttgggaatctcggagacagagttatccacataaatttgagagttcaagggaataacgagaaaggttcaggaattaagcttgttctcatcctgatgtaagtattctcttggtccctgg

SEQ ID NO: 419065 - DNA, 122 bp, Homo sapiens
tgcgtctgcagagagcgcggcggtgaagcgggagcaggcggcctggcccaggagccaggacggccacagccacgccaccaccggcgagggcgagggccagggccactcactgtgacccgcga

SEQ ID NO: 419066 - DNA, 122 bp, Homo sapiens
gagagcgggtagcggggagggccgcccacgacggaggtttctctgtggttacctcagcggcgctcttcgcaatctgaaagttggggcagctgaagagccccaccaccttcacctgcagcggc

SEQ ID NO: 419067 - DNA, 122 bp, Homo sapiens
cttgctgcacacggtgtattattactttcccaggaccaccgtaacaaagtagcacaatcccggggcttgaacaacggaaatgtgtcaaatgtgtcagctcccagctcagagactgggagacc

SEQ ID NO: 419068 - DNA, 122 bp, Homo sapiens
tcacagcgcgctggcgctacacgcccgctaaaagaaggttgatttctaattggccccggtcggccaatagaaaaaagataatctggagcgttttcattggtccgctaaagataatgacccgc

SEQ ID NO: 419069 - DNA, 122 bp, Homo sapiens
tttatctcatacatcctggagagaattgtccagggacaaaaacagaagcgccgccagcgccgcaggacttcgcctctgcaaacgtgtgaggagagctgcgctgcgctgagctgcgtggtgac

SEQ ID NO: 419070 - DNA, 122 bp, Homo sapiens
gtgaaggagactgcggggagcggcgtggcccctgcagctgcgtgacagatctcggggtgccggcatggttagaaggtcaccacagcagacacatgctttactctggcccattagccctcgtc

SEQ ID NO: 419071 - DNA, 122 bp, Homo sapiens
tgctctgcccttttttccctccgcttccttctgcagcggggtcggagcctcggcgccgtgcgcccttgcccagaaacttctctgacgcttgctttaggttggtggatttgtgaccctgccca

SEQ ID NO: 419072 - DNA, 122 bp, Homo sapiens
ctattttaaaaacaataaataaattaacactgttgacccttctctggaccctctctggatcgatggtttataggcttaaaacatcaaaagcaattttacttgtgaaaattttcatcagtttc

SEQ ID NO: 419073 - DNA, 122 bp, Homo sapiens
ggggtgaggcagctcggcttcccagcgcggcacagcaagccggcgcccttttattcccggcgctgcgaggcttccccaagtccacgcctcggcacacccccaccctgccccaccccggggag

SEQ ID NO: 419074 - DNA, 122 bp, Homo sapiens
tggggtggcttcagtggaggaatgagggagtggcaggtgaagtgcaggaagagccagctgcggaaacggaggctgggctctgtcttgtactgtagagaactctctggcctgttttttcacct

SEQ ID NO: 419075 - DNA, 122 bp, Homo sapiens
ctgactctcaggaggaccaagcattcttgggggagacaatttaaactaccaaggtacacccgcaactccctctcggagtgcccttacgttccttcggctggcccctcgccccaaaggagccc

SEQ ID NO: 419076 - DNA, 122 bp, Homo sapiens
cagcctagtcggggggtgctgaggtccaagagtcaggcttagtgcttctgcatgtttaaacgccaataaagggtaacggagctgtggattcgtttttccaatcagaacatttttcgcacagt

SEQ ID NO: 419077 - DNA, 122 bp, Homo sapiens
ccctggcccggccccgccccccagctcgtgcgcgcgcgcgcgggagagcggccgctcgcccggaagtgacgtaactctacggcctagcaaccgttgccaaggagctcgactctgggagcggt

SEQ ID NO: 419078 - DNA, 122 bp, Homo sapiens
gaatctcagcttcgctaattagctgttatctagtcagctcagtgtttttgatcacaaacccgatttttgacactggcctttaggtaggcaggcttccctatgggccagggatgtggactcac

SEQ ID NO: 419079 - DNA, 122 bp, Homo sapiens
acgcctgtaatctcagctactagggaggctgaggcaggagagtcgcttgaatctaggaggcggagaaagaaaaaattagaaccagcttgtatatatctacaaagaaaaatttgggattaaga

SEQ ID NO: 419080 - DNA, 122 bp, Homo sapiens
ttcctagttgggacagcatatagggaaacgttaaggattataggcaccggagaggtaacccggcttgaggggttggttaaagggaaaggcgagacttagggcgagaccgagcggggctaatt

SEQ ID NO: 419081 - DNA, 122 bp, Homo sapiens
ccctgctgcccgttttttgtctgaagcccggctgggtcgctggagatccagcggagtgtgcggagggaggcgtgttggataccttttaaaaatgagaagccccaggccgggcgcggtgactc

SEQ ID NO: 419082 - DNA, 122 bp, Homo sapiens
ttatatccactgcatagaaagtaatgtaattgtttaaacattacaaagcatcttttataacgtgagggaaggtttatatgaaagtgtggaatacggaattattatacatgcagttccatatg

SEQ ID NO: 419083 - DNA, 122 bp, Homo sapiens
ccgcccgggagaggaagtccagttgggcccggccgggcttcagaggcgcagggcgggagccgcctcgcgcagggtcctccccaagccggcgccaggccctgccctcgtccggccctgccctc

SEQ ID NO: 419084 - DNA, 122 bp, Homo sapiens
ttatcctaaagccgtgagcaaacgctactcgctggtgttaatgggtggtcgtcagacactcgctttagcagccagatcagacggttttaaggtctcccactctgcatcctctcacaccccaa

SEQ ID NO: 419085 - DNA, 122 bp, Homo sapiens
ttttccggctctgatgcaggaggcatgtgcctggccatactgtccacagggaagtggtctcggattcccgggactgatcacaggcaacgcctcctgagtgcatacgtgagaacggataccct

SEQ ID NO: 419086 - DNA, 122 bp, Homo sapiens
acgtcgcccagatggaagaaactctggagatgcgcgctcctacaccggtgccgcggcgcccgggcccagcaccacgcacctatgcgcgcctctgccggtcctcctagaaatcccgccctgcc

SEQ ID NO: 419087 - DNA, 122 bp, Homo sapiens
aagtcgagcctgtccctcctcaaatctcacccgaagacacctgctgacacattgccaggccgatgtgagaaactggaaccgtccctggggacctcggcggcacaagccatgcctgcttccca

SEQ ID NO: 419088 - DNA, 122 bp, Homo sapiens
gcggacaatcccagtgcagatgctctgtatcgatcgcatgctatcggttctttcaaggaacgtgtattgatcatcaattaagtggtgagtactcctctagatgtcgattctaaagagggaac

SEQ ID NO: 419089 - DNA, 122 bp, Homo sapiens
gtgtcccccacccgtctagtttcattttcctgtacttgtttacaggaagtagcctctaatcggctcttaaatccaaacctactcattacaaggaagagtaaacatctgtctgtttcaaacag

SEQ ID NO: 419090 - DNA, 122 bp, Homo sapiens
gttttatgacgagacagaagcccggaaatacgttcgcaagtgaggggagcctgaatactgcggggcgtccgggggtcgggaagcggcaagttgcccctgttgctggcgttgcccggaaaggc

SEQ ID NO: 419091 - DNA, 122 bp, Homo sapiens
tgtaataagaaaaaatgaagatataaaaataaattcaatgaatgacttgctttcagggggcggtttgagttggaagagcttcagactgagcctggtacagtggcataaacatgggctttggc

SEQ ID NO: 419092 - DNA, 122 bp, Homo sapiens
tttctgtcagtgtacgtttcattcatacatcgtttgggtcagggtctccggccagatacccgcagctaatgccctcaagtgtgaggtgcaacacctcaaggctgggcaccgctcaaggtcgc

SEQ ID NO: 419093 - DNA, 122 bp, Homo sapiens
gctatggcaaagaggagccgaatgacaggatcatgtcagttaaccaaggagggcttcctgcgagaggcattgttctaaacacagttttgaaggtaatctgagagaagggacctgcctaggga

SEQ ID NO: 419094 - DNA, 122 bp, Homo sapiens
ccccctccctggggtgggcaggtccggagggcggggcccgggggcagctgggctctcaggcgctgcgggaggagagaaatgccccaggctctccggggcacacaaagcgcaggcgcagcggg

SEQ ID NO: 419095 - DNA, 122 bp, Homo sapiens
tcacgcacggactcttccgcgccacacctaacaaatacgccgacgagagctccccgccggcggaagaatggcctggagagggcctcgatgcttgctgggacctgtagtcttgacgcatgaga

SEQ ID NO: 419096 - DNA, 122 bp, Homo sapiens
atacttagaagggggtcatattagtgcttatctttttaaacaaggactcttcaggtaagacggctggtctaaacatgtattcgttcatttgttgtttgttttctggattttttgcttcaaca

SEQ ID NO: 419097 - DNA, 122 bp, Homo sapiens
aaatattttatggttaccaattattattggttatcagtcttcacacttattaaccatcagcgtggaaacacatcttcacatttcccttatttaggatactaatgctgtcacaaataaaatca

SEQ ID NO: 419098 - DNA, 122 bp, Homo sapiens
ttattaggtgcactaggccttccaatgagggggatgagcaacaatacccctcagttaaatcgcagcttatcacaaggcactcagttaccgagccacgtcacgccaacaacaggggtaccaac

SEQ ID NO: 419099 - DNA, 122 bp, Homo sapiens
cataccctttttgacaatctctgattctctcatttcatagatgtccctttcacttgaatgcgcacacacacacacacacacacacacacacacacacacatcattaggtctccagaaacaaa

SEQ ID NO: 419100 - DNA, 122 bp, Homo sapiens
catgcaatttctctctgtccttcagtcccttcatctcaaggtttaatttaaatatggtaacgcctgtatgcaactcccagcatccagtaggcactcactaaacacagttctccaccctcctt

SEQ ID NO: 419101 - DNA, 122 bp, Homo sapiens
ccaggaatacctctccctcctgaccttacctgcaccttcatgagccgccccaggtaagagcggtagtaagacaggtaaatcttgctcagcgtctccacatattcatccctgatctcctttgc

SEQ ID NO: 419102 - DNA, 122 bp, Homo sapiens
cacacccatgcggtcccccaacccctcgcccggtgcacacccatgcggttcccaccccctcgcccggtgcatacccatgcggtccccaggacaccagccattcgcggatggtgcgcagctgc

SEQ ID NO: 419103 - DNA, 122 bp, Homo sapiens
cctagcctgctcgcgttcattcattcattattcattcaggagctttttaggagctgtcatcgacctagacctccggctggtcggttgtgaggcatgagggagaggaggggccaggagtgtct

SEQ ID NO: 419104 - DNA, 122 bp, Homo sapiens
atattaataaaagcttggtggcggcggcttccagacaggtggacgctttaggccgaagatcgggtccgcccggcgcgggggtcggtccaggcagagccattctctcctcggtctagggtgga

SEQ ID NO: 419105 - DNA, 122 bp, Homo sapiens
ctctctttcgaatacctttgtccaattccataagggcagagttggcatccagttcctgttcgccatagccggcatctgccaggaaagacttagttgagtttgacgccatgacccgaatagtt

SEQ ID NO: 419106 - DNA, 122 bp, Homo sapiens
tgagacaggggagggggcagcccggaagttttctgacggcagaaggagcccgccctgagccgggggacgcgcttgctggggaaggaagaggctgtggagaccactctgagtggtgggctgtg

SEQ ID NO: 419107 - DNA, 122 bp, Homo sapiens
ttcccgcggcgcagggctcgggacctgcagccctccatgcctaagcctaccccctgcctccgtgggctcctgtgccgcccaagcttccccgatgagcgccaccccctgctccacggcgccca

SEQ ID NO: 419108 - DNA, 122 bp, Homo sapiens
caggggacaccctctagacggagagcgggctccgaggtcctggctggccctcggtgcgcccgcccctgtgttggtcccacaatccctggcaatgagaggccagggtttattggacagagtca

SEQ ID NO: 419109 - DNA, 122 bp, Homo sapiens
caccatttttaaaagtaccattcttttgactttgctgttcccaaggcttctgtgatattccggcccctccgtttaaaagccatcagatttgagagcaataagtcttcaaaaccgggaattta

SEQ ID NO: 419110 - DNA, 122 bp, Homo sapiens
gccggctcccttgaagaccgtcttgagaaagggctagagaggcttttagtgcaagccccacgggatcacaagttgaaagaagtatttacatgtgtcagtaccctctcattcctgaacttcaa

SEQ ID NO: 419111 - DNA, 122 bp, Homo sapiens
cccgatttccacaggcaaggctaccttagcccttttaaaaggcagagctgcggagggggccggattctaggaggaaccaatgaaaagcctcactcggcctccgctcctcccacttcttgctg

SEQ ID NO: 419112 - DNA, 122 bp, Homo sapiens
ggagctcttcccagggcccgcctccccgccagggggcgatccacctccacttcctgtttccgcagccgccctaccaggagcctggcactctcctcagggcccgcctccccgccagggggcgc

SEQ ID NO: 419113 - DNA, 122 bp, Homo sapiens
tttcgctgtggttcgtgaggacgcgtcctgggctgccctgagaagcctacgtctccccttcgaggcccgggaagacctccaaccccgctgacaatgctgggccctcagccagacctgccctg

SEQ ID NO: 419114 - DNA, 122 bp, Homo sapiens
tactagggaggctgaggctggagaatcgcttgaacccgggaggcggaggttgcagtgagccgagatccgcgccattgcactgcagcctgggcgacaagagtgaaactccctctcaaaaaaaa

SEQ ID NO: 419115 - DNA, 122 bp, Homo sapiens
agccgtgggaaaagccttcccaagctgtcagaggaagagccggcctgcccggggcaagcccgccgcacccgccatcgggcctgtgaactgttttgaagctgtgcgtgttttgattctcagtt

SEQ ID NO: 419116 - DNA, 122 bp, Homo sapiens
ggccttgcctctacagtcctctttggcctagtggcctcctcccttgtggattggctgggtcgcaagaattcttgtgtcctcttctccctgacttactcactatgctgcttaaccaaactctc

SEQ ID NO: 419117 - DNA, 122 bp, Homo sapiens
tctcggtctcttctgaggatatctgaaaagcgtacttcagattctgaacccaggtgttgacggctgcatgactggaacgggagcctgtgtggaaggacaaacctcttcagaaggagtggccc

SEQ ID NO: 419118 - DNA, 122 bp, Homo sapiens
acacattaactccctcaaggtcctaggtgaggactttgccccttctaccttgtgtctccccgcctgcatctcccagtacccagcacaaacaggcagaagactcctcagccagctccacccca

SEQ ID NO: 419119 - DNA, 122 bp, Homo sapiens
ttgtggccagcttcggccaaggcgagagaccggacttctaagggtgggtgtgcgcgtcagcgaagcccggcccctgcccgcccgaagaggcagcagcctccagcgtccccgctgccgaccct

SEQ ID NO: 419120 - DNA, 122 bp, Homo sapiens
agcttccaagtcattcttgatccatttgtctccctcagtcctcactggcagtcaatatcccgagtcctatcaaaatagctcttaaaacttctgcctcttctccactccctcagccaccaccc

SEQ ID NO: 419121 - DNA, 122 bp, Homo sapiens
caacaacaaaaatactaacagcaatgggaccgtaataaatcaactcggagtgggtacaggcggttccgggacaacccacacttagtctaggagcccggagatccctcatccagctttccccg

SEQ ID NO: 419122 - DNA, 122 bp, Homo sapiens
ccgctgcgaggctgacccgcccagccaggcgcggcgtccggctccttgacggccacgccccgcgggaagagaagcctattgggtggtcacgcctcctcctaacgccagaacctcatcccgct

SEQ ID NO: 419123 - DNA, 122 bp, Homo sapiens
cagctggtaaataataacgtcagggacctcaaatttagatctacagtccaccacaaaggccgtgcatagatattaggtttgccgcaaaattgtgggttttggctgggtgcagtggctcaggc

SEQ ID NO: 419124 - DNA, 122 bp, Homo sapiens
ggtaactgaatttcatctagaactgtggactgttctggctacaggttcaagtgctggggccggcagtggagagttccacgtgtacagacatctgcgccggagagaatatcagcgacaggact

SEQ ID NO: 419125 - DNA, 122 bp, Homo sapiens
ttttccattatgatagtttgcttctcattaaaagtggagtctcctacaattatccattgtcgacttgtgaaacagcaactgtctctatcttggtcattgtgttgccttataggtttacaagg

SEQ ID NO: 419126 - DNA, 122 bp, Homo sapiens
caaactaccatggcacacgtttacctatgtaagagacatgcacatcttgcatatgtaccccggaacttaaaataaatattaaaattaattttaaaaagcaacaaacagttcctcaccacctt

SEQ ID NO: 419127 - DNA, 122 bp, Homo sapiens
cctcttaagtgagccggttagatccagtgcgccccctatctcctctgcccctacgcctcgcgcaaggccctcgcagccggaatagtcgcgcattgaccgactggactctaaagccccttggg

SEQ ID NO: 419128 - DNA, 122 bp, Homo sapiens
tagttcaactaggagcacagagtgagaaccagatattggggcaggaactcttctgtttgacgtctacagtgggagagactgcacacctgtgagcacagggattcctttgtgtaggggttcct

SEQ ID NO: 419129 - DNA, 122 bp, Homo sapiens
gccccggctccccagcccaccgccatgcagggctcgcgtgcgggaaaactaatatgccggcgtttaagcctgtgcccctctgctgggtgtaactgcgctgaaataaatgatctgacaatgtg

SEQ ID NO: 419130 - DNA, 122 bp, Homo sapiens
acccctgcaacctccacccagatcaggatttagaaaatctcggctgagggcggtggcttacgcctataatcccagcactttgggagacggaggcaggtggatcacttgaggtcaggagtttg

SEQ ID NO: 419131 - DNA, 122 bp, Homo sapiens
aaatatacctgcacataactgtatactgggagaagagacatcttccttatagaagaatttcgagtaatgtttgcagatacctccccgttcactagctaggccttagccctccctacaccttg

SEQ ID NO: 419132 - DNA, 122 bp, Homo sapiens
tttcttgtaggcccaaaacccatatttctaataactatgggaataatttccggaattcttcgttactcacacaaaaacaggaggtacacatgagagaaaagtctttccaatgtaatgagagt

SEQ ID NO: 419133 - DNA, 122 bp, Homo sapiens
gtgagtcattcgataagatgtgtaacagtggcggtttctgtgaatttccttgagcaaaggcgtgtgtctaaactacttaagatctttaatgactgaaatgggtgggagtgggtttcaggagg

SEQ ID NO: 419134 - DNA, 122 bp, Homo sapiens
gcaacctccctgcccgattctcctgcctcagcctgccgagtgcctgcgattgcaggcgcgcgccgccacgcctgactggttttcatatttttttggtggagaaggggtttcgctgtgttggc

SEQ ID NO: 419135 - DNA, 122 bp, Homo sapiens
ctagtatcattcaggaagtggacccagccgcaaactcaggagcgttccaagtgtccagagcgtctggtagtcgcaatagccagtgatcagtgacacccccaagaaagtgatagcgacagaaa

SEQ ID NO: 419136 - DNA, 122 bp, Homo sapiens
tctccccggcgcctgcaagtcctgcgccccgtccccgctctcatgaagccgtgacagagccggccgtctccaccccgctgtagccgcacagactgacaatctcggcacaaagaggagacagc

SEQ ID NO: 419137 - DNA, 122 bp, Homo sapiens
aggagtggaaggagcgctccatagtggctctgtcatcccaggttcccttctgcctagcaccgtggccctagtgatcccgccttcgccctctggatcccccacccccactgtctcgctgctcg

SEQ ID NO: 419138 - DNA, 122 bp, Homo sapiens
cagggccaggagcctcagagaccagtgtgggctgacaaagcccagccccagtggttggtgcgctgggtgccctcactgctgtcatgagttcacaggggccagtgtgggccatggaaatgaag

SEQ ID NO: 419139 - DNA, 122 bp, Homo sapiens
ttgggcctggaatctggacacacagggctcccccccgcctctgacttctctgtccgaagtcgggacaccctcctaccacctgtagagaagcgggagtggatctgaaataaaatccaggaatc

SEQ ID NO: 419140 - DNA, 122 bp, Homo sapiens
gtcaggctgtattcctgaaaatcatggtgaggacatgaggaaaatgtccttccagcgctgcgcccggacagacaaggtgggtggtggccttctctgcccctcccccgctgctatgagcagca

SEQ ID NO: 419141 - DNA, 122 bp, Homo sapiens
agagaggctgcggatgcgacccagctccggctcagctgcgcgcgtttgcaaatgcggctgcgtccagacagggcatggaacacatttccaagctcacgtccccgtttcttgtttacagctga

SEQ ID NO: 419142 - DNA, 122 bp, Homo sapiens
actaggcaaatggtcacttgtcttctgatcaagtctccctgcaagcaaacataaagagcacgggtgtgagtggtctgatggtgtccagcctcctgggagccttgtcctgtgcctctccacca

SEQ ID NO: 419143 - DNA, 122 bp, Homo sapiens
cgagcaagcccactaaaggagttgttggggtcccccacactaacactttgcatctgctgccggagccgttattgccctcactgtctcagatttggccagcacttagtggctgcacagggaca

SEQ ID NO: 419144 - DNA, 122 bp, Homo sapiens
gcaactcttgcttgagttgatccacttacgcttgaggcatgaactatggaccactctctgcggcagcgagactgggtctggctggcacgcctgatgtttggaataggctcaacccagtcacc

SEQ ID NO: 419145 - DNA, 122 bp, Homo sapiens
ttatttctatgtgggaatacctcattgtgagcaaacctgacatacagcagtaggactgaccgtcactagaaagctttgacacaacacttttttttattatagcacactgccaaaatgtgttt

SEQ ID NO: 419146 - DNA, 122 bp, Homo sapiens
actgggccttggcaggcttgcctgggactccatccgtgtgcggccaggagttgatcccaccgtctctgcacagacctcctcaaagccaagggcaggggtctgcagaggtgggtgagggatgc

SEQ ID NO: 419147 - DNA, 122 bp, Homo sapiens
cacagagggagcccctacaggcaggggtttttctgtctgtgcttctgggagagtatgtctcgtacatttgtcgcgttgatgaagacttcacagctccatcagctgcgggcaagggggtctga

SEQ ID NO: 419148 - DNA, 122 bp, Homo sapiens
ggatggtgagcgttccagggtgccaagtcccgtgggtctaacgggcttgttggcgagcgccgcgggctctgcagtgcctgaggccagaatctggctggggagcggcctcgggcttaggccat

SEQ ID NO: 419149 - DNA, 122 bp, Homo sapiens
aggtggggcctctgggcagaggacatcttggtaaactgggctgcagcagggcccaaaggtcgggattgaggggaggccctgccaggtgacctctgcaaggacctggggaactgcacgcaaaa

SEQ ID NO: 419150 - DNA, 122 bp, Homo sapiens
cggaaggctgaaagggtctctaagacactctaatttcccgacagcctggcttgcctgccacgaggagggaaccccagggctcaccccctgtgattcctgcagttgggcttttcctgctgttc

SEQ ID NO: 419151 - DNA, 122 bp, Homo sapiens
aagtgaccctctttatttcccttcctcacgtggtgcaggcaggaagtgacgcgcctggcccgggagctgcggtcgcagaggccgacggagccggagtcgcggacgccgcggggtctccggga

SEQ ID NO: 419152 - DNA, 122 bp, Homo sapiens
gagacttgggtcggcctcctgaaatgacagcagggagacttgggtgaccccccttccaggcgccatctagcacagcctggccctgatctccgggcagccaccacctcctcggtctgccccct

SEQ ID NO: 419153 - DNA, 122 bp, Homo sapiens
ccaagacaccctcagggatgtcttccatcccaggaaggccaggtgggacaatttgccttccgggcaacacacattcctgcctcccagtaccctgtgtcccctgggcctccacccactgtgta

SEQ ID NO: 419154 - DNA, 122 bp, Homo sapiens
ggtgtgcttggctctgctgggaagtatggggtgttggtccagggcaggagccacaggcaccggtgctgcgagagaaaccctgagcgctggccggtgagccaggcccagatggggccagatgg

SEQ ID NO: 419155 - DNA, 122 bp, Homo sapiens
actgtggagggacgcgcttggaggatgtgggcggccccgcgcggagcggtgcagagtcggcggttgtggtggtcctggcccagcatccaggcctcgcattgccaggggcaggcggctgggag

SEQ ID NO: 419156 - DNA, 122 bp, Homo sapiens
tctgcccgcctcagcctcccaaagtgttgggattacaggcatgagccaccgtgcccggcccgagttctacttctagttactgggtaaccgggaggcatctatgctttttacagctttaggcc

SEQ ID NO: 419157 - DNA, 122 bp, Homo sapiens
tgtgtatgtacggggtgccctggcggcggtcctcaaattcccttcaggtggcagacagaacgagggtgacagtgaaaacgtgtccgcggcattggccctcggggaggaggcgaggggtccac

SEQ ID NO: 419158 - DNA, 122 bp, Homo sapiens
aggacaggcacccgggcgatgggaggcgcagcgtccacaggaagcgcccccaccgcaggccgagctccggctgtcctggggcctggcccaccccactgcgcctagcgcagcccgcactccac

SEQ ID NO: 419159 - DNA, 122 bp, Homo sapiens
cgggagcgcgcctgagggaggccgcggggggcagggccgggactgcgttgagacagtcgccgtgcctcagtttcctcctctgcgaagggcgggaggagtcggacgcgccctagagccccgcg

SEQ ID NO: 419160 - DNA, 122 bp, Homo sapiens
gcagggtgtccacgggactcggctcttcctccctgacccctcaggcctgtcctgggggtccgccctagaaatagctcggaggaaggagccagtgacttgggtgacgttttggaaattcagta

SEQ ID NO: 419161 - DNA, 122 bp, Homo sapiens
agcacacgtctgttcttggcagcgcgtggcggatggaactggcataggttatcggaaggacggtttcctagtgggcgtcgatggttagagacgtaggcgtttcccctggtgtttccttatga

SEQ ID NO: 419162 - DNA, 122 bp, Homo sapiens
ctgagctgccaggggcctggccactctcaccctgagccctgccctggctgagctgatcaccgctgcatgtcccagctgccggtctgcctgtcacctgcagtgcacatgtgtgcatgtgtgtg

SEQ ID NO: 419163 - DNA, 122 bp, Homo sapiens
ttgtgggcttgacaaaagggccccgggccaaggcttaaggggggtgctgtggtccccaggcgcgaggctgggggcccgggccacccggctcctcctcccggagcctggtccaggcgcgctgc

SEQ ID NO: 419164 - DNA, 122 bp, Homo sapiens
ccacttcgcttctcgccagaacgtctcttaacatttaggaaaatgcgtttcgcccgtccgcgtgcaagcttgccatcacttggggttgcgcctgtgatctttatttaaactccaccagcctt

SEQ ID NO: 419165 - DNA, 122 bp, Homo sapiens
ctgggcgagggcgggaaccgcttggcggcgcggggcagggcggggctgactggggtggggcggggcgaggagggacggggcggggcgaggcgagccgcgcggccagggggcggtggcggttg

SEQ ID NO: 419166 - DNA, 122 bp, Homo sapiens
ccggggctgagcactcaccccaaatgtgcgctccggggctgagcactcaccccaaatgtgcgctcctgggctgagcactcaccccaaatgtgcgctccggggctgagcactcaccccaaatg

SEQ ID NO: 419167 - DNA, 122 bp, Homo sapiens
aatttggggtctgggcccggcattggcatttctaaggagtctcaggtgatgctgactgctcgtctggggactgcactttcaggactgcagctgttaatgaaccagctctgcctggaggctag

SEQ ID NO: 419168 - DNA, 122 bp, Homo sapiens
tggcctctagaggctgatgagaggcaggagctgaccccggaggggccctcgttgacgacgcgttgcgcctggagaggctgccgggaggccggagctgggcctggagagggcgacttcaggac

SEQ ID NO: 419169 - DNA, 122 bp, Homo sapiens
tgaaatcaaagcacaccgtctcctgtagttcccagagccgtcttagcatgagtgtggaggcggcagcgagggcgaccccagtgccacacacacggcacgccgcttcacaggcccacacgtca

SEQ ID NO: 419170 - DNA, 122 bp, Homo sapiens
ccaagcctgcgcgaatgtccttgtagccagctatgaccaaacatttagggcgcacctgagcgccaggcccacgccacccctgcttgctttcacttaacagcctcgactaggccccctatgcg

SEQ ID NO: 419171 - DNA, 122 bp, Homo sapiens
tgccccatccggtaccctgataaggacttcggataaatccagagcagcctgttggcaccccgacccaactcaaggcagagccctgcctctagtgagaatctacgcaggctctttaattatca

SEQ ID NO: 419172 - DNA, 122 bp, Homo sapiens
gcgatgagctaagtttgttgtgtgattaactggaaagatctaggtctgaactccctcttacggtaagaaactgtttaacaacagccctttactctcttccagccccctcctttcctcactcg

SEQ ID NO: 419173 - DNA, 122 bp, Homo sapiens
gaccggaagtgacgtgagcgggttccggttgtctggagcccagcggcgggtgtgagagtccgtaaggagcagcttccaggatcctgagatccggagcagccggggtcggagcgggtaggtaa

SEQ ID NO: 419174 - DNA, 122 bp, Homo sapiens
taaacaaaactatattcagatgagctcgggccgggtgacttaacagatgaggaagtgtctcggggccatcggcggaggcgcagcccaggggtccccagctccccgcctcgccacctggggac

SEQ ID NO: 419175 - DNA, 122 bp, Homo sapiens
tgtgatctgtgggaagcaactaaaccggcgtattcgcggcaggggagctctgtgccgtcccgcggccccaccccgctctgccatgggaagccgtagcttggcgctgcccacagtgacgcgag

SEQ ID NO: 419176 - DNA, 122 bp, Homo sapiens
gcccggatgccccgcccgcgcccatggcgcagccacacacgacctcggtcccgtacttcgcgcgctctcctgcaccgccgccgccatctcgctcaggagctcctccacaaccgccggcaaca

SEQ ID NO: 419177 - DNA, 122 bp, Homo sapiens
ccaggtccccaacaccatccggaaggcatggaacgaccgggacaaccgctgtgacatttgcgccactcacctgaaccagttgaagcaggaggccatccagatggtgctgacgttggagcagg

SEQ ID NO: 419178 - DNA, 122 bp, Homo sapiens
atttttaaaaataatattgtatactccgcctcattgcaagaagactcaatctggcttcttcgctccattctttttttttttttttttttttgagacagagttcactttctcgcccaggctgg

SEQ ID NO: 419179 - DNA, 122 bp, Homo sapiens
gctgctatgggtcagatgccagggccgggggtgcctgctgctaggtcagaggggcctctgcgggaggaggcgacagtggctccctggaggcggcagtggggcccggccacaggccgtcggag

SEQ ID NO: 419180 - DNA, 122 bp, Homo sapiens
gatcttctctgccctcttcccctttacctgtaaggtaagtgcatagatggattgaaaatgcgatgtactaaatctctggaggtgagagaggaatggcctctcaattcagtctcggaagctcc

SEQ ID NO: 419181 - DNA, 122 bp, Homo sapiens
aactgaagaagcgtgatcacggccttggcatttagggcaggcaccagcgcatctatggaccgcgcacaaattccggggatgccgaatttgggggatgctaaggggagagagtgggtctctag

SEQ ID NO: 419182 - DNA, 122 bp, Homo sapiens
gaggtgctggcacctctgaggctagcagtgcgccagcaggtaccggtgttttgcgctctccgctaagcctccggctctcctcccagggccttcttctggtcatccttccctcctccccgggg

SEQ ID NO: 419183 - DNA, 122 bp, Homo sapiens
gactgagcaggcgtctcggggagcacttctgcagagcgaggacttccatgtgagcgattccgttctccccaccaccaatccgacctcccagccgtctccgccgcccgagcatccttgaggtg

SEQ ID NO: 419184 - DNA, 122 bp, Homo sapiens
atgagtagctgctttccgcaccaaatccagaacatctgtactgggggtgtctgacacttgcgtgctctctctcattctgaccccttctttccccttacatatcattttttttcctttcttcc

SEQ ID NO: 419185 - DNA, 122 bp, Homo sapiens
catgcatacgacatacttcctgcagtataatgatggttatcagtgtgctacacgttataacgaaagtcaattgtttcttacctggaaatatctcctgtgattcagtttcaccaatccaggct

SEQ ID NO: 419186 - DNA, 122 bp, Homo sapiens
aaaaaaatttcacacagttataagattttgcagatcctgagtaagacagtccctgccgggcgcggtggctcacgcctgtaatcccagcactttgggaggccgaggtgagtggatcacgaggt

SEQ ID NO: 419187 - DNA, 122 bp, Homo sapiens
ttcttacggatgaggcagtccgggcttatggatgaggcagtccgggcttggagagcggggcggagggtggtggggggcctgggacacgctctccccagtccagccaacacctgcttcctgtt

SEQ ID NO: 419188 - DNA, 122 bp, Homo sapiens
gggatccctgcgggaccacagcgcttcagcctgtgcctgtgcagtccgcggtgtgaaggacggtttaagtaggcggtgtcaccccgccccttcccctccagcacgccccgccccttcgcccc

SEQ ID NO: 419189 - DNA, 122 bp, Homo sapiens
ctccctctgctctcttgcttggtttgagggaccctcttaaaccctgctctccaagcctcacgtgaattgaaccagccaccacgtggtccccggaggcgctgagctgcgctgagcccggcccc

SEQ ID NO: 419190 - DNA, 122 bp, Homo sapiens
cgaggcagggtcaggcgccagggagtttggagacccggcagagtcaccccgcaaccgtcccgttgccttgggtcgggattcctttgctttgcagtctacagtagcgctccccgctcttgctt

SEQ ID NO: 419191 - DNA, 122 bp, Homo sapiens
tgaactcccgggcacaagtgatgcccccgcctcatcctcccaaagtgctgggattacaggcgtgagccacccagccctggcccctagttgagtcattcttacaaagaacatcacgctgctgt

SEQ ID NO: 419192 - DNA, 122 bp, Homo sapiens
agcgctctggctccttcctcaactgttttccttgtaccttagagtttcctgaccagggcccgctggctgctaagacttcttcctggtgcaagggagccggccggccggccgtccttttaggc

SEQ ID NO: 419193 - DNA, 122 bp, Homo sapiens
tccatgccattaatactagttttactgtgaatcttagaaaaatgctgatggccagagagacgtccctctagcctgatggccgaagcccttaccaacaccctttgggaagaagctgccctgtg

SEQ ID NO: 419194 - DNA, 122 bp, Homo sapiens
tgaggtggggagggagcctagagagccgtaaaataaggattggaccatttttccaggcggcgaaagcggcacctgggtttgtttcctgatcgtcttctcccccagagtcctgctgaacaagt

SEQ ID NO: 419195 - DNA, 122 bp, Homo sapiens
ccatttgctttactcagtctatccattcaaatgctaatcttggctgggtgtggtggctcacgcctgtaatcctagcactttgggagactgaggcaggcagatcacttgaggtcagaagtttg

SEQ ID NO: 419196 - DNA, 122 bp, Homo sapiens
ccccgcccaccccaacagttgctgcctgcgattggaacgcgcgggagggcagctacggctcgccacccccattggctgggcccccttgtcagtccgacgactgcccaccaccccctccgcct

SEQ ID NO: 419197 - DNA, 122 bp, Homo sapiens
gagcaggaaaaggcggggcttccgcttggggcatggaggctgtacctcttacgtcacttccgtaaacaaacggagctgcggaggagcgggtcccgggatgtgaccggggctctgcttgtggc

SEQ ID NO: 419198 - DNA, 122 bp, Homo sapiens
acagacagtcctgtcaccgtgcagctgatgcgtcctgtggaggggtctgcagctcgggggcggcgccgggggcggggcaggggcagtgtgagggatgggacgtgttgagccatagatgtcct

SEQ ID NO: 419199 - DNA, 122 bp, Homo sapiens
aactgaaggcttaatcacaatgtttacattcatactgtttctcaccagtgggaattctttcgtgctcaaaagaaactggaacaattaagggctttagaacaatgtttgtattcacacagctt

SEQ ID NO: 419200 - DNA, 122 bp, Homo sapiens
cgcggggctccttccttcgcgcatgcgcacatgcactcttggtaatgcttgcaggtggcccgttcttcctctttgtccttcgctgccacgtgagaggggagtgtacgcgtgtgcgcgcgtgc

SEQ ID NO: 419201 - DNA, 122 bp, Homo sapiens
tggagttccatctgagaggttaaaccaaaaaagctttaattttttttttttcagtttcagcggcttaagttggacagatgtctgctgaaaaaccagtttgcaaaactgtgtatgactcatgt

SEQ ID NO: 419202 - DNA, 122 bp, Homo sapiens
gagagggaccgatatgtgaacatggcagctgttttctccagagccctgtttactgacggccgaacagtgtgaatcctgagaaggtttggatttgggtctgaactgggctcgtctggccatag

SEQ ID NO: 419203 - DNA, 122 bp, Homo sapiens
ctggaggtccagtggtcggggtagagctggatccctcagccttctggatcatgcaacagacgctagccaccaagtcccttatggaacagacacggacctcagatcaaagcaagtgtctgtca

SEQ ID NO: 419204 - DNA, 122 bp, Homo sapiens
ttttaaatagcccaaacaatgggagttaacaaattgggcactaacattttaactttttctcgtgtttcaatatgtggaatttcttgcttagaagctggctctttccaagtatattgtttcat

SEQ ID NO: 419205 - DNA, 122 bp, Homo sapiens
ctgatctcttcctgcctgccactctcaataaatctttgttgaatgggtgactgaagttgccgaagttttcgtagtgtctgagttcctttttccatctgaagttactacataagcagaggata

SEQ ID NO: 419206 - DNA, 122 bp, Homo sapiens
gaattggggaaacatttagtgtctgcatctaagtggagagctggagtctctcatgggactcggtgagaagaattcaagctctgtaccataaagctctttggagttttatctttgctctacat

SEQ ID NO: 419207 - DNA, 122 bp, Homo sapiens
taacatattgttttaaaaagttacttatgataatattcccgagacttttctgcaatttgacgatttcttccactcacaggaagacaggcctagactataacaatgaaagtgaactccaccag

SEQ ID NO: 419208 - DNA, 122 bp, Homo sapiens
ggcgagccgccaacttttaaatctcgcgcacaagtgggctgggctgcgcggtccccgccgcgcgtcacctcgccgcctgccgcccccggcctacctcgcctcaccccgccccgctgcctgcc

SEQ ID NO: 419209 - DNA, 122 bp, Homo sapiens
cacgggggagttgtgtgatactcattttcaatccatgccattgtgtatatactaccgtgccgtgtgtagatacacactctggtgtcatcgtgtgcacaccatcatgccatgtgtgcatgctg

SEQ ID NO: 419210 - DNA, 122 bp, Homo sapiens
ctcaaatttgcattaaagaagtttttaagaatgttcaaatggcatgctgctttgtctggacgtgaatttattagcaagtagtaaagcacttcactaaaggaccatgaatttttgtggtttca

SEQ ID NO: 419211 - DNA, 122 bp, Homo sapiens
ggggccggggtcagttccggggtcggggcgagagttctgtgcggcccctgcctgggagcccggcctgtaggcccaattccgcggcgccctccgtgaggaggtcctgcccctcccccggctcc

SEQ ID NO: 419212 - DNA, 122 bp, Homo sapiens
agcctccttcgttgagacactatttgttgagtctttcctcttttcctggccctgacctagcgtggggcgacagaagagcaatagccgggtgggggctgtgagaacggctggggttgggagcg

SEQ ID NO: 419213 - DNA, 122 bp, Homo sapiens
cctgaagtgcctgagcccaggaggacaccccacataccgtccagcctatctactggagaacgaagaagaggagcggaactcccgcacatgacctcccaccctaggagggagggaaggacacc

SEQ ID NO: 419214 - DNA, 122 bp, Homo sapiens
tggagaggtgcttcaagatttgtttcttgatgatcccggccatggtaccgaggctggagacgccgcggtctcgtcctgttgctcactgcctcctctcttcgtggccgtctcctctctgtccc

SEQ ID NO: 419215 - DNA, 122 bp, Homo sapiens
aaaggcctataagcattacgtaaaaagattaagagaggtgtaaggagctcactacatgttcgggtttagaaagtctcatagctctgaaagatgaggttaattagcatcatacacctccacct

SEQ ID NO: 419216 - DNA, 122 bp, Homo sapiens
cagaatgacattctctgtcagaggtaacaaatacaaaagtcttaattttagtgtacacgacgctaagatattgttagataggtattatgtgttgttcagagaatattttttataagtgtgct

SEQ ID NO: 419217 - DNA, 122 bp, Homo sapiens
caactatttaacggttttaaaatattttgaatatcaccccggatataagaaactcttttgcgtctccactgcacaatacatacctgctcaccatagaagctaaatccttgtgactgaatcct

SEQ ID NO: 419218 - DNA, 122 bp, Homo sapiens
agtcacgtcacctggtgcgtggaggtggagcctgcggctggagtaaggcttgctgtgggacgccctcgtactttgctctccttgcgggtggttgccgagccgagagcattggatcctccccg

SEQ ID NO: 419219 - DNA, 122 bp, Homo sapiens
gcccagcccaagcagcatcccagtctcgccggcgcgggtcccctttgaccacacagacttcgttcctgcccagaccaaccggctgaaaatgtagtgttcccagcagccttcaggctcagccc

SEQ ID NO: 419220 - DNA, 122 bp, Homo sapiens
tgagcttgcaggcccctgacgccgacaggatgacctcgttgatggacatggggctggcgtcgctgtgctcgctctgcacggcttccgtggctggctttggggtgacgtcggcaggaggggca

SEQ ID NO: 419221 - DNA, 122 bp, Homo sapiens
atatcaggcctgtcatgaataatcaccgttctcctttcgtctcgctcccctcgtacttctcgcctgtctgattctctaagttcatttcttggtggtggaggctcatttcttctggagtcact

SEQ ID NO: 419222 - DNA, 122 bp, Homo sapiens
tggcatttctaagactggaagcatcacactcatggatttccaagtttggaagggtgaccccggtaatccctaagaaatggtcaccatgacctggaaggaggtccaccccagtgggacagcta

SEQ ID NO: 419223 - DNA, 122 bp, Homo sapiens
tctctccgcgaatgcggcgagcgagctggatgtccttgggcatgatagtcactcgcttggcgtggatagcacacaggttggtgtcctcaaagagccccaccaggtaagcctcgcaggcctcc

SEQ ID NO: 419224 - DNA, 122 bp, Homo sapiens
gggagatggggagggcaggaaatgcaaactgcgcatcccagaggctctgggttccttccacgggaggggatggagaattcacttggagtttctttcagttccaaatgcccgagtgcaggctt

SEQ ID NO: 419225 - DNA, 122 bp, Homo sapiens
tcccacctcttccgctccattgcgcccggctcctcggcccgccgccgggcccgccgccgccgcccggacccccactcgccgccgccgcctcagctgcctccgctgccgctgccgccgccgcc

SEQ ID NO: 419226 - DNA, 122 bp, Homo sapiens
ggcacctgcatgctacttcctttgatgtggttctaacagacccctttcacctctgcgcggcggtgctggctaagtacctgtcgattcctgctgtgtttttcttgaggaacattccatgtgat

SEQ ID NO: 419227 - DNA, 122 bp, Homo sapiens
tggcgagctttgtgttcaccgggcggattctggcagacaccggtcccccagttgttgcagcgagactcagacccaacccctgaaccccagggatggcgcctcactgagtccattggatccgc

SEQ ID NO: 419228 - DNA, 122 bp, Homo sapiens
gtccagaccggagcaaagcttcctagttctgctttgcgcagcccccacgcggtgtgtggccgcgattgtcttttacaccactttctcccggtgtcgtgagccggccttggagggttagttgc

SEQ ID NO: 419229 - DNA, 122 bp, Homo sapiens
gcttcacgctgaatggcttcttcctcggcatggcccggaccagtcacctggcccgccctccgccgagctcccgccgcctcaactgactgccccccggggcagcccccgccgcaggggcccgg

SEQ ID NO: 419230 - DNA, 122 bp, Homo sapiens
tttgtgaccagcctgaccgggacccggcagctggggctcctcggagatcagaatgggctccggggctcttccttgggcagcccctcctgctcctccccggtgcggtaatcagcaagcattaa

SEQ ID NO: 419231 - DNA, 122 bp, Homo sapiens
gactcagcgtttttacctgagctcagtagctggggagcccactagtgctggggagcgagccgtggtttccattcctgggtgatggagtcatgggagaaactgcagtgagcaaacacagtagg

SEQ ID NO: 419232 - DNA, 122 bp, Homo sapiens
gttcatcctaatcgagctgaacactagtcactgggttccatggttctcttccatgacccacggcttctaatagagctgtaacactcatcgcatggaccaagattccattccttggcatccgt

SEQ ID NO: 419233 - DNA, 122 bp, Homo sapiens
gctgctaagaggggcggagctgggcgagaaggggtttcccagcagagcatcccacaaggccgagtggacagcatacattgaaataggatcactaccagcaggaaatggcttcacctcctcag

SEQ ID NO: 419234 - DNA, 122 bp, Homo sapiens
taggtcgattacaaatatggtgtcccattttcttttctaacctaaacgagatgttttaaacgagtctcattctatccggtaagaataaggaaggaggcaagtaaacttattttttggaccaa

SEQ ID NO: 419235 - DNA, 122 bp, Homo sapiens
cccaatggccccaggtcagcgtccatcagccaggtgtccagcccctggtgcactgaagatcgggcccttcctggtgccctggtctcctgcattgagctgtggtgagcacatccggatcctgc

SEQ ID NO: 419236 - DNA, 122 bp, Homo sapiens
caactataatcacagcagcaagcttctctttactgaggttgctatgtgcaggacactgagcggcttcatactctgtgtggcagtattatcctcatctaacaaataaggaaactgaggccgag

SEQ ID NO: 419237 - DNA, 122 bp, Homo sapiens
cgtcacggtgctccccaacagtaaatgggccaacatcacctggaagcacaatttcgggcccggaactgactttgtggttgagtacatcgacagtaagcattgctgtgcggggtggtggtggc

SEQ ID NO: 419238 - DNA, 122 bp, Homo sapiens
agggcagatgacgacggagcgggtgacgggcgcccctcactcccgagaccctcccgcgcccgtgtcagcgtaccaagccccccgcccctgcccggctcccggcgctcgctcaccgcctctcg

SEQ ID NO: 419239 - DNA, 122 bp, Homo sapiens
ctgtggtaagtcctggggtcaggacttactccaggggatgatgtcctggggatccaccatcgtgtctcaccactacccaagacacagacatggcttctgttcataaattcctattaaatatt

SEQ ID NO: 419240 - DNA, 122 bp, Homo sapiens
caccacagtctcactctaagtgattattatcacaccggtaagtttccactgtggctgctgcgtgcaggctgtgaacacatttgaagtcagcaggggaccgttagaaacctcccctttgctga

SEQ ID NO: 419241 - DNA, 122 bp, Homo sapiens
ggcggctgctccagtaagaccatgtgctgcagaagagggctgtgcgctgcccctccgtcccgctccaagggcgaggtgctcaggtagggagtgaggtgggtgccggggaaaagggagagcct

SEQ ID NO: 419242 - DNA, 122 bp, Homo sapiens
atcaggtgctggccagagcaggtcttttccgtctttaagacatgcccaggtgggttttagcggcaacttcctagcagcgacactccccctcacccctcctgccgcggcatcccaccttctcg

SEQ ID NO: 419243 - DNA, 122 bp, Homo sapiens
ctgattaccgccgtttatcagagtcgcagctttcgttccgccgctcgccgacaaagtcctcgctggattaccgtcgcctgcccgatgcccattccgattacgcacgctattcgggctcctat

SEQ ID NO: 419244 - DNA, 122 bp, Homo sapiens
ctgcatggcggcggcagcctccactacgcgctagcccgaaagggtggcgcaggcgggacgcgctccgccgctggctcctccagcggcttccactcgtggacacggacgtccgtgagctccgt

SEQ ID NO: 419245 - DNA, 122 bp, Homo sapiens
tctaaagggctgcttctacccagtcggggcaccttttaaaaattcacacacatagccgggcgcggtggctcacgcctgtaatcccagcactttgggaggccgaggcgggtggatcacgaggt

SEQ ID NO: 419246 - DNA, 122 bp, Homo sapiens
gccgccgccgaggccgtgtgcaaccggcagctgctgcagccgcgggaggagagtcgggatcgccgcgaggaacccgggaggaggcggggcgcgcggcggaggaacacgcaggcgccgccctc

SEQ ID NO: 419247 - DNA, 122 bp, Homo sapiens
caggctggagagcagtgctgtaatgtctgctcactgcaacctcctcctcccgggtttaagcgattctccagcctcagcctcctgagtagctgggattacaggtgcgcatcaccatgcctgga

SEQ ID NO: 419248 - DNA, 122 bp, Homo sapiens
aggcaccaccacctgccacagggccaacaccagatgggccgcctgcccctgtggcagtgtcgatgttgtctacttccccgtgtgcctctattcttgggctctgtctctgttctcaacaccgc

SEQ ID NO: 419249 - DNA, 122 bp, Homo sapiens
cattgatgtcctcatcctcgttgaaagggaaggtgccgctgaggctgacgtacatgatcacgcccactgaccacatgtccagcgagcggttgtagccctggttgagcagcacctcgggtgcc

SEQ ID NO: 419250 - DNA, 122 bp, Homo sapiens
cgccccggcccgtgcgcccgccgccgccgcccaggaacaatgcgggccaatgtctccgggcgggcgagccggctatgcaaatgcccaacggcctgtgagaatccccttcgccgccgcctggg

SEQ ID NO: 419251 - DNA, 122 bp, Homo sapiens
ccctgggctgtggaagtgtggactgtggccagtccagacgctcttgagtgggcgtggtggcgggcagggagggtggccgtggccctgctggccctcagtgtctgtgtcatctcagcaggtcc

SEQ ID NO: 419252 - DNA, 122 bp, Homo sapiens
tcagcaaaaagaggactaaagtagaaatatcaaccgccagctttcatctgtgcctgggggcggtccttcctgtgctcgtggcacgtgtttatactatgattgacaacccttaaggagaaagg

SEQ ID NO: 419253 - DNA, 122 bp, Homo sapiens
gtgtagaatcgaagaaggcagtcccaagggctcttctgccccgtatccccgcctgaggagcgtgccaggcgcgcagctagtcctcccccgacccaaccggtttgatgaaacgcaagagaaag

SEQ ID NO: 419254 - DNA, 122 bp, Homo sapiens
gcaacgcgtcgctggggggacacctaacgcacgtgctggaaggcccagacaccaacaccacgatcattcagctgcagcccttgcaggagcccgagagctgggcgcgcacgcagagtggcctg

SEQ ID NO: 419255 - DNA, 122 bp, Homo sapiens
gaggcggagagaccttgcccttcagaacagacagagggcggggcgggggcggggccggggcgggacctgtgcgtctctcagcctggctcccagagcctcaatttttcgggttttggaggcga

SEQ ID NO: 419256 - DNA, 122 bp, Homo sapiens
gtctggtggatgaaaaatttcacaagataaattaaagtgttttctggctgaatggagaaacggggggcaggatggtagagataatttttccaggactcagaatgatttatcttatcgctgtg

SEQ ID NO: 419257 - DNA, 122 bp, Homo sapiens
gtaatcccagcactatgggggacccaggtgtatggactgcttgagtccaggagtttgagacgagcctgggtgatacggcgaaaccccgtctctacaaaaaattaaaataaaataaaatacaa

SEQ ID NO: 419258 - DNA, 122 bp, Homo sapiens
ccccgcctctgggagagaaggcggatccctaacgccagctatctccaagagcaacattgccgcagcacttccgggacgtcgtgctgcaaaggacgccgctgttatacgtcacttccacggct

SEQ ID NO: 419259 - DNA, 122 bp, Homo sapiens
atagcatcaccttcagtcctcacatcagataggtacccatttcagaggagagaaaactgacgcttggaaaagctgaataatttgcctgcaatcacaaagctggtgaatgcaaagcctttatc

SEQ ID NO: 419260 - DNA, 122 bp, Homo sapiens
ctgccattccccagtcccttttatgaaaagatttgccatagaaacagagttgggatatggcgaaagcagttatttctgacagttgctggtattgattgcattagtatcgtatcaatttctcc

SEQ ID NO: 419261 - DNA, 122 bp, Homo sapiens
gtgtgtgtgtgtgtgagtgacaatctcaaagaccccagagggatgcctcctaccgctgtgcgcagctggtggagtagaggtgccttagctggctgatccctgctccctcccccaccactggg

SEQ ID NO: 419262 - DNA, 122 bp, Homo sapiens
agccgcctctagttggcttctcgggcttccggggcaggagggcgcgcggctttgtgcctacgaattgagaactggagagccagtaaccggtgcaccgggaacctgccgccttgcgccgcagg

SEQ ID NO: 419263 - DNA, 122 bp, Homo sapiens
agcctcttggcatgacctcaggctgctgcagaagtgacacctggccccggaggcgaccgacgtcttgtcaggaggctggcaggtgggtgaacgtgcttctctttgccccaaggtgctggccg

SEQ ID NO: 419264 - DNA, 122 bp, Homo sapiens
tcatacatagctgtcctttttctctcattgagggctctgtttattgtcaccccctgctaccgccttctctgacctgcctagctaaaacagcccctcccatatgcagtcactctacatcacag

SEQ ID NO: 419265 - DNA, 122 bp, Homo sapiens
tccggcccgcgattgtgggcggcctctccctggcggcccaggcattagcctgcacttccccggccgccgcttcacaactaaatcaccgcggaagcttcccagccaataaatcacctgcccac

SEQ ID NO: 419266 - DNA, 122 bp, Homo sapiens
gcaggggagtttcatcagcagcgttctgggatctccgggttgcggacggactgcatgaagcgattcctcataatacgtctccccacatccctctctctgcgtcctcttgcgtctgtttttct

SEQ ID NO: 419267 - DNA, 122 bp, Homo sapiens
tagggtgcggctctagggacccagtagtggcttggactagcgtgggggattccgccctggcgctttccctggctggctctcccatgctcgcgcctcgctccccttcctcggtcttcgctatg

SEQ ID NO: 419268 - DNA, 122 bp, Homo sapiens
cacgttgtacccactctcctattttgtgctgatgggtaaggaatacgacaaggagtgagacgatccagtgagacagtggaggtagcccagcatggtggtgggctccttgtagtcccaactac

SEQ ID NO: 419269 - DNA, 122 bp, Homo sapiens
actacattacccagaaggcaaagtgcggaacacttccgctcccttcacaaagcaggtggccgcaccacgcgcggctaggcgcgggcgtttctgggagttgcagtttcccagccaaatggtac

SEQ ID NO: 419270 - DNA, 122 bp, Homo sapiens
tgtggccttcggggtgtgcccatgccagtgccttagagcctggcattactgataactgcacgctaatctcaatttcaagcatcccacttccccccacccctacttcctcctgtctttctccc

SEQ ID NO: 419271 - DNA, 122 bp, Homo sapiens
cgtctgcaaatgatttgcattcttggctctttggaactgcctgttctttgtctctctgttcgctgctcaaccctttccttcccttctgtcccaaacttggctggttttagtctcttgctccc

SEQ ID NO: 419272 - DNA, 122 bp, Homo sapiens
gagtggttcagaaggccatcctcccgcaggcagcctcactcacgtacctcagtctctcctcggaaaagtgtgtgcatgggattgtaatatcgcatctatgggaaatgtcaatgttgacaaaa

SEQ ID NO: 419273 - DNA, 122 bp, Homo sapiens
tgaccagggagaacttacaggatgttagagacaaaacaagcagacacctgaaacaatcaacgcccaataaaacaaagtaggatgaaaattctcttagttctttgataacaatttgttcactc

SEQ ID NO: 419274 - DNA, 122 bp, Homo sapiens
tgcctggtcctcaagcaccgacggctgtcctgcgggtggaaggcagggccaggtgtgcagcggccgagagccctcccaagacagcgcgtgcatcgcagccacaggagcagagagaattgctg

SEQ ID NO: 419275 - DNA, 122 bp, Homo sapiens
aagtaattccaacttacatttacatatcgcattaaagttgacaaaatgcagcccatatatcgtttgccacagtaacaccaatactgggagatggccattcccactgcacagctgtggaaact

SEQ ID NO: 419276 - DNA, 122 bp, Homo sapiens
cgcgttcggggccctggccgccgcctccgccaagctggccttcggcagcgaggtcgagcccggggcgctgttggtgctgctgctgcgggcgggcgggcggggcgccgctgggcggaggaggg

SEQ ID NO: 419277 - DNA, 122 bp, Homo sapiens
ctcttaaagagacaatgttaggagtattcatttgctaggatggccttcacaaaatacaaccgacctgaattgcaaacatttattttctcacagttccggaggctggaagtccaagatggagc

SEQ ID NO: 419278 - DNA, 122 bp, Homo sapiens
cccccagtggccgctgcgccagcgctcaccggtgcacgtaggttctcaggtactggggggcgtcgtagttcaccaccagctccacaccctgcacgtcgatgcctcgcgcggtggcgtccgtg

SEQ ID NO: 419279 - DNA, 122 bp, Homo sapiens
gtccctcggctccgcccccagttgctcgtcggttccctcggctccgccccctcggctgtgcgtctggccctcagctccacccccagctgcgcgtccgttcctcagctcagtccccaagctgt

SEQ ID NO: 419280 - DNA, 122 bp, Homo sapiens
aagtcacattgtaaatctagtgtaggagacttggagtcaggcagtgagactggtggggcacggggggcagtgggtacttgtaaacctttaaagatggttaattcattcaatagatatttatt

SEQ ID NO: 419281 - DNA, 122 bp, Homo sapiens
gctcctgggatcgcgactccggagtcggtgagctccgactctgggcctctgggcgcgcagcggccatcttgtgcccaagccccgcccccaaggccaatgttcgctctgaaagggggtggggc

SEQ ID NO: 419282 - DNA, 122 bp, Homo sapiens
atgatgttcacataatttatgacagtgattttccagcagatggcactaagtgtcttgttccgaaaagattagtgtatttgacaattttgcaaattggatgtgtcttttcagaggagcattgt

SEQ ID NO: 419283 - DNA, 122 bp, Homo sapiens
aatgagagaaaccaatttctggattgggggtggggacacggtaatagaggaggaagcctgcgatctttaggatccgcctccaggcccagaggagggagagtcacaaatgacagccttggccg

SEQ ID NO: 419284 - DNA, 122 bp, Homo sapiens
ccaggttttttctttagctcttcacattttctaaatttgcagatctggtgtcccgttttgcggttcctgcaactgctgcagacgccacagttgatgagcctcttgcagggcacgcagacccc

SEQ ID NO: 419285 - DNA, 122 bp, Homo sapiens
ttgggcaccctcctcgctccactcagccgtcttccacctgtggcttgttcctcagtttcacggcttcctcctcagattcgtggcctcaggaccacaaagtggctgctctggggccagcatct

SEQ ID NO: 419286 - DNA, 122 bp, Homo sapiens
ccggtcccttgtgccttgtgctctgactgaggggtacctgcatgttcgacattagctctccggggcaattggatctctattggccatacatctgagaactctcagaaatactgtttattcct

SEQ ID NO: 419287 - DNA, 122 bp, Homo sapiens
tggccgtggggatcgaatattctacagggcacttcattctacagtgtgagcccgagctcccggtgcggagatgaggcctggggccgggccgctgcccctcgcccccgggcggggcccaagca

SEQ ID NO: 419288 - DNA, 122 bp, Homo sapiens
cgtgtgtgtacacccccaagataatcactaggtaacactttggtgtatttctacacctcacgtatgtgtatgcttttacagaactggaccacagtacagctacagtttcttgtctccaccct

SEQ ID NO: 419289 - DNA, 122 bp, Homo sapiens
gtccccagacgactctgtctcaatcccggaggtctcgggtggcatgggtttaaaatcagacggtgggatcggggacgaccccttctcaatcccggaggtctcgggtggcatgggtttaaaat

SEQ ID NO: 419290 - DNA, 122 bp, Homo sapiens
agggagagtagccttgtccctgccccactacaagtctgttcatatgaagacatacaaagccgtcgcctctaatcagtgttcaaagggtcgattgtgcaactcacattcctccagagaaattc

SEQ ID NO: 419291 - DNA, 122 bp, Homo sapiens
caggtagggcccggtccggatcgggggcagtagcggctgcagccgctccacagaagcctccgagttcactgtccaggtctgtgtggctacctccgaggctgacgtgggtaggccccactcgg

SEQ ID NO: 419292 - DNA, 122 bp, Homo sapiens
gggcccagtgcggggcgggcggcgccgggggctcttcaggctcagggcataggcaggcggcggccgcgttttctggagacggtcgctctcggagggaccctgcaattgcccgagaccgagag

SEQ ID NO: 419293 - DNA, 122 bp, Homo sapiens
cagtgccaggggcagcagtggggcagaagtggggcggggcttggcagggctgggcagggccgggctggcaggtcctctgcccccagggctcaagcacagggctgaccagagcagcagttctg

SEQ ID NO: 419294 - DNA, 122 bp, Homo sapiens
aaaaccgaccaggcgttgggagaaacagcaatgcccagcgactcccagtgaccccagcaacgcccagagacccccagcgactcccagtgaccccagcaacgcccagagacccccagcgaccc

SEQ ID NO: 419295 - DNA, 122 bp, Homo sapiens
tcaatatacagttgttgaatgaaaggtccagagtggtaggaactgagaagaggcaggaaacggtcatgacatacatagccttacaggtcataccaaggatgctgaacttgtattctgcaagt

SEQ ID NO: 419296 - DNA, 122 bp, Homo sapiens
ggaatctgaggttccagtaatctcatctctcaaggtcactgctctttagggaaacacccccgctttttccaaatacccttgccccacgggccctttcttgctgccctgattctcctccccct

SEQ ID NO: 419297 - DNA, 122 bp, Homo sapiens
agggttcccgcttagaggaaagcctgtgcgtttccctgacctgagctgggcgcacggtgccggaagtcgtccttggtgaggatgcagagggcgcgtccgttcatctcgaacccgtgctccgc

SEQ ID NO: 419298 - DNA, 122 bp, Homo sapiens
taagaggcgtgacgcgagctccagggaaccgggccaccaggaagaagctataccttcgtacgcccacccctgacaaaaggtcagaaggtcgttggaccccagaccgacaggacgatcagccc

SEQ ID NO: 419299 - DNA, 122 bp, Homo sapiens
ttcggtctctggcccgagggaagccggtccttcccggctgagctcgcggccagcgctggccggcggattcccattcattcacccttctcctcctccgcccagtactcgtggccagggtcgta

SEQ ID NO: 419300 - DNA, 122 bp, Homo sapiens
tcgaggagccggggaggtgtgaacggcctcctttgtgcctctgaatcgaaggcaattaggcgctgcttatctgggcattagccgtgtatgcaaaccgggctcccgccccctcctcctgggct

SEQ ID NO: 419301 - DNA, 122 bp, Homo sapiens
ccccagggcagcccatggacagcaccagcgtgggaggtggcctgcaggagccagaggccccggaagtgatgtttgaggtctttcctcccagcctgggacatgggggtgggcacgtccagagg

SEQ ID NO: 419302 - DNA, 122 bp, Homo sapiens
gaggccggcccgggacccggggccgcagccagcttgaggcgcaatgtgcgcaggaagcggcgcaggcggtctggggggcagtccgagagcagcagctgcactgcgccggccccgggggtgtc

SEQ ID NO: 419303 - DNA, 122 bp, Homo sapiens
gcctaagattttgcactccaggccctttgtctgacctgaaattactgagctaaaagggaccgaaagatcctaatggaaccaccgatgggaaaactgcggcccaggaggaaacacaccaagca

SEQ ID NO: 419304 - DNA, 122 bp, Homo sapiens
accggaaccagcgtgcgtctggctctcctccgccgctctgggacacctcattctgtctgacgctcaagacctggcttcgacgtttatggccctatgtccctcgactacgggttgcctgcctg

SEQ ID NO: 419305 - DNA, 122 bp, Homo sapiens
gccacgtgccggggcggaaggctattggttcgcccggagttgtttgtgagtggccattggcgacgtcgaggcgccatgacgagccgattggctgggcgttggaatgcccgccagggcaaggg

SEQ ID NO: 419306 - DNA, 122 bp, Homo sapiens
accaagaggtcagacccagcagcagctaaggctaggcctgggaggcagcaagagaacgaccgggctcgcaggcaccccgggatgctcaggcaatgcctgctcctccctcgcccgcggtccag

SEQ ID NO: 419307 - DNA, 122 bp, Homo sapiens
ttgtgcagcaacttaaactctggaagcctcagtacccagctcactgggataatgtgaggacgtattgtacttcctcagtcccaagaggtatattatttttgcattttggcatttctgaaatt

SEQ ID NO: 419308 - DNA, 122 bp, Homo sapiens
ccgccttggggtgggcggggaagcaggcagctccatgtttgcaaggggatcagccggggccgcggacgaagccgccgagtttctgggggttttccgcaccaccgatgcgagctccttgctgg

SEQ ID NO: 419309 - DNA, 122 bp, Homo sapiens
catgggtggctgcatggaggacgacgcaccccacaaggtgctgcttcaaccttttgaccacgccagtgggaggggggcacatcccagagccaagagtgtgccctgtaaatttctagatgtgg

SEQ ID NO: 419310 - DNA, 122 bp, Homo sapiens
gaggcctgagaggcaggcagggctgggtcatgcaggccttggactttattcagaatgaggcgggcagcctccgaaggttcagcaggggagagacaggtcaactggacattttcagtagagta

SEQ ID NO: 419311 - DNA, 122 bp, Homo sapiens
gagacgtgcagtccccaaggagctgcagaaaagggctcttccggagtcctggggattgcgcgtttaaaggggaccctccctctccccggatcttctctgagcttggcaagttaatcggaagc

SEQ ID NO: 419312 - DNA, 122 bp, Homo sapiens
gcctcatggcctagaagtccccacattccttgcaactctgatgctgggcacctacaggcccgagtttatcatttactgggcagttcaataaagtcctctcaacttttcttgtcaaagaactg

SEQ ID NO: 419313 - DNA, 122 bp, Homo sapiens
gcacccatgaggcaagtgcaaatatcctttcatactccagtcaccccaggagtggctgcacgggaagcctcgtctatctctgattttgtgtaagtcatagttgttcaatatagtgaccataa

SEQ ID NO: 419314 - DNA, 122 bp, Homo sapiens
tcctccgtcggccgcctccccggaccgaggcaggacctcaccccgcgcgtgttccccgggcgcccctctgcgaaccccaggcccttcccaggtttgcgcgcgggggccatccagaccctgcg

SEQ ID NO: 419315 - DNA, 122 bp, Homo sapiens
tgacctgacccccatggacggggagaccttcagccagcacctgcaggccgtgaagatcctcgccgtcagagacctcatttgggtccccaggtacgtttcccgaggtgagggcaccatccagg

SEQ ID NO: 419316 - DNA, 122 bp, Homo sapiens
ccagctcgggctggggaaggagggatggagcccaacaggaatggctgagaaggtgccggacgcagggactgggaccgtctctttgcagaggggggaccttgggcttccttggccttgtttgt

SEQ ID NO: 419317 - DNA, 122 bp, Homo sapiens
ctgccggaggaagcaaaggaaatggagttggggaggagggtgcagagtcaggattctcgccgacctggtgccgtagatactaacattttggggtggaaaattctgcaagccagagctgtgag

SEQ ID NO: 419318 - DNA, 122 bp, Homo sapiens
atgctgcatctagccccacaccaaagacacccgggtaagcaggtctgccacggacaaaaacgcctcgccgtgcagaaaccggggctggacgttgttcggggctgattgcccatttatgactc

SEQ ID NO: 419319 - DNA, 122 bp, Homo sapiens
agaggaccgcatgtcccctctttatgtggatttatcttttatgaaaagtttgcttttgtccgggacagtttgttgtcgtgagatacatcagacaatataatcatgggacaagctgatgtctc

SEQ ID NO: 419320 - DNA, 122 bp, Homo sapiens
accacggtgcctgtaggtggtgcggtgggcggggctgacccgacagcggtcagaggtgcacgcaccaggagccccggttccagcggttccagcgccgactccaccttgaccattgaggaact

SEQ ID NO: 419321 - DNA, 122 bp, Homo sapiens
aaccagtgaacttgaagccgccagttgcgtttggtcatcgggttgcgtgaacctctccaccggagccctcccctcagcccctttcccccactggggaaccaggttgtgtactgtagagtgtc

SEQ ID NO: 419322 - DNA, 122 bp, Homo sapiens
gggcgggggccggcgtgagctgtcacctgagaggaccggcggggttgccgggagggaggccggcgccaggcatccagctccgccccgctcggtccagcctcctgcgcccaccctctgtcctc

SEQ ID NO: 419323 - DNA, 122 bp, Homo sapiens
ggggaagggagcgaggcaggggcatcccaggcggcggcccggccccctcaggtcccttttcgtcgcccaccgtatacccacccggaggtgaaatcctgctgcacgctcagcagccgctcgcg

SEQ ID NO: 419324 - DNA, 122 bp, Homo sapiens
ctagtcttagcagctctaaggagccccgcacacatgctttggacaccttcacagaaccctcgcacatatgacagtaactccccaactaggttagatggtgccacgatgggtaactggcatgc

SEQ ID NO: 419325 - DNA, 122 bp, Homo sapiens
tgcaatagactgggagagggctgggcgggtgagcacacaggcgtgacctctagtgagcttcgacaccccagcctctgcgtcactctgagaattacagctttgtagcttcgtatcccttttca

SEQ ID NO: 419326 - DNA, 122 bp, Homo sapiens
gtactcactggatgtcggatatcagtgataagcaggacgatgtcagacatctctaacacccgccacagctgcctccatgtctaaaaagacaggatcaggaagagaaactgaaaacagagtcc

SEQ ID NO: 419327 - DNA, 122 bp, Homo sapiens
atgtcgggagcccacacctggcacacccctgactctggggctcagtgtcctgctgccctgcggccacgtgatcagctagaggtcatggctggacccataggcgaatacagcctgtggatttg

SEQ ID NO: 419328 - DNA, 122 bp, Homo sapiens
cctcggcggcggtgcgcaggagactcgggcgtggggaggaagccgcagcccagggctgctcgccgctgttccccccgccccctgttgcaggagacaccgaggctccgcggagctgcggcggg

SEQ ID NO: 419329 - DNA, 122 bp, Homo sapiens
ggggccagtttgcagttggggtgaggtggctttccttgaggcagcctggctgagtgaagtcgactttgctgaccaagaaggctcctcccaggggtggggaagcctcggcagggggcggcatg

SEQ ID NO: 419330 - DNA, 122 bp, Homo sapiens
cacccagcttgttgctgcccagggccagctcccgcagcgaggccttggaggccacaatgccgcacaggtcccggcagttgtctgatgtcacaccgcagctctccagcctggggacacgggtc

SEQ ID NO: 419331 - DNA, 122 bp, Homo sapiens
aggcagaaaagagggttggggtttgatccctgctggtgaaggggcaggttcccggggggtcgcggagggggtctagacctctagtcgagggctgctttccctctccgtgcagatgggcggcc

SEQ ID NO: 419332 - DNA, 122 bp, Homo sapiens
ataacgggcttgaggacgcccagggcttcagccttttccaggcgtccctcgccggggcaacgcagagcagctgccgttcttcccgcgccccagcagatggtggtgtcagcccggcctcgtgc

SEQ ID NO: 419333 - DNA, 122 bp, Homo sapiens
ctctggcgcgctgagggcggtgagcgagggcgccaaggcacaggtggggcgggagtcgagcgcggaggctcggggggcgggacgcggggcctgggagcggccagggaccgcggcagcgcctc

SEQ ID NO: 419334 - DNA, 122 bp, Homo sapiens
gtgagtgttacaactcctaagggtggcgtgcctgcagttgcttcttccttctggtgggttcgtggtctcgctgacttaaggactgaagctgcagaccatcgtagtgagcattacaatgctta

SEQ ID NO: 419335 - DNA, 122 bp, Homo sapiens
gctccaggaatacttacctgctgagaaaaggaaaagcacaacactgactttaccccgcgacgcttttaaaaactccaaaacacccagcgcgatggggagtaggtttccctaaagacaggtgg

SEQ ID NO: 419336 - DNA, 122 bp, Homo sapiens
gtgctgatgctgcaggaccggggaccacactttgagtagcactgcttgatgaagggaccacggctttatcatctttgttcattgccagccctccggcttctcaggaaacgcttgtggaatgg

SEQ ID NO: 419337 - DNA, 122 bp, Homo sapiens
aaaccaacattaaacacaggtaaaccttcagttacatccgcggtaagtaaaagcagggagcgtgagaataccagaaagatgccagtctgagatgctatctcagagtctagctctgaagatgc

SEQ ID NO: 419338 - DNA, 122 bp, Homo sapiens
cgcaaccgcatcccttttccaaaggcggcggcgggggcgaggtggtcgggtcacttttcccggaggcctaaagggcagcgcgcgttttctctcctttgggccgcccttccccgccccgccag

SEQ ID NO: 419339 - DNA, 122 bp, Homo sapiens
atatgtcagaaatgggattactctgacacatagggcttcttttattataggatctcagtgcgtaaaactatgccctccacctctgctctgctgaggtgctgcgattattagctagcttttag

SEQ ID NO: 419340 - DNA, 122 bp, Homo sapiens
gtcgcccctctcccccaaccaaaagcttccctccaaccagctgctcttgtcctctcctcccgagggccctgtgccctcccagcggacttgcaggggagaacgtccatgtttgtgcgagtcac

SEQ ID NO: 419341 - DNA, 122 bp, Homo sapiens
ggcagaggggctcttgttttcaccttctcgaaattagagccagcgtgctacaccttcttgcgcagggtgtgacctggagagccctgtgcgtggcctgacttcagtctacatgctggaagtgg

SEQ ID NO: 419342 - DNA, 122 bp, Homo sapiens
ggttcccgacaggctttccccggccgcgggcgcgcgcggcccattctctccgttgctcttcgccatcccagccgcgcccgccgcctgagctccagcggccacctcagccgccctgctgccgc

SEQ ID NO: 419343 - DNA, 122 bp, Homo sapiens
gcccagccccgaggcttcaggaggctgggcagccggcgcgcccaggtgggcgagtccagtcggaactgcagccccgagtttgctccagttccttgtcccggctggaggctgggaggggtagt

SEQ ID NO: 419344 - DNA, 122 bp, Homo sapiens
tcaacagtggcccatctgtatcaggatgctttgtaatgattgcagtgtgagtcctgccagcgagaccagggccatcagaaggagccacagttgcatggactgacagagacgtggcttcctaa

SEQ ID NO: 419345 - DNA, 122 bp, Homo sapiens
tgccctcgcgcggacagtcctcccagaagcagacgtggctgctctgctcggggcctcccacgtgctccaccgtgacgtgattcaccagctcgtgcatggtgccgaaagttttggagcagggc

SEQ ID NO: 419346 - DNA, 122 bp, Homo sapiens
acctcttatccagaagccaccacctgctgttgctcagtctgcccaggagtatagacttgtcggccaagcttcccctggcaacctgggagttgaagcaaataagaaaatttggaagcacctgc

SEQ ID NO: 419347 - DNA, 122 bp, Homo sapiens
aaaagggagcagagctttccccaggaagcttggctctggtttagatttttcaggaaaagccggaatcaaattacagaataaataaaggcaaccatcccccttttaaaggtacaccagccttg

SEQ ID NO: 419348 - DNA, 122 bp, Homo sapiens
cccacccggcgtcacctgcaggccccgcccacccggcgtctgcaggccccgcccacccggcgtcacctgcaggccccgcccacccggcgtctgcaggccccgcccaccctgcgtcacctgca

SEQ ID NO: 419349 - DNA, 122 bp, Homo sapiens
gctactgtgggtctcctattgctgcgcgtcgcgccaatttctccctccctaggggactagcgccagaagtcgttcctcacccggctcctggaggagcctgcggcttccacggtctccgttcc

SEQ ID NO: 419350 - DNA, 122 bp, Homo sapiens
ggcctggccggctcccacctctcaaagccctgctcggacaatgctgctgaggcaaggctccgggacggcccacccaacagaggaatcagacacaaaggcagccctgggctaggtctgacggc

SEQ ID NO: 419351 - DNA, 122 bp, Homo sapiens
ccgcccccagacttgcgcatgctgggattgtaatactgtcgccttgccaccaacgggctacgagcggttaagagactacagctcccaggatgtacggtgatggcacccgtttggactccgcc

SEQ ID NO: 419352 - DNA, 122 bp, Homo sapiens
aggctcccggctgtgtctctaatagcacagaacccaggagctggcagggacgagtgtgcccggacccagccgggccatcctgctggactgctgtgcgaaggacaggaagccagtgtggctgt

SEQ ID NO: 419353 - DNA, 122 bp, Homo sapiens
tcagactacccaggtctgggccaggccaacagctggaccacagctatgaaccccatgcgccggcctgcccacccatcatgactcccaccccagccacagaaaggtcctgggctctcccacag

SEQ ID NO: 419354 - DNA, 122 bp, Homo sapiens
cgagtgaacctgcggaccctgagcggctactacaaccagagtgaggcctgtgagtgacaccggccgggggcgcaggtcactacccctccacatcccccacggaccgcccgggtctccccgag

SEQ ID NO: 419355 - DNA, 122 bp, Homo sapiens
caccctggagggagtgacccttacattgatggacaacagaacactaagtgttcagacatccgacctcacccttcactggttcccactgctatggaatggagtgtgaactcgcttcctgggct

SEQ ID NO: 419356 - DNA, 122 bp, Homo sapiens
cgacctcaagggctgccgcgtcggggatcggaagtggtcttcaaagaggggtctaggtcgcgaaatcctggcagcagccgaagtgaaaaggagctgctaggaggcgggcggggggcagtctg

SEQ ID NO: 419357 - DNA, 122 bp, Homo sapiens
aatctccttctcttgttgtggtgtaactcagatactggctatactagttaatattttacccgtttcattccatctgtgttagctttaaatattccgacatacacaaaaagcctaattagctt

SEQ ID NO: 419358 - DNA, 122 bp, Homo sapiens
cgaggaggccccgaaagccccccgagcaaccgctacgccggcgactggagcgtttgcgggcgggacttcctgccctgtgggcgggatttcctgtccgggccagactacgaccacgtgacggg

SEQ ID NO: 419359 - DNA, 122 bp, Homo sapiens
tggggccaaaggacaaattttctgtgttttcagcactggggtgcatgagggagcaggtgtcggccacaccaacacatataagttgttgcctgcgggtacagatcaatgaattctttcctgtt

SEQ ID NO: 419360 - DNA, 122 bp, Homo sapiens
agtcagtctctcatcttacagcccccaacagagaaggttattgcttaaacagagagtgttcgtatatttaaaaggaacctctgtatccagtaagccatcgtttctatgtatgtagattcatg

SEQ ID NO: 419361 - DNA, 122 bp, Homo sapiens
tatcatcccatggagcttgggcaccatccaatgcaaatgcctcgatcctgaagaccttagcgactggactatttccttgctgccttccttcataggactgagaaaccacggagagcacaaca

SEQ ID NO: 419362 - DNA, 122 bp, Homo sapiens
tcatgctggcttgggacagtggcttggagaccagacttcaatgacagaagcactaggcagcggcactcatggcaatgtgtgcacccacagaaatgtaacccacacctcgggttcaggagccg

SEQ ID NO: 419363 - DNA, 122 bp, Homo sapiens
gcgcactccgggacgcgcgcgaacacgcagcagccagaatccacaggggcgtggtttgcgcgcgcaggaacttggatctcaaccccagggctaggtgcctcctcccgctgctttccgccagc

SEQ ID NO: 419364 - DNA, 122 bp, Homo sapiens
tctccatcttccgacctcgtgattcgcccgcctcggcccccaacgtgctgggattacaggcgtgagccactgctcccggcctattaactcaatccttagaaaaacaaatgtggcaaaggtgg

SEQ ID NO: 419365 - DNA, 122 bp, Homo sapiens
ctcgagtgcatccactccgcgagccacgggcggcgcctgcccacccgcggctcggctttgcgtgttgtaagccgactattctatcaccattgcaggataagctggcctttaaattttcaaag

SEQ ID NO: 419366 - DNA, 122 bp, Homo sapiens
cagagggaagccgctcttggggggatccctgggttccagatgggacatttccccagcacccgtcggaccacttaaaggagtggtttaggctgccgggggcccaagcactggcacctaacccc

SEQ ID NO: 419367 - DNA, 122 bp, Homo sapiens
gtctgccgctgcgcctgcgcgactcccagaagcctttggggggtgggtgtgtagtcagagcggcctctgcttccggccacacccaggcccagcgttggccaccacttatgcggcggctgcgg

SEQ ID NO: 419368 - DNA, 122 bp, Homo sapiens
ccctgtggatcttctggacaattcccggaatttcttgcagggtagcactttcccttaagtcgtctctttctcgtttggatagtcagtatttgtatagtcactattctcttttggttagccat

SEQ ID NO: 419369 - DNA, 122 bp, Homo sapiens
acggatgggacccatgaaacctgactcctctcagactctagccaagtctaagactttggacggccaccacccagaggagaaactgagacccagagcggcacgggttggccagggtcacccag

SEQ ID NO: 419370 - DNA, 122 bp, Homo sapiens
atttctggaaggctgttcatggtaccaaaaacacagcagctttcctttccctgccaaacccgccaatgaaatgccacttatctgactttttctccctctgctgaacaaaatcatatccatag

SEQ ID NO: 419371 - DNA, 122 bp, Homo sapiens
ctccctgcgggcccgaagccgccttcccgaggcggcggagttgggcagctccgggccccgcgccgccccgcagagccggagtttctctccggagtctggatacagctctccgcttcgtcgcc

SEQ ID NO: 419372 - DNA, 122 bp, Homo sapiens
caccctttttcactgagattctctaatcagtttgtcatttacatgtccattaagagttcccgctcttattaagttaatcatatttttgactcattgacttgtcatttttgtcacaagatcat

SEQ ID NO: 419373 - DNA, 122 bp, Homo sapiens
ggaatatggcctggccatgagctgaaagtacagccgcggagccggcctcggcttctccaccgccccgaacaagatcttttatattgacaggaatgcttccaagtcagtcaagctggaagatt

SEQ ID NO: 419374 - DNA, 122 bp, Homo sapiens
acttctgattggaagaacttggggattgacaagacctcacgcccaattagaagtgcaactcgcctcagcgagtctccgcctgttacgcgaaggcaagggctggttctcgggcctaggatagt

SEQ ID NO: 419375 - DNA, 122 bp, Homo sapiens
cgtttcttgggatgggcggcctctgtgatgccctgagcggctgggattctgaggaagcgccggagatgctcccagcatgaccttccccaccctccctcctagtcccagctacacacacgcca

SEQ ID NO: 419376 - DNA, 122 bp, Homo sapiens
ccgggcgtactcacgccggccccgcccgaggttcccgagtccgcgcggctcctgaggcggcgtcccaggcccggccctgcccccggcttcccgcccctgcggctcctggcttaggtcggcct

SEQ ID NO: 419377 - DNA, 122 bp, Homo sapiens
attttcttaaccgattaattcagagccacctccactttgccttgtctaaataaacaaacccgtaaactgttttatacagagacagcaaaatcttggtttattaaaggacagtgttactccag

SEQ ID NO: 419378 - DNA, 122 bp, Homo sapiens
tccagctgcgttgggtacattttggagccacaagttggttcccgttggcgcagaccttcccgatgtctgctagtcctctgcgaggagacgcgttctcgggagcgcagctgctccgcgccgcc

SEQ ID NO: 419379 - DNA, 122 bp, Homo sapiens
tgaccacggggtcctgggcggcgacgcaaactcagccccccacacccttccagatacctacgtgcacctggaccagccagtctaccaccagggcgcgcatctccggggtcacagcgcggggc

SEQ ID NO: 419380 - DNA, 122 bp, Homo sapiens
ccagtgcccagctgagtccgtgtgaacttccagctgctgacgtcggtgggctctcagcagcgcttggtcgtggaaagggaaagaaaccaaacccggactgctggttcagggcagctgccggc

SEQ ID NO: 419381 - DNA, 122 bp, Homo sapiens
cattccaggccagcctaactggccacagaaacctccttgccactggggtttcaggagtaacgcccgacttctgtgctcaaatcagaaggcagatgccagggacctgtctggctccctggtct

SEQ ID NO: 419382 - DNA, 122 bp, Homo sapiens
agagtggggaaccgtttgacctattttctctaatgaggcctaggccatccttatcatgtgcggggatacgtggcacccaaacactatgatgctgggggtttgagagccttctgtagtctctc

SEQ ID NO: 419383 - DNA, 122 bp, Homo sapiens
cctccaccgcgatctcacagaaggggttcatggagtgcttcacaccatccgtgaccacaccggtcctgtcaggcttcactcggatctgcccagcaggaggggaaggggtggggtcaggagga

SEQ ID NO: 419384 - DNA, 122 bp, Homo sapiens
tttattttattttttgagacaagagtctcactctgtcgcccagcctggagtgcagtggcacgatcttggctcactgcaagttccacgtcccgggttcacgctgttcttctgcctcggcctcc

SEQ ID NO: 419385 - DNA, 122 bp, Homo sapiens
tgcacggagctgccaggagtcgggagctcccagcgctcgaacgcggagagcagcctggcgcgtcctgacacgccgccagcacccacactttggcaggtcccagagccggcggggcgcaggcg

SEQ ID NO: 419386 - DNA, 122 bp, Homo sapiens
gcccgctcccagacccactgacatcttccagggaccctcccctccgggtgcgccgacctccggctgctgctgggaaacagcgccagccaagggcgagtcagatccagacagacccaggcccc

SEQ ID NO: 419387 - DNA, 122 bp, Homo sapiens
gaggccgggtggctggtaaggggcaggctcaggcacagcggaggggcagtagagaccacgcgccctctggcggcctggagcagagaggcggccacgccgcgcagtgatgctgtggagtccgc

SEQ ID NO: 419388 - DNA, 122 bp, Homo sapiens
atcccccatccgaaggctggtgttccccaaggccgggcgccgggcagcctgtaggagcagcgtgagccgccggcccctgcactcgatgcccctttatccccccgactacctcatcgaccccc

SEQ ID NO: 419389 - DNA, 122 bp, Homo sapiens
tccccgccgcggcatgcggtggttcgctctccgcacttccctgtttggggcagttaggtccgcagaagtctgtccgcgagctgtcagcgcgggcgggaacgccgcggggcgcggggtgggcg

SEQ ID NO: 419390 - DNA, 122 bp, Homo sapiens
aggtggggtgggaaagtttggggagtcccggctctcacagcctgtcgtgagaactgcccccggggaattcgtccgccgtacggaaaaactggccggagcagagtcgtccgcggttccgcggt

SEQ ID NO: 419391 - DNA, 122 bp, Homo sapiens
aaaaaaaaaaagctcatttcttcacaaagtctctggctgtggcaaatagaacacaccatccgtttatagagtctgctaattggcactagggcattgtctgggcttgcacttctttactggca

SEQ ID NO: 419392 - DNA, 122 bp, Homo sapiens
ggggcagagatggaagtgcgcgtgtgcctagaggggagagcaaaggcctggagggctccacgctctcaaccgttcagggctgatgcccctaagaaggcagggcactgtattttccagggtga

SEQ ID NO: 419393 - DNA, 122 bp, Homo sapiens
cacacacacacacacgcctcgtgctctccttctcctcctcctgacatgatggacggcaggcgcagcccaggggcccgcaggtcacgctgtgtccacgaatccctctgggggctcttctttcc

SEQ ID NO: 419394 - DNA, 122 bp, Homo sapiens
gctggctgtgaattgatgcagattttggtgagctgaaagctatattctagtaaaagccaccgagtcctgaacagtctgaaacctcctaaagaaaccaagctcctcttacttttatcttcaca

SEQ ID NO: 419395 - DNA, 122 bp, Homo sapiens
caaggtcccttctgttccctccatgctcactcccctctgcaacgttctaatgtcaaagctcgtgcccttaaactacagcacccacaattctttcttgttattgacccttacgcacccatcat

SEQ ID NO: 419396 - DNA, 122 bp, Homo sapiens
agccatacctgcccactgcccggcggtggaggcgcgtctggaaccccccggctcgccccgcgcctccccacccggctcccagccctctgccgagacgctccgcctccagccccgcgggcctc

SEQ ID NO: 419397 - DNA, 122 bp, Homo sapiens
ggtgttgatgatcttgcccagggaccacatgagggccccgtacacccgcatcagctgctgcgtctcgatctggtctgccttgttcagcaccacgcggatcttgtcctcatggttcttcagag

SEQ ID NO: 419398 - DNA, 122 bp, Homo sapiens
gcgagaagccgggggggcggtgctgcagcctcggcgaggggacggccctttaattaaagtcgcaggcacctaggcgcgcgggaggcgaggcagggagcagaggttgcgctgcggagagagcg

SEQ ID NO: 419399 - DNA, 122 bp, Homo sapiens
cccctctccggctcaagcaatcctcctacatcagccttcagagtagctgggactacccgccgggcccaccaggccccgctaatctttgtggtttttgttttgtttttcagttaagggactgg

SEQ ID NO: 419400 - DNA, 122 bp, Homo sapiens
gttgtgttgccttccctttaagctctgatctttgtacttaagtcagtgtgctatcatcaacgatgacaatagaaaccacattaagaaacaagcttcactactttaaaatctaaggcagcaca

SEQ ID NO: 419401 - DNA, 122 bp, Homo sapiens
agcggcctgccccagtggtacataggggttttggcaggtatcgtccccgtggcccctatacgccctggggacagcggcctcgaccttcaaagagaagggccccagccaatcctgagccaagg

SEQ ID NO: 419402 - DNA, 122 bp, Homo sapiens
accatggcgtttaatgtcttgggcaccccttggaaatcacagaaagtcagctgtactggccgtgtggaactctcatcccaagacctactttgaactgagtaagaaggtcattgtgcccactg

SEQ ID NO: 419403 - DNA, 122 bp, Homo sapiens
cagcttctctagagggtccctcctggtgtttctctgctccacagcctgctcctgctgcttcggttctcatctgggctttgcaataatctcctattcatcatgttcaccaatctatttgttaa

SEQ ID NO: 419404 - DNA, 122 bp, Homo sapiens
gtgtatgatcaggtgctgttccataaggatagcaggatgtacaagttccagagctgcttccgccgtatctttggtttctactgttgtgtcttctatggacaaagcttctgtcaaggctccac

SEQ ID NO: 419405 - DNA, 122 bp, Homo sapiens
agggcagggtctgcggcctgtgcgggaacttcgacgacaatgccatcaatgactttgccacgcgtagccggtccgtggtgggggacgcactggagtttgggaacagctggaagctctccccc

SEQ ID NO: 419406 - DNA, 122 bp, Homo sapiens
tggtgttcccatctgtaagatgggaataagattgtccccacctcagaagtaggtacgaatcgggagagtgaagcacgccacgcactacctggtctgtcaccaggacacagctgccattattc

SEQ ID NO: 419407 - DNA, 122 bp, Homo sapiens
tgtctccccgtgccggtgtgtcgactgcagcaggaactccctggtgtccagcagaaagaccgggactcggagggtggccagagtgtcattttattctctttaacaggaggtctggccaccag

SEQ ID NO: 419408 - DNA, 122 bp, Homo sapiens
gctgctggttgagtaggcagcttgcttccaggggtaagctgactgtcaacaggggcatctcgcttctcctccccataatatctcagccttcagctgggtaacaggggcttgttctcatggag

SEQ ID NO: 419409 - DNA, 122 bp, Homo sapiens
tccgacctcctccttcagggcacccagcgccgccgtctgcttcgaggctggaacgacccccgccccaaaatgcatgcccctcgggtcacttgggaggactcaggggacccccttccagcctc

SEQ ID NO: 419410 - DNA, 122 bp, Homo sapiens
accctgctcccagagacgcttttcggattcgctcagctcacaggcgggatgggaatgtgccgcagggctgctgcctcacacgtccgggtttaatagacttttttccactgataaaagaccac

SEQ ID NO: 419411 - DNA, 122 bp, Homo sapiens
acagatacttagccgcagggtttctgtgccagggagatggcggctcagtgggctaggcaacgcgtggagagagcttcctactctcgggataagcaagattgagccccacagctgtaggccat

SEQ ID NO: 419412 - DNA, 122 bp, Homo sapiens
ctccgatcaagcccagcaggggccggcaggtcgcgccaagtgcggggcccaccgagcctgcgcccacctggaacccggggcagcgcagccccagtccccgcctgcgcctctccctccacgcc

SEQ ID NO: 419413 - DNA, 122 bp, Homo sapiens
aattccttttagatttggacccatatggtgctgtttaccattgggaataatcaatcacctcgagaaattgcagaagcttcttggaaggacatggaataatttgagggaaatggctgatagat

SEQ ID NO: 419414 - DNA, 122 bp, Homo sapiens
ttcccctccacctttctccatagcaacggggtcattcctccctgaggtccaggagaagggcgacctctgccagcccaagaagcggtgagaactacattacccagaggcccgtgagccaggtt

SEQ ID NO: 419415 - DNA, 122 bp, Homo sapiens
tccctcgcacctttcttagagctctccttggaggagttgctcagagcatcttttgtgggtcgatggaaaggttactgggaaacttcagttgtttgagactgggatcacctggcctctgtgta

SEQ ID NO: 419416 - DNA, 122 bp, Homo sapiens
gccctgagatgagggtgcagcattaaaacccgtgcagagggtggctgcttctccatgagccgagcaaaccgtcctcccatggctgcttcctgtaaaccggctcctaaggccagcgggcgttt

SEQ ID NO: 419417 - DNA, 122 bp, Homo sapiens
tgccggggaaggagccggttacccaggcgtgggacttggccgccatgggatgtcctgctacgagtcaggcctggatccctcccctaccgcctacagctgggttccataggatggtgagagga

SEQ ID NO: 419418 - DNA, 122 bp, Homo sapiens
tcaccgagccatagagcttgcccttgctgctcatggccacgaagaaccggctggccacgccgaagatgctcaccacgccccgctccacgggcgagagctccagcaggcctgggggcggggcg

SEQ ID NO: 419419 - DNA, 122 bp, Homo sapiens
tttttatgttttagaagaggccaaagtctccaaggctcattcaaaacaatacacacagaccgggatccagaagagaatcggcctgaagctccctggagctccctggagggttccacccccct

SEQ ID NO: 419420 - DNA, 122 bp, Homo sapiens
tgctcagcagaagggagcaaatgggatggagcttcagccaccctggaagccgccccttggcgccttcctccctcccttcctctttccaaaatcaagccccctcttcaacatcaagaactctc

SEQ ID NO: 419421 - DNA, 122 bp, Homo sapiens
attaaaggctcatgccaaggagaagcactgcttctgggggagagctaccaaatgggaccacggctttttcatttgccacaagggtagaattttgtgtgtgcacataggaggaaagcaaacag

SEQ ID NO: 419422 - DNA, 122 bp, Homo sapiens
gctacgtgccggggctgggccgggggtgaggcctggggcggcgcgcgaggggcggggacccggctacaggagcgcagtgctttggggcgtgtttgggggcgggggtctatggccgcgcagtc

SEQ ID NO: 419423 - DNA, 122 bp, Homo sapiens
agtaaaaggaaagggcagcttgcccgcacccaaaatggcggtcggcgctctgcacgacagcgcctgcgcagggataagcgttctgtgacaccaattcccctggagtgtcctcccccacccca

SEQ ID NO: 419424 - DNA, 122 bp, Homo sapiens
ggcggcggagaggggtttacgtaaaggacgcagcgtcccccggggggcggaggcggccttcgcgccggcgccggcgccctgcggaagcggcgttagtgaatcggggccttggggagcccagg

SEQ ID NO: 419425 - DNA, 122 bp, Homo sapiens
ctgcttgtttaaatctccgagctggcggcgccaggcaggaaagtgtctgctccagctcctcgctgcaccttcctcacataatcttggcgaacgttcacatttccagtcagcgtggctcattt

SEQ ID NO: 419426 - DNA, 122 bp, Homo sapiens
aagctagttatttctcacccaggagtggatttgtggtttggcttcaccatggcttcctgccgtgcctggaaccttagggtgctggtggctgtcgtgtgtggactactgactggcatcatttt

SEQ ID NO: 419427 - DNA, 122 bp, Homo sapiens
ttgcgctaaagcccgcaagaggctgggcttctcagtcccgcaaatgtctgggactacaggcgctcaccaactggcctggctaagttttttgtattttttgtagagacggggtttcgccagtt

SEQ ID NO: 419428 - DNA, 122 bp, Homo sapiens
ggagcgggctccgccgaggccctaatgcccggcctgccaggcagcggcgcggccaggcggcgcagccccgcccacccctcggcaacccctccgcggcccttgtgcgcgagccggggaactcc

SEQ ID NO: 419429 - DNA, 122 bp, Homo sapiens
acgtgggacaccccccttcctcctcccccctcccccctcccccgcgcggggcctggtctgcggggcagctccctgccaggatctgcccaccttggcttcagtaggccagcgtgggcagagtc

SEQ ID NO: 419430 - DNA, 122 bp, Homo sapiens
aaaactcctctcattttcagatgccatgactggaaagacagaaggctccaaaggcctcagcgccccatgaccttagaaaggcagaaggctccaaaggcctcagcgccgcatgaccttagaaa

SEQ ID NO: 419431 - DNA, 122 bp, Homo sapiens
gtagtgggacttcaggggccagaaaagaagggcaaggcaggacatgtagcgaaatcgtcacgagtcgcttaactacagggataggtctgacagatgccccgatttccttcttgtgcaaacat

SEQ ID NO: 419432 - DNA, 122 bp, Homo sapiens
ccaacacctgctggcatgtgctgaggatgctggtgctgctggctttcccagccctgcccccggggctgctttgggtgtgtgcctcttgactttagtgagaatgtactttttcatccctacca

SEQ ID NO: 419433 - DNA, 122 bp, Homo sapiens
gtctccccgccaagccgtggctcccctgctcccttttaccctcccttagcagccccctgccgggccacgttggctcagaaatccattttctacgcctccgagttgcctttctcagcgtagtc

SEQ ID NO: 419434 - DNA, 122 bp, Homo sapiens
tcgaatatagtttttgcatccacttgacgaggaaggagcctctaccctaaacaaaaatggcgggagctgcttcacacgtagtccctcacgcagaaagcctggaaggccccctccactttctc

SEQ ID NO: 419435 - DNA, 122 bp, Homo sapiens
gacgtcgccggaggaaattcatggctgtggatggatggagatgactggctcctacccagacgtgtgtaggtgaggcccagaagacaggctgctgccaggtacagggagtggtaggactttag

SEQ ID NO: 419436 - DNA, 122 bp, Homo sapiens
acaaacacataactgtggcacatcaaagagtgatgggcactgaagctgcaaggtcacccacgacctgaccaggaagaaaacctgacaattgctgccatagctggcaaggctttccaagctat

SEQ ID NO: 419437 - DNA, 122 bp, Homo sapiens
gggagtgttacacctcttaaaagtggtgcgtctggagttgtttgctcctccctgtgggttcgtggtgtcgctgacttcaggagtgaagccacagaccttcacagtgagtgttatggctctta

SEQ ID NO: 419438 - DNA, 122 bp, Homo sapiens
attccaaaacactcttccttccacactgaccgccctgcttagcccctttaaacctgagtccggagcctcacaggttgcaaagcaccgtggtggttacccacagctacagacaagtcggcaaa

SEQ ID NO: 419439 - DNA, 122 bp, Homo sapiens
gagctacagatcacaaatgtgatggaggcaaaccagcgggttagtattgacaactggtgccggagggacaaaaagcaatgcaagagtcgctttgttacacctttcaagtgtctcggtgagtg

SEQ ID NO: 419440 - DNA, 122 bp, Homo sapiens
cccccgccgcggcagctgccgccgggcccccgcggccaccatgaagaaggaggtgtgctccgtggccttcctcaaggccgtgttcgcagagttcttggccaccctcatcttcgtcttctttg

SEQ ID NO: 419441 - DNA, 122 bp, Homo sapiens
ttgcagaacgagtccgagttactatccctttaaatacaggcgtttcggcctagctgccgccggtccaatccgcagcgcttccgtgccccactttcccgcgtcagcctggctccggcctccac

SEQ ID NO: 419442 - DNA, 122 bp, Homo sapiens
ggttcataccaggaattgagaatgtttgagtgcacagcattttctaaactagaatttctccgaggcactagttctttgagatattacctgataaaaggatttgatgtcaatcaaatgtgata

SEQ ID NO: 419443 - DNA, 122 bp, Homo sapiens
gggcatgaacattgtttggtttcagtgatggattcgttactacatttgcaaagctccacacggtttagggaagttgtggccttaggaaagacttaaacagctgtttttgtaatccctgagaa

SEQ ID NO: 419444 - DNA, 122 bp, Homo sapiens
cagtgggcgggtactgagcctgcaccaggaggtgggcgggtgaggatggtggcgcggggccgggcagcagttggaattcctttgaggatagtttcaggacacaagcatggcccctacagatg

SEQ ID NO: 419445 - DNA, 122 bp, Homo sapiens
ggggagggggaccccgcctgcggctgcaccggcccggggtcgggggagggggctggggggcgcgatccataatttttaaaatcaaacaaaagtggctttagtgtgtttaaattgttgtgcat

SEQ ID NO: 419446 - DNA, 122 bp, Homo sapiens
gtgctcacatccgctggcgggctccgcgggtaggagtggcgagggtggtggcgcaggccgcggcctctgcggccccagcgcttcttcctgcctgggggcttcacccagccagggttccagga

SEQ ID NO: 419447 - DNA, 122 bp, Homo sapiens
ttatgccgttaaaaaatacatatccatttaagtcaggggtacttgaatatgcagatgagccgatatgtaatattcctggttcatttgagtaataaattctgcagcccgctctttatgatggt

SEQ ID NO: 419448 - DNA, 122 bp, Homo sapiens
gtgggcatggtgggttctgaggcccagggtggcggcggggacctcccggggctgcggggccgggcgcactcacatttgcctttggggtcccggcacagcatctcctcattgctggtgaactc

SEQ ID NO: 419449 - DNA, 122 bp, Homo sapiens
ccattcctatccggaaaattcaagctgtttgggcaccaggagggactctgagacagagggcgtcggagaaggcgcgtctctgcttgtcctcttgggctgactgagggtctcacgctaggcca

SEQ ID NO: 419450 - DNA, 122 bp, Homo sapiens
ctgttaggtccctaccccagcctatctcttccccaggcttgtcctttctagtcacctccacgcacagtcaaccaagcacccatgcagggtgaggccatcccaaagcgctttcaaactgtgct

SEQ ID NO: 419451 - DNA, 122 bp, Homo sapiens
agaccttgcttctgagactctggccaagctggctctgagagtgaaaggctcagtctctctcgcctggggaagaaacatgcaggctttagaatcatgcaagtaaccgtttacccacttggctt

SEQ ID NO: 419452 - DNA, 122 bp, Homo sapiens
ccgcgagaattggaaggcggcagtgaagcggaagccattactctctggagtcgattgccccgagacacatgggccaaggaggggtcagcggcgaattctttcggcctgttggggacccctcg

SEQ ID NO: 419453 - DNA, 122 bp, Homo sapiens
ggggccattctcagttattgctgtcaggggcatctgtcagtgggctgcgtttctgcgacacggtggcatgtcggatggacattgccaagagaatctggttaggaggtagaggcagctgatgt

SEQ ID NO: 419454 - DNA, 122 bp, Homo sapiens
gcatgatcaccagctgcacgtgagcctcccgaccacatgaaggagcacagagaacgtacacgctcaactgattgtaacagcccacgttagaaacagactgatgcccccaaagcaagtaggta

SEQ ID NO: 419455 - DNA, 122 bp, Homo sapiens
tctcctgtacctactggggcatttttttctagcctctgatgagccgcttgtattactctgcggtgttcttctgtattgaacagtgacagaaggagctgtttgcagtcagcccaggttgggtt

SEQ ID NO: 419456 - DNA, 122 bp, Homo sapiens
ttcttgcttatgacatgtcattgctgtctgtgtaggtaaaaatctattactatagttagtcgtctaaattgccataggaaactggtgtgtgttcagtgcctaactgcagcttaaccacttct

SEQ ID NO: 419457 - DNA, 122 bp, Homo sapiens
attagaaaatcaagtttaggtaaagcatttggcacagagctcctaagtacccctaaatggcgggttttgagcttgatgaggaactaatacaaattaggttgtcttattcaggtggaacaaca

SEQ ID NO: 419458 - DNA, 122 bp, Homo sapiens
cctgcgcgggcccggctgggtagacggggagcggcgggagccggccgccttttctttcttcgccccggactgaagtgcggtcggggccgcgcggcggagcggctggagcgcgcgcctcctag

SEQ ID NO: 419459 - DNA, 122 bp, Homo sapiens
ctgcatcccagcagcaagcttcagcggcttcctcagctgctggtgtatcgggtcctagttcggctggcggcccgggtccccagcagcagccgcaaccgccagcacaactggtgggccctgcc

SEQ ID NO: 419460 - DNA, 122 bp, Homo sapiens
gttccttgtgcccactgtccctgcagacgctctcctttccaggcggcctccagtggtttccggggtcctgctgctccctaatagtagcgattcaggctcctggtcccgggcacctcaggctg

SEQ ID NO: 419461 - DNA, 122 bp, Homo sapiens
ccacctccccggttccagcgattctcctgcctcagcctcttgaatagctgggattacaggcgcccgccaccacacctggctaatttttgtgttgttagtagaggcggggtttcatcatgttg

SEQ ID NO: 419462 - DNA, 122 bp, Homo sapiens
aagaatctttctctgctttttccagctctttgtggtccctttccccattttcaaagccagcggtggagcatcttcaaacctctctctcattttgacctcctcttctgcttccctctcccacc

SEQ ID NO: 419463 - DNA, 122 bp, Homo sapiens
cctccagcagtggcactggcagacgagccgtccagtggggacgttctgaacaaggcaacacggtgcccaggaggccagcctgagcggccctagaggaccagagaacttgactaagtttggga

SEQ ID NO: 419464 - DNA, 122 bp, Homo sapiens
gcaccgctcccaactcaccaacttctgaatactcagcacgaagcgggtccaaggcctgctcggaggtgcagttcgactaggccttctggtccgccagcaaacgcgccacagccccacgcgcc

SEQ ID NO: 419465 - DNA, 122 bp, Homo sapiens
gatccccgtgggggaccctgagctgaggggttacaatgaaactggccggtggcagatttgcggtggccaagagcagacttctaagggtgatgcttactgttctgaccagccctggttatttg

SEQ ID NO: 419466 - DNA, 122 bp, Homo sapiens
gagatgggggtgagagctcaggagcccttgtggcgcactctcccgacgggaggcgaagtgcgcacgcgcgccggtgggggggccgagtaacgggagagggggcgcgcgagggagggaggggg

SEQ ID NO: 419467 - DNA, 122 bp, Homo sapiens
ccgggggggcccccagtacctggaacaggaacgcggtccagttggcctccatggctgcggcggccgacccccctcctccccactccccccgctcggggagcctcctcagccggaggaggcga

SEQ ID NO: 419468 - DNA, 122 bp, Homo sapiens
cgcctcccgcggctgggctctgggagcgcggctcgggtatggaagtggagcgggctttggcgcctgggtggccctaaacctactccgagcggccacggcggcctcttgccagggacccccgg

SEQ ID NO: 419469 - DNA, 122 bp, Homo sapiens
acaaggtgaaaagcaaagaaatgtctgcaggacatagcgtcccgggcttgcctagaactgcgccctccgcaacgtttctaaaccactctccgcccgtttcccagcagcagggtggagaacgc

SEQ ID NO: 419470 - DNA, 122 bp, Homo sapiens
ttcttggaaaaccatctggaatgaacacccataggagcatcagcgaaaacgacagggcctcggctgattcacaggttctcgcacagctcagcagagctgccaagctgggcaacacaggtccc

SEQ ID NO: 419471 - DNA, 122 bp, Homo sapiens
gaccctgtcaatgacctgcagctcaaagatatgtcagttgtagagggtgggctccgggcccggaagctggaggagctgatccagggggctcagtgtgtacacagcccccgttttcctgccca

SEQ ID NO: 419472 - DNA, 122 bp, Homo sapiens
acgcttgccgtggtgcagcccgtagagcagcagcttgtacctgtgggcagggtccaggcccggcacgctgacctccctgaggctgccctccacgggcaccacctggggctgcccgtccctgt

SEQ ID NO: 419473 - DNA, 122 bp, Homo sapiens
aatcgctgtgttcatttgaatacctgtagtgacgcacggctcactccctccagagacagccggtgagccttcccagatgactttttccagccactctgggctgagtgttcgtggcccacctc

SEQ ID NO: 419474 - DNA, 122 bp, Homo sapiens
cttggtttacaaagaaataaaaaccttttccccatccttcttttgattgaagactacccccgcccccaggctccaaagccgggcaggaacgcctcttatctccaccacagccattttcctaa

SEQ ID NO: 419475 - DNA, 122 bp, Homo sapiens
tttaaagcgcagtttggctgggcttgggtttcttcttcactaattgaattccatttgtgccggagagaacagaaaaaatactgtttgcctccgcccggcccctccccctgcggcgaggagga

SEQ ID NO: 419476 - DNA, 122 bp, Homo sapiens
aaattggagctcgccacattctgaaattctttcggttcgtgaaagcagtaacctaggaaacgagactggcaccacccctttcagtcctaaagcttggtttctcccgcttttctccattatgt

SEQ ID NO: 419477 - DNA, 122 bp, Homo sapiens
acgctttgcatggtgcgcagaatatcccaccgatacccagaaatccagtagaaatagggacgagtgttgctgcgaaagagccttttgcatttgaaatgcatgttaggttaactggaaaggcg

SEQ ID NO: 419478 - DNA, 122 bp, Homo sapiens
gaaataatttgataaaagatttattggaagccaatgtaaggatcagcccaagaagacacacgaacaacgttggacatgttccaaagtctgttacaagttgaaaggcttttagaagaaagttt

SEQ ID NO: 419479 - DNA, 122 bp, Homo sapiens
cacaaagcagtttctttctactggtcgaattctcaaggcagaaaagctacatacgtctctcgtttcttcactaattgttctctagaaaagggaaagtgaagaagggaaagagaaaagacaac

SEQ ID NO: 419480 - DNA, 122 bp, Homo sapiens
cacagaattacacagcgctaaatacagaaactcctttcagtaaaaagcgattgctatgaacgtgttaaagcatcaagtctggttttccgccacctctccgggctgaggtggcctggggacac

SEQ ID NO: 419481 - DNA, 122 bp, Homo sapiens
cggggcctcaccgccttcacacgagtgcgctggaagtgcctggtcattgatgagatgcagcgcgtgaagggcatgaccgagaggcactgggaagcggttttcaccctgcagaggtctgtgtg

SEQ ID NO: 419482 - DNA, 122 bp, Homo sapiens
ctctccggggccgcagtgctgggaaaagctcagcctcggggctggtgttggcccagatgccggaggaggagaggcgcagcgcccacacgccatcctctggccgcagggagaggtctcccttc

SEQ ID NO: 419483 - DNA, 122 bp, Homo sapiens
gctgcggccgaagcacaaggatgaacagctgcggatactcggctttggtgccaggaagaccgcggggcgtggcggggaccgggccctgcgaatggagcagctgagactcagctccgcggaat

SEQ ID NO: 419484 - DNA, 122 bp, Homo sapiens
catctccactgacttcacctcagtggtgatgttcactggcgcaaaggtcaccaccatgcccggccgcaggatgccggtctccacccggcccacgggcaccgtgccaatgcctgcagagggga

SEQ ID NO: 419485 - DNA, 122 bp, Homo sapiens
aaaccacatggtgccctgtgaatgtaaatagtatgatgtggattcctctagcactgatggcgaagtggcactgaaagggcttcttaggcttcataaacgcctacacaaaaaccggtctttat

SEQ ID NO: 419486 - DNA, 122 bp, Homo sapiens
ggcagtgatgtaaagaaggcgtttactggagagcactgggcaaggagaccaggcagctgccgctctaatcctggcctccctgatggctatagcaaggatttttaaaggtagggttgcagaag

SEQ ID NO: 419487 - DNA, 122 bp, Homo sapiens
gtggcaggcaggggatggcagccccctctgctttggcaagaggcagaatccagacactggcgggagagcgcctgcctgccgggcgttcctggctcctgctgcaggcaccacagagaccccag

SEQ ID NO: 419488 - DNA, 122 bp, Homo sapiens
atcagcacctgttgagttcaaaccggaattttttctccttcgcatgtggagtttccttgtcgctatgaagaataaatctgccttattctctaggattccacatttcagcctggctactaagt

SEQ ID NO: 419489 - DNA, 122 bp, Homo sapiens
tcctcggtggcggggtccgcggttggagccgagcccgggcttcggctgctggccgtgcagcggcttcccgtaggagcagcgttctgccgggcttgccagaccccaaactttgtccgcggcct

SEQ ID NO: 419490 - DNA, 122 bp, Homo sapiens
gttttaaggcagaatgcaacatataatggaaatgaacctgacaatggtgacagatgtcaacgagatagttgcaaggcaggtttaaagtttaaaggtttgggaggctgaagcaggtggatcac

SEQ ID NO: 419491 - DNA, 122 bp, Homo sapiens
tgagagtgcgcatcagtgagtgtgggggtgtgtgtgcgcgagggcgtgtgtgtgagtgtgcgtcagtgagtgtgcatggcaaggctgtttggaactagcagttctgtccctcttcttacccc

SEQ ID NO: 419492 - DNA, 122 bp, Homo sapiens
taggttatttatgttgcctgcactgataaccaaagactgtgcaattctctatatcttttacgtcttggagacctattcttgttgtttgcataagatgtaaaaaatataattctgtgtcctag

SEQ ID NO: 419493 - DNA, 122 bp, Homo sapiens
gccgcagcaaacacacctctccacattccagcacacctgcccacctgctgtccaagcccccgaggagctcagaggttgtgtatcacagccaggtgcttccaggaactccccgccccacgtcg

SEQ ID NO: 419494 - DNA, 122 bp, Homo sapiens
agaaggccaggagagcgaggtgggggcgagtgcttgtagcaggaggcccttcaccaaatacggggatgggggatacgcgggtgtgtatctgaacatccactcatgtgcctttgcttacattt

SEQ ID NO: 419495 - DNA, 122 bp, Homo sapiens
tcccgggaatccggaggccagcagtggaaccgcaaggctctacagggcagatctgcctcccgtgctgtctcagctacgccgagtcgttggctcagggcggaggattttcctattggccgcgt

SEQ ID NO: 419496 - DNA, 122 bp, Homo sapiens
agctgggggctggatgcctgggtactgagcaggaagctgggttcctggtcagcccccccacgggccccgcccatccctgtcaacttcctccattctcttcccacccaaacagcttgttcagt

SEQ ID NO: 419497 - DNA, 122 bp, Homo sapiens
cccggaatcttcctggccctagagcctgcaggctccaggccggccccttgaatctcaccgcgaggaaggcaccctgctgcctgcacttatttgcatccaagagtttgcattgagactggcgc

SEQ ID NO: 419498 - DNA, 122 bp, Homo sapiens
ccatttcctctccatctaagctgttttttggaatctgaccagctggtgtcactatgggaccgtgaatacaggcatcttcagagctctaggagtagaagaattttggattggcgttgtggccc

SEQ ID NO: 419499 - DNA, 122 bp, Homo sapiens
agcccagcccgtgtagaatgaggtgggttctggcctgcgggaggaacaggcagcccagcccgtgtagaatgaggtttggttctggcctgcgggaggaacaggcagcccagcccgtgcagaat

SEQ ID NO: 419500 - DNA, 122 bp, Homo sapiens
ttccgcggctcgtagtcgcgcccgcgaggaaacgccagggaggcttcctgccccgcccagcggtggcccagggcacagggaaccacggctgcttctctccgaggtttgtggcctgagaaact

SEQ ID NO: 419501 - DNA, 122 bp, Homo sapiens
tgctggctctgtgcttacagggtgcggtgaagcgctccccattctgcaggattttcacagcgccccaggatggaggggctgcagctagtgtgcttgggcaagactctggctgtgtagccaca

SEQ ID NO: 419502 - DNA, 122 bp, Homo sapiens
ggctttgagccgaggcatccccgggctgggcgaccgtgggcgtgggcgctccggctgctgcggcggttcctgctgtgctcagctgggtcacgactggaactggcgccctccggaagtgaagg

SEQ ID NO: 419503 - DNA, 122 bp, Homo sapiens
ggaagactccgccgccagcggggtgactgtgctcggcgccgccgccatcgcagcgaggcgcgcggacaattgcacttgcgtctcgattccgttaagctcctttagccccgccttccgttagc

SEQ ID NO: 419504 - DNA, 122 bp, Homo sapiens
gatattttttgatcagtctctcacagtgttcggccctgcagcctgaaggtctgagaacaccggcggggagtgggtggtgggtgcatgggaaggacgatggctccacggtcctgccgtcaacg

SEQ ID NO: 419505 - DNA, 122 bp, Homo sapiens
gcgaggggtagcgcgcgccggaagttggtaccatagagactggagagccggaggtgcccccgccaccggggcggggcggggcgaggtcctagctagctgggttagtaagcggcgcgagcgtg

SEQ ID NO: 419506 - DNA, 122 bp, Homo sapiens
aactctcagggtggggatgccacccggaaggggtgcttcgtaggctgcacgtcggggccgcgaactagagaaggctggatgtgcctccatcgccactaggtaaacgcagcaaggaatttggc

SEQ ID NO: 419507 - DNA, 122 bp, Homo sapiens
gctgccaccaccattcagcatagtatttctgcagcatagagctctgggaaatggatctaccgatattcaacgcctgtggaatccactgggaatatctcttctaccccgaggagctgggggag

SEQ ID NO: 419508 - DNA, 122 bp, Homo sapiens
accccatcggagagcctgagtgagggcgatcaattcagctttttgtgccgaggtatttgccggtaaagcctgggcccatagcacatctgtctttgtagtaatggctgcaccagcctttcgta

SEQ ID NO: 419509 - DNA, 122 bp, Homo sapiens
catccataatgaagcaaaatggaagtcttttgggataaggggaatctgtaggaaatgccgcggctctctttaggcctagggttggctacaatgtggcatttccttctcgaggcgagggtgat

SEQ ID NO: 419510 - DNA, 122 bp, Homo sapiens
ggtgtaactggaggggcgggcccttctccaagttagagttggggttctgagcgagtcgtgcgttttaggtttagtgtcttttccttgtccctgctcggggagcgtgaggcagatcggccggc

SEQ ID NO: 419511 - DNA, 122 bp, Homo sapiens
ctccaccctttgtctgaatcttttctctcttttgcttttcagtgttcctgtccttcttaccgtggattctactcacagaaacttcccctctgtgtggggcttttccttggagggttctttgg

SEQ ID NO: 419512 - DNA, 122 bp, Homo sapiens
gtctccatgtacgggtcgtgtgttcccacttcctgtattacggtatgcacgtgtgtgctgcgtgtgtagatggcaggtctgtgtatgtgtatctgtgtctatctctgagtttatctgtaaca

SEQ ID NO: 419513 - DNA, 122 bp, Homo sapiens
aggagcagagcagcagctgagcagcgtccctccccggccagctctccacagccacacctccggccacaagttctctaatacaggatgttggcaggtagagagggatgctggatagggggaaa

SEQ ID NO: 419514 - DNA, 122 bp, Homo sapiens
accatcctcccctaacccatctccagctctgttgctatccctgaggtctctagagctgaccgcggcatctcagaaaagggatggggaacctacaagtcgccgtcgcctgcctggctcattct

SEQ ID NO: 419515 - DNA, 122 bp, Homo sapiens
gcctgctcattcctattccctctgcgctgctcctgccctctccctagaaccttctagaagcgtggctgttcgtgctgttccctgcctttctgcgcacacatgctcatattcttaactaggga

SEQ ID NO: 419516 - DNA, 122 bp, Homo sapiens
catatgtgaaaatgcatcactgagaactcagcacaggctctgggcatccacaggggagaacgcagcgccacacagagcgatactcgcttttcagccctcaaaccctctaattgttatgtctt

SEQ ID NO: 419517 - DNA, 122 bp, Homo sapiens
acgggccacatccccactaatctgattggttctgacgattattcaaacccagatagtccccgcccccttgccacggaggctaacgattggtcagtgtcttaccagacccgccctccacgccc

SEQ ID NO: 419518 - DNA, 122 bp, Homo sapiens
agcgccggggtttgcgcagcggcggaaatgggcagggcggagcgagcgctgcggctaaagcgaaggcggggaccctacccatccctagtcctgtcggctcctcccaccccgggtcacgccgt

SEQ ID NO: 419519 - DNA, 122 bp, Homo sapiens
actttaagttctttctacagacgggtcctctgcctcttgtgtaatctctctacgcacgaacgccatatatcgtgcggtggtagggctgtacttttgtaatgcttgatgagttctttacgtac

SEQ ID NO: 419520 - DNA, 122 bp, Homo sapiens
agggaactccctgaccccttgcgcttcccaagtgaggcaatgcgtcaccctgcttcggctcgcgcacggtgcgtgcacccactgacctgcgaccactgtctggcactccctagtgagatgaa

SEQ ID NO: 419521 - DNA, 122 bp, Homo sapiens
gagcacatcgtttgtataagggcaaaggaaaagaaagggcagccaaggctggggcggaaacgcagcgccctcaccttcgagaaggaagcatggggaaggcgccctcttgtggaactcggctc

SEQ ID NO: 419522 - DNA, 122 bp, Homo sapiens
ggcattgggtttctagggaatatggctcagtagggcctgccccttcaagggcagcaagaacgaagcaggatgttgtcactcccgtctgaataaagctccatgagctgggttggaaagctgaa

SEQ ID NO: 419523 - DNA, 122 bp, Homo sapiens
gtgaagaacgcgtgccccaaagccaggcttccagacggtgctgccctgtctgcagggacacggacggctggatccgctcctgctcctcgaaggcctttgtgtcgtttggggagaaccaggcc

SEQ ID NO: 419524 - DNA, 122 bp, Homo sapiens
ccctagataagataagattaggagagcggcactataaataggcccccatccttcctcaggcgcaggccccagccagctcaggctacactatcccaggatcagcatggccgtccgccagtggg

SEQ ID NO: 419525 - DNA, 122 bp, Homo sapiens
aggccctttggcctagaggccagagccggggtctgcagagacgcaggcactctctgtccccgcgagccccaccactgggttgctgcttttgagccggttgcttcgggccggcagcccttctt

SEQ ID NO: 419526 - DNA, 122 bp, Homo sapiens
agcgcaagaggcggccactgccccacctcaacggaaagctgtcccacacaaagcaggggccgcccacctgcccagaccccacggaaggggtggccactcaccagcctccaggcctccgtgct

SEQ ID NO: 419527 - DNA, 122 bp, Homo sapiens
ggtggcagccgtgccacctcctgtgagtcagggcaggaccaaccaagagcctaacaccaacggcaacacccagccacttcccaaactctgtacagttttaggattgaatgttaatttgttgc

SEQ ID NO: 419528 - DNA, 122 bp, Homo sapiens
gatgaatgagcgttcctgttgcccagcatcctcatcagtaattgttgtggtcgctgttgccgattttggccattttaataagtgttcagggtatttcattgtagttttaatttgcaattccc

SEQ ID NO: 419529 - DNA, 122 bp, Homo sapiens
tctaagatgggatttaccctgtgaaacagggagaagacttatggaccccaagcatcatttcgagttgtagttgagtttttaaaagacatacatgcaaagttcctttgctttggaccctctgc

SEQ ID NO: 419530 - DNA, 122 bp, Homo sapiens
attaatcgttgttgccccctgtgggaagagcatacgaatagatggcagcctgcaggcctacgtgctataatggcagaggggccaggaaaggtccctgaccctaccattcaaggttcactctt

SEQ ID NO: 419531 - DNA, 122 bp, Homo sapiens
aatgctgtccacacagacccgcccggcgcagctgtgtcagtgtaaatcctagtctgcggccgggctactgacatttgcatgtgattgactaatctatgagagagaaaacaaacacaagaaag

SEQ ID NO: 419532 - DNA, 122 bp, Homo sapiens
cggtggggggcgggctgggggcggggcggccggggctgccttcccgggcgcatatgcgagcgcagcacccggcgctgccgagccacctcccccgccgcccgctagcaagtttggcggctcca

SEQ ID NO: 419533 - DNA, 122 bp, Homo sapiens
ttggccaatgcggcgtgacgtcacggagacggggcctttctacaggcaggtactcggtgacgccataaagaaaactctgagggcttccgccaatcagagataaagtgtgctagcgaccttcg

SEQ ID NO: 419534 - DNA, 122 bp, Homo sapiens
tgtcatgggaggaggaagggtcaacaaagacaaacttgtcttgggggttttaggaacccacgttccgatgggagagggaggatctaatggggatcccgagtaggggatggggtcccagaaca

SEQ ID NO: 419535 - DNA, 122 bp, Homo sapiens
aagcagctgctgaggctacgccaagacgaaggcgcataaaatgaggatggacatggtgcacgttggctgctttgacttgacttcagggaaaccccgtcacccatgttctctcgcttcaggcg

SEQ ID NO: 419536 - DNA, 122 bp, Homo sapiens
tccagcccagcgccgccgcaccccggggtcccgcgcggggtccccgccccccggctgacccgcccgccgctgcgaccccgggcagcctcgccagctctccaccgttgtctcctcggctcact

SEQ ID NO: 419537 - DNA, 122 bp, Homo sapiens
acgggtcacgctgtacgtcgggaaatggagtccagggtaatctgtcagccgactgtacgacggggagccctgaagcactttaggaagcagagagcctgatgcacgctgggaaacggagtcca

SEQ ID NO: 419538 - DNA, 122 bp, Homo sapiens
ttcttgaagggggatctgagcagcatatctctatgtctgcctcatttccctatgtacaagcgtgtacctgattgcagcagaatgagatgagaaacaaatatttttttgttacaatttaccac

SEQ ID NO: 419539 - DNA, 122 bp, Homo sapiens
aaataatgtgactttgtagattggagagtgtgtgaccacagaaaggaaagggaggcagcacgtgccagccggcgacagaatgttaagtctgcagcatactccaccgcaatgaaacaaataat

SEQ ID NO: 419540 - DNA, 122 bp, Homo sapiens
ctggtcagggaggctccggctgcacaggagccgacagagtcgggggaggctcaggcatggcgggctgcaggtcccgagccctgccccttgggaggcagctaaggcccagtgagaaatcgagc

SEQ ID NO: 419541 - DNA, 122 bp, Homo sapiens
gtcgaattacctggactcagccccaggaaacaaaactgcctgcctcccccaaatggcaaacgtgaacgcgccagtctttgagaggcggcttgcctggtgaagaacacctgcggttcgtttaa

SEQ ID NO: 419542 - DNA, 122 bp, Homo sapiens
gatctgagctgggccgtgaggaggagggtgaattgcttggattaggatgcagatgagtgccgggcagagagccagacaggagctagacacagagaggcccgtagattgccatttgtggatgt

SEQ ID NO: 419543 - DNA, 122 bp, Homo sapiens
ctcgaacaggtcgcattcacagtctgcctgggctctagctgggccccttatatacctgctcggattccccggggttggggcttggtccgcccctcgcaacccggaggacccgtgattgacag

SEQ ID NO: 419544 - DNA, 122 bp, Homo sapiens
aaatgccaccgtgaccgttttgctggtagtttcttgagattcgagcaggacccagtgaatcgaagcggagttgcctgcaagatgaatcccgttgccatggcgactcctgccttcggaatctt

SEQ ID NO: 419545 - DNA, 122 bp, Homo sapiens
ccataccccgtcttagaaggtcaggtgtgcaaaacttggactcgacttcatccaagagctcgtccaggtcctccgccatcttgaatcgcctggccttttcccctccaatcgccaaggctccg

SEQ ID NO: 419546 - DNA, 122 bp, Homo sapiens
tgtgaaattctctctcctctgcagccttggtctgcagtgacactggcagatgctaaacttcggcctgtctagaacagttaattaggttatagaggctgccaaaaatcccaaagtcatccaaa

SEQ ID NO: 419547 - DNA, 122 bp, Homo sapiens
ggggccagacaggccggggctgagtcacggaggcgccccagccgctctcccacccccacccgcacccccatccctaggccgccctgtccctggggtccaccccagccgcctcgccagccacc

SEQ ID NO: 419548 - DNA, 122 bp, Homo sapiens
gtcagaactgatggctgcagaagtcataaagatcccatttaatctcgcgcctatctatcacgcggctgccttcatcctctttgtgccggggtaatatgtgctcattacaaaagcaaaacaga

SEQ ID NO: 419549 - DNA, 122 bp, Homo sapiens
tcctactcaaactctccccaccaaggcaaggcagggcgtgtctagaaagtccagcttcagcgctgagcacggcgactggggcagagagcggggcacgcgaggggctggagcgagaggcgtca

SEQ ID NO: 419550 - DNA, 122 bp, Homo sapiens
aatcaggcacatcctggagacccgctacgccgtgcccgggaagagcctggaggagcagaacgaggtcataggcatgcatgcagccatgaagtacatcaacacgactctggtttcgcgcatcg

SEQ ID NO: 419551 - DNA, 122 bp, Homo sapiens
tgtgttttcctccagctcaggcttctctacctttcttcctttggagcatctgttatgcaacgtattgaaaagcaaattgcctgttttggaaagggtgatttccttttgaggccatcttaatc

SEQ ID NO: 419552 - DNA, 122 bp, Homo sapiens
tcctctccaccgtggaggctgaggccaagcccacggcacagggcacaggctctggcggggcgtgttcgaggttgggcgtcagcggaggccgcaggggctcgggcgaggcagccactggagcg

SEQ ID NO: 419553 - DNA, 122 bp, Homo sapiens
ggacttgtcaaagtcggaagcctagtgcttccccaaactttgttttttagatggggggggcgtgggcgaatgggacttgatgtattgcggaagagctgcctcccgaaattcccaagcaaatg

SEQ ID NO: 419554 - DNA, 122 bp, Homo sapiens
ttatagaaactaaatccaggacaagcacagtggctcatgcctgtcatccctgtgggaggccgaggcaggaggatcatttgagctcaggagtttgacaccagcttaggcaacacagggagacc

SEQ ID NO: 419555 - DNA, 122 bp, Homo sapiens
agttttctgtatccatagagctgactttgctcaggaaatttacaacttacctaatttgaacgcagctggccaagtctgtatttccctccaggaatgtgcacagttgtgttcagaccgtttag

SEQ ID NO: 419556 - DNA, 122 bp, Homo sapiens
ttgggacccgggttctaagaacaccgggccgccccctgctgatgatcttggttcgcagtccgcctgaggccacggccctatggaaagttctcgggaaggctgcgggggccctcttctttaag

SEQ ID NO: 419557 - DNA, 122 bp, Homo sapiens
aaagcgcgaggaccttattgtcctcctcccccatcctccaaccagcccacaggacagccgcgttaccatgacgaccgggctcctagaagctgcagtcaaggacctggttgccatggtttccg

SEQ ID NO: 419558 - DNA, 122 bp, Homo sapiens
gcctcactgcgcatgtgccaaagacaatcacccaaagtactcgaaaccaagcggcagggccggcccttgcgcaggcgtactagcgacggccgtagggagcgcttcctcctccccgccgccgc

SEQ ID NO: 419559 - DNA, 122 bp, Homo sapiens
ccaccttcatacacactcacctccacagaacacctccgggtcccgggcactccgggccagcgcaggccccagcagcagggccagcagagccagaggcagcagcatgggccccatgccagctg

SEQ ID NO: 419560 - DNA, 122 bp, Homo sapiens
actctgttcttccctcccctgcctctgtgtttgagctttctcatctaagaaatgggaacgcgtcataactacctacaagaggagcaattggtgtgccgttcctggcccctggtaagcgctta

SEQ ID NO: 419561 - DNA, 122 bp, Homo sapiens
tggaagccgccgcgactgggggaagggcgcgtggcgggtcgattctggggaatctcaaggcgtgacttatctggatcaccctagacttcccctagtagcaagtggcctcttctctcttcacc

SEQ ID NO: 419562 - DNA, 122 bp, Homo sapiens
ggccgccaggcggaaggcgtactccgtgttgggcttcaggtcctccaccacgtaggaagtcgtcgggtcgaaggtccttcccacctgggggcagggcagagaaggacagagagggatggggg

SEQ ID NO: 419563 - DNA, 122 bp, Homo sapiens
cgtctattcccagagaaatttctaaacgaagaagcaaatatgaccacgggttcccggcctcgtgtgggatgagactcgtgctgtctaggagagaaaatctgtaggtttcactggttttagca

SEQ ID NO: 419564 - DNA, 122 bp, Homo sapiens
atgagagtggatttttccttccaaatccacttggagtgagtcccgaaagactcacttttgcggcaatccccacaatgacatcactggagcggaggttatataatttaaagcaaccacatctc

SEQ ID NO: 419565 - DNA, 122 bp, Homo sapiens
tcctgtcctccccgctttcagaagctaggtttgttccttgcttagagggtaggaaactggcgtgaatcatcagaggggcagtttcacataagggtagcattagaatgttatggtagaggctg

SEQ ID NO: 419566 - DNA, 122 bp, Homo sapiens
ccgccgaggggacgtgcgcactcacttggtcatcaccatctccatgagcatcttcagggtcgggtactcctcccacgcagccaggcctagggaaccggagggtgtggggctggccaggctcc

SEQ ID NO: 419567 - DNA, 122 bp, Homo sapiens
ccctgcacagcttccgggaagaggtggggataggaggctcgccccggggaaggttacgctcggggtccccagaccaggtctccgcacgcccctgccccgtcgcctcccgggagcggctgcag

SEQ ID NO: 419568 - DNA, 122 bp, Homo sapiens
tggggccaagccggccctccccggccatctgcgggcaccgggaagacaggccatcctctgcggttctccctcgcgggatcgaacccgcagttcagcgtcttaaccagcccagttgccgacca

SEQ ID NO: 419569 - DNA, 122 bp, Homo sapiens
accacatgtgggtcataaatatgcgttaatcaaaaaggacaaagcaatcaagtggctttacgtcatttattaccatttctgtgagggtcaattgttagtaactgcctgcatgtggctcaggc

SEQ ID NO: 419570 - DNA, 122 bp, Homo sapiens
tgggaccgccactggccgcctgctggtcaatctgggacacaggaagccgccggctaagtccggagctcgctggcagcagctgatcgaccctggaggttccgactgagatgcggacgctccag

SEQ ID NO: 419571 - DNA, 122 bp, Homo sapiens
gcggcggcggcggcggcccaggaggaagtgtccggagcgacagtgcagtcgaccaatcggcgcgggcctcggcgacgtcagagaggggcggagcctgccgaggggccgggggcggaagggga

SEQ ID NO: 419572 - DNA, 122 bp, Homo sapiens
ccaactcttttccctcattggttgagggtcactcctaggatgttcacttcctggcacttccgacttgctctgtgtgccaagccaaacaagcccctgcagccagagagaggggagctcatggc

SEQ ID NO: 419573 - DNA, 122 bp, Homo sapiens
tcctcttgaaagtgtgggctttgctgtagctccagttgctgggctaacttttaattctaacgttctgtgatgactggatactgaccggagaatgaatgatgctctcacttttccttacttca

SEQ ID NO: 419574 - DNA, 122 bp, Homo sapiens
gcccctgggagggtaagaaaggttgccaaaggacctcaggctctcggacaccaggagcctcgggctgcacggaaccactgctcctctagggcttggagggaaagccaaggccgcgcctgccg

SEQ ID NO: 419575 - DNA, 122 bp, Homo sapiens
cagctctttgggggaggccacggagcccgacccgctccgggcgcgcaggcagccctcggccgacgggagtaagccctggtggtggtcctacttcacatcgctgagcacccacaggccacgct

SEQ ID NO: 419576 - DNA, 122 bp, Homo sapiens
actttactcactgaccatggttacaagggttggccctgaaatgccaatcctggcccacatcgcggcccgcacacgaggcactgcttttggagtgaaccgcacgctcacaatacaagtagttg

SEQ ID NO: 419577 - DNA, 122 bp, Homo sapiens
tggagccgcctcagtgggaggtagtcagagtgtctgaggtagaagaccccggggaaggaacgcagggcgaagagctggacttctctgaggattcctcggccttctcgtcgtttcctggcggg

SEQ ID NO: 419578 - DNA, 122 bp, Homo sapiens
attttacatacaaataaagcacaagaatgagagacaggatggtttagtggttaacagctccggctcagagttggactgacctgccttagaatcgcagtgttgccacccatcacctgtggcct

SEQ ID NO: 419579 - DNA, 122 bp, Homo sapiens
gatggaggcagctggcagggctagccctgcctgcaaagttgtcggaaaggacaggtcccacgggaaagagtagcaatatgagatagtgccaaaactatggaatttgaagtcaaatgagctga

SEQ ID NO: 419580 - DNA, 122 bp, Homo sapiens
agggaatatgaagtttgtgaaatgttgagcccgctgtgctacattcctgtaaaacacacacgtgcacatgcacacccacgtgcacacacgcatacacataaatgcacatgtgcagatacacc

SEQ ID NO: 419581 - DNA, 122 bp, Homo sapiens
cccatttctgcctggagcacccactgtgcttggtcttcctgcagtctttggcaccggctccggtggaaggcaccaagttcctcatcagaaggctccattgtgcctattgtttaaatatagat

SEQ ID NO: 419582 - DNA, 122 bp, Homo sapiens
ccgccgtcctcggagctgggcggggacctgattctgggggtgtggacagagccaagggaccgccccccaaggcccagcgccgggagatgcaaggccgggcccaaggtgttggacactgcttt

SEQ ID NO: 419583 - DNA, 122 bp, Homo sapiens
tcgcaaatgggaccctgattctttcactgtgtctctacccctcagccagtttcaagcgcccggtagtgatcctgggacccgtggccgacattgctatgcagaagttgactgctgagatgcct

SEQ ID NO: 419584 - DNA, 122 bp, Homo sapiens
aaaatgttctcttccccagtccccgtaccttgtcattaaagtttggtgcctcgggcttggcgacagagcttatcgacaagctaagttacttggagagcagtcccctgatttcatcatgttct

SEQ ID NO: 419585 - DNA, 122 bp, Homo sapiens
ctggctgagaactgctcctggcagtggatcacttgtgctgtctaagtgtgcaaggacaggcgcccctcccaattcttttctttccccaagtaattagcccaagggctgaagccctcgttcag

SEQ ID NO: 419586 - DNA, 122 bp, Homo sapiens
ggcagctcttcctcgggccggaagcgctgcaggctgtagtcccaggagagaatcaggcagcggccggcgaagggctgtgccagcacaatgtgaggctccccttggtaggagaagggctctac

SEQ ID NO: 419587 - DNA, 122 bp, Homo sapiens
ggggagggggcaaagggcgcatcggccccgcctcgaggccggcggctccctgacgacccccgggacaaacggggaaactgaggcacagagtcagacgcaactctctgctccttttttttttt

SEQ ID NO: 419588 - DNA, 122 bp, Homo sapiens
ggcggacgcctgggaagagattaggcggttggcggccgacttccagcgggcgcagttcgccgaggccacgcagaggtgcccgaccctccctctcctttgtggagcccaaattaggccgtggg

SEQ ID NO: 419589 - DNA, 122 bp, Homo sapiens
tagcccaatctgaggaagttaaagtgaaacagactcacagaggctggagagattggtcaacgtttcacataaagactgaaagactgaagattttatacatgtagcagagaggcagggaagaa

SEQ ID NO: 419590 - DNA, 122 bp, Homo sapiens
gctgccccgcgcccgggtgcgggcgggaggtggagccagttcagaggaggggaccctttacggtaaaagctgccgtcccttgtggcttctagaagataggaaaacaagtggctccgagaggc

SEQ ID NO: 419591 - DNA, 122 bp, Homo sapiens
tcgttgtgctgaggacgaacggcgctgcgggcctggctccctatggcggctccctgctcgcgcttcactccaaggggaacccacagaggttttggaggagttattaataaattgtctttttt

SEQ ID NO: 419592 - DNA, 122 bp, Homo sapiens
gtatgttcctctgggagacaggttctctgggtagagcctgggaccccccgaccccggccccgtgtgctggtggccacaaacagctctgctgggcccaaggcagctgctgataccggggtccc

SEQ ID NO: 419593 - DNA, 122 bp, Homo sapiens
ataaggacttctgggcagttgtttcttcataactcgatagccattgaagacttcctgctgcgaagagcgagtccgcctccccgcccccccctcgtctttttcccccttcttgcacacaagac

SEQ ID NO: 419594 - DNA, 122 bp, Homo sapiens
ttatcgctccaagagattccactccagccgcccgcctccctcgtggattagcaagcgagtcggaaaaatacacaggatttaattagaggcaaattaaaattggtaatgaaatcgggccagtt

SEQ ID NO: 419595 - DNA, 122 bp, Homo sapiens
accgtggcaggtccgctgtctgggcagatggccaagctgatgctgcagcgtgcagagagacggctccgggaggacaggtccaggaaggagctggtggagcaggtgatagaggggcagaagaa

SEQ ID NO: 419596 - DNA, 122 bp, Homo sapiens
ggagggcagctgccggttgctattggtaccgctagctagaatggctgcgggggccgtacgcggctgctcatacctttaatcccagcactttcggaggttgaggcgggaagatctgttgcgtc

SEQ ID NO: 419597 - DNA, 122 bp, Homo sapiens
gaagttttgtagcgggaaaaatacaaagtgaacatctctaggctacttcatcaaagtccccggggaccacatttttctctcaggagactgtcctgtaattcactgaatcattgcttgtattc

SEQ ID NO: 419598 - DNA, 122 bp, Homo sapiens
cgctgagtgtgcctgagcacggcaggtgtctatggctgaactgtgccccttaaattcctgcgtggaagccctaacccccatgtggcagtgtttggagacaggcctctgaggaggtggtgagg

SEQ ID NO: 419599 - DNA, 122 bp, Homo sapiens
ttgtgtgggtgtctttgttacatggcgtgatcatgacggaattcagaccgttgggagagccgtgtgtatgaaagaggagagcctagtatgtcagggtccacctgccttatatatgcgtgatg

SEQ ID NO: 419600 - DNA, 122 bp, Homo sapiens
ctgggtgacggatgctcaaaagttcagaagttttcccaatgcttccttaagcggctggcgcgcgagagaccgagaaaaggtgacgcggggcccgggcaggcggccggcgcgcggcccccccc

SEQ ID NO: 419601 - DNA, 122 bp, Homo sapiens
ggatagtggtatcctctagcaggaagggagggaagtgtgagtgggaaaggagaggagctgcgctttctaggatgccagaaaagagtgatagttacatgcaatgagaacacatggacacagga

SEQ ID NO: 419602 - DNA, 122 bp, Homo sapiens
cgtctagcagcaccgaaaagtggccggggtccgtcggcacctgagcgcagcgggcgcgggcgggactgtcattgggctgggccaggctccaggacccacccagggagaccccacccccgtcg

SEQ ID NO: 419603 - DNA, 122 bp, Homo sapiens
gcagcaagtgtatttgccagtttgctaaaatgggaaaaacccaagagactgatgggtaaacgttagcatgcattcattccacaagtgcctttgagcatttagggggcagccccaggggccca

SEQ ID NO: 419604 - DNA, 122 bp, Homo sapiens
ttccgttaccaaaagcgtttccgtgaatagcgtgattggaaacttgtgcgggccggagaccgcggcgcggctgctctttcaacaggcgatttgttctcctgtccgaggctcatttccatgca

SEQ ID NO: 419605 - DNA, 122 bp, Homo sapiens
gcctgggtctgagttccaatccaaagaccagcaccgagagaccagagctgtggtttccgtcgagcctgaggcaggaggaaggtcctagcctgtggccaggcaggaggagtcccttgcactgg

SEQ ID NO: 419606 - DNA, 122 bp, Homo sapiens
gagccccatggttgacaaccccatgagacgtgagttctgagccagcctttccccatcttccgcggtgggcacggggcgggggctcttgtcccgtctctggcttggccgggccccgccggagc

SEQ ID NO: 419607 - DNA, 122 bp, Homo sapiens
agagagatggttacattcatataaataaacgggcacatccagcacactatttctagttgtcgtctgctaataagtttacatctggtaaatgccagtgtttcatcaaatggctgcattgcaca

SEQ ID NO: 419608 - DNA, 122 bp, Homo sapiens
ccaggaccaggcttgcatggggacgggggtctgcgtccgcgtccagggtccaaacgagggcggtggacacgccggaccgcatcccgcccccaaagccggctctgggctgtgcaggaccaggc

SEQ ID NO: 419609 - DNA, 122 bp, Homo sapiens
cgcacctgaacttggcgtggctctgccctgcctggccttttgtaaggcagtttctcaatacgcaggcagggagcgggatcttcccgccactcattcttttctttttagagatgcggtctcag

SEQ ID NO: 419610 - DNA, 122 bp, Homo sapiens
gactgcagggagggcattccaggcgggggcgccacctgggcaaaggccgggagatgggagcgtgcagggcccgtgggagggtggagagatccggggcagggaaagggcgcggctgggtcctc

SEQ ID NO: 419611 - DNA, 122 bp, Homo sapiens
tatgccctctctgatccagggatacagcagtgaaaggtcaccccacctgcaggaaggggtcgctgactccagatatgctgtgttctgtggagtatcccattgtcaccagagtccggaggatg

SEQ ID NO: 419612 - DNA, 122 bp, Homo sapiens
gggtctttttttttccccccaggagagccagtttgtaaacatttcctaactgagcatgggcgggcactgaagcactgttaatctctgcaccctaacctttctctgtcatcctgtttgtcgtc

SEQ ID NO: 419613 - DNA, 122 bp, Homo sapiens
caacgtgctcggcgcgcagctggccggccggccagcccaacgccgccagagcgctcgccgcgggcggaccccggagctgctccgctttgttcccggctcgcctccacttccccgccggcgcc

SEQ ID NO: 419614 - DNA, 122 bp, Homo sapiens
ctgaagaccagtaagcagagaccagcgagagcaaatagcgtgaggaagcctgcaggtagccgactggagaattctttattgctccgggaggctgacattttgttctagtgaggccttcaact

SEQ ID NO: 419615 - DNA, 122 bp, Homo sapiens
ccgaggctgcggcggctgcgagtgtggcggtggcggcggtggttggagcagtggccgctccgcccctctccaccagggctggaccacacagccttcgcccggggccctaagcagccaatcac

SEQ ID NO: 419616 - DNA, 122 bp, Homo sapiens
ctcacagtcaggccggatccgggtgaggttgtagtcggcccgcagggagcgcacggctcgcgtgatgcttagcgccagctcaagggcggcttctgcctcggggtccttccaggagcactgtg

SEQ ID NO: 419617 - DNA, 122 bp, Homo sapiens
tatatacatgtcaactaaagaaaaaaatcaggcttttaaagactcaaagttagttttattcggagtcttactgaggaatgcaaccctggagagtctttcaaagagtttatgttatactggtc

SEQ ID NO: 419618 - DNA, 122 bp, Homo sapiens
gcgctgccgggaagcaggctgaggggcgcaccgggcggcgggcggggacctggggaaggccgggagcgccgggaccgaggacgcacgcggcgggccgggccgcgcgcgcctcccccctcccc

SEQ ID NO: 419619 - DNA, 122 bp, Homo sapiens
tctcaagcgttgcaggctccgggagtgctgcgcggcagtagctgccgcagtatttatccccgcagccggccgcagctctttgttgccggaagagccgcccgctcttagcccggccccccggc

SEQ ID NO: 419620 - DNA, 122 bp, Homo sapiens
caagaaagctgaggcaaagcaatgtcagacctaagtggcctgtaggggacaatctgagatcggaggctgcagggccaaaaaaaaaaaaaaggtttgagaaaaatgagaggttggggcaaagt

SEQ ID NO: 419621 - DNA, 122 bp, Homo sapiens
caaacttatgtattaccacttaaaaaaccagctcccctactccaagggttgcattactttcgtgcttgacaccccgacaaccccgcacccaccccccgactcattttccccaagccaagtcg

SEQ ID NO: 419622 - DNA, 122 bp, Homo sapiens
catatgtgtgtgtgtgtgcatgttaaacggaggacggaatatgaagttcaaattcccccacggcacctggcgtagtccctggcacatggagtgtgtaaagtcatgttcttaagtgaaagtat

SEQ ID NO: 419623 - DNA, 122 bp, Homo sapiens
ggggaggggggtggtggtggtggtgctggcggcggcggcggctgctgctgctgctgctgccgccgccggggaagggggggggggccggggcagggagacacgcagccgcccggatggcggcg

SEQ ID NO: 419624 - DNA, 122 bp, Homo sapiens
caggcctgcttttaggggtgggagcgtggggtctggagcgggcggccagaagtcagaggccgaggctccaggcccgacccggggctccaggccgagcggcgggcggaccccggctccgcccc

SEQ ID NO: 419625 - DNA, 122 bp, Homo sapiens
agttcacctgtgttgtagtatgtgtcagaatttcattttttcaaaggctgaataatatttcgtggcatgtatatatcagatattgtttatccattaatgggggtttgagttgtttctacctt

SEQ ID NO: 419626 - DNA, 122 bp, Homo sapiens
gactggggatctgatccttgtgcagaacctggaggggcctcagacgctggaggtggacgtcgacatgtcggaatacctggaccgctccttccaggccaaccacgtgtccaaggtcaccatct

SEQ ID NO: 419627 - DNA, 122 bp, Homo sapiens
ggctgctgtgttggacagaaaaggggaacttcagctacatgggcatggctgggccagcagcgtgggcagagaaggcagctgcctctgcgatgtgatctgacagattccaacaggcccatctg

SEQ ID NO: 419628 - DNA, 122 bp, Homo sapiens
ggagagatggagactttgatttctcacgttgttgctgctcaactctcggcacatgagcttcgtgcaaccttctaaatatttcttctctgacatgggaagaaggaaagcttacgagaattgaa

SEQ ID NO: 419629 - DNA, 122 bp, Homo sapiens
aagaggaactatccaccatcgcggggcttcggggagtgtggaaggctctcaggagcgggtcggcgtctggttggatgcgggttcgagccgcgtgtacgtactggagggagatggtcagactg

SEQ ID NO: 419630 - DNA, 122 bp, Homo sapiens
cttgttactctcacaaacagcgcttatgagaaaggcagtgtcatgcttgattctcttcctcggtttgcccatgtctgaaaatcctgagtgggtctcgtggcagcctccaaactcgagcagtg

SEQ ID NO: 419631 - DNA, 122 bp, Homo sapiens
cctctggccagtacacccatgaatttgatggagacgaggagttctatgtggacctggagacgaaagagactgtctggcagttgcctatgtttagcaaatttataagttttgacccgcagagt

SEQ ID NO: 419632 - DNA, 122 bp, Homo sapiens
gcgagtggtgcctgggagccggcgttgaaccggcgggatgactagcaaccgagcctttttcgaggttcttagagatgattttaacagcactggcttgacaggtaaacagacgtgcgtttgaa

SEQ ID NO: 419633 - DNA, 122 bp, Homo sapiens
cccacgtctctatctccccaacagtgcgcctgtttatgaaaaaacgagccccccacacgccgtcccaaggctcggcgcctctagtgacctgacggtcaatgttcacctccctagtcattagc

SEQ ID NO: 419634 - DNA, 122 bp, Homo sapiens
acaccccttcccccatgatgtttctaagatttactgtccacagagaaacgcgggcaatcacggcccggggccttagtttccatccttgggctttagctaatctttttgtcaacaaacagagc

SEQ ID NO: 419635 - DNA, 122 bp, Homo sapiens
ggtctgacacccgaaggggaaccccagggactagtcctgccgtagtctaagctctggtctcgcggaggaaaagcaggggcggcccccgtacgcggggcctgcgcccttcagccccagcccca

SEQ ID NO: 419636 - DNA, 122 bp, Homo sapiens
cttccggcggcgcctcgcaccgcgtcggggtgagcgggtgcaagcgacgccccggcatagcggcaccattggacacttcctgcgctgcttcaatcgccgggattgcctctttgaccttgaac

SEQ ID NO: 419637 - DNA, 122 bp, Homo sapiens
cttcataaaaaccaatcatttaaaactaaatgttttgaagctctaaagccagtcaggctccggggaggatgcagatgatcccctcaggccactgagaaacttttaatcagggatcacaagta

SEQ ID NO: 419638 - DNA, 122 bp, Homo sapiens
agtaacacgggggcctctcatcctgcaagaaacaccctggggctcagaggcggggcggagcgatgaccaatgtcccatgactccgctcctggctgcagtgttcagcctcatgcaggccgaac

SEQ ID NO: 419639 - DNA, 122 bp, Homo sapiens
caggatgtggacctggggactccccagaagggcaggagcgggaggctcacggagcgtcggcggaaggcacacaggatgctaaagctttacaaaggcctctcggaaggggaggcgttgggact

SEQ ID NO: 419640 - DNA, 122 bp, Homo sapiens
tgcagccactgcaccgagatgtcctcaggcatgaagttctggatcaggcaggcgagggtgcgcttgtcccggctccccggccactccggcgtcgcaaacgcatagacttccggggcagcacg

SEQ ID NO: 419641 - DNA, 122 bp, Homo sapiens
aaatgacttaaattacaaaaaaagcacagctgtctttaacagctctaggagttcatgcaacgagcctacaatttattgagtaggattagatgcttattgcctatgacactttaaataccatt

SEQ ID NO: 419642 - DNA, 122 bp, Homo sapiens
cggcgccttctgcccgcccgtcccggccgccgggtgcaaatgggtttgttgactgcctgccggcctcgtgatgtctgtgcaacctgacctgaagtcaggatcgcgtttgggcttctcggttt

SEQ ID NO: 419643 - DNA, 122 bp, Homo sapiens
gctgccagcgacatctgcatgcatgtctcattgtgcactgctaaagtgcgtctctagagacgcctagacatgggactctggatggcaagagcaccttcatctttccccggcttcccgaactg

SEQ ID NO: 419644 - DNA, 122 bp, Homo sapiens
tcaaatgaggtgcctgggctggcatcttcgtgtgttcctgggtgaccctgtgagcagctccgtttagcctccagccctgacaacatcccttcccaaagggacggcctctgcacctgccccca

SEQ ID NO: 419645 - DNA, 122 bp, Homo sapiens
ccaggtaatacggccgcagggtgatacggccgcagggtgattacggccgcaaggtgatgccgcccgggtgattacggccgcagggtgatacagccgcagggtgatgccaccagggtgatatg

SEQ ID NO: 419646 - DNA, 122 bp, Homo sapiens
agttggatgacattttcgttgcgaatgtgggacagccctgtgcccagccccagggccaggcgggtggccgaggtttcctgatcagggacgaggatgctcccagggccagcaaggccacgggg

SEQ ID NO: 419647 - DNA, 122 bp, Homo sapiens
cgtcttacagccaaggccgggtcgggagcgaggctgcggcgagtgcggcgctgacagagacgcgcgcgcgcgcgatcgcgctcggaccccggccgctgccgccatcactgtcgcccgcccag

SEQ ID NO: 419648 - DNA, 122 bp, Homo sapiens
cttctcagccgttgggtggccgatgggattgggcgccgtggagcagggggcggcgctcgtcggggaggctcgggccgcgcaggagcccatggcggggaggggcgtctcaggcatggcgggct

SEQ ID NO: 419649 - DNA, 122 bp, Homo sapiens
ttctcattaagtcccaactgtggtttttatcaggaaagcctctttcaaagggcacagacacgaagctccgcggactcgttcatttcctccgttgacccacacacacctccccgccctcccct

SEQ ID NO: 419650 - DNA, 122 bp, Homo sapiens
caccaccaccccagccactgccaccaccgcctctgcctccgcctcttccactggagagcccgaggtcaaaaggtcccgggtggaggagcccagtggtgctgtaaccacaccggctggagtga

SEQ ID NO: 419651 - DNA, 122 bp, Homo sapiens
agtgaataaatcaagaaatcgtcattaaacaccaaaattgtgtttaacagaaccaaacagcgccacgcacttgtgaccctgacctgaagcttctggtcgagaaggcccttgaactcccaggc

SEQ ID NO: 419652 - DNA, 122 bp, Homo sapiens
ctgctattacactaaggaaacaagtggaattttctgaccaaaactcattcatgggtcttccgataaacaatctttacatatactgactgaagatatcaaatttctgtgccacaaaatagtag

SEQ ID NO: 419653 - DNA, 122 bp, Homo sapiens
cggggctgaaggccacgcgggagccccggacgcgcccagcccggcctcccctccccacggcgggcccaggcctcaccccgatgaggtagatcttgtccagactgaagttggggataatggta

SEQ ID NO: 419654 - DNA, 122 bp, Homo sapiens
tattggagagaccgatattagcatttgttgaaatgtttctgagccctctggattttatctcgcctccatgtgggttggcttttctagcagtctggggctgtcaccatgttggaattgttggg

SEQ ID NO: 419655 - DNA, 122 bp, Homo sapiens
atgccgagccctcctctgcggcccgccggcccccgggggacgcaagggaggcgaggggagcgggtaccgcctcgccccctgccgcccctcctggcggactccgggagcctcgggggagtggg

SEQ ID NO: 419656 - DNA, 122 bp, Homo sapiens
cctcttctcagggaaggaatcgtcaaaaatcaatgtttcaacagatctcgcggtgctattcgagattccctattaaaaaaaaatagaattgatgcaaacagcctgttccttccggggttttg

SEQ ID NO: 419657 - DNA, 122 bp, Homo sapiens
gcctcaatcaggagcataggaattcgtgcaaatatcagaccatatgaaatcatagccctccggccaggagcctaggccatagcagcttgttgctctgctgaccctggtgtctgatcccagcc

SEQ ID NO: 419658 - DNA, 122 bp, Homo sapiens
atttatccaaagaagacacacaagtagctgataaatccacgaagcggtgctcacctcacccgttgggatggctgctatagaaacaaaacacaaaggcaacgagcgagcgtcgtggagcgctt

SEQ ID NO: 419659 - DNA, 122 bp, Homo sapiens
taggcagcgcccgaggccggaacaatagcgcgcgcgggcggggcgggggcgggggcggggcgctcctctgggcaccgcccccggcccgccccccgcgctcgcagtcccgctcgcacactggc

SEQ ID NO: 419660 - DNA, 122 bp, Homo sapiens
ttgtggacaactacacatgcattatcttgccttgaaactctgtgttgtcaaggcccctgacggtctcactgcgtcctctgaccactccatgtgtatgaagtgtatgaggacataatctttca

SEQ ID NO: 419661 - DNA, 122 bp, Homo sapiens
cgcgagtgctgcagtcccggatctcaggcgtccgttagctacagaggccaattcctaacccgcgcggctcgaatcccgggggtcccatcgcctgccggccgattcgcccatgccggaggtac

SEQ ID NO: 419662 - DNA, 122 bp, Homo sapiens
caggaaaggactgacaaaataccaactatcctcaacggggtggtgatgacatcgtcccaacgtcccgctccctccctccttccttcccagagctatgcgggggctttctggagaccccccta

SEQ ID NO: 419663 - DNA, 122 bp, Homo sapiens
cgccagttcccacatgtgccagcacctgccgcgggccacgcgatgccccggggatggagccgcaaacagaagctcacagacatccctggaggagacaatgctgtgggagggagagaggagct

SEQ ID NO: 419664 - DNA, 122 bp, Homo sapiens
ggtggctgtctaggcctggcagtcgagcgagagcggcacgggcgggactcaggtgagctccggaggctcctcaactctttggagtgcaaacaggatgagtatgccaagagcatgatcctgca

SEQ ID NO: 419665 - DNA, 122 bp, Homo sapiens
ctcggaattcacaacactccccaaatcgcttcctgcgcaggcgcggagtcggaagggagtcggaaagcagaccccggtgccccctaataaagcccccagccggacgctgccgctaccggggt

SEQ ID NO: 419666 - DNA, 122 bp, Homo sapiens
tgctgcttgggaaggtggccggtggcccggaggacctgctgcgccagccaaacaccgggacgtcatgtgcagccaggagcctcgcagcctgtaccccaagacgggacggcagcagcctcagc

SEQ ID NO: 419667 - DNA, 122 bp, Homo sapiens
acaccctgcagaggccgaaacggagacgagtgtggtagtgatggggtttcacgactctgccgtcggtggcgaacggtgtccgtggcaaccgccttctgacgtcaagagttcttgacgtcatg

SEQ ID NO: 419668 - DNA, 122 bp, Homo sapiens
ctcatgacagcctggggcatgaggggccacacccctgaccagagataaggacatgggggccgagacagggctgggtgcccaccccgggtgaagggcgcacctcccctccagacagccagagc

SEQ ID NO: 419669 - DNA, 122 bp, Homo sapiens
gaagagaacgataaatccgcggcgcactcggcagaacgtacaccgcaccgcataatttagcggggcaatgccgccgggagtccacgccaagttaatggaatatttcctgtaaatattatttt

SEQ ID NO: 419670 - DNA, 122 bp, Homo sapiens
aaaaattcacaggctgcattaacagctagaaaggtttcatttataaccaacaggaaattgcggggtagcaaaaagattgcgcagacaaaatcagaatgctctaatgagcaatgtgctagccc

SEQ ID NO: 419671 - DNA, 122 bp, Homo sapiens
attctgccgcccaatagcggtgcgccagtgggtaggtctagcagtggcgcagcaatagagcgctccggagcgtctcattggctggatcaaacccaagcgagccattgattggtcgacgcccc

SEQ ID NO: 419672 - DNA, 122 bp, Homo sapiens
ggcggggccgggggcggggcgtgagctggccggggcggggcctatggaggggcgggaccgcggcgccctataagtactgcggagcgaggcgcgcgcccggccagagagcgagcgcgcaacgg

SEQ ID NO: 419673 - DNA, 122 bp, Homo sapiens
agccctgcatttggggcaccagcttctcttcttttcccttccggggagtctaactctgggcgggcctgagagggggcagatggtgggaggggctccttctgacccctaagtccccaagctct

SEQ ID NO: 419674 - DNA, 122 bp, Homo sapiens
ctctcgccgcgggtgcacctggctgggcgtgggccagcgaggggcccggcacccccagcccgcgggatgacctcacctgtaaagtgtgcgtagacaccgccctgcagccctccctcccggcc

SEQ ID NO: 419675 - DNA, 122 bp, Homo sapiens
cgctgaccgcggctttagtgttgccagggcaggtgggagtcccagctgggccggctttggcgcgcctcgcgcggctgccgagcggtggagcagccttcccgccttcccgccgcgtcgccggc

SEQ ID NO: 419676 - DNA, 122 bp, Homo sapiens
caaggtacttaattaggagatcatttatattgcctggcatggtgactcatgcatgtaatccgagcactttgggaggccaaagtgggaggactgcttgaggccaggactttgataccagcccc

SEQ ID NO: 419677 - DNA, 122 bp, Homo sapiens
tggccgatagagttgcactgtggatatatcaagcgtgtgggtctttcgcctgctgaggggcgtctgggctatgccagcgtttgaagttgggaatacgctcagactttgtgactttaccttgc

SEQ ID NO: 419678 - DNA, 122 bp, Homo sapiens
cagggcgcgtcaactggctctgctgcgcgaagtggagatgaactggtacctaaagctctgcgacctgtccagcgagcacaccaccgtctgcaccacaggcatgccgcacaggtaagctgccc

SEQ ID NO: 419679 - DNA, 122 bp, Homo sapiens
cagagatagtggcaggcaagagagaaggggataaggagttaccttgaagataggatgtatcgacggcaggcacctcatggtggccacaacaatgacctcagccatcaagtgtcccctcagaa

SEQ ID NO: 419680 - DNA, 122 bp, Homo sapiens
cccccaacctaaagacgacgtactccaaaagctcgagaactaatcgaggtgcctggacggcgcccggtactccgtggagtcacatgaagcgacggctgaggacggaaaggcccttttccttt

SEQ ID NO: 419681 - DNA, 122 bp, Homo sapiens
gcggaggaggcaaaactctgtagcccaattggttcaactttctaggcattggttgtgcgacgtgcagttgggtgttgtggagaagaattgggcccttcctgttgaccagtgccggctgcagg

SEQ ID NO: 419682 - DNA, 122 bp, Homo sapiens
aagtggcctgtgtgcctctctttgccactttgatggcttatgaggtgtactatggactgacggaggaggagggggcagtgcctgcagagcaccaggtgaggtaggggagaggccaagccagt

SEQ ID NO: 419683 - DNA, 122 bp, Homo sapiens
ggtgttagaggatcatagcaaattagtttaagccattcgatttatatatagcacatggtccgtacctttgttttaaaaacaacgacaacaaaagactgttaggaatacactggataataaat

SEQ ID NO: 419684 - DNA, 122 bp, Homo sapiens
gtggtcacaagtgcagccaagaatgaggggctatttgggtcaggcaagcctgccatgtttcgggaaagttgccccggggttaggaaacgctccatctgagggaaatggagctccccaccggt

SEQ ID NO: 419685 - DNA, 122 bp, Homo sapiens
agatgtccccgggatgggaggagcccggcagctgcagatgacccctggatgggcagagcccggcggccgcagacgtcccgccggccgggtccccagggccgcagacgccccgcagaggccgg

SEQ ID NO: 419686 - DNA, 122 bp, Homo sapiens
ctccagccaccaaagtatctgaacccagaactcacaacaggaacgtgtactcaacaggaacgtgtactcaattagcttttgtgggaaagggttgaagattcttggtaactgcttcaacaaac

SEQ ID NO: 419687 - DNA, 122 bp, Homo sapiens
gcaggcccagctcgctgcagagccttttcggcctccccgaggccgcgggcgcccgggactcgcgcgacaaccccctgcgcaagaagaaggccgcgaacttgaacagcatcatccaccgcctg

SEQ ID NO: 419688 - DNA, 122 bp, Homo sapiens
cgagtttctgagcttccgtgggtcccgtgcatttacgactgtgacgacttagactcaggacgtgcacgtgatgccgtactgggctttttccattcagcgtgattacacggtgttattcatta

SEQ ID NO: 419689 - DNA, 122 bp, Homo sapiens
cgctagggaactggatccttgaggctaagactgggatggattctgatctgtttgtcccttcgttccgcagagctaccctccgcttctaccgttcacggggattccggaaccctcagagcccc

SEQ ID NO: 419690 - DNA, 122 bp, Homo sapiens
tgcagctgccctcggcgctcacgctgctgccgccctccttcacctcgctgtgtctgcccgcgcagaactggtgcgccaagtgcaatgcctccttccgcatgacctccgacctggtgtaccat

SEQ ID NO: 419691 - DNA, 122 bp, Homo sapiens
ttcacgccattctcctgcctcagcctcccaagtagctgggactacaggcgcctgccactacgcccggctaatttttttgtatttttttaagtagagaccgggtttcaccgttttagccggga

SEQ ID NO: 419692 - DNA, 122 bp, Homo sapiens
tatgaccaagaagagctgaagaaccgttaccaatcatttggaaacaatcactttgctgagcgatcattcctaactgctcctcagacagagtacaggaataacatgattgttattggcctgta

SEQ ID NO: 419693 - DNA, 122 bp, Homo sapiens
catgcagagaccacgacacgtggcatggccatgctcagagggtacatgcaacaacccagccggacgagcccattgtcgcttgccaggaccaactcggtcctctctgctccgctcccctcact

SEQ ID NO: 419694 - DNA, 122 bp, Homo sapiens
cccaggtggaccacgtcccaggcggaccacgtcccaggcggaccaagcccaggtggaccacgtcccaggcggaccatgtcccaggcagaccacgtcccaggcagaccaagcccaggcggacc

SEQ ID NO: 419695 - DNA, 122 bp, Homo sapiens
aatagtcaaatcttttggggggaaataaaaagcaaagagcatactcacattcctttcaggcgctgccacattttttcagtctgttctcctgtaagatacttaaaagtggtgttttccaattc

SEQ ID NO: 419696 - DNA, 122 bp, Homo sapiens
aggaaaggtcagggccaccaaacctatcgcacaaccgctgaagtcagccaccctggcggccggggagcgaatgggaagcacttgacaacacctgtcttggagttgctttttgaagctttggt

SEQ ID NO: 419697 - DNA, 122 bp, Homo sapiens
gctgaactgttagatgacgggcagtgtagcaggtctgcttgcaccagctctccacacacacgtgagtgataccctgcactacatcatgaccatcaggacatcaccaggtgacgggaattttt

SEQ ID NO: 419698 - DNA, 122 bp, Homo sapiens
cttgagtacaagccaataatgccagcttcttttacaggtgcacaagttgaacttcccagacgggattcgaacctacgatctccagtagccaaagccctgcctcggcaaccctgaacgccaac

SEQ ID NO: 419699 - DNA, 122 bp, Homo sapiens
ggttccattggcccaccggcagtcacgtggctgcccatagcagaaacgtgtgtggggttgcgggggaacaatgtgaacgcgtgtggagtgacgctactggctgaaacacttagcaattattt

SEQ ID NO: 419700 - DNA, 122 bp, Homo sapiens
ggtcgcggcaccccggctcccgccccgcgcctctggagggaggtaccgagggacgcgcagcgaaggggctttgctaattgccaaagcaggaagtgagctcgtggaagaagcgaaggaggaga

SEQ ID NO: 419701 - DNA, 122 bp, Homo sapiens
agtcccccgggggctcggatgatgaatcatgggcggtgtttgctggaagaatttttgttccgcttcgggcaacaaggaacccaaacctctcactgttgtggggagaaaagttggaaatcaga

SEQ ID NO: 419702 - DNA, 122 bp, Homo sapiens
acagcaaacagcatccccacaagctcgcaggaggacgtctgtgaggttcccgtctacgcacgtgcccggcttcagcgaccccaggaaaggagggtctccacttaatcttccaagatctacgg

SEQ ID NO: 419703 - DNA, 122 bp, Homo sapiens
agtggtattccttcccgaagtagctatgctgtgctttgcagaatctcagctcagttagctcgtccactgtgtaaccgctccctactttaggaatgtggccgagcattcaggcagaaccattc

SEQ ID NO: 419704 - DNA, 122 bp, Homo sapiens
gagaaactgtaactgcacacggttttcagcctcatgcctccgtggaacctgcctgtcaggcgggcacctggaatctcaagcaactttctcaaggtgaggcgatttttttctttcatttctca

SEQ ID NO: 419705 - DNA, 122 bp, Homo sapiens
aactatgccatgggagcagagacagctcttccctgggagcagtgctttactgagctgcaacgctctccccagcccaggggcaggagttgaacatatcacttgaatcacttctggtttctaga

SEQ ID NO: 419706 - DNA, 122 bp, Homo sapiens
caggaacatagtcgtttttactgcagacttgccctagcagaggcccattgctggaggttccgtcaaagactttaatgttttcactttcacagcttccatctggatcaagcctgtggaaaaaa

SEQ ID NO: 419707 - DNA, 122 bp, Homo sapiens
tgagggtgctgtgtccccgggaagtaccctctgcgggggaccctcttcccaaggtgggggcggggctgccctctgctggagacgcggagcattgcggctcggtcccgggacatccctgggag

SEQ ID NO: 419708 - DNA, 122 bp, Homo sapiens
tggctggtgttctttcatctccacggggcattccacccaacaatcaccatctgccagggacgcctatgaatgtcaaagttctgctaggtttctctgaagcctgcttctgctttcagcagctt

SEQ ID NO: 419709 - DNA, 122 bp, Homo sapiens
agccttggtctcccacctgtaaagtgatcttaggtccctcctggctctaaacttcaggcacggtaaaccaacaaaaaatgtgaaatacatacatctaccactagatggcataacactatgat

SEQ ID NO: 419710 - DNA, 122 bp, Homo sapiens
gcaaagtagcacaggagcctcaggtcaggaggctaagcacgctgacctacactatgtacacgtctctctcccacgacggagagagaggcctctggggcagagccctgcttgcagtccgggaa

SEQ ID NO: 419711 - DNA, 122 bp, Homo sapiens
cgtccacaaagaaaatcaaaacaacccgaaaacaaaacattgcctggtggtggggaaccacgaccctgctgcacgcgggatcagcacttggggttcgggctcgctctcggcgcccctcgggc

SEQ ID NO: 419712 - DNA, 122 bp, Homo sapiens
agaaaggccaccaccatctccacgagaaggtcctaagtctttgttactaacctatcaggccgtaactcagtttcttggagggcaaagagtccctttggatgactattttcttgggaattatt

SEQ ID NO: 419713 - DNA, 122 bp, Homo sapiens
attaaggacaaggaatctaagtgaatgggcagtaggggacatgaaacatggcagggtcaccggagcaagccaaaacacttttgaagagccagtgagtcaaacctgtggaaacctatgccaga

SEQ ID NO: 419714 - DNA, 122 bp, Homo sapiens
gccttccctccccctctcccccactgcagtgctgactgtttggggaggggctccaccctccggcttccctgatacactttgggttgtatacagcccacctgcctcgaatgagggattctgcc

SEQ ID NO: 419715 - DNA, 122 bp, Homo sapiens
aggatgaaataacagattacatcattgaagtgaactgccctgctcagtgctcagtaaacccgtttcatttttttcctttggtggataattaaatttcttggaatgtgtgatacaggcttggt

SEQ ID NO: 419716 - DNA, 122 bp, Homo sapiens
gggggcgccaggagctgggaaccccatgaaatggcgccggggtctgtgcccccaccaggtcgtggggagccctgagctgagggtgcctggggattgagggcacctgagccagggaaacccag

SEQ ID NO: 419717 - DNA, 122 bp, Homo sapiens
tcaaagctcttggaacagtcgagcaaatgaaaactcttaaagccataaattgtccgggtgcggtggctcatgcctgtaatcccagcactttgggaggccgaggtgggtggatcatgaggtca

SEQ ID NO: 419718 - DNA, 122 bp, Homo sapiens
ggagccactggtggggttacttgctggcggtcggccactttcgcccctccctcgccagcccgccagctccctaaggttttgtggttttttgtcaccaccacacctcagtgttgagctaagtg

SEQ ID NO: 419719 - DNA, 122 bp, Homo sapiens
ggctttaatttactggtacattatcttgacatttctgcagcagaatagattagttggttccggctctgtaaaggaagtcaaggtagctgatttgactagttgattaacattcctaattggct

SEQ ID NO: 419720 - DNA, 122 bp, Homo sapiens
ctatagtctagtggaaaccataacctcaagattcacagtagaggaacaacctaggccaggcgtggtggctcatgcctttaatcccagcactttgggaggccaaggtgggcagatcacttgag

SEQ ID NO: 419721 - DNA, 122 bp, Homo sapiens
gtgggcagcccaatggagatgctccacccgagcagccgtccgagacggtggctgagtctgcggaggaggagctgcagcaagcgggagaccaggagctcctccaccaggccaaagacttcggc

SEQ ID NO: 419722 - DNA, 122 bp, Homo sapiens
tttcgtaggaaggagccgatttggcgaaagttacgtaaacaatggaattgtctcagtttgcgcctttgtttcgtttgacagccctccagggagtcatagtgattgctggagacggtgaacta

SEQ ID NO: 419723 - DNA, 122 bp, Homo sapiens
gacccctggtgaagacgctaagaaatgatggtgctctaaaagaagtctctttggctgtttcgtttatcccatcagaaaagaacagagattcaaatcttgctatcaccatattgccttttcat

SEQ ID NO: 419724 - DNA, 122 bp, Homo sapiens
ttgagagcagatacggcctcctaggaaacaagatgagcacgctgtggaaagcagggcattcggacagcaagaaaaggctcctgaagttagaaagacgaagcagaaatgaaaattttgataga

SEQ ID NO: 419725 - DNA, 122 bp, Homo sapiens
cacagcccttgccactcgtgtctggctcacttttggcaggtgtgggatccaggctagaagcgtgagccgagtgcagtctcccaggccaagtgggtggaatgagcccagcaggcccgagcaaa

SEQ ID NO: 419726 - DNA, 122 bp, Homo sapiens
cgtaaataaaagacacaattcccagcacatccgaattgccttgtttttcgaaccaaagcacgctgcgttgcgaccgtcaccacatttgaaagcatgcaccaccagcagcacggggtgacagg

SEQ ID NO: 419727 - DNA, 122 bp, Homo sapiens
gcgttgctcttatgagctgtaacacgcactgcgaagatctgcagcttctctcctgagccccgccagaccatgagcccaccgtgaggaacgaacaactccagacgcactgcgttaagagctgt

SEQ ID NO: 419728 - DNA, 122 bp, Homo sapiens
tgtgtacatttttgcattgcaggagtcttgggtgggtgtacaggccagtggcggggtagccgccagtcctaaggaacagagttggagcgcagcacagggccctggtggggcttgagagagag

SEQ ID NO: 419729 - DNA, 122 bp, Homo sapiens
gatgctccaggcctctggacttaggggtttggagaccgtgcggaggtgtcttcgctctttcgtgccgcccctcaagcctcttaatttagggatggacacgaaatggttgaaaaccattcgtg

SEQ ID NO: 419730 - DNA, 122 bp, Homo sapiens
aagaagaacggggttcggccccacgcgtgcagtcatgttcctattaataaacccggtgaacgcactggagcttctcacagtggcacttagtcacagcccctcagcgctgtggggcctttgag

SEQ ID NO: 419731 - DNA, 122 bp, Homo sapiens
ctcctggacttaagtgatcttcctgcctcagcctgccaagtagctaggactacaggcgtgcgccaccatgctggctaattgtttaatttttttgtagagaccagcccaggctggtgtcaaat

SEQ ID NO: 419732 - DNA, 122 bp, Homo sapiens
ggggcatatctctctgtttctatggttcctcgttgagggaaaaaggctttcaagttcttgcgtgagcactgacaggcttttatgaatagttggtgacacaggtacaaactgggctgttctgg

SEQ ID NO: 419733 - DNA, 122 bp, Homo sapiens
aagggggctccggacacgggctggcggggcaaatgtaggccccaggaggagccgctgcggcgcccggctcggcggtaacagcagccccagcggccgcggcggcagagccgggaagccggaac

SEQ ID NO: 419734 - DNA, 122 bp, Homo sapiens
tatttcaaaaatgagtttggaacagtacatgcattattttacagtattagtcaccaggggcggctgtaccaggcacacacactctgagacagtctgatgaaaagctgcctgggtcaatggca

SEQ ID NO: 419735 - DNA, 122 bp, Homo sapiens
gcctggtgtgttggctcacatgtgtaattccagaactttgggaggtcaaggtgggaggagcgcctgggcccaggggttcaagacgagcctgggcaacatagtgagacctgtctctataaaat

SEQ ID NO: 419736 - DNA, 122 bp, Homo sapiens
tggagcaggggacggcgctcgtcagggaggctcaggctgtgcaggagccccggtggggagcgggtagagggtcgggggaggcttaggcatggcgggctgcaggtcccgagccctgccccgcg

SEQ ID NO: 419737 - DNA, 122 bp, Homo sapiens
cctgaagtctccagcctgccccactgcccaggcttggcccacccaccgtggtgcccgccccgcctcccttagggcgcatgtctgttcccaccagagggcgctcctggacagacactctccct

SEQ ID NO: 419738 - DNA, 122 bp, Homo sapiens
agttccgattgatgctgttgcgcctccgctccttcttgttcagcaggatgttggaagctgcggggacagagggtggagggcagagctcctgatacagctcctccaggtccttgtgcccccac

SEQ ID NO: 419739 - DNA, 122 bp, Homo sapiens
tgagcacattcttcacaccctgggcacttgtcccattcagctagttccaaactgagagcacggtcttttctgtctagtgtacttaacccaccgaggccctgggcacttccacctcagctccc

SEQ ID NO: 419740 - DNA, 122 bp, Homo sapiens
tcccggtttgtaaaaccacctcaagaaatccttggaccttcagtccccagaagtagtccccggtccctgcccccagagctggcccctttccttcctctgctgcacccaagaataggagaccc

SEQ ID NO: 419741 - DNA, 122 bp, Homo sapiens
ttggcgcgctctccagttccctcctggtcacctgctgcctgatggtggctctgtgcagtccgagcatcccgctggagaagctggcccaggcaccagagcagccgggccaggagaagcgtgag

SEQ ID NO: 419742 - DNA, 122 bp, Homo sapiens
gcgctggccaccgtggaagccgtacaggttcatcttgtatttatggtctggctccaggcccgagatggtgaccccttcctcgtgccctggcaccctcactgccttgggctgcccatctccat

SEQ ID NO: 419743 - DNA, 122 bp, Homo sapiens
aaaaaaaaccacaaatgttctaaatggatgggaggagaataaacgctggaacgacaaggacgaaggccttaggttgcgcaaactcggatgtcactgaagtttttctgcctttgcgctgcaaa

SEQ ID NO: 419744 - DNA, 122 bp, Homo sapiens
atggcagtgtgacccagtcttgggcaaaatacaataggcctagtaagtatatccctggggcgcgatgtgtgagaaactgtaagtctgacagatccgcaacggaagttgttaagcaaatcgct

SEQ ID NO: 419745 - DNA, 122 bp, Homo sapiens
ccaaagtgctgggattaaaggcctgagccaccatgcctggcctgcattcattttcaattacgcatatcaaatgatcacaaaatttattggcttaaaatagcaagcatttatggcctttatca

SEQ ID NO: 419746 - DNA, 122 bp, Homo sapiens
gccgggccgccaattcgtgcagccatgtttgccactttcctggaggcagagcgcatgcgtcgcagaaccgaaacgtttccgtgaacaagttgcttgctttctgtttcccggactaagcctgt

SEQ ID NO: 419747 - DNA, 122 bp, Homo sapiens
ccttgccgtcactccgctgcgtgggcggggctctgagggggcacaggtagaggcccttcgcgaagggattagcatagtcccaccccccggcgcgagcctcgggccgggcgctgattgggcag

SEQ ID NO: 419748 - DNA, 122 bp, Homo sapiens
ggctcagacaggctgcagaaggcagggttgagacaggcacagggaaagttatggagccagcgacaggtttttaaagaaacaggtaatgattaggttggattttaagaagaaccctctggctg

SEQ ID NO: 419749 - DNA, 122 bp, Homo sapiens
agatgatgcccaagactccggaagcaccaggaccagtgatacctgagtgagaggccatggcgagagagagcaaggccagcttcagtgggggcttctggagccagatgtgttcgccatggctg

SEQ ID NO: 419750 - DNA, 122 bp, Homo sapiens
actttagagggatgagggagacagaagaatgacagcaggtgttggacagtccaacgtctgcggctcttacaagtggtaaggaagaaatgagactgggccccagagttcctattaataaaata

SEQ ID NO: 419751 - DNA, 122 bp, Homo sapiens
gacaacacgtccttcaatttcaaagcgagcgcattgctttattcattcaaagagttttaacggcacaatatcccatagcatacacaaaatctcctaaggcgtacattatggtaaagtttctg

SEQ ID NO: 419752 - DNA, 122 bp, Homo sapiens
gcatatactcaagtcctcattctatacctttgcattgctaaaggcactgataagtcctgccggaaaagaaaaccactgaaatgtttaaccccacatgtcctgcaaactactaagagaaattc

SEQ ID NO: 419753 - DNA, 122 bp, Homo sapiens
aaaaaaaaaaaaaaaaaaaaaaaaaaaaaaatatgtctgctaaataatcacagagtgaaacgaagaggaagaaactaaagtacagtttggaacatagtacagtgcccctgggtactgaatca

SEQ ID NO: 419754 - DNA, 122 bp, Homo sapiens
ggaaagagaccagacctggaaaagacagagtcaaagctgggtgagcaggccttcgaagggcgtggctcagcaaagataatccatattgtagtgcaagaggattcttgtggaatatgttttac

SEQ ID NO: 419755 - DNA, 122 bp, Homo sapiens
taaaatacacacagctcaatctcgtccatataacagcttctgaaatgcgaggaggcctggcgggaatggtggggtgcacggaggagggccgcgctagacgagaaaattctacaacagagcat

SEQ ID NO: 419756 - DNA, 122 bp, Homo sapiens
gaagttgggttaagagttaggttgcttggaggagtttctgaggtttggtggtgacttccacgttggtccttttatatatctgaaccagctgctgtttacaaaattgttaacatattttcttt

SEQ ID NO: 419757 - DNA, 122 bp, Homo sapiens
agtgtgagattttttaccaggtattgcgcttaagggacatgattttccattttcttcgcccggacaacttgaatgaaatgggcactgttgattccacttctgtcgaggagcttcggggctca

SEQ ID NO: 419758 - DNA, 122 bp, Homo sapiens
tccgggaagccttgaaactcaactcctgggtgggccaggaaggttgtccgagttgggcagcgccggccggggcccccctcagagccgagctgctcgcctccctcgagacccagcgcagcctg

SEQ ID NO: 419759 - DNA, 122 bp, Homo sapiens
gcttttaaaaagtacttggatgccaaggaaaccaaagtaattgtgtggtgacttttgaagcggctttttaaagttataataattgaaagcttatgtgtttacacagatcttcagattgatat

SEQ ID NO: 419760 - DNA, 122 bp, Homo sapiens
ccaatcccaagcccgccagccctgccagacagactgggactgtcccgagctccggcccagcgagcctggccgctgtggtgtgttgcctgggaccctggccaggccatcagtggccacagcca

SEQ ID NO: 419761 - DNA, 122 bp, Homo sapiens
agctggcgggagccatggcgtacctgggggcccgcgggctggtgcaccgagacctcgctacgcgcaacctactgctggcgtcgccgcgcaccatcaaggtggctgacttcgggctggtgcgg

SEQ ID NO: 419762 - DNA, 122 bp, Homo sapiens
atatccacccccaaacagccacatatacttcttattaagcatcctctaggagctggtctgcgccacactactttctttgaaaattctgtcttctgtaattacatttccataattttgcaaat

SEQ ID NO: 419763 - DNA, 122 bp, Homo sapiens
gccgccgcgctctgggtcgggcttccgtggggtttcctggcggctctggaggccacaggacggggttgtctttgtgtcattcatcacccgagtttgccctgtttgacattccctttacagtt

SEQ ID NO: 419764 - DNA, 122 bp, Homo sapiens
gacagagaagccactaaaacgggaggttctcactcagcctcagacttcgatctggaggaccgagaacagctgccctttcctcttctaggctgcagaaaaatcgcttccatgctctcaagtaa

SEQ ID NO: 419765 - DNA, 122 bp, Homo sapiens
tccggggcagggttcaatcccgcatttgccgaagtccctggggctggccggggtggaagacggggagggctctatgtctgggaaggggctctgaagaccacgtgggggcgctcgaaggggcc

SEQ ID NO: 419766 - DNA, 122 bp, Homo sapiens
cagccatagtaagtgacccatgttggacattccagggtggttcggttggcagcaattgatcgccaaaacagaaatgaagactcattgatttgaggtcccacggctagaaagtatctgtggta

SEQ ID NO: 419767 - DNA, 122 bp, Homo sapiens
gagtagtttgagaaccacgactctgggagcggcctgaggatgcttaggatgagcgcagagcggaaaggaggattcgtgaaggctctctgatgccagtcaaggggttagactttgccccgcag

SEQ ID NO: 419768 - DNA, 122 bp, Homo sapiens
acttgttccacctctagatagaaatcaaaagcaaggaactttactgtttcgcccaagaaccggaagaaagatctagctcagcatcaaaggcttgccaaggttgttgttggaactccataccg

SEQ ID NO: 419769 - DNA, 122 bp, Homo sapiens
gattacaggcaggtgccatcacgcccggctaatttcatatttttagtagagacagcgtttcgccacgttggccaggctggtctcaaactcctgacctcaggtgatccagccgccttggcctc

SEQ ID NO: 419770 - DNA, 122 bp, Homo sapiens
catggtccacgtagcggcggcagccggatgtggctgccgggttggccagcacaggcacagcggagaagctggctctctgcagctctgcgggggcatgcagccagtgccgggccaggtagacg

SEQ ID NO: 419771 - DNA, 122 bp, Homo sapiens
ctctattgttggtgaagattagccgaactgaacatgccatctctattgctgttattttcacgggtttgggtgtcaattatgggttccctagaatttgcccgtaattgactatgtcccactat

SEQ ID NO: 419772 - DNA, 122 bp, Homo sapiens
aaaaagccaggaatctaaaggcctggggtctagtgcatggcccacagcatcctccctgtgcggggccggtttccctatctgacatattacacagggatgatcatttataatgccagcaaaca

SEQ ID NO: 419773 - DNA, 122 bp, Homo sapiens
tcacttcctagatggggtggtggccgggcagaggcgctcttcacttccagacggggcagccgggcagaggggctcctcacatcccagacgatgggcagccaggcagagacgctgctcacttc

SEQ ID NO: 419774 - DNA, 122 bp, Homo sapiens
acaagcatgagccaccatgcccagccatgcctgattattttttgtattttttttggtgggcggggaggtagagatgcgatcttgctaggttgcccaagctggtctcgaactcctggcctgag

SEQ ID NO: 419775 - DNA, 122 bp, Homo sapiens
gaggtcacatgcattttaggggaggagttgttcagtccgaattggatggttctttgccttcgatgaggtagagaggatttgaatatggagggaagttgtactgctcaccctctaggttcctt

SEQ ID NO: 419776 - DNA, 122 bp, Homo sapiens
aatagacatggttctttgacaatctcttcactttaggaaacgaaggcactccttaccctgcgagtgggcaggaaagggtggctcttcattgaaggagacccattctgactggtgggtggcaa

SEQ ID NO: 419777 - DNA, 122 bp, Homo sapiens
cttggggagctcggcctggcccctgctccctggagttgaggcccaatgtacctgcagatacgccccagggactgggtggagtcctgatggcactgctgtccagacggtgaccttggcctcat

SEQ ID NO: 419778 - DNA, 122 bp, Homo sapiens
cagagacacagcattgccccttatggcagcctctccctgcactctctgcccgtctgtgcccgcctcttcctgcggcaggtgtcctagccagtgctgcctctttccgccgctctctctgtctt

SEQ ID NO: 419779 - DNA, 122 bp, Homo sapiens
gctttctgcctcgtctggaggtcctctgactgcagctcctccttcagcttgggcagggcccgatggccataggcagtggtaatctgggtggcattgatgttaatgggaagctccaaggagtt

SEQ ID NO: 419780 - DNA, 122 bp, Homo sapiens
cagatgccaggtcagccaggagctcagggatccaaggcccctctcagactcctggtgcagcgattatagagttcagccatttaggagagtgtgacagagtggcggcagatggcccctagcag

SEQ ID NO: 419781 - DNA, 122 bp, Homo sapiens
agctggtaaagttttaacgtaggcccttgtcaatgcttcagaaataagcctctggcggcgcgacagagcaaaactccgtcaggaaagtaaggaaagaaaggaaaggaaggaaggagggaagg

SEQ ID NO: 419782 - DNA, 122 bp, Homo sapiens
agccgggagcctgcccggagaaggccgtgcagggcggctgaacgtgtcagggcacctggccgggcctggggccgcgccgaggacaccggccaccaggcagcgtcctgggccgggagcctctc

SEQ ID NO: 419783 - DNA, 122 bp, Homo sapiens
tttctggctgactacaccagattctaccgtatagacacaccatacaacataatacatatacgtatgtgtaaacacagctaaacacatgtacacacaaagattatatagttttccttttagaa

SEQ ID NO: 419784 - DNA, 122 bp, Homo sapiens
acttcaaaacaggtgctggacatcttcccattgccccatgccagcccctgctctgtgccccgggaagctgactgtaggtacaggatccatggggcctcgttgctccctggcctccacctagt

SEQ ID NO: 419785 - DNA, 122 bp, Homo sapiens
cagggtctgccggctcccgggcccatgttaatcccgggcatgggggggccgagggaattgcgtggtggtctcatgccgctgccataattctgtgggttgggacccatgggccccatgcctcg

SEQ ID NO: 419786 - DNA, 122 bp, Homo sapiens
cagccatcacctgccaagccgcggctacactgtccggagtgcgtgtttaccctgagaaagcgtagcctagtgcttctgaggaaccgcagacccctaggcaggagccaggagaagaccgccaa

SEQ ID NO: 419787 - DNA, 122 bp, Homo sapiens
aatcagtaattgctgaaggtccactctgcacccccactgcaacaggcaccagaggaacagcggtcagtcttgggcacgttgctgaatcccatgagtgatggccaattcaggaggcgaagcac

SEQ ID NO: 419788 - DNA, 122 bp, Homo sapiens
ctcagtgtcccatctctgcagaaagagaggcccccttggccacatgaacccccatcgctgcgggaaggccatattggctaccaggggccgggccctgccacctggcctagccagcctcacat

SEQ ID NO: 419789 - DNA, 122 bp, Homo sapiens
acagaccgccggcctgggccctccaggaattccctgcagccttgcccggtccccgactctcgctacccaccagccctcccaggcacccaagagcctcccagcggcgggccagggccggcttc

SEQ ID NO: 419790 - DNA, 122 bp, Homo sapiens
ccagtagccggggaagcaccacagtggggtcaagtggcaaggcaagagccgcagctgtgccggtgcctcgctttccggccctgggacctctcacctgcaaagtgaggactttgtagtgggtg

SEQ ID NO: 419791 - DNA, 122 bp, Homo sapiens
gttgactggccctgtacatatttggctaattccttagatctaagaacggcttctcttgcacgactgtttttccggatggcaaacaagaaacacagcagcagtctcttgactgtgcctgcttt

SEQ ID NO: 419792 - DNA, 122 bp, Homo sapiens
accgttcggattcggtggccgggaaataaataagccaattcctttggtgactaccccccgcggatttccagacccttagctaaatctagccacccagaaaggggaaaggggaaaaagaaaca

SEQ ID NO: 419793 - DNA, 122 bp, Homo sapiens
taaccaggggaacccatggttaggggaactgaggctgggtccgccgtgaagttgtaacagcggtggcaccaggctccccgatttgaggggttgggccttcggaaagcaaagcttgcagcgtc

SEQ ID NO: 419794 - DNA, 122 bp, Homo sapiens
ttgcaggactatgcctgacactgtgcctgggcgtggtctgggcagtctcttcacatcatccgcgaaggcatctgggctttttcctgtctgtcagcggatgactccttcctccgtcgtccctc

SEQ ID NO: 419795 - DNA, 122 bp, Homo sapiens
gtgacaatcagcacacagtttctgtccgcccgtcaataagttcatcatctgtggtttctgcgagctccagaggccttcggagtgcaccagcggccccagatattcaggaggactccacaaca

SEQ ID NO: 419796 - DNA, 122 bp, Homo sapiens
gggacactgtgtggctgtaatgcctgcaaggccctggaaacgtgggtcacttacaagctccgagaagccgcggaccacctgccgccgcttcaggttggtctctccatccaggttggcggtct

SEQ ID NO: 419797 - DNA, 122 bp, Homo sapiens
ttccggacccgaggaaggaggagcacggctccaccaacagggcatgcgcacatctgaggtcgcttagggctcggattaccgcagcccagattttaaagacccgaagggtgttggagggttta

SEQ ID NO: 419798 - DNA, 122 bp, Homo sapiens
ttattaggaaggctggagatcatgaagtagaaaagcctcctgttagagatgaggatgccccgcccttcggccccagagcaaaggatttccccgcttccggcgtggcccaaagaatcaagacc

SEQ ID NO: 419799 - DNA, 122 bp, Homo sapiens
gcgtctcaggttcctcgtctgtaaaacgggatgagaacagcacctgcctcacagagtccgcgtgaacatcaaaggtgcaggatgtttgggggctccgctcggcgtctccggcgatgaccatg

SEQ ID NO: 419800 - DNA, 122 bp, Homo sapiens
ggcctacatcctttgtctgttaggtgcttccacatccttatgtcttaaatggccaaaatacgtcacccccactgccaaaacacacaggtcactcgaggtcacaatctggaacataggctggc

SEQ ID NO: 419801 - DNA, 122 bp, Homo sapiens
gttggagaaattcaaggaatggctgttgtaatgtacatttcacgcttagcctttcctccccgcgctgggaagaagtgctgcgcaccgcggctccgccagggggcaggagaagtcacattaca

SEQ ID NO: 419802 - DNA, 122 bp, Homo sapiens
cgatccccggcctgaacgggtaggaggggttgggggattccgccatcccttgttttgaggcgggaacgcaaccctcgaccgcccactgcgctcccacccacacccagagtaataagctgtga

SEQ ID NO: 419803 - DNA, 122 bp, Homo sapiens
cagggagatgtttggaaaggctgtggctgataatgagacgcgggtaaccctggtggatatcgttccatcctggtgcgtgccttcctggttgcctcctgctgcctgctcctggggagtggagt

SEQ ID NO: 419804 - DNA, 122 bp, Homo sapiens
cttagtgcccccctcactgccatgcctgccaccctcctacccctccacgttaaatatgcacgctggcgagcaggcagcggagaacacagaccttagagttccttggttttggatcctagctc

SEQ ID NO: 419805 - DNA, 122 bp, Homo sapiens
ggccccgccattctccttcccggctccctcttgtgccgtcgcagattcctgggcgcagcacgaggctacacctggtcctggatcctctctatttggccagaagggagggagtctttttgtct

SEQ ID NO: 419806 - DNA, 122 bp, Homo sapiens
ccattttggctagtaagggtcaaagaaagtcttttcatagaggtgatatttgagctgagacgtgaaacatgaacttgtgctagccatgtgaaaagctggggagacatttcagacctgggaac

SEQ ID NO: 419807 - DNA, 122 bp, Homo sapiens
aggcggggccccaggcggagagaccttgccctttagaaccggcagagggagggcccggggcgggacctgtgcttctcagcctcgcactcagcgcctctgtttttcgagtttttggaggcgac

SEQ ID NO: 419808 - DNA, 122 bp, Homo sapiens
aacaatcaaatcctaatcaaagacacgtcaaccatcccccgggttgaaataatgggtgttcggcagatgggggctgcctacaaatctgagcctgctgcctcatttcctctagtcaacatggg

SEQ ID NO: 419809 - DNA, 122 bp, Homo sapiens
gatgcgctccccggcccctctagccccgtggtggtacaacgcgaaggtgtgggaaggccgcgataaaccggaactgcagcccgccggacacctccggcttcacttccgtaagaggagaggag

SEQ ID NO: 419810 - DNA, 122 bp, Homo sapiens
catcatcaccgtctgtgtgatgccatcgccgcgtctgtgtgacattaatatgtgtgacgtcgacatggcccgtgacgtcgttgctgcatctcggtgtgacgtcatgccaagttccccatgtc

SEQ ID NO: 419811 - DNA, 122 bp, Homo sapiens
aaaaatgagattgcattggaattttttcaaaattaacctgagattactttttaaaaaatgcgagctcagggtaaatcacatagggtagaaaaataagcttcaattatcagctaagagaagac

SEQ ID NO: 419812 - DNA, 122 bp, Homo sapiens
ctgcgcgaggggggcaggtcccgggcgggccgcgggctgggggtggtgctgcccggagggcgggcgtctagggccggagggtggagctgggggttcgggggtgtacccgggggcgggaggct

SEQ ID NO: 419813 - DNA, 122 bp, Homo sapiens
ccttgaccacctgggaaggcatcagggactcctcctgccgcaccatcaccatcagccgcgcgatgtcgttggccagcatgtcatccaccgtgtccagcagcttgggcttcagcgcctggaac

SEQ ID NO: 419814 - DNA, 122 bp, Homo sapiens
ttttaaaaggacaatgctgaagacacaaatgtttacaatgaccacagcgatgacgggatccgagagaaaggcaaggcggaaggggtgaggccggaagccgaagtgccgcagggagttagcgg

SEQ ID NO: 419815 - DNA, 122 bp, Homo sapiens
gggtggggaaggcggtgccgaggagttgggaaattaatcacctccagaaagcagagggagcgcgccccgcaagaacccgagtggaaacaaccgaagaccagaaagggagcaggaaggacggc

SEQ ID NO: 419816 - DNA, 122 bp, Homo sapiens
ggagaaaagtgtatgaaagccaccgtggcggttaatgagctgtgagatgaggcgctgctgcggccgctgctgctgacactcgctcccaggctgcacccgccgcccttggcgcttcatgtaca

SEQ ID NO: 419817 - DNA, 122 bp, Homo sapiens
aggctctgcagtccagacaccttgcgggattcctgatacttcagctcaggtaggcgtttccggagaattctgggaagagtagtccattttacgggaagtgtagtccactggctcgtggaaca

SEQ ID NO: 419818 - DNA, 122 bp, Homo sapiens
aactcctgacttcaagtggtccacccgcctcagctttccatagtgctcagattacaggcgcgagccactgtgcctggcctttattgtactttatatatgatgagctagtccttttaaagtac

SEQ ID NO: 419819 - DNA, 122 bp, Homo sapiens
tattaaagaaataaaaccatatcgcattcaaccacagtataaggcaataggtgaaaaaaacgatggctgtgattcaactcattactaggtttagagattcaagagaggctgctggacagagg

SEQ ID NO: 419820 - DNA, 122 bp, Homo sapiens
tgggtggcggaatgaaggacacagaggccactgcggggtctggcctctaagaggcttttacggcctcctccgtcactaccgggcgagtgattcagcctgccttttttttttttttttttttt

SEQ ID NO: 419821 - DNA, 122 bp, Homo sapiens
ccatgacccagccccgacgccgctggggctgtcccagcccctctccttagccgcttgtgccgccatcagaggggcctgtctcgctcccccagacacagagcctctgttttcctcactccggg

SEQ ID NO: 419822 - DNA, 122 bp, Homo sapiens
agcaactacagaatctgcctggattcagggagtggcatggggtggggtggtgggggttgacgatggctataagaaacggctttgaagatggagggagggccatgagccaaggaccggggcaa

SEQ ID NO: 419823 - DNA, 122 bp, Homo sapiens
tcacactgtgttgcccaggctggtctcagactcctactctcgccatcctcctgcgttggccgaccacagtgctgagtttacaggcgtgagccactgtgcccgaataatgctgcagccttctt

SEQ ID NO: 419824 - DNA, 122 bp, Homo sapiens
agcggcccgcgggcgggcgagggcgcggcccccgggtgtctagccccagctgggcaaccgcgcgctgtcccgctcccgcagctccccgccgccccggcccagcatcccgccgccccggcccc

SEQ ID NO: 419825 - DNA, 122 bp, Homo sapiens
cggtgaggtgggcggggccttgcgggcaggcggtggagaaggcggaccgctgggaggagccgagtgcgggtaagcagctgccggcaaggttctcgccttggccggctctgaggagccatgca

SEQ ID NO: 419826 - DNA, 122 bp, Homo sapiens
aattgaatatggattcaatatttaaatgtacaaactgaagaaaatgtaggagaaatttttcgggacattggcctaggcaaataaaatatgactaagacttcaaaagcatggtgtggtaggtt

SEQ ID NO: 419827 - DNA, 122 bp, Homo sapiens
gggttattattactaaatggagtcagtataaatgctttccaataaagcatgtccagcgctcgggctttagtttgcacgtccatgaattgtctgccacatccctcttctgaatggttggaaat

SEQ ID NO: 419828 - DNA, 122 bp, Homo sapiens
actcctcccgccctgtctgcagttggaaaacttttccccaagtttggggcggcggagttccgggggagaaggggccgggggagccgcggagggaggcgccgggcccgcgcgtgtagggccca

SEQ ID NO: 419829 - DNA, 122 bp, Homo sapiens
tgcgcaaatttagagacagctagtgccgtctggggaccagtcactgtgctaggatcagctcgagtactaagccgcgacagttgggctagaaagcccttcctccgagccccccaaggcccagg

SEQ ID NO: 419830 - DNA, 122 bp, Homo sapiens
cagacatcccccgcagaggctccaaagcccccgagcgacggtgtgtgtggaagaaattcccggcttcccaagatgagtaagacgtcgcggtcatcttggtgtgtaatatgggcagagaaaga

SEQ ID NO: 419831 - DNA, 122 bp, Homo sapiens
ccccagccgagacacccaagccttagcacgtttataatgtgacagtggtacggggtgccacgcagtgtttccaggagcgccgggggggagcgccaaaatgctaaacccattcttagccaatt

SEQ ID NO: 419832 - DNA, 122 bp, Homo sapiens
ctgcccgcggagtccggagccgatcggggaacggggtggtggggctgcggtaggctggagcgcggagagggcgcggcgcctgggccctgcgggcggggcacgggattccctgggtccgggct

SEQ ID NO: 419833 - DNA, 122 bp, Homo sapiens
aggaggttactgctgggtctggggctgactgcccggcgttggttgaatccaataaaccgacggggaaggacgcctcctaagcggagccattggcagccgtagcatcagccccagcccaaggg

SEQ ID NO: 419834 - DNA, 122 bp, Homo sapiens
ctcccgggttcaagcgattctcctgcctctgccacctgcatagctgggattataggtgcccgctaccacatctggctaatttttgtatttttagtagagacagtgtttcaccatgttagtca

SEQ ID NO: 419835 - DNA, 122 bp, Homo sapiens
gcagcagcttaataaggggggtctccagagaactgtggtccaggcaggtggctgggagcccggtgagccctttcagagaagggggagcgctgctgtctcaaagagcagctgagccaaaaaca

SEQ ID NO: 419836 - DNA, 122 bp, Homo sapiens
actgtggagcctgtgtgagaggaggcacgggcgcgaacacaggagcgcacttcctcattccgtttctcctcatcctctctcccactgccactggcatcactcatcccatccggtcatcccaa

SEQ ID NO: 419837 - DNA, 122 bp, Homo sapiens
gctgggtgagacaggtatgaatcttgaggagtcagggctgggggactgctcatattctcccgagacttgtgagtctctgggggactcctgggtgcatggggctgactcccgcagaaacctct

SEQ ID NO: 419838 - DNA, 122 bp, Homo sapiens
ttcaggacccgcccagggtctcccagtagctagtgtgtaagctgagaccagaacttggctcgttctctcccagtcctgagcttgggcagaatcaccagcaacgccagctcccttccctttcc

SEQ ID NO: 419839 - DNA, 122 bp, Homo sapiens
acactcagtgcaggagtccatattaccacataggcgtttcggatgggggattcccttctccggggacttggaagaagtgtggtcaagaagctatgtgtagttgcaacacttccccctggagg

SEQ ID NO: 419840 - DNA, 122 bp, Homo sapiens
gtgcccgccgcagccctgggaccctgcggccccggtccctattcgaggccccagccggagcgttccgggatccttcgggggagtgcccagccccgcgcccccgcctcccacatgactccggg

SEQ ID NO: 419841 - DNA, 122 bp, Homo sapiens
cgagcgccgcgtcctccattttgagctccctgcagcagggccgggaagcggccatctttccgctcacgcaactggtgccgaccgggccagccttgccgcccagggcggggcgatacacggcg

SEQ ID NO: 419842 - DNA, 122 bp, Homo sapiens
ccagcactgttcaagctgggagggacctcagtgctcattataccatcagaacccggcccacggaggggaagcaattgcccaagatcacacagtaatctgggggcaaaggaggtgttagaacc

SEQ ID NO: 419843 - DNA, 122 bp, Homo sapiens
cctccacccccggggggttcctgcgcactgaaagaccgttctccggcaggttttgggatccggcgacggctgaccgcgcgccgcccccacgcccggttccacgatgctgcaatacagaaagt

SEQ ID NO: 419844 - DNA, 122 bp, Homo sapiens
tttggctgtgaaatgcatcttaaggtgtggtggctaatgctgtagtatgttgacaacatgcgggattatgaactgcaaatctgtaggtagctggtagctattagctctctgtggtcaccatt

SEQ ID NO: 419845 - DNA, 122 bp, Homo sapiens
gcttatgctccgtgcgcgtgcaggcatccatgaaggtctgcgcgatgactgacagcgaggcgtccaccacctcgtggacatgcacgtcaaagatgaagtgggggttcttgaggatgttcacc

SEQ ID NO: 419846 - DNA, 122 bp, Homo sapiens
ctcaagctagctgccccacccaccaagcctcctgggcctttcagctggggctcagtgggacggtggctgcctgcctgtctctgtccctgagcatgacacactagggctcacatgtgacccat

SEQ ID NO: 419847 - DNA, 122 bp, Homo sapiens
ggaagagcagggaacaacatgtcacgccctcagaagccgacactctaggggaacagacaccgtaaacacacagctttactgaacatgactggtggagaggcacagaggagaacagggaagaa

SEQ ID NO: 419848 - DNA, 122 bp, Homo sapiens
acttaattccctattctgaataagggcagaacctgtgaaaatgactggatatcacttccacggttatattctgttacatggcaatgacaaaaggattctgcatatgtaattaaggactccaa

SEQ ID NO: 419849 - DNA, 122 bp, Homo sapiens
gggcaccaggggaggatctaccagggggttctggtggaagggcccacccgggaagcggcgcgcggggaggactcgggggcgccgagaggaactgtccgggaaggggcgcgcgggccgcgggc

SEQ ID NO: 419850 - DNA, 122 bp, Homo sapiens
agctatcctagggttattgtaaaaaacaaagggtgctttttgaggaaatgaatttaaaagcgggggggcacgcatagagacagaccttgggaaagtagcttgagacagaagggaaacaggtt

SEQ ID NO: 419851 - DNA, 122 bp, Homo sapiens
agagaaaaactggttaggcagactccaaatgaaaggaaccagaagcgaagcggagtctgccgcatgaattcttaagacctcaggttatctaggaaatctaccgcacgctaaagtgctcctcc

SEQ ID NO: 419852 - DNA, 122 bp, Homo sapiens
agaacccgtgagactaagaaaaaagaacaaggaagaaaggaggcataggaatgaggactccgtggagggaaaacggtcattccctgtcgctttggggaatctgctgcaaaaacacgcctgtc

SEQ ID NO: 419853 - DNA, 122 bp, Homo sapiens
ctggcgaggaggtgactcaagaccttcgattcttctttcatctttgtgcgccctgcccttcggataagtctagacttgcagtgcctggggctgaccggaggtgggggggggggggtgctcag

SEQ ID NO: 419854 - DNA, 122 bp, Homo sapiens
agggcttagaagcgggttggggaggggaaatggagtgactcggagacttcccctagaaaccgtcaccgccgccccatttttcggcagcccctggccgagggttgggaaaatgggagtcgctc

SEQ ID NO: 419855 - DNA, 122 bp, Homo sapiens
caagacacaatggtggaatctttacactggggccttggcaacccattgctctaataagcccgtgcccagagaggtaaaatgtctttccctcagccacacagccagcaaagcaggaatgagag

SEQ ID NO: 419856 - DNA, 122 bp, Homo sapiens
cgctgggggcacggcgcgaggctgcaggggcggcggcagctggggctgcaggacgtggctcgcatgcaggccgtgcgctgggcccttggcttgcgccgggggctgctcgggctggggcggcc

SEQ ID NO: 419857 - DNA, 122 bp, Homo sapiens
agattcctttcaactcggctgtgacgtctgcgtcttcataagaaaggacgtgtttccgagcggccactgagaactacaggcaggccgaccggcaaaccacccacagccagcaccgggagctg

SEQ ID NO: 419858 - DNA, 122 bp, Homo sapiens
atgtggctggtcctaattcagacgtgctgcaagtgtaaaacacacaccagatttcaagcacgtagtacctaaaaaagaatgtaaaagatctcattaataagtttttacattggtgacatgat

SEQ ID NO: 419859 - DNA, 122 bp, Homo sapiens
aggcggcgccattttgtgctaggagcctgataaaaccggcccggttctgtggaaagtgggcggcggagccagggtccctggaatggcggagactctgtcaggcctaggtgattctggagcgg

SEQ ID NO: 419860 - DNA, 122 bp, Homo sapiens
agttatctagcacaaacttgaattttaactcacattaagtattaatgagtttacattcaccgggtttaaattgatgaacacttggtgaccctacctccaatgttccacctccattccaattt

SEQ ID NO: 419861 - DNA, 122 bp, Homo sapiens
ggacgccgcccacggcatcgccagcgaggacgccgcccagggcatcgccagcgaggacgccgcccagggcatcgccaacgaggacaccatccagggcatcgccaaggagtacgccgtccacg

SEQ ID NO: 419862 - DNA, 122 bp, Homo sapiens
gctagatttcttgaggttgaatgccagctctactgtagggtctagccctacggggcttggcgggtgttttccccgtgtgcggagatgagagattgtaacaaataaagacacaagccaaagag

SEQ ID NO: 419863 - DNA, 122 bp, Homo sapiens
aggcgcagtggcgtctaaatttgggcccactaaatgcgtcggagcatctccgcgcccaggcggctcctcctcactgcggcaacccgggaaaacttgtgaactaatcagaaaaagtggaaggc

SEQ ID NO: 419864 - DNA, 122 bp, Homo sapiens
ctgtgagcatcttggttaattgccagcagacattttccaaagcaaactcagatcacaaaccgcatcgagtttgagtataccaattctcacgtaacgttacgatgggaatttcaataacactt

SEQ ID NO: 419865 - DNA, 122 bp, Homo sapiens
atactgggtgctgatgaaaacgggccgacatctgtggaacccccgggggcatggagccctcggctaagggtctgcctctggtctctccccaggtgggcgggggcaggacggaagcccggtta

SEQ ID NO: 419866 - DNA, 122 bp, Homo sapiens
gactggagcccgggcttgggcagctgggctgcggcgtgctgatctgtctgtcatcgcaggcgccggctctgcagcagtaccgcactagcgccggctccccggccaaccagtctcccacctcg

SEQ ID NO: 419867 - DNA, 122 bp, Homo sapiens
ttgggagaagggggcggtgatttccacaggggtcacctccttcttaacctcacaggcgtccgacctgtggaaatctaacaagcataggggaaagcaaaggcagcatcttaggtaagtgaagt

SEQ ID NO: 419868 - DNA, 122 bp, Homo sapiens
aagaggcttgagtaaagtggcacctgatagcttattttagagaagatccagcctgtacctcgtgtcccagatgtagtgctgctgcgagatgctttagtgtgctctgcacctcaatctgtcca

SEQ ID NO: 419869 - DNA, 122 bp, Homo sapiens
aggaaagctgcgggggaaaagggccaaaccctgaaattacccggatgtggtccccgcgcgcgcatgctcagtggcttctcgacaagttggcagcaacaacacggccctggtcgtcgtcgccg

SEQ ID NO: 419870 - DNA, 122 bp, Homo sapiens
agaaagggggcaccggctcaggcttgaggggttggttctgagccccccacccccacccctcgcttttaatgcgactctggcgagaacagatgtcccaaaccgggcgaactgcccagaccccg

SEQ ID NO: 419871 - DNA, 122 bp, Homo sapiens
atcacgacaacagcctgcttgccagggatgcgcttggccacgtagttctcatagtagcgtcggttcatctgtctagtctctagtgtggccagaccctggggccagctacgctcgtgggcatt

SEQ ID NO: 419872 - DNA, 122 bp, Homo sapiens
ggttggcgcactgagcctaggcctgcgcccccgcctccagcacccccaccgaccccaccccgccaagcgcccgagcaaggccaacctcctgttctctgctaggtctctccgaggtcgccttc

SEQ ID NO: 419873 - DNA, 122 bp, Homo sapiens
ttagtggaatagttgacaagattttggttcatccacatctgaaattccatatggacatcgcgaatgttatttgtgaagaatttttagtgacatggggaaatacttatgaaacattaagtgca

SEQ ID NO: 419874 - DNA, 122 bp, Homo sapiens
tggacgggggacagccgggcccgggcgaggggctgccacgcctggtgtctcgcggggctgcgtccctgagcacggtcaccctgggccctgtggcgcccccagccacgccgccgccttggggc

SEQ ID NO: 419875 - DNA, 122 bp, Homo sapiens
tactactgatcaaaatctttgtgagtactttagctgacatcaatcatagcaaagcttgtccgatgtcctcctatcctttcagcattgaacaattatttttactaatttacactaccacctca

SEQ ID NO: 419876 - DNA, 122 bp, Homo sapiens
cgcgtcccctgcccacccggcagagggagcgttgtgcggggagactccagaaacaaaatccgagtggactgcaggggtgacagtggcactgctggttcccagaaggtcctgggaaggaagag

SEQ ID NO: 419877 - DNA, 122 bp, Homo sapiens
ccaatgaaaattgatgtttgtgacccagagcagattctggagccttttgtacgcctgggacggcccagcgtggaggggacagtgtggtgcctttttgttcaggcttcgctcaggtcagcctc

SEQ ID NO: 419878 - DNA, 122 bp, Homo sapiens
aatttactaaagaagaggcatcaataaatgttaagactcatttattgtctgagcctttcacgtgaatatgacatttatataacatgacaagctttgggactggagaggaggactttgaaatc

SEQ ID NO: 419879 - DNA, 122 bp, Homo sapiens
cggacgggggcggctctccgcccggctgcatttgcatgtcggtttagtcaccgccgccggcgcctacttcctctaaggccggggctgactttcaggaaatgatgccggccccgtaagtcagg

SEQ ID NO: 419880 - DNA, 122 bp, Homo sapiens
ggccagcccctgcccactgagcccctctctttttccaggtgacctttctctaatagttgacggccggcaaacgccaaccatccctctgttgtcctcacaaaaataatcctacaagaacaatc

SEQ ID NO: 419881 - DNA, 122 bp, Homo sapiens
gaggctgaggcaggagaatggcataaacccaggaggccgagctgacagtgagctgagatccggccaacagagcgagactctgtctcaaaaaaaaaaaaaaaaaaaaagtacaacacagctgg

SEQ ID NO: 419882 - DNA, 122 bp, Homo sapiens
agcatcttgttatcatagaaagatgccaggactagaggtcataaattcctttaaaaggaccgtaatcagtgtaaaagcagagtggatttgcccttctgagctctgggatatgccgcagcaat

SEQ ID NO: 419883 - DNA, 122 bp, Homo sapiens
tgtcctcacagaaacttccacctcaacatgaataaacttacctcagcatcccccaatctgcgctgatgactcaccagcatttatatccctttccttccttagtaacggaacctcatttctat

SEQ ID NO: 419884 - DNA, 122 bp, Homo sapiens
ttgcaacagatgtctgatctgatctgagaacagtttgtgggagtgagccctttagcttttcggatctgagctgaatccaggtagacagcatcataaccgaatttttaattgcaggtggccca

SEQ ID NO: 419885 - DNA, 122 bp, Homo sapiens
gtctttgtcttccgccaaagatgaagccatcaacctgtggcctggatagtgcctcaggagcgtggagtgagggaccagggagctcagacagatgagtaggctcctttgtggagacctgattt

SEQ ID NO: 419886 - DNA, 122 bp, Homo sapiens
agaaacagaggcaaacaatagctgaaaatctgtgggcctgttgctgtggtgggtcggcgacgtctgagcaagtgcagtgaaccaaagggcgggaccaagaaccacgcccctgagggagtttg

SEQ ID NO: 419887 - DNA, 122 bp, Homo sapiens
ttgtcacgtgaggaggggccatagggaccagagacgcagccggtacatgacagaagttggcgtcccgcactgagcagaagccattatggcagccaccagatgcccgcgcccttagcaaccgc

SEQ ID NO: 419888 - DNA, 122 bp, Homo sapiens
tttgcccttcaagctggaactccagctgggactaaatccagtgctgtggggctcagcagtcgatgttgttgagactgaacacagattataaggacattgcatttatctagactttggttaaa

SEQ ID NO: 419889 - DNA, 122 bp, Homo sapiens
aacgcggttcggcggcctcagtcactgtcctttgtaagcttggggagtcggcgggagagacgtgacccactggccacttcaggcggctctgtgtcgtaaggatcagtttcacattaggtgat

SEQ ID NO: 419890 - DNA, 122 bp, Homo sapiens
cagtgcttaagcacagatgtggagaagggatatctctcctctgcagcttgtccactgctgcgaacacagccatggctgctcctatgggaggttggtacaggcgtatcacaagacagccattc

SEQ ID NO: 419891 - DNA, 122 bp, Homo sapiens
gccttctctcgcgcctgatgagcattttcccaacagagccgagtatgtgacctttcccaccggtgcttttctttcaaagtggacggtgggcgcggagcttgctatgagagcgcttgtcctcc

SEQ ID NO: 419892 - DNA, 122 bp, Homo sapiens
catcgggggaggacgggatccgcccggcctagcccctcaatcctcttttccctcccgcgccgcctactgggaagattctaccgccaggctcgacgcccccagaagtgcaggtggcgttacca

SEQ ID NO: 419893 - DNA, 122 bp, Homo sapiens
ctcctggcccggcctttctattccctggctggagtgattccgcctgaaggagaattcgcccgttttccccggacccagctgccacaagcatttagtattaggctgccgcttattattagagc

SEQ ID NO: 419894 - DNA, 122 bp, Homo sapiens
cagtcatcaagtaaaactgaagcattaacgatcacgagaatcagctcagcacgggaaagacgtcactttaggaggcatctcttcaccttcatgcctatcaacagctctagcagaaaggccat

SEQ ID NO: 419895 - DNA, 122 bp, Homo sapiens
cggtgggcgcctgtccggctgagtggggtcgctctagggggcggcagcggagtttcagggcgcggggggcactgggcgggaccctgggattctgggcggtgggtgaggagggtggagacggg

SEQ ID NO: 419896 - DNA, 122 bp, Homo sapiens
tttcacaggggagctgtaacagggccctaattaattaaagtgataattactcctctccctcgcagtttgttagttacataacacattctccaggaaattcacatccttagaattcctcttta

SEQ ID NO: 419897 - DNA, 122 bp, Homo sapiens
gatacccactttcgggtcagtgcgccacgtgccgcgggagattcggatgagagggatgggcgtcggcagccccactctaaactggaagggacctgggggtgggggcgcagggatccagggtg

SEQ ID NO: 419898 - DNA, 122 bp, Homo sapiens
ctagatgtatgtgggactggcagctcattctccatggcctgcagtgtggcgcagtcagggcgctcggatggcagaagggcaggcagatgctaggagggaagaggcagaagtgaatgttttga

SEQ ID NO: 419899 - DNA, 122 bp, Homo sapiens
ggccgcctgcctgcagttgcttctacgcggtatgtctggtctggccaccccaagccccaccggcccctccccgaaagacccggagggcaggaggccaagcacccagtgctccaaccaccctg

SEQ ID NO: 419900 - DNA, 122 bp, Homo sapiens
cccgcatgacggcctctagggggacagcgaggtccccctcgatctctggctgtaatcagccggcggggccagacggtgccgagactccagggcgaggccgcagggagggggctgtcccgccc

SEQ ID NO: 419901 - DNA, 122 bp, Homo sapiens
cctgtcagagaccagcccagctctgaaatcaagccgttgagaaaagggaattcggccctccgccgcctcttcagtttaaaatcgtttcccgactcgctctgcggccccacgcaggaagcctc

SEQ ID NO: 419902 - DNA, 122 bp, Homo sapiens
gctggcctttataaaatgcacatgatttcgtctgcgttactgtctgaaattcttccacagcgttcaagcgacatgtttccacaggcagagcaggcaccttcttcccagatcatcttacccat

SEQ ID NO: 419903 - DNA, 122 bp, Homo sapiens
tccagtaccccctcctccagtgtcgaaggtgggcaggccctcggccgggtggatgagccgcgactggagggggcggggcctgggcgggaggcgggcggtgggcgtgtccggggcggggctgt

SEQ ID NO: 419904 - DNA, 122 bp, Homo sapiens
ccatcgagggattttcccattgaaggcatttatttagctaaaaggacttcatctttaaggcggtaatgcaggacagataacagagataaagataacaggaggtgatctttcagctccataat

SEQ ID NO: 419905 - DNA, 122 bp, Homo sapiens
cccgggagacaaagccggggaggacttggcagcgcaagcgcagggtgcttccccgctgggcgcgctgggagatggagtctagccaggagggctccatttttgcccgaggcccttgggaaggg

SEQ ID NO: 419906 - DNA, 122 bp, Homo sapiens
gggccacagtgccgaaagctgtgagcctcccaaacggccgtcgtgtgtgccgcgctcggccgtctggcgcctgcgtggcttggcttggcagcctcttactcaagctttgttttccttggggg

SEQ ID NO: 419907 - DNA, 122 bp, Homo sapiens
ggattacaggcgtgagccactgcaccgggccaaagtcgcagaatttagagctggacaagccgacatcgcctcctccggcgggtggctcagtgcccagtggctcagtgctggtgcacggtgag

SEQ ID NO: 419908 - DNA, 122 bp, Homo sapiens
tgctggagcagatcctggtggctgagaaccggtgagcgcgccaggccggggttgggagagcgccgcgtggtgtggacagttaagcgcctgcgttcccgtgtgccttgcgccgtgcctttgcc

SEQ ID NO: 419909 - DNA, 122 bp, Homo sapiens
ctccgcgggagccgttggggctgttggcctcgggctgaggtgcaaggaccaggactagggcgagggcagcggtccaaggtgcggggccaggctgaggtgctaggtgtgcgggggccgggatg

SEQ ID NO: 419910 - DNA, 122 bp, Homo sapiens
ggaggattcgtaaaagaggaaggcctccgtctcctgcatgcccctgggaacggaatatctcggtgtaaaacccgatcgtacgtacctatgttcgttctattcttagataggagaaaactgcc

SEQ ID NO: 419911 - DNA, 122 bp, Homo sapiens
tgtaagtcacaggtggagaatgtctttggccatataactgatagaaaagtcattttaagccgtgtgagcggtttcaggaataaaagcatgtaaactcaggtcaaacagcctagaactaggga

SEQ ID NO: 419912 - DNA, 122 bp, Homo sapiens
cgaggtgtcatccagaggtctgggcgttgccccttggagacacttgcacgggggtctgggcgccaggacgctggaggcgtgggatgatggcgattcgtctcccatcttcaaggccaacacag

SEQ ID NO: 419913 - DNA, 122 bp, Homo sapiens
accacagggagggcaccaagccattcatgagggattcgtccccatgacccaaacacctcccgccaggtcctacttccaacattggggatcacatttcggcgtgaaatttggaggagacaaat

SEQ ID NO: 419914 - DNA, 122 bp, Homo sapiens
gagcccgggaggatggggtaggagggggtggctagtctgcgcagcggagccccactcttacgagcacaactcaagggattgtgttcttgacatgattggccccaaactgggtccatttgttt

SEQ ID NO: 419915 - DNA, 122 bp, Homo sapiens
gggcctgagcaagctggcacgggaagaggacagggcctctcgtgtcccctcctcccttcccgcccatcgcactggtcctgcagagatagctgtccccttggggccccggggctcccgctggc

SEQ ID NO: 419916 - DNA, 122 bp, Homo sapiens
acacacgcagtgcaaaggtttcaccagacatggtcttctatgcctatcacctggtcaatacgagcagcagccacgttaaggtgtaatacacactggcgtcatctaacgttccatgtgaggaa

SEQ ID NO: 419917 - DNA, 122 bp, Homo sapiens
cttggtgtgggtttcagaaacttagcaggataaggaggtggtccatgtggtaggatagcccggtgaggaaatcagacccctccagggtgaggagggcttccacccatagggtgaccttgtgt

SEQ ID NO: 419918 - DNA, 122 bp, Homo sapiens
aaggaaggcgggtgaggggcggggagagccagggggagcctccttcgccccgccccgccccgcttcggaccgtatcacgactcaaaggggggatcaactcttagcctccttagtcctccagc

SEQ ID NO: 419919 - DNA, 122 bp, Homo sapiens
tggacgcgagcgagcgagatgcccaaccccaaaaacagcaaaggcggccgcaaaaacaagcgcgccaacagcagcggcgacgagcaggaaaatggagccggggccctggcagcggcgggcgc

SEQ ID NO: 419920 - DNA, 122 bp, Homo sapiens
gtcccataaaaaccttcttctgggctccatccaaggcggtggagccagcatggccctggacggatatttcagggaggctgagagcgaccgcaaggaagcattgtgcctaatcgtggcactcg

SEQ ID NO: 419921 - DNA, 122 bp, Homo sapiens
aacattgaccttgacaggagacgtttcttgtgagttgcatttaagaaaaacttttctatccgaggctggtgtggtcacattgttaataccaaatgcgcaggctgtgaagaactcagtgggtc

SEQ ID NO: 419922 - DNA, 122 bp, Homo sapiens
gtagccaaagcaacagaaattttagcttaacggctgagggcttccgggattaccgcagggcgggcgggaagcgcctttccgctccggagggaaggccgcgtccccaagggactgcctaagtg

SEQ ID NO: 419923 - DNA, 122 bp, Homo sapiens
gcccacacgcagccccaggccctctgcctcccacaccggcagaagcacgcgcgacggtcccgctgggtccttgtaaagcttgtagagcacctctcgcggcacgaaagccagcgctgctggca

SEQ ID NO: 419924 - DNA, 122 bp, Homo sapiens
acagagggaaagaggccaaactgctgaatgtcagcggcctgtctggaggggctgaggcttcggcctcgggaggctgaagcaggaggcagggaaacggtcaggcatacaggtcctcccgatcc

SEQ ID NO: 419925 - DNA, 122 bp, Homo sapiens
tccctgcccagggcccggccgggccgggcgacacctacctcaccaggatggccacccccacgtcctcgcagttggcatagagccgggcccacatagcctgcaccgccttcctctccgcctcg

SEQ ID NO: 419926 - DNA, 122 bp, Homo sapiens
cgaagctcctgccttttaagactacaaagaggcagctcaaaattagactgcacaggtaagcgaggaactgcagtctaagcctggactctgccttctgccctccggtctcctctgcagaaagc

SEQ ID NO: 419927 - DNA, 122 bp, Homo sapiens
cgaatggagaggatatgtagcagctagccttgagcacctaaccacttttcaaaggagctacgcacaaaaataccctagcaacatgccacggtgtcagaaaggctcaggttcccaacaccatg

SEQ ID NO: 419928 - DNA, 122 bp, Homo sapiens
atggcaagtattattatgtccttctgagatgaggaagccaaagctcgggaggtaaaataccgggcctgaggtcacacagtataaaggtagcagagctgggaagaaagcccagatgttatcag

SEQ ID NO: 419929 - DNA, 122 bp, Homo sapiens
cgggtccaggagcagaggagcaaatccctgggttcttggggggccctacctgaggggtgccgcagcagcacgtccaggctctcctgggcctgcgcctgaaaaggcctatcccgcgtgtcctg

SEQ ID NO: 419930 - DNA, 122 bp, Homo sapiens
cccacgcccctgttttgggcgccgggcagcagggacttctccaggccggttcccgggccacgacacccggtgggccgagcaagggagagcaaccacttcatctccacgccgctcagagttga

SEQ ID NO: 419931 - DNA, 122 bp, Homo sapiens
gatttcctccctggagagggccgcagagcacgtgcagagctgccggagcagcgcaggctgcgcgcccgacaccagcctgcggttttccatcaagaaggagaccgaggttctcaagaccctgt

SEQ ID NO: 419932 - DNA, 122 bp, Homo sapiens
tggcagccacgtgattagaaaacagcgcgcaccatgtgacagtagaagaaggaccacctgcgcctccagagccagccaatcccgaccctatcatggcgcggtttgcccacctcctgatgaag

SEQ ID NO: 419933 - DNA, 122 bp, Homo sapiens
agtgctggtggaaagggggaggaaagagcgcgcccggcaccgcacccccaattaggggctcgtctagtgaattgggggtattctccttcgaatgagtacactacccgccgcaccttggccgg

SEQ ID NO: 419934 - DNA, 122 bp, Homo sapiens
aactgtcacacaaaccttggagctcagccagacatgtattccaccctcagggaggtctcccgaaactaagctgagggatcagagcctacagaaggggacacacccacaccacaaggagaccc

SEQ ID NO: 419935 - DNA, 122 bp, Homo sapiens
tacttgctcaagcccactccgactctggagtgtactttcacttccataaatctgtgctttcgttactccgctcttttgttgctttgtttgtgcattttgttcaattctttgttccacacacc

SEQ ID NO: 419936 - DNA, 122 bp, Homo sapiens
cgcagccgagtccaggtcacgccgaagccgttgcccttttaagggggagccttgaaacggcgcctgggttccatgtttgcatccgcctcgcgggaaggaaactccatgttgtaacaaagttt

SEQ ID NO: 419937 - DNA, 122 bp, Homo sapiens
gcaaagaggagtctcatcctggtttctctgtcgtcttcacccgtgctttggccacagcaccgcagtgctctctaaggacttctgtaagctgcacagtttgctcccgacgcatgcattaaagg

SEQ ID NO: 419938 - DNA, 122 bp, Homo sapiens
aggcagctcccccagccgcctcggggtttagctccaccctgcctgccagccccagagctccgctggcatcaggccagagtactcaggcctctggggcaggtgtcctctgcagcactgggcgg

SEQ ID NO: 419939 - DNA, 122 bp, Homo sapiens
tgggggcgcagaggtaggcagcgggcagcagggtgggggcggcgggggcggcagccaggccgggctcgcagaggccgcaggacactgccgagggcaccaggcggccgagcgggaaggggcgc

SEQ ID NO: 419940 - DNA, 122 bp, Homo sapiens
tttgattatattattgtatgttgattaatcaaagtgccgccctaaatcccgctgtgactccgtgggtagtagggtgggtaggtaggtgggtttgacacaacggggatttctcgtgtttggga

SEQ ID NO: 419941 - DNA, 122 bp, Homo sapiens
gtggaaccggaacgcaggtgaggcactgccctggcgctaggccggcaactggggtcggtgcgcgcgtgagcgcgttcgcgttcgaggtcccggctctaaggtgggggctgcacctccccctg

SEQ ID NO: 419942 - DNA, 122 bp, Homo sapiens
ctagcggagccttttgttcccagccagaagtttgcatgccgggaccgtgacagctgcgggcggggaggacggcggggccgcggggccagcggcgtggtggagaatagaggcggctgcttgtc

SEQ ID NO: 419943 - DNA, 122 bp, Homo sapiens
gggcggagctgggtccgaggccggcgggggcgcctccatcccacgccctcctcccccgcgcgcccgcccgctctcgggtgactccgcaacctgtcgctcaggttcctcctctcccggccccg

SEQ ID NO: 419944 - DNA, 122 bp, Homo sapiens
caggctggagtgcagtggcgtgatctcagctcactgcaatccccgcttgcagggttcaagcgattctcatgcctcagcttcccaagtagctgggattacaggcatgcaccaccatgtccagc

SEQ ID NO: 419945 - DNA, 122 bp, Homo sapiens
accctccgaggcggccccgctctccggacctgggcggccgctgcctcctgcgtgccctgccggggccaggtcatcacttcccgggaattatcccaacccagcccccaagcccacgaacgggg

SEQ ID NO: 419946 - DNA, 122 bp, Homo sapiens
agggtgactggaggaacgcccccggaacgcgcaggagctcacctgcgctcaactctggagcggagcacctgaccgcgccgcttccccgccccgcctcctggcttctattggctgctgcagag

SEQ ID NO: 419947 - DNA, 122 bp, Homo sapiens
taggtgaacagatttttggtaacaggatatttgcatgggtttttaattgaaagcgagaagcgtatctttacaatggcaagttctggcagtctccatcttaacccagtgatcaaagttagcgt

SEQ ID NO: 419948 - DNA, 122 bp, Homo sapiens
caggccctgaaactaccactcgtgttcagaaagtctacgtaataccttattgttttcacgcgaagaaaccagcccttcaggccgggctgaatgtggtttagggattctctggctgtcattgg

SEQ ID NO: 419949 - DNA, 122 bp, Homo sapiens
gccgcagcaggtgggggcccagtgggcgggggcggggcccggctctgggcggagccgaggcggcggcggcgcaggctggggccggggccggggcgggagccggagcccgagctggagcagcg

SEQ ID NO: 419950 - DNA, 122 bp, Homo sapiens
caatttggctctttgggcttctgtccaatgttccgaatggcccactcacagggcgcttgccgagggaccctctgcgactgaggcggactggcatggacgacccccggggtcatgccagcccc

SEQ ID NO: 419951 - DNA, 122 bp, Homo sapiens
aattggcttacatgatcatggaggctgagaagtcacatatctgctgtctgcaaccagcagcgaaattcagtctaagggcctgtgaatcaggagagccaatgatgtaaatcccagtccaagca

SEQ ID NO: 419952 - DNA, 122 bp, Homo sapiens
ccacccgatatttgaatctcatgcaacatcacaggccattcaagtcagtcaacaccaaggcgctggaagaacaccaatactcactcgggtaaatgagctggggagggggatcgctcgtacgt

SEQ ID NO: 419953 - DNA, 122 bp, Homo sapiens
cagctgttctgagctgtgtggatcccacctccagccgtgcatctgcataataaccagacacgttctccaggctctgagatataccctggaacccaaaagggaaagtgaaagtcacaacttgg

SEQ ID NO: 419954 - DNA, 122 bp, Homo sapiens
cagcggcgcccgctcctggggcgaactgtcaggagagcaaggctagggtcaggcggacaccgcgcaggcacttccgccgccgcgcaccaatatacctcccagcccgggtcggacgggcacgc

SEQ ID NO: 419955 - DNA, 122 bp, Homo sapiens
aaggacggatgcggccaagctcggggcctagggagagccggctccgaagttcctcccagacgccagcctgcttggcacctgtctgtcaccgtgatggagcaccttccaagcgctgggtgcgg

SEQ ID NO: 419956 - DNA, 122 bp, Homo sapiens
gcgctccgcagtgccgggaggacgccgcagctgctccagctccaagctcagcgatgtgagcgaggccagcacctcctccaggccgccctccacgactggaagcgggactgggacgaagcgcc

SEQ ID NO: 419957 - DNA, 122 bp, Homo sapiens
tcttttcctagactttaaaattccaaaaaagatcacaagaagtctctgtctaaattacaacggctatgctaagtgagaaaagcagagtgaaaattagtgtgtttcagatgacaacatttagt

SEQ ID NO: 419958 - DNA, 122 bp, Homo sapiens
ttgtcaggctgtatttggctatgtaaaacctttctttcctcgggacagttgtttataagccgggagcaagaggacattccaaagagtgagtcttcagagccatgtcctgtctagagcgctct

SEQ ID NO: 419959 - DNA, 122 bp, Homo sapiens
cccatgaccgccagcagcttcctctccttcgcggaactcttctcctacgtgcttcaggaccgggccgccaaaggcagcctgggcacccagatcggctttgcagacctcatgggggttctcac

SEQ ID NO: 419960 - DNA, 122 bp, Homo sapiens
ttggggtttgtaatttgtatacacttcttacccagcagaaacagcttactgaacacccctcgggtggctggatgatgtgctagcaactgaaaccatctctgcgacttaagcttctctggtgc

SEQ ID NO: 419961 - DNA, 122 bp, Homo sapiens
cgcggtggggtgctttagaagtggccggagcccgcacctgcatgcagctcgcgcagaaagcgcctggacgctcccttaggaccgtttgcattctggccgctcgacaaaaacacccttttgaa

SEQ ID NO: 419962 - DNA, 122 bp, Homo sapiens
gttcccaggaacgcctttgcctggcttccagactcggtagctcggtggctgcggggtgcccgtgctccagtcccgaggtgacgccggggggcaggaggacggaccagagggacgcgcccagc

SEQ ID NO: 419963 - DNA, 122 bp, Homo sapiens
gttgcgccatccgctccggctttcgtaaccgcaccctgggacggcccagagacgctccagcgcgagttcctcaaatgttttcctgcgttgccaggaccgtccgccgctctgagtcatgtgcg

SEQ ID NO: 419964 - DNA, 122 bp, Homo sapiens
cttttccggccttgccccgaacagacatgataaacaagtcagaactatctctaaacaaaacgattactcgctttccgcagccttttatataacggtagagtagacctttttgaaaactgaaa

SEQ ID NO: 419965 - DNA, 122 bp, Homo sapiens
aggcctggaaatgagaagacagtcagaggcagctgacaaggccggaagtgcgcggcctggcgccgacaggaacggggggtcctccggcggacacacgcgcgcccagggccctcccctgcgcc

SEQ ID NO: 419966 - DNA, 122 bp, Homo sapiens
tggggctctggaaacagatgtaagtggcaaaggcagggcagaatgcctggccctggcagccgagcctccttgtgatggtgttggtgtcaccacccctgctagcagaacccagtctgcctccc

SEQ ID NO: 419967 - DNA, 122 bp, Homo sapiens
gctctcttcctccgcctttagtgacagcaacgacgacactgcctacgcggggtgaagaggcgtcctgctcgctcttccgcaccgtccttcccggttaataaaatgccctgtacgcttcacgt

SEQ ID NO: 419968 - DNA, 122 bp, Homo sapiens
acttggccatttttcttaagacatcaggtgcaatcctggggacatgctcacagtactctccgatgagccacaggatgctggctcgggccatgggcacctgtggttgtgggagaggagtgaag

SEQ ID NO: 419969 - DNA, 122 bp, Homo sapiens
tctgccacgagggggcggcagcgcaccgttcagacgctgcgcccctggtgcattatgggtcgcgtagtctcaaaggtggcataagcatcctggaacgcaaacggcatttcccagaaaactac

SEQ ID NO: 419970 - DNA, 122 bp, Homo sapiens
ccgggggtctcggtggcgggagccgccttcttgtgggacttgggggcacgtggcgcggggcggggacgcggacagacccctcccgcatcctaggaggcctgggagggtccgcggggacgcgg

SEQ ID NO: 419971 - DNA, 122 bp, Homo sapiens
tgtccctcatctacaaggtccagggtccatggtctgaatcaagggtcctggctgcccctgcgccgtagggtcaaaggtcatagtggggtgggggcagggagaagatgcagccaagagctccc

SEQ ID NO: 419972 - DNA, 122 bp, Homo sapiens
gggggcggcagggcaggtgggctctcttggtgctcagctgaggcgcccatcccaggctcccggcgcctgctgcccccaggctgggcctacctgcagcagggcgtggggcgcgatctccagca

SEQ ID NO: 419973 - DNA, 122 bp, Homo sapiens
cctttcgatccacggcaccccagagtcacagacacgccgtgtgcgccaggctgaggcctccgaagccagaccccgcgtgcctgtctgcaacctgttcttcccgggacgtgtcctggtaggtc

SEQ ID NO: 419974 - DNA, 122 bp, Homo sapiens
aaatgcaaaagaagtggcataggagtgtgttatgggtgctgaactctctctctttttccccgattttccagagctaggctgtggagtagagtttgtataggtaactaggtaacttattgtgg

SEQ ID NO: 419975 - DNA, 122 bp, Homo sapiens
gcagaagcccgaggtgtgccctgagttaaagaaaccgtcacaaagaacaaagggagaaggcgggttccagcctccaccacagccctcgcgctctgaggagccacctgggggcctcagccatg

SEQ ID NO: 419976 - DNA, 122 bp, Homo sapiens
cacccgggcggggcaggaagacgcggccccgaccggcgggtggggtgggggcggggcgggcgcccccagggcgggcgggtggacgaacaggacccgggtccggggctgggggctgccgcgct

SEQ ID NO: 419977 - DNA, 122 bp, Homo sapiens
gagttaaacagtaggcgtggccagaaccaagggacgcatagacggtgggcgtggccaacgcgggaaggagcaagcagtaggcgtggccacagccgagggagcacaaatggcgggcgtggcca

SEQ ID NO: 419978 - DNA, 122 bp, Homo sapiens
gcagagaggagaagaagagcgcaggtgagcgctcccgggggcgaggcagcggccgaggggcgtggcagcgttcgaaagccttgaccgtgaaccccatcccgagctccttccagtctcccgcg

SEQ ID NO: 419979 - DNA, 122 bp, Homo sapiens
ggcggctctgtataagtcagctgaaagcaaacaaagggaaggcagaatctttcattcacacgatttatccgcgcccactgggtgcactacggtcgggcattggcgacccaggagcgactgac

SEQ ID NO: 419980 - DNA, 122 bp, Homo sapiens
gacgcgtcggggtctcggagaaagctcttgaagtggctcagcaaggcagcgttggtcacgcggcccccagcctggcacagaaagtccagtagtgcctcctggctcagctctcgggccatcgc

SEQ ID NO: 419981 - DNA, 122 bp, Homo sapiens
ggggtatttcctttcctgtttacccgagcgaagagtggcccccggtggcccaaggaggggcgcctccaggcgcagggctccggcggctccagctgctcccgggctggctagcgggcgctggc

SEQ ID NO: 419982 - DNA, 122 bp, Homo sapiens
gaatcaccgagggcagctgtgcccaggtgctgaggcagtggctgcccagcgtccctcacccgtccctctttgtctggacagctctttcctgcttaggggatgtggcaggaaaccttggcctg

SEQ ID NO: 419983 - DNA, 122 bp, Homo sapiens
agtgcacaagcatcagaccgttgctggtatcaaaaatgctctgcagggaagcggccccgccgagtgagatccaggcccttctccccagttaaacttcttggtgacttccccatgcaaggaga

SEQ ID NO: 419984 - DNA, 122 bp, Homo sapiens
tctcttttcctttaaagctaaagacaagaatatcatgctatacaggtgcaactcaatccccgttaataaaaaccaatgtaggtataggcattctaccctttgaaatagctgtgtcccaacct

SEQ ID NO: 419985 - DNA, 122 bp, Homo sapiens
caaaagccgatgggacggcccgctgggctgttcccgcccctatgcccttttttgggtttccggccagaggcatgctgggagcgtcacatgcaaattgagcgtgcacccagcgttccgccctt

SEQ ID NO: 419986 - DNA, 122 bp, Homo sapiens
gaatttcaaacaggctccccagaggatcagcctcaggtgccctgggcagccttccttatgcgtgaccactcagccctgttaaatgggacctctagctcagggagttgagtctagagagggcc

SEQ ID NO: 419987 - DNA, 122 bp, Homo sapiens
gtgacgcaaaactgggaggggccacgaggacctcgggcacatccagcagtgcgacggggccggcgccttctccgagctcctcccacgctcgcgggtcggagctcgcgcctgcgcagttcggg

SEQ ID NO: 419988 - DNA, 122 bp, Homo sapiens
actagaggaggcaaagccaaaattagccccaggccctccctcaagtagtgaaggggccaccgggcctcccctcaacccgtagggggtcacgggccccgccccgctcccggtcaagaccctga

SEQ ID NO: 419989 - DNA, 122 bp, Homo sapiens
ctaagtactagtttcctgaaagtcctgaaaagtaagccgaaatgcaagttcaaggtatcacgggctgaacttaatgaggaaggagtgacataatttggataggtccttagtttcagagttct

SEQ ID NO: 419990 - DNA, 122 bp, Homo sapiens
aggggggggaggtgacctggaatgggctgagaaacaggagccacgagagccgcgtggtgacgttagaagggcgctacagccgcgactttccaaagctagtagagagatcccagcgtcccccg

SEQ ID NO: 419991 - DNA, 122 bp, Homo sapiens
gagtcctccaggatgtacaccgagtgagcaacattggcaggaaatagttgcttggcccagcgtggcattctgttggtcttggtcaggagtcgccgggacagcagtttctggtcaggggtcac

SEQ ID NO: 419992 - DNA, 122 bp, Homo sapiens
tgtgtgatttagaaatagatctatgggacagacagacacgaaatcgggcattggggccctcgcaggcagggtatctagactggcagctgccggtgcaggatattgccaaggactcggcatcc

SEQ ID NO: 419993 - DNA, 122 bp, Homo sapiens
cgagcaatccattgtacacccactgacgcgagacgccactcccacctctcactaaatcctcgtctaggtgctgtctgttcccggctcctgcgttctcactcattgatctatctgtctcttcc

SEQ ID NO: 419994 - DNA, 122 bp, Homo sapiens
cgggccctgctcagccggtccatggctgtcttaggatcccgcttggtggcgaggagggtgcggctcgtgggtggctgcctggggctaccccgtgtagacttgctgggactttgtctagacaa

SEQ ID NO: 419995 - DNA, 122 bp, Homo sapiens
cccgggccaggcacccccgccgcgtccccctctctctctgccccctcccggtgccaggcgcgcttttccccaggcaggaccgcggtggggactcacctgcagcaggaccccgacgacgacaa

SEQ ID NO: 419996 - DNA, 122 bp, Homo sapiens
ccagctccgagtacatcctgctgagcgttctacaccagctcctggaaggccagtgcaacccggacctgcggctgctgggctgtgctgtgctggccccccggtgtgagggcggctgggtgcgc

SEQ ID NO: 419997 - DNA, 122 bp, Homo sapiens
caccgagggcctccctccggccaggcaccatgggctctgcacacaccaagggctttgctccggccaggcaccatgggctctgcacatatctgctttctaaaggctactttagcccttgagac

SEQ ID NO: 419998 - DNA, 122 bp, Homo sapiens
tggcatggaattcgttacttccagaattacaaggctgacaagctgtttatgaggtgtttccgggctgtgtgttcataaagaatctcccctcaaaatagggcgagctcgttaatggaggaagt

SEQ ID NO: 419999 - DNA, 122 bp, Homo sapiens
gctcccaaggcgggcttcctcccgaggcccagtggggcggcccccccggccccacccacgcggaagtccagcctggagcagaggagcagcccggcctcggcccctccgcatgctgtgaaccc

SEQ ID NO: 420000 - DNA, 122 bp, Homo sapiens
cagactgtcgagtagggccgcccgcgtcgggaccccatccccggggcagtgcgggccacccgggacctgggaacccgggccaccccccaccgccgtcagggtctctcccgccggtgccgcag

SEQ ID NO: 420001 - DNA, 122 bp, Homo sapiens
ttaatgtcttatgctgccttcattactctcacaactaagtctgacattaattaatttaaccgatgcaaactatttcagttttggtgctccaagtttaccataactttgttcatgtatttatt

SEQ ID NO: 420002 - DNA, 122 bp, Homo sapiens
gggcggtggccgaggcgggcgggcgcgcgcgcgaggcttcccctcgtttggcggcggcggcggcttctttgtttcgtgaagagaagcgagacgcccattctgcccccggccccgcgcggagg

SEQ ID NO: 420003 - DNA, 122 bp, Homo sapiens
aacggtatttttttttttttctgtttagagtatgttagtgcagaacgtacaccaccgcagcggttgggggtgggggagccccaaaccagtgaaatctcaagctgagcgtctggctggagttc

SEQ ID NO: 420004 - DNA, 122 bp, Homo sapiens
ccgctacgtgcccttcgacgccgccgtggacttccatcgcctcattgcctccaccgccatcgtcctcacaggcagggcctgggtgtccctgggaggctctccagggcctcccgcccccgctg

SEQ ID NO: 420005 - DNA, 122 bp, Homo sapiens
ttggagggggcctgagggctgcggggcgggaccgagcagggcggggcgcttaggtggcctcgggggaggcggggcttggaggctccgcccctcaggccccgcctcctccccggctagtcttt

SEQ ID NO: 420006 - DNA, 122 bp, Homo sapiens
aaaaacatggggctacatcctagaggcgctgtgcatctttatctgcacagagttttgtcacgtccacagtgcttttcacacgcactatctaatctgatcgtaccccagctccctgatgatat

SEQ ID NO: 420007 - DNA, 122 bp, Homo sapiens
ggcatctggcctgggcaggagcagggccagggccaggggcagcggggcacagggggtggtcgcgcccaggagccatgtggcgcaaggccggacccaggcgcccaccctgcctgccgggccca

SEQ ID NO: 420008 - DNA, 122 bp, Homo sapiens
acgcgtacgacggcaaggattacatctccctgaacgaggacctgcgctcctggaccgcggcggacaccgtggctcagatcacccagcgcttctatgaggcagaggaatatgcagaggagttc

SEQ ID NO: 420009 - DNA, 122 bp, Homo sapiens
atacagtctgtccgactggtgaagagggaagaggcagaaggaaaaagacaagaatgtacacgcatgaaataaggaggctagaaaggtcaaagaagagaaagaaactcgagagggagagagat

SEQ ID NO: 420010 - DNA, 122 bp, Homo sapiens
atgaaagattcagaaataaattacattgtgctccattcttcctggctctcaacatcttcccgcataagaaatcagtttcctgagagtctccaggctccaaaaggccatcctaagggatgaag

SEQ ID NO: 420011 - DNA, 122 bp, Homo sapiens
cccatgtgataagctgcagtttggaaacatttcttgtgatagttcctgttagcaggcaaacgggagagcctcatcttgcgtgagagccctcccattaaagccttgctggctctgtctgctga

SEQ ID NO: 420012 - DNA, 122 bp, Homo sapiens
tctccttccctggctccagtggatttcaggctcacgtgcaggctggaggggtctcacagtcgtagccatcaaacagacactcttcagagtcacactgtgggtggcactgcccgtcccggaag

SEQ ID NO: 420013 - DNA, 122 bp, Homo sapiens
acacataccaggagcttgtctaaaactattgtatcctgcaaatcctattaactgtaaggccgccaaaagcacctatataggttttgctccaaagtttgaaaactgaagagaaaccaccctat

SEQ ID NO: 420014 - DNA, 122 bp, Homo sapiens
cccttggctcacctggcgccgcgagacgaggcgccgtcgcggctgacgctgaagctcagacgctgcagctgctgcacatagcgacccagtccgttgtggagaacgctggccaagaagcggct

SEQ ID NO: 420015 - DNA, 122 bp, Homo sapiens
cgccctgggagccgccatcttgccacttcccctcgcccggccgtccgcgggcgtcaatagcgactttcagcacaaaacaaagatggcggcggcggcatctcggaaatgcccggatgagactg

SEQ ID NO: 420016 - DNA, 122 bp, Homo sapiens
gaaaaccaaacttaatatgcaatagcataaactaatcattgtttcattttctggaaattgcgttggcaccagggtgagaagtagatgaaaaaacgccgagaaaaacaaagacatctctcggt

SEQ ID NO: 420017 - DNA, 122 bp, Homo sapiens
agctgcttcctgtcatctgatgataccctaccttatacagggacaatggccacatcagtacgtaatctgtgtatgccaccccacagcacaggagctgtggccaattttatttaaaaaaaaaa

SEQ ID NO: 420018 - DNA, 122 bp, Homo sapiens
caggaaacctagaagatacaggatcagttctgttaatgctgtctgcagagagaaaagggacgtgctgcagggtttatcagagaagccaggcaggaaggatcagggacgcagccatccactca

SEQ ID NO: 420019 - DNA, 122 bp, Homo sapiens
catcgatagccaaagcctgccccctctgcagcctccacccactgaatcagaagagggtcccggagatctgcatttcactctaaaaggcaacctccagtgctccttagacttgcttagaaaat

SEQ ID NO: 420020 - DNA, 122 bp, Homo sapiens
ggaggctgaggcaggagaatctcttgaacctgggaggcggaggttgcagtgagcagagatcgcaccagtgcactccagcttaggcaacagcatgagactccatctcaaaaaaaagaaaaaag

SEQ ID NO: 420021 - DNA, 122 bp, Homo sapiens
ctcagtccgtgggccactgccaacccccaggcccaggccccggccgccccactccctggacgcggaccccaatccagctgcgacagggacccgagtttcgacagagcctgcatcctccaccg

SEQ ID NO: 420022 - DNA, 122 bp, Homo sapiens
cttgtgtcttagataatatgcctgcccctaagcttagaattcagctacagacacaggttccggtgactcaataagaaagagatttaagacttcctttgattacccagttatccacttggtta

SEQ ID NO: 420023 - DNA, 122 bp, Homo sapiens
cccctcgcgcatcccaggggccaggcgggcgctgcaaagcctgctgggaggtgtagttttcgctgaagacggggctgcccagagccaaagcagggtgggctccagagcaagaagccatcgtg

SEQ ID NO: 420024 - DNA, 122 bp, Homo sapiens
ggcgggggcgcgaggtagtgggtggccccccctccttgctgccctccccttgcactcacccggaagtggtgctgcagctcgtgctcccgcgaaccccagttcctccacgcccccctccctcc

SEQ ID NO: 420025 - DNA, 122 bp, Homo sapiens
tgcgggtaagcaccagctgggcgtcagcaaagcccgagtcagcatcgctgaaggccacgtcgtctgtagtcagcagccgccgcccaccccgggccacatggaagatccggctgatggtctgc

SEQ ID NO: 420026 - DNA, 122 bp, Homo sapiens
ttaacccacaaggaattttctcttgtcctaaactattatggccttctttgtccgattgaacggaggtaacgaagtctcgtcttccgccagtcgtccgggcgaagccagtctggagccgctcc

SEQ ID NO: 420027 - DNA, 122 bp, Homo sapiens
gccttttccgacataatgtgagtgtgtgtgtgcgtgtgcgtatggggtgtgtggtgtgggcgtggatgcatccatgcttgtgaccctgactgctggggtccagtcttcagcacaaaagcaag

SEQ ID NO: 420028 - DNA, 122 bp, Homo sapiens
tcccctcacctctagagcgacgcccagattctcccgcttctttttagtcatgttacttgccgggatcccccagtcatcactggacgcgcccaccaagtcgctatgtgcgcatgctcaagtct

SEQ ID NO: 420029 - DNA, 122 bp, Homo sapiens
tggtggggcctcctcatgggggtgaagggatccagtcgcagtcctgccctctccctgctccgggagaactcaccaagaacacacaggagcaaaaagatgctgagccccatggtgggtcactt

SEQ ID NO: 420030 - DNA, 122 bp, Homo sapiens
cgcgaaggtcctgcggcatctcctctcgcagttgccgcagcctagccggccgggggcaggcgctggtgccccccgcccgctccccgcagccccagcagagccggagttcccgcggccgccgc

SEQ ID NO: 420031 - DNA, 122 bp, Homo sapiens
ctcctgtggctccccagctcacaccatcgcactccgtgcacttccacacacagcactttccgctgctgccgccaggacccgtttgctttgatcaactactgtgttttaaagatttctgaggt

SEQ ID NO: 420032 - DNA, 122 bp, Homo sapiens
tagtgtgtaaaacttatttttaaatttctgttctttaatggactttttattgttgagaagcgctatataactgagctaattcaatttagtagagaagatggctctttgattgcagctctcag

SEQ ID NO: 420033 - DNA, 122 bp, Homo sapiens
tctgttacccaagggagctggctcaggagctttctgctctggctgagggtcctctgtagacgggttctggccgaggctcagcctggtgaccctcttcacaaaatcccttctgcaggctttgg

SEQ ID NO: 420034 - DNA, 122 bp, Homo sapiens
cttctgcttcgaggtctccttgaggacactgtttcagaaatctctgttgcaatatttgagcggatcactcaaccctttccactcttaatttttctctaccatctcaccttaggcaatataaa

SEQ ID NO: 420035 - DNA, 122 bp, Homo sapiens
tgctagcacagctgccggcaatttgtgcatgccttgtggtgagaaatgtggctgcctccccgggccagagcagccagaggcccaggcctgcccgccctccctggcttgtcctcatcttgctg

SEQ ID NO: 420036 - DNA, 122 bp, Homo sapiens
ggccctgtgcctgcaaatcccgaatcccctttggtctcctttcctacgactgaagagacacgggggtgggctgtggtgtgaggaccatgggtcttggccaaacatcggcacaaaatgtacca

SEQ ID NO: 420037 - DNA, 122 bp, Homo sapiens
tcagcgcggctcatcttcgcccagccaggacacgcaggatcgcgttatctgtccctcccgcgggcacattgggagttgtagtctaattatatatttccgcccttagtgtggggagagcggga

SEQ ID NO: 420038 - DNA, 122 bp, Homo sapiens
gtccccagctcctctagggttgcgcaaatcccttgcggcccagatgccaggcagggcctccggctcaccttgctggatgtcgccgttgctgccccccgggatgggcacgctgagctggcgct

SEQ ID NO: 420039 - DNA, 122 bp, Homo sapiens
agcagcctctcttgaggaaaataataagtggtgctatcattgactgctatctctgaccctcggagattatgttgaccagagctgtcccagtcccaaataatgcaatatttgcagtaggtact

SEQ ID NO: 420040 - DNA, 122 bp, Homo sapiens
gccggggccgtggctgacatggagcaggtgggtcccggagcggtcgctgggagcgggtggcgtgcgagggccgtcttccgccggtcgaacccgcttcgccgcccgctgtccgtgctgggttc

SEQ ID NO: 420041 - DNA, 122 bp, Homo sapiens
ccgaccccgccgcgggctgcctgactggcgggcgggcgggaggggtggccgagaggccggcggcatccctcccctgcgggcgggcaggcgggcgggacgcggcctccggggcgcatccgcgg

SEQ ID NO: 420042 - DNA, 122 bp, Homo sapiens
cagtctcagaagctgcgattccgccggtggtgacgctccagttaccctacggtgatcacacgtgtgctgatatacctcttgtgcccacgttcctccttggggtcagtcctgcagacctgcat

SEQ ID NO: 420043 - DNA, 122 bp, Homo sapiens
cccttttgccactaaatgcttcaaaactgccttttttcctcgccgccgggccaggcggaacgcctaagtccgggtcagtctcgtccgtcggtcggggctggcgcggtgcatcgtgggcactg

SEQ ID NO: 420044 - DNA, 122 bp, Homo sapiens
ggaggctgaggcagaagaatcgcttgaacatgggtggcagaagtttcagcgagccgagatcgcgccactgcactacagcctgggcaacagagtgagactctgtctcagtgacatatttatgt

SEQ ID NO: 420045 - DNA, 122 bp, Homo sapiens
gctaatagacacaggggctccacccgggggaagccaccgtgagtcacaggcctacgcatccggtactactgggcccaaaatatctgattgcgtctggggaagcgacagccaagcccttaggc

SEQ ID NO: 420046 - DNA, 122 bp, Homo sapiens
tattcgggaggctgaggcatgagaatcgcttgaacccgggaggtggaggttgcagtgagccgagatctcgccactgcactccggcctgggatacagagcgagactccatctcaaaaataata

SEQ ID NO: 420047 - DNA, 122 bp, Homo sapiens
cgagaacgcgcgtcttccgggccgccccgccagccgccggccgcccccgcgcccgccttgcggacggccccagccccttccgcaccctggcccgcgcttacctgcagcctggcacaggcaca

SEQ ID NO: 420048 - DNA, 122 bp, Homo sapiens
tttcgtcatttttgaaacatagaagccgtaacggaagcaagtgaaatgctcagtcttagacgactgcgtcgtgctatgaccggactttttcttgaaaggtaaatgcatttaccacatgcttt

SEQ ID NO: 420049 - DNA, 122 bp, Homo sapiens
ctataatcccagctactcgggaggctgaggcaggagaatcgcttgaatccggggcaggggcgcggaggtttcagtgagccgaaatcgcgccacttcacactccagcctgggagaaagagcga

SEQ ID NO: 420050 - DNA, 122 bp, Homo sapiens
tcaccggggtctagggaagccctgtgactgtgactcagtcacagatggagaaggtcagaccgccggctgactgactagcctaggtcagttcggggaggttaagggccacgtctgaaagtccg

SEQ ID NO: 420051 - DNA, 122 bp, Homo sapiens
tggctctttgaaattatatatttcacagatgatatctaagaaatctgaatctcaaagctccgtgacagaggcagaatcacaaatgctcatttgcagatggcacaggcagagctgagagtgga

SEQ ID NO: 420052 - DNA, 122 bp, Homo sapiens
atcccaccgtcgggcctgccccaggtctggagcccggtggagaagacctaccactcgtgccgccgccggcgctgggcgcgtgtgcgcttcaggaaccatggggagctgagccacgagcagga

SEQ ID NO: 420053 - DNA, 122 bp, Homo sapiens
taggtctagaaagaaggacgcggcagtggggttggagcccagcacaggagggaagagctgcgaggcggcaggctggagccccatgactgtgtgtcaaagtatgaaactggggttttgtaaat

SEQ ID NO: 420054 - DNA, 122 bp, Homo sapiens
ggaacagtctcagcaccgcaaggaccagcacactgacccatatctgtgggcccggtggcccgggcccagagggaacccaaatcaactgcttccttggcagaactggccacacgcacaggtcc

SEQ ID NO: 420055 - DNA, 122 bp, Homo sapiens
catttccatctgagtagcagtcagaccatctcaggctcgaactatgctgcaggaggaagccggcagccgagttctcccttcccaaggagcttacccccaccctcccggctggagaacctgcc

SEQ ID NO: 420056 - DNA, 122 bp, Homo sapiens
cgaactcctgacctcagatgatccacccacctcggtatcccaaagtgctgggattacaggcgtgagccacggcacctggccaacaattcataagttttaagtttcacactgttgtgaatagc

SEQ ID NO: 420057 - DNA, 122 bp, Homo sapiens
tggaggagcactctgtcccaccaaggacaactagaaaccaaagccatctgacagccagtgcggtaagggcgggggatgtgtgtgtgaggtgtgcacaccccccgagaacctggccctggact

SEQ ID NO: 420058 - DNA, 122 bp, Homo sapiens
agttaccggaagaactaggtagtctcttctcgcgagaaagggaggggtcgcaggcccaggcgctcggagcgttaccagggaaacaggtctcggttttgcggctcccactcagctgcgggaga

SEQ ID NO: 420059 - DNA, 122 bp, Homo sapiens
cccggaggagggaagagggccttggctgggggttcttgagcgggactgctggctgtccctcgtcaaacccctgacctcagcatccctccccgccacgcctttcccccagggtccgtgtatcc

SEQ ID NO: 420060 - DNA, 122 bp, Homo sapiens
tggaaggctgtgtagagaattaaggttgtgggacggaaagcacttggcggggccttaccccggtacttctcggccggggcgattttgcttccctggggacattggtcgatgtctggaaacac

SEQ ID NO: 420061 - DNA, 122 bp, Homo sapiens
acacagacctactcccctgggggctgagggaggtcactgggaggtgatctttttccacctcggattgagcaagagaaggctgccagtggcccagactttgaaacaggccaggcagaggccag

SEQ ID NO: 420062 - DNA, 122 bp, Homo sapiens
acggaatatagataggcccttgaacttgaaaggttgtaaaaacggaacaaatcatgtattcgatggcgccacctgttgtcaatgtgtgatattgcagcttgtccaggaaaggaggaaagagg

SEQ ID NO: 420063 - DNA, 122 bp, Homo sapiens
gtggggaagtggggggagtttgatccttgcactggactttatccaagccgctagctgacgcgcgccgctggagtcaagcagatgccccggcgggcctgctcttgtctctgttccctcaggtt

SEQ ID NO: 420064 - DNA, 122 bp, Homo sapiens
gactcagctttttgagctgaggtagaggccagcaaggcttgtgccttgattatcttgtgccgactaataatagcatacctacccttcctgttttcctgatgcataagacaacctgcatctct

SEQ ID NO: 420065 - DNA, 122 bp, Homo sapiens
ctgcagacagaagctccctgtggacagcacgctgcatctgggtccagctctgtgcacggccgagagctaccctcaggaaatgtctgctgaactggctggcttaaaaattaactgcctccgcc

SEQ ID NO: 420066 - DNA, 122 bp, Homo sapiens
aggcctggagcagatccttctctcacagccctgacacctccatctgggccttccagcctgcgggactgcaggacaacacatttctgttgtgaagctgtccagctccaggaaataacacactg

SEQ ID NO: 420067 - DNA, 122 bp, Homo sapiens
agccctgagggggtgcactatggggcaggggaggggcagcgaggggccagctctcacctgcgtgacgtcatccctaggcgtcacacaggtctcaccccctgctgtgaagttgcagaaaactc

SEQ ID NO: 420068 - DNA, 122 bp, Homo sapiens
tcatcttcgcagcagctctttttggtgagtactgttatccccattttgcaaataaagcaacggaagcttagagaagtaacttttccaaatgtgcctcagctccaggcaaaataggaacctag

SEQ ID NO: 420069 - DNA, 122 bp, Homo sapiens
ttttgtcatttccacccatactgaagtgtgtatcttcctttattttaaaattacaagaaacgcaggtctgctttttttgtgtgtgactgacaaaggccgacggagagtaaaaacaagtaaac

SEQ ID NO: 420070 - DNA, 122 bp, Homo sapiens
agtgtttgcccttaagccagaatgctattttgaaaagctggctaattttaatccaaattgcgtatcttgggctaagagctctccatgcctgagaggaagaacaatgcacaaaagtggactcc

SEQ ID NO: 420071 - DNA, 122 bp, Homo sapiens
cgatggcagattccctcttgctgggctctggcgggtgccatgttgtccccagcccactttcggcctctgatgcccagcgtgggcttccagaagcagccatttgactgctctgcactgggggc

SEQ ID NO: 420072 - DNA, 122 bp, Homo sapiens
gccgagacctttcacccccgggcggagcacgggcccccgcagggacgccaaaggaagtcgcgccacctgcggggtcccaagtccggcatatttttgtttgcaagaccaaaagccatgcggag

SEQ ID NO: 420073 - DNA, 122 bp, Homo sapiens
ggcaaatgcgcacgacctacattaatttatgcagagacagctgtttgaattggaccccgccgccgacttgcggatttccaccgcggaggccccgcgcgccggtgccgagggccgaggagcgc

SEQ ID NO: 420074 - DNA, 122 bp, Homo sapiens
gagggagcggtgtcggggggagactaaccatggcccacggggctgcggtagctgcggaaccgtacccgacaggcagcgtccccggctccctaggtccccgctgcccgtgtcggatctcgcag

SEQ ID NO: 420075 - DNA, 122 bp, Homo sapiens
tcccgaagcaccgcccactgacagcgtgttccaatcagaggcggagaggaacaaaagaggcgaggtccgggagacccatacagggcggtttccacagagaccccagacgcagtcttggctcc

SEQ ID NO: 420076 - DNA, 122 bp, Homo sapiens
ccaaccggcacggggaggcgggcagcgggcggtggccgggggcgggcaggccgtggggggcggaccccagagggggcggagcagggcccggcagccgagcagcctggcaacggcggtggcgc

SEQ ID NO: 420077 - DNA, 122 bp, Homo sapiens
gggttcagacaccactgtcggcgagcaccgtgctgggcgcagaggccacgtgtggtgggacggcagcctgctggcccctccaggtgaggaccaggagcacaggctgtggcaactccagcccg

SEQ ID NO: 420078 - DNA, 122 bp, Homo sapiens
cactgagggtgctgctcagccttgggccaggctttgctgtgaggataccaagaggaatcacgctgagaccagtccccctgggagcccacaccctggttcagtgacttggaaaccttttgaac

SEQ ID NO: 420079 - DNA, 122 bp, Homo sapiens
agacgcaagggccaccccgcctacgcctagcggcgcagactggcggtgctcgcaatgccgcggaggacgccacctcttatcgccgcttgcccgtcgaggccacgccccctcccgcctccact

SEQ ID NO: 420080 - DNA, 122 bp, Homo sapiens
catcaaatgatcaaaacatttgccactgaggcttcactggtgagatccgttctccgtcctcgggtgcagtcccttgggggctgctcctcggactgcgccccgcacacctgttatcgagggtg

SEQ ID NO: 420081 - DNA, 122 bp, Homo sapiens
tatggagtgtgcacattctaacacagcaccttgtcagctggctgagaagctgaaaattctcggcattcctccttgatgtcaattacttcaaggagcaggaaggtgacttcttttaacaagtg

SEQ ID NO: 420082 - DNA, 122 bp, Homo sapiens
caagacggcgggaaaagcaagcagcgaagcctgggaagccccttcgagcaactgcagctccgccagcggctgtgcccggggggggggtgtgggggggggagcctacgcagcagggcgcctgc

SEQ ID NO: 420083 - DNA, 122 bp, Homo sapiens
aaagcgtcccagggcctcctacaccagcgcctgagcaggaagcgggaggggccatgactacgaggccctgggaggtcactttagggagggctgtcctaaaaccagaagcttggagcagaaag

SEQ ID NO: 420084 - DNA, 122 bp, Homo sapiens
agctagaggatcctgtggggaaagtgccgggcacacagtaggggctcactcttctagacacgttatctaaaacctggttcatctgtccttccacgcagggcctaggggatgccgaattccag

SEQ ID NO: 420085 - DNA, 122 bp, Homo sapiens
cgcttgggagtccagggcgccacctggtggccacccgccgcgcagcgccgcgcagcgccccgggtcccccaggcctagggccgcccccgccccgctcccgcacacacgcacgtgcccacccg

SEQ ID NO: 420086 - DNA, 122 bp, Homo sapiens
ctttcacatggacccgttgtaagcccttaaaagggccaagaatttctttcttagggagctcggctcttaagacacaagtctgccgaagctcccggctgaataaagcctccttctttctttct

SEQ ID NO: 420087 - DNA, 122 bp, Homo sapiens
gccatggcacacacacacagggaccccctgccacggtgcacacacggggacctcctgccacggcacacacacggggaccccctgccacagcgcacacacgcagggaccccctgccacggggc

SEQ ID NO: 420088 - DNA, 122 bp, Homo sapiens
gcacctgtttgcgctcatgatcagcacctgcatcctgcccaacatcgaggcggtgagcaacgtgcacaatctcaactcggtcaaggagtccccccatgagcgcatgcaccgccacatcgagc

SEQ ID NO: 420089 - DNA, 122 bp, Homo sapiens
cgcttgaggggtagcttgaaggcccctgaaagcagggaacgaggcgcggctgtgcgcgcgcggcaggtgcacaggacccacctcgccgggacccacctcgccgcagcccctgcgcggccttt

SEQ ID NO: 420090 - DNA, 122 bp, Homo sapiens
cttctggtgctcttcggcagccagacaggcacggctcaggatgtgtcggagagactgggtcgcgaggcccggcgccggcggcttggctgccgggtgcaggccctggactcctacccggtggt

SEQ ID NO: 420091 - DNA, 122 bp, Homo sapiens
cgtgtggtgaccagggaatcctgggcttccctgcttcatgcggacagtgtctcaggcccacggggggcaggtcaaagtggcagtaagtattcaaaggggaagtcgaggcacctgtgtgttat

SEQ ID NO: 420092 - DNA, 122 bp, Homo sapiens
ccgcggcggctgctgaggacctggggagacccagcctgtaggatccgcagctgcggtgcgcggccggcagtggcgctcgggcttcgtccccgggggcggggcttcgtccaggcgcgcaggga

SEQ ID NO: 420093 - DNA, 122 bp, Homo sapiens
gagatggaagggcaggagaaactcacccttcggaaagagacaacataaaatgtgtcttcccgtcggtcaattgcatccaagaatgctggctgcgaacggtctgggtggcgatatagttgcag

SEQ ID NO: 420094 - DNA, 122 bp, Homo sapiens
cctcttgctcaggtgcagtgctcctggaagggccgaagagtgggtcctgcctcgggtgggcgcgccctgctgtgctgagcccctcacaacctggcagcaagggttgccctggcccagcgctc

SEQ ID NO: 420095 - DNA, 122 bp, Homo sapiens
gggacccagggaaacccagcaggcagcggtcactggcgaccttgagtgtggagaagggagcgaggaggagcctgggtggacacctgcagcacctgcttcagaggcgaagtgggtacaggtac

SEQ ID NO: 420096 - DNA, 122 bp, Homo sapiens
ggttagctgtatctttaggtcttacttaggctggtcaaattaaccataaaaaattctatgcgttcctgcctaaaggatttagacctacctgtcagtgttctgagaaccccctacatgaagta

SEQ ID NO: 420097 - DNA, 122 bp, Homo sapiens
atttgttcctagtaactacgttttggaaagcagctgtggactctcaaggacaggcaggaacgaagacctccttagggtccgagtgtcgcttcccacagttagattacccatgaatttccttg

SEQ ID NO: 420098 - DNA, 122 bp, Homo sapiens
tggctcagaggccaatggacgcctggtacatgaccggcatcgactaatcagggccaggctcgatgaggctttgtctccctaccgcgcgcggggccgattctcccgcctcccagccccggcgc

SEQ ID NO: 420099 - DNA, 122 bp, Homo sapiens
aagggccagcacagcactcactaagagacaattgtagttcgtacatttataaagaaaagccggcctcacactgtgcacccaccccgtgacaagacgctttttcgtttatgtcatgtagccat

SEQ ID NO: 420100 - DNA, 122 bp, Homo sapiens
cggcaaaaggccaaggcttaaacccacctcctgcaccgctcacctcctgactccagctgtcggccttctaggcaccgtccctcagtctccgctgtgggtccccacccaagctccctgcctgc

SEQ ID NO: 420101 - DNA, 122 bp, Homo sapiens
ccggtctcgctggttgcaaatgactagaaacactgtcagagatctcgacaccaccacaatcgaaagaccaggctgtcctgacagaccccgtcgttttggcttaggcggcagattaaagtgta

SEQ ID NO: 420102 - DNA, 122 bp, Homo sapiens
tccggggctgagcggatgggaagcctcagccgcaaggggcccggctgcctggagagcggccgcccgcggaggccccgcagcctaacgccgccccggcgcggcctccctcccttctccccgca

SEQ ID NO: 420103 - DNA, 122 bp, Homo sapiens
tgtaaacagcctcggggtcccagacgagacaagtgggaccgctcaagcctgcagaacccccggtctcggtcccaggcacaagagcctcccgtagccccgcctgatctttctcagtctttagg

SEQ ID NO: 420104 - DNA, 122 bp, Homo sapiens
gtacgtttataccgcaggcgggcgagccgcgggcgctcgctcaggtgatcaaaataaaggcgctaatttataccgccgtggctccggctttccctggacatgggtgtgggatccggaggaaa

SEQ ID NO: 420105 - DNA, 122 bp, Homo sapiens
gtttttgactactgctactccagaaatctcccactaaaaatcctgtggaattgggataagcgaagtccctttacctgatttagtaattaggtaaaaagaaaacatgaaaactttaggtctcc

SEQ ID NO: 420106 - DNA, 122 bp, Homo sapiens
gccaacgtctcccgcccatcccaccttcctgccgtcccagtgggctctggtaggcccaggcggcctgtctgccctccgcgtcatgagtctgggctggggcctcagaaggtgtggctccaggc

SEQ ID NO: 420107 - DNA, 122 bp, Homo sapiens
ttaatttcggaaatgcagaggtacacgctttctcaagcctagccgattagaaggggctgccgggcttccaccacacctcatcgaggcaatgttttctggtagagatgctcatggaaatcact

SEQ ID NO: 420108 - DNA, 122 bp, Homo sapiens
ccctcggctcggatgctcgttagggatgttagtggttattggaagcggcgcggagaatggcgtgttccgaggccagatttcttctggccagaggaccctcggcctgctcctgttcccgccgc

SEQ ID NO: 420109 - DNA, 122 bp, Homo sapiens
tcctcaatgattgtgaggcctcctcagccatgtggaactggctgcagagtcattaaacttcgttcttttgtaaattgcccagtctcaggtatgtctttttttatttttttttgagacagagt

SEQ ID NO: 420110 - DNA, 122 bp, Homo sapiens
ccgggcgctgggtggggaggggctgtctgggcgcttattgttggtcggactccgagggtccgggtcacagcccccgggcggcgcggcgccgggggacccaggcgtgcgggcgtccggccggc

SEQ ID NO: 420111 - DNA, 122 bp, Homo sapiens
accaacaaagagccagttaatgctaattgtggcgatgctctttgtgaggcaacagctgtccggtatctggatgaaagccaccaccgcatttcacagaggccacagaacagctgttaggagac

SEQ ID NO: 420112 - DNA, 122 bp, Homo sapiens
attctgttataagcaacagaaaatgaaccaagagtatagttagaatcggtttgtatatgccgtgatgttttagttgtaaaaggaaaattgattacattattgacagcagtaacacagcatgt

SEQ ID NO: 420113 - DNA, 122 bp, Homo sapiens
ccaaagcccttgtatcttaagtctcaaaagtacttttgagagatttcagaccctggaacacggtatttgataccagccctgtccatgtgtgggtagctttctgagttatgtgaccaatcaac

SEQ ID NO: 420114 - DNA, 122 bp, Homo sapiens
cacccggttccaccgtccccggcagggagcccaggggccgcaatgcaggggcaccgctcccgccactgccaacatcttccccagccacccggcaggcccgggctgggccctcagagccctgg

SEQ ID NO: 420115 - DNA, 122 bp, Homo sapiens
ggaggaggaggctgatggcctctagggttgtggtcactccctctgccagggcctggctagcgttagagctgttactgcccctaccttacagataagtacactggggtaaggtgaccagacta

SEQ ID NO: 420116 - DNA, 122 bp, Homo sapiens
ccccgcaccgctcactaactgggatctgaggcactctgagctctggggcctcttctcacccggacccggggctgcctggcgcctcccacgcctacgtatccatatggtagctactcacgctg

SEQ ID NO: 420117 - DNA, 122 bp, Homo sapiens
gactctggaaattccatacatactttctgcattaggaagacattctctgcatgctgatctcgttaaaaaggaaaagccaaggagcatcctgcacctccctcctgtaagcgagctttgcaaat

SEQ ID NO: 420118 - DNA, 122 bp, Homo sapiens
ctcacagcttataagtacagtgctagctgtgtgagacgaacaagcaaaggaagaagctgacgccctaataagtgcaaggagctgtagaggttacttagaagacttggtcactcttctaaaaa

SEQ ID NO: 420119 - DNA, 122 bp, Homo sapiens
tgcagctgtcagggtctagggggcgacggtgggctcggcgccctcccagtgaggtggtggcggcatgcgagtctcctcggcgcggcggcagcagttttcagattgaggccaagagacctgtg

SEQ ID NO: 420120 - DNA, 122 bp, Homo sapiens
ttcgcgggattttttttcaagcacgaagggcggggcacgaggcaagcagggccgcgccaccggccaacactgtcacctgcaggtcatgagagccgagcgccaccaaccccggaagaaaatac

SEQ ID NO: 420121 - DNA, 122 bp, Homo sapiens
tcacataggagagtccgggcctctgagcagttcccactgcctctggaagtgtgcatgtctcgtggccgaagttcaacaagcttacacatctgtgcaatttcacaaaatctttttgaacagtt

SEQ ID NO: 420122 - DNA, 122 bp, Homo sapiens
tgaatgccatttcttttctttatcactcttcttgatttactgggccatggagattctatccgcctaatccaacaactaagaatagaatggtgagatccattccatctcaccaaatctaacag

SEQ ID NO: 420123 - DNA, 122 bp, Homo sapiens
ctttccccttctaatactaggtcagtttctgtgtggtaacttgagaatacaatgaaacatcgtttaaagtaacctgtggcatgttactggtaccttgcaggctaaatacatcctaagtgtgc

SEQ ID NO: 420124 - DNA, 122 bp, Homo sapiens
tatggactcaggaagctgggaaagcgcaaagtctgagaagagggaatgcgaagagtggggcgagctgaagaccagcactgtctgagaatgcgttagaaataactgaatcatagtgcatcacc

SEQ ID NO: 420125 - DNA, 122 bp, Homo sapiens
gctccctagccacagcccaccagaagccagagggcaatggggcctgtggatggcgccatacgagtcagcctctgccctgctcatgccagctctcccctggcactgccaggccccaagctgtc

SEQ ID NO: 420126 - DNA, 122 bp, Homo sapiens
ccttcttgctggcccttactggccactggcacttactgctgactgctcgggtcatgtgcccgggctttcggaacaagaagagctgccagttctgactcgtccccgtgtcctgcacacagctg

SEQ ID NO: 420127 - DNA, 122 bp, Homo sapiens
tcgcaaaagaaccgtccccatgcagtactgtacttttcttttcccttctgccgtcaacctcggagtagcttcgctcccagaaggcctcaaagcgcgaccaaagagcgtgacagagcgcttta

SEQ ID NO: 420128 - DNA, 122 bp, Homo sapiens
ttttgccgcctgaggctcgcggggcccgtgggacctgcgaggccctgggccgtgtcctaccgcctggccccacacagggcaactcccttggcctgtcaacccaggcctagtataccccgact

SEQ ID NO: 420129 - DNA, 122 bp, Homo sapiens
gagctaggggcgggacagagccctggggaagagcccagccagaccatggggttggagcaccgaggacctactacgggttcaggttcccggcccagggttaaagtggacggagctctaagctg

SEQ ID NO: 420130 - DNA, 122 bp, Homo sapiens
ccaggaccctggctctcatttcccagggcttgtcctgggggtgagcaccaggctctctgccgatatttcagacacaaatggggattcacaagggggtcgttaagaaggacattttcggccgg

SEQ ID NO: 420131 - DNA, 122 bp, Homo sapiens
cacggacgccactggaggatgagcctgcagcccctgagcagttctcccaccgtggggccacgtgcacacggggtgatctccgtgcctcaggaagctgcgctgcgaagggaggggagacgatg

SEQ ID NO: 420132 - DNA, 122 bp, Homo sapiens
gacctctgggaagtgtttcgacgaggatgggggttgagggggcaaagggcaagtgcccaccgcctaccagacagcaccggtgcgtctccagctcggcttccccgccagcccctcaggcctgc

SEQ ID NO: 420133 - DNA, 122 bp, Homo sapiens
acatttaataatgtaatgtgtttgtcatacagggtgaatacagatgcacgggaggccatacggtttaggcaaaggggagcacaaaagttgaagatgaggcgctgccatcaatgctgggactt

SEQ ID NO: 420134 - DNA, 122 bp, Homo sapiens
ccagcccctgggctgggacacccgtgtggcacgtcgcccacgctgctataaaaggggtcccgcgcgacttccaaactcagcgccaacccgcagaaccaggaaagtaacggctacagacagtg

SEQ ID NO: 420135 - DNA, 122 bp, Homo sapiens
atctggattccagtgatcctctgcagtgcccacctgcctccagggagcgactgaagaagccgactgccgggggaacacctggattcatgaaccaaagcagcctcaagtttcatgttgtcaag

SEQ ID NO: 420136 - DNA, 122 bp, Homo sapiens
tttctccaccgagctccagcggctgcggggcccggcgccgccctcgattaatgctggcagcgccaccaagcgggcagctgggaaacagcggccacctcattccaaggaagcggggaggcgga

SEQ ID NO: 420137 - DNA, 122 bp, Homo sapiens
agggacccctagggtcagacagcaagtcccagctggtgccactctggcccccaccaactgcgtggacagccctcacccccgctcagcctccctgagaagaaagggtgggcacaaaccctccg

SEQ ID NO: 420138 - DNA, 122 bp, Homo sapiens
ccaacttgatggtataccacctgcaaagctatcccagaaacagatgaagtttaggatgcccgaagactggtttgtgacatagaaaaattggaattgaaatgaaactgcacattcattgatat

SEQ ID NO: 420139 - DNA, 122 bp, Homo sapiens
ttcccgagtgagagccgctgtttcccgagtgagagctgctgctccccagctgggaggaaccggatgcaccttgtagactagagccagatccggaggagtagctgacctgggaataccccgtt

SEQ ID NO: 420140 - DNA, 122 bp, Homo sapiens
gaaggacggggcgcgcgcggcaggggggcaggcggcctggtgcaggtgcatccccaggtgcgcgccacgcccctgcgggacccggcggcaccgcggtgcgttcccagccgccggcgctagag

SEQ ID NO: 420141 - DNA, 122 bp, Homo sapiens
agcatctggctgtcctggtggggacatatgagcgctgccacaggccgggaatatcccaggcgagtaagaatagcccacaataagagatgactgctgcttgctctgctggtcactgcagttgt

SEQ ID NO: 420142 - DNA, 122 bp, Homo sapiens
ggttccaccgacactggaggccaggcgtgggccctccgtaaagtcccccgtgtgggattacgggacaggcggcggaaccccagtttaaccctgggtgtgtttgggcacgcagccatgccgac

SEQ ID NO: 420143 - DNA, 122 bp, Homo sapiens
tgtcaaggaacctgccattgtgttgctgaaaggcacttgcaacattgcataaaaatcaggcgttcgtgtcaccctcagactagtcaaagctgctgttttttctttctctttttgaaagaaga

SEQ ID NO: 420144 - DNA, 122 bp, Homo sapiens
ttccccatgacgccccacgcccccaccctgcgtctgctcctgtgacttgaggaaacggaccgacctcctttaaaggaggggttcctgagcctggggagcgtgacttccgagcctgtccgaaa

SEQ ID NO: 420145 - DNA, 122 bp, Homo sapiens
gagttccaggactcagtttcccctttgagcctcctttagcgactaaagcttgaagccccacgcatctcgactctcgcgcacaccgcccttgttgggctcaggggcggggcgccgcccccgga

SEQ ID NO: 420146 - DNA, 122 bp, Homo sapiens
tctggaaactgctgacaccgtaaaaacctgacttccctcaggaacagcagccgtcagggccgcgcagagcaccgcagagcgctgatcaggaaagcgacgccagacgaaccggtcgagaggaa

SEQ ID NO: 420147 - DNA, 122 bp, Homo sapiens
acaggccttagcagatacatccctggctgggagcaggagaggcaccttattactgttccacgggtgccttactgtgagattaggtgagatcttcttacctctggatagttataaaagttctg

SEQ ID NO: 420148 - DNA, 122 bp, Homo sapiens
agtttcattgaagtgagtattttacaggtgagggattaaaattagaaacaagctatagctcgaaagcaatgttactgtactagtaatagtcttgctattgttttagatctcaggcaggcatg

SEQ ID NO: 420149 - DNA, 122 bp, Homo sapiens
cggcctcctgggatgagttgacaggccaaagcctactggagctgaccatcatgtgtccagcgtcagggtccacatgcaaagtggccttcactgagggcaaggacgaacaagactccagttga

SEQ ID NO: 420150 - DNA, 122 bp, Homo sapiens
ccactgccggaggaatctggcgcagaacctcgcccacggcaccagtcacccctctgctctcgtgttctcgagccgcagtttcataaatggtctgagccgtgtctgtgattccctgcgtagag

SEQ ID NO: 420151 - DNA, 122 bp, Homo sapiens
tcctttctcctgctcagtggggcgtcatggagtcctatgttggggtctttcatgggtttacggagagatgagtgagcaaatgcagagactgtctcagcctgacacaaaccccttcccctttc

SEQ ID NO: 420152 - DNA, 122 bp, Homo sapiens
gaggcccggaagaggcctttccttgatgatcgagctgtgcacagggagcaaaccccaagccgactgcttgtctgtgccaccctcaaacaatgatttccccaaattggacagcctgggtttgt

SEQ ID NO: 420153 - DNA, 122 bp, Homo sapiens
acggcgccccacacgctgtaccgcccgtcgcgttctggacgccccggcgaccacacacaccgagacacacctcagcgacaacctggatccacaaaaaggaggccctgcccccttaaaaaata

SEQ ID NO: 420154 - DNA, 122 bp, Homo sapiens
gatctacctggggaggcacctacaaagccagcagactgacacccgtgtcctagccgtcggcggcctgcgaagcgatagtcaaaggaaccaggacccaggaccccggcgctctgcttacccgc

SEQ ID NO: 420155 - DNA, 122 bp, Homo sapiens
tttaaagaacaatccttcttctgttgccttagagagttcatttggcattgtaaaagtggacgtaatttcaaggggtggccaaaatgtatcaattagcctgacaactaggtctttttaacaga

SEQ ID NO: 420156 - DNA, 122 bp, Homo sapiens
cgtgatccgcccgcctcggcctcccaaagtgctgggattacaggcgtgagccaccgcgcccggccgctttatttctttagtaaaagcaggagtgtacaattttatttggaattaactattta

SEQ ID NO: 420157 - DNA, 122 bp, Homo sapiens
ccaggcggggcagccaggcggaacggagcacccggcacctcgctccgccgccgtggcggccgccgctcgcactgtgacgttagcagccttcgcggctatttatatccacacgattggatttc

SEQ ID NO: 420158 - DNA, 122 bp, Homo sapiens
ggggtccgtgccgcgcgcctctttggtttagctggtcatccagagttgttctgtggtctacgggaagaaagaaggaagtccatctcctaacttgttatcaactgagcaatcctgggcaagtc

SEQ ID NO: 420159 - DNA, 122 bp, Homo sapiens
gggctcggggcgcggctgcctgggtcccctctggcggcgccagctccaggaggcaggaaacgaggaggccctggctcacggagtgtgcttttacagaagcaagccctggcgctccgggcaga

SEQ ID NO: 420160 - DNA, 122 bp, Homo sapiens
ctaacctgaagaggcattccggtagcaacgggagcggatagcgcggctggttgcttcttgcgcctgcttggttgctagggaagctggggttaccatgcgccagcccttccgggtcaggccgg

SEQ ID NO: 420161 - DNA, 122 bp, Homo sapiens
ctcgtcctcgcgcctagtcgcccctcatgtcctgctcgttcggggccccgtggccgctggcgtcacccgtcaggctccctcggctacctctcctggctccggacggacggctcgccttggac

SEQ ID NO: 420162 - DNA, 122 bp, Homo sapiens
ggttctttctcacaagcgaagaataagtgtttgcattctaactataatcagtatttcaaccgagtggagatattttagtgccttcggtgggcatttatcttcttgctatcagcacaatagaa

SEQ ID NO: 420163 - DNA, 122 bp, Homo sapiens
gctcttcaatttgtctgtaatatgcactgtagtcgcgaccagccctcggggcgttggtttcgtaccactgcttgatttgcacttcaagtttggagttggactgctccagggtccgcaccttt

SEQ ID NO: 420164 - DNA, 122 bp, Homo sapiens
tggatgtgtggttgtgtaggacggaccgtccggagacacgctggattctctgcctttattcgctagcttccaaaacaataagctggtggtcttgcctcctccaacgcttgcccatgagggtt

SEQ ID NO: 420165 - DNA, 122 bp, Homo sapiens
ctcactaccaggcgggggtgcctgaggacgcggttgtgggttccagcgtcctccaggtggcggcggcggacgcggacgagggcaccaacgcggacatccgctatcgcctgcaggacgagggg

SEQ ID NO: 420166 - DNA, 122 bp, Homo sapiens
acattgtacctatcccgaaggaaacggggctcagtcacccaaagagcccacgagaaaggccgagcaggagaggggaaaacacacacacacaacagagaaccattgcatttattggacattga

SEQ ID NO: 420167 - DNA, 122 bp, Homo sapiens
tatttagtgtgtttcatttgcctttcttaaatacagggcacccctgaaacaggctttgttcgcagctctgctctgtcctcggatttaggttatcgaacaggcttcctccctcccctgcacaa

SEQ ID NO: 420168 - DNA, 122 bp, Homo sapiens
tcgccaccccggcggccgccccctccccttccagacccggctgcccggcccgccagctcccggcagtgctggcttcggaaagagagagaaagaacagaaagcaaaacttcctggcggccgac

SEQ ID NO: 420169 - DNA, 122 bp, Homo sapiens
ggcccgggggccagaccggaaccccagtggacggccattggccagggcactcaccgctctcgttcttctcgatgacatccaccacctccccggcctggaggctcagctccgagttctcctgc

SEQ ID NO: 420170 - DNA, 122 bp, Homo sapiens
gtgaaatatcaccgtgttaacagttaggagagtgattttctggcccaagatacattttgccggcattagagactcaccggaagagatcttgaatgatctccagagaggtacctgggaccctt

SEQ ID NO: 420171 - DNA, 122 bp, Homo sapiens
catcagggggctcccaaccccacacacctacgctatgatggaatctcgagtctcgactcccgactcctctcagatctatgcacacttgaggaaatctcggtgggcagcgacctgccagggtc

SEQ ID NO: 420172 - DNA, 122 bp, Homo sapiens
tggcaaaaatgaagggctgaaagctgcttaccctggcaaaatgcacattctgtaatgtagcgagtcagattgctttgccaacatgaactcttcctccattaaaggatgtgaatataattggg

SEQ ID NO: 420173 - DNA, 122 bp, Homo sapiens
aatattgttaaattgtgttggttttataacttttcttgaatttttcttatacatttatttcggttttgtagttgcctaggagttacaagcctaaggagttactcctagttgtgtttgtacaa

SEQ ID NO: 420174 - DNA, 122 bp, Homo sapiens
gtaataatctcttcctgacctccagctgctattattaagataactagcagagtttgaaatcgccattataaaagtggttctcattacaacatccagtttgataaatgctcacaattgaatag

SEQ ID NO: 420175 - DNA, 122 bp, Homo sapiens
tctaacaaaaacaaatcagtcatcgtttcccttcttccaggagactgtgcctgaggaaagcggggggcgtggctgcagttctggacgggctggccgagctgcgcgggatccttgtgcaggga

SEQ ID NO: 420176 - DNA, 122 bp, Homo sapiens
acttgttatttactcattccttttccctctcaagcagtatacacaacacacacatgtgcacgcgcacacacacacacagtctgtggggaaaaaaatatctcaatctcctccttatgaaggaa

SEQ ID NO: 420177 - DNA, 122 bp, Homo sapiens
agtggagaacaggtagctggtggtttctctgtagcagtgagaggacaggatgggtagattcggctcaggaaggctctgaagtggtagtagatacaccagcctcccccatcctctgactgagg

SEQ ID NO: 420178 - DNA, 122 bp, Homo sapiens
ccgccgggggctgactcacccggccccaagcggaggcccccggatggggggcagtggaggcgcctagcccctactccgcgtcctcccgggcaccttttttggtgggacatcccaagtctccg

SEQ ID NO: 420179 - DNA, 122 bp, Homo sapiens
tggagaaagatgtttcagaagaaacagcatgtcagcaagattgtgtgatgctacacatgacgctggctttgatatgactaagttgtacaatttatggaacaaggagagagtaaaaggagaga

SEQ ID NO: 420180 - DNA, 122 bp, Homo sapiens
cgacagcccagaaagactgagaggcactgcaacccggctgccatgtggatctcagatgcacggcctccagcgccatgggataagaacgtgtaccgttcaggctgcccggtgcgtggctcgct

SEQ ID NO: 420181 - DNA, 122 bp, Homo sapiens
cgcccgctgctgcggggctggttctttgaggaatttgtcccaggcgtcaaacgctacctgcgccgaagctgcctgcagcagaaggccgtgctgctggtggcccacccgccctgcccaagccc

SEQ ID NO: 420182 - DNA, 122 bp, Homo sapiens
ttctcaccccattcacacctagaaccacggtgcagcggatgtggacaagcagctggcagacggagctgttgccatcaattctcttctctgtaataactgctcggcatggttcctagacacca

SEQ ID NO: 420183 - DNA, 122 bp, Homo sapiens
caacgctccatccttacaaccaccccagcgaggtcgcgggacaggcgatgcgttcctcggcggcatgtgattcctgtgggactcttggagtctcccagactccttcggtggtccacgacgct

SEQ ID NO: 420184 - DNA, 122 bp, Homo sapiens
tctaaaaagatgtttatttactgaaaatagtaacatgggctgactgtgcagaagtttccccgggttccctgaagctgtcacttcccgtgaggccaccccagctctccacgtccacgcactca

SEQ ID NO: 420185 - DNA, 122 bp, Homo sapiens
ggaccaatcaggtccagcccttgaaaggccgtcagttcccaccccaaagagcactgggatcgctctgtgaaggggaggttaccacaactgctaccgtaaatgcatttctcagctttcagaac

SEQ ID NO: 420186 - DNA, 122 bp, Homo sapiens
atctcgagatagaaagagtccacgcctgggggcaccgtgcagtggatgaccttattccagcggggattcttggcgccattgtgtgccgtgggcgtctcgtacaccgcgtagcccaggcgcag

SEQ ID NO: 420187 - DNA, 122 bp, Homo sapiens
ggagctcagaagccctggcgttgcaggaattctttggcagttgcagcaccgggcccagctcgccttcgcatccttagtgttggcttcaggccgaggtcgactctgccccctggtggccgaat

SEQ ID NO: 420188 - DNA, 122 bp, Homo sapiens
gtgtgggcatatgatcacattaccttgtacagcgcctctaaaacgcagatatccaataaacgtttatgggtgcatgttcccctatccagtgagagcactggaacagaaccaagaattcaatg

SEQ ID NO: 420189 - DNA, 122 bp, Homo sapiens
tggctgccttaattggctgaaatgctgtgattggtccaagagtaggttacaatctgtttacgtatctagttaggttacagttcactatggatggagcaacctttaggctgaactcaaaatat

SEQ ID NO: 420190 - DNA, 122 bp, Homo sapiens
gggtgggggtggggggcccgggcctcccgggctcgggttctggccccaggtcagaggtggcgctggcggcaggtggatgcccaggtcctcgccgcgccgctccgggcggtgggaccggcttc

SEQ ID NO: 420191 - DNA, 122 bp, Homo sapiens
atggctgacggggtcagtgcaaggacaggcacatttcccttctgcatcacgtggggactgcgcctccctatgtcatgaagccagggaatatgtgtggccggccgcttggggtagcacttgtt

SEQ ID NO: 420192 - DNA, 122 bp, Homo sapiens
tgtggttcccactctactggccccaccccaagctgctggctgaaagagagggccacttctcggagccacagcactaagtgaatcagaccaaaggggtgactctggaaggcaccagcatgcat

SEQ ID NO: 420193 - DNA, 122 bp, Homo sapiens
cgggggcgggagcgagggtcagctgcgactgcgcgccgggaacggtggcctgagcatccgcgtcgtcgctttcgactcacggtccccgctcactggatgtagataccgtggaggccagaaga

SEQ ID NO: 420194 - DNA, 122 bp, Homo sapiens
ggtgaagttgcggggctggcgggcgcgagggtggcggagcgcggagctagagcggcggagcgggcggaggggcgggagccgtgaggagggggaggcgcggcgcgggggccggcggcgtcact

SEQ ID NO: 420195 - DNA, 122 bp, Homo sapiens
catctttccctcaatctccaggagccaatgcgagactttggctccgattaagcgacggcccgagactcggggtgcgcgaggaggatcgacagagtggtgaggggacctaggagggcgggagt

SEQ ID NO: 420196 - DNA, 122 bp, Homo sapiens
tcagcgtcgtaaaggcctttggatttgcgtaggggagagagggaagacgtgtaggggacacgtcttgcctgggagcgaataagcagatttcagctcccttgaagggatcagctttatagaga

SEQ ID NO: 420197 - DNA, 122 bp, Homo sapiens
ccacataagtccatgcaactgtgactcagagttctggcagcactcagaacactccagtcacgggcacactgctaaagaccatcactccattcattttcccagcgccttccgcagccccgcct

SEQ ID NO: 420198 - DNA, 122 bp, Homo sapiens
aagagaaagtaaaatctgactcagggacactgaagcacagactctcctgagtgggcagtgcgatcagacgatctggtggagctgggtagaacattgtcaagatgaagaaataacatcattag

SEQ ID NO: 420199 - DNA, 122 bp, Homo sapiens
tgtgtgtcttttcacactttccagctgggtaagcctgggcaagttaagttctctaggccccgggtttttcttttgtatgacagagattaacaccagtacccatcccacaggcttgctgtgag

SEQ ID NO: 420200 - DNA, 122 bp, Homo sapiens
aggaagccccgcctcatcaactcagtcaagggctttagttggcccggcgtcggtgagtggcgggtcttagctccgccctggccgtccgctgcgctgcctgggtcggcgccgtttccagttga

SEQ ID NO: 420201 - DNA, 122 bp, Homo sapiens
gcagcaaacgctgaccagtccggatcgatgggggccccgatagcagagtgattggcctgccgcgtctggagtctaactgcagcgccgggcaccttccgaggggctcgcgctgtctgactgca

SEQ ID NO: 420202 - DNA, 122 bp, Homo sapiens
aatgaggtgatgtagcaaaagctgacacgtgatagtcactcgagaactgctaccttcccccgctccacacatcctgattcgtacttcactcccactccatcctccccatccccctctccctg

SEQ ID NO: 420203 - DNA, 122 bp, Homo sapiens
ggagaggcgctcagaagccagaggttttggatgctccctcccctaccagagctgctgccccgactctttctagcttcaacctgtctcccttgggtctacaggtcggctgccgggaaaaaggg

SEQ ID NO: 420204 - DNA, 122 bp, Homo sapiens
ttgacattgctgagcttctctttgtgaaaaccacagatttttcgcagtcttcagtggctgcggtcagaggtggtcagcacgttagtgctcccagtggagaggtgatgcagggatctgggtgc

SEQ ID NO: 420205 - DNA, 122 bp, Homo sapiens
cttctggagcaggaatctgtcaccctctcacttacctgctggcgtagaccacacaggcagcgccccggaacgagctgccgcactggggctgaggaacttccccgccccaccctcatccctct

SEQ ID NO: 420206 - DNA, 122 bp, Homo sapiens
cctgagaggtggattctcgcctttgtcggcccctggagcccagcgccgctgccccagtcccggaaaggccgcgtcctctgcctggtcctaggatcctgcagaccccacccttgccttaaggt

SEQ ID NO: 420207 - DNA, 122 bp, Homo sapiens
ccacaacagagtcctccaatatgtatgtacaccgagtgagccacattggcaggaaacagtcgctcggcccagcggggcatcctgtcggtcttggtcatgagtcgccgggacagcagtttctg

SEQ ID NO: 420208 - DNA, 122 bp, Homo sapiens
agagcgagagagagagagagagagagagcgagagagagagagagagccccacacctctcgcgagagcgtcggctctttgcatcgctctctgtcggagtggagtactattagcatggaactct

SEQ ID NO: 420209 - DNA, 122 bp, Homo sapiens
actcacctgtacttttacccacttgggtattgcctggactgagattgtgacactcctttgcgcacttggctagagaaatgtgatgaaaccctggtgtgaaagttagtgtgggcgtgcagctg

SEQ ID NO: 420210 - DNA, 122 bp, Homo sapiens
cgaaggcacagtcctccttcccgagttgtcaggatttttatcccatctgtctttattattcgaataacagcaaatatccatctatatatgtatttgctatttttatatatatatatacatac

SEQ ID NO: 420211 - DNA, 122 bp, Homo sapiens
gaaacgcaacttgctcaggagcaggggttttcagactgcggcctgggacccccttaagagcgtgtgaaatcaacataaagcgtcttgcctggcattacaaagcgggggaagtggaaggaaac

SEQ ID NO: 420212 - DNA, 122 bp, Homo sapiens
ccacaggacaaaggtggtgcatcttattggtacctcaacttccctcacaaacgttgaaaacgctgaaaagggagggagagctatggattatatacggaagcacaggacggaagaatcaagag

SEQ ID NO: 420213 - DNA, 122 bp, Homo sapiens
gctggtggggtttggttctagagcatagggctgctatcccagctactgaggtacctcctgcgtttgcagtcattacttgttaggggttttcacactttgacttcctgcttttcacttttcca

SEQ ID NO: 420214 - DNA, 122 bp, Homo sapiens
tttaactgtatcatcagcttcgtgttacatctctttcctgactgttgggtgagccctcctcggatgcttgcttctggctacacgcccctttacccttttctctgcactgttttcatctttat

SEQ ID NO: 420215 - DNA, 122 bp, Homo sapiens
tgcctgcctttttgccccttctgctcccatccccaggtggacgccctgcttcatctggcccgccagaatcgggctgtggcccgcacagcccagaatgaacggtcatcacgcagccacagtgt

SEQ ID NO: 420216 - DNA, 122 bp, Homo sapiens
tgtgtctttctctggccactgcgagatctctggacaactctctctgggactggtagagcccgctggccgcctctgggggctcccccgcggtgctaatggggggcgagtgggcactcattcca

SEQ ID NO: 420217 - DNA, 122 bp, Homo sapiens
acagacctcggtcgtgcgcgcacgcacacacacacacacacacacacgcacgcacacacacggtgcttcaccccagccaggccagaccaaaagagaccattatttcctgctgcctccctttt

SEQ ID NO: 420218 - DNA, 122 bp, Homo sapiens
ttccccggagctgacaggggcagcaaggtcggagttgatccgagggtccctgcctggtcccggggggacggtcagcctcccgcccggagccgcggggagaggaagcaggtcggggtctccgg

SEQ ID NO: 420219 - DNA, 122 bp, Homo sapiens
cccagggacccagcagtgggctcccagcgggccctgctctggcgtcggggttgcagataccgcccaggaggaggcgagcgaggcctccgggacaataggtcaaccctgcgggggtcgcgggg

SEQ ID NO: 420220 - DNA, 122 bp, Homo sapiens
gttgtctcactgccatctcaaattagcatgtcagtgggatgattgattcaacaccctccccgacccaaccactaaataaatggaaccctgacacctacatctgcgtgttggccattccagga

SEQ ID NO: 420221 - DNA, 122 bp, Homo sapiens
acaactcagtgcccacgtgcgaatgaatgaacaaactagttccgggcggagccagaggcgcgcgccggcgcggaccgaggcccggccctatccgccccgccccctccgccccgccccctccg

SEQ ID NO: 420222 - DNA, 122 bp, Homo sapiens
ggggccgcagaggctactctcgtgctctggagaagcaccgcatctttctccggacccccgcgctcagccaatcgccccaaagtctccaggtgggggctccgcattaccagtcttggtcgcaa

SEQ ID NO: 420223 - DNA, 122 bp, Homo sapiens
gtagggccttcaaacagcaaagggacatgtggcttgtacgtgaaagagccaccctttccgcgtgttgaggcaagactgcaggggcacatgtgcatgcagggaggtgaggccaggcgcttgcg

SEQ ID NO: 420224 - DNA, 122 bp, Homo sapiens
gaggatcagggcgggaaacacagctcaaatcctacctgcatggccgagctcaccggggtgcgtctaagtagctcgcctttgcggcccacccaaaatatctggataatggttaccccgtcctc

SEQ ID NO: 420225 - DNA, 122 bp, Homo sapiens
ccccatgcgaggggagggagggttcccaaaagagaatcgcccacggaaccgcagcccgcgcgcagtcactcggtagctcggtgccctacacacgctgcctcacctttcggacctcaggctcc

SEQ ID NO: 420226 - DNA, 122 bp, Homo sapiens
ccgggcacccgtggcccgagttctgccatccccactctcccacccccagcttacatcggtcgcaaaggcccacaaaggcgaccccttcctacatggggaaactgagacccgggacccaggag

SEQ ID NO: 420227 - DNA, 122 bp, Homo sapiens
actgagctgccttccttggtctgggtgggaaggtattcctggaagtggcgagcagcaatccgcacaggacagtgtgctgtgctgagtgccttgtgggtgtttaaattaaatatcccattgta

SEQ ID NO: 420228 - DNA, 122 bp, Homo sapiens
tcagttccgatgcctcaaccgctcagccgccggaatcgcagccactgccggcttcacagacgcctgcctccaaccagccgaaacgacccccagcagcccccgaggtacctggagaactggag

SEQ ID NO: 420229 - DNA, 122 bp, Homo sapiens
gccctgttcctgcaccgcggctttgggagttcctagacccgcacctccattctctcccctcgcctcgggtctcaccatgtccaggagatccgagacggccccgaggatacttgccccccagc

SEQ ID NO: 420230 - DNA, 122 bp, Homo sapiens
caccatgaagcaaagtgataacacaaggagaatgcagctctgtcctggaaggagggttgacgactgacagatgatacatgttgagtcaatggaatgaggcagttgcaggctattgttggaac

SEQ ID NO: 420231 - DNA, 122 bp, Homo sapiens
ggtgagctggctgcgggagccgtggggctcagggtttcggggcgtgtgtgtcggggagggcggggggaggtggctgaagggacgcgccgctcggtgagcgcgccgaggaagagaggcgagcg

SEQ ID NO: 420232 - DNA, 122 bp, Homo sapiens
aatcttggaaagtacagagtgtagtaattaaaactgatatttgagccaggttgcctggttcgaatccaaggtctgccttttactggttgatcctggaagagttttttgattcttctgtgtct

SEQ ID NO: 420233 - DNA, 122 bp, Homo sapiens
gggagaggatggtgctcaactttaaccgggtcggcgccctcgggagaaaatgcagcctgacgggtcgggtgagcgcgctcggccccgccccggcccggcccggccccgcccccggccccacc

SEQ ID NO: 420234 - DNA, 122 bp, Homo sapiens
aaattagggtgcgtgaaagaagtcacaaaaagcgcagaggccaggcttcccgccctaatccggcctttgtctccgcccctctgcctttgtttcggcccaagcgtcttattggtcagacatct

SEQ ID NO: 420235 - DNA, 122 bp, Homo sapiens
tgtggtccgatctgcggtccgcttgctttccctgcccggtcccgagcgctcagcctgaagcgccgctttcgagggcaccctgcatacactggccgcgcctcagggatctcattgcccgcgct

SEQ ID NO: 420236 - DNA, 122 bp, Homo sapiens
ggcagcctcaggtagtggagctgcgggcagcaggggtcaggctgcaggtggggctccctgcgtccccttgctgtgagctccctctgccccctacccccgggctcatcaccccggctgccccc

SEQ ID NO: 420237 - DNA, 122 bp, Homo sapiens
ttataatttgtaaggtacacaccattttaacaaggatacgacagtgttggtgcagtggtccgaactgacttctcacaatgctgcattatgagaaatatgtatctcgctttacacagaaaaca

SEQ ID NO: 420238 - DNA, 122 bp, Homo sapiens
cttggacagacagcctgagattccagggcgtgtgtgaaggaaagccgaggagggcagggccgcagagagaacaaaggggacacgagttcaaattcctgccagggtctgagacctgcaacgtc

SEQ ID NO: 420239 - DNA, 122 bp, Homo sapiens
gtaggtacgggtctccagatatactgcctaccacgctttgctcacccctccaaccggcctcggtgttccaggagccagcacagcaggtggtccagcctttcctggacctcctcgtcccgggg

SEQ ID NO: 420240 - DNA, 122 bp, Homo sapiens
cgccgagctcgtgtgcctcagcggcccgcacccggtccccgaccccccgggccccgagggcgccagatcagacttcggtgagacaagccccgctccggaaacgcactcagtttcctccatct

SEQ ID NO: 420241 - DNA, 122 bp, Homo sapiens
attcaatgtgcatgaaaagctttacgcaggacctgcacccacacagataaactgcgaccccgaggactgggatggggaggcggccagcgggcctgtcactgcacctacgctgtgtatttcac

SEQ ID NO: 420242 - DNA, 122 bp, Homo sapiens
ttattttagacaaacagctttatttgaaagacgggggacagccaagtccccctgaccctgcggtcctggcaacgtcggtctcaggcgtaggaggaccagtgtcctgcggagagaaaaatagg

SEQ ID NO: 420243 - DNA, 122 bp, Homo sapiens
ataagagaaaaatcccccggctttcatggctctgggtttccgtgtggctgcagcgggaagcgcgctgtccttgaggcggcctctctcgcctggcctgcccgcccctccccctcctcgccccc

SEQ ID NO: 420244 - DNA, 122 bp, Homo sapiens
ctcaaaggcaccctccttgcagatggggcagtggacctccgtgttcttggacaacgccagcggctgctccctcacagtgcgcagtggctcccacttcagtgctgtcctcctgggcgtgtgag

SEQ ID NO: 420245 - DNA, 122 bp, Homo sapiens
ttcccgccccctggaattccagctcctctctcctcctcccgggcccgcaaggaagagtggcgcaggctcagcccgcgggcttcaagggtttgctccagagcctgcgctgcccaccgcgcacg

SEQ ID NO: 420246 - DNA, 122 bp, Homo sapiens
tcgggctgcgttgcatgtagggagccaggcacttggtgcctgggagactgcctggaaggtcgctgtgatcctttaggtgagaagtgagggtggcttagacctgggcggcagccatgactgag

SEQ ID NO: 420247 - DNA, 122 bp, Homo sapiens
ctgcagtacgcagtcgcggtacaccggctcacggtcgccctgggagccgctcgccagcgccgctgccccagctagcaggaccaaccgcgccgccaggccggccatcctttctccctggctcg

SEQ ID NO: 420248 - DNA, 122 bp, Homo sapiens
gattactttcctctctgttcactaatttaatatggaaaaataaatcatgattctcatactcgcaaagcactcaggcttttcatccagggtactgtactcacaggattcctgtaggagtcgat

SEQ ID NO: 420249 - DNA, 122 bp, Homo sapiens
gaacccaactcttggcttctctgctgcgcggggcaggcaccgggctctcctaggtgtgcgcgcgtgtgtgcattttatccgcccccccttatctcgctcccctccccccacacccccgcccc

SEQ ID NO: 420250 - DNA, 122 bp, Homo sapiens
agtcggccggctgctgcccctgtttacccctgtttattccctgggggttcatggacagggcgccaccataggaggagggtggagggaatccttgggtggctgcagctgtgtggatgtcaacg

SEQ ID NO: 420251 - DNA, 122 bp, Homo sapiens
gatagaggggctgcagggccactggaaggaacatggagctgtcatcactcaacaaaaaaccgaggccctcaatccaccttcaggccccgccccatgggcccctcaccgctggttggaaagag

SEQ ID NO: 420252 - DNA, 122 bp, Homo sapiens
gctgagggtctctgtgaccccaggcccccaccacgggctccactgtactcaacttgtagacgaggaaacaggtggggaagctgcatccctgcccccaccagccagcccaaccgcgacagctt

SEQ ID NO: 420253 - DNA, 122 bp, Homo sapiens
gcacagcgtcggccggggccaggccgagccaggccacccctgttttccgcgccattggcccgcccggcccgccccaaccgacggcgccctcctgacccaggcagcctagcgctggggcccaa

SEQ ID NO: 420254 - DNA, 122 bp, Homo sapiens
tcaggacaccaagagcctggaactgtccggcaccatgcggtaacagcagctgttgggcagcgtagagtctactctaggatcaagcttcgcctactgactggagtccgtatcccgggggaacg

SEQ ID NO: 420255 - DNA, 122 bp, Homo sapiens
cactccctgcctcctgctcagcccacaggcaatctgggcacaagtgacacatcccctgggcgcctgtcccttcgcactggcccagggagttcatgtgtctgatcagagggcgcagtccaccc

SEQ ID NO: 420256 - DNA, 122 bp, Homo sapiens
ttgttagcaagaaaatcaaagtctgttccctatttgtcccatctttttcatattttgcctcgtctccctggattgtttgggtgagggtagctcatcaaagagctatgacactttggggccag

SEQ ID NO: 420257 - DNA, 122 bp, Homo sapiens
aaaaatcatcatttcaacgaatggcaactggatagccacatgcaaaagaatgcagttggacgcttatctgatgccatttacaaaaattaactgaaaatgcatcaagagttaaagtacaaaac

SEQ ID NO: 420258 - DNA, 122 bp, Homo sapiens
tccataggctcaagttcaaaataaaaaaacggttgctctgcggcggattccggctcctcacgcaggaagagctccccagggagcctgtaaaactgcaaacaaatcttgaaaaggaatgagtc

SEQ ID NO: 420259 - DNA, 122 bp, Homo sapiens
atgcttcctgtcacatcactgtgctgctgagaacatgaagtctgtgggtgaattggtggacgggatccagaatcattacttggcagtggattatagtgtgatgactcatttccggtggtctc

SEQ ID NO: 420260 - DNA, 122 bp, Homo sapiens
ggcccctccccagccgcgctccggaggcgccttcagcctctcaccccggcaagctgtcctcggccctgcccacggactcccccagggaaggcacagctgtcttctaggagacacggagcgca

SEQ ID NO: 420261 - DNA, 122 bp, Homo sapiens
taaaaaaaaaaaaaaaaacaaaaaacctttacgtaacgtttttgctgggagagaagactacgaagcacattttccaggaagtgtgggctgcaacgattgtgcgctcttaactaatcctgagt

SEQ ID NO: 420262 - DNA, 122 bp, Homo sapiens
gccatagaattggattttaggagggatgggcccgccgacaaagccaacaaagttttaacccgaagatcgctatcttatttatgctttaaaaagacctctctggcctttctgcgaagctctat

SEQ ID NO: 420263 - DNA, 122 bp, Homo sapiens
gccgccatcttggtccgctgccgagttgcttccccgagagtttgaaggctccggaacttccgtcctgggaggttaatatccgcctcttgaggcagcctggctgggaaagtctaaccgcgggg

SEQ ID NO: 420264 - DNA, 122 bp, Homo sapiens
ccagactgctctgtgacaaagggccacgcctgcccctgggaggggtattgggctgccgcccgcagatgttgcagtaggaactgaagaagatggcgtgcctgggcttcctcctccccgtgggc

SEQ ID NO: 420265 - DNA, 122 bp, Homo sapiens
gtgaggaagaaacccagacacagctgcccttgccaggtcatcaggtggcatctaccaaagcggccggtttttggcttcttctaaagaaaaagctaagaactcacaaaattgtgtggtaagag

SEQ ID NO: 420266 - DNA, 122 bp, Homo sapiens
cggccgggccgaagcctggggacacagaactgccagctcagcagccggttacatcccgcccggccacccgtagccagcgtccgctaatgcgcgatcctggaagacccagcaaccccgccgcg

SEQ ID NO: 420267 - DNA, 122 bp, Homo sapiens
aaagtgaaaaaagaaaaatgcaggtaaaaggtccttcgtccacctctctgccctgggatccgcggctgcaggtggcgcggcgcgggcggtgctgggaccggggacccgcccaggaccggctg

SEQ ID NO: 420268 - DNA, 122 bp, Homo sapiens
ggagccctgtgcacgcatctctggccccactggggttctgaattaggtcacagatgcagacgtttgctcgaagtggctgccgagctcagacccggcgagatggtggcaggcctccacccaca

SEQ ID NO: 420269 - DNA, 122 bp, Homo sapiens
gagtacgggtggttgtaacccttctcccactaggtcagcccttcctggctctgaaccccacgccgctcgcaaagccctaggctccttcgtaaccacacagaaggatgctgtctgtgtcggcc

SEQ ID NO: 420270 - DNA, 122 bp, Homo sapiens
gcgttggtgtgctagggccactgtaaggaggtgcctccaacggggcgtgaacagcagcagcgtgtggtcccagttctggaggctccagctgtccacagggctggttgggtctgaggcagttg

SEQ ID NO: 420271 - DNA, 122 bp, Homo sapiens
ctagggcccctgccaggtccacctgcagcagcgtggagtccacgtggctgctaaggttcacggctcggagagtgtcaaggagaaccacaaggcagacaggagaaaccccatgtccccgccgc

SEQ ID NO: 420272 - DNA, 122 bp, Homo sapiens
tgggggcgggcggggcctcccagagccgccaggcgtcccgccccactccgcccacacgcacggcccagcccagggttccccgggaccaccccagaccagccccggcccccccgggtcctcca

SEQ ID NO: 420273 - DNA, 122 bp, Homo sapiens
gtgttggcttcctacaggagctagaattttcagagctagtcctacagtgaggggagctaacgtggagtgggcgtgagaattctattcagcaagcacaagcgaagctcaacctttttgttcag

SEQ ID NO: 420274 - DNA, 122 bp, Homo sapiens
ctccgcactgggcacaggggcccttggggccagccgctgtagccagtccctaacaagggccggtggtggctggcctcggcagggcagtaacgagactaacccggccaggccacccaggccag

SEQ ID NO: 420275 - DNA, 122 bp, Homo sapiens
caagaagcctgacctgaaaaagcagccagggctggagggacggcccaatatgagcctggccgatgccggctggagaggagagaggcgttcccaggtcagaggcaggctcgtctcgtcttctg

SEQ ID NO: 420276 - DNA, 122 bp, Homo sapiens
ctgcgtcccccgcaggcggccggaggctgtggaagggaggccgcgggtagccgggttccgcgagtgtctcagccgctcctctcggtccctgcgctcccgctcggcgtcatcggcggcccggc

SEQ ID NO: 420277 - DNA, 122 bp, Homo sapiens
ggctccaggaggggaaatggggccaccgaggccaaagtaagagtcctgcttggacaccagcggagcacagcctctactcctagggcctggcctcgggacctgtcgaatgccgactcccgctc

SEQ ID NO: 420278 - DNA, 122 bp, Homo sapiens
ctcgtccctgactggtcagcaagaggagtgcccggggccacgcggtgcattctctgtgcccgtcagctgtggctgctctgcgtgctgccccacaccaggtccctgctgagcttctgtccaca

SEQ ID NO: 420279 - DNA, 122 bp, Homo sapiens
gggagaaaggaagaaagaaacttttcacaggaggccaagaaatagctctcttggccatgccgtaaaagactgagagccgagtggagcagaaaaattaactcctagaagttctgcaaatacct

SEQ ID NO: 420280 - DNA, 122 bp, Homo sapiens
ttctcgcccgaggacccgtggctccggcgcccctgcttcgctggtggtcgccccgggttgcggagttctttttggtacactcgaccctccagccagctgttcctacccgcgccacgggctct

SEQ ID NO: 420281 - DNA, 122 bp, Homo sapiens
cccccaatgctgtggcctggaaattccccagagagtaagacctgggtgggccatggcgctcgccagccaaacccccttcgaggccccccgtcctgcgcggactgctcgtcaatgtttgaaaa

SEQ ID NO: 420282 - DNA, 122 bp, Homo sapiens
gacaggtttgttcaagaaccgcctccaagattttactactgcaccgcgatttcagagtggcgggaaggactgagagtcccatttagaaacttcccaaatcttaactgccaatatctttcttt

SEQ ID NO: 420283 - DNA, 122 bp, Homo sapiens
aatctcggcttactgtagcctctgtctcccgggttccagtgattctccttccccaactcccgggtaactgggattttcaggcacacaccaccaccccagctaatttttttgtacgtttagta

SEQ ID NO: 420284 - DNA, 122 bp, Homo sapiens
cccggcgcctgggctgcacagtgggtgaggcttcccttcgcctcagcctatcccaggcctcgcttccggtgacatcatgtctcctagcaaccgcgggaagggggcgtggccggaagcctgga

SEQ ID NO: 420285 - DNA, 122 bp, Homo sapiens
agctagcgtgtcagcgcgtcgaggaccgggcttggtgggggcgggctgggcacaaaccaacgtgcatcccccgccactggaaacgtgggtgctccatgctgggggaatcttttgggtttcgg

SEQ ID NO: 420286 - DNA, 122 bp, Homo sapiens
cgcctcgggacccttgagcggggctcgcccatctccagtcaggggctttgccgcagagtgcgcggcggggctccaggggccgtggagctggggctctgctctccttgttttggacaggtgtt

SEQ ID NO: 420287 - DNA, 122 bp, Homo sapiens
gtgatcctggaatacaggggcgtggtggagacctcgagaattctaaccgtgttggggaaacgaagacgcagaggcagtgccccctgcctggcagccgcaggccctgagacacaggctgcctg

SEQ ID NO: 420288 - DNA, 122 bp, Homo sapiens
tcgtttgctactgattttttaacattgttgtattcatgagtaagactaaatatcaccagacggtgagtggtttcctaagtgccgccaatggacaaggggtagctagaacaatgatgaggtgt

SEQ ID NO: 420289 - DNA, 122 bp, Homo sapiens
agcagcccagtggagtcctggagtaggtcttatggaaggaaggggtctagggaacagaaccgtaaagaagcgacgtcacttcctggatgatgaccacacgaacagaacttagaactctggta

SEQ ID NO: 420290 - DNA, 122 bp, Homo sapiens
cccacttctgggaggccgcacccgctctgcgccttgaagagaccgcccgcagcgcgaaggcgggtcctcacccgaggatgtggcgaaacgcttaacacccaggcaaatgcaaatggtcaacg

SEQ ID NO: 420291 - DNA, 122 bp, Homo sapiens
tggctcttagggagtagaacggggcatgggccaagctgacaaaggagtaggtttggatttcgggaatagctgccaccaggagaactgagtggatttccaccgccttgtgactgttatataat

SEQ ID NO: 420292 - DNA, 122 bp, Homo sapiens
aaggaggggtgaaaattagcaggatactaaattgggaatgagaaatctctttttagagggcgtggacttgcagaactctttgaagcagcagatgctagactgcccaaaccccacgcgagagt

SEQ ID NO: 420293 - DNA, 122 bp, Homo sapiens
atctctgcccggccgccatcccatctatgaagtgaggagcgtctctgccaggccgcccatcgtctgagatgtggggagctcctctgctctgccgccccatctgggatgtgaggagtgtctct

SEQ ID NO: 420294 - DNA, 122 bp, Homo sapiens
gcagtcagtccacttgtcctccccctggggtgtccatttccagagatgatagaactgaaacgccccccaacttccccacagctgcgcgttcccctgtgttcctagcgcgcagagttgcagcg

SEQ ID NO: 420295 - DNA, 122 bp, Homo sapiens
cagggccagccaatggcggtagaggtcttgggcacctgacaagaggggcggtccccccgccggaaggggcggggcgaggcgagcggccgcgtcagcggtaggtggggctgtggttacgctgc

SEQ ID NO: 420296 - DNA, 122 bp, Homo sapiens
cttgcccttggggggaggtgggacaaattttttaaaaatttatacatgcagagactgcagcgcagagaagctaagagacttgcccctgcccacacagccagtggtagagcctgaactcaaac

SEQ ID NO: 420297 - DNA, 122 bp, Homo sapiens
ttacacgccggccagagcagagggctggaggtcggagttgggggctggaggaacgggtggcgtttttaggattcagtaacaggatcacagctttttcttgtggtggaagctattggaatttg

SEQ ID NO: 420298 - DNA, 122 bp, Homo sapiens
gacggagtcgctgctgctgctgacggacacggcggacgtagactcggccgtggagggtgtcgtggacgccgcctggtccgaccgcggcccggtgagacccgtgcgctcccgtctcctcatac

SEQ ID NO: 420299 - DNA, 122 bp, Homo sapiens
ggatagtctgtgccgaaactcccgatcccaacatgctgcgtacagacacacgagcgaaaacggttcgccctcccctgggtatccaaggatgaggacgtgagtatgaaagtggtccccgggcc

SEQ ID NO: 420300 - DNA, 122 bp, Homo sapiens
cagaactgccactgacacgtgtgtttctacggtttcacgctgcagttgcattcgggaggccgcaagcctggctatcatgggcgtctgcaagacctcccagcagggctgcggagggcgagcgg

SEQ ID NO: 420301 - DNA, 122 bp, Homo sapiens
gcttggctccaagcgtgagcaactgggatattctggtcataaatattccttgctacccttcgagcagtgctctgcctggctctggccctgtgacctcttctcttaatactggcttctgtcct

SEQ ID NO: 420302 - DNA, 122 bp, Homo sapiens
cgcctggccaacataagctttttgtaccccccagacatagcaggaacccagtgagaaggccgggctgctcccacccagagaccctggaagagcctggcatggaaaatgggccgtgcatcgtg

SEQ ID NO: 420303 - DNA, 122 bp, Homo sapiens
cccatatgtaatgcatttctcaggaagaccatgtgttttcagtgatgaatcaaacaaagccgtgcaactgatgctaatggagaagaatctttctcttctctctttctgtttctccctctctc

SEQ ID NO: 420304 - DNA, 122 bp, Homo sapiens
taatatacgtgataacttacacaatgacgttcaacaaatacttgtggagtgaaagatgcgcgattcattgacagatctcagggatttcagaaagctgtataaggaccagctcttcaggctcc

SEQ ID NO: 420305 - DNA, 122 bp, Homo sapiens
aatacaatttacaccttgtaaagactccactcttatgacccaagctctacttgtaaaagtcgatttgatcacaaagtgaccctgcgtggttgttttgggagcgcaaaagctggaggcaaagg

SEQ ID NO: 420306 - DNA, 122 bp, Homo sapiens
ctgtgcactgcgtgctgcagccatgcttggtgcccacagtgtgcactcgggcagtcctcacgaagcacctgagactcacacttcactggcacccctcacagatcccagagactcactttgcc

SEQ ID NO: 420307 - DNA, 122 bp, Homo sapiens
ataaccaagtacaggaactgggcagtatttgattttccttgatttttgagctatcatcatcggtgcgtatatggatggctctcttccattttcaactgatcctcccaccttggcctctcaaa

SEQ ID NO: 420308 - DNA, 122 bp, Homo sapiens
tcatgctgaaaagctggataattcttggaccgtccgcaatgatatcatcacccggtggtgcgtgctcctctctctgtggggactgagctcctcggcatatgcactgtccccgctgcagggct

SEQ ID NO: 420309 - DNA, 122 bp, Homo sapiens
cccactatggtcatcaggggcgggttcttggcgacttgggcacttgggtcacctcggccgcgcccctactggcctctggtcactggttacttggggagaggtcctcagattcgtacgcttgt

SEQ ID NO: 420310 - DNA, 122 bp, Homo sapiens
cgggtcacgaggctggagcttcctgcttgcagagtgcggcggggaggcgcggcccgggaacgcgggatcctggggaggtgagcggcatggctggctgtgccgggaggaggcggcgcctggcg

SEQ ID NO: 420311 - DNA, 122 bp, Homo sapiens
ccgggcggggctcgggccccggctcctggctgccccgcggctctcagtccgcggctggcccgcctggcgccatgttcccgggctggcctggagtttctcgatcttctcgctcttctccgacc

SEQ ID NO: 420312 - DNA, 122 bp, Homo sapiens
tgggcctctggacggaggcgcgcaggggcccgggaggcgggaacgatgggcctttctaggcggtatcagggccgatgctcgtggatgcagagcagtgaccagcccagaaccgtaccggcttc

SEQ ID NO: 420313 - DNA, 122 bp, Homo sapiens
atgccgtaaaaaaatcagaattataaatatattcgtatgagcagaactttacatggaaaacgaaatactaataaaatgggcttgttattctgttggagtgagtgcctaggaagggtttcgtc

SEQ ID NO: 420314 - DNA, 122 bp, Homo sapiens
aggagccctctcctacggcgctagggagcactggaagcagagatgccagccctggctgagcgtagcactgcaccgtccgacctccgaggcaggggccggggtcacacctgccaggactccgc

SEQ ID NO: 420315 - DNA, 122 bp, Homo sapiens
tgtccttaggccccgcacccagctcccgccgcacccctgcacctggctcccacccggccccgcacctgtccttagaccccgcacctgactcccgcccggctccacacctgcctcccctccgg

SEQ ID NO: 420316 - DNA, 122 bp, Homo sapiens
gcggaggcacatgaacgaactggggagtgaatcaaacaggtaaaaacccttgtatatcagcggcaagatctagaaagagcctagcagtccaattcattatctctccctcttccaggagatgt

SEQ ID NO: 420317 - DNA, 122 bp, Homo sapiens
cctggcctatagtcatctgtgaggtggcagccaaagttgtagatgagatcgaggtgacgtcgctcctgtaacctgatgcccacatctcggaaggcatcctgagccatgagctggagctgctg

SEQ ID NO: 420318 - DNA, 122 bp, Homo sapiens
catgcatctttcccggccccagtccagccatacccggttgatgagctcgccaaccatgcccgtccaggagccgttgggctcgggcgccccgtacagcccatcctccaccaaccgcaggcggt

SEQ ID NO: 420319 - DNA, 122 bp, Homo sapiens
ggcggctgggagggagcgcgggagggagcgtgcgcgggtgggatcgcgagcggccagatgcgccgccgcacgtggcccggtggcgtcctgggatttcgtcgtcgcaaagccactcgtttttt

SEQ ID NO: 420320 - DNA, 122 bp, Homo sapiens
atttgacaaaattcaacactcattcatgataaaaactctcagtaagctaggaatagacaacgtcctcaacctgataaaaaaaaaaaaaatctacaaaaaaacctcatgtctaatatcatact

SEQ ID NO: 420321 - DNA, 122 bp, Homo sapiens
aatgtaccatccttttgatttagcaattttatatgtaggaattcatcttatggatatagtcgtgttcataaatgagtgcagtgatatcaatttaagaacatccatcatgtcactgtttatta

SEQ ID NO: 420322 - DNA, 122 bp, Homo sapiens
ggaagacaggagggagtgccgcaacttcttcagtgtagccttaagtcgcggtgaggggcgcgtagagacttgctgctcccatagcaacgggaccagccaccctctacaggcctgacgggtta

SEQ ID NO: 420323 - DNA, 122 bp, Homo sapiens
tggttttgtactttctctcctccctgtggctgccgcacatgaaaggctggggtcaggccccgcacgggggtgggaagcagggctgtgcgttttgctttcatttccccgagaacagcaggaag

SEQ ID NO: 420324 - DNA, 122 bp, Homo sapiens
gcatctgtaatcccagctactcgggaggctgaggcaggagaattgcttgaacctaggaggcggagttgcactgagccgagattataccactgccagcctgggagacagagtgagactgtgtc

SEQ ID NO: 420325 - DNA, 122 bp, Homo sapiens
cccctcgatcctcgcggagctcctggccgctgggctgcgagcgactccgttcacacccggcgtccatccctagccaagccctggggcctcggcaaaacacttggacgggatggccctgagcc

SEQ ID NO: 420326 - DNA, 122 bp, Homo sapiens
tggcgtggatggagattatacgtgggctgaacaccaacaagtgggtgcggaccttcctcccgctttaccctgaagtcccagcccggagcacgcggccgtggtgagctgcgatcccaggcccc

SEQ ID NO: 420327 - DNA, 122 bp, Homo sapiens
cgtgcctccgctgacggccgtgtttctcccgtgaggagtggccgtgcctccgctgacggccgtgtctctcctgcgaggagtggctgtgcctccgctgacagccgtgtctctcccgtgtccag

SEQ ID NO: 420328 - DNA, 122 bp, Homo sapiens
tacctgagcctcagttttcccaccaataaaatggggataacaattcctgccttacaggctcgtgatggagtgcctggtatagtgcctggaacatagaaagcacttggtaaatggtagctatg

SEQ ID NO: 420329 - DNA, 122 bp, Homo sapiens
gtggaggttcgcgcgtagtggcggcgggggatacgggacccgggcgggaattccttcctgcgtccgtcccgagtctcttgatatggagccaagtaagttttctggttttgcttttagctggt

SEQ ID NO: 420330 - DNA, 122 bp, Homo sapiens
attgttaccttatattttatggattaggaaccttatgctcaaaaggctcaagttagtttgcgttgggtttcacagccagcaagtagaaaagtcaggattcagaactgtgctctctgacctgc

SEQ ID NO: 420331 - DNA, 122 bp, Homo sapiens
cctgaagagggtacaccaaggtaggaatatatagtgggagaggaggtgacaggcagactgcggagtctagcctttagtctgtagcctgcgcagggagagtaggttcacatcttaggtcttct

SEQ ID NO: 420332 - DNA, 122 bp, Homo sapiens
catcagggcagtgtttgggtccagagtgaagccaccctcttccagctctcaaggctccatcggggaccctcttccggctctcaaggctgcatcggggaccctcttccggctctcaaggctgc

SEQ ID NO: 420333 - DNA, 122 bp, Homo sapiens
gcctctcaagccctatcctcctgcttcttatcccatctttacccatcaattcccccttctcgtgcacactcaataccttggcaggcataatatgtagtatcctttattgtccctaggtcttt

SEQ ID NO: 420334 - DNA, 122 bp, Homo sapiens
ggtttcgccatgatgcccaggccggtctcgaactcctggcctcaagcgatccgcccctcacggccttcagagctgctgtaatcacaggcgtgagccaccgcgttcgactcttccaaaaactt

SEQ ID NO: 420335 - DNA, 122 bp, Homo sapiens
agtaatggtgctcttgagcagtgcacaacctgaagaactgtatacagtggccttgccttccgagactggtttccagaaatgagtgaccttcatgtaggtggtagagaggtagctaatgcctg

SEQ ID NO: 420336 - DNA, 122 bp, Homo sapiens
ctgctttctagtgttcctgtctttgggtcctcacctctgcatggttactaacgggttatccgagcctaagcctctcacgaagcggaaagtcaagttaacagactgccataggcctgccaagt

SEQ ID NO: 420337 - DNA, 122 bp, Homo sapiens
tgaggggcccgcccggtgggggcgcaggactcagggagccgcctccggaggagggtctggcgggtctcagcccctcctcgcccccaggctcccactccttgaggtatttcagcaccgctgtg

SEQ ID NO: 420338 - DNA, 122 bp, Homo sapiens
ggtggtcatttttatgttccctgggcaaagcgagcagccgtttggcttataaaatagcaacgactgcagtggcccacactgtcatcacgaaatgccgcctcttgtcatggtccccggaaaac

SEQ ID NO: 420339 - DNA, 122 bp, Homo sapiens
ggaccctgcgggcctgggcgccctggcggaccaatgggtccccctgatcctgctgcacctcgttccccaggggagccctgagaaagcagatggtcagacccccaggaaggagacaccagccc

SEQ ID NO: 420340 - DNA, 122 bp, Homo sapiens
ccgaccgcacacagcaaggcgatggcccagctgtaagttggtagcactgagaactagcagcgcgcgcggagcccgctgagacttgaatcaatctggtctaacggtttcccctaaaccgctag

SEQ ID NO: 420341 - DNA, 122 bp, Homo sapiens
cacacatcacacccaagaccaccagccatcccctttccattcaccgtctttccaaccacccgccccacgtccatgctcggccaattatagcacagcgtccaaggtttgagcggtaggcctat

SEQ ID NO: 420342 - DNA, 122 bp, Homo sapiens
tccaggcccacccttcccctgggagcaccacgcaggccccacctctctccgagaatccctcggtgtcgtcctcttcagagctgttcaggtcaaagaggtctttaaattgcttcctgtcctca

SEQ ID NO: 420343 - DNA, 122 bp, Homo sapiens
gcgtcccgcctagcctgttgaacaggtagacatgagcgacccaagcgtaagtgccgctgccgcgagtgcccagggtgcactcgcgcggggaccgacaggtgccactgcagggtcccctctcc

SEQ ID NO: 420344 - DNA, 122 bp, Homo sapiens
cctttgtttttggtgaattcaatggctgaatgttgctgagtgtctcttggtcttgtttcccggtccttgtagctaagaatgtcgtggaaggataaaatcttgttaattcgtgatgtcacaat

SEQ ID NO: 420345 - DNA, 122 bp, Homo sapiens
accttccattggcaggtgtagacactgcaggctggacctcctgggtgtgcttgtggactccgatcttgcccttgataaaacccctgtgggacaggaatagctctttgaacctccaaggtcca

SEQ ID NO: 420346 - DNA, 122 bp, Homo sapiens
gacggcagcttaggggcgggactcttttttaaagtccgtggaggaagtgcaggatccctccgcggggagtcacgtgccccgcccccttgggggcgtcgaaactcttaacaaaaacaaggggc

SEQ ID NO: 420347 - DNA, 122 bp, Homo sapiens
ggcccggggcccttggtgcggcgtggcgcagggcgcggcgtggggcgcgcgtgggcgcggcgcaggcggcccgggtcaccatgaggactctccgcaggttgaagttcatgagttcgcccagc

SEQ ID NO: 420348 - DNA, 122 bp, Homo sapiens
atcgcggtccccgccagcttccgtaggagcctttcattccaggaaggtccatcgtacttgcgttttcagggcctgagcgatgactttagcaccagacacctgctcctcgctgcgctctgcga

SEQ ID NO: 420349 - DNA, 122 bp, Homo sapiens
ctgggggaacgtggacccggaactcggggcgttggctggtgcgactggctggggtgagggcggctttgcccggattgtcgcgactagagctgcagttcagaaggtctggttcgcctgagcct

SEQ ID NO: 420350 - DNA, 122 bp, Homo sapiens
cgtaggctcccgacctcttactcatcttccactagactctcgggcgaggtccctaatagacggccccaggaagggtatcgtctttgtcacacaaaattcccaggcagggcctcatcctcagc

SEQ ID NO: 420351 - DNA, 122 bp, Homo sapiens
tcaaagcagttgagcaatcttaagtgggggtgcccgaaagtggtgcgttctgaccccaaacgtcacactacccgtccctggaggagcgggttgcagcccagctgcgtcgccccgcgcagagc

SEQ ID NO: 420352 - DNA, 122 bp, Homo sapiens
ggcatggacaggaggagagggaaagatgggagcccagttggggacgggttgagtttgagacgattttcgaccccagtggagagccgaagggagctggacacaaggcagttcagcacagaggc

SEQ ID NO: 420353 - DNA, 122 bp, Homo sapiens
tttccatattcccagtccctcaggccacctctcacctgtccaaccagggtgtgtagggagcgaaagatttcgtagagcacctctcgggagaggttgggtctgcatcttcgctccaggttcct

SEQ ID NO: 420354 - DNA, 122 bp, Homo sapiens
gaataacaaactgcattataaggaactgttgcccttctgttctgaggtagacaaccttcacgtttctttctcttatggctcttatttttgccttgcagcacaaatggcatttatgtatgaga

SEQ ID NO: 420355 - DNA, 122 bp, Homo sapiens
actccaagactggttggttggttgaactcacataggcagcatggagtgccgtgcagcccccgcctagctgtggcttgggccctcccagcctgatgaggagctggaagcagctatgttgagtc

SEQ ID NO: 420356 - DNA, 122 bp, Homo sapiens
tttttgtggaaagcaaggcagaatttttgaagtttgtttcttcaaatactttctgtttcccgtacatacaagctagtttgttctgcagagatctcattttctaggaggctcggagggggacc

SEQ ID NO: 420357 - DNA, 122 bp, Homo sapiens
gcgaacatgcaggaatttcaaaaaactcagacaggcgaaggcagccaggccatggggcgacgccaaaatatgcacgaagaaaaatgctattaggtcaccagcccttgagaggcgggaagtcg

SEQ ID NO: 420358 - DNA, 122 bp, Homo sapiens
ctacctgcgcgcccgccccataaagcgctgcccgcctcgtccccacccccccaacccccgcgcccgccctcggacagtccctgctcgcccgcgcgctgcagccccatctcctagcggcagcc

SEQ ID NO: 420359 - DNA, 122 bp, Homo sapiens
cacccttgtcggtcccctggaaagctagcggtaagatccgggaggctgaatttgaggccgcggtagtccaggcgacttcccctggaaggtgtgacgatgacttgtactgcaaaagaagccta

SEQ ID NO: 420360 - DNA, 122 bp, Homo sapiens
tttcaaccagctttccactaaagagggtccagtcctctaaaaacaaaaaccaccggacaccggagcagttagccacagagacttgcggccccctctgcaactgaacatgcgccgggtttcta

SEQ ID NO: 420361 - DNA, 122 bp, Homo sapiens
gcggtggaggcctgaggcctgaggcctggggcggggtggcggccgggctggccttggcctcgcgccttcccctgcggccgccgcgggctccgcgggcggtatcggagtgtcgtgcggcgcgt

SEQ ID NO: 420362 - DNA, 122 bp, Homo sapiens
tgtcatgtgctgcatacattaagatgttttcaacaaatatttgtgactgcctagccaacacgaagccacgctgcgaagacagctctaggggtggcgtgggtgactagggttgtcccccaaaa

SEQ ID NO: 420363 - DNA, 122 bp, Homo sapiens
gcggagaagagtctgggggtgtcccatgtgaacatctgccctgccccacaggttcactgacgccctggtcaccatccggaaccggcacaacgacgtggtgcccaccatggcacaaggcgtgc

SEQ ID NO: 420364 - DNA, 122 bp, Homo sapiens
gagactcagctgctcccgggcccaagccctcagccccacacctggcctcagccttccctccggatctaactccagctgggcatcccgggccacacttcacgcagcagccaccctgagctgcc

SEQ ID NO: 420365 - DNA, 122 bp, Homo sapiens
tggagcccccagaagagcccgggtgcctagcactcggcagctcacaggagctggcggaggcggaggcgggcccgagctcggaccccggccccgccccccgacccgccgagcccgccccctcc

SEQ ID NO: 420366 - DNA, 122 bp, Homo sapiens
aagagtaggtcatgtaagatatttaattaggaaagcttcctcaagctgtagcacagagcacggacaggctaaggagcaaaactggacagagactgatttagtagaagtacacagaaaagagt

SEQ ID NO: 420367 - DNA, 122 bp, Homo sapiens
catagctgttctggacctgggtcctgcttgcaaggacagttccacaggcgcaccggaatgcgcctcccctttccacccgccagcattcccaagcacgcctcggcttctgactgttctgtgct

SEQ ID NO: 420368 - DNA, 122 bp, Homo sapiens
gtgcccggggctgcagagccagtgaacaaggtttccaccccagtggaacgcacagcctaacggaaagacagatcagtaaacaagtaattacaacagtggtaagctttacaaagtgatgcctg

SEQ ID NO: 420369 - DNA, 122 bp, Homo sapiens
gagatcttcctccagcaacaagggtgggacggaatccgttccccgccggaaagatggatgcgcccttcccgggcgtgcccggggctgtgtgcccacttcccatccggggagctcaccccacc

SEQ ID NO: 420370 - DNA, 122 bp, Homo sapiens
aagccgcctttcggggaggaacactgaccttgggatgttgtgaatactgaagatccattgcgagagaccgtgattccagtaactgctctgctcaaaaacaaagtttcacaaattactactca

SEQ ID NO: 420371 - DNA, 122 bp, Homo sapiens
ttgtggcccacttacaatcactcagaatgttactgtcccttgagggctaccacgtttattcgaaacaaatcattttcattaacaatttaacacagctacccacctcagtgaggttcttcctg

SEQ ID NO: 420372 - DNA, 122 bp, Homo sapiens
aatgcggtggctaaatacaaggcacaaaagatacctttagtggcgctccctcttgcttcccggtgacccagactttggtcagaagagtaccacagcccaacggggctgcggacggcaggcgt

SEQ ID NO: 420373 - DNA, 122 bp, Homo sapiens
aacaaccctctgccattccggccaaattcagttcacatgtcagatagcctgcttcctttacgtttccttactctcttgtccatgctttttaggtgctgattgggataggccttctcctttat

SEQ ID NO: 420374 - DNA, 122 bp, Homo sapiens
acacgtgcaccttgcatccacgtctgtttcatggaaccacgcacgtgcacgttgcatccacgtgtgtttcgtggaaccacacacatgcacgttgcatccacatgtgtttcatggaaccacgt

SEQ ID NO: 420375 - DNA, 122 bp, Homo sapiens
agtatggtcacatattttgttcccttccaccctgtcaccctacttcagtttttggaagcacgcatttgcatgcttctgggggagatacgtgaggaacagattgcattccactattaactggg

SEQ ID NO: 420376 - DNA, 122 bp, Homo sapiens
cttggaatgctcctaacaccttgcagtgcacatgacagccctccacaataaagaatgatccggccccaaatgtcaggagaatcagggttgcgaaacccgaataattggagtgcctttttttt

SEQ ID NO: 420377 - DNA, 122 bp, Homo sapiens
ctggccaccaccatgatccccaggagctgagccatcatctccacctcggagtcccggggacgctgctgggccgcctcctgcccgtggtagacgtggcacagggtggccacgctgaccgtgtt

SEQ ID NO: 420378 - DNA, 122 bp, Homo sapiens
ttttgtcacagccagcacatgacaatcttacagtatttcttacgtgggttataccagagacgcatttttttatcccacagttgcctagtcaacgaaagaaaggggcaaaatactgtccacat

SEQ ID NO: 420379 - DNA, 122 bp, Homo sapiens
taccaatcagaaaatctttgaatccgcccatggcctggaagtccccacttccggtcctcccgccttttggactgaaccagtgcacacctgacatgtgtgcattgattccttctccctaaaac

SEQ ID NO: 420380 - DNA, 122 bp, Homo sapiens
ctcaggcagtctacccacctcagcctcccaaagtgctgggattacaggcgtgagccaccgcgcccagccagaacatctgtttttacacccagagagcgcccctcgttaggacagaaccacgg

SEQ ID NO: 420381 - DNA, 122 bp, Homo sapiens
aggatacaggagccgatctccccgggctccgaagcgtagtcccagagcccgtcaatcctacgccagcaacgccccacgggttgcgttttccggcgctacaggaacttcctgcgcggttgctg

SEQ ID NO: 420382 - DNA, 122 bp, Homo sapiens
ggaataacatcagtttgataataaaaacagcagaaacaacaggaagaagaatattaactgcgagcatggctgagtgtgtttttggcgccagcactgtgcaatctagacgggtttcctttcat

SEQ ID NO: 420383 - DNA, 122 bp, Homo sapiens
gggggtgagagcttgtacagaagaggcgccattcatcacagtaaaggaccatgggcaacacgatttattttcagattcctcctacctctaaaatatgacctgcctcggcgggatgggcagag

SEQ ID NO: 420384 - DNA, 122 bp, Homo sapiens
ctcaatcatctccaggggccgcccgttcaccttgatgagaccattgccgcgtttgcagtgcgccacagctgtcgctgtcttctgtaagatacaagagaaacaggggccccgtgagctccggc

SEQ ID NO: 420385 - DNA, 122 bp, Homo sapiens
aaaacacagcccctgagctgagagagctgccgagtcattgtcgattgtgctgagtgcggccgtgattccctgactcacctctctgtgtgggggtgggagcagggatccccttttccgcagct

SEQ ID NO: 420386 - DNA, 122 bp, Homo sapiens
gttctttctctgctagtcattaccaggggctatgactaagaattacctcttaatgccaaccgactcggggagactcggggagaagcccacgggccgagaggccctgaagtccggcttcccgg

SEQ ID NO: 420387 - DNA, 122 bp, Homo sapiens
tgcctgctgatccatgtctagagtcctcctggttcatcttgtccgagagaataaaactcccgtcttctgccagtgtggggaaggggcagctactgcttctcatacacccttttaactcattt

SEQ ID NO: 420388 - DNA, 122 bp, Homo sapiens
cagcatgtgaggaagacagtggacatctgctttatgctggacccagtaagatgaggaagtcgggcagtacacaggaagaggagccaggcccttgtacctatgggattggacaggactgcagt

SEQ ID NO: 420389 - DNA, 122 bp, Homo sapiens
agctgagtgtctgcagcctgctttaggcagggcacggctgtgcagtctgtcatcgtccctcgtcactcccatcaatgctggcaccaacctcacttctatttatcgcctcatctgatcggctg

SEQ ID NO: 420390 - DNA, 122 bp, Homo sapiens
gggagaatgcagaaaccgggtcagcgccaggtcgcacccggctctgccctgagggcccgacgctacctggctccgccccgggacagccccgccccggctcccaccttcaccggaaggctcgc

SEQ ID NO: 420391 - DNA, 122 bp, Homo sapiens
cagcacaccccggcgcgatgtgccctgcctgtgtctgccggaggctgtagtgcgcaggagcggaaaccaggccgcccttcccccacccgcttccggccgcggctcggttctcccgcctccgc

SEQ ID NO: 420392 - DNA, 122 bp, Homo sapiens
gtgaaatcctgagttacatctggggaggctaaatcctgaaatcctaattgcagaagcaggcgagggagtggggggagagaggcacagattgtgactggagattagtaaaacacacaaatctg

SEQ ID NO: 420393 - DNA, 122 bp, Homo sapiens
tctttccacctgatttagaacctaaaaatcttgaaaggaaagagaaagaactaacattttcgtgactgagaactggatggtgacaaatgagaaaataaacacagtaaagacaagtttggggg

SEQ ID NO: 420394 - DNA, 122 bp, Homo sapiens
tactgcctggagggatcactcccatcaaaagactggtgagttggaagctaagagcacatgcgcatagccagctcctctcccaggctggcagtcatgattacgagcatcattccagaatcttt

SEQ ID NO: 420395 - DNA, 122 bp, Homo sapiens
ccccgagagcagcccggtgctggtgcgcaccgatgaggacggtaggcagtgccaccggggcgggaggggaggcgttctgcctcagacaccacccaccaagctccccagggccttcctttcct

SEQ ID NO: 420396 - DNA, 122 bp, Homo sapiens
tgtgatgagcacgcctctcccaggggccgacccggggagaaccacccctgaccctctggacgaccggcactcaagggtcctgcagggcctgccccaagcactgtgcttctcccgtgcgaatg

SEQ ID NO: 420397 - DNA, 122 bp, Homo sapiens
cggccccaggcagttgcagagctaagaaaaaccatcccgccaggccccttcttgtggtaacgcggtcctaaccctgctctgccccacaaccccatttcacccgggagacgcagacgccaggc

SEQ ID NO: 420398 - DNA, 122 bp, Homo sapiens
gggagaacttccctttccaaagttagataacaggctgggctctctgtcagaggattggcgcgacagctccacgtgctgcagctggcgcagggccaggcccgccctgccaagcagcgggaagg

SEQ ID NO: 420399 - DNA, 122 bp, Homo sapiens
agaatccagaaattcatttttttaaaatgacgaagttctctgatttttaatacagtatagcgaaacacaacacctgagggcagctttcagtcattagtgtgccaggtgggaccctggtctgg

SEQ ID NO: 420400 - DNA, 122 bp, Homo sapiens
gacttggcccacctcctgggcccacagtaaggcaggtactggagggtcgttgaccatggccgggagagcagggtgtctggccccaggttcaggccttgcgttcctagctgctctgccacctg

SEQ ID NO: 420401 - DNA, 122 bp, Homo sapiens
cagacgtgcttgggcccgggccccggagcgcgcactgggccccggagcgcgcactgctcccggaaaagcacttactttgcaccgagcccgcgaagctctcgccctcgctgctcgcgttcatg

SEQ ID NO: 420402 - DNA, 122 bp, Homo sapiens
tttttttccacctaacggcttttccctgagctttcaggaggccattgaagccgttaagaccgggtcaggtgaacaggaagttaaagactgaaaaggagacacaaaactgccgactttcccga

SEQ ID NO: 420403 - DNA, 122 bp, Homo sapiens
ccactccaccttcggcctgccacgcagatactccagcagcttctccgtggccgcaagtcgcgtctcctgctcaggcttcgcaatgtcccagaagaagtccaagaactcgcgactgtgcttca

SEQ ID NO: 420404 - DNA, 122 bp, Homo sapiens
gtcctggcgggtttggagatgcttccgcccctgacgctggggccgcgactccggagtccccgggagcgtgcagccctccaacactgagacccgctgccttcaaagttcccgcggcccccgct

SEQ ID NO: 420405 - DNA, 122 bp, Homo sapiens
taaggacctctgctgctgtccccggcaaatgtagataaagccattagcttgcacccatcccggctgtctcgcaggctgccggctgttcgtttgtccctgccgctgatttgggtgtgctgact

SEQ ID NO: 420406 - DNA, 122 bp, Homo sapiens
ttgatagatactgccaagttgttcttatgtttcttttatcatatagcagtgtctgagaatcgaatagatatcattcgaagttggaaggaagaggattccacatagagaagtgtgcatacaag

SEQ ID NO: 420407 - DNA, 122 bp, Homo sapiens
cgcagcatgagggcgttgagctcgctgagggcgttgtaaggcagccacagctgctccaggcggcccaggggcctgaaggcctcgccaggaaccctgcgtatggccgtccgctccaggcgcag

SEQ ID NO: 420408 - DNA, 122 bp, Homo sapiens
gttcggaagaactgaacatgatgagttgccggctgcttcctgagtccttggggaagcacacgcaccatccacttagcactggagcctggctgttctccgggcactcctaccccatcttcctg

SEQ ID NO: 420409 - DNA, 122 bp, Homo sapiens
ggatgtctattgacttctttctctttgaccgttgatccatgcaggacctggattgtcctccgttccctaatacagaagtttttcaggccagcctctgacttagccacattccatctgcatca

SEQ ID NO: 420410 - DNA, 122 bp, Homo sapiens
gggcagcaacagctgcagcagaagcaacgctgaggggcccgggtgggattgggggacctccgtggggagcatggctgagacatggacctgggagacagaaggctctcaagggaggaggaagc

SEQ ID NO: 420411 - DNA, 122 bp, Homo sapiens
ttcttgttgtaataaactaaaggagttcatttattgggtttcccagcttccagcctcagacgtaattaatctcttttccccttctttcctgttctaacaaacttccagacacaaaacagaca

SEQ ID NO: 420412 - DNA, 122 bp, Homo sapiens
gcgggctaggagccccgcgggcccctcaccgagtgcccagagcccggatccaccagcggccggagagctccctgccatgccacctcgcccctgggctgcggctgactccctgccattgtcca

SEQ ID NO: 420413 - DNA, 122 bp, Homo sapiens
agaaggcggaatggtggtggagatggacgtagagtggcgcccgggcagccggaggtcggccgcctcctcggccgtgagctccgtgggcgcgcggagccgggggcttgggggctaccacggcg

SEQ ID NO: 420414 - DNA, 122 bp, Homo sapiens
ttgatttttgcttccaaaatactgggcacttcagtctcggttttcttccttacaatgtggcgctcccctcctgcacgcgccctgacatgacaaattccagggtttatgtggacggtcgttgg

SEQ ID NO: 420415 - DNA, 122 bp, Homo sapiens
ccatccacctattccttagctggccatcattagggaaatgatgtatttatttaaccaacacgtacatagtgcaaggtaaaacacaaatacctaacaaatattaattcagtgattacccagaa

SEQ ID NO: 420416 - DNA, 122 bp, Homo sapiens
tgcatcttccacgataacgtggggttccaaggccagggtgtgtttcctctgcaggacgagcgtgtgactctggtgaccgcagagcccccctgaggcccccgggttctgtgatctcagaaagt

SEQ ID NO: 420417 - DNA, 122 bp, Homo sapiens
accgcaggctcgcggcgggcgctgggcgcgggatccgactctagtcgtaatggaggcgggcggctttctggactcgctcatttacggagcatgcgtggtcttcacccttggcatgttctccg

SEQ ID NO: 420418 - DNA, 122 bp, Homo sapiens
tgtgcatcaaaggcagagctgacggaatttgctgcagcagccaccatgggtggaaagagccgccaaggctgaacccgacgccctggtgtgatcacttgtggggacaaagtggtcgctaatgg

SEQ ID NO: 420419 - DNA, 122 bp, Homo sapiens
tgacctgtggtggtgcacactgggaccctcaggctctctgtgctgggagggtcagagccacgtggatccgagcacacacagacctgcttcctggacgacctgtgggtcccaagaccaaatgg

SEQ ID NO: 420420 - DNA, 122 bp, Homo sapiens
ttcctttttttttttgtaaagcaatgaagttattgcatgttccaaaggcatcgtgaggtacggccacccctttggcatggcatgtctgtatgcccaggatgcatatacccaattagtgagtt

SEQ ID NO: 420421 - DNA, 122 bp, Homo sapiens
ggccacctgcctagtcatccttttggcttttctacctctttcctcctaaccttttgtgatcgagtcgcggaattcacgtccagtctcaaccgatcggcttccagtcgaaaataatcgatgtg

SEQ ID NO: 420422 - DNA, 122 bp, Homo sapiens
gttgcttaatttgtctgtcttctccactagaacctaaactttcctgtcatggtgttctgtcgtatttactgttatattctaccatgtagcacaatgcttggcacatagtttgttggagatga

SEQ ID NO: 420423 - DNA, 122 bp, Homo sapiens
ttccgtcgtgtgcggatttcgctgcagagcgaacttgcggctcgtccgagtacatgtgagcggtaatcgcccctgcagctggttatcctgacattatgcactccgaagcagaagaatccaag

SEQ ID NO: 420424 - DNA, 122 bp, Homo sapiens
ctctgtctcctgtgctcacattgatttttgcaaagctccaatctggaaggacgaggaacacgtgactcacagacaggaggaaggagctaggggagttcttcccagttctgggtggagaacac

SEQ ID NO: 420425 - DNA, 122 bp, Homo sapiens
agcccatgccttgctttggcctgtgggatgtgatgtgtctgatatccagcaagagattttcgatgggcttcccactttgacttggcctcttgcttcctgccaacctcatgagaacaacaagc

SEQ ID NO: 420426 - DNA, 122 bp, Homo sapiens
aagcaatatgaaatgatctgctgcagtgctctgagccctaggatttatttttcttttcaccgtaggtggcctgactggcattgtattagcaaactcatcactagacatcgtactacacgaca

SEQ ID NO: 420427 - DNA, 122 bp, Homo sapiens
gaaaagacagctgggcccgggggaccactaccaccaagacgcagagaccggtagtggccccgaatgcctggctgccctgttatttattggatacaaagcaaaaggggcaaggtaaagagtgc

SEQ ID NO: 420428 - DNA, 122 bp, Homo sapiens
atagcccctgaagtaggcactattattagcatccacccctatggaaaggagccactctcacgctggctcagaggcaaatatcccagatattccctgtttcccaaagatgtgtccccacaact

SEQ ID NO: 420429 - DNA, 122 bp, Homo sapiens
cctttttttcttttcttttcttttcttgagacaagagtctctctctgtcccccagggtggcgtgcagcggtgcaatctgggcccactgcaatctctgcctcctgggttcaagagattgtcct

SEQ ID NO: 420430 - DNA, 122 bp, Homo sapiens
cgctgccgaactgccgcttgggtacccagctccgggcgtcatggatggagctcttctcctcggccagcagcagctgctgacgcatgtagttctcaaactcgtactgggagcactcctccgtc

SEQ ID NO: 420431 - DNA, 122 bp, Homo sapiens
tttaaaaatgcttccatttctattcatttgcagagctactggggtcccagttggggttgtcgagaggaactgcttcccttcctactgggaatggtgtttctgttatttttttcactttccct

SEQ ID NO: 420432 - DNA, 122 bp, Homo sapiens
agtcctgcgggggcagaagggaccaggaccccggggccgggcacacagtgggcggggcttcgtgggtcagctcctgcgggaggaagaaaggcaggcgggcaccgcagtctgtgcctggcaca

SEQ ID NO: 420433 - DNA, 122 bp, Homo sapiens
acgggcctctgtcgctggcgctcttgtatataacgcggttaacttcatcaaatgggggaccgccctctctcgtgacgtcagcacccaaggaccgtggggcatcctgggtgggaagagggaga

SEQ ID NO: 420434 - DNA, 122 bp, Homo sapiens
ttttcagggcaattgaagttccggtcactactcccccccagagcaataagccacatccggcgacgtgtggcaccccaccctggctgctacagatggggctggatgcagaagagaactccagc

SEQ ID NO: 420435 - DNA, 122 bp, Homo sapiens
cagcgtcatctttcaaacaggatgcccctggagctcggatgttaggggcagctagaataccgcacggggccacctggacacggggatcctaagtatctgcggtttctccacaattgtgaggg

SEQ ID NO: 420436 - DNA, 122 bp, Homo sapiens
gcgcgggcacctaggcgaggggtgcaggtgtgcggaacagcgatgctggcccatcccgtgcgggggaagagcgaggccggcccatcccgtgcggggggagagcgaagctggccatcccgtgc

SEQ ID NO: 420437 - DNA, 122 bp, Homo sapiens
gcaccagccacagttacttcgtcaaccctctgttcgccggggccgaggccgaggcctgagcggccgcctgaccgtcgaccttggggctctccacccgctctggccccagtcgaactgggggc

SEQ ID NO: 420438 - DNA, 122 bp, Homo sapiens
atttctgtaccaacaaccttgcaatggcttccttttgttcttagaataataaaatccaagcgcccattatttggccttggtttaccttttcagccttcctttccacttactcttgagacatt

SEQ ID NO: 420439 - DNA, 122 bp, Homo sapiens
aagagaaaggggaggacggtttgtccgcattcagtggcagtggaggtgcatcttctctctcggtcgcaagaaggtggggtggggtggggcggggcggggcggggcggggcggggcggggcgg

SEQ ID NO: 420440 - DNA, 122 bp, Homo sapiens
ccacccctgccctatccccagggccatctctctcttgccaatgttttttgacattgacttcgtggaaaaaagagaggctattatgtgggaactcattcactgtcccttttatttgtaaactc

SEQ ID NO: 420441 - DNA, 122 bp, Homo sapiens
attgggctttgtgtctattctaatgaaaaaggcaccgatgctccgtcccactccttcctgcgcccccgtggaaggacggtggggggacgacggcgtaggtccaggggagctgagagtgcgtc

SEQ ID NO: 420442 - DNA, 122 bp, Homo sapiens
gcccagcccttcgcgcttgccctgctgccagtggccctggtagctgtgtccgccgggccccgtgaagacgcccagtgactcgaagccgtgtgcccagcagccgctgtactcgccctgggcgc

SEQ ID NO: 420443 - DNA, 122 bp, Homo sapiens
ttcactttacaaatttggccaccaatacacagccctaataaatatgcatcaaatatactacggcttacaagaagtgtccatcaaagcagccatctctactgttatacaataggacagctcta

SEQ ID NO: 420444 - DNA, 122 bp, Homo sapiens
tttctacccttttattgtctgcctctagatgagcctcttagagcagcttcccagattatccgtggggaagaacaggttctttattagattatccgtggggaagaatgggttctttatttttc

SEQ ID NO: 420445 - DNA, 122 bp, Homo sapiens
aagctccttccttctggactcaggagactgaggcaggaggatcacatgagcccaggagttcgaggctgcaatgtgatacgcttctgcctgtggatagccactacactccagcccaggcaaca

SEQ ID NO: 420446 - DNA, 122 bp, Homo sapiens
cccgcgtggcagaaaggagttcctcagctgctgtatctggtgggaaagcgaatgctttagcgaaaataacaggcatcccataaatacatagactagaaataagttttggtttcattaagagc

SEQ ID NO: 420447 - DNA, 122 bp, Homo sapiens
attgttaatgaatgaccattaacaaagttttcaggaaattagcacagatgacgtggcaatcgcttgtgaaggaggccttcatagaactgccttgcttttagtgtgctaagaaattctgactc

SEQ ID NO: 420448 - DNA, 122 bp, Homo sapiens
ttttcctgacggggttccgcctccaaaatgcataagttctcgcgagacgcagtaaggcaccggctcgaactggggcgggccactgccaggaaagcaacgcccctgaatgcttatgccggtgg

SEQ ID NO: 420449 - DNA, 122 bp, Homo sapiens
gtgtgtgcgcccgatgggtgtgtgtgcccgacagtggtgtgtgcgcccgacgggtgtgtgcgcctgacaggagtgtgtctgacatgggtgtgtgagcgcccggcaggggtacgtacactcgg

SEQ ID NO: 420450 - DNA, 122 bp, Homo sapiens
aaagcctcaccgctccctgtcgcggacccggggcgggggttaaggggggggtcctgtccacgcttgcctggaaagcagcccggagccctggcccctgtctgtctccccgacacacacacagc

SEQ ID NO: 420451 - DNA, 122 bp, Homo sapiens
agaggacgagagggacagagagctagaaacagacaccgggagacaggcggagagagacagcgagatggaaggagagaaacaggatgaaggacccaggcccagaggaagacagaaagttctgg

SEQ ID NO: 420452 - DNA, 122 bp, Homo sapiens
ccatctcctggcttcctgtggctccgcccaccgcggggcggaagtgggtgtggccacgggcggaagcactgggtcaggggcccaatcgtgcagccagcccctcccactcgccaccgccccac

SEQ ID NO: 420453 - DNA, 122 bp, Homo sapiens
gtcctcggcctcagggagctgcgtcctggggttctgggggtgtccaagccctgcaggagccgcgccccggggtctgggggccctgggcctcagggggccgcgcctaggggttctgagggtgt

SEQ ID NO: 420454 - DNA, 122 bp, Homo sapiens
gacatgggacccttcaatacaaaatcaataatcttagcaaagaaaacatactggatgctacgaagtatgataaagtctatgaagtactggttactatggcaacgcataatacagattctata

SEQ ID NO: 420455 - DNA, 122 bp, Homo sapiens
cctctcctggaggccaagcccctaaatgccctgcaccagacactgggtgggacgctgccccgcgtccagcctgcagcacttgttaggactgtggactcgttaacgtggacgcctcttttatt

SEQ ID NO: 420456 - DNA, 122 bp, Homo sapiens
gaggctctgagccagtggcgattggctgacgcggtggctgcgcactcggcctgagaaactcggcaagcgcgcagtgtcgactccccggtctatgccaggcgcatctcaggtaaacggttggg

SEQ ID NO: 420457 - DNA, 122 bp, Homo sapiens
gtcgctttcgtggatggcgatggtttccagatgcaggaggggaagggtggggacgcgacccggagccgggggccaaatatgagaggcctcctctgcccacagtcagccctctcccctctcgg

SEQ ID NO: 420458 - DNA, 122 bp, Homo sapiens
catcagcatccggagggacacagggttgttccatccaaagccttttggtccctttgggagcgatgctgcccgctgagaagctggcggacccagcgggagcaccgggaccggtgcagatggcg

SEQ ID NO: 420459 - DNA, 122 bp, Homo sapiens
tgcaaacaggaagtgtggcactccagctaccgaagcactggagagtgtcatggaggcctacgagcaggtccaaaagggacccctgaagctgaaaggcgtcgcagagctgggagtgaccaagc

SEQ ID NO: 420460 - DNA, 122 bp, Homo sapiens
agacctccaggactcctagagagcttccggaagtgcctttggggcaagatgcgtgctggccggtgttgtgcctccgcagatttagaagttagtggccggaggggcctggtccgagtacagct

SEQ ID NO: 420461 - DNA, 122 bp, Homo sapiens
ttcaagtgattctcgtccctcagcctcccaggcagctgcgattacaggcatgtgccactacgtcctggtaatttttgtattttagtagagatgggattggccatgctggtctcaaactcctg

SEQ ID NO: 420462 - DNA, 122 bp, Homo sapiens
cacacccatggactctgagactccactgagcctggtgtggagtccaagcgggtggaacaacggtgatgttcttgggtagggttggcccagttgagaggctgggatcgggaccccaggttgct

SEQ ID NO: 420463 - DNA, 122 bp, Homo sapiens
gtctctgccctctgaccacttcgtgctgcccttaggcctggcagaatgcccggagcgcaccgggtccctggggtcaccatggtgggtagctggacccaggccttcagcccacgctcctgagg

SEQ ID NO: 420464 - DNA, 122 bp, Homo sapiens
cattttatttaccgtcttttccggtagacggtaagctccacaagggcggggctcaataaacgtttacgagtggcttaaatgaaaggacgtgcgtgggcacaccgcggggactaatcgtgtta

SEQ ID NO: 420465 - DNA, 122 bp, Homo sapiens
cctctgtctccaaaaaaaagaaattattggatggcatttttttttctttatgaaggctaacgctagaccccaatcttttctaggttgcagtgtttctgctgataagtctgttgttaatctaa

SEQ ID NO: 420466 - DNA, 122 bp, Homo sapiens
cacctgagtaaacggttggtttgttcttgggtcaggtgtatccacagcagtcattcagtgcgagggtacttaggtcctctttatcgtcagaaaatcacagagaagcaccatgcaaaaatagg

SEQ ID NO: 420467 - DNA, 122 bp, Homo sapiens
agggggacttcggcctccctgcgggcgggagctaggccgctggaaagtccgctcgcctctcgccggcaagggatgacgccctgggccttttgtaccactcgccacggaaaatggtcacacgc

SEQ ID NO: 420468 - DNA, 122 bp, Homo sapiens
cccagctttctcccctggctggctctctgagtcagctgtactggcctctgagtcaatactcggcctggagtaggtgcttaataagtttttgttgattttttttttttttttttttgagacag

SEQ ID NO: 420469 - DNA, 122 bp, Homo sapiens
gtcggcccagcgactgcgggaggcatcccggagccggccgggcggggcggagtcgacgctcggcccggcctctgctcacctcatccacgggagacggaagtcttggccctgctccgctcccc

SEQ ID NO: 420470 - DNA, 122 bp, Homo sapiens
tatttctttcacttcctagggggcaccgagtgtttcctctacagggtcatgtcctgtgatcgctacctggccatcagttacccgctcaggtacaccagcatgatgactgggcgctcgtgtac

SEQ ID NO: 420471 - DNA, 122 bp, Homo sapiens
cggacttgctcatgaagattctgagatcctcgtcaacttggtacttgatctctgaatttccgttctaccctcagtcctcttgggccttggttttagtggaggtaggagctgagagttggagt

SEQ ID NO: 420472 - DNA, 122 bp, Homo sapiens
aagaaacctttgtaaaggcattttttgagaatatattatttgccagcagacagatcatcacgtaagaattgtgtttgagtaggccaggcacagtggttgacacctgtaatcccagcactttg

SEQ ID NO: 420473 - DNA, 122 bp, Homo sapiens
ggtctttcggaacctttattcctgatgtttatagctacagagtaatatttctgtgtccatcgtatatttaaaagcctatggtgcacagttgattgtgtgtgattgctgtcttcattcactta

SEQ ID NO: 420474 - DNA, 122 bp, Homo sapiens
aggctttagaagaaacggagacccacaggggcaaaacagccttgcatttcaacagagaggcggagacggatctaaaagtcagctcactggattccagtcattgcctgttgccctacaccacg

SEQ ID NO: 420475 - DNA, 122 bp, Homo sapiens
tggccagcattgattctttggattaataaaggatgcatctatgaacctgatacgtaaatccgttgcctctccatgcctgtaacactttacgcagcccactgctgagctgccatgatatgttc

SEQ ID NO: 420476 - DNA, 122 bp, Homo sapiens
gcacgagttattgaagacagctgttgtaagcatttcaggacaatgcacctcccttaacaccgagtccgggatttggggcggggtgccggaaaacgccaggtcccgccagcagagggcacggt

SEQ ID NO: 420477 - DNA, 122 bp, Homo sapiens
ttccagcaagttgcctttcttccctgtttaagagctgagaaaactgggccttggggaaagcgagaagtcccagtttaagtcaccagagacgtcttcctaaagaagtattcaggatgctgtgc

SEQ ID NO: 420478 - DNA, 122 bp, Homo sapiens
tctttgcttttcaggtcctacctcgagcataagacctcaatgaactatatgctggcaacacgcctcttccaggacaggtagagatttgctaaactttaaatttaggactagatcacaagatt

SEQ ID NO: 420479 - DNA, 122 bp, Homo sapiens
atctattcttatcagcttgcctgactgcccaggtcataagtcaaatacttgaaaagcccccgagctgaccatgattgcaatgcattatggactgcaacaaaatacagggagacaaccctaaa

SEQ ID NO: 420480 - DNA, 122 bp, Homo sapiens
tctgcatcagaaaacagggcacaaagtgagccagagagactccgggagggtttgggggcacgagtactcggcgcagccggctgctgggttggcatgaccacggatccgccggcaggcgcgag

SEQ ID NO: 420481 - DNA, 122 bp, Homo sapiens
ggaaactcccgataaacccattagatctcgtgagacgtattcactctcgcgagaataacgcgggaaagacccacccccatgattcaactacctccctctgggtccttcccacaatatggggg

SEQ ID NO: 420482 - DNA, 122 bp, Homo sapiens
acgcactaacacgagctctcacagacacacccagacgcgatcgcagactttcagacaccacggggcccacacactcgctgccagggcctgacagagccagcagctctcatacgcacatgcaa

SEQ ID NO: 420483 - DNA, 122 bp, Homo sapiens
gtttcataggacacacacatggttactgtaggcaacagatcctataatatatgagctggccgggtgcggtggctcacgcctgtaatcccagcactttgagaggcccaggcaggtggatcgcc

SEQ ID NO: 420484 - DNA, 122 bp, Homo sapiens
gcgcgttgggggcggggcctatgtgtaaaaccggaaagggagggagaagggtgggatccgcgagggcctttgggaaatgtagtctttaatctggcccgtgacagatgcttgcggaggggcgc

SEQ ID NO: 420485 - DNA, 122 bp, Homo sapiens
tccaagatgtgttcgtgataataggggctgcagtggaattactgttgttcaacgagaggacgatcaccagcatcttagaggggtgatcagtatagatgtttaagtcagcagaaagaaacttc

SEQ ID NO: 420486 - DNA, 122 bp, Homo sapiens
ccccctcctgctgcactcctccgccaccgggctaggttgaaaggaaaaagccaagaagcgcgaagcagcccggctctggaaggctttggagagtccagctgacttgtacacaattcgcggcc

SEQ ID NO: 420487 - DNA, 122 bp, Homo sapiens
atttcgatttttttttcaagtgcagtgaagaattaaagatctcgtccaccaaaaatactccgagtgtgcatttcgggttttaatatggtattgtctgatgggtttgacaggctggcggtcca

SEQ ID NO: 420488 - DNA, 122 bp, Homo sapiens
tctctacagtttttaggcattcgctgtgtgatctagaaaagctacagagtctcgctccgtcgccaggctggagtccaggggcgcgatctcggctcactgcaacctccacctcccgagttcaa

SEQ ID NO: 420489 - DNA, 122 bp, Homo sapiens
taagcacggacatataacttccacctttaaaagtcctggatgtgagaaagataagaacaacggataaatgaaaatattaacaaaacgtctgagtatgccagaggccacgtgaaaagacggtg

SEQ ID NO: 420490 - DNA, 122 bp, Homo sapiens
accttctccttgttggcgcgctgggctcgttccttctccagccggctctggcccacgcgccgcgccttctgctgcactgcttcctcggccacctgcgtcgcgtgctgcagccgtcgctcccc

SEQ ID NO: 420491 - DNA, 122 bp, Homo sapiens
tttagggcagccagcacccagctcaaggtctctgaatccaatggcccatgagccacagctcgggaaggagaaggagctgccggggatcccaccgggtgaatgatcagagtttgtttgtttgt

SEQ ID NO: 420492 - DNA, 122 bp, Homo sapiens
tctatctcaggtttctttttattgaagcttgaagctcaagttcatggcttcatcaaaagacgcttcaaatcctgaagttgagatagctctcacctggagcccgtgtgttgttctaccctttg

SEQ ID NO: 420493 - DNA, 122 bp, Homo sapiens
agcagcgaagttacctcaaaacgccccggcctcggcccgccacggacggctccgaggaggcgccgggagcgggcccagtaggaccctctctgacagcccccgtccctccccaagcgctctcc

SEQ ID NO: 420494 - DNA, 122 bp, Homo sapiens
cattacaaaagatgtctttactttattaaaaagcttactaaagatttcctttacaataaacggcataagaaagtagttgcttaactgctcttctccaatcgaaacaactcgattcttttaga

SEQ ID NO: 420495 - DNA, 122 bp, Homo sapiens
cctgggagggggccgggagccaggggcagctcgggagagccggagctgtggcggctgtggcgaggcttggagccctcttccctgcaaaccatgtttgccaaagacaaaggctcgttggtgcc

SEQ ID NO: 420496 - DNA, 122 bp, Homo sapiens
tatttatttatttatttattttcggaaaagcactacagagaatgaacagccaatgagcttcggcaaatattacatcactagtatatgcaacttgttctggatgccaagatcaatttataggc

SEQ ID NO: 420497 - DNA, 122 bp, Homo sapiens
agtttcctcctcctcaggcaccatgggagctcagagttggagctgagttgatttcaggagcgtttcctgccacctgggttggtggactaagctccacgctctccatacgaggcactgctcag

SEQ ID NO: 420498 - DNA, 122 bp, Homo sapiens
gcgctgcgctctcggaaatgactcgctccaatcccgcttcgcggggttcgcgccggggggcgggagggggtgaattatccccggattaatcactccggagccgcttctccgccgctccaaat

SEQ ID NO: 420499 - DNA, 122 bp, Homo sapiens
aatttttagtatattcacaaataggtgaaaccatcaccctagtcaattttagaacatttccgtctcctcacaaagaaaccctacatcctttagctatcacccctccacctcactgttacatg

SEQ ID NO: 420500 - DNA, 122 bp, Homo sapiens
ctccgtattcctaaaggacaacgggtcttgctacctatagagcgagtgaggtgccctccgcgtgggtagcatatatgctcaagaaaagagggcgggggaaggagttcctgaatgaaggtctg

SEQ ID NO: 420501 - DNA, 122 bp, Homo sapiens
ttgccagttgttaaaaacgacctctatagagagggaaaacgggaaaggcgggagcgatctcgatcccgagaaagacactgggactcgaggacaagggatcgagaccatgacaggggccggga

SEQ ID NO: 420502 - DNA, 122 bp, Homo sapiens
tcctcccgggcgcattgggagtctccagaagtaagttacaggcagagctgtttaaggaggcgtgctccccaccccagacccttcagtgggccctcaacaccctccccaccagtggacgcgtt

SEQ ID NO: 420503 - DNA, 122 bp, Homo sapiens
tcctggccaggcggagacgcgctgcgattggccgtggtgggtgccggtaacccgtgctagcgtctttggctccccgcaccgtagatgtcaaaggctgaagctgctccctttgccacattata

SEQ ID NO: 420504 - DNA, 122 bp, Homo sapiens
gaaagctccttcttagttgtgacggaaattaggatttataaaaaaaaaagtgtatttgaacgtcttgaaatatcctattaatcgttagtgctgtgcactattactattgttatattcaatta

SEQ ID NO: 420505 - DNA, 122 bp, Homo sapiens
gtttccccagatgtatgatgaaaataatagtaaagaacgtcccaccaggggcccaggccccgcactcaccgaggctctgcagcgtggccactagccccccggcgggcacgccgcccccattc

SEQ ID NO: 420506 - DNA, 122 bp, Homo sapiens
ttgggggggtggggtggggggagcggtgatctgagctccgagcagctggtcttcgcggctcgctccctccttcgcgctctctcgctccctgccgccgcccgcagggctgcggggctcggtgg

SEQ ID NO: 420507 - DNA, 122 bp, Homo sapiens
cgggaccgaaagggtaaagcagaggctcccggctcgctgagtgacagcatggccggcggccggggagagccgaccaatcagggagggcgtacgcgacccacgtgcgtaaacggcctcgctat

SEQ ID NO: 420508 - DNA, 122 bp, Homo sapiens
ctgcactcacctcccgcgtctcagggcactcacctcccgcgtccctgcactcacctcccgcgtctcagggcactcacctcccgcgtctcagggcactcacctcccgcgtccctgcactcacc

SEQ ID NO: 420509 - DNA, 122 bp, Homo sapiens
ttttggatcgaaaatcaccttgagtggaggaagtgacttcactgggtctctggaggctctcggagcttgagtggctctgccccaccctgaatcatgcacccataaatgcagttatgggtgga

SEQ ID NO: 420510 - DNA, 122 bp, Homo sapiens
gcctccaggccccagacacacccctctcgaccccccgaggtttcctcccagatctgttcccgccgggacctgaccttgcgcccctccaggcgccttaggtgtttgccaggcggagccttctg

SEQ ID NO: 420511 - DNA, 122 bp, Homo sapiens
tagttggatgcaagcacacaaagatgggcttggcgtttgtctaaggctttggcagcttcgcgaattccacgtgctaggtcatggtggatgagagcggtcttcagcacctcttgtgaagcagt

SEQ ID NO: 420512 - DNA, 122 bp, Homo sapiens
aagcaaacctcatcccgagccaggagccctttccagcctctgataactcaggggagacaccgcagagaaatggggagggccacactctgcccaagacacccagccaggccgagccagcctcc

SEQ ID NO: 420513 - DNA, 122 bp, Homo sapiens
ggccctatgggacaaaccccgccctctccctgcctactacgggcagtcgacaggtggggccggccccacctcctggcagcgctcgcccgctccgttcaatccccggtagccccccaaataaa

SEQ ID NO: 420514 - DNA, 122 bp, Homo sapiens
ggcccccgcaaaacaatgtgtgttgtgagccaggacgcaacttgccggaggcggcgggggcgcgccgagcccgcctgagaccgcgctgaccttctccccccgccgtccgttgggcccgagcg

SEQ ID NO: 420515 - DNA, 122 bp, Homo sapiens
ccccggcactcccgccgtggctgcggcttgggcctcgtggaagcaggcgggaggggcgggcgttgcgctgcgggggtgcgggggtgccgcttcacctatgcctctgtgttcctggtatactg

SEQ ID NO: 420516 - DNA, 122 bp, Homo sapiens
agagccgggagggcgtacctggcagccaaaagcccagccgctaatgagcccggtgcggcgcgagctatttttagcagctgctcctcgggacgcctaatcgctccggccggctcccgccaggc

SEQ ID NO: 420517 - DNA, 122 bp, Homo sapiens
ctttaagagtagtggcccctcctcccttcagaggaggacctattagagcctttgccccggcgtcggtgactcagtgttcgcgggagcgccgcacctacaccagccaacccagatcccgaggt

SEQ ID NO: 420518 - DNA, 122 bp, Homo sapiens
ggcacttccagggctccctgtctgcatgtccttcactttctactttacattaggattatccgtggcaaatacgcccagaacctcctggagagcagagtctacatcagatcatctttgtgacc

SEQ ID NO: 420519 - DNA, 122 bp, Homo sapiens
ctttcctcgctgcaccttccagattccaggtcagcctatggggcactgtggtgagtgggtcgtacggctgaggcgggggacaccagcgactatgagagcgctgtttgtattcacgccgtgcg

SEQ ID NO: 420520 - DNA, 122 bp, Homo sapiens
agcaccacgcgagcagtggcagcccggagcacctgcagaagccccggagcgagggcagcccggagcactccaagcacaggagcgccagccccgagcatccacagaaacccagagcctgtgga

SEQ ID NO: 420521 - DNA, 122 bp, Homo sapiens
gacagtccatctgttttctatttcggttttctgcctcttggtttcaaagcacacgttccccgtgacctgttacctgttgctgaaccttgttccagtgcacagcggcctctcgcgcatcccca

SEQ ID NO: 420522 - DNA, 122 bp, Homo sapiens
gtgcggctgcctggatgggagaagccggcattcatcctggcgcccctccctgcctcgagtcgtctccctgttagtgctaccatctgtcagtgttgtgatgtggactcagctgactccgtggc

SEQ ID NO: 420523 - DNA, 122 bp, Homo sapiens
caggaaatccgggagagggcggtatttaccagtcccttccccgagagcaaccaggcaaatcggggaaggttagaggtgggggacctgcctgagccgggacaaaaaactttggagctagggcc

SEQ ID NO: 420524 - DNA, 122 bp, Homo sapiens
gggaagttttctgttgtcccctggactccatccagaaaaagatggccctggtggcagcctcgaagcgcggggagggaggctaggactggggccgcgtcgggaactgagcctgccgggacgct

SEQ ID NO: 420525 - DNA, 122 bp, Homo sapiens
agactgggcgcagggccgccggggcgggcggggggcttaccttgctcttgacttccactgcgctgcaatcgtagaatcgcaaggtctgagacttgtgaaaacttcggttcatggtttcggcc

SEQ ID NO: 420526 - DNA, 122 bp, Homo sapiens
gaccctgcacccgaaaaatctctagtgtattcggggagccatgaaaaggctcccttgggccggtgggatccttggctttgtctctggctgctgcgcacaccgtcagccgtcagggcaattgg

SEQ ID NO: 420527 - DNA, 122 bp, Homo sapiens
gcaggcatagctggcccaagatctccttctgacatgggaggtggaatccactggagaagccgctgctacccagaaccttcccatacgtgcctgggctccaaactgggagctggcggattccc

SEQ ID NO: 420528 - DNA, 122 bp, Homo sapiens
gaactcaccttctctgaggcaagggcgggtgtctactttaaaactactgccccccctccccgccgccgccatagtggagccgccaaagccgccgccgccgccgtcgccacagccaccggcag

SEQ ID NO: 420529 - DNA, 122 bp, Homo sapiens
gttgagcccctgccagaactctgtgcctaggcagcctcgggtcctctatctcagtccagccgcttgcctcacttcttcccgcttgccttatctccccgcagacgtggttcccctgcagcccg

SEQ ID NO: 420530 - DNA, 122 bp, Homo sapiens
gcgtcagccccactcccacctcagaggaggggcagcctccctcagcggggacttcagccccggggacactgcctggccaggcctgggtgaagagtcctcacgacctcattccctggagctgc

SEQ ID NO: 420531 - DNA, 122 bp, Homo sapiens
ggacttcctctccggctgggcccgcctgacgtgggaggcagccagggttaatcatttccacgaagccttgaccccacctgccttggccgctctgctcccgcctcccactgcccctcaggcca

SEQ ID NO: 420532 - DNA, 122 bp, Homo sapiens
ggaagcagatagggtagaatagggtgtctgggggctgggctgggagcatcatggggcagacgtggcagcggggaactggcctgtctcccaggtgtagacacttctccaggtgagtgcatgaa

SEQ ID NO: 420533 - DNA, 122 bp, Homo sapiens
cgaactcccggactcaagctattcccctgcctcagcctcccaaagtgctgggattacaggcgtgagacactgtgcctggcccaggacaggtctcctgggaaactgaagctcacaggagtgat

SEQ ID NO: 420534 - DNA, 122 bp, Homo sapiens
cagttgcagcgaaagtcacggcagttggggctggtgtcagctgatttactgcagtggcggcggcggcggcaccggcaccttgcagtatcactggggagacggcggctgtatagcgcttgccg

SEQ ID NO: 420535 - DNA, 122 bp, Homo sapiens
cgccgccgacatctcccagctcagcagtgcctagtaccgtaaagagtatggtctgaaaagcgcagggaagttccgccgcgaccttttgcgacgcgcctcgctcgcgggacacgttaacagag

SEQ ID NO: 420536 - DNA, 122 bp, Homo sapiens
cccagacccggagcagtggcagcgcggtgggcaccagcagggagaatatgcggggcagcgcggtccggagcagcacccagtcggcgagaagtagcagtactgtccccagccatgcgagagaa

SEQ ID NO: 420537 - DNA, 122 bp, Homo sapiens
agcacatctccccatatctttttttcatcctatatatacaggcattgaacctggggtggacgccttcgtcctcttactttcgggaacaccctactctgtctatggagtagctgttttttcac

SEQ ID NO: 420538 - DNA, 122 bp, Homo sapiens
ccagcggtacgcaggcgccgggagcctacgagggctcgcaggagctgggaggcgcgcatgcgtgcagctctttggaggcggtagcgttttcggcgtcgagactggaggctgagtgctaaact

SEQ ID NO: 420539 - DNA, 122 bp, Homo sapiens
accaggctcttctcagggctcctgaaattccgaccataggtagcctagtgtttatctgtacgcgagacaaggattttgggtgctacgtggacatgatatcaagtaatataatcacagtgtga

SEQ ID NO: 420540 - DNA, 122 bp, Homo sapiens
gcgagaacttgcgcgggagccggactgagcggtgcgagcgcgcaggcgcggccgacggggcgggctgctactccggaatctgctaatcccagtcggtgccgcatccccagcccgccgccatg

SEQ ID NO: 420541 - DNA, 122 bp, Homo sapiens
aacagactgaatgctcttctctgtctgttctctttctggccttccgcccccccccccccccgccccttctgtgcctgttattaagtttgttgggggaaaaaatcgtagtttttgtggatttc

SEQ ID NO: 420542 - DNA, 122 bp, Homo sapiens
agagcggggaagaggtcgtaagatcccctgttagggtgttcataaagtaacttctcctctcgcacagaacgtcttgactaaaaaacaatccgtacagaatgtgcgggagagctgtaggaact

SEQ ID NO: 420543 - DNA, 122 bp, Homo sapiens
tatttatttcattttatacttatgacaaccctgtgaagtccctctgtcattctatgcagccgttgaaattgtcattcttgccattttatacaggatgaaataaactcagagagaaggtaatg

SEQ ID NO: 420544 - DNA, 122 bp, Homo sapiens
ggtccccggggtccgcgagccgcgctccgagcgggcgcagccgcggccgggaggtgatgccgggggctgattaccatgagaaaggctgtgcctggaaaagcctcctccacgcgactgtcaat

SEQ ID NO: 420545 - DNA, 122 bp, Homo sapiens
acataaataagagcttgtcattcccctgctcaaaaccctgcagcagtttctcatttcactcggaggaaaacgcaactcaaattctaaaaatggcctacaaagctgcacctgatcttcctgtc

SEQ ID NO: 420546 - DNA, 122 bp, Homo sapiens
ccctgacaccgcacccggtcctcaggcagcgcgccccagaccccgggttcggcacgccgtcgtcggcttccggacatcgcaacttgcgcccctctcggggatcctcctcccgggctctggac

SEQ ID NO: 420547 - DNA, 122 bp, Homo sapiens
cccagaccccacccctcaccccttccctacctgaactcttcctcctacacatcacagcagcgaccacagctccgatgaccacaactgctaggacagccaggccagcaacaatgcccacgatg

SEQ ID NO: 420548 - DNA, 122 bp, Homo sapiens
ctgcccggggagctgcgggcactcgcacctagccattgtcgctccttgcgcggtccgcaacggagaagtaactcaagtctgagtgttgttggtgcgagaatgagagagtgttctggtgtggg

SEQ ID NO: 420549 - DNA, 122 bp, Homo sapiens
agtgaaggtccggagttgtgccggcacatcatgggctcagtgcccgtgagctccccttcccgatgtgcacacagaccctgctgacaggccgtccacctgaggacactcagcagccacctgcc

SEQ ID NO: 420550 - DNA, 122 bp, Homo sapiens
gtgacctctgtgaggccacggagctcttctgtggtctggatgcctgggccacagaggcagcgtggaccccatgggcctcaggccagcagaagggggagccagagtgggtctcagggagtcta

SEQ ID NO: 420551 - DNA, 122 bp, Homo sapiens
cctccgaagtaggccacgcctgcgccattgcacagttcggagctctcccatcagcccttccgagtgcactgcctcaagtcgcacatccaaagtgaaatgtgggtgttttaatcactgaagag

SEQ ID NO: 420552 - DNA, 122 bp, Homo sapiens
cccaccagaaggaggaaactccgaacacatccgaacgtcagaaggaacaaactccagacgcgccaacttaagagctgtaacactcccagcgagggtccgcagcttcattcttgaagtcagtg

SEQ ID NO: 420553 - DNA, 122 bp, Homo sapiens
ggcgcccttcggggtgcagagccacaggtggggcccgtttgcgtcctgggctcacgcccacggtccaaagcagctgctgcccaccccgaagccacgcttggcctcgggagagagggtgtcca

SEQ ID NO: 420554 - DNA, 122 bp, Homo sapiens
ggaagagttggtggacagtgcaacttattggtgataggggagcttgatcctaagggaaggcgcagaggctgtgagatactccttttgccaaggttcatgctgtgaggaaaaactgaagggca

SEQ ID NO: 420555 - DNA, 122 bp, Homo sapiens
agttgtctcttatcctccagggaaccagaaataggcaggtcgaccaggcgtcggcccctccgcctccgcctggccctgtgctccccggggcccagcgccccgaacacaaccccagggactca

SEQ ID NO: 420556 - DNA, 122 bp, Homo sapiens
tcttaagaagagaggactgactcctggggagtcgggtcagtcccaatccagagatgaaaccgggaaaggaggcgcacgggggaagggcgggaggacgttttccttttcggcagaaatgccca

SEQ ID NO: 420557 - DNA, 122 bp, Homo sapiens
cattcaccctccaaatcaagcctggactactagtattcacccttagaaaaaaaaatctagcgtctagtatttaaaacgtgtaaattatgaacttcatgagaggcttataaccccatcctagg

SEQ ID NO: 420558 - DNA, 122 bp, Homo sapiens
cgttttttctatttggtcggtgcctgtgcaatatgaattgtttagcactttgaatattaccgcggaactctatctcgcttttgccaagggcagagttctgaattctaataagatgaatatgt

SEQ ID NO: 420559 - DNA, 122 bp, Homo sapiens
cccatgcctttgggggtgtcgggatgccccactttaagccgggctgagctcatctccacccgacctccccgcactcacgtcagtggccttttcagtcctgccgtcctggtggggtgcagtgg

SEQ ID NO: 420560 - DNA, 122 bp, Homo sapiens
gtgagcagcctgcggaggaagagcctctcagacagctaatgacaggttccttctccctggcgcggccacctcccctctccagcgggtggagatggagaacctgtcggccggcctcagggtga

SEQ ID NO: 420561 - DNA, 122 bp, Homo sapiens
gaccaggccccgcgccctcagtgctgagacagcctccagccctcggtgccttaggggttgcgcgtcaccttggagaccgcgtgagaggagggcgtgcctctgcaaaggcggaagtcggctgt

SEQ ID NO: 420562 - DNA, 122 bp, Homo sapiens
ggccctgatgagctcactctcccgtctgtgtcttcacagcccacctcaccccgcctcccccggcccaggaaacttcagacttcaccgcagcttcctgcctcagaggatgtcagggccccggt

SEQ ID NO: 420563 - DNA, 122 bp, Homo sapiens
ctgggagcctagtcaagtcatcctagagtcctcccactctgaggctggtgaaggggaggacgggactgtttgatgagtagttactgcttgtgtgtgttatcttactgaatccacataccttc

SEQ ID NO: 420564 - DNA, 122 bp, Homo sapiens
agcagtgagtaccatcagacccctttcgtttgctattctgtcctacttttccttagaattcgggggctaaatactggcacctgtcagccagttaaaagcgactagcgcggccgccggactaa

SEQ ID NO: 420565 - DNA, 122 bp, Homo sapiens
tgttctgttattctaaatttaattgttttggatgtacccattccattcctgccttaggtgcggatccccctggagggatgggattgggcaatgagagttccctaatggatttcatccttcta

SEQ ID NO: 420566 - DNA, 122 bp, Homo sapiens
gctatttttatcccaaatgtggccgagagggggctggggctgggtgacggggcagggcaacgtggctgatgggcctgacctgctcagaaaacccaggctgtgtgagactaagaaggaaaagt

SEQ ID NO: 420567 - DNA, 122 bp, Homo sapiens
tcagtaagtcagtaggtcattggtgcccgcttgggatctccaagttcgagggaattgttgcggctagggtttgatcatgggacaacagttatctgcacaacagaagcagtatataaaagtat

SEQ ID NO: 420568 - DNA, 122 bp, Homo sapiens
tgatattagggagatgaagatgaagaaattgatggagataccaataaatacaagaaaggacgtaagaaagcagcttatgctggaggcttggttttggaccccaaagttggtaaggctgggca

SEQ ID NO: 420569 - DNA, 122 bp, Homo sapiens
gcggcaggcggaaaacttaggaagagctggatgcctcccacggagagcgtcccttccaagcggccccggagtggagtggagtggagtggataggggtagacttttcacacggggacaaatta

SEQ ID NO: 420570 - DNA, 122 bp, Homo sapiens
aagaaagggattgctgtctcccttgaattcctctgttccttagagcttgtgttacttggacggaattgccaacacccttttttatagagggttctccacttgaccttattaaggttttattg

SEQ ID NO: 420571 - DNA, 122 bp, Homo sapiens
ccgtagatagatattcacgaccgggctagaaatggctgcagaatttgttctgtgaagggccggctgaggcagccatccggtaacatcacctggtaacaccacccggtaacatcatcgggtaa

SEQ ID NO: 420572 - DNA, 122 bp, Homo sapiens
gcccctgccaaagggcttccatgccctgagttctggactcaaggcacacaggactaggcacgtctctgggagcctccaaaccacagaatcaaagaggtccaaggagacaggagactcccggg

SEQ ID NO: 420573 - DNA, 122 bp, Homo sapiens
gccccacactgacactacgccgaccaccgagaagtgaggactccacaggccgagagcccacgtgaagccggagcccgtcggtgactgacagacgctctgaaccccacagatgtcgccgcccc

SEQ ID NO: 420574 - DNA, 122 bp, Homo sapiens
acactatggtaacatttagaatttaagatagtactttagaacactagttcaccatcttctcggtttgttggctttctgatcaaacctgcttttcctcctaccaacccatatctcttgtgtcg

SEQ ID NO: 420575 - DNA, 122 bp, Homo sapiens
taacctaggggctaggtccagttatatgtcacaattaccccagtgggctggccccaggcacgagaggagagtcacatcacagtggtgctgggcccagcaatatgtcacaatccccactgtgg

SEQ ID NO: 420576 - DNA, 122 bp, Homo sapiens
agcactggacgatgaataaaccctttgacagatgcattctcagtctttggacagttctgccggctaggcgcatcatgaccaccaccttacaggtgggcaggcagagaggcagagcgggacgc

SEQ ID NO: 420577 - DNA, 122 bp, Homo sapiens
ggatcaaggaggtgtccaaggggctgctgccagccaaagctcggagtgaagctgcattcacggagcccagggaaacggcaggagcctcacttggggcgacgcctggtccaggtgcagccaca

SEQ ID NO: 420578 - DNA, 122 bp, Homo sapiens
cccgcaattcctccggtgtccccccgcccgatccccaccccgttactgagcacctccccccgttgctaagcacccactgctctcagcctccgagtccgcaacctgctggggccctcctgtgc

SEQ ID NO: 420579 - DNA, 122 bp, Homo sapiens
gggggtgggcggtgggagggagagaggggaggagggccgaagagagaagggacccaggcgcgaagagctggcctggcttaccctgtagccccggctgccgtggggaacccctccccgccatc

SEQ ID NO: 420580 - DNA, 122 bp, Homo sapiens
aagggtatttagcctgtactttttggcttgcctggctctttcagccctctgagcagtatacgggaatttctgtcagcatttttagtgtgtgtgttccctgtgctgttttgtaaattgggcca

SEQ ID NO: 420581 - DNA, 122 bp, Homo sapiens
ggtagctacactcctcttgcagtgcctgcgccttcttctgcagttccacgcccgccgcctcggcctcctgcaagaagccgccaacagcacaagccttgacctctttgtgctgctgggcctca

SEQ ID NO: 420582 - DNA, 122 bp, Homo sapiens
tggccccaaggtaagtccctctgaatacctaatatccaagaactgtctaaggcagggaggcggaaagtggtagtgtttctgactcaggatatttgaggttctgttatcaatcatgccttcta

SEQ ID NO: 420583 - DNA, 122 bp, Homo sapiens
ccgcctcccggattcacgcgattctcctgcctcagcctcccaagtagctgggattacaggcgcccgccaccatgcctggctaatgttttgtatttttagtaaagatagggttttgccatgtt

SEQ ID NO: 420584 - DNA, 122 bp, Homo sapiens
tgcagcatccatcttggggagagtggtggcgggtcctttccttgttctcttgctccctgccgcctacctgagaccgcaggaaatctgggtctttctgaaggcatcttcttgtggtgtagtcc

SEQ ID NO: 420585 - DNA, 122 bp, Homo sapiens
acctggatcccttgcacgtgcagttcacacgtgaactgtgcccctttgagaatctaatgccgctgctgatctgacaggaggtggagctcaggtggtcacggcagcgatgaagagcggatatg

SEQ ID NO: 420586 - DNA, 122 bp, Homo sapiens
ggcattctcttccattggccaagagcattctcatctgctcagcaactttctcccattggccggacccttgatgctgaggctttgaagcagagcctgggttttccaggcactgctgattagcc

SEQ ID NO: 420587 - DNA, 122 bp, Homo sapiens
agtactgacctcaatcagggttttaaatacttgactctaaatcctttatcttgggccaggcgtggtggctcatgcctgtaatcccagcactttggaaggcggaggcaggcggatcacttgag

SEQ ID NO: 420588 - DNA, 122 bp, Homo sapiens
cacctccacccccaccatacccagcccatacatgagcccctgggctgagctgcgcggccccggccaggcagacaggccagggcactgctgtgcacaatgcagcggtttagctgaatgtgatt

SEQ ID NO: 420589 - DNA, 122 bp, Homo sapiens
caagtgcctcgggaccagggcacagatctccaaccggttggcccagcactgtaaaaccagcgggtcagccaggcagcccgggaaggcaccccacatgaacttgcgacggaaagcatcctcca

SEQ ID NO: 420590 - DNA, 122 bp, Homo sapiens
cctcacttttggggggcgggggtgcgcaagcgcagtgggggagctctggggtgggggtagcggtcgagtatcaagttgctttctgtcccggcagaggaagccagatcgctgagggtccggtc

SEQ ID NO: 420591 - DNA, 122 bp, Homo sapiens
tataacctagtaacattgtagctgctataacattgtagtcgaatgcattaatcacgtttgcggtgaaggtggtgtaaacaaacccactgtactgccagctgtataaaagtacagcatattca

SEQ ID NO: 420592 - DNA, 122 bp, Homo sapiens
caaatctccatatgaaaccagaacaattcaatcgcttattcacagtctagatgtttgcaccgggtagacaaaatattgaaatgtttggcagaattgctcaattgtcctttggaagtctggca

SEQ ID NO: 420593 - DNA, 122 bp, Homo sapiens
gctatgaggttttccgaggcccggtcgcccgcctggtctgcgtttattttgggttaaaatcgctctgagccagtctgctcccccagcctgtctgagggaggtccaggtagacaccgcctgcc

SEQ ID NO: 420594 - DNA, 122 bp, Homo sapiens
ttctttttctgaaagtgctcagatttattctgctgaatatcggttcgtacaaacgacagccgcattacagtttattgtcacatcaaaagggaaaggccaaaaaaatatataacttaggcaag

SEQ ID NO: 420595 - DNA, 122 bp, Homo sapiens
aagtaaaataagcccagcaataaagcaccgggatacaaagaattcagcatcatctacacccgagtggctatccactggagcagcagcatgtcagttaacaacagagcagggcaggtcagcta

SEQ ID NO: 420596 - DNA, 122 bp, Homo sapiens
gagtacagtggcgtaatcatagcttgctatagccgcactcttgggctcaagttatcctcccgcctcagcttcctaagtagctggaactgcaggcacaaaccgctgcgcccagctaatttttt

SEQ ID NO: 420597 - DNA, 122 bp, Homo sapiens
gctcactagacccctccgcaccgtcccctgcccggcccctcttccggggtcccagcgggtcgggctcatgattccccggccccgcattcaccctcacccggtaaccccgggcgtgccccgca

SEQ ID NO: 420598 - DNA, 122 bp, Homo sapiens
ccccagccccagccagccgcggggctcagcctgggcaggggctagacccccggggagaggcgaaattggctggaaaatcacagctgatgacagggcgagtagctggtgggatcgagaagcgg

SEQ ID NO: 420599 - DNA, 122 bp, Homo sapiens
gatgtacggcttttgctttttcacacgcaaaccgccacccacattcagtatgtatacaagcgcgcaggccatacgtccccaggaccgctcagcttcctccgagtttcagaagcttcccgggt

SEQ ID NO: 420600 - DNA, 122 bp, Homo sapiens
gtgatgggtgggtacctgttgaggaaagcgttgccaaacgcgttgagcttgcggaaggggcgccgcgggtccaccacgagcgcgttgcccggcaccacgccctcagtggggccgtgcatgac

SEQ ID NO: 420601 - DNA, 122 bp, Homo sapiens
cgggaggagggaagaggagctgaccagacccaaaaaggggcgacacacgccggggagggacgccacgcaggccgcgggcggactcccgggcggcggggacgcgcggggacccggccgcggga

SEQ ID NO: 420602 - DNA, 122 bp, Homo sapiens
tgctttccaatttgcacatgatttcttgctcatctgccatacttttcactgtcaatttcacgtcccgagagatgtacaaatacaccagccaagggatacaatagacacaatgtagccacctc

SEQ ID NO: 420603 - DNA, 122 bp, Homo sapiens
atacaatgaagactgcatgtgatcggcagctggtatttccgatgacctacatctcagggacgcagtaggatgttcattgataaacaaataaagcggctcgaagaaatattgtgcagagacat

SEQ ID NO: 420604 - DNA, 122 bp, Homo sapiens
tagaagtgttaagttctgcatgtaagctattcagcacctgggaaagggaacagcgatactcgtgctctgaatctaaaaaagtagaggcacttcttcacctggcttgctctatcatcctccat

SEQ ID NO: 420605 - DNA, 122 bp, Homo sapiens
cagaggcttccaggaaaacagcaacaccaaacacaccggacgggagtcctggctgcaggccgttctacatccagggccccgggtaggcagcgcttactcttcccccatgcaagcccctccct

SEQ ID NO: 420606 - DNA, 122 bp, Homo sapiens
gaggaccgctgccggcagcccgccccaccctgggctcctccccacacccgctcgggcagccgggagccacctacaaactccaggactcgaccccagagcgctggcctgagccgcccctgctc

SEQ ID NO: 420607 - DNA, 122 bp, Homo sapiens
ttggtggggttcggcatctggagccagggacccatgggcaatttccacctctaagggggtcgggaaaggcacgctgagggtgaatatgtgcggccgcattcctggcccttggccacagacgc

SEQ ID NO: 420608 - DNA, 122 bp, Homo sapiens
cctcccccatcccatgtgtggggacggatcacctcatagcacccccagaaggctgggtcccgtccatccccagagaactccctccaagttgctgccctgttgtccttctactccaggccctt

SEQ ID NO: 420609 - DNA, 122 bp, Homo sapiens
tggagggaacggggtaccggggatgcagggggtagggctctccctcgggagcgcagagggcgggcccagccccctctgcacgggtgcaggtgtggggcgcctgctcaggccctcgagggaac

SEQ ID NO: 420610 - DNA, 122 bp, Homo sapiens
gaagtcccagccagcctcttccggggtctcgacatggtcacgctgcaggggactttagtgcggacgattctggaatcaacggagatacaagaaagaatgctaatgtcctccaaaacccgcgc

SEQ ID NO: 420611 - DNA, 122 bp, Homo sapiens
agatcactgaattgcacagtgaagacttattcaacttcatataccctggaggatctggaccgggagttcaaggcttttgcccatgctcaatggaaagcacaagtacgaagtatatattctct

SEQ ID NO: 420612 - DNA, 122 bp, Homo sapiens
gggatttgggagccccaagcagatctattaatccaacgcattaaattgctaattaagtcacgactgaagcagtctgtacttttccactagggtttacttagaaaaagctggggaggccttgt

SEQ ID NO: 420613 - DNA, 122 bp, Homo sapiens
gctgcgtcacaacatgcaggtcacaagtggtcacaccacagcgtaacacatcacacagatcgccactcatccggcttctcacgcacacgcgcccgcgcgctcacatacacacagcatcgtgc

SEQ ID NO: 420614 - DNA, 122 bp, Homo sapiens
tccccgctctttacctacacggtctccttatgatccagggttcgccgtggacctctgggccgtgcattccagcctgatttgggttgtttttttggcttctcccgacccctgtgttaacaaat

SEQ ID NO: 420615 - DNA, 122 bp, Homo sapiens
gggcgggtggggggtgagttgtgttctgggagcaaagagcaataacatcccccttctccccgcaagcacacaggagaggtctgtcttcccaagggacagctggggataggtggccacacctc

SEQ ID NO: 420616 - DNA, 122 bp, Homo sapiens
aaccgagcccgaggaacttggtccttttctggcccttaaatccgtatttcccctttcttgcgaggctggcgcctcagggttttttgtttttgttttttaacattaccagcattgtggcgtct

SEQ ID NO: 420617 - DNA, 122 bp, Homo sapiens
gcctccagcttctcctgctccccagctgcccggtactcccgggcgagatcccgcactcgccgcttatatttgagctcctgccgctcgtgccggctcagctccacgtccccaaaaaggaactc

SEQ ID NO: 420618 - DNA, 122 bp, Homo sapiens
cgatgatttgttgtagctgaggcgaacggggcgaggctgtgaggacgggttttggagcgccgctcggccgtcctcaaaactttggacacaccctccgtttctgtcagtcaagagttcttcat

SEQ ID NO: 420619 - DNA, 122 bp, Homo sapiens
aaaagacagtggaaatgaaaataaaagaataggtagtggtgtcaaatactggaaagaggtcgggcttcataaagtaggagcagaaattaagttgtagcagattgtggagcgaatggaaattt

SEQ ID NO: 420620 - DNA, 122 bp, Homo sapiens
tagttccagtgttggcgaagacgccacgcggtgacaaacaggagtaaggcggtccccaggcgagggccaattggcagccgcctttgccgcgatgcttcctgggagttgtagttcggggtgag

SEQ ID NO: 420621 - DNA, 122 bp, Homo sapiens
gcgagggggcaggcagggtgggggcggagccttggtgccgtagctccggctacgccccctcgctgctcctctgcgggcctccgtcccggcccaactccgcccctgtcccttccagggtccgc

SEQ ID NO: 420622 - DNA, 122 bp, Homo sapiens
cggtgttgcccacaacaacctcatggcaatggcccaggagactggaggtgaggggtgaggcgctcctggcagtgagcctgaggcccaggggaccttaggatccctgagtgtgcccagaggga

SEQ ID NO: 420623 - DNA, 122 bp, Homo sapiens
aaaagccagtgcagggcctgcaggtatagggggatcctgcaagcagaaatctgtggtgggcgggcggcaggtgagcaaggagaacgtgtctgtaaaggaagcacagggaacaggtggtggct

SEQ ID NO: 420624 - DNA, 122 bp, Homo sapiens
ccgcgttcccttcaagttggtgtccaccttcaagaattactattcattggtgctggacagcgctctggaccgcgagagtgtgtccgcctatgagctggtggttaccgcgcgggacgggggct

SEQ ID NO: 420625 - DNA, 122 bp, Homo sapiens
gctgaggtccagggaaatggaaagctttgctctgtctcctgctgggacaagatccttaatcgcctgattcctcacatcatgctgatctttcctctaacaagaaattgactgagctttcacag

SEQ ID NO: 420626 - DNA, 122 bp, Homo sapiens
gagaggggaacgtgacgctggcaaaacgcggcccgggcgcgctgtgaagcgaggagattgcgtctgcggaggacaggaagaggggaggggagggcgggggccacaggcgggcgggtgccctg

SEQ ID NO: 420627 - DNA, 122 bp, Homo sapiens
taccgttgcctggcctggggtggtgagatcaggcagcggtggggcctgggccgttctgcccggcaccaccccagctgcttgtttcacctggaatcaggagcccgatggtccctggccttcta

SEQ ID NO: 420628 - DNA, 122 bp, Homo sapiens
accaagaagaatgaacaaacaactccagacgcgcggccttaagagctgtaacactcaccgcgaaggtccgcagcgtctctcctgagctagtgtgaccacgaaccaaccagaaggaacaaact

SEQ ID NO: 420629 - DNA, 122 bp, Homo sapiens
gcagcatagataatggttaaggaatgtggccattgcattcgattacctggattcaaattacgatacctacactaaaaagctgtgagactgtgaatcatggatttgacctctatctgcctcat

SEQ ID NO: 420630 - DNA, 122 bp, Homo sapiens
tggctctggggactgggtgacgtcaggggtgagcctctcgtgattggctccatcaccctgcgtaagatcaaagggaagaaaggagagccccgacagccggagccattgtggctccggccgat

SEQ ID NO: 420631 - DNA, 122 bp, Homo sapiens
aactctgtcgagtaactttgaaagtatgcaaactcatactctcagtttctgcacttatgtcgtggataggtaccagttctcagaccatattttttttttacttaccatggtattttaatagt

SEQ ID NO: 420632 - DNA, 122 bp, Homo sapiens
caacagaccagattctgagaacagatctgtagttttctaaacaccctacattgatccaaacgctatggtctcgcatctctccagaaagagggcggccaaaagcaagagctagctgttgtttc

SEQ ID NO: 420633 - DNA, 122 bp, Homo sapiens
ggacgaccacacgcagaccctctttcaggtacctgagggcctccctggggtgctgcggggcggggccctccagggagggcaggacgagagcgtgaggcctcgggcaggaaggaggggcctgg

SEQ ID NO: 420634 - DNA, 122 bp, Homo sapiens
ccgacggcaccctcgtctccttcaccgccgacttcaagaaggtgaggcgccctcactcgccggggtggcaccttcaagcctgagccccccgggatcccaggcgctctcttgcctgcagacgg

SEQ ID NO: 420635 - DNA, 122 bp, Homo sapiens
tggggcgggagcgttgacctgtcgggtaaagccagccctaccgctcgactcagttgcacgcgcagggagtgtgtgttcactctgactcggcccggctccccgtccccgccgaagcgcagagg

SEQ ID NO: 420636 - DNA, 122 bp, Homo sapiens
acccagtacagctgcctgcagctcgcaaggcccctgcataccgaaacatggctagcaccacgcagaacagagttttagattttatttaattttaattcaaccaggggacctgctggttacca

SEQ ID NO: 420637 - DNA, 122 bp, Homo sapiens
ggcgggaactggaggcccacgcaggtcgcctgcggtgtctgcggcctgtgcctctggggccgcctggccagggagggcaggagatgcctggtacatacctgaatggctgcagggcaggtgaa

SEQ ID NO: 420638 - DNA, 122 bp, Homo sapiens
cccatcctgacctacatcgagggcgtatgtgtgctgtggttcacactggagttcctggtgcgcatcgtgtgctgccccgacacgctggacttcgtcaagaacctgctcaacatcatcgactt

SEQ ID NO: 420639 - DNA, 122 bp, Homo sapiens
actggggtgggaccacggaggggacgggtgagcctcggggacgcacggtcactgggaggccgaggacccccggggctggcaggaggtctgtgccctgggtgatgccacttctcctattaatc

SEQ ID NO: 420640 - DNA, 122 bp, Homo sapiens
ctgcagattccagtacaaactcaggactctcccccgcccagccgcccctacacaaggactcgccgaacacaccttgaatcccgcgccagagcgcagcccggaactgcagctcgcggcgcggg

SEQ ID NO: 420641 - DNA, 122 bp, Homo sapiens
cctaacgcccccccgcccccccaatctagggccgctctcgcccttcggattggctcgatgcgtttttccccgaatcctttgcgggtccggcctccgatccctgtgtggctgtttggcgggtg

SEQ ID NO: 420642 - DNA, 122 bp, Homo sapiens
tggctgtcactgacttcgcgacgatggcaaggaggaaacggctccaactggggagagcagcggccccgacacgacatgtgtctgtattacacgttggcagtcgaggttcctcctgacacttt

SEQ ID NO: 420643 - DNA, 122 bp, Homo sapiens
ttaatcgtagagagttgagtgacttacccaaggttgtctggataagccctagaaggaaggcggtaggcagctccattcagggaaactgcatctaatcagtcagtcaaaaatcaagtaacttt

SEQ ID NO: 420644 - DNA, 122 bp, Homo sapiens
tcctgactgtctgagatctgcccagcggcaaagctgtttgttgtagctatttgttttttgcgtcacttttttcttttcctttctgtatgactggtactacaaatggagatgtgcatctgtta

SEQ ID NO: 420645 - DNA, 122 bp, Homo sapiens
ctcaccggaggctagcggctgcgcttctccacgccccgccggggccgagagcgccgccagcgtggcccgaatgctagccgtttctgtggctgacacgtggcagcccaggccccatagcccgg

SEQ ID NO: 420646 - DNA, 122 bp, Homo sapiens
tttttatgtaacagttatttctgggtaattcacactatgtttcagagcttggattttcttcgggtaggtgtggacatggagtgtagttctaactttacaaccagagcacctgctttgagaca

SEQ ID NO: 420647 - DNA, 122 bp, Homo sapiens
gctcacctggcgcgacaatgaagagctcattctgcgaatccctacgcacgagatcgccgccgcctcctacctgcaggacgacgcgctgcacctgctagtgctcaagaccggtgcggcgggag

SEQ ID NO: 420648 - DNA, 122 bp, Homo sapiens
tgggagccccccgaggccaaactttgcgaggcgggacgcggggggctcttcttgctgctgcgcagcttccccgcgcgctctcccggaagcctgggttctgccaagtccaggagcagctgtca

SEQ ID NO: 420649 - DNA, 122 bp, Homo sapiens
gatacgagattgaagggctttgtcctcattcaaaatctggaaatgttatttagggatccacgtctttgctgcagaagactttctgcgcggcaacgtctctacccctacacacacctctgaga

SEQ ID NO: 420650 - DNA, 122 bp, Homo sapiens
ctccgctcggagttcccaggcagctggggcgccctccaagtgacgcctttgtccaggctgcgctcgcggagaataaagggggcgctgtccaacctcaggttcggggaaaaccaaggaaccaa

SEQ ID NO: 420651 - DNA, 122 bp, Homo sapiens
cccatccctgctggggcgatcccgggctgaaagaggcgtcaggtactgttgtctccgctccgcgtttcctctctggactcctcgtggttgacagggaaatctggagtctgaagaaactccag

SEQ ID NO: 420652 - DNA, 122 bp, Homo sapiens
caatatttttaaaaaatagatctcacctttggttaggtgtcctggaactgctggtaatggcgtctttctctgatggtaccagaaataatggaacttccttgaagctgatagccaatgaaatg

SEQ ID NO: 420653 - DNA, 122 bp, Homo sapiens
aaagcagagggtacgttttctgttatgaaaagtaaagactgagccaggcgctgtggctcacgcccataatcccagcactttgggaggcaagttgggcggatcacgaggtcaggagatttaaa

SEQ ID NO: 420654 - DNA, 122 bp, Homo sapiens
gttgcgctccccccgccgccgccgccagcgccgctgcagtgattcctcgtctccatctagcgaggctattgtgtattgggcgcttaattatttattcaccctggaggccgaggattcccact

SEQ ID NO: 420655 - DNA, 122 bp, Homo sapiens
tccacctgtcagggggttcgacgccactttgagatgacaagtgaggccacctgggcacagcgctggtgtgagaaggaggccatcaggacaggtcaagaacccaggcccgccctgctccgaaa

SEQ ID NO: 420656 - DNA, 122 bp, Homo sapiens
caacagcagaacccaccacctggtcttgctttactcagacctgagggtgtgaaaggtgcccgtgacctcccgcatcagggagctggccgccaccctcgactcccggggagcaggcgtcccgc

SEQ ID NO: 420657 - DNA, 122 bp, Homo sapiens
ctggaattgagcagtaggaatgtgtcagtcacatccccaccttcccaattcttgtcatctcggttcaggaaggtgaacggtgttccgattccccgcggcgggggcctgtagtgggagctctg

SEQ ID NO: 420658 - DNA, 122 bp, Homo sapiens
agggctgtcggttcactgggctctcctcttcccacacgctgagcactccgcgtcaccacccgggcaccaggccaggcctggggtagcacggcacttgggcctcagattacagagccggcaga

SEQ ID NO: 420659 - DNA, 122 bp, Homo sapiens
ggggaaaatgtcaggtcggttggtcagaaacacgcttgtaggcactgggaagcattggcacgcaaatgcaagaattgcagaaccatgagcctcaggccgagttctggaaaaggctgtctgtc

SEQ ID NO: 420660 - DNA, 122 bp, Homo sapiens
actgtctgtgcggcagcccacaaggagaaatagactcagaatgacaatccgacactcccacgggctgcgtgccactttgcggtacaccacacaccagcacggagaggggtttggtgcagggg

SEQ ID NO: 420661 - DNA, 122 bp, Homo sapiens
aagtatttgttgagtggatgacacaggggtcttgaggtcaaggagtgtctggtgtttatacggggccttaagatctctgccaacctgtgtctctcacccttaaggactggctcagagaccag

SEQ ID NO: 420662 - DNA, 122 bp, Homo sapiens
ccgaacccctggcgatggggtctcaaggctacctgtcctctgccactccaaggagccagccggctccaccccagctccccaagtgcctgcacgggagcgggagacgcctcccccaccgcctc

SEQ ID NO: 420663 - DNA, 122 bp, Homo sapiens
acttaatcttcacaaggactttgtgagcaggctcttttagtacctccacttttacagacacgtaaactgaggcgcgggcgactaaatgaacggctcaagaccacaagaggataatattggat

SEQ ID NO: 420664 - DNA, 122 bp, Homo sapiens
ccatagggcgctgggtaccacgacctggggccgcgcgccagggccaggcgcagggtacgacgcaacccctccagcatcccttggggaggagcctccaaccgtctcgtcccagtctgtctgca

SEQ ID NO: 420665 - DNA, 122 bp, Homo sapiens
gctggtttccgagttttaatatttaaggtgatgtatccatcttcatcctgcatggcttcccgagtactgcaactgagctcagagttcaatgactttgcaaaatgtagtttccaactttacaa

SEQ ID NO: 420666 - DNA, 122 bp, Homo sapiens
tggagccgacccgacccgctcaaagctgccccgggaaccgcaggtttggttcgcgcacgccgggacttgccaaccgcacccgaaaaatcggggccatgtccaaatgtttcgcttcgctgccg

SEQ ID NO: 420667 - DNA, 122 bp, Homo sapiens
ccgtgcacagcagggagctgaaatggggaaacgtggtccaggggagaggggactctgcgccgtgtttcactaaaccaaggtggtgtccacggcacgaaacgaccaaaacacgcgtctcagct

SEQ ID NO: 420668 - DNA, 122 bp, Homo sapiens
ctgagggcccatccccaaatcgccttccttagggaagccggaacaaacgatgcagcggggcggccctggatctgttccttcctaagagctggagcaggtacagccccatcctagaccccagc

SEQ ID NO: 420669 - DNA, 122 bp, Homo sapiens
agatcctggggctcctcaggcctcgacagagggaaaaccgaagcacaggcgactccgcggcggggttgtaatggcggcgcctcctgctcgcccagaccacacccggctgctccagatctgcc

SEQ ID NO: 420670 - DNA, 122 bp, Homo sapiens
ccagtttcttaaatttttttagagatgggatctcactttgttgtctaggctagagtgcagcgtgtggcaccatgacggctcactgcagccttgaactcctagcctcaagtgatcctcccatc

SEQ ID NO: 420671 - DNA, 122 bp, Homo sapiens
ggcggggcaatggacgggcgatgtcccccggagggcggggccttgcgagagcttgttctccgcctgaggaggccaagagaaacttacatgcggatgggtttataagagagacagggccaaga

SEQ ID NO: 420672 - DNA, 122 bp, Homo sapiens
gagtgtggttggcccttttgcgttgtttcagtcctctcggtacctccccgcccagccctgcgatcttaactcaccgggcccggctccccggccgcttgcataattagggagggcgagggcgg

SEQ ID NO: 420673 - DNA, 122 bp, Homo sapiens
gctatctaaaagtttaaccaatggccagtaatataagcaatcatgcatatgtaatgaaggcgccataacaacccaaaaggagaggattcagcggagcttctggataggtgaacactgggagg

SEQ ID NO: 420674 - DNA, 122 bp, Homo sapiens
ctgacgcgggaccaaggcttggcagggagcgcgctgctgtggaaggtccttgggaggctgcgaccgcctcggagagggcgggcgggggagaacggggcggggggtggggcgggggccagggg

SEQ ID NO: 420675 - DNA, 122 bp, Homo sapiens
atccttgtcactccagagacaatgcccagagatggcgtcttctcctacccactcctaaagcgggcctctcctcaggtgtataaggcacacggagaaaacaggttcggcagaggtggcactgt

SEQ ID NO: 420676 - DNA, 122 bp, Homo sapiens
cccgagggaaagagagggactctggatttccaccctcctacccagggcgtgttccctgcccgtgactcagcctgtgatttagggcgtctgcagggtgaggtgggtggaaggtgatgcccgcc

SEQ ID NO: 420677 - DNA, 122 bp, Homo sapiens
tagaggggatggctgggccgctccgacttggcgtgtggggtggcccgctcctcagggctacggatgctgttggccaaactgggtgaggagaagaagctgtactgtaggtcgccgggtggcgg

SEQ ID NO: 420678 - DNA, 122 bp, Homo sapiens
tggccctaaaaaggactaggaaaattccagttgaggatttacctagtatatcttccctcacgtttggtcctaacttgttcatctttgatttcttagttgaattgtttcccctgtgaccttct

SEQ ID NO: 420679 - DNA, 122 bp, Homo sapiens
atgcccatcgttaggcgcctggtggttgtgcttagcgatctcagggtttcctcgctgctccgccctagcctgccgtagcggacccgtaggttccgggacatccgtagccgatccaaggcctg

SEQ ID NO: 420680 - DNA, 122 bp, Homo sapiens
gtgacatccttcgagggcaaacacggtagtgtccgctactgtatcaaggccaccctgcaccggccctgggtcccagcacgccgggcaaggaaggtgttcactgtcatcgagcctgtggacat

SEQ ID NO: 420681 - DNA, 122 bp, Homo sapiens
aaaatgacctatttatcgtgagcatttgtttggcaccatgagtaatgtcccctaagccaccgtgtggctctccctgcggctgatggatgtgcagaactgcttgtcctgcatggctgtgccca

SEQ ID NO: 420682 - DNA, 122 bp, Homo sapiens
ccctggtgacagaggacaacaatctcagcccgctgcggccggcggccgcggcccggcgcccgcgctcaccctggctggctcgcccacactcactcccgcgccgggctgctcagccgcgctcc

SEQ ID NO: 420683 - DNA, 122 bp, Homo sapiens
ttgtgagccactgtactcggcctgagtctggctttttgttttgtaggttcattaaagaagcggaagcagaatgaggctgccaaggaggcagagactcctcaggccaagaagataaagcttca

SEQ ID NO: 420684 - DNA, 122 bp, Homo sapiens
gccaggcaagtgggccgcagaggcctggcttagctttgggaacggaagcacgggaaggggcgcggagaggcaggaagcggcctggggaggctggggtggccgggactacggacccgaccgca

SEQ ID NO: 420685 - DNA, 122 bp, Homo sapiens
ttggacagtggggtaaactgaggcccgataggggcgctaggcactgcccggagtccggcgcgcacggattgaggcgacctgattccgccgcatcctggcccgcgcggcgagtgtggtctctg

SEQ ID NO: 420686 - DNA, 122 bp, Homo sapiens
catttcccaccaccactgcctcgccaggaagaatctagtttcagccagtaaaatcactttcggtccaaaatcactttcttattccaaaagattaatgaaccagccttggctgtacacgtgtt

SEQ ID NO: 420687 - DNA, 122 bp, Homo sapiens
tcccagcggtgcttcctctgaagtcattgccacctgcagcagcacaggggacagaaaggccgtttctccaggtccaggcagctcaggcccctatgagccctggcgtagcagagacccaggct

SEQ ID NO: 420688 - DNA, 122 bp, Homo sapiens
ggcaggccggccccaccctcctgacggtcaccctggtccctgaagctgcctggatatggtcgccatgcaggaagccgcccagcacctcctcggcacacacgacttcagcgccttccagtccg

SEQ ID NO: 420689 - DNA, 122 bp, Homo sapiens
cctgatgggaatggggtatatattttttcggtttcggaatcacctctgcgctgacctccgcgtaggccgcacggcctaggcctcggagggccgctcgccgcctgctttctccgcagcccacc

SEQ ID NO: 420690 - DNA, 122 bp, Homo sapiens
aagggagcggccactgcctctttttctccacagagccaccacctgcattttagctgctcacgccagctgagctaagggccagctccagctcctggctgctaagattcctccagtttccttag

SEQ ID NO: 420691 - DNA, 122 bp, Homo sapiens
gcgggccccgggtgcctcgggggcgctgacgggtcgtccccggcgtgttattgttgtgggcgcctctggcgggggtggcgggggaagagatagggagtccggaggtaggggctgcagctgtc

SEQ ID NO: 420692 - DNA, 122 bp, Homo sapiens
aggcaaagaagacaaggtgacgactctctgctcgctcaagtggcttcggtcccgggccagcggccagggatgggcaggggggaagccccaactcccggctgctcccctcctcgctgctccgt

SEQ ID NO: 420693 - DNA, 122 bp, Homo sapiens
gctttcttctgccaggaaggtcaaaatgtggactgaagctccagcctgaacacccatgcacgtgtgcggagtgccccgcctgccccacgactggagtgaagcctgggacctgccccacgact

SEQ ID NO: 420694 - DNA, 122 bp, Homo sapiens
cagcaacacctttggtcaacacactttaggagactggttggagatgtgacccagaaactgcgtaccttggctcagaacacaagaggagagaagagagaagacgactatctctcactaccacc

SEQ ID NO: 420695 - DNA, 122 bp, Homo sapiens
gcattcctccctacagtgtttatgctgatttgtttctggtaacaactaatactggcaaatcggctgggcatgttactttatgctgcccatattcaggaaaattggaattctagctgggtcat

SEQ ID NO: 420696 - DNA, 122 bp, Homo sapiens
gagtctcagctgccgccacgcagcgcttgccctgcccgagcttcggctcactggcagcggcgaggccaccgaccaccctccgccttccagtcctaaactcggggctggagaccgcaggagct

SEQ ID NO: 420697 - DNA, 122 bp, Homo sapiens
tgggccacgcctccgcaaagaaggacaacgcgaagctgcccgcgtagtgcctgttgcactcgccaaggaccggcctggcagagatagaaaactcgcagtacgtttgcctcagaaccgcctca

SEQ ID NO: 420698 - DNA, 122 bp, Homo sapiens
gctttcgcccccctccccaaactccactgggcccgcccagaatggggtgtgggtgtctcccgcttgcaggcgcccgcacgcctaaatttcctctagaaagtcggtgggaaacagccccacct

SEQ ID NO: 420699 - DNA, 122 bp, Homo sapiens
acgcactgatgtgtgcctccacggtgcaccgcctgcattacacactgatgtgtgcctccacggtgcacccgcctgcatcacgcactgatatgcgcctccacggtgcacccacctgcatcaca

SEQ ID NO: 420700 - DNA, 122 bp, Homo sapiens
catccagcatggtggaagcaggtgcagctgtgccacccacatcgggacgcgtgctccactcgtggcattccaggctcacaatgtcgcccttatccgatgatcagccacctcggatgtgtcca

SEQ ID NO: 420701 - DNA, 122 bp, Homo sapiens
tgcgcttccgggcgggcgctaggaccggggacaatcaggagggcgcagagcgggctggggcggtgcagggggcggggctgccgcggcattgcggatcggcgggcactagggcagcgcggagc

SEQ ID NO: 420702 - DNA, 122 bp, Homo sapiens
ttgggccagaaatcccagcactttgaatggcagggaatccttcaagcctgttgtacatcccggtatgaataattctactgaatataaccaccctaaactatgctgagccatagaaccagagc

SEQ ID NO: 420703 - DNA, 122 bp, Homo sapiens
gacgggtgatcccagtcctcgcagtgaactctggggcgcagaattcaaaacgcttgcggtcgccgagcgcagccccgccctgggttatgtaagtgacagcgctgggccgtttctcttttttt

SEQ ID NO: 420704 - DNA, 122 bp, Homo sapiens
tgtctaacccacaaatggaaaagcccgttcatggttttaacattccatcactgggcctcccggggcctcctcggcgagtcggcagagggagccattccccaataaattgccgcgcgaggcct

SEQ ID NO: 420705 - DNA, 122 bp, Homo sapiens
agaaataaatttcctcacatccagtctttgctttgttgactgctcaacaccctcttgtctcgcttgcttttctgagagtgaccttgacagcatccctccaaagagaagggtatttcctttat

SEQ ID NO: 420706 - DNA, 122 bp, Homo sapiens
aggggcggggaggcggggacgtgcaaaggaacgtgacgtgacgtcagcgcgtcgccctgccgccctcagcccactggtacctggaaggagtcttattcagggattaggttacccaggttgtt

SEQ ID NO: 420707 - DNA, 122 bp, Homo sapiens
gttttgctctgccctcctcagttcacgtgggcaccttggaacactgaagaaggcattttccgaactcactgtcctacggacttattctccgcactgttttcgcctccttcgccctgttctcg

SEQ ID NO: 420708 - DNA, 122 bp, Homo sapiens
aaagccagtcttgacaccctgagaatgctggcctttgtcagcagatgaagcagatattgtcgagctgggacaaaagtgcccttgtgatttgtggagaccaggcgtcctctgtggggtccggt

SEQ ID NO: 420709 - DNA, 122 bp, Homo sapiens
tgtccacgatgcagatgaggatgttgggctggcccagctccacccgagacttggggagcacggtcacccgtggaggcactaggaggaacaggccctgagtccacaggctcatccctcacccc

SEQ ID NO: 420710 - DNA, 122 bp, Homo sapiens
tagctgggattacaggtgcacgccactgcaactggctaatttttctatttttagtagagacggggtctcgccatggttgccaggctggtctcgaactcctgacttcaagtgatccgcccgtc

SEQ ID NO: 420711 - DNA, 122 bp, Homo sapiens
tcacagggccaggcacttctctagtcttgagtcacccatgtcattcttttaacctaccctcgggtaggacactggagccatagatgtgaaccttagcctttaaggcacgcaagaagacactg

SEQ ID NO: 420712 - DNA, 122 bp, Homo sapiens
gccccagcgctgccccacaaccaggctggatttaaagcctgtgcagtaggcgtctgtcttcgcggtggcagcattttcctgtcctccccaggactgggagagtgcagcgctcctctttccct

SEQ ID NO: 420713 - DNA, 122 bp, Homo sapiens
caaaaacaaaagaagaaatgcctagcttgggatgtaaagaatctacatgacagatgggtgcgtctgtcatcccagtgtgagataagagaaaaatgtaagctgatgcagaagagaccttgagc

SEQ ID NO: 420714 - DNA, 122 bp, Homo sapiens
tgaaaccaagaaaaccaggccagatgttcttcccttccggcgacaggattcagcgggacccgtcctggatggagctcggtcccggaggtcctcctcgtcatccacaactcccacgtcagcca

SEQ ID NO: 420715 - DNA, 122 bp, Homo sapiens
aatgtgaggattgcacagagccttcttcagctccttcaccacgtcctcggagccaaggtacggcatcttcctaagagtcacagggcagctcccacagctcccacggtaactcgagggctcct

SEQ ID NO: 420716 - DNA, 122 bp, Homo sapiens
ggaaggaatcaagttggcggggatttttccgcgagtggctgcattggctttaagaaactgcgccgggctgggcagccgacgcaccgctaggtggcgcacgcgctcgctgcgtctttcagggc

SEQ ID NO: 420717 - DNA, 122 bp, Homo sapiens
acagctgggtgcagtggggcaggtggccgaccagggctgtgcccgtgtcctcgtgtttcccgccactttaggttctccctgtgggggctgaggaggccccgttccccttggtgcagctcggc

SEQ ID NO: 420718 - DNA, 122 bp, Homo sapiens
agaatgtcgcaagcacaaaaagaatccgagcaagcagcacggggttgtgggaaaaaataccggacaggaagcgaaggcaggatctaattatcattgccttagccaccagaaagcccccacca

SEQ ID NO: 420719 - DNA, 122 bp, Homo sapiens
ttttttaaaaatgaatactcaatgtgaaaatgctctgttttctaagacctagtagctttacgaccaaagaactgagcttgctgagttttttgtcgtaaagcatcagtgacctccaaattcat

SEQ ID NO: 420720 - DNA, 122 bp, Homo sapiens
gagaccccgccccacgctgaggatagtttatcccggtggcgtccaccccacggtttgggacgctgattgggccgaagttggcgcgtgcgcagtagacttggcgcaagctcagttgatgggtc

SEQ ID NO: 420721 - DNA, 122 bp, Homo sapiens
gagccactgtgcctggcttagttcgaatgaatttaaatgtaaacagcctcgtgtgccaagcggcctgcaatgtggacagggcaggatggtagtggtgccaggcggggagagccatgtccgtg

SEQ ID NO: 420722 - DNA, 122 bp, Homo sapiens
agtaagagttaatctgcctgttaatcaaggcactaaggggctcaatgcgagttttattagcgacaggagaacagaggcggcagccagggatcaaaagccgggatcccatatatttgtcagcg

SEQ ID NO: 420723 - DNA, 122 bp, Homo sapiens
tttagctgagggttcaggaatttccacggatgcctgttcagcctgggtgaggcggcatcccgaagcacgctgcccgctccgccgtaggtcgttcccttctgccgagcagctggcctccgaga

SEQ ID NO: 420724 - DNA, 122 bp, Homo sapiens
attaaccagtctcaggtagttctttgactcaggttgcattgcgagaacggactgatacaccgagtatttttctgctgctgtttttctgctgctgctttgggtgactatttgttcacagccca

SEQ ID NO: 420725 - DNA, 122 bp, Homo sapiens
atgactcctgcggcctctccgaaatcccaggagcatccttgcagcgcgaggagaatggaccggggcctggactcatcagcagatctatccacagccagggaccactccctaaagcccgccgc

SEQ ID NO: 420726 - DNA, 122 bp, Homo sapiens
ttatctgtgcgatagggctgggggtgggggtgggaattaccaggagaccatcacacaggccgtggacaagttctacaagagccagggagaacactgtccgtgcatgcgtcccagcacccagc

SEQ ID NO: 420727 - DNA, 122 bp, Homo sapiens
aagacctcgcgagtgagaagacacatgtggtgccgcgggcatggctggtgtaaggctgcccggcacgggtgccaggccccggaacggaggaaggcactgagcgtcaggcggcctagaggcca

SEQ ID NO: 420728 - DNA, 122 bp, Homo sapiens
taaaaacccaaaacaggcaaaagaggatgccagtttgcaatccctgaagtagagagagctcgtgctggggaaaagtctgccaaaatgctttaaggtggaatgtgtaaaagttctgtttccca

SEQ ID NO: 420729 - DNA, 122 bp, Homo sapiens
gatttaactgatttaccaccgcagccagctcttcaagccaggggcgggccggacggctggcgcgcaaggcctgctggggcttgtagtctagaccacttccgcgctcaggcgcctgcgcttta

SEQ ID NO: 420730 - DNA, 122 bp, Homo sapiens
ggccggatgtgaggggtggactctgtaaacggagcctccctgagtcagaggagactgcaccgaaaggtgccctctcaaaaggactgtgcaaagggtggctccggtgtgcgtgaaagaccacc

SEQ ID NO: 420731 - DNA, 122 bp, Homo sapiens
tgagctgctgtggtggggaccagtttcggtgatggaatcaaaagtgctgaccccctccagcgcttgtcataggcaacctgctagctctggactgcacacaggccacacaaaggcattgctac

SEQ ID NO: 420732 - DNA, 122 bp, Homo sapiens
ccaaggcagaggctcctgtgttctctatgtaaccgcctccaaaaaagctgggaaatttcgcggatcaaaatgtaggcgcttaaagctgaccctctgctgtcaatgttgggacttagatacat

SEQ ID NO: 420733 - DNA, 122 bp, Homo sapiens
ctcctgcgccccgctcctagggtacacagggcagaacaccccagtccagactctcaggttcggggtgtgaccctccatccttgggtgcggggccccgaccacctccgcctccctgccgccgc

SEQ ID NO: 420734 - DNA, 122 bp, Homo sapiens
caaagctgattacaagcttcagcgcattcctgaaggagccaaaagcgacgcaggtgcaaacgagccgagggagccccttatcccggtgacagaatgggacaagctgggaaaggcttagacca

SEQ ID NO: 420735 - DNA, 122 bp, Homo sapiens
tgagagctgtgatctcttaagaacaagagcttctcaccagcttgtcagttgctcagcaaacgtatattgagcacctcctgaaagccaagtcctgttcttacttagtatgcaaatattgtcac

SEQ ID NO: 420736 - DNA, 122 bp, Homo sapiens
tccgatgatgatatacttgaagagataagcataagtcatggtgtcgcgtcctctgggttccgggtccgcccgacttctatagccacttacctccgacctctctagccactcaatctaccgat

SEQ ID NO: 420737 - DNA, 122 bp, Homo sapiens
gacattacatctttcttggctctttttgacccaggtgagcgaatcctctgctgcgcggtccggtggggtcggctggctctgctgccgccctctggacccgccggagacaggtgagcggagtt

SEQ ID NO: 420738 - DNA, 122 bp, Homo sapiens
ccgcttctgggcggggaacggaggccaaagagagtcccgtgccggggcagagggcgcaggcggcgcgcggtggggagggggccgtcctgggggcgggggcaggcgggggggtggagcccccg

SEQ ID NO: 420739 - DNA, 122 bp, Homo sapiens
gaaccggtggtgctcatcctaaaacacaggcgcttgaaatgcgtatttaaaagcaacacacgcgcagtgcagaaaacaaaaacagatacaagcaaaaagtaagacgcctataatccctcccc

SEQ ID NO: 420740 - DNA, 122 bp, Homo sapiens
ccccgatttgggctccctgggtgcctccgccccaggccgcccaccaggcgctcacttgcccggtcctccgtctggagcccctcccgatggccgtcgccacccactctccttctctgtctgga

SEQ ID NO: 420741 - DNA, 122 bp, Homo sapiens
gaaacacacacgggcgggcggaggggacccggggcgagtcatcaagggcgcgtggttcggcgtgccaggcgcgctgctctgcctgctctcttggcttctgtctcccttcgaccgatcgcccc

SEQ ID NO: 420742 - DNA, 122 bp, Homo sapiens
gcagggagcccgtgctgaccaccgagtaggaggacatggacatgtcgtctttggtttcatcgtcagacagcagctgggagggtgagccctgtccctcgccgctgcccccctccaccaccacc

SEQ ID NO: 420743 - DNA, 122 bp, Homo sapiens
atgctgtatcagcagtgtctagcacagggcctagtccatggtaggtaaacaaatgtttgtcgaataaataaaagaacacctgaataagtaaatgaatgaacgggtaagtgattttggaacgg

SEQ ID NO: 420744 - DNA, 122 bp, Homo sapiens
ctttaatgccgaccttcgcaggattctgttcgcatagcccggtggagttctccagccccgcgtaggccctcctgaaatttacccagagtgggcgcggccatcccggcctcgggacaggggtg

SEQ ID NO: 420745 - DNA, 122 bp, Homo sapiens
gctggagccgggcagtcagtgcgggggcaaaggcagcaggcagggtaccacgagaaggcccggggcgctgcgagaagctcccgcgctacagggtgtgacagcgggcagcggcagggcaggcg

SEQ ID NO: 420746 - DNA, 122 bp, Homo sapiens
taagagctgtaacactccgtgaggaggtccacggcttcgtttttgaagttagtgagaccacgaacccactgtcaggcagaaacatctgaaggaacaaacttcggacataacatctttaagag

SEQ ID NO: 420747 - DNA, 122 bp, Homo sapiens
gacaatttgtttttcattttttataaatttataattaaataaaaatttccaagctcatgacgtttacatgaaaaatggtagtcagtgggacatggggtttcatgattacagtgaataaatag

SEQ ID NO: 420748 - DNA, 122 bp, Homo sapiens
gggacacgtggagcgtccgccggaggccacgtcggcgtcggctgtccacgtgacccggcacgccccgccctgtccaccgcccggggccaccatcttgggggcgggactttgtcgagggggcg

SEQ ID NO: 420749 - DNA, 122 bp, Homo sapiens
tcccgggccgtccgtcggagccgaggaggcggggcaggcggctggctggtgctgggcgggcgggccccggaattgtcatttctttgtttccgaaggcggaggaggctccgagccccccctcc

SEQ ID NO: 420750 - DNA, 122 bp, Homo sapiens
tccctaggttagacaaccagagttattaattttttaaggtcctcaagataaaatggcaggcgggactccattctgagaagggaaaggatatgttggtggactactaactttgtggtaggtaa

SEQ ID NO: 420751 - DNA, 122 bp, Homo sapiens
cactaggtctgcgctcagtgtgacccagcggggtttgtgatgtgtttgtcttgtgtgtgacgataactcacgtgtggcagccttcttctcagcacactgctctggcttggcagcagggttaa

SEQ ID NO: 420752 - DNA, 122 bp, Homo sapiens
cagtctgattgttgaaagtatgctaaataccaagtaaatgctacagtcataaagtgttgtcgcaggtggagaggagtcagaaagtgttaatgactatgctaaagcttttcttgctaaagtca

SEQ ID NO: 420753 - DNA, 122 bp, Homo sapiens
aaaacaaaacaaaacaaaaccaaaaaccaaaagaattagctgggcgtgggggtgctcatccgtagtcctagctactcagcaggctgaagctgggggattgcttgagcccagaagtttgaggc

SEQ ID NO: 420754 - DNA, 122 bp, Homo sapiens
ggaggtgcagctggagctgacccccgtgcagccggagctgcagctggaactggtgccagccgcagggggcggcggagcggcggtcccgggggctccggccgcggtcgtggtggctcccccgg

SEQ ID NO: 420755 - DNA, 122 bp, Homo sapiens
tacgacactgcctcccacacgctgaacgtggcggtgatgcagggcaaggacctcctggagcgggaggaggccagcttcgagtcctgcttcatgcgcgtcagcctgctgccggacgagcagat

SEQ ID NO: 420756 - DNA, 122 bp, Homo sapiens
caatcctcctacctctcagccttccgagtagctgggactaaaggcatgcaccaccatgcccggctaatttttgtatttgtagggacagggttttgttatgtttcccaggctagtctcaaact

SEQ ID NO: 420757 - DNA, 122 bp, Homo sapiens
ccgggccaaggcctgggacgtgacggggcccatgctgctccacaaagccaaggagctggccgatatcatgggccaggacttcgtgcccagcatcggctggctggtccgctggaaacgccgaa

SEQ ID NO: 420758 - DNA, 122 bp, Homo sapiens
cactggagtggcaccttcagggccaggagaggcactggggaggggtcacaggatgctactcgggcacctagaagccacagctgccctccacagagcggcactgcaccatgcgcaggaatgtc

SEQ ID NO: 420759 - DNA, 122 bp, Homo sapiens
cataaaaaagatagcatatgttttccagaaggtaaataactagttgggaagttgtaggcacgtgaaacactggacgattcaaataagtactgaattaagtaatgtagcttgtaagtggtgtc

SEQ ID NO: 420760 - DNA, 122 bp, Homo sapiens
ggcgagaaatcgagcacagcagctgctggcccaggtgctaagcccctcactgcccggggccgggggcgccgccaagcccacacacacccggcactctatctggcccgcaagcacctcgcgca

SEQ ID NO: 420761 - DNA, 122 bp, Homo sapiens
agctgtggctgatgccctggccatggaccccctcagccgctgtgtgtgcgcctctcaacacgcacggctgactccagcggcacgcctgctcctcggcccttgtgtctagtgagtacgactga

SEQ ID NO: 420762 - DNA, 122 bp, Homo sapiens
ccatggcacctgctccatttacgggagtggccactacatcacctttgatgggaagtactacgactttgacggacactgctcctacgtggctgttcaggtgtggtcacgggcactgcctggtc

SEQ ID NO: 420763 - DNA, 122 bp, Homo sapiens
tgctgcggcggaacggctgttggtttctgctgggtgtaggtccttggctggtcgggcctccggtgttctgcttctccccgctgagctgctgcctggtgaagaggaagccatggcgctccgag

SEQ ID NO: 420764 - DNA, 122 bp, Homo sapiens
gggcatagtagttgctagggacccttttctaggtactaggggagggggctccccaacctgcgggcaggcagctgcctccacgatgtttggttttaataaagtctctttgtttccttctctgt

SEQ ID NO: 420765 - DNA, 122 bp, Homo sapiens
tcctgcagaggcgtgggcgctgtagggcgacatccctggtgcgtgcagacctagggcatccgggttgttctggcccgcggtctgtgtcactgggcgtggagcggtctgggtgttaggcagag

SEQ ID NO: 420766 - DNA, 122 bp, Homo sapiens
tgccattgtagccgtagccgtacctgccggagtgcatgctcgccgagtccctgaattgctcgctcacggaactatgatctccataattatgcaactggtagtccgggccatttggatagcga

SEQ ID NO: 420767 - DNA, 122 bp, Homo sapiens
ggatgtccagaacattccgtgcccgtggttaagaaacgggagaaggataaagtggtctcacgaaaccagagtgctcaagagatgctttagatgtttacaaaacagcccaaatatccttctag

SEQ ID NO: 420768 - DNA, 122 bp, Homo sapiens
cgctgctctgagaaaaggtacctcccccagaaagactgcgcgggaagtcccgagttttcccgccacgccgagggcgtgatccctgacgtcagagctccgcctccacaagctggcggccggtg

SEQ ID NO: 420769 - DNA, 122 bp, Homo sapiens
atggctgcgactgtagcaagaggggactgggactgggactggggacccaggagcaaggcccggtttggtttggatcttctcggtcaataataactgctctgagggccggggtgcagtggctc

SEQ ID NO: 420770 - DNA, 122 bp, Homo sapiens
ggccatgaagagggagaggtgcagagtgaccaggcagttggtgcgtctttgccgagtacccgctgtgtgccaggcactggggtgcagtggtgaacaggacaggcaggcaggcttcttggtgc

SEQ ID NO: 420771 - DNA, 122 bp, Homo sapiens
tcaccatgaagtaccaagtttcactgtctacagtcctactggcagtacaagcatagaggccggagtctctaggcgtggcgccctttatctgcaagtactccccaataagcactgtcctattg

SEQ ID NO: 420772 - DNA, 122 bp, Homo sapiens
agataacaaagagattcttcctgggctcaagtacgtgtcttcttgaaatccaataggaggcgcctgtgtacctttcctcagtctccagaggcccttccagctcaggaactttctggggaggt

SEQ ID NO: 420773 - DNA, 122 bp, Homo sapiens
tatggagatcgcctgcagcgccacctgcaggctggaggagcactccgggccccagttcaccgccctggacccagctggcaccacctgcggttcccaaggacgcatccagtaaggggcggggc

SEQ ID NO: 420774 - DNA, 122 bp, Homo sapiens
cagagcaccctctccttggaataaactccggatccaagtcccagaacccaccttaggaggcgtctgccgcccccgccccctccccagccttccaggccctggctgcggtggatgggggcgcg

SEQ ID NO: 420775 - DNA, 122 bp, Homo sapiens
cgagcgcagggcagcggggagctggtagcgagacacgagtgacgactgcaccgaaggctgcgtagctctgcagctcccggtcacgtgagggccgtgcgtcaccgccaagctcaccctccttc

SEQ ID NO: 420776 - DNA, 122 bp, Homo sapiens
ttcccacatgtagagttctcaggtccaggtattattttatgaagtcggatggaatcttcccgcacatggagttctgaggtttctcaggttgctctctggctcagtgatgctgtgtgagaatg

SEQ ID NO: 420777 - DNA, 122 bp, Homo sapiens
caggctctgcctggctcggacatcctcggacctgtgcatgcatgtgtgcgtttgtgtgtgcgcgcgcgtgtgtgtatgtgtgtgtgtgtgtgtgcgcgcgcacacacacacacacacacaca

SEQ ID NO: 420778 - DNA, 122 bp, Homo sapiens
ggtcgagcttagagagccgagtgacgtcagcgggggagaacgcctgatttgtgtggtgggcgcgggcggtggggggaagcgcagtgcgcaggcgcaactgcctggctctgctcgctccggcg

SEQ ID NO: 420779 - DNA, 122 bp, Homo sapiens
tcacgttgacctgccgcgcggaggcctggcctccagcccagatcagctggcgcgcgcccccgggggccctcaacatcggcctgtcgagcaacaacagcacactgagcgtggcaggcgccatg

SEQ ID NO: 420780 - DNA, 122 bp, Homo sapiens
accgcgcccggcctgcatccagcagcttttgctgggttaggagtaatcacagccctgcctcgttgcttgatttgcaggcagcacccggtacacacccaagacaggcagcaccatctacactg

SEQ ID NO: 420781 - DNA, 122 bp, Homo sapiens
gcacctgtaatcccagctacttcggaggctgaggtaggagaatcacttgaacctggaggccgacgttgcagtgagccgagatcgtcccactgtacgccagcctgggcaacaaagtgaaactt

SEQ ID NO: 420782 - DNA, 122 bp, Homo sapiens
gatgggaagcagcggggctctgagcagggacatgaccccctctggcggctgagaggagaacgtcccgtagggccagggtgaccagagaggagtgcagatgggctgtgaaggttgggcagggc

SEQ ID NO: 420783 - DNA, 122 bp, Homo sapiens
aaactccttctcaggcctgcagttagaattcagtagtgtggagatgcatgcagtgccacccggggcccacagccagcccttcggtgtgcgagttccacctcaatacagtgaatatccttaaa

SEQ ID NO: 420784 - DNA, 122 bp, Homo sapiens
agacagtacggctcagatattccagctcacaaacccactgtgcgtgagtcctctctgaaccgatagaaagtgatgcttttttgcatagcgtgtgacacggatgagaaacgagagggtaagta

SEQ ID NO: 420785 - DNA, 122 bp, Homo sapiens
gaccaaggaacctcactgtggttctgtggctctgcactgggtttgcctcctgggtgttgccggccagcccagcagatggtggaccttgttctgaggctgagcttctcagcactggcagcccc

SEQ ID NO: 420786 - DNA, 122 bp, Homo sapiens
tctgttctcgccgcccgcccggcagtcaggcagcgtcgccgccgtggtagcagcctcagccgtttctggagtctcgggcccacagtcaccgccgcttacctgcgcctcctcgagcctccgga

SEQ ID NO: 420787 - DNA, 122 bp, Homo sapiens
accttcagaaattactttcagcttctttccaattctgaatcatgagtaaaatcacaaacacgttcaataacaatatgttcctcttgcataaatgtctcttctaggccacatacataattaaa

SEQ ID NO: 420788 - DNA, 122 bp, Homo sapiens
cagtggcacggacccggcactgacgtggtggctctcacagtggcacggacccggcactgacgtggtggctttcacagtggcatgaacatggcgttgatgtggaggctctgaaggcacactgg

SEQ ID NO: 420789 - DNA, 122 bp, Homo sapiens
tgaacggaacacgatgccacaccacagtgggtcctcaacagatatttatggaataaataacgcaacgcaatgtagtatttacgctttctacctggcacatgaagagcacttgaaactcttcc

SEQ ID NO: 420790 - DNA, 122 bp, Homo sapiens
tgtcgcaggaggaagggtgctgtcccgcgcgggtgctgagacctcattccggagaggcggcgggaggaagggctttgatgggttcttccgtcccggccccacaaggctgggacgaaaagcaa

SEQ ID NO: 420791 - DNA, 122 bp, Homo sapiens
gacccaaggaagcctcctgctcctgtggtgcagtgagtggcaggcactccaggagaagaacgagcccagccgagaaacaataccaggacattccccatgcagaaacgtcaccccaggctcct

SEQ ID NO: 420792 - DNA, 122 bp, Homo sapiens
ttctgcctcattcccacaaggtgttgggacccagcagacacgggtgctggcgatcaccaccgtgtccatttagagagctttcctgaggcccacagtgtgcaggcggcagccattgtgcgggg

SEQ ID NO: 420793 - DNA, 122 bp, Homo sapiens
gctgcccagcaagatgcggacctgggtgcagtcacagggcccccgaagctgcagggaggccgccagcctggtggaggacctcacacagatgtgccagcaggaaggtgagaggcgcaggcttc

SEQ ID NO: 420794 - DNA, 122 bp, Homo sapiens
agtgatggcccacgtcggtggctgggaagacctttgagatcagtgtggagtgatggtccacgtcggtggccgggaagacctttgagatcagtgtgggagtgagatggtccacatcggtggct

SEQ ID NO: 420795 - DNA, 122 bp, Homo sapiens
tgccctcatgacagactctcccaggggtatctcctttgctaagtgaatagatgtctattccgttacatatctgctgtgtgacaaaaggcttcacacttcataaggtgcccttgaactctgca

SEQ ID NO: 420796 - DNA, 122 bp, Homo sapiens
tccatctgaggcgactgggccagggcacagaagccttggccaaaggactgcgtgtgcctgcgaacaagcatgttcgcacctgcgagggagtccgtgtgtttgcgtgtgagcccgctccgggg

SEQ ID NO: 420797 - DNA, 122 bp, Homo sapiens
gcctccgcccgcgctctgatacctctccctccgcgcgtgggcggctgcagccgagggtcccgaggttcctactccgctgtcccggaggctccgactgccccgccgctcctgggccgcacgcc

SEQ ID NO: 420798 - DNA, 122 bp, Homo sapiens
gtctcttccctgatggaggctgaaaggaaggggtggggggtggctgtacagctgacacagcgtagagttgtagaaaagggcaggaaagaagtccagtgttctgggaaaggtggtggcacagg

SEQ ID NO: 420799 - DNA, 122 bp, Homo sapiens
ctgccagtccacttaaaggtaccttggtggtttcatacccttaagagatgttgaagactccggaaggatcactggctttcattactatcttcagtgaaagtttatgatgatgactttttaat

SEQ ID NO: 420800 - DNA, 122 bp, Homo sapiens
ccacagggtactgaaggggccctgagagatttcccgacccacctcagagcttctcttcctcgcctcaactttcccggggtcgggcctgggagacggcgcccacccgcctcctccacaccacg

SEQ ID NO: 420801 - DNA, 122 bp, Homo sapiens
tgggagtgggtttcagaagcaggccaggctaagcgctgggaggggagtggggctgcgcgccgtgtcacccctcacggtgcctccctccgcaggcagtgatggagaacatgcggcggaagtgc

SEQ ID NO: 420802 - DNA, 122 bp, Homo sapiens
ttgcagttactcgtatattactgacactggaacagacatgttttaacaaactggttgagccgtatcagtgcgaaccagctgaatgtcagcgctgttccctcctgtgacagaagccaccggcg

SEQ ID NO: 420803 - DNA, 122 bp, Homo sapiens
acagatatgcaaaacagagacctcctactccagccggcagacaggacccagccagctgcacgcacgcactgactcagctgagcctcctgggtggcaggcagcacctcacccgggtgcatcac

SEQ ID NO: 420804 - DNA, 122 bp, Homo sapiens
acgtgtcggaggcaccacctcgggctcgggacgccgggcccccggcactcgaggccactccggagaaaaccaaaacaaagcaaaatgcgcaccgcctccagaaactgcccggcaggccctgc

SEQ ID NO: 420805 - DNA, 122 bp, Homo sapiens
gcggaccagggcgctccccattcccgtcgggagcccgccgattggctgggtgtgggcgcacgtgaccgacatgtggctgtattggtgcagcccgccagggtgtcactggagacagaatggag

SEQ ID NO: 420806 - DNA, 122 bp, Homo sapiens
atttcccgccagactcagtcggagtggcctggaagagcgggctcaaactccaaaggcagtcgtgggagagtcgtagcggatacgtttcccctgacatgcgccgggtgctcgtctctgccccc

SEQ ID NO: 420807 - DNA, 122 bp, Homo sapiens
aggatacagaaacagactgaggcttgagggagcttggcaatgctgagggggcctggtcctcggtgtcagaacctcttacccaggataccacccttccgttgaagcaggggaggcgggcgttg

SEQ ID NO: 420808 - DNA, 122 bp, Homo sapiens
gacattctcgccctgctgcttgggatgaagaggtcctaattaaatacccggaccttccaacgggtagattttcaaagaagatgcccagctatgctgcatcctcatccacactctcccgctcc

SEQ ID NO: 420809 - DNA, 122 bp, Homo sapiens
aggacgtcggtcctcccaggtttgagggcggtcaggcggggtcaaggccaggcagcggggcgcgtctgcgttgcgcccgactctccgcggttacctgtgcctagaggtgatttgaagggcag

SEQ ID NO: 420810 - DNA, 122 bp, Homo sapiens
cctcactccctcttgagatgccagggtgtctgcgggcgctggcggcggtgcgggaagggccgaggcccaggactgggccagcctggctcccgcgctcagcccttgtcgcccgcaccgctctc

SEQ ID NO: 420811 - DNA, 122 bp, Homo sapiens
gggcggggagagggcgggagagctcgttcgaggctccctggtggaaggctggtgccactgcgcgagtgagtaatcgcagccaggcaccggggaaaggggaacgcagagggcctcccagtggc

SEQ ID NO: 420812 - DNA, 122 bp, Homo sapiens
cgcaccgaccatggcctccaaatgccccaagtgcgacaagaccgtgtacttcggtgagtgcgtgcccgctcccggcccgctcggtgcatcccgccgcccttcgcggccagtcccgcgccgca

SEQ ID NO: 420813 - DNA, 122 bp, Homo sapiens
gatgaggaggaagaagagggctgtggtcatacacactgtgtacgtggccaccgcaaaggacggcgtcgtgcaaccctaggaccgacccccaccacccctccccagcctcctgacccttccca

SEQ ID NO: 420814 - DNA, 122 bp, Homo sapiens
tgaactcctggcctcaagcaatcctcccatctcggcctctcaaagtgttgggattacaagcgtaagccactgcacctggccaacaggctgaatttagaactatgtttggaatgattttggtg

SEQ ID NO: 420815 - DNA, 122 bp, Homo sapiens
cccagttccgctgctgtggcgtctccaactacactgactggttcgaggtgtacaacgccacgcgggtacctgactcctgctgcttggagttcagtgagagctgtgggctgcacgcccccggc

SEQ ID NO: 420816 - DNA, 122 bp, Homo sapiens
cccggctccccccgcacctgctcacccaacccctgctcaccccgcccctgctcaccccgccgtctccgtctagtgagttttgatgatgggcttttcacttgtgttcagcttcaagctttctt

SEQ ID NO: 420817 - DNA, 122 bp, Homo sapiens
aggccaccgccctctgcgcgatccgccgccggcgcagcctctcccggcccgccctggcctcgcgcccagcagcccagcctagagccgccgcggcagcctagagccccagccccggctctggg

SEQ ID NO: 420818 - DNA, 122 bp, Homo sapiens
agtattaaatgaatgaatgatgcttttcagttgctattactctgtgatccttaagccatacggccttactacatccagttttttaactgtggaaagacaagaaccttttaccttcagaagtg

SEQ ID NO: 420819 - DNA, 122 bp, Homo sapiens
cgacccctgcagacaccacgtaggggctgctggaaagatactttcgtctgtgggaggacccgggcaaccttttgccacacaatttttcttccatccacagctgcctccagctcccctttcaa

SEQ ID NO: 420820 - DNA, 122 bp, Homo sapiens
ttggtttccccaaaggtcaccaagggagagcgcggcccctgtaggaaacagccccaggcacgcgtgcacaggcgccgagaccgagggagagcgcggccccgtaggagacagccccaggcacg

SEQ ID NO: 420821 - DNA, 122 bp, Homo sapiens
cacaggactcccaggcttcgccgccgatctacaatttgctgaaggagcaaagaacatcctcggctctaagtagggcttttagtgtgctcattgatgagtgaaagtcgccacacatgtcaagc

SEQ ID NO: 420822 - DNA, 122 bp, Homo sapiens
cccacacgtccttcaggtctggtgtcctttgatttaagtgagtaactctggtggtgtcatcgatcgctctgacagatttttcttttgctctagtcttgctgccaggtctgcggaaaagagaa

SEQ ID NO: 420823 - DNA, 122 bp, Homo sapiens
tgcccaatgtacggcattccttgtggtgaaccacagggctggcccaggattcttagatgtcggaggaggcgaagatgccacgtccagcagaaagagctgcacagtggcggccgcgcgtcaga

SEQ ID NO: 420824 - DNA, 122 bp, Homo sapiens
cgctccctgccaagcccatgatgtaatggtgtatgttaatcagtagcatgtggggagctccggctcgggcggctcagtcctccgcgagccgacactggaggcagcagcagcggcggctgcag

SEQ ID NO: 420825 - DNA, 122 bp, Homo sapiens
atgatcatagcagatatctgttggggaggaacatgtgtgtggtgggggagaagaggaatacgagacaatgaaatacccaccttgctagggtgaagaggatccactgattgctaaatttagat

SEQ ID NO: 420826 - DNA, 122 bp, Homo sapiens
ttaaaaagctttcaggatttggcacaatttctggttaaattagctagaaaaaggaaataccgaagaacaggggcctgctcattcccggcatgctgtgcgtctcctctggaaggactgggcgt

SEQ ID NO: 420827 - DNA, 122 bp, Homo sapiens
caggctcctatttctaacagcgccgccactctgagagatgccacttatgctctaagcccacgcagcactgaccactctctgaagctacagcgaatgtttgcttcctgagtgcttcttcctca

SEQ ID NO: 420828 - DNA, 122 bp, Homo sapiens
gtggctgcgatcctcggggaaaccgaggtgagggggcaaggtagggtgcgctggagtccacgcccgctggcgccagactcccgggagtactcgaggtctgccccaaacctgaacgcaatcca

SEQ ID NO: 420829 - DNA, 122 bp, Homo sapiens
ctcacggcagaagctgtctgtcctccagggcttcacggccacgccagctgcctgacaggccgccgtgtaggctgccaggctgcggcacaggaaggctttgtcacccttttgcgcgcacaggt

SEQ ID NO: 420830 - DNA, 122 bp, Homo sapiens
ttacctgtcaggcgccccccgcgccgccccccgtgtgcgcccagacacacgagcacagcgcggcacctgacatttagtggtctggcaaacaactgtgtgacagatattacagtagctgtcag

SEQ ID NO: 420831 - DNA, 122 bp, Homo sapiens
accctccaaatatctgtttctagcttccagccagaggctatgcttcccagcctgtcagaacggccaccttcaggctgcaaccctttaggaggaataaagctatcctttccaaactagaaaaa

SEQ ID NO: 420832 - DNA, 122 bp, Homo sapiens
attatagattagggccacgtggggactgtctgtgatgggaaggaggaggtgggagtggagcgggtttgtgtcaggaaactgatagtgcaattaccataaagaggttttcccaagtcaggttc

SEQ ID NO: 420833 - DNA, 122 bp, Homo sapiens
cgcccccctcggcgtctccccgcacgggccccaggctcagccagcttctctcgcagctcgcggctgattcgcacctccaccgccagccgcacattagacctcaggctgcggcggggacacgg

SEQ ID NO: 420834 - DNA, 122 bp, Homo sapiens
cgggtggcatagaaaccggtccctgcagcatgggagaagcagccaagagccttgtgctgtcgttgtgcccggctctgcacagacagccccaagaaactcgggggtcatgggaagcggttggg

SEQ ID NO: 420835 - DNA, 122 bp, Homo sapiens
acatgctgtccgaacggattctcaggagagaaaatctgactctgcaaatgcagaaaatggcgtagctggagggggcttgagaccccatccaccccgtggaggaaactagggtccaccaagtg

SEQ ID NO: 420836 - DNA, 122 bp, Homo sapiens
cagacaccacattacatgcgccggcacccagggggggaccgcacaggcaaccacacctcgcgtgccaagatgagcgccgaactggccaaggtcattaatgatggcctcttctactatgagca

SEQ ID NO: 420837 - DNA, 122 bp, Homo sapiens
cagccaagtgagcagagcactgctagccggccaggccggttgtcatggagaccctgtcctcgctaggcgggcgcgcgcacagcggcgcgctcttggcctagcgcgtgcacaagggcgctctc

SEQ ID NO: 420838 - DNA, 122 bp, Homo sapiens
ttgatggtgtatctgtcagcttcagaaccggcgtcctgcatagagccgcacgtgcatcggcgcattttccctgcgggagggccgcggccccactgcgtgtgcctctcctggtgccctcctgc

SEQ ID NO: 420839 - DNA, 122 bp, Homo sapiens
tgaaaggaaaaggcttacaagtactagagagcaaggtgggctgagtgtccaaaatgcacacggcaccaaggctgcacaggggtgactcaagagctaattctttatactaaaatttcattctt

SEQ ID NO: 420840 - DNA, 122 bp, Homo sapiens
tcggctcggcccactacccaatactatcccacccattcctaacaggactcccgagaagggcggccacctctgccagagaggcaatggatttctcaccagtgttcatgtgtggtacttggaga

SEQ ID NO: 420841 - DNA, 122 bp, Homo sapiens
gctgctcatggcctccggaagcggacgtagggcgggtggggtacagctcctaaggagaaacggaaccgcaggcaccgtccctctcccgctgcagcctgaggaacgcgttccgaggaacccct

SEQ ID NO: 420842 - DNA, 122 bp, Homo sapiens
acctggcattccacagaaaggacacccagcattctcttttgcccatttccaaatcttgaacgacattgcccctgattgtattggtaaccttctttttttttttttttttttttttttttgag

SEQ ID NO: 420843 - DNA, 122 bp, Homo sapiens
tccccggcagagccgcccccgtcagggcttcccggggccgggcgtctcccagctcagccccgcagcagcaggtctcactcgctgtgtcacgctcccctgtgctcacacccaccactcactcg

SEQ ID NO: 420844 - DNA, 122 bp, Homo sapiens
ccccttccagatgtagggggggtgggggatcccctccgcgataggccgcgagggttgacgcggtcccacgaccccctcccacgatccccagaggtgcagcgggcacacccctccttccagat

SEQ ID NO: 420845 - DNA, 122 bp, Homo sapiens
tctctactaaaaatacaaatcttagctgggcctggtggcacacacctgaggcaggagaatcgcttgaacccaggaggcggaggttgcagtgagccaagatcacgccactgcactccagcctg

SEQ ID NO: 420846 - DNA, 122 bp, Homo sapiens
ccggccggcctcgggcagtgaggggcttagcacccgggccagcagctgcggagggtgcgccgggtcccccagcagtgcccgcccactggcgctgtactcgatttctcgctgggccttaggtg

SEQ ID NO: 420847 - DNA, 122 bp, Homo sapiens
caccgatatttcctggaacgcggcctggagtcagcaaccagcctctagcagctgcctctacgcgctctacctgcttccccaacccagacattaaaattgtttaaggagaaccacacgtaggg

SEQ ID NO: 420848 - DNA, 122 bp, Homo sapiens
gagacgcgggagccccagaagccggcccgcccccagcccttgcgacagctcagcccagagcgcctgcgacattggcaggcgagcagcaacgaccccagcctggccccgacagagtccctgcc

SEQ ID NO: 420849 - DNA, 122 bp, Homo sapiens
ctggtaggggttaccgagagagctgggttcctggtctggtggactccgccggatatgcaacgagctctttatggcaccttggagatggttgcttttagtgccgttgacagcgggctcagagc

SEQ ID NO: 420850 - DNA, 122 bp, Homo sapiens
cgcggcaccgcggcgagcaggaaccagctctaccacttcatcagcacaactgtctcggggcggcctcagccagcaggcccggcgccgcccacttcctgcgaccaaataaggccggggaaggc

SEQ ID NO: 420851 - DNA, 122 bp, Homo sapiens
atcactcaggctgattctgcagggtgttctccttttgttcctgttagaactctctcttaccgtctgtcagaaagacaagctttctattgagaaagattacgccaggtcccactcggtaagca

SEQ ID NO: 420852 - DNA, 122 bp, Homo sapiens
cggaggggtgccagcctggggcacgtgcagacacacactacccagcagaaagattccgggcggctcgccacacaaccctctgcctggttttgcaaaaaaaggaccatctgaaggccaccggg

SEQ ID NO: 420853 - DNA, 122 bp, Homo sapiens
caacccggtgagcccggccgcacgacgcttcacaggaaaacacaacccggtgagcccggccgcacaacgcttcagagcctcattaccggctgtggctcgctgaggccacgggcttccggcag

SEQ ID NO: 420854 - DNA, 122 bp, Homo sapiens
cagaaccaggtacccgcaactgacccagcccaggtttgtcaaagatcagatgattgcagacgtgtggtgttatttctgaggcctctgttctgttccattagtctatatatctgttttggtat

SEQ ID NO: 420855 - DNA, 122 bp, Homo sapiens
gagggtcacttctgttcaggcaatagcctcccagcctaagggctagcccagagaaggacacggggaggaaagctgtccttcctactgagtgtcaggaccctcccatcttgggtgctgggggc

SEQ ID NO: 420856 - DNA, 122 bp, Homo sapiens
atcactgcctctgtcccatcgctccctgaagtagctctgactccggttccttgaaaggggcgtgtacagaagtaaagatggagcctgcaggggagcgctttcccgaacaaaggcaagtcctg

SEQ ID NO: 420857 - DNA, 122 bp, Homo sapiens
cctggccccacagggaatcttagaccatactcttgacttatttgggcctcattttagaaccggagctagaggctgggactgctgctgggtcttctggaacctaatcaaaggtgctccctctg

SEQ ID NO: 420858 - DNA, 122 bp, Homo sapiens
caaaagacaaaataaaaaatactcctaggtagtcctccaacaattgtggactaggaggtacgtgtagcagttaagggttaatcaagggaagccaaaccactgtgagccatgggactaagggt

SEQ ID NO: 420859 - DNA, 122 bp, Homo sapiens
tctgggctgggggaggggagccggggaaactcttgcgggggccccagtctttctcccacccgttcaggggacgagtggcggacccgcagacccctccctcccagatatcctcttttctccac

SEQ ID NO: 420860 - DNA, 122 bp, Homo sapiens
ggaggatgcatcagcagagagcccaggatgtttcactagcaccaaaggctcaagactagccgtccaagattagccttttaatggggttcttgtctcccatgcatccctgcaggcctcccacc

SEQ ID NO: 420861 - DNA, 122 bp, Homo sapiens
gaaaagaaagaactcccaggccagggattcccgtgtgaggccagcgaacagtgccagccgcgggagcttgctgtgtagatgttggtggaaatccttcactaacacgattaaaacgcctttgc

SEQ ID NO: 420862 - DNA, 122 bp, Homo sapiens
cctccgaacccaacatcagcagtggctgccggttttttttttccctctgtctctggttggcgatggtgcgaataggaaccacccttccagccccactagagtatcagcaatagaggcggcgg

SEQ ID NO: 420863 - DNA, 122 bp, Homo sapiens
agtcttatgagagaattctttgccaacctgtttacaaacagctgacttattccacaggaacggtttggcaggacatatccaggtcacctgaccttgggttgtcacagaaaccatgagcctca

SEQ ID NO: 420864 - DNA, 122 bp, Homo sapiens
tgagagagttgatctgtagtactacaagtttgaatgtattttgcctctcataaagcttttcgtaaatcaccatagaagttggttaaagtgcttgccatggctgtatctaccgcagactgagg

SEQ ID NO: 420865 - DNA, 122 bp, Homo sapiens
ctgagatctcgctggctcttctcctctcggattttcggggtgctcccttagggaatctttcggtcccatctcagagaccccagaagggaagtgtattagtgcgttttcacgctgctgataaa

SEQ ID NO: 420866 - DNA, 122 bp, Homo sapiens
ctcccacagcgataccggtttgcattgccctgactcccgcgcgggccccgccccctacgccgctagccaatccatgcattagtggcgtccgggctcgcagtaccgctcgctcccaccgcgag

SEQ ID NO: 420867 - DNA, 122 bp, Homo sapiens
gagatggctctggtgacaccccagcaacccccgactccggcccttgcccttgccctggcccggtatggttcctcaccatttccagcgtggcctcctggtcattccggttcaggatgaagatg

SEQ ID NO: 420868 - DNA, 122 bp, Homo sapiens
tcctcaggctgtagatgaaggggttcagcatgggggtgaccatggcgtacatcactgaggcggtggagctgctctgggaagaatgggtcacagcagaactcagatagaccccaagtcctgtt

SEQ ID NO: 420869 - DNA, 122 bp, Homo sapiens
gtacccacaaatcaggaagcattcccggatgaaaagcattcacagaaccatacgctggttcgccaccttcccggtgcaaaaaccctttcctcggaaattctcagcgcaaagactttgcccta

SEQ ID NO: 420870 - DNA, 122 bp, Homo sapiens
gctgcttccttcacctgaggagggcacggcctctgagagtttcaccagcagacctgactgcgcagtggtccagggcactgagcccagccccagtcttgaccatggcctgtcaaacgtggttc

SEQ ID NO: 420871 - DNA, 122 bp, Homo sapiens
ggacctaagccccggcaatcggcagccttaacgctgtggccgtcgcttcttctttagctccgtctctgtggcctgcttgtatcaatctcatcttgagctctgatcaagacctccttctccta

SEQ ID NO: 420872 - DNA, 122 bp, Homo sapiens
cccctaccgcgccgggcctgcgagggaggggagggacggggagccgaggggagggggcgccggcctcccggctcagctgccccactgaggcctggacctgttgactgcgattggcccgcctc

SEQ ID NO: 420873 - DNA, 122 bp, Homo sapiens
ggcatcaggttcggacacgcacggcctgtggggtcgtctgggtaccacaagaagtcggatcgaaatcggggcgtctggtgggaaggccggggtctgggcgggtgcgcgtttggtctgggcga

SEQ ID NO: 420874 - DNA, 122 bp, Homo sapiens
gcgggggcggcaactggggctgcgcggggcgcttgcaggccagcgcgagttccgggtgggcgtggactcggcagcccagcactcggagccgccggcctgcctacaagccccggtagcgacgg

SEQ ID NO: 420875 - DNA, 122 bp, Homo sapiens
cgggaactgttcctcttccattgtgtgactcctacagtggaaaaataattacagtcatggcggtgagtaagtagggggcaaagcaaagaactgaatgatgtgcaactactttctgctctagt

SEQ ID NO: 420876 - DNA, 122 bp, Homo sapiens
tcacctggcctcacccgcacctcctcagggccttctcccccttgttagagccctgccccacgagggcagcccaggacacagtgctggaggcaaaccaggacaggtgagcacaggtgtggccc

SEQ ID NO: 420877 - DNA, 122 bp, Homo sapiens
actgggggattaatgaagcccaacagaagagaaaacttcaaaactccactggatcaaaagcgatcagcccgaggcgttgaagcagcctacactgtctgcgtctcagggggaaggcacgtggt

SEQ ID NO: 420878 - DNA, 122 bp, Homo sapiens
gtgtgtcctgcccatggggccgaagcctcggaggacattatctggacttagtcccttccccgcgatgccatcaagctggacaattttaaggtctgtttctttcccaatgtagggtataggtt

SEQ ID NO: 420879 - DNA, 122 bp, Homo sapiens
tgggtccttagagcccaagaaagagagaacagcaagcagttggggcagtgaggggtcctgcgctttgtcacatgaggctggtttggtttcacacagttcccggtagcttttcacataccctc

SEQ ID NO: 420880 - DNA, 122 bp, Homo sapiens
cgggaggaagagctgggcccggcgaggacaccgggaggctgcaagtggttctggagaggccgacttgaggaggcccggcctctgcctcaagcatggcggcctctgcaggcccagctgttcct

SEQ ID NO: 420881 - DNA, 122 bp, Homo sapiens
aagactgggtcaccatccaactcagccttcggagtaggcggtggggctgggggaagaggacggaaccatgaggtctctccatcacttcccgggtgtgttgagaggcaagcaaatgcggtggg

SEQ ID NO: 420882 - DNA, 122 bp, Homo sapiens
cgttttcccactcgttttccggggttcccccgcggtgggacagtgagcagttcagggcgccgcagccgaggccttcctccaggtaaatcgccgggcctgcgggggcttcccacacgcgcggg

SEQ ID NO: 420883 - DNA, 122 bp, Homo sapiens
aggatgttcatttcatcccacttctgggattttttgctcagctgctcgtggacactcccacggggatgttcggccgacgccaccatagaggaagtcgtagaggtgttgtccttcaggatccc

SEQ ID NO: 420884 - DNA, 122 bp, Homo sapiens
gctccccacgcgccgcagcctggaccccgccccctccgcatcccgttcccccctcctccccgcaacccccggcccagccccagccccgggtaacagctgcgctgcgtctcccctcccacccc

SEQ ID NO: 420885 - DNA, 122 bp, Homo sapiens
cagtatgtttcgggatggaagcacccctcctaagaatccgcagtttctttctagcagcaccgttatggcgcctaaacggatatttgtttggcaataccagcgctatccgctaggtgccggcg

SEQ ID NO: 420886 - DNA, 122 bp, Homo sapiens
gctgctttgttcccagactctcccctcctctttggagatgacttgaacccctttgagatccgaggggctggcggggcgcgggctggggggcgacagttgtagctccacttcctgctaatgcg

SEQ ID NO: 420887 - DNA, 122 bp, Homo sapiens
gatcaatttgctatttctactgaggctaaggaatggttttatacgcagagggaaaatcatcgtattaatctatggaagaatagccagtcaaaataggggaccacacactagaagttacaaaa

SEQ ID NO: 420888 - DNA, 122 bp, Homo sapiens
cccctgtccctgccccacctccacccccgcccccacccccacctgccacccctgtgaccccggcccccgtgcctcccttcgagaagcaaggagaaaaggacaaggaagacaagcagacattc

SEQ ID NO: 420889 - DNA, 122 bp, Homo sapiens
ttgaacgaagatcagcctcggcgaagcgcctaggcgccgaggcctgggtaaaaacaactgcggccaagccccgccccgccgccggccccgcctcgcccgcccccagccccgccccgtgcccg

SEQ ID NO: 420890 - DNA, 122 bp, Homo sapiens
tgactaagtttaatcttttagagagagaaataaactctaactgttcagtgaaacactaaacgcacaccaatttcaatgaggaagaaagagagagaaaaaggggaaactgcttcacaaatgta

SEQ ID NO: 420891 - DNA, 122 bp, Homo sapiens
accgagggctggtttccttgactgtgggagaaacgccgggagccggagtaagtagggctccgggcggggcgaaaggaaaagttgggtccctagagtgaagaccgagttctttctgtccgtct

SEQ ID NO: 420892 - DNA, 122 bp, Homo sapiens
tttgggggacatgggcatttggggcgcctgaacccaagacctctggatggtagggatgcccgggcgtcctggataccctgcgggactcggggctcctgcggggaagatggcacgttttactg

SEQ ID NO: 420893 - DNA, 122 bp, Homo sapiens
atgggtgttccggctaaattctccctcccctttccctccacagctcagatggcaaatgtgcgacccagggacctcccgctccagcagacctgtgcgcacaactttgcacagattacctgcta

SEQ ID NO: 420894 - DNA, 122 bp, Homo sapiens
acatggtcctgaggagctgagctgtggtgctgtcttctacttccacctcctctgcaaaggcgggcatgtgaccaggctgggttaatcagtttttcatgtccctggcaacagtggttagacca

SEQ ID NO: 420895 - DNA, 122 bp, Homo sapiens
tcaatgtaggaagctcactatgggtcccatctgggtcaccaaaatgtcaatctgaaataacggaaaggataagaatctagtttaaatgagtttattcaagtgcaaaactgaggatggccatt

SEQ ID NO: 420896 - DNA, 122 bp, Homo sapiens
ctccccctgctagaaacctcacattgaaatgctgtaaatgacgtgggccccgagtgcaatcgcgggaagccagggtttccagctaggacacagcaggtcgtgatccgggtcgggacactgcc

SEQ ID NO: 420897 - DNA, 122 bp, Homo sapiens
caacaggctggaaactggcatggccttcagagtccaggaccagaaaactttggatgattccgcctcccccaccccacctccacccggcctccccacactcccccaccccacatcctcatgga

SEQ ID NO: 420898 - DNA, 122 bp, Homo sapiens
gtgtagatgctacattgtagttacattttctcttgtaattattacagtgctgggactattcgagctttaaaatcctttctgaagatcctaaagctactcagtggttctgctggcattagggg

SEQ ID NO: 420899 - DNA, 122 bp, Homo sapiens
gccgcctgctcaagctgcgggaaggcggcagccacatcagcctgccctctggtacccacccgtgtccccagagcgccccccaagaggctgctgggagcagccccgacctaggatttatctct

SEQ ID NO: 420900 - DNA, 122 bp, Homo sapiens
caaggtggtgctgctgggggaaggctgcgtggggaagacgtcgctggtgctgcgctactgcgagaacaagtttaacgacaagcacatcaccactctgcaggtgcggacctcggggagcggga

SEQ ID NO: 420901 - DNA, 122 bp, Homo sapiens
cttccttatgggtaaggaccttatggacctgctgggacccaaactaggcctcacctgatacgacctgtccttctcaaaacacctaaacttgggagaacattgtcccccagtgctggggtagg

SEQ ID NO: 420902 - DNA, 122 bp, Homo sapiens
caggagggggaggggcagaagagactggccagcagcggaagcgcgcggcaggtggagccgcgcgggaagaagcacgcatgcgtcgcgggggggttggcccttggggtgctgggcggagcttg

SEQ ID NO: 420903 - DNA, 122 bp, Homo sapiens
tatcctcaacaaaactgtaacagggaatctatctgtgttcagtgttgctcccctgaacaccgtgctcttcactcagccttcacacccctcacatggtattctatttaaaaaaataataataa

SEQ ID NO: 420904 - DNA, 122 bp, Homo sapiens
tcctggtctcacaatctagaaacatctgaaaaggaaatcggtccggcacaacctcttgatcgctctgtgcaatcactttttgcctgtgttaagtattaataagtgatttattgagtaatttt

SEQ ID NO: 420905 - DNA, 122 bp, Homo sapiens
agggccatcaccgcggaactctgaaagcgcagatctgtcttgaagtcctgagcgatttctcgcaccaggcgttggaaaggcaacttgcggatcagcagctcagtcgacttctgatagcggcg

SEQ ID NO: 420906 - DNA, 122 bp, Homo sapiens
ccaagaagggacaacatcgtcccaggcagagagggacagtctagaggtataccaggatggcgtggtcaggaacagagccctcccctgccagggcgtcaggtccatctgggaacgggcaggtg

SEQ ID NO: 420907 - DNA, 122 bp, Homo sapiens
gaggcccccagacccctgagactttttcccctcttcgtccgatttacctcgaacctgccgcgacctcgctgccaattcagaaggagcgcgaaccacccggaaacccagccgggagcggcggg

SEQ ID NO: 420908 - DNA, 122 bp, Homo sapiens
gagttggcgggcctgccggggaagtggccagccctggccagcgcgcacccctccttgcaccgggcgctggacacactgacacacgccaccaacttcctcaacgtgatgctgcagagcaataa

SEQ ID NO: 420909 - DNA, 122 bp, Homo sapiens
caaaatgggaactcagggttgaaaacgcaacagccaaaattaactcagtggatggctcaacgccagaacagagaggctggagggaagagtcagtgaacctaaagataaaataatagaaatta

SEQ ID NO: 420910 - DNA, 122 bp, Homo sapiens
cgaactcctggcctcaagcaatcctcccacctcggcctcccaaagtgctgggattacaggcgtgagccatcatgcccagcccaattttaaaaattggattgagactattgttttgcagtaag

SEQ ID NO: 420911 - DNA, 122 bp, Homo sapiens
cagctcccaaacggaaatagcggaacactgggccaatcgtagcgtcgtgcctttgcttggcggccaatgagagaggaagtgggggagaaacccgcctgtgagcggcaggagctcaagccagt

SEQ ID NO: 420912 - DNA, 122 bp, Homo sapiens
tggaagcaggcatggtgcgtttcagccaacctctgaatccaaggatctactcatcaataccgctgtgcatttctgaaagaaaaaaaaaatgtatataaaatgagaacaaagagaaaaagggt

SEQ ID NO: 420913 - DNA, 122 bp, Homo sapiens
agaaggatccgtgtggagagcaggccccacactgtggaagctgactgtgaatctgtggaacggggcagggctgtgcattcccagggcaaggcaaccacaggctcaccagagagaagctgcta

SEQ ID NO: 420914 - DNA, 122 bp, Homo sapiens
caacatcgatgacccttgtttcaccagcgcagcattctgagccccaggagaaattccccacgtccagcctcggggcacagtatttcttgttacctcctcgcacacggactgtgtggatgcgg

SEQ ID NO: 420915 - DNA, 122 bp, Homo sapiens
aaatgtcactctttcaaaatctataactcatgtatttgaagactgtttcatgctttgctccgaacaaatagtaaataactgagtatgttcagggtaatttatgaaattttgtggtggtgcca

SEQ ID NO: 420916 - DNA, 122 bp, Homo sapiens
ttctctaacagcccccaatttctctctgtgcctcaggctgccttccatggagccaaaacacgttctgaccacgtctttcttctactgtaaagtccttagtgacccctcactgtgtgcaaggc

SEQ ID NO: 420917 - DNA, 122 bp, Homo sapiens
aggaaactgaggctcagagaagttaagcagcttgtccaacgtccgtgtgttgctaactggcgaaagccaaatgtgtggtcagcctccatcagcgttctatttgcttccttcatggggctgct

SEQ ID NO: 420918 - DNA, 122 bp, Homo sapiens
agctctcttaagtctaggtcctaatcttactctcattatctagggactgccaaaggtaaacgtagccatccagggctgtctggaagagagtcaggattgtaggtatccctttcctttcccca

SEQ ID NO: 420919 - DNA, 122 bp, Homo sapiens
cccgggttcccgcccacccctcactcctgcttgaggacagggcagacattgcgcatgccccgtatccaaggccgcctccgggagcacctcccatgccgctccgctccctcccggtgaccggg

SEQ ID NO: 420920 - DNA, 122 bp, Homo sapiens
tacaattcacagtttttagaactgtcctcatcctgttctgatctggggccctccctgctccgcctgggctgtcaccgtgtcctgggggtgacatgggcctgctccgcggggcgtggagaccg

SEQ ID NO: 420921 - DNA, 122 bp, Homo sapiens
tcagcgtccgcggcccgcagctcagggctcacgaggaagctgtggcttgctgcgtccaagcgccgccgcttttgtgctgggcgtgggggctgcagctctgggtggaggtggaaatacctccc

SEQ ID NO: 420922 - DNA, 122 bp, Homo sapiens
gcacaccaccatggctgggcctttttttaaattttgtatcattttgtagacacagagtctcgccatgttgcccaggctggtcttgaactcctgggctcaagcaacccatctgcctcagcttc

SEQ ID NO: 420923 - DNA, 122 bp, Homo sapiens
agcctagggaggcagttgccagaaaggctcaggatcctgaactcatcttggactcgaactcgtcttggaatgccgccttcgcactcctgcgcctccgagccctgtgtgttctcgatgctttt

SEQ ID NO: 420924 - DNA, 122 bp, Homo sapiens
cgccatggccagggacacaaacaaaagcacgcgcttccactccgcggacagcaaccacagcggctccaacagcacttccccgccaagcgtttcaaaagtaacgacgcagcacgtcgtcaggt

SEQ ID NO: 420925 - DNA, 122 bp, Homo sapiens
gcaggggaaggacaggactcagaggagcggggaggcaaggtcccaagtccacaggagcctcgggttactacaggaggggcagtcttgtgggaatactaggacattcagagccctggaagtat

SEQ ID NO: 420926 - DNA, 122 bp, Homo sapiens
tctttaaagagatggggtttcactctattgcccaggcacaatcataggtcattgcagcctcgaactcctggactcaagagattctctcgccccagccccgtaactgggaccacaggtgatta

SEQ ID NO: 420927 - DNA, 122 bp, Homo sapiens
cctgagaggcaggagttacaggctgaaggtctgacacaagcattagtgagatgctcccctcgaagaatagtcttgtttcttctaaggactgattctcaccccggctttggctctcctaattt

SEQ ID NO: 420928 - DNA, 122 bp, Homo sapiens
cgacacccggagcagtgcaaatcaactcccccagcctagcggcgcgtgcgcgaagtgaggcggccacgcagccacctaacccgccagcgacccgtgtcctgaaagcaagccgcggctctgtg

SEQ ID NO: 420929 - DNA, 122 bp, Homo sapiens
ggcgcgggagggggcggggcccgggcgctggagggggcggggcccgggcgctgggcggggcgcagatggctgagcgcaaccgcgtccccgcatgggatccttccgccaaacgggccgagtaa

SEQ ID NO: 420930 - DNA, 122 bp, Homo sapiens
aaaacgcacagccgcatccattcgggagagaagccgtataagtgtgagacgtgcggctcgcgctttgtacaggtacggagccagcctccaagtggcttccaaggcaaacctgcaagaggtgg

SEQ ID NO: 420931 - DNA, 122 bp, Homo sapiens
cgacctctgcttctgacctgggcactgagcatctctcggcctgctggacgcacgaagtggcggacactcaggagaagatgagggagtggcccagggtcgtgactctgagtgtgctctgagca

SEQ ID NO: 420932 - DNA, 122 bp, Homo sapiens
gacgtattcagacgtactgggggcggggcctcaaggggaaaagcgcctgagccgggatatcgcgagaacatcccgttctttcgtagctctggtgctgcggctccgctctcgtcgcaacgaga

SEQ ID NO: 420933 - DNA, 122 bp, Homo sapiens
catgcagcaccgtgtagccactctccttgctgccaatgaagacttcccctcgggcgaaggcgtcctgtgggtggggaccgcactggaggcggggccatgtcccttccagccccgcttcactc

SEQ ID NO: 420934 - DNA, 122 bp, Homo sapiens
gaacggaggagaacgtgaacagtctgtgcgctcagcctgaggtttccctaagaccttctccgccccagacatgctctcgttaggttggtttttctggattggtttgttctctaattgttcct

SEQ ID NO: 420935 - DNA, 122 bp, Homo sapiens
tggagcagggaatctccagggaaaagggccagggggagcaccggagccggaaacactcaccgtgccattgcggctcccgctccagggtggcatttagagttccaggcaggggccgctatctt

SEQ ID NO: 420936 - DNA, 122 bp, Homo sapiens
atcccctgaggctgcgggcaagaggcaggtgggcgacgggagcaggggcctctgtgcaaacgtgcttgctggggatacggtgacggcgcccccatgcgtcacctttctctgactgctgagtt

SEQ ID NO: 420937 - DNA, 122 bp, Homo sapiens
acatacacatattgtcctgtatgttttaagtcatctctagattatttaaaatacctaatgcgatgtaaatgctattatactgtattgttcagggaatgatgacaagaaacaagagtctgcat

SEQ ID NO: 420938 - DNA, 122 bp, Homo sapiens
ccatttctgacccggcagccaggaaaatgtgaaacaatttgcttctggaaacaggacagccggggccgtgttcctgcaacagcagaccaagcaccgcggcggacccaggcaagcacggaaca

SEQ ID NO: 420939 - DNA, 122 bp, Homo sapiens
aaggacccgtggctgggaaaggtcatctaggtggcctctgcaagagggcaggtgggcagccgggtcagagcagctcttcatgagactccccaaggctgactgcctccattttgcctctccgc

SEQ ID NO: 420940 - DNA, 122 bp, Homo sapiens
catctcgaaggagctggagattaacgggacgtaggggtgatttcactagcgttggggcagcggtcctcgggcgctggggcgagcaggagtaaccgcacgggtgtgaggacaggcacggagcg

SEQ ID NO: 420941 - DNA, 122 bp, Homo sapiens
agcccgcagcctgacccctcatctgagccgaaacgggcctgacgggatcagagggggcggcggcgcggcgagccggtgggaccctcgcgggcgggcaggggagcgcggggcagcagccgggc

SEQ ID NO: 420942 - DNA, 122 bp, Homo sapiens
ctgggggacacttaaggacggcagaagggtccagagagtccgaggcccgggcccagggagcgggtcgggaacagaggcacgacatcggcgggaggtcggaggcgggcagtggaacccttctt

SEQ ID NO: 420943 - DNA, 122 bp, Homo sapiens
ccgtgggcaccacgcagttttgggtcgagggctctgctccaagcaccccgggcataaaggcgggccttggctcggtcaagagtccaggcacgcacactggcataaaacactcctccgaagga

SEQ ID NO: 420944 - DNA, 122 bp, Homo sapiens
gatggaggtaggctgcagccacacgtgcgtggccgtgctggacaattttgtgtacgtggccggggggcagcacctgcagtaccgcagcggcgagggcgcagtggacgcctgctaccgctacg

SEQ ID NO: 420945 - DNA, 122 bp, Homo sapiens
tacccagctgcttctagcaaggtaaacgatgggatattttccaagctcctagtgcgtcaccggttctctgggctatgtgaggataccatttcctacttgagctgcttttcttcttggagtcg

SEQ ID NO: 420946 - DNA, 122 bp, Homo sapiens
actccagcctggatgacagagtaagaccctgactcaaaaagtaaaataaaataaaattcacgtaactaaataattatgtggactaagacaaggctatgggcttctgctttgaaatcattttt

SEQ ID NO: 420947 - DNA, 122 bp, Homo sapiens
gtcggggacccggagctccaggctgcgccttgcgcccgggtcagacattatttagctcttcggttgagcttcgattggtcaaacggcgccgcccccccccccccgccccccgccccccgctc

SEQ ID NO: 420948 - DNA, 122 bp, Homo sapiens
gtctaagaaattaaaatgtggtccttgatgttctttaaaatggcctttgagtatttggttcgccttgactctgtgtttaaataggaattactaatggttatcagtgacttgtagttcattaa

SEQ ID NO: 420949 - DNA, 122 bp, Homo sapiens
cgatggcgggcttcagggtgacatgcaggtaatgcatccccgccagcttcatggtctcgtcgatgcacttggacgccagtgagtttcctcggaagatggtgttggggtccctgggaaatggc

SEQ ID NO: 420950 - DNA, 122 bp, Homo sapiens
tctctgtgtctgtataacttcacataatagaatgcctatgagcactcttgaaaaactactcgtcataataatgataatgagaatagtggcaatttattgagcaattcctatgtgcttggctt

SEQ ID NO: 420951 - DNA, 122 bp, Homo sapiens
atcagggcggggtgggggctaaggacaaggcaatgggatgccgaaaggggctgctcttcgcggggtgggtatggggggtttctgccgagcagtggggaaaggggagttggcggcggggatgc

SEQ ID NO: 420952 - DNA, 122 bp, Homo sapiens
ttctgtaggtcttactgagtaacttctgcattctcagaaagccgtgtatgcgcggactcccggtggatgttaccaatcacattcatagatctcagagctgatggctgcctttccatagcccc

SEQ ID NO: 420953 - DNA, 122 bp, Homo sapiens
gtctgctgtgagcgaggcgggggcgtctggaataacagaggcggtgagtcggcgagtcggcggcaagagatgcttacagtccattctgtgctgagactgaagacctagctgtgaggtgtgga

SEQ ID NO: 420954 - DNA, 122 bp, Homo sapiens
gaccagcctgggcaacaggacaaaaccccctctctaccaaaaatacaaaacttacgcaggcgtgctggcaggcacctgtattcccagctacctgggaggctgaggcacaagaatcacttgaa

SEQ ID NO: 420955 - DNA, 122 bp, Homo sapiens
ggatataaaaatggcttcgttatacagacctttcaaaatacttatgcagcaagatgacagcgacttttcaactgagtatctgttgaaactcaagagacctgactgtattgatgaaattattg

SEQ ID NO: 420956 - DNA, 122 bp, Homo sapiens
aagccatgggccccgggattccccagcctgtgtggctgtactgctgtgtgcattgttgctcgttgctatagggacccacagaagggaaagtagtggttttgcatcctgttctcgtttggtcc

SEQ ID NO: 420957 - DNA, 122 bp, Homo sapiens
cccacccacccccctgccaaattgtacttaattataatgataaatgatggcaggcatccacgaccacatcgcagaacatgacaaacactccacgtcgccgagccaacaagccccgctccccc

SEQ ID NO: 420958 - DNA, 122 bp, Homo sapiens
acccccggaaacctcagcgccccatccggggactgctgccctcggacctgctgcgggccgcgcacctggctcacttccgccccgagagccccagctcctggaaccccgggaggggcttcgca

SEQ ID NO: 420959 - DNA, 122 bp, Homo sapiens
gaactggctccggggggagtggggccctgcgctagaggcagaggcagttctttgttcaagcgttcctctggggaccggcagcagaggcaccgtgttctctcagccctggatacgtcttgtaa

SEQ ID NO: 420960 - DNA, 122 bp, Homo sapiens
atgcaggggctttgcccaaacccacactaggtgcagggccggggaggctgtttcaggaggcgaaggaagggccccgggcggtgaggggagaggctggttccgaaagtgtgggcgacgcagcc

SEQ ID NO: 420961 - DNA, 122 bp, Homo sapiens
tcctggagctgggtgttgactctgtccaagactctgctcagtcacttcctggctgatccccgagtgctcaagtgtgtgatgagattagggctcccccaggcaggaaacggccacattggacc

SEQ ID NO: 420962 - DNA, 122 bp, Homo sapiens
cctgctggacctgcccgtgctgcggcctccggcgacccggcagcgacgcgggcggggacgcggtgcatcgctactgcgcccggcggacagcgacttgctgctcaaaaagaataagaaccagg

SEQ ID NO: 420963 - DNA, 122 bp, Homo sapiens
cttctgcgctaggaatctccatggagtttgcgctccctctggcacgttgaaaacgtcctccgcagcttcgcaccggcttcgcggcgccctgacagctgggtgaggagggagcgaatgcccac

SEQ ID NO: 420964 - DNA, 122 bp, Homo sapiens
gaatgtcatgcctttccccattgtctaactttgtgatcagacatcgtgtgaggcagctgccgaatcccagcgctgtccctgcacccaggccggcagcaggggaccccgcgtctccaccttga

SEQ ID NO: 420965 - DNA, 122 bp, Homo sapiens
accctgcttccgaaagcattgatcgtgggtacgatgtctacatttgtgtgagatcagacccggccttctagaaccacgcagtcaacactcagaaaggatggcacgaccatcctctgagcgtg

SEQ ID NO: 420966 - DNA, 122 bp, Homo sapiens
agtggattcggtgacactaaggttctttacccactgcgaaagcgaatggcttggatctagcgcaggtcgaagttatattccttcttcctttgtatgcaagattaggttgttacaaaagaggg

SEQ ID NO: 420967 - DNA, 122 bp, Homo sapiens
acaaccacgttcatgggaaccagccacctccacatgttgggcaggagggaccctagggagcggccctgacccctccatgtgcatgcgcacagggacctgggccagcagggcctgatcagtgt

SEQ ID NO: 420968 - DNA, 122 bp, Homo sapiens
cgttgcggctgttttccccccgtcagcgaggctttttgttgccgcggctttttgcccaggcgtttgctgcctccttatttaatcagagccttaatttgaacgtcaggtcatcaaatctggaa

SEQ ID NO: 420969 - DNA, 122 bp, Homo sapiens
ccatgttggccagggtgatcttgaactcctgacctcaagtgatccatctgcctccgcctccgaaagtgctggggttacaggtgggaaccactgcgcccagccctagaattatcagatttaaa

SEQ ID NO: 420970 - DNA, 122 bp, Homo sapiens
ctgcccccccgcctcagtttccccgaccacacaacacaggaccagcgtctccagggcactcgcggttccccagaccctgtggtgacctttctcatcaggccaccctcacctcccagaagctg

SEQ ID NO: 420971 - DNA, 122 bp, Homo sapiens
ggaagcagaggcagtgaagcctcttgggagatgacatatattcagaatgtaagcaccagacggggcaggggagacgaggatgaaaggagcagagcaagacagaggtcagaatgttctgttca

SEQ ID NO: 420972 - DNA, 122 bp, Homo sapiens
gcgcaaaagcagggcagcgaggtgagcagagccagagttcagaaggggccgcaagtcagacgaggggctgggaaaaaagagcctctcccaaggttaacagaagcgtgcggagcgtgagaagc

SEQ ID NO: 420973 - DNA, 122 bp, Homo sapiens
gccgagcgggactggctgggtcggctgggctgctggtgcgaggagccgcggggctgtgctcggcggccaaggggacagcgcgtgggtggccgaggatgctgcggggcggtagctccggcgcc

SEQ ID NO: 420974 - DNA, 122 bp, Homo sapiens
atgtggccatgcctgctccctggcagtgcgcgtcctgcaacccttcccaccccagggcctcggcttccgcaatgaatccccatgtttcaaatccccgctgctcccaaggctacctgctgcct

SEQ ID NO: 420975 - DNA, 122 bp, Homo sapiens
atttttcatagtaggtcaagaagcaggtctcgatcccggaccagaagttcctctaggtctcgtagccgatcccgttcccgtagtcgcaaatcttacagccggtcaagaagcaggagcaggag

SEQ ID NO: 420976 - DNA, 122 bp, Homo sapiens
aaacgcactcctgaagccgcaggcccacctactactactagaacaaccccgggtgtcattcgcgtgcctctcggtgcggtgggggcggacagttgcgccaatccccgaagcaagggagggag

SEQ ID NO: 420977 - DNA, 122 bp, Homo sapiens
gccgccactcggtacccgctgccacctccatagagctccgactcactgctggcgctaaggcgtgtctgaagccgaacttatcactcttggggcagccgaacccaccagagtctccccgaatg

SEQ ID NO: 420978 - DNA, 122 bp, Homo sapiens
tcacacaatactgggtttaattcctaactttcttacttgctaggtgtgtgaccttgggaacgttatttaccaccaaatatgttgtcatatatgaaaattaggagaatacattccttcaaagt

SEQ ID NO: 420979 - DNA, 122 bp, Homo sapiens
ggcgggaggagcgggagcctccgtgggagattcgggaggagcagccggcgtgggtggagccgccggcgtgggaggagccgcggggcctgggtgagaacggggcgggacggccggaggcgggg

SEQ ID NO: 420980 - DNA, 122 bp, Homo sapiens
ccggtcagcggcaggaactgggagccattgactgcctgcgagatgcagttgtggctcaggcgcaggcactgcaggtgcgagagctgggcaaacatctccggctgcacggtcaccaggttgtt

SEQ ID NO: 420981 - DNA, 122 bp, Homo sapiens
tttgggggtgccttggtgttgctggccaggtcgggcagcgatgtggggagcagtaccccacggcacatccgccctttggcacgtggtgtgtgtgaattacgcgtgtcctgatgcagcacaca

SEQ ID NO: 420982 - DNA, 122 bp, Homo sapiens
ggtctcctgggctgggccaggccccgactcagaaccggacggaatcgagagatcttggcccgtcctccgtgccactcttttgagggtagactacatttcccagaaggttcagcggtttgagt

SEQ ID NO: 420983 - DNA, 122 bp, Homo sapiens
aaccaatacaatagaaaacctgttaaaaatgcaaattcttggcctcaattccagacctaccgtatcagaatctttgtggatggggtggagtaatttggattttaacacaagtctttcctgtt

SEQ ID NO: 420984 - DNA, 122 bp, Homo sapiens
tgaactgttatccatgtttccattccccgaggccagttagacccggagcagaaaggtgcgcgtggtcagttccagctcctaaaatgatgtgcagtctgcaagctggaaaggtctcggcgcgg

SEQ ID NO: 420985 - DNA, 122 bp, Homo sapiens
tgctatccaacagatccttttgtagtgatggaaatgtcctttgatctgtactgtccaatacggtagccagtggttatatgtgggtgctgactacttgaaatgtggctaatacaactgaggag

SEQ ID NO: 420986 - DNA, 122 bp, Homo sapiens
ggggaggcgcgggcctgggcggccagccccggcgcacagccgcggccggggcgcgcggcgcggggcggaaaagcctgtttacacagactgcacaccgcctggggaataatgcagtaaaggaa

SEQ ID NO: 420987 - DNA, 122 bp, Homo sapiens
agccaccgcgcccggcctatgctatttatttttagcacatggtcacttgttactttaggtcgcatcttttcaactagactgtcagctcttggaggcagggagggctcacacttgggtagtac

SEQ ID NO: 420988 - DNA, 122 bp, Homo sapiens
cacgcgatgctctgaggaaggaaaccgtctaggaaccaagagtcacggagctgcctcccgcgaccgccttcctcaatcactacaatgaaaacacgcagtgagctgagctgcagtgaagacaa

SEQ ID NO: 420989 - DNA, 122 bp, Homo sapiens
ggcaacggctggtgcatgttgccggcggaggcatttaggtagtgcacgacggctgggcgccgggcctgtttggctgtgacgcccacccccggctttcatccgcctatgccctagggctagtg

SEQ ID NO: 420990 - DNA, 122 bp, Homo sapiens
ctcggctgcgctgatccctcgccatgttgaagatctctcgcagctgctgtgctgagggctcggggatcagggccaccaggtaggtgaccacatctatcagaagggggttggcatgcacacgt

SEQ ID NO: 420991 - DNA, 122 bp, Homo sapiens
ctcactactcaggaggtgacggtgacgtggtgccggtccctgaagtacgcgcacaagctccggaggttgcgggagctgagggaggaaacagggacacgatcagattcgctccaggtggcggg

SEQ ID NO: 420992 - DNA, 122 bp, Homo sapiens
accccaagcagagagcagagtgacctctggacacatgcagctgggcagcaccactgtctccggaattcctcatatctccctggggaacttgaaacagtggacgcaaacatgaatacagactg

SEQ ID NO: 420993 - DNA, 122 bp, Homo sapiens
ccaactcaactcagcccttagacacccaggcgtgggatgcagacttcaccccaggaacaccggacaccccacttggtcccagaagcggcgcctcctcccagcttctccatgcacagccccac

SEQ ID NO: 420994 - DNA, 122 bp, Homo sapiens
tccacccttcatgaataaatacaaaatgccttgccacccagaagacgaaccctttgtagtcgtgcatctcttttgaacatgcgtctttaggaccctgtgttctttcatttcagtattcttgc

SEQ ID NO: 420995 - DNA, 122 bp, Homo sapiens
gggcaacatgatgaaacctcatctctacaaaaaaatacaaaaattatcttggcgtggtggcgcacgtctgtagtcccagatgctctgaaggctgaggaaagaggaggatggcttgaacccgg

SEQ ID NO: 420996 - DNA, 122 bp, Homo sapiens
ttgactgaggcaggctggcttcctacagctgcggcagagctgaggaggcgggaaggagaccgtgcaggccgcagcaccgaaaatatttgctctctggcccttcccagagtgcttgccgacct

SEQ ID NO: 420997 - DNA, 122 bp, Homo sapiens
gtggtcattcaaagttctgttttccctttatctgcattaagctccagctttgaatccaaacggtgcagttaggaaggaggaagagcaaagaagccgggcaaataaagatgacagccaggagc

SEQ ID NO: 420998 - DNA, 122 bp, Homo sapiens
accacggccgcggggaagcgaaactgccggaagacctggcccagcgcccagcggtagtggcgcgcgatcttgtagtagccctggaacttgcggtggtccggcggcaccgcaatgctgctcag

SEQ ID NO: 420999 - DNA, 122 bp, Homo sapiens
caaaacttaggacccagggcaggccgggctttggagacgagtcagtcttactcaaccctgcgcacctgagaacaggtgctgttctgagtgaacgactgggacctggcacgaactagcctggg

SEQ ID NO: 421000 - DNA, 122 bp, Homo sapiens
gggggcgagtgtgactggcagaggggcagcctgagcataggtttggagctggactgagcccgtagcagtcgggagcgtgtgtgaaccgtagtcaggcctgcaatgtcgaggggagaagttgc

SEQ ID NO: 421001 - DNA, 122 bp, Homo sapiens
caaagttctagaacaaacaagagaagtcagagtgaggacagtgaattgaaaggcagaagacggcactgaggatggaagaaactgacatcatgcacttcctggtgtgatgtgctgagaagaat

SEQ ID NO: 421002 - DNA, 122 bp, Homo sapiens
tgggcccttgtggggcctgagaatgctggggacacttggcagagagtgaggctcaccgcccggtgcccctgcctgaagctgggattctgcggtggccccagggtgcccgtggcaccagagag

SEQ ID NO: 421003 - DNA, 122 bp, Homo sapiens
ggcactcactgaggcggtcatgttcgacgacgccattgagagggcgggccagctcaccagcgaggaggacacgctgaccctcgtcaccgctgaccactcccatgtcttctcctttggtggct

SEQ ID NO: 421004 - DNA, 122 bp, Homo sapiens
tgagaaacactgccccatggcccgatacgtcctcaagacggacgatgatgtgtatgtcaacgtccctgaactggtatcagagctggtcttgcgagggggccgttgggggcaatgggagagaa

SEQ ID NO: 421005 - DNA, 122 bp, Homo sapiens
acaggaacagcagcagtgtaggtttccctacctagagggtggtatgcagtgattctcaggcgctggttggaaggcacagctgagggacacaaactgccaggaagtaatgtggtaactagcca

SEQ ID NO: 421006 - DNA, 122 bp, Homo sapiens
ctggctcttaccaggtcacgtgatccctccagacaacatcctgcccctcgtcatctgcagcgggatctccaaccagccgctggaattcacgttccagaaaagagagctgcctcagatggtca

SEQ ID NO: 421007 - DNA, 122 bp, Homo sapiens
agaaatttctcgatttaccctccccttcccaccgtgctggcctgcgcgcgcggacgtgcgcgctccgccctcgggccgcctgcactgcaattggttggtgtctctgggagggatttgaaact

SEQ ID NO: 421008 - DNA, 122 bp, Homo sapiens
ccggaagcccgccctcccgtttccggaagcccggcacaggctgggtctgcagatggcgtccgagtgcacagtggccagtgtgattccgcagtcttgggctgttcggccaagcgcccaccgga

SEQ ID NO: 421009 - DNA, 122 bp, Homo sapiens
gcccggccccggcccccaggaggaggcgctgacgcagcagcgtggagcccgggaattgagcgcccccggggggttccagccgccggattccagcccggccggggcctgcgggcgcccagagc

SEQ ID NO: 421010 - DNA, 122 bp, Homo sapiens
aaaatagagcccgggaggcccagtcaaaccggaagagagccagaggcctccctggagtcccgaagacgatctgaaccaaggagcccagcgccctctagcgggagacaagctgcttcgcggcc

SEQ ID NO: 421011 - DNA, 122 bp, Homo sapiens
tcgctcggtggtggtgagcaggaaggcaccggtgtcccgggggcagctctcgccgtcagccggcagcacggacacacagtcagccaggcggatgacccgtcgctcccctcgccggccaggcc

SEQ ID NO: 421012 - DNA, 122 bp, Homo sapiens
acggatgtattctactttctgtgctatctgcttctgcccttctggaaaagtcatcccaatcgaagaaaaactgaaaaagttaattagaaaaaagaatgcgtgaataagcaaaccctcttagg

SEQ ID NO: 421013 - DNA, 122 bp, Homo sapiens
ttataaaaggccagtttgtggttatttttgtccttgtgggccatatggtctctctcgaaacgactcacctctacctttgtaacaccagagcagccaaagaccatagacatccaccagagaaa

SEQ ID NO: 421014 - DNA, 122 bp, Homo sapiens
ccagcccctccatccctccctgctcccagggaggtgtagcacctgggtgtgtgcaccgtgcgtgtctgtgtgtacacacatgaacctgcagtctggatgccactggccctgggttccgcaga

SEQ ID NO: 421015 - DNA, 122 bp, Homo sapiens
taaaataaaataaataaaaacccctgcgttcatccgagcgcagtggctcacgtctgtaatcgcagcactttgggaggtcaaggccggaggatcacgaggtcaggagatggagaccatcctga

SEQ ID NO: 421016 - DNA, 122 bp, Homo sapiens
tcttgcatactacactgaatacctacattctgtcaaacaaccacaaccagaagagtaattcgatcaatactctttcattctctaattaagaaatctgaaacattttgaaaaccaaaaggttt

SEQ ID NO: 421017 - DNA, 122 bp, Homo sapiens
acgccttggggactgcgagttgggggacaggagctttaggggccagagtgcttgaaggcgcgtgtctcaagggagccgcaaggcccccgtgaagaggaatccccttttcctcctgagctgtg

SEQ ID NO: 421018 - DNA, 122 bp, Homo sapiens
agtgctgctctgctggagggaaagagaattctgggctgaatttaacagtcatggcggtatcgattctagaggtaaatctagaggaacagtacaaaaggtgtttgctgagataataagatgtt

SEQ ID NO: 421019 - DNA, 122 bp, Homo sapiens
ctgggcaacaagagcaaaactccgtctcaaaaacaaacaaaacacccttcaatggtcccccgtcaccttctgcagaatacacattcctactgattcaggccctgtctacctccccacactca

SEQ ID NO: 421020 - DNA, 122 bp, Homo sapiens
atctcctctgaaccaacctaaacaatgatgtggaaagtatgactttgaccctgcccaaagcgcagggcccagctgctccctctggggaagaaagttgttctttcagactaagaagagatata

SEQ ID NO: 421021 - DNA, 122 bp, Homo sapiens
cccctgggctgggggcgcgggcaaagcgggggcctggcgggcgctgagaggacctgaagccggcgcgggcggcggaggcggtaggcgcgcccctccaccgcgcccgggagcggggagcgggg

SEQ ID NO: 421022 - DNA, 122 bp, Homo sapiens
ttaattaaaatcgcagaatggactgtaatagttctgtcaccacctgcgaataatcagcagcggctagtcttccagatttaaaaattcatactcacttttccgtcttactatttttgtcattc

SEQ ID NO: 421023 - DNA, 122 bp, Homo sapiens
gggcgagtcggggtcgccgcctgcacgcttctcagtgttccccgcgccccgcatgtaacccggccaggcccccgcaactgtgtcccctgcagctccagccccgggctgcacccccccgcccc

SEQ ID NO: 421024 - DNA, 122 bp, Homo sapiens
tgagctctttgcagccgtaggtgaggtaggacagtgaccagcaggcttctgagagaacctcgctgtggtggcgctgcaggagtgagagggcacgcagcatctgcttcactgcagtttcgcaa

SEQ ID NO: 421025 - DNA, 122 bp, Homo sapiens
tggcccagggagggaacgctggctggggacgatcacaaagcctctctggtgcccggccagcgacagggaccctcggggctgcggggggagaggacgcccctgccctggccgcacagggttgg

SEQ ID NO: 421026 - DNA, 122 bp, Homo sapiens
gcaaggggccacgcgggtcactgccgagccgggacgggctggagccgcgctggggtggggcgcttggctgaccatccccggccccccggctctgcgcccctcccgtctgggcacacccttca

SEQ ID NO: 421027 - DNA, 122 bp, Homo sapiens
ctcccctgcttcactgctcccagtggccctctgtataaagacgtcttacaaggcattcaacgcccttcacaacttggccacagcctaactttctttttctttttcttttttgagacagagtt

SEQ ID NO: 421028 - DNA, 122 bp, Homo sapiens
agtcctccttggcccccggcgtgcccccccacacccccagccaaggcgagcgtccagccgcgacacccggctcgctacatttcgcttctgcgttacagcgaggccgccgctccgcttccacg

SEQ ID NO: 421029 - DNA, 122 bp, Homo sapiens
atccctccttttcctgtttagtttttcacaatgcgggtacctcagcccttctgaggtacccgcattatcacccaggtggtagtgctaccatatcattttgtttttttcttcttcctcctgca

SEQ ID NO: 421030 - DNA, 122 bp, Homo sapiens
cgcccaaactccagagtccgtctccgccggagaccggcagcgacgctgaccggccacttccgacgcaagaaccggaagccatggcctgacttccggcaccgccccgctcccccgcgcggtgt

SEQ ID NO: 421031 - DNA, 122 bp, Homo sapiens
gaaccgagggagccagacagctgcgatattgggaaggcctccggagccgcgaagagcgcacgcgcgagcgcgcgcccgcgttctcctggcgggcttggtatttggcgcctgcgcgctgagtg

SEQ ID NO: 421032 - DNA, 122 bp, Homo sapiens
ttttgttatttttaagcctgcccagcccttgtttttgttgatttttttggtggggagcggcgagggtgattaacttgtcccgtgtcttaacagattgtttaaagacctacatcgtgaaaaca

SEQ ID NO: 421033 - DNA, 122 bp, Homo sapiens
tgatccaggcctcaaagccacaataacggttttgtttttgcttttgatgaggtcccactccgtcacccaggctggagtgcagtggcaccgtcatagctcactgcagcctcgaactccagggc

SEQ ID NO: 421034 - DNA, 122 bp, Homo sapiens
gacccgcccgcccagtcctcattaaatatggcagcgagcggggccgacgtactgcggctgcgcaagttgaaactcctcctggcagctcctccccggcgggcctcccctcatctcggctgggt

SEQ ID NO: 421035 - DNA, 122 bp, Homo sapiens
cgagagtgatgtctgtagtgaagaatttggcgccatcttgagaaggtcaaagtgattcttcgattaaatgccttacttatcgcctagtgtgacctggcgcttgggtttactctccccagcaa

SEQ ID NO: 421036 - DNA, 122 bp, Homo sapiens
cggtgtttacggggctttggggtcctgctttccccgagcatcgcggcctctgagctcatgcggaacataaaagctcgcaaggcgtagaactttttcacgttttcatttgtttcccgtagggg

SEQ ID NO: 421037 - DNA, 122 bp, Homo sapiens
cggggagccgggcggcccttggcgtttccccgcggctgggccggcgcagccgcagccccgcggcgcctcccgctgcgatcccatctcccccggaaggcagcaatcccgcgggccatggagga

SEQ ID NO: 421038 - DNA, 122 bp, Homo sapiens
gctgcaggggcggggaacgcagtgaaggggcgcggcgcaggtgtcaggttgctggagaggcgggcctacagggcggaaaccaccggcgcgggtgaccggaagccccgcccccaacatggccg

SEQ ID NO: 421039 - DNA, 122 bp, Homo sapiens
cttgatctcctgacctcgtgatcctcccactttggcctcccaaagtgctgggattacaggcgtgagccaccatgcctgacctgtttaatgtttaaaatatgccgtaaagaaaatccagctgg

SEQ ID NO: 421040 - DNA, 122 bp, Homo sapiens
ctatgggagcccttctctgggctggccgaggccggagccggctccctcggcttgtggggacgtgtggagggagaggcacgggcaggaactggggctgcccgtggcgcttgggaggcagctag

SEQ ID NO: 421041 - DNA, 122 bp, Homo sapiens
agcgccgcagaggggaagggccaaacccctggcgggcagcgggcaggacccccaggatcccggacctcaaggagcaggggaacgcctggagccacgacctcacactttgccaagacaccaaa

SEQ ID NO: 421042 - DNA, 122 bp, Homo sapiens
gaaccagagccaggtataaagaacaaggcgatggaggtgtgcggctgcgtagacgtctgccggccgaagatgggtgtgcgaccccggaggggatcactttctttgtgtaaggcctttagtgc

SEQ ID NO: 421043 - DNA, 122 bp, Homo sapiens
cggctgcggctccggttcccgctgcggctccagcctcatcctcagaccctgcggcagcagcggctgcaactgcggctcctggccagaccccggcctcagcgcaagctccagcgcagacccca

SEQ ID NO: 421044 - DNA, 122 bp, Homo sapiens
gaagcggccccgtgagttggccctggttggtggagccggcactgagcccccctcctgctccggccgagcccccccgccgggagggggcgtggccgcggccgtggacgggccggaggcggcgt

SEQ ID NO: 421045 - DNA, 122 bp, Homo sapiens
ttggggacaccaggcgaaagcggagctgttctgtttaaacgccctttgtgtgtgaggacgcggcctcagtgcagctacgctgggtcccgcgtagggagcgcaccccagaaagggagggtctc

SEQ ID NO: 421046 - DNA, 122 bp, Homo sapiens
tcgttaacgcatcaacctctggaaaggacagggaaacaggaaccaccgtccagacactttcggagcttctgtctcggtaacaataacacaggaaataagcaacagggtcttgtgaaagacag

SEQ ID NO: 421047 - DNA, 122 bp, Homo sapiens
ttacaatgtgcaaaaagagcatgtacttcagagtactttcagtacccaaatatgatctaacgcatgaaaattcaactttttaaagtatcagttgatttaattgcaagaggattcaactgatc

SEQ ID NO: 421048 - DNA, 122 bp, Homo sapiens
ccactgaggtggatttgagtcattgatctgggcagagccttctggagtcggggtttctctcgtctcaaggcagaggtcctacagaagttagtggtcttggccaagcggacattgatgcaact

SEQ ID NO: 421049 - DNA, 122 bp, Homo sapiens
attgtaaatttttttatttaaactagtcacaaaggtatcacaggtatgacttacacctaacgggggccaaaagatgggttgcgaaacgaatgactgaattatccctaacaatcttgggaaga

SEQ ID NO: 421050 - DNA, 122 bp, Homo sapiens
aagccaaaaagtaaggcacagagaactagcactacacagagaaagctgccgctggccaggcgctgtggctcacgcctgtaatcccagcactttgggagactgaggcaggtggatcacaaggt

SEQ ID NO: 421051 - DNA, 122 bp, Homo sapiens
aagccaggctgtaggtgctggtgataggatagacaaaatctctactcatgcaggtcactgcgatgagctggtgccatccaactggcacagaaactgcagaccagacaggagaacacccagga

SEQ ID NO: 421052 - DNA, 122 bp, Homo sapiens
ctgtccatggccaccctgagaacggcagtcctgaggcagagacatgggtgaacctgcattcgggcggggagcaagggtttcacctccagcacgttgccgctgcgcagcctcagttcctcctc

SEQ ID NO: 421053 - DNA, 122 bp, Homo sapiens
agccactgtacccatgcaagtttcttaacccttctcttcctcattttctcatctgtgagacgaagacagcctcccacccagacacactcccctcacggggctctggggagaaatgatgtgga

SEQ ID NO: 421054 - DNA, 122 bp, Homo sapiens
ggcggggagagcttgaggtatttgcctggggacgtacgggagcaggaggtgggacccggacgtcctggctcagcgcagccttttccagtacccgggaccacgggccagcctgtgtcccccgg

SEQ ID NO: 421055 - DNA, 122 bp, Homo sapiens
ccccccgcccgccgctccgtgcagcctgagaggaaacaaagtgctgcgagcaggagacggcggcggcgcgaaccctgctgggcctccagtcaccctcgtcttgcattttcccgcgtgcgtgt

SEQ ID NO: 421056 - DNA, 122 bp, Homo sapiens
ggcagatcctggcacctgggggcttcctccagctcgggctccggcttggggagcggagaacggggcggggcaggagctgggaacaggttagacgacgtgacttgggctggagggaggcgggt

SEQ ID NO: 421057 - DNA, 122 bp, Homo sapiens
gttgtgaaaacagtttaagggagcacgtggccaccccagccctaggaggctgccgagaagcgcggctgttaatgaaaatgcattgacaaccactcctttaggattccttccccaggagctcc

SEQ ID NO: 421058 - DNA, 122 bp, Homo sapiens
gcaagcagcaagacctaaggatcacttgtatgtggcatatatagccgtggcacacatagccgtggcacactggacaaccagggtacacaatgtgctaaaaaacagaaggagaggtgggtagt

SEQ ID NO: 421059 - DNA, 122 bp, Homo sapiens
cggggaaacgggccggggttggtgtttgtaaacttgcctcggtcccggtgggggcagccgcggcggtggggttggcagggtgtgctggggcctggaggaggcgccgcgcggccagggagcca

SEQ ID NO: 421060 - DNA, 122 bp, Homo sapiens
gtcagtcacggagtccacccaggcctggcatgtggctgtgtccacctctatgcgtagggccggagtgctgacggggcacagaggtgtgtgttcttgttgctgtgtagagaagtgtggagtag

SEQ ID NO: 421061 - DNA, 122 bp, Homo sapiens
gttgatgaggtacgtggggactgggagaatgagagcagttgaggattattttcttctgggcgttgatctggaaatcaattacccgactagttacttcagtcaaaatggtacagccaatcctc

SEQ ID NO: 421062 - DNA, 122 bp, Homo sapiens
tccctgacattaaaacaacacacacagccccagtccccgcggggggccccaaaaggagggcgggggcggagtctgggccagcctcgcccccaagccaattcccattttcacccggcgcccgc

SEQ ID NO: 421063 - DNA, 122 bp, Homo sapiens
cacgcgcaattcagacctcggcttcctacttccgccgctctcgcggccccacccctctcccgtcacttccgccagctgccaccaccccaaaaaaagccgcagactccgggcactcggggaac

SEQ ID NO: 421064 - DNA, 122 bp, Homo sapiens
ggggaggggagggggcgcagaaggcgtgacaaagacggactctgtcttgagtgtgcgcctcgctccggcccgctcccagcgaactgtgcctgaagtgtgtctcacgggagggccaggacgaa

SEQ ID NO: 421065 - DNA, 122 bp, Homo sapiens
atgtgctgctgagcacggctgctctgcgaggtgggcatgagggcctggatcacacgtcggcggagatgagaaaagtgagaggcaaaccatccctcgctctagtctgcatccttggctctgag

SEQ ID NO: 421066 - DNA, 122 bp, Homo sapiens
gcgggccgcgggtggcgggggccgggccgcggctccgggtgttaggagacaagatggcggcggctctcagaaggccggtctcctcctctccgccgtcctccgccccgccgctcgccgcctcc

SEQ ID NO: 421067 - DNA, 122 bp, Homo sapiens
tactggagacagcacctctcgcgcccgggcgggcggcctcgtctctgcacccctaggcggcgctgcgctcctcaacacccggccggctccgctttcccagacggctgcccagcctccagcct

SEQ ID NO: 421068 - DNA, 122 bp, Homo sapiens
ggagggtgacacagcatcatccctggggttttgagcagagacactgaagccccgtctgatcgtctgatcgtgacagcgcacgagactaaacgtggactcagacgccttctgcaaaacacctg

SEQ ID NO: 421069 - DNA, 122 bp, Homo sapiens
gggattgttgtctgggactgcaagcagggtatgtttttatctactgtgaggttcctggggcggagatgtgcagtggagcgagaacttcctgtgaccgtgacattgtctaggtggtgagcagg

SEQ ID NO: 421070 - DNA, 122 bp, Homo sapiens
tttgcagtgagagcacagcatttgtcactcaacctctgaatgttagtgacactattgggacgaaaaaggactgtgctggcccaaatggcaggcatctcatatgtggcatctttctttctcct

SEQ ID NO: 421071 - DNA, 122 bp, Homo sapiens
attttaatggaatgttataaaggatttgcaacaaaatgcagacgtagatttagggactgccgacttctatagatcaaggacttcattggtgcagctgaggaaattcttccaaacaagtctaa

SEQ ID NO: 421072 - DNA, 122 bp, Homo sapiens
ccttccctggttcctcaaggcacggctcccccaggcagatgaaagcttaatagagttttgcgacatgaaagtcagtcggaggaaagagccttgaacagttgtgcgtgagagagaggcaagcg

SEQ ID NO: 421073 - DNA, 122 bp, Homo sapiens
cctgcgaccgcccccgggctcccggcccgtcagccagccctgctgccgacccacgcgctacgaagcggtctccttcatggacgtcaacagcacctggagaaccgtggaccgcctctccgcca

SEQ ID NO: 421074 - DNA, 122 bp, Homo sapiens
ccccccgaaggaatgtggactttgccgaaggatggcaggaagccgctgtcaggaagcgatcgtcgtttctggaggagagcgtgaagagctggggtcagtggccccgctcagaggaactctag

SEQ ID NO: 421075 - DNA, 122 bp, Homo sapiens
gctccccagcctcccagaacggcccccgcccccgcctccctcccagcaaacgtgctcagacgcctctgggcttgttgtggtctcgccagtctgcggacaagcgctccaaactcaatggacaa

SEQ ID NO: 421076 - DNA, 122 bp, Homo sapiens
gcttcgggaccgactctttggcaccgcagcctaaagggctgcaggggtcggttctgcgcacgctcagtggcgcctttgagaccccgtccgccaatagtcaacatggggccgcagcgcaggcg

SEQ ID NO: 421077 - DNA, 122 bp, Homo sapiens
gaaaaaaaactttccaagggcacagaagaccatactgtgggtgcccctcgccgcccccagcgtccctgccgcactctggagctgctctgggaacacacacgtttgtgcactctaagcgtcag

SEQ ID NO: 421078 - DNA, 122 bp, Homo sapiens
cctttttcccatcattttcacaattttattccatgccctggagtcagggttctgacagggcgtgctaaggtcagagtcagaagctgagcggaactctcagagctggacggcgagctgcacgg

SEQ ID NO: 421079 - DNA, 122 bp, Homo sapiens
gctgagaagctatgatgaagggcaaggtttgccaaatgttcatggggacaagttctccagcgacactggtttaaaataggaattccgaaaaggtctgattaatgagtttggggtggaaccca

SEQ ID NO: 421080 - DNA, 122 bp, Homo sapiens
tgcctcttaatgccggtaggagcagaagtgcttttcctaagggggccgggttttcctagccggtgtagtgtgtccatgggaatccagggtgtccgtcccatggaccttcagcgctagggtcc

SEQ ID NO: 421081 - DNA, 122 bp, Homo sapiens
gctgcgccccgggggcgcggaaggtgcggggagagggggtgaggaaggacagtgaggggccggtcctgggcccggaggactcagcagccgccttggcagcaaatcctgtaggctgtcccctg

SEQ ID NO: 421082 - DNA, 122 bp, Homo sapiens
cgagctccacttcacatccttgaggctgcagcccagcgagggcgccgggtccatcttccccgaagcctcctgtcccgcgctcccccgccgccgccaccggcaccacccgcgcctcggcggcc

SEQ ID NO: 421083 - DNA, 122 bp, Homo sapiens
gaggtcagcctacagctcttgcgggagaaagacacgccggcccccttggatgccatccttcgtctctcatgggcagccagtggtcctggaggctgaggcagacacagagcctgtctactcag

SEQ ID NO: 421084 - DNA, 122 bp, Homo sapiens
gttcccctctggagccgaggcgcggagggtcgctcctgcagggtgctgggataggacactcggggaagggtgaaagccacatggggcctgtctcgagcagctgtggggatgggagacctgcc

SEQ ID NO: 421085 - DNA, 122 bp, Homo sapiens
cagaggtctaggagggctcccgcagaggccctgcacccgagctggtccagagagatcttgcggatgcggcaagtggcggtgacgtgcggccgcgggaatgacgttggccgcggccccgcctc

SEQ ID NO: 421086 - DNA, 122 bp, Homo sapiens
ggaaaaatactgaactgaaaatgaaactcaacctgcaccacattaggcagctcagctctacgcatcagaccgtagctccaagaagagcatcaaagtcagaaagagggtgggaaagcaatgat

SEQ ID NO: 421087 - DNA, 122 bp, Homo sapiens
accctgagagacacactggacgctgcgcgcaagagccctgtgcatatggactccgattgacgccatcagattcgcccacaagccctgtgcgtatgggctccaatcgatgccatcagattcgc

SEQ ID NO: 421088 - DNA, 122 bp, Homo sapiens
gtgtgtggggtcctggctctggcccctggcacaaatgcaggggacggggcccgggtcacccgcctgtctgtctctcgctggcaccgccgccggggcgtgggcaggaggctgctggccttcgc

SEQ ID NO: 421089 - DNA, 122 bp, Homo sapiens
cggaggcctcctagaatttctggggccgccactgctctgggggaatcgtgggacacagtccggggaaagaacaaagctaggcgccaggaagggccgaccagcccggacgggtcagccgggtc

SEQ ID NO: 421090 - DNA, 122 bp, Homo sapiens
gaatttttttttaaatgatgagaagccgcaccgggtcggggcaggcttccgggaggcgggcgcggggccccggggccgggtcgcgttggtcccgcgccgggggcggggcgcggcgtgggctg

SEQ ID NO: 421091 - DNA, 122 bp, Homo sapiens
acatcctgacatctccctttcccaggagacctggctaggacagtccctaggggacagggtcgagacctcatcctgtctccttccctcacctgggcaaggatgagtcccacaggggcaggggt

SEQ ID NO: 421092 - DNA, 122 bp, Homo sapiens
actgaggcttgcatcaaattagacaaatagttaaaagaagaggcaaagcgatctctgtggcgtctctctttggaatcacccgatagcccaattagcagctctgaagctgaggctctagtgcc

SEQ ID NO: 421093 - DNA, 122 bp, Homo sapiens
agccgggtgacacccagacccccagctcctgcacacccctgggcaaccctgctgtgcccccggggtgctgagcgtggctttgccagtgtgtcagaggcatcaattgctaaaacaattcggca

SEQ ID NO: 421094 - DNA, 122 bp, Homo sapiens
tgatttaattctctgctagaaatatgcatagccatgctctttccatacagcctaacagctcgtaaaatgcacctgccattaaaatgatttgcgtgacccatttggcggctgctgagctgttt

SEQ ID NO: 421095 - DNA, 122 bp, Homo sapiens
aaaccaggtcgccgcggtctgcagcagaacgccaggttccagaggacggcaggcggagggcggagggagaaaggcgcgcgaaggcgcggaggaggcgtcggctgcggcgcccactcccccta

SEQ ID NO: 421096 - DNA, 122 bp, Homo sapiens
cgatctcacatcttgatcctactgcgggtgcgtaaagaaaacggagacgcagatgtgattcgtaagtgaaggctgtagtcttggcgcacttggcaaaggctttttatttcatacattatttg

SEQ ID NO: 421097 - DNA, 122 bp, Homo sapiens
tgctgacgccaacgttcttcttggtttccacgtgtctgttctaaaatcccctcagcaagacggtggattctgagcagaggcagaaagcaaaggcctcctgcagccagaggggatccgcaccc

SEQ ID NO: 421098 - DNA, 122 bp, Homo sapiens
ctccttgactaagctggttccttgtgtcaaagcacctcatgccttccattaaagagaggccgtgtccaccctgagctggctgattttggggagggaggatggcagggaggcagcccaagatg

SEQ ID NO: 421099 - DNA, 122 bp, Homo sapiens
ccagcctggggaacagagcaagatccccatctctaaaaaataattaaaaaataggccgggcgcggcagctcatgcctgtaattcctgcactttgggaggctgaggcaggcagattgcttgat

SEQ ID NO: 421100 - DNA, 122 bp, Homo sapiens
cccgctgcatgggtctccagggagctcgctgcccacccggcgctgcaggctcggctccctcgtacactctctggtaggtgctagggacgaccctatgggccagcttgccatgcccagtcccc

SEQ ID NO: 421101 - DNA, 122 bp, Homo sapiens
aaaactcaggcctcagacttggaacaccctcagctggaatcccagcccctcattgtgtaacgttgagcaagtcacctgacctctctgggccttagcttcctcctgagtgtcatgggggtgat

SEQ ID NO: 421102 - DNA, 122 bp, Homo sapiens
atccttgactttggggagctctggctgtgaacacagcccacccatataatccattttgcacggtccgttatatcagaaaaaaaaagcgcaactggacgggggtggggcagaccaacgaaacc

SEQ ID NO: 421103 - DNA, 122 bp, Homo sapiens
cagctggagggagtgactggctctcaggagaacccaggagcactgagctgcggctggggccgggctcctgtggaatcacaggtaattctcccagaagggccgcgttatcttccctttctgaa

SEQ ID NO: 421104 - DNA, 122 bp, Homo sapiens
cctaacatgatgatgtcagatccccggccttattttcttcgcctattggttcctctgcgtcggagggggcggggagatggggcggggccgactgactatgggggtgggaagacaaaggttct

SEQ ID NO: 421105 - DNA, 122 bp, Homo sapiens
gaggcagggccggttgtggctccgtgcgctcacagctctccgtggagctctggcagagcccgcttcactttatgtcacgccgccaccacccccgccacactttccctccctccggggctgcc

SEQ ID NO: 421106 - DNA, 122 bp, Homo sapiens
agcttgaaaggacgttcttccccagagtctctaggtaagagcacagcccagctgacgcctcggtttgcaccttctgaaactgtgagcagagaaccatgttgagctcataggacttcttacct

SEQ ID NO: 421107 - DNA, 122 bp, Homo sapiens
cctggttagtccttcctatcaaggttaaggactatttcaagagctagataaaacagggtacgtgtcttcaacaggtcacagcatatacactctcccatcatttatctgactggcgagttgag

SEQ ID NO: 421108 - DNA, 122 bp, Homo sapiens
ccgccgcgcgtccgccggctacacttcctcttcctctgaactcatgtgcaaaatatgctacgctgcatcttcagggaaagcctcgcggcccctgacagcagccgctggagcggtgggcccgc

SEQ ID NO: 421109 - DNA, 122 bp, Homo sapiens
aggcagggcagtccgaaggcttgggggtgtatcatagggtctcatcggaggtttgttggccgtaagacccctggaattggaactctaaaaacacagaaaggatatgagctcaggagacttga

SEQ ID NO: 421110 - DNA, 122 bp, Homo sapiens
gtggcagcgacggcggcggcagcggagatcccaaggtccgtaagcggggaactggggggtcgcagggcgggccggccaagaggcttgggagctgggcgttgctgggggtggagggatagaag

SEQ ID NO: 421111 - DNA, 122 bp, Homo sapiens
aacaaacgggcttaggcaaatttggcaagtcagcggcgcagccgaccgagaactccagagcgagtgctactcagttgccctttgatcctgggttcaggtttgggctccatctctctggcatt

SEQ ID NO: 421112 - DNA, 122 bp, Homo sapiens
ggagcggatcaccggcggtttcatccccgtgcactcttgtctgatgaaatataaatagcacgcgatgttttcgagcaaggctagggaagcgtctgtgggtcgtcctcccgcccggcagaggc

SEQ ID NO: 421113 - DNA, 122 bp, Homo sapiens
gctcaaggccatcccgttggggcgctgcgggctcggtgagagcgggggcccgggataggtcggggggtggggtgggagaagggggaccgacgggcggcggcggccaggcccgcgccgcagct

SEQ ID NO: 421114 - DNA, 122 bp, Homo sapiens
ggcagaaccagccaatccctgcacggatagcgcccggaagaggctagaagctggattcagcgtgtccgcgacctcacctttaggtcctgtgaggtcggtggaatcctggggtcctccaaatc

SEQ ID NO: 421115 - DNA, 122 bp, Homo sapiens
gttcatcttctctctttcttcacgtcttgttggttactgctacctggcttccaactgttgcgctgggcagtctgacaacacgaagggaccctccaaagtccctctcatcatattctcttggg

SEQ ID NO: 421116 - DNA, 122 bp, Homo sapiens
tagttatatgaagcccaaatttacaactatacactaagatgatcaactcaagattctctgcgtaggttattcttcaatcaatgtattgaactttgaattaaataacatggccaagtatggtg

SEQ ID NO: 421117 - DNA, 122 bp, Homo sapiens
cattcatgaagacgttacaagcccggaagaattacacaagcactgagctgactgttgagccggaggagccctcagacagcagtggcatcaacttgtcaggctttgggagtgagcagctagac

SEQ ID NO: 421118 - DNA, 122 bp, Homo sapiens
gggtgggaggagggagcgcaagcgttttctagcgacccgggttttcttcatgaactcctccgagtaaactttatcccggcgagagagcggcggagatcctcgactcccgcccgccctcaacc

SEQ ID NO: 421119 - DNA, 122 bp, Homo sapiens
ggccgccgcttcatccaagaccggccgcaaaccagcaagatggcgtccggccggcagtgacgtcacagggacccacgccccgcccctcccgctgcaagccctgggaaaacgcgcggccgaga

SEQ ID NO: 421120 - DNA, 122 bp, Homo sapiens
aaacgctatctgggctaggccaaatgtggctcgcagcgggtccgggagcggggcacctaccggcagctcccgcagcggaggcgcgtcccccgggcgccgaggcagcgcccgcggctggaggg

SEQ ID NO: 421121 - DNA, 122 bp, Homo sapiens
tttttgttattgttaaattaacttctcgagaagagaaagggggggaagctgctaggtgggcgatggccaggggctgaggactcaggctccagccttttggcaaggacacggcggcccaagga

SEQ ID NO: 421122 - DNA, 122 bp, Homo sapiens
tccgcccctcggttctccaacgcccgggagtcgctggtgtccgcaaggagcgtgatgaagcggtggatgagtccgtccagctgcagggaggggcgctctgaggccggggccgctggctcccc

SEQ ID NO: 421123 - DNA, 122 bp, Homo sapiens
ccctggcttacctgttgttgtccctggcttacctggagtccctggctccgggcttccctccgcgtgctgctgctcctccaggtcccccccggtggctctcgcgcgcccccaggcggccacgt

SEQ ID NO: 421124 - DNA, 122 bp, Homo sapiens
aactgcagctcttttcggacagtgatcccctcgaaaaacaaacaaaaaactgaagcccagcggctggagcaaggggcctggaaaggcgttgagcgagggccggggcgcgagggctccggggc

SEQ ID NO: 421125 - DNA, 122 bp, Homo sapiens
tcagtgaaactcagaggatttgctggaacatctggtgactccacactcattgataactttcgactattgtcggtttgtagacaaatcccaaatctgtcctctccaaaatgtcagcaccaaaa

SEQ ID NO: 421126 - DNA, 122 bp, Homo sapiens
gctgggaaagaccttcatcggggcggcgaagcccgcagtgacagagggtcttagcgtacccgttcacatgaattgtaaaaacgcacttacatgccattcgttctttcatttgtttagtagaa

SEQ ID NO: 421127 - DNA, 122 bp, Homo sapiens
aaactgagtttctgcaaggtgatcgctggtgactcacagaacacacagctgcagtgcgaccggcggtcctctgcccacagatgcacttattcctaagggaaggcgggatctgggagccaggg

SEQ ID NO: 421128 - DNA, 122 bp, Homo sapiens
actcccctcggtgcctgtgtctgtgcctgcctctgaccctcgctcctgctcctccggccccgctggcccctacttgctctccaagaagggagccctgcagtccagagccgctcagagacacc

SEQ ID NO: 421129 - DNA, 122 bp, Homo sapiens
cccagaagcctcaggagatggaaaatctttcatttcttaatgagttaactgggagttttacgtcgtcctaggtgttaagcacatgagaaatatgtagcatcactattttggacctcatgtgt

SEQ ID NO: 421130 - DNA, 122 bp, Homo sapiens
tttttatttgttttctttaaacatcagaagattctctcttcccctgccttacctcctccccgggaagtgggtagattctcagaaagagaggcaacagtgagccattcaggcctgcatgttta

SEQ ID NO: 421131 - DNA, 122 bp, Homo sapiens
tcactccggggccctgggctgatgcctccattaatattactgcattcactgtgaagtgtacgtgtcagcatcagagaacaagaactacggcttcactgccaggagtgtgaagaaccatcccc

SEQ ID NO: 421132 - DNA, 122 bp, Homo sapiens
tcaccacaccactgccccaaggaccttacaggccctccctgttaataaacagctctaacacggccaggctgggctctgggattctgaccagtctctgttttgtttgtttttttaaaactaat

SEQ ID NO: 421133 - DNA, 122 bp, Homo sapiens
aaagattcctctgccctcagagactaacaaaaatacggtgtcctgcgtttcgcagaaggacgggaggcgtcccagagctctcccgggagaaaaacccagggagaagtggtggtaggaggcgc

SEQ ID NO: 421134 - DNA, 122 bp, Homo sapiens
atttctcaccactggtgccagatggagggtgtcgtcatactgaagtcaggcctctgcccacgtgtcatacagttttttttgtctgtctcttctattttggcagttagacattaagaggggat

SEQ ID NO: 421135 - DNA, 122 bp, Homo sapiens
gagttttggggcaggagttctaccccaagggatgccatgtcctccccagctgggtggggacgtttgtggcagcagcgctgaccacggctgcgggggtggtttctgaacctccactgcacgaa

SEQ ID NO: 421136 - DNA, 122 bp, Homo sapiens
tcggcgatccccgactcccttctttatggcgtcgctcctgtgctgtgggccgaagctggccgcctgcggcatcgtcctcagcgcctggggagtgatcatgttggtgaggggactccccggca

SEQ ID NO: 421137 - DNA, 122 bp, Homo sapiens
cggaagctgttgtcatagttgtagtcaaaacgggcgttgaccatgccttcctcagtgaagcggaagatctgtcggtcaatcaggggcccaatctgacggtagcggatggtgcaggtgaagcc

SEQ ID NO: 421138 - DNA, 122 bp, Homo sapiens
tttagtctttaaaaaaaaaattatctgaaagtgtacctttttcctttttacttttactgacgactttaaggtgatgttggcaacagtccagcccagctgggattttaaactttcccctccct

SEQ ID NO: 421139 - DNA, 122 bp, Homo sapiens
caatgaggacccaggaacactatattggccctaactactcgccgtccaccaagccctaaccgaagaaatttgattccggctgggaaactgtcacaccttcacaacctcaatacccagctttg

SEQ ID NO: 421140 - DNA, 122 bp, Homo sapiens
gccccgactcgactccagaccccgacccgactccgggctcggcctcccgcgacccctgcgcgcactcaccattgtggttgacccaggtcggcttcaggagcttcattgttcggccgccgccg

SEQ ID NO: 421141 - DNA, 122 bp, Homo sapiens
gcttttgtagcagcaccggccggcggccaaagtcgaagaccacccattgctcaaaggtgccgaacgaggcagcctgcacacgcactcccacctggaagtcggcagtggagctgggcacacgg

SEQ ID NO: 421142 - DNA, 122 bp, Homo sapiens
aacggggccccactggacacatgggtagctagaaaacagatgcgcgcccaaagcctccgccggcatgagtttgctccgtgtctgccccacaggacataggaggcacttgtcacgactgccag

SEQ ID NO: 421143 - DNA, 122 bp, Homo sapiens
acctagaaacggaatcatgagaaataaaacaagaaagtatcgttacgcccaagaaaatggcgtggaaatatgtgtttttgttgcatccaaatctacttgctcattgggcagtgggggaaggg

SEQ ID NO: 421144 - DNA, 122 bp, Homo sapiens
ccggcacaatgcaggggacttttcagcttcacattagcacacagggcgctgggcaatgtccgggaatcaacacacacggccctcccggggccaccggccacccccgcctccagacaacccag

SEQ ID NO: 421145 - DNA, 122 bp, Homo sapiens
atcacgttccctccgtattgacgttagtgcatgctcagttgctaattttgaaggcgggtccgcccggtatctagaaattgccgggctggtttgttttgggcggacgtgacgtaacgtcttgg

SEQ ID NO: 421146 - DNA, 122 bp, Homo sapiens
cccagaccaacaggcgaggctgttcgaggaccttgttagccacctcagccccgcccgccgcgagccttctgctggcctcccgttctgcagggaccctccctagccagcccggccgcgtccca

SEQ ID NO: 421147 - DNA, 122 bp, Homo sapiens
acaactttatggccacgtgtgcgtgaaagcccaggaaacgacttcaaacaaaactgcattcggtaatttaaaactaataataattattataataatagatacaaatatcctaaaacatatat

SEQ ID NO: 421148 - DNA, 122 bp, Homo sapiens
acaaatcaggaaagaaaggaggcctaactttgcattcctacagaagggcggcatgctgggcgtcctcgctctgaaatttcctcatggcaggatgtctggcatggaaaagtcctggttggttg

SEQ ID NO: 421149 - DNA, 122 bp, Homo sapiens
ccatccagcaaatggagatcccactgaaacctgcatatgagaggtcatgtgacgagctgtcgccagtgtctccaactcaaggaggttaccccagtgagcccacccgatccaggaccacacca

SEQ ID NO: 421150 - DNA, 122 bp, Homo sapiens
ttgcaccgcacagccgaacccgagtgtgtcaatgggtgtgtgttggaatgaggatggcgacgagaagatccctcccggaataacttaatttggtgagcagtggcgacagtagtaatcccaaa

SEQ ID NO: 421151 - DNA, 122 bp, Homo sapiens
gaaatggagtggaattaaatgtggtgtgtgtgtcccgggtgggggtggtgttagtctgtgcgggtcaagggtatgtgttatccaaatgaggtttgtgggtatccacatgtctacatggtaca

SEQ ID NO: 421152 - DNA, 122 bp, Homo sapiens
cttgaaccagcctgcctgccccgttgggcctctctgctctcccgcggagcccactctgaccgggagtgtcccatggtggcctgagaataccctctgcccacaggtcccgagcagcccggccc

SEQ ID NO: 421153 - DNA, 122 bp, Homo sapiens
gtccgtctgttttattcacagcatatagcagttactcactacccatgtgtggactaaatacgtgatctcacacaaatgcagaagggagaaattatccaccttttacagatgggaaagccaag

SEQ ID NO: 421154 - DNA, 122 bp, Homo sapiens
gaagcttgggcaggacttcccttccctcatctgcaaggcccaggagatgcctgaaaccagcgcctcacagcctgcagtgagcagacatatctcctggtcttttgccaaaagtggattctgac

SEQ ID NO: 421155 - DNA, 122 bp, Homo sapiens
agacagttttcaaaccgcattttaccaaggaacacttagaagacatcttaaccagttggccggggtaaaaaacagatgaacgtggtgtgccctgtctcagccggggagcccacctggtcgtg

SEQ ID NO: 421156 - DNA, 122 bp, Homo sapiens
tgcagacttttaaatagatgaccccttcagatcatctgtgcctacctcctgcccatcaggcgtctacactgtcactcagacacctgtggcatgtggaggagactgccctgtcctgagcctgg

SEQ ID NO: 421157 - DNA, 122 bp, Homo sapiens
ctcggggaccaacttcggcctggccttcgtgtggctgctcctgttcacgccttgcggctacgtgtgctggttccggcctgtctacaaggccttccggtgagcagagctgccgggggccgtct

SEQ ID NO: 421158 - DNA, 122 bp, Homo sapiens
aaaatatgtatcctctataattagttatgacagccatttgtaatgaatttgtcgcaaagacgtaataaaattaactggtggcacggtctttgtatttagtgtgtggttcctaaaaacaaatg

SEQ ID NO: 421159 - DNA, 122 bp, Homo sapiens
ggcccgcccgggaggccgcgcggccgccggcaacttccgcgcccgggccccgccggctgccgcccttcccggaactttccccggtgcgccccgcccacccacaacagcccggccccgccctc

SEQ ID NO: 421160 - DNA, 122 bp, Homo sapiens
ttcggctgaaagttttcctcaacttattgaattattttgtcgcagccgagcacagcggctcgcacataaaactgcagcactttgggaggcaaaggcaagagcatcactttagctcagaagtt

SEQ ID NO: 421161 - DNA, 122 bp, Homo sapiens
acttgcccctgggggagaccccactgccccccaggagtagccaggggtcagccccacccacgcgcacaccaacaccacacaccagtgggctcgggttactgccgcctgccccgggggccctg

SEQ ID NO: 421162 - DNA, 122 bp, Homo sapiens
tgagttgcctgcctggtgccttcccaggggcccacctcccgcgcttacctgtggaagagccgcccgtaacaaccgtctccaccttgacctcggtgacagccaggagcagtgagctgttcccc

SEQ ID NO: 421163 - DNA, 122 bp, Homo sapiens
ctaaatggtggattcaggtctctgcccagctgtttactggctgtaaaaccttagatgagtcgtgtggccttttttagtgaaggcttctcatcacaagatgaagtggtgggtcatgagaaccc

SEQ ID NO: 421164 - DNA, 122 bp, Homo sapiens
ttttgttgtggtgaaaacatttagtatcttttagcaattttgaaatatacaggccaggcacggtggctcgcacctgtattcccagcactttgggaggctgaggtgggaggatcatttgaacc

SEQ ID NO: 421165 - DNA, 122 bp, Homo sapiens
acacgtaccaacatactggctccctagtgctgaccttcccgaccaacactgaggttacggcgacattcacttcattctagtccctcatagtgagagatgacagcatgctggcagccctcgca

SEQ ID NO: 421166 - DNA, 122 bp, Homo sapiens
gggaaccacaaaatctgtgactggaagaacccacagctcctatgagccattctgagtactcgtgatctgccttattcgtgacttttcccatcggtgccctggggagccctgcaggacagctg

SEQ ID NO: 421167 - DNA, 122 bp, Homo sapiens
gacgtgacaggaccgggcctggggaagcgtgtgctggcgtcagggagaagacggcagccgcgacatctggcacctggggctgcagagcctgagcaccccggaccgcgcccggcgagggcggc

SEQ ID NO: 421168 - DNA, 122 bp, Homo sapiens
acagcgccgctgccagctccacgcccgaccctacccatattaggagaacagctctccagacgtgtctccagggccaggctccgcccttaaaagtctgtggaagaggctggctaatcacgttc

SEQ ID NO: 421169 - DNA, 122 bp, Homo sapiens
ccagggccctccggagtcccatggctggaagcatctctcatctagacctgcacggcctctcgtgtttgagttgttaacgtgaggcagagctgacgtacttggggccaaaagccctgagttca

SEQ ID NO: 421170 - DNA, 122 bp, Homo sapiens
ttctgaaagaagtatacacccggtggcacagaaggtgcaaccagcagccagaggtcatctcgccctcccggcaggcttctcctggaaccccggaagccaggcagcgctgaccagcccaaacg

SEQ ID NO: 421171 - DNA, 122 bp, Homo sapiens
cacaaaacttaacattgacaacaataatattatctaatgcacactccacatttgagtgaccgcaattgtcatctgcgaagctttaaaaatatacacattcccgacctctcctctggaagttc

SEQ ID NO: 421172 - DNA, 122 bp, Homo sapiens
agaaaggaatgaaaactcaaagcaatgagggctttagaaaaatcagtgcctggaattcaccgtggtgtggactggatcgagccatttagaatgagggaagcagtctttgcacaaagacagta

SEQ ID NO: 421173 - DNA, 122 bp, Homo sapiens
agttccaatgaatttgagatgcacagaaaaatgttctgatgcttcaaaacagtaggtctgcgagattgcttaagagacctcatcagtctctttctacacaatggggacaaaatgtctccatc

SEQ ID NO: 421174 - DNA, 122 bp, Homo sapiens
gaaggagggcacgtcgtgggcgtgcaccaggctgggcaggagagtccgatgatgagtcagcgctcagcgcttcagtcagtgagagatggggaggcggcaccggcaccgtggctcgggctggg

SEQ ID NO: 421175 - DNA, 122 bp, Homo sapiens
ttccttttcacttccatagcactgtacttgcctggttttcctcctacttttctggcccaacgctttttcctgttcttcactggtgtttactcctcttctgtctaatctctgcatgttactgt

SEQ ID NO: 421176 - DNA, 122 bp, Homo sapiens
aggagaaggaggaggcgggggcccagggtggagagcacgagggcctggcccaggcacggccggcgcctccgccctcgaggagggcgtcacctcagctccccccggcggcggagccggcgggc

SEQ ID NO: 421177 - DNA, 122 bp, Homo sapiens
gaacgcagcagcgtgtcgccatgtcttgtgtggctgggatacgctgcaggggtgtggagtcgccgccccaaagcgggccccgccccctcccggcttgtccctgcagagccccgaggcctcag

SEQ ID NO: 421178 - DNA, 122 bp, Homo sapiens
tgcaaggggtgcaggaacaccacttaccacttcaaaagggcctcgtagaagcaagacctgcggcccaaaaagggttccaataacgtcagcctcttgctgttactgttttctttaattgaact

SEQ ID NO: 421179 - DNA, 122 bp, Homo sapiens
gtcgcttccgcaggtgagcgcagcctttctgctccgtcgggcctggtgtggcagcggcagcgatttaatggtccttaaagcttccgatctcaaaatggaaagactgaagtgtcaagatgact

SEQ ID NO: 421180 - DNA, 122 bp, Homo sapiens
cggccgcggtgtgtctcctcaggtgccgagctggtcacttccatgtacagcatggataaccgtcttctcagggaaggcctccagcccgcattcagccacctgcccagccgccgggcggaggg

SEQ ID NO: 421181 - DNA, 122 bp, Homo sapiens
cggataggaggctagcccctgggaaggtcactctcggggtccccgggcctggcctccgcgcgcccctgccccgccgcctcccgggagccgccgcagtccccactggctgcggacgggcaggc

SEQ ID NO: 421182 - DNA, 122 bp, Homo sapiens
gctggaccaaggagtccccgatgaagacgacttcgggttccttatctttgctgtcagccacgaaccgatggtgctgcgggagcgcgcgagagggagtcaatggcatgcacgctccagggccc

SEQ ID NO: 421183 - DNA, 122 bp, Homo sapiens
cagggacgcagaaagtgtacgcgtcagagagtggaaaggagaaaacaggttctgggacggcgacagagaagggaagtcgtgtcgcccagaaaggctatacaatctccacccttcccgtttgt

SEQ ID NO: 421184 - DNA, 122 bp, Homo sapiens
gctgcgcgtggtgacgcgggaggcatcagggcccatagaactggggctttgtgctttttccggtaaagagctccaggggggaaaacatcacaatataaagaaactctgagcggtgctgggcg

SEQ ID NO: 421185 - DNA, 122 bp, Homo sapiens
agctggaggcccagctgaacgtgctggagaagagctcgcctggccaccgggccacggccccgcagacccagcacgtgtctcctatgcgccaagtggagtccccggccaagaagccagcctca

SEQ ID NO: 421186 - DNA, 122 bp, Homo sapiens
cacccgctcagctccatccaagagggcccggcagtttggagtgaaagcttagcttcccaacgggtaaatgaacctgcctcccattcacagggcggcctctggctggacacctggggcctact

SEQ ID NO: 421187 - DNA, 122 bp, Homo sapiens
gggacgctggtccgcgccctcccgccgcgcgcgccgtctgcacaggccggggaggctcggcgggcgccctccccaacgtggagttatcctgggagcggctccagggcccagccggtgagggc

SEQ ID NO: 421188 - DNA, 122 bp, Homo sapiens
aggtatggggaccccagccccctcccagggtctctttccacccaggacaaggcactaattcgctttgactgatgaagcatctcagaactggaaaggctggcatcacctaggcaactgtattt

SEQ ID NO: 421189 - DNA, 122 bp, Homo sapiens
tgcctccagggcggaccacgacccagcgggccgccggaaggctccttacctggccgcagccggaccctcctcagggaagcaactgcctccagggactccgcggggctgtcgggcggttgccg

SEQ ID NO: 421190 - DNA, 122 bp, Homo sapiens
cgccgggcccagagggcgggggtggggcaggcagtgccgcagtggccgctgctggggagccgattgcaattgcgaggagaagcgtggggttaatccttcaagacgcctgtcaccatcctccc

SEQ ID NO: 421191 - DNA, 122 bp, Homo sapiens
tgcatgcaatgtgcacaacagtcctcacacagcgcgtacgggcgtgcacgcgtccttacacgctgctgtacacagtgcacacacagaaggcgtgcgtacgcacacagttcttcatacgatgc

SEQ ID NO: 421192 - DNA, 122 bp, Homo sapiens
ggcgggcctgccccccgggacgggttctttctgcgcagccccccaggcgctcggcgcccccgcctcctgctcaaggtcaaggaggctgcttccccagcaggaaggcggactggaaaggagct

SEQ ID NO: 421193 - DNA, 122 bp, Homo sapiens
gtgcgttgccgcccacatagtgtgggcagctgaggcgccgcccggatcagagccgcagggcgtctactctgtcactttcccaacctgacttttccggattgctatttcagacggcggttgca

SEQ ID NO: 421194 - DNA, 122 bp, Homo sapiens
aggagaaggaaaaaggggtgtttctggaggaggaggaggaggaggaggaggaggaggaggcggctgctccaggctgtagatgaacctgcccatcattgagcagctggagaacctcaggaaaa

SEQ ID NO: 421195 - DNA, 122 bp, Homo sapiens
gttatttattttcttccctcatatttatttcaaagcaatgatttcatttttccagaagcacgatggtcactcttcattcttcaaagatagctgtttaaaaacatctctttaaacagaaaaca

SEQ ID NO: 421196 - DNA, 122 bp, Homo sapiens
tgcgtgaggcccctgtagggaggtgactatgtttcagcagctgctgccttgtttgtcctgcgtgggtctttggaagatggagctggcttggttcacccctcactggcatgcagaggaaatct

SEQ ID NO: 421197 - DNA, 122 bp, Homo sapiens
atttttttaaatgaagtggtatgattatcattattttgtagatgaggaaacagacatttacgtatgtaactggcttggcttaagttatacacctcataaagtggcagggctaggaacaaact

SEQ ID NO: 421198 - DNA, 122 bp, Homo sapiens
agacaccctgtgccttgcctgcagagggctcccaggtcagcgggaagatcagacccatcacgagatgggcagcccagagtcatagccaggatgtgatgaaggaggcccaggcagaggggtca

SEQ ID NO: 421199 - DNA, 122 bp, Homo sapiens
tagctggacggcaagcaggacagcggctcagagaggcccagccccttccttaagtgctcccgtgggcgggattcaagtcctgatcttgaccatctctctccctgcaggcatcacgtggggca

SEQ ID NO: 421200 - DNA, 122 bp, Homo sapiens
ctgccccctctctgagagccctggccagctcttcgcccctcacctctttgaaactctggacgtatttatggctccacctccccacctccctcccccgtcagtgggatgactgggggagggtt

SEQ ID NO: 421201 - DNA, 122 bp, Homo sapiens
agcctcaaatacagctgtgagggttaaatgagttaacgcatttaaataagccggctgtgccgtaggcattcattcattcaccatttaccgatttcccactatagaccaggcaatgctttgga

SEQ ID NO: 421202 - DNA, 122 bp, Homo sapiens
gggtgtgtccagcccagcccccacacccaccggagagctagcgcggccctgggctcctgtcgggcgctggtcctcacctgttccggccaccctgggcctcgacccggccaaggtggagcccc

SEQ ID NO: 421203 - DNA, 122 bp, Homo sapiens
agggtagaggagtcatcagcatatggattaaattccctattcattatgcatccgtcagagcgtcaggagaaaacttcacacagcatggccccagttcaacaagctggaaaacgctctgagtc

SEQ ID NO: 421204 - DNA, 122 bp, Homo sapiens
gtcgtggcggacagccggcgggcttgggggggggcggtgggcggcgatccacctgggcgacgtggcagccattgccggcgcctcgagacccctccccacccggccgcccacccgccctctcg

SEQ ID NO: 421205 - DNA, 122 bp, Homo sapiens
cgggagctgggcagagtcggcagtgcccgctctgggatgcgcaaggatgtctgaagctgccgtgggccgaggtcggggcacaaggcccagggcacagggcggacccggtgatgaccccaaga

SEQ ID NO: 421206 - DNA, 122 bp, Homo sapiens
gatggtggctgtgggagacccctttagcgtcaaggacatgaaataacagggtttggaacccggctcctttgttgcccactatgttaggccgttcttaaattgctgtaaatacctgagactgg

SEQ ID NO: 421207 - DNA, 122 bp, Homo sapiens
aagccggaggttccaggagcgtctagccctctggatctccggcgtctgaggagataagcgcggtgtgggtcagaccccgaggggtcctcgcatctccgtctggaactcccctcaacgctctc

SEQ ID NO: 421208 - DNA, 122 bp, Homo sapiens
aactccacgacaccagtgccatctcggtaaacatcagcataacatacatcacctgcttcacgcatgtgatcctttaaatcctgccaacttccacttggaggcagtcctgaaaaagtgatttt

SEQ ID NO: 421209 - DNA, 122 bp, Homo sapiens
atgaactcactttccatttccagatacctggaggcagaaacttaaagtgtggacccccagcgtctggatgagaggacacaaaggattaaaaagtcaacatccgcgcagccaggccccccacg

SEQ ID NO: 421210 - DNA, 122 bp, Homo sapiens
ccaatgactccctcctgtaaactggggactcctctggtgcatgggcaggtttgtgttcttcggggatgtggcagatggaatgggcagactgaggacctcacagcagaaatatcaggacatat

SEQ ID NO: 421211 - DNA, 122 bp, Homo sapiens
gccagggagtcctttcttagcagcccttagcgtctgacgccaggcaggccagggccaccccggggacagctgtctccctgagctcagctttccgagtgctattcttagccgggcgagtcggg

SEQ ID NO: 421212 - DNA, 122 bp, Homo sapiens
ggccgaagggctcctcaagtgccgccaaagtgggagcctacgcagaggaggcgcggagagcgagcgagggctgtgaggactgccagcacgctgtcacgactgccagcacgctgtcacctctc

SEQ ID NO: 421213 - DNA, 122 bp, Homo sapiens
cacctgtagtcccagctacttgggaggttgaggcaggaagattgcttgatcctgggaggtcgagggtgcagtaagctgtgttgtgccatggcactccagcctgagtgacaaagcaagaccct

SEQ ID NO: 421214 - DNA, 122 bp, Homo sapiens
ccgtggttgatttgattttctctggtgttttcactagttccggcctttggcgctctatgacgtcaccgaagtgacggagcggaaaagcgcgagaagcggcttggttccttgtacgcagaggc

SEQ ID NO: 421215 - DNA, 122 bp, Homo sapiens
gctgttcccagccagtgactggtcacagcaggcattaaggcaagccattcctgggagacacgggactcctctgatggctaactgtagctggaagactcctccacggccttgctcaactctcc

SEQ ID NO: 421216 - DNA, 122 bp, Homo sapiens
ctcaggtgatctgcccaccttggcctcccaaagtgctaggattacaggcacgagccactgcgcttggccacagccgggcctacatttaagattctccgttggttggtaaacatttagaagta

SEQ ID NO: 421217 - DNA, 122 bp, Homo sapiens
agtctccccaataaaagctttctttgcccccaaacaaaacctcaaatctagaagctagagcgctgggagcgcacagcaaaaggaggccagacagcagcccagggaggggcggcgtgagctca

SEQ ID NO: 421218 - DNA, 122 bp, Homo sapiens
atcagactggggtcccccatgtgccggtgagacaacgctaggtggggtgagcgcctggcccgggcccaggacgggcccaggagtgagggcccacactcctctggcagagaggacaggagggt

SEQ ID NO: 421219 - DNA, 122 bp, Homo sapiens
agccaaatgcctgtgaggtgaactctcttgtcatcctgtatttaagctgcaatagctgtacgtcattgctgcaaaactggtctttctaattatctccttctctgatcattcttgttctatag

SEQ ID NO: 421220 - DNA, 122 bp, Homo sapiens
ggttttttaatgcctttttaaaaattctgttgcttatttcagtttgaacccattttcttacgtcaacacatatccttctaaaacctagtttttacagtgagacatgttccattcctgttaca

SEQ ID NO: 421221 - DNA, 122 bp, Homo sapiens
cgtgcgtgcgcccgcagattcgcttcaggcggtaggtgtggagtacctgggcagctccggcgggaatggtgttggggagaaggagctgtcattcatagtcttctacatatctgaataaagaa

SEQ ID NO: 421222 - DNA, 122 bp, Homo sapiens
aaaagctgggtgaaaggataatagctgactgttgaagagaacatgttggggtttttctcccgctagctgaagaatcaagttctgagggcctgctcagttctgtaagaaagtattagctgtct

SEQ ID NO: 421223 - DNA, 122 bp, Homo sapiens
tatggccatcacctgaaaagttttcttatcttctgtgcttttggtccctggaaacaaatccgcctatgtatgaagctagttgatttccagttgcactatttccagttgcctctgaagttcac

SEQ ID NO: 421224 - DNA, 122 bp, Homo sapiens
tggccttcgagaagggcagcgttctcttcaacatcggtgccctccacacgcagattggggcgcgccaggaccgctcctgcaccgagggtgcccgccgcgctatggaggccttccagagggcc

SEQ ID NO: 421225 - DNA, 122 bp, Homo sapiens
ccgcccgcagcccccaacaccctggccgcccacccgagctgtcccctcgctgggaccccgcgcagcctgcccagtcccccgcccaagacctcgaggccgaaacctcaggtccttggatatct

SEQ ID NO: 421226 - DNA, 122 bp, Homo sapiens
tttggaggtaggacctttaagaggtagttaaggttaaatgcagccatgagggtgggatcccgagccaatagaattagtctcttataagaaacaccagaggagacttcctctccccccccctc

SEQ ID NO: 421227 - DNA, 122 bp, Homo sapiens
tgttcctgcgcagtagcccaccagtgccccgtagtgaaagagctgcggaccctgaatggccgcacatgcgcattgatccccaagagggcggaggtgtaaaggcaattggaccgctcgggcga

SEQ ID NO: 421228 - DNA, 122 bp, Homo sapiens
cgatgacggcccctccggtaaaaatgctgcctcttctccctccgtccccagccatccctccgtcctcagcctgagcacagctccgcttgtacaagtaagtgtggaggattgttccaaagact

SEQ ID NO: 421229 - DNA, 122 bp, Homo sapiens
cccggggcctccccggggcgggggtcgtggcgggcctggggtcaccttgctggctctcggcgcgggccagctcctgcgtgatgaccaggtccatggcgccggcgccctgctcgtccgctctc

SEQ ID NO: 421230 - DNA, 122 bp, Homo sapiens
aacggggaaaagaaggactagtttggtaggcagcttagctaggatttgcccgtgattaagcgtatagagtgtctgccagctgcacttatcagaaaaaaccacagcgccctcctccttctcaa

SEQ ID NO: 421231 - DNA, 122 bp, Homo sapiens
ggacggcaacgagggtccctcaggaggtccaggtggcaccgacggagctcaggccagccccgcccgagggggccggaagccctcgccaccagaggctgcatcccccaggaaggccgtgggca

SEQ ID NO: 421232 - DNA, 122 bp, Homo sapiens
gtctgcattaagtagcttccttacaatcatcccgatggtaaaagtgtcaaatttcgcaaacgcctggacaaggaagtgaaatgatcatctaataacgcagttgactcatctgtcaaataagc

SEQ ID NO: 421233 - DNA, 122 bp, Homo sapiens
ggctggggcgccggatttctttaaaaactccggcttccattggctcgtgcagtccctcctcgttctgcccgaggcgccacggccgccacccgcgcgggcactgcgcctgcgcggagtgagag

SEQ ID NO: 421234 - DNA, 122 bp, Homo sapiens
ggtggtaggcccgactcggggagagtcggaccttggggacctcggggacctcgggcagatcggggaccccgggcagatcactttcagcctggggcctcggtttcctcgcgcgtgtctgggag

SEQ ID NO: 421235 - DNA, 122 bp, Homo sapiens
ggaaagacagaggcaggccctgagccctggccagggtcctctgtgcacactccttcccttcgggcccaccctcccaccgctgccagccccagggggcagggtcccgtctgcactcagcccca

SEQ ID NO: 421236 - DNA, 122 bp, Homo sapiens
cattggctgggcgagacgcttctgggcgggccgcgcacgcctgcatctaggtcttggccccgcccctcccactggaaccccgccccttgggactccggccacgccccaggctctgagcaccg

SEQ ID NO: 421237 - DNA, 122 bp, Homo sapiens
ttttgctggtacaacaatgctacagcaaacatcttatggtttaagatctaatgaagggatcgaatgaggcaggagttcaagaccaccctgggcaacatagcaagaccctccctgtacaaaaa

SEQ ID NO: 421238 - DNA, 122 bp, Homo sapiens
cggggaaaattgagggtaaagaggtcactgccactttatttgagccccaaaggcttttctcgatgctgtttgacattatccaagatacatttttaaatctataacgggagtgaagagttgta

SEQ ID NO: 421239 - DNA, 122 bp, Homo sapiens
tcgccattaccgtcatcacacgccccccacccaacccggcgggcccaccctctgcacccacggcgaaagcactctttctaaaccacgccccggatgtcccgcctccagcggctcggaggtct

SEQ ID NO: 421240 - DNA, 122 bp, Homo sapiens
cctacaaggtccgtctcagccctggccccagctcccagccaggcctaccaggcagcctcccgcagcccccacagccactgcaccgtgagccagaggaggctgtgtgggtggcccgctccagc

SEQ ID NO: 421241 - DNA, 122 bp, Homo sapiens
tcgtcctccagagtcgtgtattgagtgcttactgagcgctgcctcctcatcctcctgagtcgagtattgagtgcttactgagcgctccctcctcatcctcctgagtcgtgtattgagtgctt

SEQ ID NO: 421242 - DNA, 122 bp, Homo sapiens
cccggggcgagggtcttcgcagcggttctgaatagaaagggcgctggggacgggggaggccgtccagagagaagcagcactccccaccctgccagggccaggaccccacttttgtggaaggg

SEQ ID NO: 421243 - DNA, 122 bp, Homo sapiens
gacagcttggggtttcgttacaggcaccaaaaagaaaccccggtccagctggagacgcaccgagcagaagcctcaactcccctcgcccaggcgtgcagcccacccccagcaccggctgagca

SEQ ID NO: 421244 - DNA, 122 bp, Homo sapiens
tcccagcaaaagccatgagtgtagattgtgcgtgagaggaaggatctgatccctgcagaacgccagaatggaaaggcaagaaacagcccaaggtgaggagtaaaacaggcgagaacaaggag

SEQ ID NO: 421245 - DNA, 122 bp, Homo sapiens
cgtagaggctccgcggcccgggttggacggaggagcccaggagccaccgcagccgccgcacgcccagagctccgagcttcgctgccagcccaggacaccggggccctgccgtgggccgaggg

SEQ ID NO: 421246 - DNA, 122 bp, Homo sapiens
gtgctgggggagtgtcatgaactgacgtgcggtgcagccagtgactaggcgttgtcggtgcgcggcggcggggcgaagcctcgcgaggggtgggagcccgcgctgcggggcgtcactcacct

SEQ ID NO: 421247 - DNA, 122 bp, Homo sapiens
tgttatgacgaccaagggcaaacagctgggaagggaacttataagggcattcacggaaagcgctcagtaacccaggccacaagtggggtgaaggaagctgtacaccgcggagtcacagctgg

SEQ ID NO: 421248 - DNA, 122 bp, Homo sapiens
actttggtacattaaaaatccaaatccttatcatgatctgcaaggtgcttatccttttttcgcttcatctctcagcactgtctttcagtctacacccagccacactatccctccctcagttc

SEQ ID NO: 421249 - DNA, 122 bp, Homo sapiens
ggattctgcggaaggtagagaattaagtttgtcctgccgttgtctgtgtttttattacaccgggggccgcggcttatttggtgctgtactttctcatgtattcctaatcatgtcttttcctg

SEQ ID NO: 421250 - DNA, 122 bp, Homo sapiens
cgggagggaagcctcacgagcctgtacacttggaggagccctaagcgttaggatctgctgcgagggctgcctggaacggaggtgagaggatacaagtggcccggggcaagcatagtgaatca

SEQ ID NO: 421251 - DNA, 122 bp, Homo sapiens
tacatgtgcacctagaggctcgcttttggaggcctcgtaaatgtggctgtgtgctgcatacgcagacagggacgggcccggccataggcgtacacgtacgaatgcacacacatgcacacccc

SEQ ID NO: 421252 - DNA, 122 bp, Homo sapiens
tgactgtgacctctctggacctcaatttattcacctctaagtctgaagcaatcacgtcagcgtcatccgacaggatcattccatgagatgagatgaatccaagagctttttagaccaaaatg

SEQ ID NO: 421253 - DNA, 122 bp, Homo sapiens
cctgcggccagcatcctcttctgaggcatctcttgcctcatgactagtgcctgcctctctcgagggatgggtcccctgcagctccagctgtaactgggtgccctggcaaccctctcaccgcc

SEQ ID NO: 421254 - DNA, 122 bp, Homo sapiens
gaagccccctgaggtagaaaggctccagagttctgacctcggggcccttggtatctgcagcgtcgctgcgggcagctccctcactcctgaatcacccccagctgtcgcgtcctggggctgcg

SEQ ID NO: 421255 - DNA, 122 bp, Homo sapiens
tgctaaacatcctaccctgcagaagacagccgcctcaacacaaaattatctagcacaaaacgccagtagctcaaggttgagaaatgctgaactagaggtgtgggcttattatcaggatagca

SEQ ID NO: 421256 - DNA, 122 bp, Homo sapiens
agctgccttctatttaagcaactggcctccttagaggccactccttggccatgccaggcgcgggcatctggccagcatgctgctctgcacggctcgcctggtcggcctgcagcttctcattt

SEQ ID NO: 421257 - DNA, 122 bp, Homo sapiens
gctacagggcgggagaagcggagggcggagtgctacggaccggggccgcagtcaggccagcgccggcccgggagggagaccggaagcggccatgttcccccagagtgcaccgcgcctgtagg

SEQ ID NO: 421258 - DNA, 122 bp, Homo sapiens
agaatagtttcagaaaacaaaggagtgatttaggagactatagaatattaagaataaagtcgacatgcagaaaaggagatgtatagctccatcttagacatttttcgtgtgtgtgtgtgtgt

SEQ ID NO: 421259 - DNA, 122 bp, Homo sapiens
gtcgaggacagccacatcgccttcagctttctcgcgccgctcgctcgcgccccccgctcgcgcccccagtccagctgccgctgcaggccctgcgcgcagtcttcgccttgtccgcctgctgc

SEQ ID NO: 421260 - DNA, 122 bp, Homo sapiens
ggggagctcagcacctccagaggcagccacctcaccacagaccaacacaccctgctgcagcgttcttccttgtgggcaatggaaatctgccagcaggaactggtagcagaaaactccccaaa

SEQ ID NO: 421261 - DNA, 122 bp, Homo sapiens
atttaaaatcagactttccccccttctttacagcattctatcaaaatacagtgttttgggcgtccggcttccttctgcaacagacgtgggtcacgctctctctggctctctttctgccgcca

SEQ ID NO: 421262 - DNA, 122 bp, Homo sapiens
ccctggtgccctcccgcggccgcgcctgccgagaaaagcttctctgcctgggagccatcacgccccgccccaggaaacctggaccttgggcttatgcgtttatggtatcaccgcctggagtc

SEQ ID NO: 421263 - DNA, 122 bp, Homo sapiens
aagcgcgcggctggagctgggactctgaggagcagtgcgcgcctccctgagcgccaggcccgcccgaggccgagccgctatatatatagcccggcgccccctcctactcgcccgctcccgcg

SEQ ID NO: 421264 - DNA, 122 bp, Homo sapiens
ggaagttaggacacctggcttcaaatccctaagcagttgtttgctgctccagctaccatgcgggagtgtctagtgggaggattgtgtgggggaccaagaggaggatgaagtcacaaacgccc

SEQ ID NO: 421265 - DNA, 122 bp, Homo sapiens
gttagggactcctgataggaaaattcctaacagagctttgtccagctgacactggacctccgcctggggtcctaagttggagcccggcggaaatatgccccgtgggggaaccaaccgtggca

SEQ ID NO: 421266 - DNA, 122 bp, Homo sapiens
accgcggacgcccgcgctcccgtcccgactgcttgccagccctgcgcctacggagagcgtcgcgtttccctggagacagccccgccccatgcccgctgccactctccggctccgccaatccc

SEQ ID NO: 421267 - DNA, 122 bp, Homo sapiens
gcagtcgccaactggcagcaggcgacgtgtagcagatgtccgggaggacaaaggcaggcacggtccccaccagccgcccgtaattgacggcctttgtcagccatggcagagctgacgctcca

SEQ ID NO: 421268 - DNA, 122 bp, Homo sapiens
cctgcagatcgggagtcgagcaatgcctacccccgcgctcccgcaccagttgggcgctcccggatgatgccctacccctttggatccacgtggtctgcaacctggtgcgagcagcccgggct

SEQ ID NO: 421269 - DNA, 122 bp, Homo sapiens
ctcattctttgctcaattaaagtctgataatttaatttgtctaaagttttccttttaacacgaccaagagtcacagattgcttagtctggagaagctactcttggctctatgcagtccacaa

SEQ ID NO: 421270 - DNA, 122 bp, Homo sapiens
ccaatcagagtttcccaggcacatcgatgcaccgcctccttcgagaaacaaggtaactttcgggttctggttgtctccaaagtcatccgaccaatctcgcaccgcccagagcgggcccttcc

SEQ ID NO: 421271 - DNA, 122 bp, Homo sapiens
aaacctagagcgcttcaaattgcaagcaaggaggccgcgaggcctgacgggatttgtagtcggcgctagacgccggcgcgcacgcgcagccggggccggggcggggcggcggcactgcggtg

SEQ ID NO: 421272 - DNA, 122 bp, Homo sapiens
ctaccgttagggaactctggggacagagcgccccggccgcctgatggccgaggcagggtgcgacccaggacccaggacggcgtcgggaaccataccatggcccggatccccaagaccctaaa

SEQ ID NO: 421273 - DNA, 122 bp, Homo sapiens
cttctgtttatatcaggcgtgttacaccttcacacgcactagggatccaggtaagcccagcggcccgaacgtcattactgactggtgacactgcagtaagtaaaccttttttgccgaacact

SEQ ID NO: 421274 - DNA, 122 bp, Homo sapiens
ctcgatctcctgacctcgtgatccacctgccttggcctcccaaagtgctgggaatacaggcgtgagccatcatgcctggactatgtgttggtttccatgcatgtttcctggcgcatagcccc

SEQ ID NO: 421275 - DNA, 122 bp, Homo sapiens
cccacccacataccaggagttcagaaggagaccaagaacaaatcacttctgtcttcttttcgtgactcaccttgggtgtcttctgatgcactggcctcccagaagctgggcctgctgacctc

SEQ ID NO: 421276 - DNA, 122 bp, Homo sapiens
tcaccatgccctaagggggcatttactatctcactttgtacatgaagaacctgagagtcacgtaggtgaagggccagctcaagtggtgaagacagaatgtgaacctaggaggtcccagtcca

SEQ ID NO: 421277 - DNA, 122 bp, Homo sapiens
atgaatagcaagagagccagctcccatggtgccctccgtctcatgaataactaacaagggcgaggttcctggagcccaaactcaggcctcagccacccttcgctccaagctgaagacaagaa

SEQ ID NO: 421278 - DNA, 122 bp, Homo sapiens
tgtcatgtccatcaatgatccatttagaatatctgatagctggggatgtggcgcgccgcgcggagaacagagctttagcccgcagaacgcccatatgtatgccacccgcctcatccaaatga

SEQ ID NO: 421279 - DNA, 122 bp, Homo sapiens
gcgggcggacgcagggccggacacgccgccgcccgccggcgcgctccacctcgcggcagccggggagaggctgctctgcccctgcccagccttgagccggccccttcgccctcctcctcccc

SEQ ID NO: 421280 - DNA, 122 bp, Homo sapiens
gggtgggggggccttgggaggcgcttcttgccaaatgcagacgaggggtgagcctgccagcgtttgcgacgtccccgcacgacaggctcatactttctgaggatcgtgcatagcataggacg

SEQ ID NO: 421281 - DNA, 122 bp, Homo sapiens
ttggggtccaaggctgagggagcgggacggaagtgagcgggtcccgccccttccccttctcgtctccgttggagtcgtctctgccgcggcttcctcggctgccagctctccggcgagccgga

SEQ ID NO: 421282 - DNA, 122 bp, Homo sapiens
taagtcctgcttcattgttgggcacttaggttgttttcaatttagtattatcccagataacgctgctctgttgcttcctaagggtgcattcctagggatggaattttggctgttgcttcagt

SEQ ID NO: 421283 - DNA, 122 bp, Homo sapiens
ctctgcccttaaggagttgtcttccagattggggaataagacaattaatatgaagcagaacgtgatggaacctgtgaaaaactatgagcaagttgctgtagggggttcagaagctgagagta

SEQ ID NO: 421284 - DNA, 122 bp, Homo sapiens
aagggcttcctctaccggcgcaccagctctcgctctgccgcagacacagcttcatgagcacggagccgctgtcagctgaagccagtctgagctcggactcccagcgcctgggagagggcacg

SEQ ID NO: 421285 - DNA, 122 bp, Homo sapiens
tgtgattccccgacgtgggcctgcagcaagagacgggtgctaacagcgtccgagccaatccgtaagcatcagagggacaaagaaatcataaacaagaggcaggatgcaactgcttcaacgca

SEQ ID NO: 421286 - DNA, 122 bp, Homo sapiens
cattcccagcgcctggcagcgtccatcgatgcactcgatatctcggctgaagctgcctggcgctagaaccaggaaggcgctgagcttaaactgaagcaagttcggtggacgccggcggcgcc

SEQ ID NO: 421287 - DNA, 122 bp, Homo sapiens
acgagggaggggggacgagccgggcgttttggctgcagggagataaatgactgcaagccccggcgctgcagcctcctcgagctttgtggaggatcctgcgcccagggttgcctgcagtgcca

SEQ ID NO: 421288 - DNA, 122 bp, Homo sapiens
caggcccagggaacttatttgtatgcagcacaaatttcagaatctgttctcagcctgtgccgagtgaaaaatggcctgcattttcttgatagcccatgtggttgtaaagaataaatggctaa

SEQ ID NO: 421289 - DNA, 122 bp, Homo sapiens
gcaccaggggaggatctaccagggggttctggtggaagggcccacccgggaagcggcgcgcggggaggactcgggggcgccgagaggaactgtccgggaaggggcgcgcgggccgcgggcgg

SEQ ID NO: 421290 - DNA, 122 bp, Homo sapiens
tggggctggcaacctggcgccccccgcgccggcccactcggaccctctccccggctctcccggcttgtgaggattacagctcccatgtccatagtctggcagatctctactatgtgttcaga

SEQ ID NO: 421291 - DNA, 122 bp, Homo sapiens
ggccactgttccagacacagttctcacagttcttgacagactcatagatgtaggagggtacgaggaatacacacagcacacaatggacagccaaacctctatgatgcaactatgttctggga

SEQ ID NO: 421292 - DNA, 122 bp, Homo sapiens
ccgccattttgggaaggtcgacgcccggctgccagcccaagcctccgctggtagacgccccgcggacgccatgacaaagaggtcgcagagggtcaaatacagcctctggattgaagcagtgg

SEQ ID NO: 421293 - DNA, 122 bp, Homo sapiens
tctggttccccgcgcctgggacagagccaggcagccctgggtcggggtggttggtgtcaccgagaggtcggggcgccctgtttctgcctgggacaccagtccgtgtctgggtacagaagaca

SEQ ID NO: 421294 - DNA, 122 bp, Homo sapiens
tggtgactccatattcacccatcagaggaactgctagactgtttagcaagcagctgcccacgttaccttcccaccagccacagatgtgggttccagttcctctacatcctcaccacttgtta

SEQ ID NO: 421295 - DNA, 122 bp, Homo sapiens
agagatggaaacagtagttgccttagacacagaagctttatttttctataaaattattcccgagagaaattttcttttaaatgcccaaagtaaataacttatatcccttcttgaaaacatcc

SEQ ID NO: 421296 - DNA, 122 bp, Homo sapiens
ttccgatttcatcccccgttgcgggccatcgccctaacttggcgaaagatatttcttaaacgacaaaaccaaatgcccagctcccaggtttccaggggaaccaggcacgcctctgtataatg

SEQ ID NO: 421297 - DNA, 122 bp, Homo sapiens
tggaaaaacatttaggaaagcgcctctttcaggaatgcaggtgaaatgaaaccagcatggcgccgaggaaggaagcgtgccccatcagtcctcgatctcaagcgggagctgagagaggagcc

SEQ ID NO: 421298 - DNA, 122 bp, Homo sapiens
ggcatttctatggctttttaaagctcacaaagcacctactcacttcatccccacaacaggcgtaaagaggtagatatttggacctcgtttcacagacaaagaaactaggcccaggaaagtgg

SEQ ID NO: 421299 - DNA, 122 bp, Homo sapiens
agcaagggttgtgaaggaaaaggaggacagggtccaacccagttgccatgcccggggtggcgcactcgccccttgtcagttgctccaacttgtggtttctctgatgcccctgtgaaacagag

SEQ ID NO: 421300 - DNA, 122 bp, Homo sapiens
ccactgaagcaggacaacggacgtctccaatgcaccgcacaggaacgggcccccagagctcgcaccctccgctgtggcatgggcaaggatgagtcaagatcaatgccctctatcctcctcgc

SEQ ID NO: 421301 - DNA, 122 bp, Homo sapiens
atcgccgcaccggagcccgaggacgctcaccgtgccgcctccccgcgggagccccgggagcggcccatcacctctgcagcctcgccaggagaagaaaagttcccacgtctctaccaggagaa

SEQ ID NO: 421302 - DNA, 122 bp, Homo sapiens
ctgctgcttgtgtgttctcctctgtggagataagcctaggatccagaaactctctgagcacggctgtcagctgtgctgtccttcctctttctgtgctgagcctcttcccagggcaggagcaa

SEQ ID NO: 421303 - DNA, 122 bp, Homo sapiens
agccctcgcgcctgggccactcagctcgacctctctccagcgttagcaataggtggagcgcgggccaatcggaagaggccggaggggcggggcgggcagtggccctgggaaggcgggtccgc

SEQ ID NO: 421304 - DNA, 122 bp, Homo sapiens
aatcaaaaaatgctggcagcgtctagaaactggaagaggccaacaatgaagcccctcccccgccctgggccggagcctctgaaaggaatgcagtcctgccaacaccttgattttagccccag

SEQ ID NO: 421305 - DNA, 122 bp, Homo sapiens
tctgacgataggactgaaagcttcctctcgctgtgtgatgtaactgttgtgacatcacagcgtggcggcactggtgtgaaggagccgctgcgccgcctgctgtgggagagtctggcacactc

SEQ ID NO: 421306 - DNA, 122 bp, Homo sapiens
gggttttaaacttggcaaagtaccgtgcaacatctgtaaccacatttgccttctggggatcggaagatgaatcccacattcctggctttgaagctttttgaaactgcagctaggaagaaccg

SEQ ID NO: 421307 - DNA, 122 bp, Homo sapiens
tcttataataaagactagataacactgctttctcataataaagactgttttgtggctgggcgcagcggctcacacctgtaatcccaggactttgggaggccgacgcgggtggatcacctgag

SEQ ID NO: 421308 - DNA, 122 bp, Homo sapiens
ttgataaattgtgtgtatttgtggtgtaccacattatacatatatacacacacacagacacgcattgtagaatagttaaatctgtgtatatctatatagccacagacatacattatagaatg

SEQ ID NO: 421309 - DNA, 122 bp, Homo sapiens
gcccgcggacgccaggagcctcctcgggcagcgagattgctttttttccggtgaggagggcgggggcgggaagcggggttgggcggccggaaggggggagggggcgagaaggcgtcccctgt

SEQ ID NO: 421310 - DNA, 122 bp, Homo sapiens
tttcctccaggaaagataaagtaatcgatagggtcttttaaatagctccgcgtttcctgtcgggagaggagtatcagcgcgcgcaccaaatctgctctggtatgtcaccttatctctcgtcc

SEQ ID NO: 421311 - DNA, 122 bp, Homo sapiens
ctccctccgggttcctgcagcgcagcagcaccgggaaggtctttttggctgtccacgcggcgggggagcagtgtggagtgtacccccatccaatccctgtcccgtgcagggacccccgcaac

SEQ ID NO: 421312 - DNA, 122 bp, Homo sapiens
tctgaccggcaacccaaccccgtggaaactggtatgcccactttgaggaggttgtctgaccgttccagggtcaagctgcatcactgcaaggtggaaacgatggagtgaggcaggcttagagc

SEQ ID NO: 421313 - DNA, 122 bp, Homo sapiens
tgtcgaagagtagcaggcagaacaggatgtggtgcagcagcaggagcagctcgggagcttcgtggggcaggagggccgggctgcgggcccaatgcagcagcgtcacggggaacacaaacatc

SEQ ID NO: 421314 - DNA, 122 bp, Homo sapiens
ctctgagggcttcattgtgtcacttctctttggatggcggacaccgtggccctctgctggcggaggggtgccattgctgcctgccccatctctatccccagggcccatgcagtcactgggtt

SEQ ID NO: 421315 - DNA, 122 bp, Homo sapiens
ccgccctgacccggcctggagctgtggaaccgcccgcgcgacctccagttcccgcccgcccgtgcctggcgctccagacctgggatcctcccggcggctctgcccagctctgcccgccttct

SEQ ID NO: 421316 - DNA, 122 bp, Homo sapiens
atatgaaaaagagtttttttaaatgaagaaatacacatggctcctgccaaagcctgggcacgggagcctggctgggagttcaccctcggcccctttgtgttgccagtttattatcaccagat

SEQ ID NO: 421317 - DNA, 122 bp, Homo sapiens
ccctctccattctggcgcccactaatggccttgccctgcctggcgtccaccgccggggatcgcgggcctcacgtgcccaaatcggacacctcgctgctgcctccgctacgagcctgtggcga

SEQ ID NO: 421318 - DNA, 122 bp, Homo sapiens
cttccttctctccaaaagcgctgggctgctgggcgccagaatttaccttttccatcttagcggcctgattagcatcgccgccgcttgtggggctggattctaccctctcctgcgtcccccac

SEQ ID NO: 421319 - DNA, 122 bp, Homo sapiens
aatagatccgaaacgtaagttacttaggataatgacagtgcctcttccataggatcactgcgagagggaaatagatccgaaaggtgaattacttaggataatgacagtgcctcttccatagg

SEQ ID NO: 421320 - DNA, 122 bp, Homo sapiens
cttaaaactgtgtcgtccttaggtgtttgtggggcacctgctgagtgcctggcttcaggccgggcattgtgggcacagaaagcccccagggtatttactctctggttctggagaccctgggg

SEQ ID NO: 421321 - DNA, 122 bp, Homo sapiens
ggaacgctggggactccgctcttgtggggcagtggggctgggtgggagcaaccccccatccgggtggctgtggccgaggcccttatgagagggtggtaggtgtgtctccacagtgggggacc

SEQ ID NO: 421322 - DNA, 122 bp, Homo sapiens
gcagctcagaaagtccacaaggccctgtggggaagaggccagcttcaagaacttccacaacgggagttcctgggaggaggaccctgaggccgacctggtccctgcatagccttgagaaggtg

SEQ ID NO: 421323 - DNA, 122 bp, Homo sapiens
gaatggatgccttagctttctaactttcacaggtaagtaaatatatatccatgttcatagcggtgggaacagaaacaataggtgtttaaaaatactagattgaggccgggcgcggtggctca

SEQ ID NO: 421324 - DNA, 122 bp, Homo sapiens
ggtgaaggtcctggaacgtgaggttgcggatgggccggcgctctgagcaggtctgcacctcgcccctcgagctgcggtaccacgtcttgtagaaggtcacatcgtgccctttgtccacaggg

SEQ ID NO: 421325 - DNA, 122 bp, Homo sapiens
gagggataagacccctcgttttacattggttgtgactcttctggttactgaatctgctggcggtggaggtggtcgaactttctgagaaggcggcctggctaccaagcacttctgatatcgta

SEQ ID NO: 421326 - DNA, 122 bp, Homo sapiens
acttattgccttcagccgccgccaaccgtcagccatcgcctacctccaaggccccttctccgggcactgttgggtctgctgatcccttcgccacagctcccgaagccactcttttactgggc

SEQ ID NO: 421327 - DNA, 122 bp, Homo sapiens
gctctggccctcccgatatggctctgacttcaatgtgcccattacttgtccccttgctgacggcctcctcacaattccacttactcaccaagttctctcctgcctcaggacctttgcacttg

SEQ ID NO: 421328 - DNA, 122 bp, Homo sapiens
ctttacctgaaagtctcccacaggtatacagcttcaggagtctcgaatcccacaggtatacggcttcaggagtctcgaatcccacgggcgtacggcttcaggagtctcgaatcccacgggcg

SEQ ID NO: 421329 - DNA, 122 bp, Homo sapiens
actgtcccactaattctccagcaaaatgcacccttaccacctgcacacgaacttccattccgtggttggagggtggccaaaaagctgctccatggccttagactctcccccaccaccatgtg

SEQ ID NO: 421330 - DNA, 122 bp, Homo sapiens
ctagggaggctgagtcaggagaatcacttgaacccaagaggtggaggttgcagtgagctgcgatcatgccactccactctggcctgggtgacagagaagacctgtctcagaaaaaaaaaaaa

SEQ ID NO: 421331 - DNA, 122 bp, Homo sapiens
ttcttgcaggaaacctgttgccaacatagtcggaagccaaggtaaacacaactcagttcccggaaacaaagctacgatttggaaggatggtgtaaattctaaagcgtagatccttgaaaagc

SEQ ID NO: 421332 - DNA, 122 bp, Homo sapiens
gaggcggggtctcccttcgggttccttcgggcacaatcgggagcttgagttctccggaagcggggccacaaacttcggctcacttcggcaatagtcgagaacggagagctgaggccagtgtg

SEQ ID NO: 421333 - DNA, 122 bp, Homo sapiens
ttgtattatcttccctgttctgattaatgctttctgactccactctgtgaggaaatgagccgagctaggacctacgggcaggaggcgctggacaccaatccggctgggcagcaaaatgcagt

SEQ ID NO: 421334 - DNA, 122 bp, Homo sapiens
actgaagacaggatgcggccacgcccaccccacctgggcacacacacggaagacaggatgcggccacatccaccccacctgggcacacatggaagacaggatgcggccacacccaccctacg

SEQ ID NO: 421335 - DNA, 122 bp, Homo sapiens
tcttgtgagctgctggaacacatcagttgcacgtacgttctcttgctggtgcagcccatccggtcagaatctgtcgctcacagtagctgttactgaatactgtctgcttcttagctgaaacc

SEQ ID NO: 421336 - DNA, 122 bp, Homo sapiens
tctctacctactttgtcgcacattacgcaataatgtacagaaattgctccaggcctcccacgtgacaatgcctccgcctgccacgcacccagccaatcagagcacttggcacctgcgacggc

SEQ ID NO: 421337 - DNA, 122 bp, Homo sapiens
ttaagctaccagggtaggtggaggggcaaaaccaggtggaggctgggtcaggcgggtccacgtgctggctctccacatgcaaggcaaacaatggctcttgtgggggttgagggtggttctct

SEQ ID NO: 421338 - DNA, 122 bp, Homo sapiens
gcccccctgcagaccccagagctgctgccttccccaggtgtgcaggaggtttgtaggagacggggccccttggctgcccaagctgccacccctcccccacccgcccagtggcagttgcgtcc

SEQ ID NO: 421339 - DNA, 122 bp, Homo sapiens
cctattgtagcacaacatcatttttctttggagaatttagttatctcccttctaccaaagcgttcctctgagctcactgttctgaataatgtctgccccactcttgctaatggtctaaaata

SEQ ID NO: 421340 - DNA, 122 bp, Homo sapiens
ccgaagcgagctccggggatgagctcgggggcggctgggtgcgagctcctgcctctgaggcgaaggcggcggcggcggcagcagaggcggcggcgaggcccccatgggccggcggcgggcct

SEQ ID NO: 421341 - DNA, 122 bp, Homo sapiens
actctatgagtgtgtatgtatttatgtgtgtctgcgtgtggacttgcaagagtgtgtgtccgagtgcacatgagtggacgtgtaaggtaggacagcaatggatgcagtctctctctctcttt

SEQ ID NO: 421342 - DNA, 122 bp, Homo sapiens
gagggaagtgaagatttatttattcttgccctgtctctatgggtgcaatgaagagcctttcgaaacgccaataagacttcggtacactgagagacactacttgaaaatactcaatttcgatt

SEQ ID NO: 421343 - DNA, 122 bp, Homo sapiens
cgtccggagcggccgcgagggtctgctcagcccagccccgcggtcggccctgggcgagaccgctcccacggctcagttcacgttccgaaaggtccggaatccaccgggtccccgaggagggg

SEQ ID NO: 421344 - DNA, 122 bp, Homo sapiens
aaataaacccagagccctaggaggggcgctccacgaggcccgttgtacagaaggagaaaccgacgccagaaaggcacgtggctccctcggccaccgccagccctggtgcctggagaagggaa

SEQ ID NO: 421345 - DNA, 122 bp, Homo sapiens
cctcagcaggagcctgactcagttcagcctcaggggcctcctccaggtcggagcacaggtcgtccccaggacccggggggctgggtattggggatcccggagcgccccccgcaggccagcca

SEQ ID NO: 421346 - DNA, 122 bp, Homo sapiens
tctgcacatagtacatgagcacaggtgcagtgtcctttcgccgccatcctctaatgacaacgctttgttgagaaaacgagggcgttagagaaaggaagagtgaaggacagagggctctgctg

SEQ ID NO: 421347 - DNA, 122 bp, Homo sapiens
ctctgtcacccagactggagggcagtggctttgaccatggcttactgcaattccacctctcgggttcaagtgactctcatgcctcagcctcccaagtagctgggattacaggcgtgcaccac

SEQ ID NO: 421348 - DNA, 122 bp, Homo sapiens
acacgccctctcccaaggcggcgtctctgggagccctggcgttccctgggcccccgggaccgagagcttacccgcgtgggactgaactcgcccacgacccccgacaccaggcaagagaggtt

SEQ ID NO: 421349 - DNA, 122 bp, Homo sapiens
ctacacctagaatggtagtttgtgccggatcccgaagcctcagctccccaggccatgctgcggggccccgcccagatgtgtgggaacgcggctgccgccggtgccaaaagacctacgtcctc

SEQ ID NO: 421350 - DNA, 122 bp, Homo sapiens
cgcagaccccacaggaaggcccaggcgccgggaaacagtctctcccacacaacagagaggcggcccgtctttctccagaaatgggccctgcgacctcccagagtggggatccctcacaatgg

SEQ ID NO: 421351 - DNA, 122 bp, Homo sapiens
cgggggtggccgaaggggtaacgccccagcagtccgaggccagctccgagggtttaacttcgccggaaccggcctgggctcggcatcatcaggtcgcgccgggcaaggactagcccttccgg

SEQ ID NO: 421352 - DNA, 122 bp, Homo sapiens
ctacagcaacacctgcaggtcaagagcctgaactgcaggtgctatgaaagttgacactgacggcccatgcccaggaaaccaacaccaaaccctaccgtgaggtcatccaagaggcaaaccct

SEQ ID NO: 421353 - DNA, 122 bp, Homo sapiens
tgatggtactagtcagccatctcacccacctcctaaaggcgcctgcccagctgtaactgccgctgagtgacctggccttggagggggcacattccacaacgcatgttctcaaatggatgttc

SEQ ID NO: 421354 - DNA, 122 bp, Homo sapiens
ggtgctggtcggtgtggattctgcagaaaggcccatttactctatcgatgtggtgtgttacgtcaatttactcttggatgttaaaacaatcttgcattcctgggataaattccacttgatcg

SEQ ID NO: 421355 - DNA, 122 bp, Homo sapiens
gctttactattttcttgaatggctaaaactcacaaaacacatctagcgtcaaaaactttgcgaccccggaagtaaaaggttaaggaagggggtcacaggagaaggctatttccgtttccgta

SEQ ID NO: 421356 - DNA, 122 bp, Homo sapiens
cgggtcccctcatgcatatgcagcagattgtgatccttactccgtgagcgctgggcgggccgggttgtgttcatgttggtgaacccgcttcgttcttgcccgcgtggatggtccgtggactc

SEQ ID NO: 421357 - DNA, 122 bp, Homo sapiens
aagcttcctggccgggaaaacaaaacagccgtggttgtgggggccataacggatgacgtgcgggttcaggaggtgcccaaactaaaggtgtgtgcgctgcgcatgaccagccgggcccgcag

SEQ ID NO: 421358 - DNA, 122 bp, Homo sapiens
tcccccgcccgggcctcagaagcctgagctttgggtgagctgattccactatcggggtcacgctcggtggaggacacggtcctgcagcctcgcatgcgtcccaagcccccttccagagctgg

SEQ ID NO: 421359 - DNA, 122 bp, Homo sapiens
gacaaccggatatgacgttaaggactgccctgtagtgcccgcggttgccagtcctctatccgacttgatcgtgcagagttggttcgcaccgcccagtgaggggaagctgttttctcgtcgat

SEQ ID NO: 421360 - DNA, 122 bp, Homo sapiens
agggagaggcgcgagcgggaacctgggctgcctgcgacgcttgctggccagctggagttccgggtgggcgtgggcttggcgggccccgcactcggagcagcgggccggccctgccggcccgg

SEQ ID NO: 421361 - DNA, 122 bp, Homo sapiens
gaaattctcatcatcaaataaaagaaacgtcagttcctcagagatcagttgatcttcacacgtaaagtttaaagtaaaaggaggaggaggagaagaaaatgaggaagaggaacaaaagaaat

SEQ ID NO: 421362 - DNA, 122 bp, Homo sapiens
caacgagatggagtggcagcgcaagctccgcagtgaggacccacgggcgggagggtggggcggtctggagctgttcactgatgccctgttataacggcctcctttgcctgcctgtgggtgcc

SEQ ID NO: 421363 - DNA, 122 bp, Homo sapiens
ctcaagaaatcaagtagaggcgaggactgtgttcctccggccagcaggtggcaccatactcgtttggtgcgttccgctggagaattctggcccttccgccgcgccgtaggtttgttgcctca

SEQ ID NO: 421364 - DNA, 122 bp, Homo sapiens
tatttcgcatcaacagctaaattaaaacctggaaaacccttgtcagcccctccttggcctcgcttggtctgtcctcccgcagtccctgcgctgggcgtggtccttcccgaggggcacccctt

SEQ ID NO: 421365 - DNA, 122 bp, Homo sapiens
gatgccaagaacctcgtggaagaaaatgtaaacatttctatactagaagtgaagcaagagcggcagctaggttcacttgaatatgtgtgtaatagttgtcatgagaggaggggttgaaactt

SEQ ID NO: 421366 - DNA, 122 bp, Homo sapiens
gcagcccccggcgcgctagcccccggaccagcctaggccagggcagcggcccggccggcacggcgcccccagcaccccaggacacttgcctctggctccgggacccccacttggggtcctgc

SEQ ID NO: 421367 - DNA, 122 bp, Homo sapiens
cagaaaacatgagactgctggaccagaggcaaaggtatatttctgtgaatccctctaatccgtaaatatcatgaggggatacagaaaagcctaggtgcatgcctgcccaggtagtaggttgt

SEQ ID NO: 421368 - DNA, 122 bp, Homo sapiens
taccttatttctctgattctgtgttttcttaaccataaaatgggttgttgcttcccctcccgcctctttccaaagcatgctggctgtaaaaacgggctgttttgaggaccagataaaataat

SEQ ID NO: 421369 - DNA, 122 bp, Homo sapiens
ccagtaattttaagggaaagccaataataatgtttttaaaaagcctcacgccacccctggcggcatctcctcggtgtactttgctgttcagatccgcctgccttctgtgccagcctaacagc

SEQ ID NO: 421370 - DNA, 122 bp, Homo sapiens
aatctcaagatgtatttatgatgtttctattctttggtctattttgcatttataaaaatgcgaaaagaaagagtttctgacatggaagatagcatcaatacctccccagtgtccacttcact

SEQ ID NO: 421371 - DNA, 122 bp, Homo sapiens
tgtttttatgtcgccgcaacagtgacacccgccgccagcttgtcttgacagcggagatcccgaacgcactgcaatttacagctccagggggcgttcctacaaccccgacaggttagccgagg

SEQ ID NO: 421372 - DNA, 122 bp, Homo sapiens
gcgtctgagttgctttcctggttcgggtctgccctcagatctcaaatcgaattcgctctgcgtatcgaatagggggaggtaaaagagactgaacacagttcaaacctagacataatgctaag

SEQ ID NO: 421373 - DNA, 122 bp, Homo sapiens
ctctcccagctaaggcgacagcgctgccattttggatcctgttcagccacgggaagccggcgtttgcacacattttcggacgtcatattaaagcgcaccggacgccgagacttctgggagat

SEQ ID NO: 421374 - DNA, 122 bp, Homo sapiens
gttgattgtacgggaaaagcctttttaaaacatcttttacgttgcttaaacctacagtttcgaaagcattccgaaggctaaagtgagaaataagcccaggctagggagaggagaaacgaagt

SEQ ID NO: 421375 - DNA, 122 bp, Homo sapiens
tctgagcggctcgggttccgcgctgccggcagggcttgggggcgccttagagccgaaccccgttttttcaggaaagggcgctgcgaccacccccgtcccgggcctcagcccctctgctgcag

SEQ ID NO: 421376 - DNA, 122 bp, Homo sapiens
taacatagacagggtctctcactctgttgccaacgctggtctgaacctcctggactcatgcgatcctcccacttcagcctacaaaagtgctgagattataggcataagccattgtgcccagg

SEQ ID NO: 421377 - DNA, 122 bp, Homo sapiens
cgagatagggggctcgggcctcaagtcttgtccagggcagcccgagacccaggagaatgccgcagctctagcaagagaggttgccaggagcctggcctgtacgcctccccgacagtagagga

SEQ ID NO: 421378 - DNA, 122 bp, Homo sapiens
tttggtgatcaggctggttgctgcctggagcacctgacagaggccgcattcaggctcagccggaaagagtagcatggatgggcgatgtctatccgggtcagggagagggaggctggggtggc

SEQ ID NO: 421379 - DNA, 122 bp, Homo sapiens
gtttgcctcaccgccggggatccccgtgcttaggaaacgccggactgtcatgaggggctgcgaagcaaacctgcccaacctttcccgggggtggacgtcgtctttgttacactggacagcga

SEQ ID NO: 421380 - DNA, 122 bp, Homo sapiens
catcctttccatagcagtctctccccgggtcagtccagggcgctgggaagccttagctctcgctttctacccccactgatccccccacgcgggccgaggctaggacacaggacctcactacc

SEQ ID NO: 421381 - DNA, 122 bp, Homo sapiens
aatggtgagggtgggtgagtgagactgagcaaggagagttgggcgtctcaaagcagtgcacgtgcaccagcatctgtggaaactcctgttccctggaccactgagggatagaattccctggc

SEQ ID NO: 421382 - DNA, 122 bp, Homo sapiens
ctgggcctttgcggagatgtcggcgcctcctggacagcggtgccgccacgaggattcccccgccgctctccaactgctgctataaaagcgctgcaatccttacccgggccccgggaagcgct

SEQ ID NO: 421383 - DNA, 122 bp, Homo sapiens
tatccaccagcttgctaaaaaagggatttaaggtgactcatccatcttgtgtttgttttccgatagccaattgcccttgaatgtgaagctaaaaggtctgggaaacagtaaaggattttgga

SEQ ID NO: 421384 - DNA, 122 bp, Homo sapiens
aagatataactccatcctgcttgcctccggctccctagcctggtgacattggcaggaagacggagtcataaactgtgccggtagagccttgggcagattaaacgaggtaaccgaaatgcgga

SEQ ID NO: 421385 - DNA, 122 bp, Homo sapiens
ccaagaccaagcccaggcagccagcctcacaaactctcccattgccatgccctctatgagcggtctgagctgtctgagctacagtgctacaaaccaagacaggtgtcaccgtaggtccctag

SEQ ID NO: 421386 - DNA, 122 bp, Homo sapiens
ttctggggacgcgagagggagggcagagctgggggcccggaggactggccaaccctggcccgggccagcgggcgcgccccgaccagaaatagccagattcctccagcttcctccgccgccgc

SEQ ID NO: 421387 - DNA, 122 bp, Homo sapiens
cctcaggaatgggatcaatgtccttataaaagaagcttcatggctgggcgtggtggctcacgcctgtaatcccaacactttgggaggctgaggccagtggattgcctgagcccaggagtttg

SEQ ID NO: 421388 - DNA, 122 bp, Homo sapiens
ctggagtctgggcttctgcatcatcaggattgagctctctctgctgctgccaacggatcccgcctgggtgctagtcccgccaccgccgctcaccccacagcggcagaatggcagcaagtgcc

SEQ ID NO: 421389 - DNA, 122 bp, Homo sapiens
gtgctggcggctggcctgccgctgaacatctgtgtcattacccagatctgcacgtcccgccgggccctgacccgcacggccgtgtacaccctaaaccttgctctggctgacctgctatatgc

SEQ ID NO: 421390 - DNA, 122 bp, Homo sapiens
acatccggtgttcgctaatctcgaggagcccggagcagccccgaaaaccgactgttcccccgaatcccgaagagagaactgacactagattgctttcttcggggcaacagtttctctagttg

SEQ ID NO: 421391 - DNA, 122 bp, Homo sapiens
tcgtttagaacctgcgtgggaacagagcacagggtcggagccccaccccgtgcagcccaccggcaccacttggcctggccccctggccctatcacccttgaacctgaggcagaggagttcag

SEQ ID NO: 421392 - DNA, 122 bp, Homo sapiens
cagacaggaaaacaaatctcttttctttgtttgtcctggttgaaaaccaaacacggtagccgtttgatgaaattccagtgtcaggagtgtttgggcagggaagggagggtaaaattgcagct

SEQ ID NO: 421393 - DNA, 122 bp, Homo sapiens
caggcagtggtgactcggcctgggctttattagaaaaggcaccctgaatacacagggctccgtagggaaggtgtctgtactgcggagggttcgggaacacaaacacgatttcccaggcagaa

SEQ ID NO: 421394 - DNA, 122 bp, Homo sapiens
tgagcgcggtgccctgaagcccccgcctccgtggggtaaaagttaccttccagaggaggccgggttttgcaacccaacgcaaaaatgtctcagacctccaagcaagcgcagctttggtctcc

SEQ ID NO: 421395 - DNA, 122 bp, Homo sapiens
gcagcgatggcgggggcgggcggcgcgggaacctgacaccgaggatgaataaatgatgctcgctgactacccgtggccaaagcccgtggccaccgagcgccggctggcaggggcagtgaccg

SEQ ID NO: 421396 - DNA, 122 bp, Homo sapiens
gcactcacagcaaaaggcgacattcacttagaactctccgtgggaaacacctctttgagccgcccccggttcaggcatcactgaacagaagtgtttcatgtctgccgaggctgctttcacat

SEQ ID NO: 421397 - DNA, 122 bp, Homo sapiens
ctaagcactgctcacgtggagcttatctcagagtttcacaaacgacaggtggagaatgaccgaagaccaccaacacacgaagaccgtttttgaggctatacaaatttgaactcacatgactg

SEQ ID NO: 421398 - DNA, 122 bp, Homo sapiens
taatatcaccctctccccccggatattatggaccatatcacagtggggtggacaccgctgcgatgtgggaaataatattatgctctcccactgactcggatattacaaaccgtatcacagcg

SEQ ID NO: 421399 - DNA, 122 bp, Homo sapiens
gggtcagcctccatcaggtgctcaggtttccctgaggactggagtcaggtgccagggaatcgcgtggtctaccttatgacctggtgctccccacacctgtctcctaggcctggggggtgggg

SEQ ID NO: 421400 - DNA, 122 bp, Homo sapiens
acgaagagtggggaggcgaatgtccgattcacggtttcgtggtactacaggatgaaccggcgcagcgacaatgtggtgaccagcgagctgcttgcagtcatggacggggactggacgctaaa

SEQ ID NO: 421401 - DNA, 122 bp, Homo sapiens
cagagtaaaacacaggccgctggaaggcactgttaggatcaccaggatggcctctcacgccgggggtgtttttttcaacggagaagttgtcctgtagtttggatattggggggaggcagggg

SEQ ID NO: 421402 - DNA, 122 bp, Homo sapiens
aagtatcccgaatcctcagcagcccgtcatctactctccatctctaggattcgcttattccggacatcgataaaaatggaatcgacgtgtggcctttcctggtggcttgctgcccggagcgt

SEQ ID NO: 421403 - DNA, 122 bp, Homo sapiens
tcctgctcagaacagcctcacagttgtgcgaagtcagacgtgagcctggggcctgggcagcggtcatcaatccttgtctgagcgacgcagtggggattttcagcttgagatggtctgacagc

SEQ ID NO: 421404 - DNA, 122 bp, Homo sapiens
agattatgcactccggggcttggagcaggagtcaggaggggctcctgtctttccttgaaacgttggatgccgggatcctggaacagtctctgcattcctcctggcgagagccagagcctggg

SEQ ID NO: 421405 - DNA, 122 bp, Homo sapiens
aactaattctatatctcaggggtggaacccagggatcaggatttttttttattacccagccgatgacaatgtatatcgaagttagtttaagaacaaaggatgtgcgcacttgttttaaagta

SEQ ID NO: 421406 - DNA, 122 bp, Homo sapiens
tccagccgagcctgcttttccacggggactgggagatgactcctccacagggaggaccgccggcccccggggagcagcgccctgaggaaggcagagcatgtgggtgtgtacaagggaattca

SEQ ID NO: 421407 - DNA, 122 bp, Homo sapiens
cccctcttccctctcttagcactgatttttgagaaatgtgaattagctacttgtaccccccgcgagccgggggtggcgggcggggacgtctgctcgtcagagtcattcaatgaagatatagc

SEQ ID NO: 421408 - DNA, 122 bp, Homo sapiens
acaggtgcaggtccagccccttcctcgcgtgtcccacgatgccactcagccaaaacatagcgttcgttctctcgtggatctgccgggcccgtgtctgcttttccatttcatttgcttgtagg

SEQ ID NO: 421409 - DNA, 122 bp, Homo sapiens
acaaggtgggaaataggggtctgggtgtagagtcacagagagatgtgcagatggtggggtcggggggtgcaagtgccaccccatctacccacagttaaataggaggccagttcaagttcaca

SEQ ID NO: 421410 - DNA, 122 bp, Homo sapiens
cctgccggtaccagtaccagtacttccaccagcactatctcaagcagcaacaatggcaaacgtgcatctgccagtggccagcagccagctgcatcccgttacctgcctcgtgaggtgcctcc

SEQ ID NO: 421411 - DNA, 122 bp, Homo sapiens
tcccttcctaactagaacatgtcatagcatgacttaggaggaagctctcattttgcactccgcggacaatttaaactgatgaatctgcttgctgaagctcatacagatccctttaggacaaa

SEQ ID NO: 421412 - DNA, 122 bp, Homo sapiens
tgagacctgactccttgctcctaccagcctactatggcttaagacccagggccagggtcccgttgatgtaacagagcagaggaccagcagatgaatggacaccttgaagcagaggagcagca

SEQ ID NO: 421413 - DNA, 122 bp, Homo sapiens
tatttctgttagagggagtagggcattctatactctaaccactagatgtcagtagtatcccgggtagtggtaaaaccaaaggcgtctccacaggtggcacaattgtccttgttaagaatcaa

SEQ ID NO: 421414 - DNA, 122 bp, Homo sapiens
tgaactcctgacctcaggtgatccgcccgcctcggcctcccgaagtgctgggattacaggcgtgagccaccacgcccagccttgtctttgggcattgaaagggccttgatgtttcaggtctc

SEQ ID NO: 421415 - DNA, 122 bp, Homo sapiens
aaggaagccctgcatggtgacccccatgtcacagatctgagccctggctgagttgatcaccgggcctggcgctgtccacccagtctgtgctgaatctatttgaagaaacccatggggtcctg

SEQ ID NO: 421416 - DNA, 122 bp, Homo sapiens
cataggagccctctcctaaatttatccccaggaggtagcctcgtcgcttgaggacagcagcgtcatccatggtgccaggaatgcccagtgcctctgaggctgccctctacagccccgaggcg

SEQ ID NO: 421417 - DNA, 122 bp, Homo sapiens
ggcaggtggcactgttctccacccgagcattaagttctcattttatttatatttaaaaaccgggccttaatcccagccctttggtaggccgaggcgcaaggatcacttaagcccaggagttc

SEQ ID NO: 421418 - DNA, 122 bp, Homo sapiens
acatatgttctttacttaataaacgcaaatttgctcacatttcaagagaattgaaattaccgaatccctaatgaccgttcgcctcacccccatagtcttacagtcttctgatactaaacact

SEQ ID NO: 421419 - DNA, 122 bp, Homo sapiens
gagttctgaagaaaaattactggacacagcttcagctatacttacactgtattgaagtcacgtcatttgtttcaatgtgactgaaacaaaatgttttttgataggaaggaaactggaattct

SEQ ID NO: 421420 - DNA, 122 bp, Homo sapiens
ctataccttttacttttctttcctattaaaggaagatataaataatgcgagctctcaggacggaaggaaccagagaaactcaatgcttagtttgaaagacttaatttcatgggctggcttat

SEQ ID NO: 421421 - DNA, 122 bp, Homo sapiens
acaaatgctgttctccaagtttttgtttaggggctaggaaaggaagagagattgagaatacgaaagctcctctctgagaacagatccagaaaaacagcatgtaataaagatttggctaagcc

SEQ ID NO: 421422 - DNA, 122 bp, Homo sapiens
aaccctggttgacataggggccatcttggcctgcaagccagaggcaggtgtgctgtggtgcgtggtcactttgctgccttgacatgtggttctctcagttgatacagaaaacaccggtacga

SEQ ID NO: 421423 - DNA, 122 bp, Homo sapiens
ttgtaccggaattctgaaaggcaagcggcgaaagccgtgaggagggcgggcctgggagggcgcgggcaacttggaactccagatgctgcgggaaccacctcccaccccgcccgccctgagtg

SEQ ID NO: 421424 - DNA, 122 bp, Homo sapiens
aaagagtcacaacgaggtgttcaaatcttgttctggggctcatcttcattacaaaggcagcgctgcttggaaagagcaagaggggcctccaggcagggcctggttgactttgggcaaatcac

SEQ ID NO: 421425 - DNA, 122 bp, Homo sapiens
ctgtgaggaagttagcagccttccttctgacctgactgcttccgcttctggtggtggcagcgctgtcaagcctcattactggaaagttcatcttgttaaatttccacttagagcaggggatg

SEQ ID NO: 421426 - DNA, 122 bp, Homo sapiens
tatgaggggagtagcagtgtgtgaaaggtgtggagtttccaggtgcttggtttgtgtgtacggtgtgaaggtatatagctaggggttttttttgtttgtttgttttgtttgtttttttgaga

SEQ ID NO: 421427 - DNA, 122 bp, Homo sapiens
gtccaggggaatgggtacggggctctcagactcctggatctgagaaggggccttgggggccggctgtcccaggtctgaggaaggactgcgccgcgagcccgaacttctgggtcctgggggag

SEQ ID NO: 421428 - DNA, 122 bp, Homo sapiens
atctctgcaggcgcgtcggctccctccacccctgctgagatgatgcactgcgaaaacattcgctctccccgggacgcctctcggtggttcagagcagggaaaatgttgcctcaggtttaaaa

SEQ ID NO: 421429 - DNA, 122 bp, Homo sapiens
gcccaagtccgccactttctgctctgtgtctgcccattgccacgatccaggaggactccgcgccgcccggccgcctccgagctcgggccccatgtgaggggcccccccttatcccacctttc

SEQ ID NO: 421430 - DNA, 122 bp, Homo sapiens
tgccgcccaagcagctcgcctggcaggggctttgctttctggacgccttttaaatcaagccgagctgccggcccctggcacacacgaaggtggccccctccctcctcgcaagcccacccgcc

SEQ ID NO: 421431 - DNA, 122 bp, Homo sapiens
gaagccggactcactcacactacggagtcgacgctggactcactcacactacggagtcgacgctggactcactcacactacacccactcatgctacggagtcaacgctggacccactcactc

SEQ ID NO: 421432 - DNA, 122 bp, Homo sapiens
tttcaccaggtgctcggagaaaccgggatttgctctccgcggggcagggagcctgggagccgcgcccatcgcccacccgcccggcctcccctccccgggacccgcgcaccaggacgccgccc

SEQ ID NO: 421433 - DNA, 122 bp, Homo sapiens
ggggaggagcagcttacattttagggcattctccagaattttagaagtaatgaagaagtacgtatgagcagtaaaagtaatatgtagggcacaaatggttagacaaaatgcaagtgcagata

SEQ ID NO: 421434 - DNA, 122 bp, Homo sapiens
gcctgggtcagagcctcactccttttcgtggctgagtcgtgttccatggtggacgggtcgcgccgtgtttgtccctccgtttggtgatgggcacctgggctgcctctgcctttttgctactg

SEQ ID NO: 421435 - DNA, 122 bp, Homo sapiens
gacggggaaacggaggctggggaataccgggcctagccgacgggggcggggcgcagggcgcgcacgctgcgtctcgggcccgggggcgcgcacgccgagcggctgaccgggggcgaggccgg

SEQ ID NO: 421436 - DNA, 122 bp, Homo sapiens
gagtagctaagaccacaggcatgcaccaccacacctgtctaattttaacaatgcattggtcgggtgtggtggctcacacctgtaatccccggtgttggagaccggcctggccaacatggtga

SEQ ID NO: 421437 - DNA, 122 bp, Homo sapiens
gcagcaaaacccttcagaccttgatccaggcctgacacctgtgaaaacaaagggaaaccccgcaggattgggcaggaagggcctcaaactgtgatgcagatttcataaagtctctgccagca

SEQ ID NO: 421438 - DNA, 122 bp, Homo sapiens
aacctcaagaaaaaacaatctgaacaaccacaaccactagaaaccctcagtgcatagttccgcccgcccacttggagtgagctctccttacaggccccgagggccccagctgggtggggggc

SEQ ID NO: 421439 - DNA, 122 bp, Homo sapiens
aatgcatttcctgcaaaaatgccaacttctgtggttcctagtagtttccatccttgaattcggcacttaagatctgtctactcaagctttttacaatcttttatatggtacaaaatacctct

SEQ ID NO: 421440 - DNA, 122 bp, Homo sapiens
cggtgacctcaggactgacgcactgcctcctccgggcgggtgcgcagcctgcgtcaggggcgctgttctccctgtgctcttggaccccgcagttgttttaggaacattcactggagagcgag

SEQ ID NO: 421441 - DNA, 122 bp, Homo sapiens
tactcttcaaattcatatggagccaggcatgtggctagttcagtatttgaggtcaaagttcggtgttggctggtgctttgtgctggcatgacgtacagtgatatttcagaacagtctttcaa

SEQ ID NO: 421442 - DNA, 122 bp, Homo sapiens
tactgggcagggctctactgggtagatagtggaacatactgggcaggcctgtggtgtgtgcgttgggagccatcctgtgacagggactttgggtggcttcaggcacccacctctcgactctg

SEQ ID NO: 421443 - DNA, 122 bp, Homo sapiens
gctttatttccatgctgggtgcccgggaagtatgtacacggggtacgtgccaagcatcctcgcgcgaccccgagagcccggggagcgggggcttgccggccgtcgcactcatttacccggag

SEQ ID NO: 421444 - DNA, 122 bp, Homo sapiens
ccaagtggctgttgtagctccagccatcacctccatatcccaaattatcaggaaggggaacgcataatgagaaagaggcagcccctctatcagaaaagaaatattttcacaaacttccccag

SEQ ID NO: 421445 - DNA, 122 bp, Homo sapiens
acgaagtgcttcgatgttcgcaaaagggtaggcccctcttgcttggggtcctacacccctcggaactggctctgcccctgcctcttccccagcacagtctcccagctaaggctcagacagcc

SEQ ID NO: 421446 - DNA, 122 bp, Homo sapiens
tggcgtcgggccgtggagcttcttctcgctggttctttactcgggaacagctggagaacacgccgagccgccgctgcggagtggaggcggataaagagctctcgtgccgccagcaggcggcc

SEQ ID NO: 421447 - DNA, 122 bp, Homo sapiens
taactacgtttcacttcaagggaatattaaatctcttcagtcgtttcataaatacagcatcgatcgtctggtttggtttttttatagataaagaaacggatgggggaaaggagatctagtgg

SEQ ID NO: 421448 - DNA, 122 bp, Homo sapiens
taaaacaattagcagaatagcctacatttgtatttattttctattccatacttctgcccacgttgttttctctcaaaatccattcctttaaaaaataaatctgatgcagatgtgtatgtgtg

SEQ ID NO: 421449 - DNA, 122 bp, Homo sapiens
aattaacccgctagaaaaatctcttgggagaggcgggagcggcaggggtggccgagtggccgtcgccaaaacgcggccccaccctggcagctgatttccgagatctggcagtaagacgccgc

SEQ ID NO: 421450 - DNA, 122 bp, Homo sapiens
ggctcggctggctggggcgggcgtaaccgtggggcgaggcccgccggtctttctgatttccgcgggcggcgtgggcgctgaggcagccgcggtcaggacctggccgggagtcggggctgctc

SEQ ID NO: 421451 - DNA, 122 bp, Homo sapiens
ggacacagaactggatcgcgaggagcaggccgagctcagattaaccttgacagcggtggacggtggctctccaccccgatctggcaccgtccagatcctcatcttggtcttggacgccaatg

SEQ ID NO: 421452 - DNA, 122 bp, Homo sapiens
acttaacattcctgtcctacaattaagactgcaaacggtggccaaataattgggccacaacgttgaacaaactaatgagtattatatacaaccagttttaaaagactagtagtaggaattaa

SEQ ID NO: 421453 - DNA, 122 bp, Homo sapiens
ggcatgtgtagacattccagtggcaccaaagggcaaccacaggagagtcctgcctcctatcgtttcttaaatccaaatatctctgaaaccatgactaactccaggaatagcagtagcaactg

SEQ ID NO: 421454 - DNA, 122 bp, Homo sapiens
tcatctgtgttggttcttgctgggcttcttcactcttccccactggtctttctctaccctcgtttgtaaatcctgctttgctagacacagcaaaagtctcccggagtcaagggcattagctc

SEQ ID NO: 421455 - DNA, 122 bp, Homo sapiens
gtaaggatctcctggcgggcagtaggacaggtgtccagaaccccggcggacatatgtccgcgaggggctgcagtctccccgttccatccagtcaccccggcgtcagctccccttccggccag

SEQ ID NO: 421456 - DNA, 122 bp, Homo sapiens
agtggctgattactgagcggttcttcctcacctggcttgggccactgtgcacagctgtgccgctggctcagccccgccccctgcggccctctgccgtggcttccccctccctacagagagat

SEQ ID NO: 421457 - DNA, 122 bp, Homo sapiens
gcaggtcacagggccacacaggctgggcctcctggagcagaggacacagagcagtgaagtcgagacctggaaactccggcggcagcgagagacaaaggcccagccacatcccggaagccgcc

SEQ ID NO: 421458 - DNA, 122 bp, Homo sapiens
cggcgacggggctggcggtggctgctggcccgagcatcttcttcccggaggctcccacagcgcctggcccctcccacccaacgaggtcacgcccatgccgggtagggccacgcccttcggcg

SEQ ID NO: 421459 - DNA, 122 bp, Homo sapiens
ccccaacccctctttcttcaagttggaagccacatttatgtagcttgaatattaaagttacgtatgtaaacatttaaaagcaggtgagtttgttaacttcggcaagcttatcagtagacagg

SEQ ID NO: 421460 - DNA, 122 bp, Homo sapiens
aggtattattagaattcctctgcaaggaagattatcccttctccctcatttatttaatcacgtatttatagcagcacgggctctgggctgttttatactttaggttataacttaatgcaatg

SEQ ID NO: 421461 - DNA, 122 bp, Homo sapiens
caggttaatgccagtgggagggcggcgcccaatagtaacttcctttggaggttgtagtaccgcccccagagccaattttccacttccgcttccggcgctgcggcagtccagatcaaaaatgg

SEQ ID NO: 421462 - DNA, 122 bp, Homo sapiens
acatggcagaagtagaactagaatctatgtcttctgaccaagattctttgaactataccacgtactttctggagaggaaggacagaaccacagacatggcagaagaaagagtaagccatgct

SEQ ID NO: 421463 - DNA, 122 bp, Homo sapiens
ttcttcaaacttggagttttaaaagaatccaaggggctacagtgcatgatgaatgtgccccgatttcctggaacttagagtcgatgaacacttaacttatgcaggtaaaggcagaagtgtgt

SEQ ID NO: 421464 - DNA, 122 bp, Homo sapiens
aagcaagcaagaaaacccacgccaacaccttacaacagtaaacagacacgcgcccgtcaccgggtgtacaaacagaaaaggctgggcccctcgctcgcgtctccggtccagcaggcctacag

SEQ ID NO: 421465 - DNA, 122 bp, Homo sapiens
ggctcacactatcccagctattccaacgcagactaaatggcttctggcccttgttaatggcgccatctcagatcagtgccaggggaaccactggtcatttgggggcactggagggagcaggg

SEQ ID NO: 421466 - DNA, 122 bp, Homo sapiens
gttcacctttccggacaccggtgagtaagggaagaggctggctcgccggcagcgagcgcgcgaaacgcaccgcctcctccaggaagcgcgcccagacagtcctcggccgacagcgggcgcct

SEQ ID NO: 421467 - DNA, 122 bp, Homo sapiens
aatattgacccttttgcttgctattctgtcctatccttccttacaattggaggaaaataccgggcacctgtcggtcagttaaaaacgattagcgtggctgccagacttaagactcacgtgtg

SEQ ID NO: 421468 - DNA, 122 bp, Homo sapiens
ttgggaggaagccatgcctggcatggtccatggtacttgctgtggccaggtacttggatccgtgcctctgggagggtctcttctgtgacgccatcacatccaggctctcggaggtggctgca

SEQ ID NO: 421469 - DNA, 122 bp, Homo sapiens
ttgatgggcttatactccaggcgccggacatttggggaggcagcgggggcggtggaggttcggcggattcccaggagcctcaggcccccatggactgttcggaacttcagcatctagggagg

SEQ ID NO: 421470 - DNA, 122 bp, Homo sapiens
gctcagaatcacgcatgcagactgactttcctgtctcccaggatgcagtaaaatggagcccggagctgggagctgagggaaaccaagtctaccgggtccccccaacttgacgaggacctcag

SEQ ID NO: 421471 - DNA, 122 bp, Homo sapiens
ttcacactcggtgattcagcgaggcagccaggacttcatctgcaccactctgggccaatacggcataccgccacctttttaccgagcagcgttgacgcccatctgctcaaataaattaacgt

SEQ ID NO: 421472 - DNA, 122 bp, Homo sapiens
catcctcacctaacggcccttcctattcacatttcccaaatgtccccatatgccgcctgccgctatctgtttcccgccagcattcggtcacggcggttctcagtccacatcccatcggagcc

SEQ ID NO: 421473 - DNA, 122 bp, Homo sapiens
aagagaggcagtgctttaaggcagccatttccaatagaaagaaaaaaaatgtgagccatgcgtgtcatttaaatttttctagtagctgcttaaaggaaaaggaaacaggctggacatggtgg

SEQ ID NO: 421474 - DNA, 122 bp, Homo sapiens
aaaatatctgtgcgaccttggcctctggattgtggactggggacggggtgtccgtggcttcggtagcgagaagcgggtgggaggggcatgattttatagactcaaaagctttctctcctttc

SEQ ID NO: 421475 - DNA, 122 bp, Homo sapiens
cagaagtcaacagggctttccagtagcctttgtcaagctgaagatagtaatatatctgaccgtccaagcagattgagtaactcattaactcagacctcacgtggaatacaaggcatcatgga

SEQ ID NO: 421476 - DNA, 122 bp, Homo sapiens
acacaaattgcgtgccagcaggtaggtttgagcctcaggttgggcacattttactttaagcgcactgttggtggaacttaaggtgactgtaggacttatatatacatacatacatataatat

SEQ ID NO: 421477 - DNA, 122 bp, Homo sapiens
ccgcctgtcgtctgagtggggagcgcctctgccccgcagccccgtctgggatgtgaggagcgtctctgcccagccgcgaccccgtctgggaggtgaggagagtctcttaccggccgccccgt

SEQ ID NO: 421478 - DNA, 122 bp, Homo sapiens
tgtggaaatccctgtgggtaggaggaaaaaacacacaggccccagcgagaattgaactcgcgacccctggtttacaagaccagcgctctaacccctgagctatggagccctcgtctgctttt

SEQ ID NO: 421479 - DNA, 122 bp, Homo sapiens
agtgaaggcagactggttagaagtaaggtcagagaggtagcaggaagggagtagaagtggcgagaacttgtagggccttgtgggtcattgccttgtttgcaatcaaatttaagttttccagg

SEQ ID NO: 421480 - DNA, 122 bp, Homo sapiens
ctcatccgggtttgtgtaaaagcctcccagtagttctcccagcctccaagcttaggccctcgcaatcccttctccaccttacaaagaacacaaacctgatcatgcctcctgccttccctaca

SEQ ID NO: 421481 - DNA, 122 bp, Homo sapiens
ttccctgcaggctggtctgcggagccaggggcactaggctccccacccagcagagggctgcggcccatgggagacaggaggagacccggatgaggaaggaagtgatgagatccctgggagtg

SEQ ID NO: 421482 - DNA, 122 bp, Homo sapiens
catcacttttaatatagacacatacattctaaggggttattggaattattagaggcaggacgtctgggaagggcacatggagttttgaggagtattttgaaacagtaaaggaaatggcatga

SEQ ID NO: 421483 - DNA, 122 bp, Homo sapiens
caagcaactgatggagaccaaatttagatagggtggtcagggaaggcctatccaaagatgcgtgattttagctaagatgtaaagaatgaaaaggaaccagctataggaagaaggtggtgaag

SEQ ID NO: 421484 - DNA, 122 bp, Homo sapiens
tgcggcggaggaagaaggaagcagcggtggaagaaggaagcggtggtggagcggacacagcggacacagcagacacagcagctcaggcggcgccaggttcctgggaatgtcagtgcggcacg

SEQ ID NO: 421485 - DNA, 122 bp, Homo sapiens
gagacaagattaaaagcgagagcgagagagaaaatgcttaaaacaagtcgctgagcagctcggagcctgttaaccagcgcataatgccccatgttaaccatcctgggggatgtcagggcggc

SEQ ID NO: 421486 - DNA, 122 bp, Homo sapiens
cctgccttgctgttacagacggccaatgggaacgtggaggccaaagtggtgtgcttctaccggaggcgggacatctccagcaccctcatcgccctggccgacaagcacgcaagtgagtccgg

SEQ ID NO: 421487 - DNA, 122 bp, Homo sapiens
gatgaacggagctttggatcactcagaccaaccagacccagatgccattaagatgtttgtcggacagatcccccggtcatggtcggaaaaggagctgaaagaactttttgagccttacggag

SEQ ID NO: 421488 - DNA, 122 bp, Homo sapiens
gaccggagggcacacgcatgcgcacgaaggaaacggtaaagcctgaagggaggtgcagagcgcatgctctctcttgcccgagatgccgaggattttgacaaggactccgtcgtcccggatga

SEQ ID NO: 421489 - DNA, 122 bp, Homo sapiens
cagccaggaagccgagggggcggtgagggcagggatggcccagccgtggcctctgccgctcgctggttttcacgtgagactgccgccgggccaacccggagcccaggccgcctctgcatctg

SEQ ID NO: 421490 - DNA, 122 bp, Homo sapiens
ttcagacgtgaaaaggcatgaggtgcggactcacacgaaacacggaagggccttgaaacacgatgccgagtgaaaaagcccgtcactcatgccgtgtattgaacgaaccattccctttttgt

SEQ ID NO: 421491 - DNA, 122 bp, Homo sapiens
gtagggaaagactaaacaggtaggcaagaactaggtcatggggtgccctggaggccatgtcgacctgatgatattcatttgaagaacaatagggagctattggaggctttctccactaacta

SEQ ID NO: 421492 - DNA, 122 bp, Homo sapiens
ggtgaactctccaatcagagatgagcagagaagagaaccatccaatcacagccccaggggcggggcgttgctgtcctccctgcagagcacacccggcctgccctgagtgaccacaggtgtcc

SEQ ID NO: 421493 - DNA, 122 bp, Homo sapiens
gcaggttaatgcccccagcgtggagaacgggaggtccttgaatgaagaatgcttgggggccgagtccaaggaagacaactctgacctccagcatcctccaacagagacgtctgggcccagac

SEQ ID NO: 421494 - DNA, 122 bp, Homo sapiens
tccaactcaattctgacactacctacctggaggtagcatcagaccccacaggcaagtgttcggtgcccaagactgcccccgcttcccatgccaatgaaagctcaggttgtctgactggctgt

SEQ ID NO: 421495 - DNA, 122 bp, Homo sapiens
agtcaggcggctgccccgaagacatgccctggggggcttcacacacaggggctctgagcccgaggaagaggaggatgtctcccaagccatccttttcccagccacaggtaacgagggtgggg

SEQ ID NO: 421496 - DNA, 122 bp, Homo sapiens
tcccttccgggaaagggtcccggacgaccccgcccctgctcccggcgcccaggcggggctcggagctcctgcaggccttctctgggccagactcagtctttgagtcgccttgtgcataaaat

SEQ ID NO: 421497 - DNA, 122 bp, Homo sapiens
ggcctaatttgtgcgggctttcacttcagtagaaaaaatgtgcatgtctcgacatccagtcgaccaggaaatactgactgggtttctgtgatatgctagccactcttacaggggtggagata

SEQ ID NO: 421498 - DNA, 122 bp, Homo sapiens
catccctccaccagcagccagcagctctccctgggcagggagtgtgggcccggccggccccggcattccaccctgcactgtgacagcacaattggttctaaaggacacaggctgacgccttt

SEQ ID NO: 421499 - DNA, 122 bp, Homo sapiens
actattgtcatagtcataacatagtcatagtgcaaatcctgcaaaattttctctcctttccgaggacttctcattctctcccatcctgacataggctccttacctggctcatagtccaactc

SEQ ID NO: 421500 - DNA, 122 bp, Homo sapiens
tgggtgttcccgtgtgagatgcgccaccctcgaaccttgttacgacgtcggcacattgcgcgtctgacatgaagaaaaaaaaaattcagttagtccaccaggcacagtggctaaggcctgta

SEQ ID NO: 421501 - DNA, 122 bp, Homo sapiens
atgactgtgattaacaattttatatagtttcaaatagttggaaggaggatattgaatgttcgcaacacaaataaatgatacatgcttgagatgatggatatacaatatcactatacattata

SEQ ID NO: 421502 - DNA, 122 bp, Homo sapiens
gtcctcagcgcggtgtgggcggcgagccccgcagggctgcaatcgttccggggtgggggccgggacaggcaccgcgggcgcaatctgagcccctgcccacgcgcagcggcctctcagtcccg

SEQ ID NO: 421503 - DNA, 122 bp, Homo sapiens
aagctcagaaacaaagagacagaaggatgaaaaagaagaagagggaggtggtggggacggcgtcatcccgctggaggagctcagctctgggatgatgtggtggctggtggtcaaccgtccgc

SEQ ID NO: 421504 - DNA, 122 bp, Homo sapiens
gcattggcgtgaggctgtggataaagctgtgtcactaagttgatggccatgagtatagtccgtaaatacgcctatgttcagttttcatagattctgccaaaccattttccgagccagcttag

SEQ ID NO: 421505 - DNA, 122 bp, Homo sapiens
atgcacattagcagagggttcgtcccactggccaataagctctggctctgccgcacggatcgctgggagtggtagtccccgtaaaaccaccgaccgcaagcccgccacattttccctccctt

SEQ ID NO: 421506 - DNA, 122 bp, Homo sapiens
ccatattcccctagaaaatggaaagctgggcaggaacatgttccaaaggctaaatcttggcggagatgatgactctaatgaagggagaggtataattcttggtagacagtgtaaataactaa

SEQ ID NO: 421507 - DNA, 122 bp, Homo sapiens
gtctcctccctcccttttaagaagccttcctggaagtcccacaaaataaatctagtctgccggagcagggccacacagccacaccctatctcaaaggaaaagctatctttgaactgagcacg

SEQ ID NO: 421508 - DNA, 122 bp, Homo sapiens
gcggcgcggcgcccggggctgtttcgtgagctggagccagcggctgcccgggcggcggtgcgcgcactctccaggctgagacacgactggctggcacgagttgctcggcaccagctgagctg

SEQ ID NO: 421509 - DNA, 122 bp, Homo sapiens
tattgaatggataatggaataactcatattgctgggaaggggaaggatatacctgggactcggggacaattggaacctggaacaacttgtagttctatcttttgcttttgtttcttattcct

SEQ ID NO: 421510 - DNA, 122 bp, Homo sapiens
tcttcatggggttctgttccctcccactctaatagcctgtgtctcattcccccaggctcccgccctgagggcagattcagcgccctgatctgggtggggcccccaggccagccccctctgaa

SEQ ID NO: 421511 - DNA, 122 bp, Homo sapiens
tcaagccaccctcagggtcctgacagaggacacgaggacgggccgcaccgcagccgcatacgtacggattccccatgagaacttccggtgcacagtactcgatggtcccacaaaaagtataa

SEQ ID NO: 421512 - DNA, 122 bp, Homo sapiens
ctcatctagggagcaagtttttgttttgttttgttttatggttaataaatcctcaggattcgtagagttcgtctgtaagaaaatagccaacatgcttgttccaggggagtggtattaataga

SEQ ID NO: 421513 - DNA, 122 bp, Homo sapiens
tccagccgagacgcagaaggcggggttgagggccggactgccgactgtagggccgactcgcgcgggaccgcgcgccgcccccgcccgccgccaaccactcacttccggcgcaggccgccgcg

SEQ ID NO: 421514 - DNA, 122 bp, Homo sapiens
gcgaatggtcccttccaggcgggtggccatgttgctctaataaagcgggaggggcggcggcgtggggggagcagatgccgctggctgccagcgggacgccggcgagcagagcgcagccgcga

SEQ ID NO: 421515 - DNA, 122 bp, Homo sapiens
agttcaaggaagtattaaaagccatgaatgaaccatctgtccaacctgagaaagtgcacccgcagagggaagagggtctctctcatcctctaagcaccttgaggccgccctcaccatccccc

SEQ ID NO: 421516 - DNA, 122 bp, Homo sapiens
gtggagcgacctggctcactggagaatgggaccctcaggcccccaaggccacaccctacacgtctgtacgggatggcactcggcgggtggcccttttctaatgtgtaccctgctgtggggct

SEQ ID NO: 421517 - DNA, 122 bp, Homo sapiens
gtcatagagccatggatgtgatgtcacaattgtggccagctcaccaggaagcaggcagagcggggaaggctgagtccacactgcaagtccagagagcagggaactaccttgagtattctact

SEQ ID NO: 421518 - DNA, 122 bp, Homo sapiens
cgtggagagccgacctgtattttaccactgcagatagaaccgaatttcccaaagtggctccgaaagaaccaaggaagaaatgggaagtcatcagctggcgcggtggctcacgcctgtcatcc

SEQ ID NO: 421519 - DNA, 122 bp, Homo sapiens
tttgggaggcttttacgtagtgttgtattttagttaaggaaaataaacctttttcatgaacgtgcagattatgtatcatttctcttagtatttggctcatgggctttcttagaggcataata

SEQ ID NO: 421520 - DNA, 122 bp, Homo sapiens
tccacgcaggatgatgacatcactacagctctacggaccggcttccatcaccgacgtccacgcaggatgatgacatcactacagctctacggacaggcttccatcaccaacgcccatgcagg

SEQ ID NO: 421521 - DNA, 122 bp, Homo sapiens
gtggctcacacctgtaatcccagcactttggtaggccaaggtgggcagatcacctgaggtcgggagtttgacaccagcctaatcaacatggagctgtgtttactgagtggggctttcgcagg

SEQ ID NO: 421522 - DNA, 122 bp, Homo sapiens
gagaaaacactggtgagattcaaggaaagtccgtcgtttagttagtcccacgacaacgtccgtttctcagctctggggaccgtagcgtggttatgtgagttcacgttagcggaaggcgggtg

SEQ ID NO: 421523 - DNA, 122 bp, Homo sapiens
ggggctggcggacacggccgggtggtggcgcagttcctgggggcacagggcagcccagcccgccggcccgcgcctccgcttccccactccagcgaaactggacaaggccgacccacccagcc

SEQ ID NO: 421524 - DNA, 122 bp, Homo sapiens
gccgccgcggggggagacgcggggcgagtgagcgctgggcggggagacagtgccgctctccgtctggccgaggaagagcagcctcgaaggctcctccgggagtgtgtgcgcttgtgtccgtc

SEQ ID NO: 421525 - DNA, 122 bp, Homo sapiens
catgttggccaggctggtctagaactccgcctctgcctcccaaagtgctgagattataggcgtgagtcaccgcgccaagatatcttctatttgggaacattttgttgtcaagtatccagctg

SEQ ID NO: 421526 - DNA, 122 bp, Homo sapiens
gctctgggaggaagcccgaggaggagcagcgcatcctggagacaccggtgcgcctctggtcgccgcctgtggaccgtctagagacgctgggccacacggagcaaagcactcaggggttcaag

SEQ ID NO: 421527 - DNA, 122 bp, Homo sapiens
gtgcgtgaggctgtgcctggggccaggagtctagccatgagcaagaactggtgaaccagacgggggcatgtgagctgaggcatgggctgggttgggggaggacaggagaggcctgacctctc

SEQ ID NO: 421528 - DNA, 122 bp, Homo sapiens
acgtcaactatgatatcatcgtccggcattacaactacacgggaaagctgaatatcagcgcggacaaggagaacagcattaaactgacctcggtggtgttcattctcatctgctgctttatc

SEQ ID NO: 421529 - DNA, 122 bp, Homo sapiens
gatcagaattacaatacctacctaacaatattgtgaagcttaaattaattaggtcctgtacgtgaaggcaccctctgtagagcctatcactcagaaagcattcttaactaatgcttaagctt

SEQ ID NO: 421530 - DNA, 122 bp, Homo sapiens
tgacccactcataatgctctaccaggacatccaggcctgctcggccgcctggaaggctgacggcgtgtgctccaccgtggccggcagtcggccagagaacgtgaggaagaaccgctacaaag

SEQ ID NO: 421531 - DNA, 122 bp, Homo sapiens
taaacctgagatccaagcgctccggattccaaacgtttcctcgagcaggtcctctctagccggccgcttatctatggtttctgctatagggcgctctagcctgcgccaaggggtagtgagac

SEQ ID NO: 421532 - DNA, 122 bp, Homo sapiens
tttctggttctgtcttttgtgatcttaaactttcattcattgtttttccatttttacttccgtgttacattttgagtcatttccttagttccagtttgcttattttctattcaaccattaaa

SEQ ID NO: 421533 - DNA, 122 bp, Homo sapiens
aatagttgttaaaaaaaaaattggaacttcagtttaaatggactaaaacttcctacgtagcgtgcaactggggtcagtatggccaagatgttaagtgcccgtgaagtcacctcttttgtctt

SEQ ID NO: 421534 - DNA, 122 bp, Homo sapiens
aggaaagtggctcactccctaggaaaacaaacactgatctttccacagctacatctcaagcgcattggccaaggcatgctttgccctgaaaaatcaccagaggccatagcgtggcccctttc

SEQ ID NO: 421535 - DNA, 122 bp, Homo sapiens
gttacacaacacaaacagtccctgtcacttggtgagtggtggtttcttgttactttcccacgaaacctgttaggtcccccggtggggtcagagctccagcagcaggggcctcagcccttatc

SEQ ID NO: 421536 - DNA, 122 bp, Homo sapiens
ccgagccacggcctccaggctgctcttcctttcggaggtcgagttcctagcatttccatccgctcctccagcccgctccctgccggtttagctgaagcttccctttcggggagttacctaac

SEQ ID NO: 421537 - DNA, 122 bp, Homo sapiens
ggctccgctcctggaggcctcgagtctgtgcacggggcgagctgggcgggccgagtgggccgcggggagggagggcggggggcggcccccagatgcctgggagtgcgcgggcagagtgagct

SEQ ID NO: 421538 - DNA, 122 bp, Homo sapiens
ttgatatcatcccttgatctatctcaaaaacatgcaaacaaaagcatgactttattcagacgacaatggatcaattagcatctagtccatcactcaagcaattcagagtatgtaccttcaaa

SEQ ID NO: 421539 - DNA, 122 bp, Homo sapiens
ccgccctcccctggcctctcgggacggccgcgcttacctgaaccgaactgtacgcacaagcgcgctcctgactccaggtgcacaccgtggaggcctgaaacgagagccatgaccgcgacgcg

SEQ ID NO: 421540 - DNA, 122 bp, Homo sapiens
aatgacaatttgggctttaatcaaaagaagccactgtctgtttgattgatccaaaaaagtcgggaaggaacgcctcattgggggccagcgaggctttatttacacttttttcagagcaaaaa

SEQ ID NO: 421541 - DNA, 122 bp, Homo sapiens
ctaccgctgcccctcgcttccccctgacacccctttgtttcaggcagggaaagttgccaacgcgcacccccttccccaacacgcccccctgtgcgcccatcccccgcagggaatccaagccc

SEQ ID NO: 421542 - DNA, 122 bp, Homo sapiens
gatcaggctgtgtcagaagtgggattcgaacccacgcctccatacggagaccagaagacccgaacacaggaagcagtaagcttgagtctggcgccttagaccactcggccatcctgacactg

SEQ ID NO: 421543 - DNA, 122 bp, Homo sapiens
gggtgaaacaagaatatcaacaagagatgggttctgtccaacccagaaatcacagcgagtcgagtattctcccagcttgtctgggcaggagacagggttgggcctgtgcgtgccaagactgc

SEQ ID NO: 421544 - DNA, 122 bp, Homo sapiens
ttctagttctagtatgtagatatccttatttaataggtctgctttctactgtttaagatacggaggcataacaatgccttgggcatagaagatattcagtaaatacttgttgaaagaataac

SEQ ID NO: 421545 - DNA, 122 bp, Homo sapiens
gtggcggcggcagccctgggtggggtcccataggggcatctgagaagtcactggagctagcgtttccgggaaacctggagactcgctgagtggcgggggtcgtcggctgcccctctgcccag

SEQ ID NO: 421546 - DNA, 122 bp, Homo sapiens
gccatagtaacaatgcgttcagccaggtttccttagctacacactagtgacaggacaggacgctgccctaaagtgcctgccgctgactcagggaggaggcttggaacacacagcgggaggtg

SEQ ID NO: 421547 - DNA, 122 bp, Homo sapiens
attattaatgatttggatctcgcagctctctatccgggtcctcagtggcgcgagggttgccgggatagcactttctcctgttcctcattctcccggtcctttatccctccgccgggtaccct

SEQ ID NO: 421548 - DNA, 122 bp, Homo sapiens
tttgttttttaccatcaagaggtcaatctatgtcctcttctcttgaacctaggctggccccgggacttattctgacccatagaatgcatggaggagatcttatgtgacttatgggcttagac

SEQ ID NO: 421549 - DNA, 122 bp, Homo sapiens
cactggctgggccacgccaccagcagtcggggcaccttccacgacacagcgtcatcgagacgtggtttcatcttagcgaacgctgtctgtccccgtggactgaattcagaagccaaactgca

SEQ ID NO: 421550 - DNA, 122 bp, Homo sapiens
tggcccattttcagcaagtaaatgggggccttgtggtatgttttgcttcctgaccttactcgttcattgcagttgaagtttccttccatttgtaaatcttgatcctttttttaaaaaaaaaa

SEQ ID NO: 421551 - DNA, 122 bp, Homo sapiens
gctgaggaagagactgtgcatcccagtgttcagtgcacccttgcatgtgctcagtatggacgctcatttccagccaggccggagactttctctttgctgtctgcggagaagaatccaacatc

SEQ ID NO: 421552 - DNA, 122 bp, Homo sapiens
cgcatcgttgccctgagcttggaggacctcgcccagcccgttccagacctcgtgggctgtcgagttcacctgcaccgcgtcccggaggatcttctccgccagactgtagcggcctagctggt

SEQ ID NO: 421553 - DNA, 122 bp, Homo sapiens
ccggggcgtggggcctgggtgagtccgggcccggagacccgcggggccaggcgggaccgccgaggaagagagctagctcttaacaatgctggtttgggggcctgcgttttgcaatcccatcg

SEQ ID NO: 421554 - DNA, 122 bp, Homo sapiens
tggccatgttggcccattctgaaaccaggctccttaacatgggctcccagaccctagacacggctcacacggaggacacgtgtgtttcctgcctctgcttcatcacctgagcaggccctgcc

SEQ ID NO: 421555 - DNA, 122 bp, Homo sapiens
atgaactcgaactcggcaggctgggtttctgcgcgggcgtggagctggagcgcatgcgctcgtccgttaccataacgaccagaagacgctgcagccactagggaggagagcaaagtaatcag

SEQ ID NO: 421556 - DNA, 122 bp, Homo sapiens
gctgtgtgcctgagacattaggccaaggggaggagccttccaagtggaatctgaagagctcgcagactttggagtgtgacagacctgggccgaatgctgccctgtgacttcccagcagtcac

SEQ ID NO: 421557 - DNA, 122 bp, Homo sapiens
cagagccccgagaagagggcatagaattccctcctctaattgtgtcccagaactctgggacgacggaggccaagctgctgagggaggggacgaggacgcggggccccagggaccaacccctc

SEQ ID NO: 421558 - DNA, 122 bp, Homo sapiens
ttcttgttgttttgaattcactccctactccaagtatacaatgtatattgagtctgtggacgacaggcagatgtttatctgtgtgcccaggccactccataggggtggaagcgtctaaccac

SEQ ID NO: 421559 - DNA, 122 bp, Homo sapiens
ttgtcaatggtctctttctccataggtgccaggcagccttcagaggccagtaaagatacccggagtatgagtcatcggtcagacacccttcctgtgccctctggtcagaggagaggccgggt

SEQ ID NO: 421560 - DNA, 122 bp, Homo sapiens
ggggacgcagcgtccgcaggacggcagggccgtatcctgcggagcagggttctgatgcagcgggtgagcactgggtgtgtgagcactgggggagggcggcagagaaggcggagggccgaggc

SEQ ID NO: 421561 - DNA, 122 bp, Homo sapiens
gaatttacctgtgaaagtggataagtcccctgtagcgtgcttgcacagatggccataccacggatgcagcagtgattagccatgtaaactcactttctgcagttttaccagcatctacctct

SEQ ID NO: 421562 - DNA, 122 bp, Homo sapiens
tgttctgaaggattaattggatttagcttggcaatgttccaatgtaataaatagcatagccgtctgttctgggacacaaaagtactgcagaatgacctgaatataaaggacaagaaatagag

SEQ ID NO: 421563 - DNA, 122 bp, Homo sapiens
gaattaataaataaatactaaaaagtgatttagaagatattgtttcacttcacctccgagcgcaggggtataattagcttcaggcttgcctagagtcagtggtgcaaaccatgtcactgata

SEQ ID NO: 421564 - DNA, 122 bp, Homo sapiens
aaaattgggaggggtggtattggccattggggcaggcagggccgggaagggaagtagcaccggccgcagccccaagccagtggcttttccacaagggcctatcctgcagccggcccgctccg

SEQ ID NO: 421565 - DNA, 122 bp, Homo sapiens
tggcggcagcacgcggtgagctgaggcccccggaggctcttgcgcgccgaatttcacccgcggccacggccaaaaccgggggtgattttcaaccaacgccggaaaacatttctaaatttgta

SEQ ID NO: 421566 - DNA, 122 bp, Homo sapiens
ttgttgaatatatgcttcactattcaaacagcatatgggtaggaagtgattggtttaaaacgcacatttatacatgtgttacaaaagtaattgccatgggaaatctggagcacagtattcat

SEQ ID NO: 421567 - DNA, 122 bp, Homo sapiens
accgcgtgggcgggtgggtgagggctgcccccagagacgcgcgccactgcagcagcaggacgtgcctcctcctctacctgccccgcaaccacgaaggtggccagtgacagccacgcttctca

SEQ ID NO: 421568 - DNA, 122 bp, Homo sapiens
agcttatttttccagaccatactgttctaagcctcaattacattaaggccaggaggccaccgaagaactccacatgccactgcactggcgggtggagcaagtcaagcagggcagctcatgaa

SEQ ID NO: 421569 - DNA, 122 bp, Homo sapiens
cggtcgcgaagagaacgagcacgtagagcgggcgttcaccccgcacgcgaagctcctccccgcgcccctcaagcttccgcctccgagcccaggggagaaacggctcactagctggaacgcca

SEQ ID NO: 421570 - DNA, 122 bp, Homo sapiens
ccccatcacgctcctcgcgtggagctctgtttcccagcttgactttgtgcctagatgaaccggctgaaggatgcgtgacttgactgcgtagatgaaccggctggtagcacactgcggctcct

SEQ ID NO: 421571 - DNA, 122 bp, Homo sapiens
caactgtgcaaagcacaagacacacgagcagtcatgggggtcctgacagagtcaagagaccgcccgttttttttttttggtttttttttttttgagatggagtcttactctgtcgcccaggc

SEQ ID NO: 421572 - DNA, 122 bp, Homo sapiens
ctagggagcctaggaaatctacttcccagcaagagctataaaacctcacatcctaattgacggagacaaggaggaacagtgattcagaggcaactctaggggagcagccagctcaggcctga

SEQ ID NO: 421573 - DNA, 122 bp, Homo sapiens
ccggggagaaggcgtctggatggtcacgggtaccatatacaatagtcacattgactatgacgtccttcaagtgggaaaagcccttcaacatgtaagtgtttgtaagcaagaaccggctgcta

SEQ ID NO: 421574 - DNA, 122 bp, Homo sapiens
cgcctccggtgcatggggactggctgaggagccagcatgggcaactgcgtggggagacagcgccgggagaggccggcagccccgggacacccccgcaagcgagcaggtaacgatggggaagg

SEQ ID NO: 421575 - DNA, 122 bp, Homo sapiens
gctaggcagggtgtggtcctgggcatccttgggcctaccagcgagccctgctcagggtgtcgggcgccggcgggcagtactggcgggggcggccgcagtcccggccttgggcccgttaaggg

SEQ ID NO: 421576 - DNA, 122 bp, Homo sapiens
ggcatgcagcctccagtctcactgtgcagactgaggacagtgacacaggtcattgacacacggctgacctaggcagtgattctccctacactaatacagtgattctttctgtgagagactgc

SEQ ID NO: 421577 - DNA, 122 bp, Homo sapiens
tagcgatagagatcaatgggcagtggggtctcgttgatcacagcctgcatgctggtcacccggaagctgttgtcatagttgtagtcaaaacgggcgttgaccatgccttcctcagtgaagcg

SEQ ID NO: 421578 - DNA, 122 bp, Homo sapiens
ggaggaaaacgggccggggactttcggcaactcggggctgtccccacactgcctgactcgcgcctactactgtgtcagggtttgataatgagggaactagccaggaattcagcttgtacgtt

SEQ ID NO: 421579 - DNA, 122 bp, Homo sapiens
gtttgctaaattaaagttataggctatgaagcctatcagttttcacaaaacaggcaaacccgtagttaaaaagatttaaattgtgtaaaagcaaagtatcaccttatgaacaagtacattca

SEQ ID NO: 421580 - DNA, 122 bp, Homo sapiens
gcaacagaacctttaaactgctgctctccccacttccgccccaggatggaggaagaagagcgtggctgcctgcccagtatcggcctccctcacacaaaacgcccccacccacccacacacac

SEQ ID NO: 421581 - DNA, 122 bp, Homo sapiens
ccggcttcggcaccccctggtcggtgcagaccgcgtcgccgccaccccagccccagcagccgccgccgacccagccgcagcagcagccgccgccaccccagcagccgccccagccgcagccg

SEQ ID NO: 421582 - DNA, 122 bp, Homo sapiens
gaaagtggtttggtcaggttggaacccgggtctgactgactccaaaaccccacataaagccggacgactcagataacatcccagcttgaatggattggtggtggctgccaggaggactgtat

SEQ ID NO: 421583 - DNA, 122 bp, Homo sapiens
cctggggtcagaaaactaagccctgttacctaatacttcttacatttgcaaaagtaatcacgactgtgactcgaatcggactggaaaatctattgacttagagatagaaagatattaggaat

SEQ ID NO: 421584 - DNA, 122 bp, Homo sapiens
acctctccgatacaagcaagagtcagatttgcagagaccggatgaggacgcgctactgaccggctgcacgcttaggaaatcttgtgggcagttctgagcaaagccatctaaagagttggctt

SEQ ID NO: 421585 - DNA, 122 bp, Homo sapiens
gataaacttaggctcagacttgggaggaggggaggggtggggggtctcaccactaagaagcggtggaagccgaatccgaacttaagtcggtctgtcatcactgtagcctttccgagacagtt

SEQ ID NO: 421586 - DNA, 122 bp, Homo sapiens
ggtctgtggacccctgcactgagcctcgtgtcctgtgaagtcaggctctgagggtctccacggcctcctctcaccagagacccccacatctgccgcgaatataacctaacactcgaaacctt

SEQ ID NO: 421587 - DNA, 122 bp, Homo sapiens
actttagagaaaaagcaattttgattggatttctgattttaaacctgtccaaagaacatacgctgcttgcttagacaatagaagtggtcgagattgaaaaaggaggaaaaataaaaaacaaa

SEQ ID NO: 421588 - DNA, 122 bp, Homo sapiens
catgggggaaggggcgccagggcaggtggtcggctgcggacacctgtggcatgggcaccgcggaggaagcggccctgttctgtctgcctggcccctgggccatctctggatggccgcccttc

SEQ ID NO: 421589 - DNA, 122 bp, Homo sapiens
aaggaggcaacaggcagggtcagcagaagaggagccgtctgctaggagacaaaggcttgccgacgttttcacagaatggaactcagctgattgagaacgccacggcagccggaagcttaact

SEQ ID NO: 421590 - DNA, 122 bp, Homo sapiens
gcagatgtagaaagacagtgggttctgacagcatcattctaaatggagaggggtgataaacgcccagtagaattcaaataaaatatgaacttcagagaaaggaaaaaagtgatgtgactctg

SEQ ID NO: 421591 - DNA, 122 bp, Homo sapiens
ccacatgtcctggcttccaggcttggtgtcctcagaagcctccagaacgtccatggaacccgcccctgcgcccaccgcctcctgctgtctttccagctgagttccggctgcccctcaccctc

SEQ ID NO: 421592 - DNA, 122 bp, Homo sapiens
gcctgaatgcctctgctggggaccttggggggcattgggacgaggcccagagcagaaggccggcacctggagccgggactgctgcgtctgaaggggcactggcaggtcgcgagcggagccca

SEQ ID NO: 421593 - DNA, 122 bp, Homo sapiens
cgcacccgggtccggctggacagcccctgcaaaacatgggtgccgtccttggccttgcagcggagccgccacatcgtgtcggtccggctgcccacaggccaggcacccgcggggccagcttt

SEQ ID NO: 421594 - DNA, 122 bp, Homo sapiens
aagcagcatgcagaaaccacagtgcagcctggcttcctgggaagcctgttgccctagcaacgtgatgctgaaaggttaaaggctgcttgctccctactactctggattacatgttgccaagg

SEQ ID NO: 421595 - DNA, 122 bp, Homo sapiens
atatttcttatcccccataatgaattcagccatatggcattctttcccatcgaaggccatcgggaatggctttaggaagctgattttcaagctttaagcggcagcaggtgccggcagcgcgg

SEQ ID NO: 421596 - DNA, 122 bp, Homo sapiens
gaaatcccttgttgagggcctgcaaccttgtgcttccgaccggagacgcctttggtccctcggtgtctgcactggctgctggtcaaggcttcagtgtggagtaattgacactttcgaggtaa

SEQ ID NO: 421597 - DNA, 122 bp, Homo sapiens
caacttcaatgggtggggaaggggataatctttaagcccaggtaagctctgtttattaaacgatcaagtgttcactggtactttcagaaatagccagagttctacaaaatatgtgttaaaag

SEQ ID NO: 421598 - DNA, 122 bp, Homo sapiens
cttctccccgggtgggccacgtcagtgcccccgggcatgtgaggtgctcaaaagaccctgcgcttctgtgggtatgcgactcattccacctcatttccccagaaatccgggtctccaggagg

SEQ ID NO: 421599 - DNA, 122 bp, Homo sapiens
gccgggaggccaggaccaaatgtgtctccttccggcttttgcaccacactaactaaccggcgccaggccgcagagccgccctggccttcggcgagaactcaggcgagcgcggcgcacgctgc

SEQ ID NO: 421600 - DNA, 122 bp, Homo sapiens
gggagcgtgtcctggaatgccaagcccgtcgtggctggcgactccctgccccggctaacacgccattgtcaaatacaagtcctgagaaagtacgagaaagaaggaactaaacccacagctca

SEQ ID NO: 421601 - DNA, 122 bp, Homo sapiens
aaaagatgatggcctgtccagcactgctgaggaagaagaagaaaagtttatgattgtgtccgtcactggccaaacgtgccactttaaagccacgacgtatgaggagcgggatgcctgggtcc

SEQ ID NO: 421602 - DNA, 122 bp, Homo sapiens
cagcaagagggagaatctgaggtggaaaacaacaaaccccatccaagagacccacagtgtcgaggaggacaggacagcgcccctcacagcaaggctggggaaccaagagacccacagcgtcg

SEQ ID NO: 421603 - DNA, 122 bp, Homo sapiens
gtaacaagtaaaaacctaactgaacacctgaaaatcttcaccactgaacaaaaggtataacgtttaccataataaaagcccaaataagatttggacattacagtcagtgagcagagcagaat

SEQ ID NO: 421604 - DNA, 122 bp, Homo sapiens
agcgtaagggcggggcccggtgcgaggggcggggtctggggcggggctttcttctgggggcgggtcttgcacctcgcctcctggaaagtccctaggggaactggccaccgggaagtccccaa

SEQ ID NO: 421605 - DNA, 122 bp, Homo sapiens
gactcccaggatgcaacgagcatttgcgcctgcgtacaaggctcaatttattcgtttccccgcccctttcatgaccttcaccgggaggctgaggtcggagtcccgattttctcctgctgctg

SEQ ID NO: 421606 - DNA, 122 bp, Homo sapiens
ggggcgcaagctcgggggtcaggatcccctttccagggatcttccgaggcgggcggtagccggcagccgcaggaggaaagctctggggcctccctggccctcccccactgacccgcttcttg

SEQ ID NO: 421607 - DNA, 122 bp, Homo sapiens
gcgccttcacaacaaagggacgctggcgggcggggcctaagaggtgcgcggtggaggggccgggcgcgaggccgcggagacagctcggagctcggcactggggagtggcacagcgctggcgg

SEQ ID NO: 421608 - DNA, 122 bp, Homo sapiens
ggctcgggccacgcccacctgtcctgcagcactggatgctttgtgagttggggattgttgcgtcccatatctggacccagaagggacttccctgctcggctggctctcggtttctctgcttt

SEQ ID NO: 421609 - DNA, 122 bp, Homo sapiens
agtcggggtcttcactttcttctcagccgcattaaaagccctcgcagttctccaggtttccgagggccagtgttctgggtcagtgaaagggctctggccacagctggctcttggtgtcctgg

SEQ ID NO: 421610 - DNA, 122 bp, Homo sapiens
ggcggcggcgcaggtactgcgcctgggggttgtgggggcgtgcggccagggtcccgtggccggaggtgtccgaccgggagcggctggagccggacgcgagcggggcgcgcgagttcgagccc

SEQ ID NO: 421611 - DNA, 122 bp, Homo sapiens
gaggagcgtctctgcccggccaccatcccatctaggaagtgaggagcgcctcttcccggccggccaccatcacatctgggaagtgaggagcctctctgccgggccgcccatcgtctgagatg

SEQ ID NO: 421612 - DNA, 122 bp, Homo sapiens
tcggcccttcccgccaaagcatctggtgtcagcattattgtatcccaggcatctggtgtccgcattattctatccctatactcaacgccacctttccccctgccccttgagtccaacagcag

SEQ ID NO: 421613 - DNA, 122 bp, Homo sapiens
gtattaaaatgactcctaaatttgcacaatattgtaatgtagcaaatgtagtattaatatcgatctgaacagcagataatttatttagacaagagcatctcatttgtatgcagggtggccag

SEQ ID NO: 421614 - DNA, 122 bp, Homo sapiens
tctcggactgctttcaattcaagactgagcgtaccgcgtgccgctgagagtgggaaggagcgcggactggctcaaacactttggaaaatggttggacagtttctaaaacagttaaacgtgca

SEQ ID NO: 421615 - DNA, 122 bp, Homo sapiens
ccctaaagtggccagagcccatccagatggtaggaatggcaaacagctaccttcacttagcgtctttttcttttttttttgagacggagtcctactctgtcgcccaggctggagtgcagtgg

SEQ ID NO: 421616 - DNA, 122 bp, Homo sapiens
acatggtcccaggagaggcggggcggcggtgactgcagcgaagtgcaggaagctgggcggcggccggcagtgaggaggaggagcgagcagacttgggtggctctgcgccgcggaggccacag

SEQ ID NO: 421617 - DNA, 122 bp, Homo sapiens
cccgccgggcctcagacagtgatgggcccgggcctggcgcccatgctggcccccccaccgcgccggacgcccaagcagcacaactgccagtcgtgcgggaagaccttctcctcggccagcgc

SEQ ID NO: 421618 - DNA, 122 bp, Homo sapiens
ttcattcaatatccaccacgtgtcaggccccgccctggtgccgaggtaaggacggtggcacgcttcagaagccttgtggaaaacaccagcacgccaactctgttcttcattctgtccctttc

SEQ ID NO: 421619 - DNA, 122 bp, Homo sapiens
ctccacctctcacgtttagaacgggcataatgatcagttgatttcgctgcccgtgaatgccgggagactctccttagtctgtaaagtcccctcctcaccacagagatggaacctctgtggtt

SEQ ID NO: 421620 - DNA, 122 bp, Homo sapiens
tcactgtttctcacattccactgcttatctggttgtaaagtatacttttctccccatctccgccttaccattgcatcacattagaaaagcatcctttcacttctgtgcaaggctctataatg

SEQ ID NO: 421621 - DNA, 122 bp, Homo sapiens
cccggcccagggggaggcccgcccccccttcccggcctgccccgggcgcccctcacccaccgcccctgcgcgccgctccagggccagccccacccacgtcccgaaccctcacctgccccgtc

SEQ ID NO: 421622 - DNA, 122 bp, Homo sapiens
aatactttttaactgtggatattttgacagtatgaaacggaagtcagtggtgaagactttcgttttgaagtgacttaggtcttacatgactcaaagatggttttcctagtagtataccagca

SEQ ID NO: 421623 - DNA, 122 bp, Homo sapiens
gcacacctggatgcaggtaatcccagggccgcctccacgccacctcccaatccgcactctcgtctctgattctgccacagacaaaagtgggcggctgagccggacagggaggccgaggccgg

SEQ ID NO: 421624 - DNA, 122 bp, Homo sapiens
ttgcgcgctgcaagtatatcctattttcttcctcttctcttgtccagggtttgattaggccgcagagcaatgaaaccacgtattttctagttttccctgcaagccaagctctgagttaagca

SEQ ID NO: 421625 - DNA, 122 bp, Homo sapiens
gccggagaggccgccgggaacaggcagtgacggcggtgatccagtggatcctccccagggcgtggctgacacaaacttgcttgtgcaagaactggaaaaccggatcaaagtgcctagcaaag

SEQ ID NO: 421626 - DNA, 122 bp, Homo sapiens
ctcaccagagagcaggaagtggagtgtgcttcctccatctgcagggcctctgaagagcaccggcagcttccttcttagcagaggagaaaatctctgccatctcgtgctcgcctacctcgact

SEQ ID NO: 421627 - DNA, 122 bp, Homo sapiens
ccctttgtggctgcggacactgtgcaggtatgagccctttggcctgcctggtccatgcagcgtaaataccaggaggcctgctgctcttcagaaaccagcctgggcgtgcagagacctcaggc

SEQ ID NO: 421628 - DNA, 122 bp, Homo sapiens
gcacgggcagcaactggggctgcgggcgtcgcttgcgggccagcacgagttccgggtgggcgtgggctcagcgggcccgcgctcagagcagccatccggccccgatggcccctggcagtgag

SEQ ID NO: 421629 - DNA, 122 bp, Homo sapiens
aacaagtaaggaaaatttatagcacacaaactttttaccttatagaatggttcatgaattcgaacttttacaacagcagcaccagttctaatcccagacactaaaatcacatctccttgttt

SEQ ID NO: 421630 - DNA, 122 bp, Homo sapiens
aaaaaccaccacggcacacgtatacctacataaaaaaccaccagggcacacgtatacctacgtagaaaaccaccacggcacacgtatacctacgtagaaaaccaccacggcacacgtatacc

SEQ ID NO: 421631 - DNA, 122 bp, Homo sapiens
tgccgctgcgggcggggagatcgcggccgcgcactcgctcggtcggagcggggaactccccggagagctggtctctacttgtcatgcaaaaaaacttgggcatctctaggagcctgagaatt

SEQ ID NO: 421632 - DNA, 122 bp, Homo sapiens
ggtcggggccggggcggcggcagcggcagctgcggccgggctgggctccagcggcccgggcgggctccggctgccattccagcagagcctagacagggggcactccccctcctcctccgggc

SEQ ID NO: 421633 - DNA, 122 bp, Homo sapiens
atggcagtggatccttatgttgccatctgtaagccccttcactatactgtaatcatgtcccgaacagtctgcatccgtttggtagctggttcatacatcatgggctcaataaatgcctctgt

SEQ ID NO: 421634 - DNA, 122 bp, Homo sapiens
ggttcagcccgcgcggcgacagcgggcttcggcccgatttgatgtatgtttgcgtctagacgtcgtcctcactgtcatcgcgctttgctttgccaccctgacccgaattcctcgtttcgcgt

SEQ ID NO: 421635 - DNA, 122 bp, Homo sapiens
ggggggcgggaggagagagcgaagtcaagtctccagggccgctggcgacttcggaagccgcgcgcccggcgctctcggccgcccccggccgctcgcccccgccgcgccgccgccctcgcccc

SEQ ID NO: 421636 - DNA, 122 bp, Homo sapiens
ttctcccagctgtagccaactctgagctcaataggagtcattaacctcacacatccattgcgggcggtgtccatctaaggaagaccttaagattgtctgaggaagaccttaagattttgtct

SEQ ID NO: 421637 - DNA, 122 bp, Homo sapiens
ccgagcgtggggactgggcttttcaatgacgggcggggttacggttgggcagcaggtgggcgtggcaggcataggcggagtcaatctatgagtgggtgggcctatcgccaggccgagagtgg

SEQ ID NO: 421638 - DNA, 122 bp, Homo sapiens
taaaatggcatgtctccattaagtagtgaggtgtggcgcaagtaatttcttagtaatacccgtgcataaaagcctacaataacttaggagacatgcacggttatgtttttataattcaccca

SEQ ID NO: 421639 - DNA, 122 bp, Homo sapiens
ctacaatgaggcgggagtgggtgggccctgcaggtcacgtggtgcggggtggggcctgggcgagtcacgtggggacggtgcgcgctcagtgcggctgcgccggccggtagctgcagctggag

SEQ ID NO: 421640 - DNA, 122 bp, Homo sapiens
cgcctcgagggcttgtctgtttaggtcccaattcctcccggatccgtacattcacacgagcgcagggcaacaatctgagcgagtgttcgtgtgtgcccgtgtgactcgccatcgcgtggcag

SEQ ID NO: 421641 - DNA, 122 bp, Homo sapiens
catgtaggtcaaagaatgcctgggtcaaattggtgctttcatcccctgcatccacatgggcgtcaccaaccagccctcgagtgaggggaagatagtccatctgggcccatttggagaaaatg

SEQ ID NO: 421642 - DNA, 122 bp, Homo sapiens
ccccgccccccgattcctggaactgcgcggccggccttcttgtaatgtttagtcactactcgcagcagagaaaggctgagcgcggagggtgagggaggggccgcgggcgccgagggcgggcc

SEQ ID NO: 421643 - DNA, 122 bp, Homo sapiens
ccacttcaccaaggacctggagacactgaagagcctgtgccggatcatggacaatggcttcgtgagtggtgccagcagacgcaggggaggggccggccagggcagagcgagcccggaccgct

SEQ ID NO: 421644 - DNA, 122 bp, Homo sapiens
tctctctggctgctgaatctatcaccaaaggtggtggagctttctatggccagtgtaatacgatcaaagttaggataaggtcttcttctcatggtccttttgggtggggctactttgggaag

SEQ ID NO: 421645 - DNA, 122 bp, Homo sapiens
agcgcccggatgaatcgaggaaacaatcagcctttcactcaccaagtccagaaagccacacgcttttcagagaagcagagctctcggatctccgaccgccacgaccgccagagccgctgctc

SEQ ID NO: 421646 - DNA, 122 bp, Homo sapiens
gaagcgggaaaggaccagttccactacaccatcctggaagaggccaaggacggcacatagcgtcttcgcggtccctattgcgcaggacctgggtctggagcttgtggagctgataccgcgcc

SEQ ID NO: 421647 - DNA, 122 bp, Homo sapiens
aaggaggaaccagttaggtggaggctgggaggaaaagaattctaggcagagggaatagaacgtgcaaggtctgcctggaaaactatacatcctttaaaaaaatctctgggccaggcgcggtg

SEQ ID NO: 421648 - DNA, 122 bp, Homo sapiens
tgctcatgtctaccttagaattgctgtccacagtagcagacaaaaattagaagcaactcacgtattcatcaataacagccaagtactcagcaacccaagcatttcatcaaccaagtaaaaca

SEQ ID NO: 421649 - DNA, 122 bp, Homo sapiens
ctggacatgctattttaaaataaatttatagcaataatttgaggcctaagagcaaatgaacgtgaacctgctttgtgaagtataatgctcctggaaaaagggaaatattggtctttgggtcg

SEQ ID NO: 421650 - DNA, 122 bp, Homo sapiens
ccgggctgtgcttggagtaccagtgctcgcccggggctatactgaatgagtaagcagccccgtctgcttttgctgtgcaaaggtaagggtggaggccgctccactttcttcaaaaggccccg

SEQ ID NO: 421651 - DNA, 122 bp, Homo sapiens
gtctctcctgtgcagggtccatggtcccacatggtgtttctacagatgatgccctgacaccgtctctcctgtgcagggtccagggtcccacgtggtgtttctacggatgatgccctgacgcc

SEQ ID NO: 421652 - DNA, 122 bp, Homo sapiens
cggggaggagggtggcagtggacagaaacagcgttcgagaacccggcacctttccacgctcgcttcttcccggacccacaacacagaaaccccccaactcggaacggcggcggggcgcgcca

SEQ ID NO: 421653 - DNA, 122 bp, Homo sapiens
gaacagccagtcagtggagcagtcagaacatacataacatttatcagttaaatcaataaacgtctttgtcttctactgcacacttcggagtgcccccaaacaattacaataacctcacagaa

SEQ ID NO: 421654 - DNA, 122 bp, Homo sapiens
gcgctcagccaatgcattcactgaggggagcttggcattctgcctggggtgggcctctcacgggtgaaagactacctgaagccaggaagacgaagtgaggacagcctcgccggctgctccct

SEQ ID NO: 421655 - DNA, 122 bp, Homo sapiens
gactcagacactttcctgcttccccgtgcaaacgggaatataaacccaggagctgctgagcggtggaatccaggtcctcgtctccatgagtctggacttccggccacacgcgtggggaggca

SEQ ID NO: 421656 - DNA, 122 bp, Homo sapiens
ccataaaaaaatacaaggtagaaagttgtggattggggtgggatgtttgcaattttaaaacggacagttaggacagatctttttgataaagtggcatatgactgaaaatgaagaaagtatgg

SEQ ID NO: 421657 - DNA, 122 bp, Homo sapiens
tgacttcttcaccctatcttgtcttttggggctttgtttctactcacttcatctgtttgacgatggtgctctttcctgactccccagcacctggaaggaaaaatgcttatgctttcgatttc

SEQ ID NO: 421658 - DNA, 122 bp, Homo sapiens
caaattgaagcaatcctaaatccacttttatttttaattgacaataattgtatatatttgcgaggtacaatgcgatgtttagatatatgtatacatggcagaaaaaagctaacatgtccatt

SEQ ID NO: 421659 - DNA, 122 bp, Homo sapiens
ggcgccctgcgaggtggcgggaggccagggtcccgggtttaccctcgggtgactgcccaacgcgggctgggatacaagcggaccctcggaagggttccttttgcagactggcgcagtaagga

SEQ ID NO: 421660 - DNA, 122 bp, Homo sapiens
tgctgcgatgagttagtcacagcccggcatgagggagcctgcggggaggcctggggccgacggggtctctccggcctccctctcgggccggcaggggcatcggggagggcggcgagccagcg

SEQ ID NO: 421661 - DNA, 122 bp, Homo sapiens
tcgcggacagccacgcccactcaagaaatttccgaaacagaaagtttgtctgcaacagcgcgccgtactgacgtagcagtgcgcaggcgcagtcccggctcctggcggcgtgttcctctttt

SEQ ID NO: 421662 - DNA, 122 bp, Homo sapiens
gagaagctgagagcccaggtggcagcagccagcatcccacgggtataagatggccagaggcggctgcctgctgctctgcaggtaccatggagctgagctataggctcttcatctgcctcctg

SEQ ID NO: 421663 - DNA, 122 bp, Homo sapiens
tgatcgcctttacagagagaacatctgggcctcagagacaccagaacacccagcggcccgcgtccagggagtctagaaccttgggctcccgcgcacacccaggccaggtcctggccgtcatt

SEQ ID NO: 421664 - DNA, 122 bp, Homo sapiens
ggcacaacaggaaccttcttcttctcttcaacaccctccatggttccagctggtaaagatcgcagtctaactttcacacagcagccaaagtgatctttataagacagagatcagattctgtc

SEQ ID NO: 421665 - DNA, 122 bp, Homo sapiens
ctgctgctgaccctggtagaggtcatcatcaatacagagtggctgatcatcaccctggttcggggcagtggcgagggcggccctcagggcaacagcagcgcaggctgggccgtggcctcccc

SEQ ID NO: 421666 - DNA, 122 bp, Homo sapiens
atttttttgattttgtgtatggatggagtctcgctttcttgtccaggctggcctcatactcgtgggctcaagcgatcctcccacctcggcctctcaaagtgctggaattacaggcgtaagcc

SEQ ID NO: 421667 - DNA, 122 bp, Homo sapiens
ggccgaggcctttgcgtggggctgccggccgttgtattctcacgatttgccgggtgactccgggtgaagaagtggggtggattctgaattatgctttatttttgctttgagttcatggcctt

SEQ ID NO: 421668 - DNA, 122 bp, Homo sapiens
aggaactggagctatatgtactctccttcgcactttgttttaaaacaagtttgggcctcgcgatttcctgaggaaatccaggcaaattagcaaagtgtcgcttgggccgcgactttagaaag

SEQ ID NO: 421669 - DNA, 122 bp, Homo sapiens
ctgtttgaggagacagccgtcgtccccggggtccctgtttgaggagacagccatcgtccccggggttcctgtttgaggagacagccatcatcctcgtggtccctgtttgaggagacagccgt

SEQ ID NO: 421670 - DNA, 122 bp, Homo sapiens
attttagagagtatttaacacaaacctagatggtatagcctactccacacctaggttatacggtgtagtccattgctgctgggctacaaaccactacagcatgttactgtattgaatactgt

SEQ ID NO: 421671 - DNA, 122 bp, Homo sapiens
ggcgcccatcacacacctgcagcgcccaggactactcaggcccgcccccccgagcaccggcgcccacccgggctgccactcggatcgtctccaaccagacggccgcgtccgtctttgtcacg

SEQ ID NO: 421672 - DNA, 122 bp, Homo sapiens
ccatagtaaagcggcggccctaagacgacgcgggggtccttgtgcgcacttaaatggagtcggctgcgcttggtgagttcccacacccggtagatgtgagggaaaaactgccttactcagaa

SEQ ID NO: 421673 - DNA, 122 bp, Homo sapiens
gactccgtgagccgaaagggcgagttgactccactccctgagactggctactggcgggtgcggctatggaatggggacaaatatgcagccaccaccacaccttttacccctttgcacatcaa

SEQ ID NO: 421674 - DNA, 122 bp, Homo sapiens
tttgctcaccgcatgacctcaggctggtcacttaacttctctaagcttcattcaatttatcgatttataaaatggagataataatacctccctcagagggttggctgctgggcagattggta

SEQ ID NO: 421675 - DNA, 122 bp, Homo sapiens
acagccttcgcctgcagaaccaaaaaaacggttttaaaaatctttttaacatctgcagaacgtgaagaattacattgcaaattagttagagattgtattggacctatagattgatttgagta

SEQ ID NO: 421676 - DNA, 122 bp, Homo sapiens
gaatgatccatgtgggcaagaccagtgtttctaacacaagttctccagatctctagagggcgccagaggccatcccaggggttctgcagctgctcgaaaaggggaccaagaatttacctagg

SEQ ID NO: 421677 - DNA, 122 bp, Homo sapiens
ggctagggaccagcagctcccctttcaatggagttagttcccatcatatatcactgagaccggcactcttacatatgccattgttggcagcactgctggctattgtacctttaacaatactc

SEQ ID NO: 421678 - DNA, 122 bp, Homo sapiens
gattgtaaagttgtgcaagcagaagaatcactttgaaatttgagcgcagccccagatgttcgggagcatttccatgcgactgctcctcctagcgtgactggctggtgcctcccggcccccag

SEQ ID NO: 421679 - DNA, 122 bp, Homo sapiens
tgtctccttgggcctccctagaccttcgcggcccttccctgctctgcacaggtgcagctccgccaaggcgctcacttctgttaagagcttgctaattagcagcctgtcttattagcggcttc

SEQ ID NO: 421680 - DNA, 122 bp, Homo sapiens
tgtgggtttccttggctctgctgggaccaggaggaagggaagaaagagaggggaaaaagccgtaaaaattaaaacaaaaatgcaggggggcagcctgaggcgagctggtgaagcggcgtgtc

SEQ ID NO: 421681 - DNA, 122 bp, Homo sapiens
tttccagtaacactcctgtcctcactagaggggtttagacttcaggaattcctttctatacggtattttctcttaggcacccagggagagggaaggacgactctcagggtagaagtccacat

SEQ ID NO: 421682 - DNA, 122 bp, Homo sapiens
tacataaccttcttcgcattcaaagggtctggactcaaaagagggctcagccttgctcctcgggagcaacccctgttttaaatctgggaaatggtgatgccagtggggaaagggcttctccg

SEQ ID NO: 421683 - DNA, 122 bp, Homo sapiens
agagatcagtcgttcctttcctgagtactccgcagagaaaaatcagacatagccccaatgcgcaagtcacagttgtgtggtatcagacagctaaacagacagttgcataaaagggcgatcag

SEQ ID NO: 421684 - DNA, 122 bp, Homo sapiens
cagtcccggctcccacaaaggacagcagcacccgtactggacggcacccccggagggacccgggcctgaggactctgctgctccagcgccccagctcacgatcgtccaggacccgtcgggtc

SEQ ID NO: 421685 - DNA, 122 bp, Homo sapiens
tcctcgtcgtgaccattttccttgaaggctgagagtggagctggggtatgccctgcgacccggtctggggagaacccaaccgcagagaaagatgtttcctttgggagccctggtgtgtccgg

SEQ ID NO: 421686 - DNA, 122 bp, Homo sapiens
ccttgggtagagtttagccccctcatcccgtgtcccgggggtcgcgcgacgtccccgagacgccctggccggtactcgcagctcgcgcctttcgttccgctcaagttcctccgccgcgacct

SEQ ID NO: 421687 - DNA, 122 bp, Homo sapiens
attgggtgtgtgtcaagactgtcttcttaggaactggcaggatcagccatcagttctgggcggattctgggcaattgggcgatacatgaagagtggttatgttgcgtcaggtcctaagacaa

SEQ ID NO: 421688 - DNA, 122 bp, Homo sapiens
aaaaggctggctcagtgtggcagacagcactagaggaggaagagcgggaaggatgtaagccgactgtttaaacaaaaatgatcaaaacacaattggccactgagaagggagtggaggctcct

SEQ ID NO: 421689 - DNA, 122 bp, Homo sapiens
cattttgggaaagcatctatttcaagaaattgtacccaaggagtcaaaggaccctagtgccgtcatcggtcctcaccactgagtggtattcaatgttaacaatgcagcataatttcatcagt

SEQ ID NO: 421690 - DNA, 122 bp, Homo sapiens
cttaactccttgtcctcagcaaattctattcaaacttgtgggcagagcaatataccacaacgccacagtttctgtgccagagcccgaacataccaccatggacacatactagaaaagttgcc

SEQ ID NO: 421691 - DNA, 122 bp, Homo sapiens
tgtgcgctgcctgcctcttgcgcgcccacgaacgtcggcctcgcttggatggcgcggtctcggctatcacacctggatcctctgcagtccccccgagtccagtgcccaccgtcccgggtccc

SEQ ID NO: 421692 - DNA, 122 bp, Homo sapiens
tggtctgtaaacattcttttttcaagtaagaggagccccgcgcttgcacagcctggggtgcgggaggcagtttgcacgggaaggctctgtgttcccgggccggcttcgccccagggccccgc

SEQ ID NO: 421693 - DNA, 122 bp, Homo sapiens
aggcgggcctgatgaagggctggtgggcgtgttcccgcccaaggtccgtgttggcccgcgcggtggctgggaggccctccccacgcccaactgcgggtataaagaggcaggctgcggactcg

SEQ ID NO: 421694 - DNA, 122 bp, Homo sapiens
gcctcctatctcccgcatgttcccagaggcaaagcagctgctctgctgacggtgctcaggcgttgaccactcctttgatgtacaggcctgtgggtttgaagggctgtttgctttcacgtcct

SEQ ID NO: 421695 - DNA, 122 bp, Homo sapiens
gcccgcacagacttctgtttgtctgccttgcttaaaatgcatcccgcctggagcacctctcgtaccatgtgcggtctcatgggcaggagggaggcttttgtttccttggcagaccctctgaa

SEQ ID NO: 421696 - DNA, 122 bp, Homo sapiens
ggctggaggatccacttccaaggtggctgactcagatggttggcaagttggtgccggctgcggcaaaggccttgttttctctccaggtggacctctccacaaggctacttgagcagcctcac

SEQ ID NO: 421697 - DNA, 122 bp, Homo sapiens
gctgagccttcccctcccctcctggcgggagtgtgtgtgcaaggggccagggggcggagtcggagaaagggttgggggtgtccgtgtccagcgctcctccggacgcggctccacaatccagc

SEQ ID NO: 421698 - DNA, 122 bp, Homo sapiens
gttctcacatcagacatatcttatctcccttctaggtgactctgatccctactcatgacacggaggtgactcgtgagtggtaccaacaaactcatgagcagcagcaacaactgaatgtcctg

SEQ ID NO: 421699 - DNA, 122 bp, Homo sapiens
ggtgcgggcatctcgagctaatctggtgggcgcaagctgggggtcagaggatagcctttccgtggccagtgacctgtacggcagcgcattcagcctgtacagaggacgggcgctctctatcc

SEQ ID NO: 421700 - DNA, 122 bp, Homo sapiens
agcgctcctcctcagccgggcccctgcgggtagggaaccagctaggtgtcagggcgcatgcgccagacctccccgcagcaggtggcctccgcacggctccgcccccgggtcgccgtaaccct

SEQ ID NO: 421701 - DNA, 122 bp, Homo sapiens
catgtaaatagctgtcggggactggtgtattgtcgccgccccagccggcgggacctggggcgaatccacacccattgtctgctgcccaaggggcctccggctggggggcgcggctgcggagt

SEQ ID NO: 421702 - DNA, 122 bp, Homo sapiens
ttctgggacctggggcggccctttctaagcctgtctgtctcgggccagggccaaggggcccgtcgcccatctgtctctgaaggtggcacccacaggcagtctgtcagtgtccgagggcagca

SEQ ID NO: 421703 - DNA, 122 bp, Homo sapiens
tcccaggattagtttgtgtcagggaataaagtgtaagacaacaccgtccacggccccttgcgtggcattaactttaaatagaggtccctttgactatactagaatgaggtgggtttatttgt

SEQ ID NO: 421704 - DNA, 122 bp, Homo sapiens
tctacttcctcacccgcggcaggcgcctctcatctcaggttgaaatccgccttccccactcgcggcaggcgcctctcatctcaggttgaaatccgccttcccagaggcctgccctgctgatc

SEQ ID NO: 421705 - DNA, 122 bp, Homo sapiens
gtctaccctgctggacgggagcacgccgtacccacgggtctgccccgccggacgggagcacgccatacctacgggtctgccctgctggacgggagcacgccgtacccacgggtctaccctgc

SEQ ID NO: 421706 - DNA, 122 bp, Homo sapiens
tgggccatgagcgtgctcgcctggcagtgttggtgcccggtccgtggagacgtccgtgggcgtccagacccagccgcggggcctcatggcggggaggatgcgggagcgggggaggggcgcgc

SEQ ID NO: 421707 - DNA, 122 bp, Homo sapiens
actaccccttccctagaaatttctgcataaatcgccccttaatctgcatgcgattaaaagcggtataagtgtgactgcaaaactgccccaagcggctgctctctgcctacggggcggccccg

SEQ ID NO: 421708 - DNA, 122 bp, Homo sapiens
gtagtcccagccactggggaggctacagtgggaggatcccttgggttgggcctgggagtccgggccatgatgatatcactgcactctagcctgggtgacacagcaagaccttgtctcaatta

SEQ ID NO: 421709 - DNA, 122 bp, Homo sapiens
tgcccccggtgtcaccgagggggctgggcagacctggcggggtggagacctgggcagatccggggtttgtgccctgggagctctggggggcacagggcaggtgtcgggtggagagaggctgg

SEQ ID NO: 421710 - DNA, 122 bp, Homo sapiens
aaaagcagccttacctctttttgtttatatggcagaggagctccacagcatattcctccccgttctccgggcgagcttctcgggccgtttcagcacacggacagctcctctgcttataggga

SEQ ID NO: 421711 - DNA, 122 bp, Homo sapiens
ctcctcgcccgttccggaggctacgtgctttctttgtcaatgaggcgccgctctgagctgcggtagcactcgcggcccgggaacccgagccggagccggggctggaacccgaagcccagcga

SEQ ID NO: 421712 - DNA, 122 bp, Homo sapiens
aataaaaagtgttagcatccgtcagggtgaccctttgcagaacctgcgtcagcctgaggacgcagggaaaggctgcgcgggagaagccgctgttagcatctgccagggtgaccctttacaga

SEQ ID NO: 421713 - DNA, 122 bp, Homo sapiens
cctgtcgcgtgcgcgtgaccaggagcctagcacctccctttcctctgcttccgccacttccgccctggagaacatttctcacccaggattggtagaaacctaagagcgcatgcgcactgaga

SEQ ID NO: 421714 - DNA, 122 bp, Homo sapiens
agttttcattgctgtaagtctcccggctgcggggtgccgatggaggaccgccttgaaacccggctccccaggcagtttcctcctctggcccttgtcaggcctgagataacctttggtggttc

SEQ ID NO: 421715 - DNA, 122 bp, Homo sapiens
tataattttttttgttttgtctagtgagtttcaacatttttaaagttttcaaaaagccatcggaatgttaaattaatgtaaagggaacagctaatctagaccaaagaatggtattttcactt

SEQ ID NO: 421716 - DNA, 122 bp, Homo sapiens
tgtaagatgagaagcgttgcaatagtatcaaactggaatggagtttgatacatagtatggcgcctagaagaagcaatctctcatgttattattaaaggttgaggttattactaaagatttcc

SEQ ID NO: 421717 - DNA, 122 bp, Homo sapiens
tggcggcacaccccattggactgttcagagctcgccccagcgcccccgattgggtagattcgggctccaccccctgcgtcacagaagtcatctaataggtggctgcagggataggctgtaac

SEQ ID NO: 421718 - DNA, 122 bp, Homo sapiens
atgctccctctcagtcagccttattggaatcttttactgttgacatgatatggctgtacccgctgttctgactcagatatttcaagaatccgtggggccttttcaggccaaatcagaaatga

SEQ ID NO: 421719 - DNA, 122 bp, Homo sapiens
gcccccgggcggtcgggcggaggggtccccggggcggtgccagggcgcaatcctggagggcggccgggaggaggaggtgcgcgcggccatgcacaccgtggctacgtccggacccaacgcgt

SEQ ID NO: 421720 - DNA, 122 bp, Homo sapiens
accgatcagtctctgccctcaagaggctcagctgcaccatcagaggagcggggccctgctcgggctccaccggaagcgggctctgctggcctgggctctgctgggagtccccttcattactc

SEQ ID NO: 421721 - DNA, 122 bp, Homo sapiens
tccgtaatcgctgcgttcatctccgcgcaccgctagcagtgtaaaaggcagcttcaagaccgaactcaccacttgctgaggtgttcagggagaccacttaaatctcctccaggctgaagcca

SEQ ID NO: 421722 - DNA, 122 bp, Homo sapiens
gaagcaaggacatctaggtccctatcaccgcttgcctagacaacttcacaggaaggcccccgggaatctgagatggagcaggtgaaccctttacatctagatggtgagtccaaaggaggtat

SEQ ID NO: 421723 - DNA, 122 bp, Homo sapiens
cctgtggactgagcagcgcagggaccaagagccgttttgggcgagcacaggaagctcaggcgggggcaagaggaaagctgagcagaggcgaagctccttacacacccgagtccaggcgaacc

SEQ ID NO: 421724 - DNA, 122 bp, Homo sapiens
accctgatcttctggtataactactcggcttttccaacttccttgtctcagtgtagatcgcgcggtaacccaggccactcagaagtcccgagacccgatgctttcgccagcgtctcggtctc

SEQ ID NO: 421725 - DNA, 122 bp, Homo sapiens
gccaggctccggtcgtgatgcggggtggcagagggatgtgggcaacgcagctgggagtcccggggcacagccgggctctctccaggctccccatccagcagctgcgcacccccccaaacaca

SEQ ID NO: 421726 - DNA, 122 bp, Homo sapiens
ggcagccaggttgcgtgatgttccttgaggatgagactgaaccacacttcatagccccaacgcctcatgaagaacaagggcttaataaatatgtgttgattaataggggacaaagtaaagat

SEQ ID NO: 421727 - DNA, 122 bp, Homo sapiens
agtgaggccacatcagagggtctgagcgaggggcggtcctgccctccaggggacaccgggcgatgtctggggacgtctgtggttgtcataactgggggcagttcctggcatggagtaggtgg

SEQ ID NO: 421728 - DNA, 122 bp, Homo sapiens
cacctcacccgcagcggaatggaaaccggttcgacaggtaacaaataggtgggttgtcaccgttatttcccaacgcatgcgccgtcgctccccgggccaccccaagctaattagatcagatc

SEQ ID NO: 421729 - DNA, 122 bp, Homo sapiens
ccagactggtcggcgagggactgagtcggtggccaccgggcgcagggacacacgtggtggcgccgaaggggcgggggaccggccctttgtgatgtcacccgggaggaggccgggctctttgt

SEQ ID NO: 421730 - DNA, 122 bp, Homo sapiens
tgacccttgacccagccttctaccacccctccctcaccggcgctcgggggtctgagctggcggctgctccaggcccacctggtgaggcgacttcagagacccctacccatggcgggggcgag

SEQ ID NO: 421731 - DNA, 122 bp, Homo sapiens
ttggtcatcaaaaagtaatggctggcaggaagccagaaaaagagacggactatttccatgcgatcccgcagttcctgggggagccccaccgcatatctggtgaacagggacacttcaggcac

SEQ ID NO: 421732 - DNA, 122 bp, Homo sapiens
cggggggcggtgcctccggggctcacctggctgcagccacgcaccccctctcagtggcgtcggaactgcaaagcacctgtgagcttgcggaagtcagttcagactccagcccgctccagccc

SEQ ID NO: 421733 - DNA, 122 bp, Homo sapiens
tagtctgcgtctggccctcggtctgggaattggcagggacgctaggacctggtgatctaacgcccgcgcggcctcttacgccggggtttcctccaggtgctcgttgccacgcgttcgcccga

SEQ ID NO: 421734 - DNA, 122 bp, Homo sapiens
aggaggagccacaatcggcagctctgggcacagcacacggacaggacccatgcgggcgtccgtgcaatcctcagagcagccacacacactggctgcaggtggctggtgacgccacctcccac

SEQ ID NO: 421735 - DNA, 122 bp, Homo sapiens
cagcactttgggaggccaaggtggcaggactgcttgagcccaagagtttcagactagcctcggcaacacagtgagactctgcctctccaaataattaaaaaattagctgggcatggtggcat

SEQ ID NO: 421736 - DNA, 122 bp, Homo sapiens
aacacccccacattttaagtccaggaaagttgaccagcgcccaaagcccacttcggagagcgtggtggaggactcccgggagctgatgttcagagcctcaaagtaggggtaagccaggctcc

SEQ ID NO: 421737 - DNA, 122 bp, Homo sapiens
gaggtcactctgggcgaagggcagtgcctggggtcctacttgccggcccaggcacaggcacggagtcagaacatcctgccccgccccttccccccaacctttcaccttcctttccagcccca

SEQ ID NO: 421738 - DNA, 122 bp, Homo sapiens
aggcggggttcctgtctaccgtgcccctcagagcccaggaaccacagcccgtgcgcctcccgcagtgggagttcgccggccgactcccaccctcacagcctcctgtcctggcttcccctcgc

SEQ ID NO: 421739 - DNA, 122 bp, Homo sapiens
agcaagactctgtatccaaaaaaaaaaaaaaaaagtcacgtgagccggggtcaccggaggcgtcccccaaccgactgggcttcggaaaaccaaggggcgcacgccgccccgccccgccccgc

SEQ ID NO: 421740 - DNA, 122 bp, Homo sapiens
gcgaggctgggatagattagtctcatggtaagacaggtgctcagtgggcccacgtaccctcgccggtagtccccgagccccgcgaccccggccgtgccgcacccacctcctgccctcgctct

SEQ ID NO: 421741 - DNA, 122 bp, Homo sapiens
cgggctccgcagcccaggcccacttcctgtcactccaggaaaacctcggagcggcggacgcggctcggcccggcttccagcccagagcccaagcgccttagccccgtcccagcgctttctga

SEQ ID NO: 421742 - DNA, 122 bp, Homo sapiens
tggaatgtttggattttgaagattagtttctattatatctctgtgggagaaaggaaaacgcgctatgggaaagtggagggcgaagaacccccgaataatttcggactgatgtttcacaaatc

SEQ ID NO: 421743 - DNA, 122 bp, Homo sapiens
tattgtgattaaaagtgaccaccaacaaaaaaatactcaacagaaataaaagtcaaactgcgtaacaccaaaaaaaagaaaaaaatctttaaagccttgagagagaaaagaagagagaacca

SEQ ID NO: 421744 - DNA, 122 bp, Homo sapiens
aactgccagtgcgaaggcctcaaggtgggagaatgctttgtgtgttccagcaagggcggccgggccagcgggctcagggaggagtgagggcaaccctggctgttaccactggtcagttctgg

SEQ ID NO: 421745 - DNA, 122 bp, Homo sapiens
aggacacaggcagggtgtccctacagaagatgtctgcttctgtctgttctgtctgttctccgcagattcagggtaggctcctggtggatggagtcggtgtcatgcctgctcctagctgacta

SEQ ID NO: 421746 - DNA, 122 bp, Homo sapiens
gagctgcgtccagcagagctgctgggtggttgctcctcccgggctctcatctccggtatccgggccgacccccgcaccccctacttcccttgccctcgctgctctctccttagaggcgactc

SEQ ID NO: 421747 - DNA, 122 bp, Homo sapiens
caccaccccaaaacatttcctaaagtctctacccattactgtctctactccacctggaaacgcagagaggcacagccctatctcttgcacccataaggacactcacagcatagactgggcga

SEQ ID NO: 421748 - DNA, 122 bp, Homo sapiens
gctaaagaggaggtgccaagctagcagatgaagtcactgccaggtgaagactgatggggacgtgttcggggggtggcatggagtgaacattgacggtcaggctccgcacacgtgctgccatt

SEQ ID NO: 421749 - DNA, 122 bp, Homo sapiens
cgctacactgaccccttcacataggtcctctccaggacctgacgaggtgggggctgtcagcggctgcatttcactggctaggggttgggctcagcgagggtcagcaacctgtctgaggtcac

SEQ ID NO: 421750 - DNA, 122 bp, Homo sapiens
atcatgagcaaaatggctaaataaaactggatggatctccccttattaaaaaggatattacgaaggggttagaaatctgttacaagttatcacctcctttagccaagggttcatagagaatg

SEQ ID NO: 421751 - DNA, 122 bp, Homo sapiens
ggagggtcctcattcatgctcacctgtctcttagtactctgatctctgcacagtgccgaccggtctcaaattgcacaaacctccagttcttgacgttccgagtgtcataaacttgaggaaaa

SEQ ID NO: 421752 - DNA, 122 bp, Homo sapiens
ctccctgtgaaatcattgttcgcgcgaccctcatctgcctcaggatgctgtactctactacgcacaactgctccatcttttaagatattggaagtgagagcacgggaggagcatgggcggtt

SEQ ID NO: 421753 - DNA, 122 bp, Homo sapiens
taatcagcacctgtacctgctcaactctattttaacgtaaatgccaatgtctccccagttcgtagcacagagcagcgagcatggtagacctttgtagaatgtaaatgatgtgtctgtgtagc

SEQ ID NO: 421754 - DNA, 122 bp, Homo sapiens
tgctgaacaggtgaccaataatcttaaagaacttgtacaacaagtaactccaggtgatatcgtaagcatgtatggagttcaaaaagcaatggggatttccattccttcccctgtcatggaaa

SEQ ID NO: 421755 - DNA, 122 bp, Homo sapiens
agttgagaaaaaaacctagtacaatgagcacctcatatagtcttcactcagattcaccctcggttagcatcatacctttaagtatgtcagtatcattaccacctctttgaaaatcattaatt

SEQ ID NO: 421756 - DNA, 122 bp, Homo sapiens
caagtggatggcggggtggacacgcgtcccggcgccccgggctccctgggatatgtagttcgcgacaggacgagcggaaatactgccaggattttaccacctctcgcccatttatttacttc

SEQ ID NO: 421757 - DNA, 122 bp, Homo sapiens
atagccctgaggacatttgcagccaccacacagagagcgcaccaggaccccaggaggctgcgagcaggtgtcacggaggacagagatgagacggagaggaaggcgggcggggctgatgatga

SEQ ID NO: 421758 - DNA, 122 bp, Homo sapiens
ggtaaaacccttgtctccacggaaaaatacaaaaattagctcagcatggtggtaggcgcccgtagtcccagctacctggggggctgaggcagaagaatcacttgaacccaggaagcaaaggt

SEQ ID NO: 421759 - DNA, 122 bp, Homo sapiens
aaacatctaacagcttctggttccagctctgccaccgctcaccttggacaaatcattcggcggtactgagccaggctttcctgccttgtcaacaaaggcggccagtccagctgacccccaag

SEQ ID NO: 421760 - DNA, 122 bp, Homo sapiens
aaactctgcctttcttttaaataacccggcatggagcagtttggtttccaccctattgcacgtggtccggcctggttatgaaatcaggaggctgctgagactggggtcctgccgaggaagtg

SEQ ID NO: 421761 - DNA, 122 bp, Homo sapiens
agttggagcctccgccgagtcgcagacaacgcctccgggagggtaatcctcgccttcccccgaccactggacccagcgctgcctgcccaccgcccctcgtcctgggcggggccgcgcgccgg

SEQ ID NO: 421762 - DNA, 122 bp, Homo sapiens
cttcaggaaatacaaaccttgtgaggttttaattactaatgctacagagtggcgtttttccgaggactgtgttccacttggtctgtctctgatggctattaactaataaccgttctcattct

SEQ ID NO: 421763 - DNA, 122 bp, Homo sapiens
ccagggtggcagcctaatgcttggggcagggtctgtggcccccctgagttttgggctctgcgtgtgtttgcggggtggggatgtggaggcgcgcagccccagggctcactgtgcgctgtggt

SEQ ID NO: 421764 - DNA, 122 bp, Homo sapiens
ccccggggtcgctgcagtgttagtgctcgccgtggaggcgtgagcaggtgggcggggccccgggcctccgggacactcctgtattagtgctcctgtaatagtgcagtcctgggagcaccgag

SEQ ID NO: 421765 - DNA, 122 bp, Homo sapiens
cacaatgtaattaaatgctagattaacctaagaaacaaaaaggaaaatagcttctttgtccgttcatctacaggataatgaggtcatgttaaaagacttagaaaaggttcagttctcctgcc

SEQ ID NO: 421766 - DNA, 122 bp, Homo sapiens
gtccgggtggtatggggaggggcggagaggcgggggttccagggcctgagcctgtaaggccgagcaggaaggaaaaaagcacctgggaagtaaagaatgtttgaagtgtaggggctggaact

SEQ ID NO: 421767 - DNA, 122 bp, Homo sapiens
tgttaactcagatggggggcagactaggccatgcctgtcactttgcaagatacacaccaacgtccgattcttctgtatctccaaccacaggaaacctacccctgaaacttcctgttttgata

SEQ ID NO: 421768 - DNA, 122 bp, Homo sapiens
ttgttttgttttgctgattttgggggtagggcaccgttgggctccttcctccacctctaccgggagttaggaagaaagagatgggttaagactttttcaagctttgccatccaacatgtgaa

SEQ ID NO: 421769 - DNA, 122 bp, Homo sapiens
accgtgccgatctaggtcgtgtgacccgtctggtgtagtcctggaacaagggttttgctgcggagggaaacggccagagacctcgatctaagaccggggtttggagactggcgggcctcgga

SEQ ID NO: 421770 - DNA, 122 bp, Homo sapiens
agagaaatgaaactgcagatgcaagaagtcagggcgattctaccccagagcaggacgtgtcgagctacctgtgcaaagccccgagcgtggggtctctccttcaaacgcgagatacttactgc

SEQ ID NO: 421771 - DNA, 122 bp, Homo sapiens
cttgcctgataacaagagcactaatgacagagctattgcatcaggttgattaataaaccccgtcttaggcagcctcatcatgtggataaagaaaaggagttaagatgatgttcctgctgcct

SEQ ID NO: 421772 - DNA, 122 bp, Homo sapiens
ggaaagggagcccctcctttcccggtctgctaagtagcgggtgtttttccttgacacttacgctaccgctagaccacggtccgcttggcaacgggcgtcttcccagacgctggcatcaccgc

SEQ ID NO: 421773 - DNA, 122 bp, Homo sapiens
agaccacgtctgcggggggccagatggcaaacacttctggccgtgtgggccacagggtgccggtcacagctgctggctcgggctgcctgggtggaggcagcttcggtaatgagtccatgtgt

SEQ ID NO: 421774 - DNA, 122 bp, Homo sapiens
gttataaaaacagcgccctcggcggggtccagtcctctgccactctcgctccgaggtccccgcgccagagacgcagccgcgctcccaccacccacacccaccgcgccctcgttcgcctcttc

SEQ ID NO: 421775 - DNA, 122 bp, Homo sapiens
ccaatacccctggcgagctcacagggcagaggcaaattcctctccactcggccgcgcccacggcctcccaaccccggacagagaaggaaaggagggacccccgcgtgtccgcagctgctttc

SEQ ID NO: 421776 - DNA, 122 bp, Homo sapiens
gcggctggctccggcgcccggtggccgcggagcaggcggagaatttatgaatggagagcgcggcgcgggggaggccggcgcgagaggaggggccgcgcacgtgaccgcgttggcggcgcgcc

SEQ ID NO: 421777 - DNA, 122 bp, Homo sapiens
gttgcttctctctttagagatccacatgtgattttccagctctgtcatatttaaatttcacgtgtcgccagagaagaccccaggataaattgtttatgactatccatcctcaggcaaggcag

SEQ ID NO: 421778 - DNA, 122 bp, Homo sapiens
gggcctgacgtcatcacgcagcctcttcctttccccgcccccttctcttggcgaacgaggcgtcagtttaacacctccgtgaatccggaagtatgctgtcaaaacaaccaaaccacggggct

SEQ ID NO: 421779 - DNA, 122 bp, Homo sapiens
agtcagtcagcctgccagtatccccaaggatttaggtcacatggggggtgagaagaaaaacggcctggacacctctcaggatgccaggatgcaaagtgtcactttctgtatctttgcctggc

SEQ ID NO: 421780 - DNA, 122 bp, Homo sapiens
ctatggtaatcaaaacagcatagcagtggcataaaaatagacacaacaggtcggtaaagccggagtcgggtcctgtcggcttcctccccggacagcatgaacttcaccactcgctccacctt

SEQ ID NO: 421781 - DNA, 122 bp, Homo sapiens
gcggcgggggagtgggagggcggagggcggggcctgatcttcgcgacagccgggagggggcgcctctcccagccctcggccgtgtcccggtctgactcgcccccgtctgctcagcgctatca

SEQ ID NO: 421782 - DNA, 122 bp, Homo sapiens
actggggctgccattctaccattgctgtaaactctttaaattttttccatttagggaaagcgttaagtgcaaagggtataactttgctttcaaaaatgattcatgatgttagtgaactgttg

SEQ ID NO: 421783 - DNA, 122 bp, Homo sapiens
aggaaaggcaggtgccaaaaatatggccatctctcagtagaagacaaggcagtacttagtcgccaaggatggtttgcaagggaaataagccaattttgattcctttaccccagagggaagtg

SEQ ID NO: 421784 - DNA, 122 bp, Homo sapiens
cgccaggcggctttatttggagtaagaggaaagcaaaggtttgaggctcagtcaagagggcgccactctgcctggccagctctccgacaaagcagacgggggggtgtggagccgtggtgacc

SEQ ID NO: 421785 - DNA, 122 bp, Homo sapiens
actttttctcccgtatacttttccgtgccttcctccacccaagtcggaggagcgctcactcgctcggccactcggcgaactcgatcagctgtatctgggaaatgaaaaaagaaaaagaaaaa

SEQ ID NO: 421786 - DNA, 122 bp, Homo sapiens
aatgcagtaagggcccatagtgggtgtttagaagatattgtgggagtagatgttcaaaatcgaggaaaatgctaatctccagcggggaaggttttgttccttagtgatagccaatagaagtt

SEQ ID NO: 421787 - DNA, 122 bp, Homo sapiens
caggtatgatcaggcgcctccgggctttcctccgaattagtcggtgtttggctcggagtgcgtaactctgtctcccctgcactcagcctccggtcccgccctctcctgtgcccccgcctggc

SEQ ID NO: 421788 - DNA, 122 bp, Homo sapiens
cggtgtaagcgcctcttataagcatgcgggggcgggcggggcaggaccccccccccgccccgcccctgaaggcctcaagcggccgcctggcagctctgctcaccttgtcggggtgcacagcc

SEQ ID NO: 421789 - DNA, 122 bp, Homo sapiens
aggcgatgccggtggattttcttcactcaacgagcagagcatccaacatggcgctgtggccgcctccagcagtccggcaggacggctgctcggaaaacttcggactttttcggaatggctcg

SEQ ID NO: 421790 - DNA, 122 bp, Homo sapiens
gttcccttgccatttatgggaccctttggcttttacagagcgtgtccagccatcagagtgcggaagccagtgcgcaggtcactaacatttacaaagcacaggcccttgacagtttatactac

SEQ ID NO: 421791 - DNA, 122 bp, Homo sapiens
gttcaagtcctgctgactaggttatccgcaggaggtaacatattatggtgagaggcataacgacaaatagctcaggctttgttcggcagactgcccaggttcagatccttgccttatcactt

SEQ ID NO: 421792 - DNA, 122 bp, Homo sapiens
gagccggggcggtgattgcagccccagacagccggcgctggctgtggtcggtgctggcggcggcgcttgggctctgtaagtgatgccaggaccagggctggggccggggagtggggcccccg

SEQ ID NO: 421793 - DNA, 122 bp, Homo sapiens
ggctgcggcttctgcccgtccagggccacttctcccgggacagtcaggtttgggagactccggattttgtttttgtaaagtttcctctgggtggaggctgcggccggccccccgggtccccc

SEQ ID NO: 421794 - DNA, 122 bp, Homo sapiens
ggagcgcagctttcactattgtgttagccccggcggcggaaggactgagcctcactgcaacgttaaagagtccttctttgttcagccccagtcggggacgcagggcgcggtgttcctccgcg

SEQ ID NO: 421795 - DNA, 122 bp, Homo sapiens
ttctctagggtactgttaccccaggattaaagcatgatagagatttcctgttatccagaacggaatagtgccatggccttttttaatccaaggagctgatactgagagcaaccacaaaccca

SEQ ID NO: 421796 - DNA, 122 bp, Homo sapiens
tgaactcctgaccttaagtgatgcacccaccttggcctcccaaagtgctgagattacaggcgtgagcctccgtgcctggccaacattttccatacagaggctaacatacagatatacaattt

SEQ ID NO: 421797 - DNA, 122 bp, Homo sapiens
ggctctggcctgcctatagggcctggaaaagacccaggccagggtccataatttaacacacgggaggctctgaagaacgtacgttcctctccaaaacccacctagccagtggctgatgtgga

SEQ ID NO: 421798 - DNA, 122 bp, Homo sapiens
tgtgtggcccaggtatgcctcaaactcctgggttcaagggatccttccccattggcctcccgagtagccaggactgcctactgggctcacgcatgtttttaaagaaatggtagataagagat

SEQ ID NO: 421799 - DNA, 122 bp, Homo sapiens
gggcgttgcctggcaacttagctgcgaggggattggctgcgcgggaccccgtgaccatcccggagaccacgcatttcctgcgcccccggaagtggtgataatgccaggccctgcccccggca

SEQ ID NO: 421800 - DNA, 122 bp, Homo sapiens
ttcagtgcagaagtttttaattttgaccgagccaaatctatcaatctaggcctggcgccgcgtcagcagagggggcggggaggcgagcgcggaactgggggaggggaaggggcggggatcag

SEQ ID NO: 421801 - DNA, 122 bp, Homo sapiens
ttcggctgccccggcccccggcccgtgtctcccccgtggtctccgtgttgtccgccccgccgcctcattttggctcagggtgatgcctgatacgcccttggttattggggggtgttcctctc

SEQ ID NO: 421802 - DNA, 122 bp, Homo sapiens
ccggccccgggtccccagcgcaccgacttgtttttcgggcgcagcagacagttgtgagcccgggggagcagctgattggtgcatttccttcgctcggcctcagctctccaccccccgccccg

SEQ ID NO: 421803 - DNA, 122 bp, Homo sapiens
tcatctacatcgcgcagtccaaaggtgagggtgggagcagcgaccgcgggttcttccattcgggctgcaccaagtttggggagcagagaaggcagttcccgtgtgcaattccggagaatccg

SEQ ID NO: 421804 - DNA, 122 bp, Homo sapiens
gcagctcttacctgcgtggagcctcacgttcatggtctgttaaacgcacacacttgttctcgctttatcgtgccattgagacagttaaacagaaaaaaagatgcaaaacacccagctcaggc

SEQ ID NO: 421805 - DNA, 122 bp, Homo sapiens
agcattcgtagcaggggcaggcgctgcatggagggggctgcggggcaggtgcctggaggccgctgtgccagggtggcctctgaaatgtgccagggagcccctacgtggtggttagatgggag

SEQ ID NO: 421806 - DNA, 122 bp, Homo sapiens
attttgcccaggaccagtgatgttcacattcaggacctgcctgaaccggcaagccctccacgtgggtccaaagtgcaaagggaaagtcactgctagaggcgccagtaccagcatagcgcccc

SEQ ID NO: 421807 - DNA, 122 bp, Homo sapiens
aagcattcttgccaccaggcgtggcttgactcgcagaacccacactctggcggctgtgggcgcggcactggaccggcgccggcagcagggcggggcctggcgggggcggggcctggcgggtc

SEQ ID NO: 421808 - DNA, 122 bp, Homo sapiens
aaaaggcgagcgcaggaggctgccaggaagcgggagccccacggggtgacggccacttcccgccgccccggggctggcctcgctgccgtcaagcggcccgtgcgcgctttgcgacagtcggt

SEQ ID NO: 421809 - DNA, 122 bp, Homo sapiens
aaagaaaagaaaaatagccctttgtagtaaagggcatgctgggaaggcaagagccagagccgcctccccagagcatgctgggaggaggggcaccagagccgcctctctagagcatgctggga

SEQ ID NO: 421810 - DNA, 122 bp, Homo sapiens
tgaggagctatagaatgttgctgaatataaagggctttgtgtaagtggaaagggggtatccgtgcatagatgcctggaatgctgtgtgcaggattggaggcaccacagagagagcatgaagg

SEQ ID NO: 421811 - DNA, 122 bp, Homo sapiens
agaggcccgctccggacagcgtaggcctgggcgcctgggtggagggtgcagggtgccgggcgcgggacttcggctctcgcctgggccatcccgggctctgagggcccggcatccatccccaa

SEQ ID NO: 421812 - DNA, 122 bp, Homo sapiens
tttgaaaactagaagcctgagaggtctcagcgagacagtcaaaggggaggctcccctcgccgagtgtcacccgggaccctgcgtccccgctctgcagagaccttctctccgggctgctgccg

SEQ ID NO: 421813 - DNA, 122 bp, Homo sapiens
tctctgagaaatgtaaatacgatttgggatttgcgccagagtcttttcctggccccctggcgtggactcgttccatgagagggtcagggttcacgaggcaaaaggctgttcccagcagccac

SEQ ID NO: 421814 - DNA, 122 bp, Homo sapiens
acggggctggcggacggcatgtgctttcgtgaattcaggccaaatctgttatcgcaaacacgattacaactcgggtctttgtgtaacaaaagcctttccaagtaccagctgttggcctgctt

SEQ ID NO: 421815 - DNA, 122 bp, Homo sapiens
tttcaagttccactcatcctgggacccactccttcctgatcttggcctcgctgctgcccacgtgtagaatcaagtcactctctgaccgctacgtgttgttctgggcttaacccttgctgagt

SEQ ID NO: 421816 - DNA, 122 bp, Homo sapiens
aggcgttcccctgtctccctacccccattggaaacatcctgtccctcaaacccggcacctcgaactgtctgacccatctgaggctggcgcccgtggccgcagaaatccctacacctctggcg

SEQ ID NO: 421817 - DNA, 122 bp, Homo sapiens
caaacagagtgaatctgtacttgtggtcagggtccagtgaggagacaacaaatgaacgctcgggcccttccacaggtaccacctggggccgtccatccctgtccctgtactggaccatgaag

SEQ ID NO: 421818 - DNA, 122 bp, Homo sapiens
atgattccagaaggctaaggagaaggctgccagtagaggaaaggggaagaattcccagggcgaggaaaacacataagcctttgcgtgtggagctgtgtaaattcaaggtctggccagggggc

SEQ ID NO: 421819 - DNA, 122 bp, Homo sapiens
acatatcagcaggtcaaatggggtgcactcaagcactctgcttactgaaggaaggcgtttcggggatgcagagagccactgtaatatatgagacaagtgacttgacccctgcctcctttaga

SEQ ID NO: 421820 - DNA, 122 bp, Homo sapiens
gcgtcacgtgggaggcggagtcggaagtgtgacggcgtgcgcggggcggggctactgctgcgcgcgggcgcgggggcggggcggggcgcggcgcggcgcggcgctcgcggctgctgcctggg

SEQ ID NO: 421821 - DNA, 122 bp, Homo sapiens
acgtgaccaaagagttgccgtttctttggcctctctagccagccggtcctcccagtgtctcgttttcccagcatctttcactgacctgaccgcaagctctttagctggagccaggagtttgg

SEQ ID NO: 421822 - DNA, 122 bp, Homo sapiens
caagtgctggtgaggatgcggggcacctgcgacgcccccacactgctggcgggaaggcaacgtgatggggccactttggagaagggttcggcaatttctcgtaagtgaaacacacacttact

SEQ ID NO: 421823 - DNA, 122 bp, Homo sapiens
catgagatgcacacttcatgttcacatacactataaaacagaaatacccttatttgtggacgtcgtaaaggcgcactgcactcttttttcaaagttaacccaggctaggccacgaaacgtcc

SEQ ID NO: 421824 - DNA, 122 bp, Homo sapiens
tctgcagcaggtgcaggtcactgagctcccaggcccagcagaggcgcgtcagggtgcaggcggcctgcatgcccagcccctgtgccgccagcttcagcagcgtgccaggcagagactcctcg

SEQ ID NO: 421825 - DNA, 122 bp, Homo sapiens
cgctttgcgagcgccagccaatcggtgcggcggcgggcccatcctgatttgcatgtccgacgacccctcaaccaatggtaatgtgactggcgtgaacaatagccaatcagaagctggaagag

SEQ ID NO: 421826 - DNA, 122 bp, Homo sapiens
gcagggtcccagtgctgcgcggcgccggctgggtgcgctctgagcccgtgactctgctcgcgcctttataatccaacctgccgctgatgtcatcctcccgcccaccgggccgcccgggccaa

SEQ ID NO: 421827 - DNA, 122 bp, Homo sapiens
tgcgccacgaaaacagagggggagtccttccttaggcagttactgcccaggttcccactccggtccgctatgtaaatcagagtctcaaaacagctttccctcgattggttaatatttaaaat

SEQ ID NO: 421828 - DNA, 122 bp, Homo sapiens
gtacttaggaagtggtttcagcagctggaaagacctcaggctcagagtgtgataagcagtcgtcgcagaaccgggcttctgaccacacagcctgaggctaccacggataggaggcaccaccc

SEQ ID NO: 421829 - DNA, 122 bp, Homo sapiens
atatcctcttactttgtgtcataaaacttgttagattaaccaaaacctcatccatctccacggttttacataccgatgtcacctacttattaacaatcctaatccctccatcccaaaccgtg

SEQ ID NO: 421830 - DNA, 122 bp, Homo sapiens
accgcggcggtgggcgaggccagcggccccgccccgttccctggcgctgccgttcactggcgtttcctagcaaggatctgcagggatcccgcctacggagtgcccctggggcaggggtaggg

SEQ ID NO: 421831 - DNA, 122 bp, Homo sapiens
tcttcaggctcaggcccttccgattggctgctgggacacaacgtggcctgtcattggctacggcaccggcgcagggccttcggagaggaagtgtggaagtcccgcgcctctaaagcccgcct

SEQ ID NO: 421832 - DNA, 122 bp, Homo sapiens
ctcgtggcgctgctgctgtggccggccaggtctgggccgctcagcgtgctggacgggctgcgcgagggcggcggcggcgggccgggggccaacgccagggtcagccgtgggcccgagacgga

SEQ ID NO: 421833 - DNA, 122 bp, Homo sapiens
ctgagccaagaatgatccctagagaagaatctgagaggccagaggattggaagaattaagcgaattttgaaataaccaagagttatgacaatagtagtaatgaatgacagtgaaccagaagc

SEQ ID NO: 421834 - DNA, 122 bp, Homo sapiens
aagttaacccgattttccttctccttcttttttctattggatagtcagcaggtgtaatagcgtagtctaaaaggagcgacccacggggtctttctccttgccgcagctgcaggcttcttatt

SEQ ID NO: 421835 - DNA, 122 bp, Homo sapiens
gaagtttagagggatgaggaggcaggagagttgaagagttgcaggatgtagctagagtggcgatgttaaatcttggggccagagagctttacagtgatgatgaagatcaagtggcattagaa

SEQ ID NO: 421836 - DNA, 122 bp, Homo sapiens
tacaggggcggccctaccctctggaatatacaaaacgttacatagatacaatatgtaaaccgggaaggggggccaccccagcagcccgtgccctcacctggtccacagttagccccactgtc

SEQ ID NO: 421837 - DNA, 122 bp, Homo sapiens
aggccaatgggctagggcaacggttgcgacggttggattttgaaggagccaataggcgctcggagcggagagtttaagaggcgtaagccaggcgtgttaaagccggtcggaactgctccgga

SEQ ID NO: 421838 - DNA, 122 bp, Homo sapiens
ttggccctgtggccaaggtgaccaagggccgaaggaaaagcgagaacgggagggacgggacgcaagagggcagatggggaaccccatactccagcaacattatataagagaggcgacgatgg

SEQ ID NO: 421839 - DNA, 122 bp, Homo sapiens
gtccattgtccaggcataattattatttatgccccctaaaatgccccagtctgaacaacacgccttaactccaggagtagcctcctgctggtggaatcccagagagtgaagtggagatccca

SEQ ID NO: 421840 - DNA, 122 bp, Homo sapiens
gagtgtgggtcctttcccgcgactacctgcttgcctctctcagaacctgcaagtgaagtgcggaagatctgtctatcttctcggcggcgcagagcccaaggtagaaaccgatggaggcggtg

SEQ ID NO: 421841 - DNA, 122 bp, Homo sapiens
agcctcagacccagccgagccccacttctgggcttagagcttgacccaacacgttcgcaccgtagcgagcgaggtccacatttagccatgccgcaggcaaaagaaggattcggcttcggtcc

SEQ ID NO: 421842 - DNA, 122 bp, Homo sapiens
ctaggcggggcggagctccggcccgggcggagccgcggccgccgcgtccggctgctggaccgaacttctgccgtgcggacagcaggagcagcgccgagccccattcccccacctctccagct

SEQ ID NO: 421843 - DNA, 122 bp, Homo sapiens
aagcgctcaacaagctcactcttcacgggggtgaagagccaggcgcccttgagcggcatgcgcgctgcctgactgggacacagggacaggaaattcgctcctgccgagctcactctccggct

SEQ ID NO: 421844 - DNA, 122 bp, Homo sapiens
cagaattcctggtttgtttttaatgttaaattttgccaattggaagcaagtaaacacttgcggatgtgctacagataagtgagtctcgaatgggagctgatagaagaatatcagaatctctg

SEQ ID NO: 421845 - DNA, 122 bp, Homo sapiens
gtgtgaaggtgtccgcggcgtcgtcgacggcggcgccggccatggaggagacgcagccgccgccgcagcctaagctgcccctgtgcgacagcctcatgatctgggtgagtgcgaggaggcga

SEQ ID NO: 421846 - DNA, 122 bp, Homo sapiens
gaagttaaatagtgaatactctttttattcagaagaatgcatttttaatagaatttcatgcgccagtaaatcagtacagtgaggagttacaggggtggggaacctctcttcaggaaacatct

SEQ ID NO: 421847 - DNA, 122 bp, Homo sapiens
cgcccggcttcccgcccatgggcctcggcagtgcccgcgggaggagcgggtggagggagccgctcgccacgtcagcgcacgcccgccccggcgctccgcccggccctcctgggcctccccat

SEQ ID NO: 421848 - DNA, 122 bp, Homo sapiens
atctttgtccctggcaaagtgggttttgcgcagtggcttagacctagaaaagaatcgtgacgggcaggaaaccattacaccaccacctgggctgtgctctccggctcccgccgccacccccg

SEQ ID NO: 421849 - DNA, 122 bp, Homo sapiens
ctcccacctgccgctcgccctagatcatgacgtcaccctggacctcagttttctcacctgcgcagtgggttaagctaaaacctgcgcctctctgccttttgaggataaaactgagactccga

SEQ ID NO: 421850 - DNA, 122 bp, Homo sapiens
gggcaggggttaccaggtggctggctgtagacctgggcgaatgccagctctcttcagcttcgtcccaactgcgacttctgctccattcttctaacagccctttcaactccgctcggctgtaa

SEQ ID NO: 421851 - DNA, 122 bp, Homo sapiens
ttgagtcagatgagacccaccccaggcaccagcccttccagggagtcacctgaccacttccggggctcccagccagctccgctgggagccatgtgatcacttaggtatgcacgaccagctcc

SEQ ID NO: 421852 - DNA, 122 bp, Homo sapiens
aaaagcaaactttttattacacttcaaaagttgaagaagaagacggagcactgtctcattcgacttgaactgggaacatgtgagttgggtgattcaattttttgtcagttctgcagatgtat

SEQ ID NO: 421853 - DNA, 122 bp, Homo sapiens
cattaggagccgccagcggtaatgaggagccgggggtgggggacctgccgctgccttggccgccaccaactaattgggaccagaagctggacctgagacgagggagggggagagacagacag

SEQ ID NO: 421854 - DNA, 122 bp, Homo sapiens
tgcccggacatgtctgagtttcacagggtcgctgattggattatgtccccttccccggcacgaatgcttttctgtcttccttaagggtagtatctctgtggcaccctgttctggctccttac

SEQ ID NO: 421855 - DNA, 122 bp, Homo sapiens
gacgcacagtcagggccgggcactacacgtggacctctcccacaacctcattcaccgcctcgtgccccaccccacgagggccggcctgcctgcgcccaccattcagagcctgaacctggcct

SEQ ID NO: 421856 - DNA, 122 bp, Homo sapiens
cgcagccccagctggccgctgccaaaatagagttgagctgggtcgggagaccacgcacgccgatccctcacagtctcccccacaccccatgggtgaattaaagagggtaaggtaggggaaag

SEQ ID NO: 421857 - DNA, 122 bp, Homo sapiens
atgctcctgttctcagtgttgctgctcctgtccctggtcacgggaactcagctcggtccacggactcctctcccagaggctggagtggctatcctaggcagggctaggggagcccaccgccc

SEQ ID NO: 421858 - DNA, 122 bp, Homo sapiens
tgcaggaccagcctgtggctctcatgtctaccagcgtacagacagcaaagacacacgacacgatatacaggagcagaggcgcccagaacacgctgtcccccaatgccagccacaagcggggc

SEQ ID NO: 421859 - DNA, 122 bp, Homo sapiens
taaactcctaacctcaggtgatccaccaacctcagcctcccaaagtgctgggattacaggcgtgagccaccgtccccggcctcaagtgattcttttaaaatttaagacagatcttgccactc

SEQ ID NO: 421860 - DNA, 122 bp, Homo sapiens
gtattctccgctctgtctcacccaggtaagccgcggcgtggatgcggagggcttgggggccggggcgccgggggcagggctggggctgggtggggggcaccggggccgtcgctccggccggg

SEQ ID NO: 421861 - DNA, 122 bp, Homo sapiens
tctctccggaagcatgtgaaaacggtccacggcccagatgcccacgtcaccaagaagcagcgcaatgacgtgcacctccgcacaccgctgctcaaagagaatggggacagtgaggccggcac

SEQ ID NO: 421862 - DNA, 122 bp, Homo sapiens
atatgtgtaaggatctgtgatagtattttacgcagtgtgaagagcagtcttctgatgggacggtacatcccgacctccttggaaatataattcccttgtaacaggagggctgttatggcaaa

SEQ ID NO: 421863 - DNA, 122 bp, Homo sapiens
ccgcccccatgagtcgtggatcgtaatatccacgggggatgggcgggtgatattactccccgcatcgctggtcgcccgcgcccctgcgatgtggctcggaatatctaggcggagagtggggt

SEQ ID NO: 421864 - DNA, 122 bp, Homo sapiens
ggcgcccgctcagcaggggcccagcagaggccggctgccaagggtgactgctgttgccagcgggacaccccgatcagcctaaacactcatctcagtaggcgtcctccacgccagaagtccag

SEQ ID NO: 421865 - DNA, 122 bp, Homo sapiens
agctggagcacgtttggtgagagaccagaaagcaatggaggccggagaggggaaggagcgcgttccgaaacaaaggcaagtcctgatattctttgttttgctgggcatagctcaggctagtt

SEQ ID NO: 421866 - DNA, 122 bp, Homo sapiens
taataatgttccacttgtttttatatttactgaatgtgtgttaactcaccctctggatctcgcgcgtgtatctgccctcagtacagtatctatttgcatgcgcctctttgtagtttgcgaat

SEQ ID NO: 421867 - DNA, 122 bp, Homo sapiens
ttggggaggtgctctttcctgctgtctccccgctgagccaccacggtgtctactgaagcccgcagcacctatcagtggatgctacttgctctgggctctggtggctccttccttccctggcc

SEQ ID NO: 421868 - DNA, 122 bp, Homo sapiens
tctccagctaatgggactttgctttttcctttgtcgggtcatttatttcacttttcctggcgctgagatggcctgagtctgtgtatgtgtgcacacgtgtgtggccactgcttttcttccaa

SEQ ID NO: 421869 - DNA, 122 bp, Homo sapiens
attaatcaaataatcacacaaatagtgagctagtgccctgaaagaaaaggcctttgagaacgtatggcaagggaacctcattttgcctgggaggccagggagggcttcttcagagaggtgat

SEQ ID NO: 421870 - DNA, 122 bp, Homo sapiens
acctccccttgactgatccgggggtcagtgtggccagacaccccacctcctcccagagtgcgcccctccatccaggatggccgggcctccctcacctcctggctggcagaacccacacatag

SEQ ID NO: 421871 - DNA, 122 bp, Homo sapiens
accaaggcttaaagtttggcaccgggagggaggccgcgggggacactccccagaagctgtcgcgggattcccccaaaatggctccaagacgcggctgcctggtccagccgcgaggactccat

SEQ ID NO: 421872 - DNA, 122 bp, Homo sapiens
agccttttggtgttcagcttaacatgggaaacatttcctataaaacgccccatcttaggtcgaccctgccgttgtccctcacagaactggaccaaagtctgaatggacgcaattgacacata

SEQ ID NO: 421873 - DNA, 122 bp, Homo sapiens
cttaacgactcaggtctcaagagcagtcactgtgcttgggcggccactgagctgcgtcttcgctttttaaagtcaaccagtgaacagggacaggggctgcctcaggagatgtggggggagac

SEQ ID NO: 421874 - DNA, 122 bp, Homo sapiens
aatattttctaaatgtgtaaattgaaggctcacaaattagttaagtgagagaaaagataacggattggaagagaattaccatattcattaggtgtgtttttaaaattttaaagtaaaataga

SEQ ID NO: 421875 - DNA, 122 bp, Homo sapiens
ggagacatagttagagctgtaatgcgtcccccgagctataacgcgtcccccgagctataacgcgtcccccaaggtacccgctgcctctgtttattcccggcagcctccaccaccggcccagg

SEQ ID NO: 421876 - DNA, 122 bp, Homo sapiens
aagccagcccctccagggctgtattcccacagccccctcccccgtcagccgggcaccccgcgtcctaactgcttattttgggcactcagcgctcccctcagggctggagttgtgctgggggg

SEQ ID NO: 421877 - DNA, 122 bp, Homo sapiens
gcaggtcggctgttgagcccctgaacaatgaggagctcacctttagagggtccagtgctccgcctgggtcacagaggctcagaattacaaaatcctctggtagctttcatggcactctcact

SEQ ID NO: 421878 - DNA, 122 bp, Homo sapiens
cttggccaggaccttggagccctgaaacagaagaaggagcccaggtgcccatgaaggagacgtcagagccacctgccggggctgttggagactgaagtagaaaaagaggaggggacgttcac

SEQ ID NO: 421879 - DNA, 122 bp, Homo sapiens
gatctgggtttattgtttttgtttgtttgtttatttctgtcgttttctagtcaattctcgcgcttttgtatcttggttgtttttgactgacattgcctaggaaagcttgtaaggagactttg

SEQ ID NO: 421880 - DNA, 122 bp, Homo sapiens
tcagaatgcatctccttgccctaggcctttcgggggggacatggccttagacagtcaccccgaaattgggctcaggtcctcacagtaagtcgagtgtccccccacatccccaaccccggccc

SEQ ID NO: 421881 - DNA, 122 bp, Homo sapiens
aaacagaaagggaggctggtgatgaagccaggagtggatgggcagggagtcatagccagccgggggcagtgggtcagcatgtgccccagtcactgcttgcctaggtacctgcatggagacga

SEQ ID NO: 421882 - DNA, 122 bp, Homo sapiens
tccgcacctggtggcgggtctgcccgcggaggatcaacagcagctggtggcagcagaagccggcgcaggccaggccgatggcgaaccagaggtagagcatgaggatgacgaacatttcagaa

SEQ ID NO: 421883 - DNA, 122 bp, Homo sapiens
caatatccgcagcacgccacacaaacatctctcagctcagccacgcagggccgatgcctgcgcgacccacactcagggaggcgcccgcctcagggcctcacaggtgggaccgcgcctgagag

SEQ ID NO: 421884 - DNA, 122 bp, Homo sapiens
ccgccctcctggccggagtagcgcgcagtcttccgtggaaactctgacaacactggcgaccggccatttccggaaatcaaaggacagccccagcacccagtaactgcctgtattgcggagga

SEQ ID NO: 421885 - DNA, 122 bp, Homo sapiens
agggccagggtggagagtgctgggccggggtggaggctcagagcgtgtccctgccaggcccggccccctagctccctccccgaggctccacgctgctgttctcagacgctaaatataagatc

SEQ ID NO: 421886 - DNA, 122 bp, Homo sapiens
cggagctggccctgccttgaacagagggcggtgtggcggctgcatgggggccaggccccacgcaccatgctcacttttcaggcgccttgctgactcccaccttccggccggtggagccccgg

SEQ ID NO: 421887 - DNA, 122 bp, Homo sapiens
gagaacaggagcatggagggcgggctggggcgtgctgtgtgcttgctgaccggggcctcccgcggcttcggccggacgctggccccgctcctggcctcgctgctgtcgcccggctccgtgct

SEQ ID NO: 421888 - DNA, 122 bp, Homo sapiens
caggccaactggactctgggcggccagcacaggcagggtcagggggtgacttctgtgcctcgtggcactgccacctgggcctgagcaagagggctccattctcctacccgcccaaaccctca

SEQ ID NO: 421889 - DNA, 122 bp, Homo sapiens
gccgtcctacgacccccgcgcgctttcaggaccactcgggcacgtggcaggtcgcttgcacgcccgcggactatccctgtgacaggaaaaggtacgggccatttggcaaactaaggcacaga

SEQ ID NO: 421890 - DNA, 122 bp, Homo sapiens
ctgaatctatagtctcaaaaactaaaattaagattgtgtgtgtgtgtgtgtgcgcatgcacgcgtgcacacgtgctgttgacagccaagcctggcctggtgcatgcactgcataagtgtagc

SEQ ID NO: 421891 - DNA, 122 bp, Homo sapiens
gatgaagtactcgtcacaggcggcgctgggctgggagccgttgcagaagaggccccagagcgcggaggtggctgagttgttgtggatgccgtaggccttgacgcaggcatcgaagctgcgcc

SEQ ID NO: 421892 - DNA, 122 bp, Homo sapiens
aataataaaagcgggtgtggacgtgtcgttctcacagggcatttggctgagcccgggcaacgcgaaagcatgcatagttaacgctcctgactgtgtgaaaccctttgtcgcggcaccggctc

SEQ ID NO: 421893 - DNA, 122 bp, Homo sapiens
ctaggccttctcctacaggtttccggtgacccttgtgtctgtgtcacttccttcagaaatcgacgtggccgtcctcggaagtacccagtgagcgctcccatggctccccctgcagttggggg

SEQ ID NO: 421894 - DNA, 122 bp, Homo sapiens
ccaccgtaagttcttcagactcagtcgtcagcaaggttatggcccgaagccgtgcagaggcggcgcgcggggaagctactggcagagctgtgcgcactgggggtgctgcaggcgctggggag

SEQ ID NO: 421895 - DNA, 122 bp, Homo sapiens
gccgtggaatacagtgagcgctctctgcggctgacagcaatagcggtgatctaatttacccggcgactggaagaaactctttgtacaggctctgggtccctttggattagtgacttcaaggt

SEQ ID NO: 421896 - DNA, 122 bp, Homo sapiens
ggacaaagaccagagagagatgctgcagatcttggggctggcgagcattgatgaattgatcgagaagacggtccctgccaacatccatttgaaaagacccttgaaaatggaagaccctgttt

SEQ ID NO: 421897 - DNA, 122 bp, Homo sapiens
ctccgaacgaacacctggcggttgggcgtgcctcagtttcccggaggcggggcattcctccgtcgccgccccccacctcccctttttcctcttcctcttggggcatctgctgccgcgcctgt

SEQ ID NO: 421898 - DNA, 122 bp, Homo sapiens
cgcctgtgttgtgtagtggaccagaggttgctgatacctgggacatagactgggtgggcacgggaagtaaagcctcgggactttggttaagcgcgccccactggcgtatcgcgccgcgggac

SEQ ID NO: 421899 - DNA, 122 bp, Homo sapiens
ttaaattgcacatcattctgagtactgtgatgaatctcgtgccaccctgctgcatccccccgggacgcgaatcacccctgtcagtgcgcgaatcacccctgtcagtgcataacaccctgtca

SEQ ID NO: 421900 - DNA, 122 bp, Homo sapiens
taaaaggctcaagctggctgctgtgttgagaatagatttcaggggagcaaaggtagaatacgagtgacctattaggaggtaatggcacaatataggccagacatgttggtggtctcggacca

SEQ ID NO: 421901 - DNA, 122 bp, Homo sapiens
acagtgaacctaaatgaataaataaacaggaagaatgggaccatgaccaaatgttgcaaccggatccaaagtttgatgccttggcatcacttgtttggtcatttgaaatgcaaattcctagg

SEQ ID NO: 421902 - DNA, 122 bp, Homo sapiens
tcaggttgacggctctacgcacggaccgcacccgacagctggtacccccacatcccagaacgccgaaaagcaggagtaaacgctggctacaaatgcctttttatactggtatcaaagagcca

SEQ ID NO: 421903 - DNA, 122 bp, Homo sapiens
gttgaaggctggaaggaagcagtgcaggactggccagcctgggtgcaggccctgaggcaccgtggtgagggggccaggtctccagagtcccctgatagccctgggctgggtctccagctcac

SEQ ID NO: 421904 - DNA, 122 bp, Homo sapiens
tgcaggggtgctgctaaagtgaaatttccagcaactatatagatttagctgtgggctgtgcgtgtagaagtagttcaacaactctcagttcttgacttccaaaacaggagtagcatatttta

SEQ ID NO: 421905 - DNA, 122 bp, Homo sapiens
gtcctgtgatgcagcctctgctccaggccacttccggaactgcgagggaacagctgtgggcgcgctcatttcagctttgcttcagatcctgggagttgggggcaccttcttttttttttttt

SEQ ID NO: 421906 - DNA, 122 bp, Homo sapiens
tgatctgttaaatcgcagatcaccaaacagaacctgtcccacctctatgcttacttctggcgaggttctgattggaaggaagtgctgtcacccaaggaaccccgtaactccgaggggcaggc

SEQ ID NO: 421907 - DNA, 122 bp, Homo sapiens
ctaccttgaaaggatcttggcttctccacaaggttactccatcctctgagcagttatttccgattctacttttgaatggtttcttttcagatcttcctcagtgctttctctttctggctacc

SEQ ID NO: 421908 - DNA, 122 bp, Homo sapiens
cccccgggatagcatcaatagcttacatgggagtgagcatcattcctgcttgcaccttcacgtccggttaaaacgattctattctgcaagccagagcttaggttccatcacttcctaccgag

SEQ ID NO: 421909 - DNA, 122 bp, Homo sapiens
aagtagaaagagctctctctaggaagtaggagatctggctgaagtgcaatggcgtgatcacggctcactgtagcctcactctcctgagcttaagggatcctcctgattcagcctctggagtg

SEQ ID NO: 421910 - DNA, 122 bp, Homo sapiens
gctgctcctgcgctcgtctgtggggtcgcccccactgcgggctgtgcgcgcctgcccgggcgccatcgcaaaatcgcgcccaaagcacaggtggggactcatagcctgggggtaaatgttaa

SEQ ID NO: 421911 - DNA, 122 bp, Homo sapiens
tggaaccccttcacccagcctggacacaaggtgtccccatcctcccggggaccagctcggcgtctcctaggatggctctgcagagagcattgcagagtcataggacagaaaataaaaacagg

SEQ ID NO: 421912 - DNA, 122 bp, Homo sapiens
ttggagaggccctttctcctcagccacagctacctggatgtctacagaccccatgccgcccgggccattttatgcccttgcagtgagggggctcatgatagaaattcatcattgggtggtgt

SEQ ID NO: 421913 - DNA, 122 bp, Homo sapiens
attggagtgtgtgcccacttgctcagactctctcctgactggctgcagtgaaaatgagctcgctggccagagcagaccaccatcagaagagccacccgcctcttagagatgcttcatgtggt

SEQ ID NO: 421914 - DNA, 122 bp, Homo sapiens
cggcaaactgtgcttggtcggacggatgcccgcgcggaggtaagagccctttgcgggattcgcccgtatccctgtgccccgccccccgcctgggactacgcgggccccaaggagcggggcgg

SEQ ID NO: 421915 - DNA, 122 bp, Homo sapiens
gcaaggccaggcttggctgcctggcaatgtttgttgtgggcagttgccatgccactccggcggcagcaagagcagggacaggtgtggcagagcccggtggttccagcccagcctggcctccc

SEQ ID NO: 421916 - DNA, 122 bp, Homo sapiens
gccaatgtcagccgcagggaggccacctggaagtgagtgcctgacacacagactttcacccgtctcttcgccccagcctcacagcaccagaccctcatttcattaatctcccaaatttaggt

SEQ ID NO: 421917 - DNA, 122 bp, Homo sapiens
tgcccaggggtccttcccgggcacggcgcggggaagcagagggcccccgggccatctccgcggcctcccgccccactggctcgtcctcctaccgcggccccatccggagctgcgctagggcg

SEQ ID NO: 421918 - DNA, 122 bp, Homo sapiens
attatccacataaagtagtctttcaggctgctaggtaacttggctgtcttctattccatccgttttatttaactacacgatggtcatgaatcagtggcaggactgccttgtaaagttgtgct

SEQ ID NO: 421919 - DNA, 122 bp, Homo sapiens
gcagggatggctggtggtgtgcactggagagcacgacggtgacgctgcgtgggaaagagacgtgggaagggcatagccggattatccactcagctccaattttctccaagcgccactcaccc

SEQ ID NO: 421920 - DNA, 122 bp, Homo sapiens
taccccgaggaggatgaagagctggagagcgccgaggacgacgagcgcagctgtcggggccgcgagtcggacgaaggtgagtcctgccgctcgcccggccgcccggagcggaggtgggaccg

SEQ ID NO: 421921 - DNA, 122 bp, Homo sapiens
ggtttagaaacgctagcatgggtaactaaagacatgagttcccacccacctgaggccgggcgactgcatgtcccccacaagagagcaagctcctgccggctccccgcctcggccactgcaga

SEQ ID NO: 421922 - DNA, 122 bp, Homo sapiens
aaagccaccagttgcatcgtaagccaactcttgccattagaagatccttcttatgccagacggaaaaccgctctctggaactttctcccctggctcattctgacccctggagcaccagggca

SEQ ID NO: 421923 - DNA, 122 bp, Homo sapiens
cgaagagtaccatccccggcatggcgaaggtcccgtagctcgcactcaggagagaccccgcgcgccgttcaccgagaacaaaccagcaccctccggacgccgccaccaaattatcggcgctc

SEQ ID NO: 421924 - DNA, 122 bp, Homo sapiens
ctgggagccgggcaggggccgctcgcagaccagctttcctgggagctggccccgctcccgcgttccccaccctgccgcaccccgttgctgcggcagacgcgaccccgccccccgcaacggac

SEQ ID NO: 421925 - DNA, 122 bp, Homo sapiens
ctcggccgcccaccccaccgcagccgggggccccgcagcgctcctgggctccaggcactgcgggaccctcagatgcccggcgtccagcccagcgagctcctccttggggaccccaacggacc

SEQ ID NO: 421926 - DNA, 122 bp, Homo sapiens
tcccattggcctcccttccctttatagaaagaccaagcaggccccactggccaagaggtacggtatttggcagtctgagttctcagtaatttggaaagttaaggagttggttcctgtgtcac

SEQ ID NO: 421927 - DNA, 122 bp, Homo sapiens
caagcaagtgcaacccgctggtgactgcaaatgagcacatggaactgtgcgcccacgctacgctcggttaaaatcaatctgggctcttcctgcctcgtccacgccgaggtcacacgcagcac

SEQ ID NO: 421928 - DNA, 122 bp, Homo sapiens
gatcttgaaaaaaccacaacccctctctgagctccaggatcttcataggtaaaataaaagcgtgcagtgagatggtctctaaggaatatgcagcctctctcccaccttgcggtcaacctccc

SEQ ID NO: 421929 - DNA, 122 bp, Homo sapiens
gttggcggcctcggctagcggccaggagccacttctgcgggtgcccagagaagcaaaagtcgccggtcccatgtcgtcgccctctctgccccccaggaggggcaagagggagccacggccga

SEQ ID NO: 421930 - DNA, 122 bp, Homo sapiens
tctcctgtccccgcctgccctgactcaccctcgcggcccgcccgggaactctgcgggagtcgcggcagctccgctcccagagacccaggagttgggcccagcgtccctcccggaacggtgag

SEQ ID NO: 421931 - DNA, 122 bp, Homo sapiens
ttttattgcaattgcctttcatgtgacacaacagaaatcagagccgaccatagcattcagcgctgtgtacatggagggagtccagcttgggtgagaggagtgtgtgcataaaaacacaggtt

SEQ ID NO: 421932 - DNA, 122 bp, Homo sapiens
ttgagttcccgcggaaaagcaaggaggcccttcctcagcggctcctacgttcattctatgcgaaatacaccttcccagataaggagcatttaaaatgtgcagagttcctttcatctgtttgc

SEQ ID NO: 421933 - DNA, 122 bp, Homo sapiens
tgaaaagcaaagaaaatatgcaacacaaatcaagtaagtaggacactcccctcttgcacacggacaggctggatgcaaggggcactcccaaaaattgttatacctgattacccagttagatg

SEQ ID NO: 421934 - DNA, 122 bp, Homo sapiens
ggcaaggatggggaaaaacacaaagtattatttttgacagctctgagttcacataatagacgacatttaaacaacgtataactggatacgtctaccaaatatggatcaccccagccttatcc

SEQ ID NO: 421935 - DNA, 122 bp, Homo sapiens
gagggaagctgatgtggagctggtgggatatgccagatacttctcacattgctctccacccgggacagattgctgtgagtctaagtgggcacgtgtgtttctgtttctccaaagaaccccta

SEQ ID NO: 421936 - DNA, 122 bp, Homo sapiens
aggacggtggggggacgacggcgtaggtccaggggagctgagagtgcgtctgtgtttccccggagacgcgctcggcccgggggcgggtggcggcgtcagtcccggggaggaccggcaggggg

SEQ ID NO: 421937 - DNA, 122 bp, Homo sapiens
tggtcttgcttctctcctcccctgcactggctctgggtgcttatctctgcagaagcttctcgctagcaaacccacattcagcgccctgtagctgaacacagcacaaaaagccctagagatca

SEQ ID NO: 421938 - DNA, 122 bp, Homo sapiens
ccagcgttggttgtcaagtcagcactcggccaggaagctgatggcaggcgtcccggtctgcgctgggagcccacggggctgaggcggccgcgccgggttgacctggtgcctctgagctacgt

SEQ ID NO: 421939 - DNA, 122 bp, Homo sapiens
cagggcccctttattgaggacctgccgggcaccaggcacaatgcatccaggatccgggggcggctgtgatcttgttcccattttccagagcaggaaagctcagagaccaccgcccagaccct

SEQ ID NO: 421940 - DNA, 122 bp, Homo sapiens
atcatacaacttaagaattctgctcctaggtatctacccaagaacacataaagacttgcacgtgaatgtaatcttcatagcagcattattcataaaagccaaaaagtagaaactcaaatgtc

SEQ ID NO: 421941 - DNA, 122 bp, Homo sapiens
tgtaaatcaggagtggttgaaaacccaaacaaggcctttctagcagctttctgggctgcccgcttcttggaagagttgaggagaaatattatgccagaatatctgaggtgtttgcaaatgtg

SEQ ID NO: 421942 - DNA, 122 bp, Homo sapiens
tggctaagaaccaattctgactggttaatataaaaggctgggatgaaaggaatgaggattcgttgcattccattcttgctacgttcactgaccagtgtagcccacccatagactgaggtgtc

SEQ ID NO: 421943 - DNA, 122 bp, Homo sapiens
gcgggggcccaaggtggcccttggactaggcgccggagctgtcaacggggcgaggtgtggcgggcggccgggggaggggacgcggtgccgagtggcctcctgcacagccgctcagcattccc

SEQ ID NO: 421944 - DNA, 122 bp, Homo sapiens
gtcataggattgcgctgaacaccaggcgcagtgcaagctgccaggagggggccgagggggcgtggccatgcccaggcctgggtgtgaagccaatggccgtcagccgacgtcagtagagcatg

SEQ ID NO: 421945 - DNA, 122 bp, Homo sapiens
aggagcaagagcaggggcgggaccaagagcaagtgcaggggcggggccaggagcaagagccggggcgtggccaggagcaagtgctgtgagaggcgcagaagcgaggtggaatcttaaaagtg

SEQ ID NO: 421946 - DNA, 122 bp, Homo sapiens
gacagaaatcagtcagccaaggaaatgagttttgagactggcaacttcagtcaccactggcgtttttttctgcatctgtgaaaattcacaccccacagagatgaggcttcctttatcctaca

SEQ ID NO: 421947 - DNA, 122 bp, Homo sapiens
cggctgtcacccatctcgctgggacaactcagctagtccaagactgcctggagggagccccgcccccgcctccgcctccgcctgacgccccaggaagccccggggccttcaccgtctctttc

SEQ ID NO: 421948 - DNA, 122 bp, Homo sapiens
aggtcgcggatctcctgctcgtacagcgcccggaagcgggatggctcggagtgcttctggcgcagcaccagcagctcggcttccaggaccttgttctgctgctccagctcgtgcacgcgctc

SEQ ID NO: 421949 - DNA, 122 bp, Homo sapiens
ctaatcacccacaactgctgtacgacaacaaagcagaaacacaggtggtgtgggcaaacacggccacagcctcttgtcacgtggaaaatgggtatggcctggccatgttttagccgcttgcc

SEQ ID NO: 421950 - DNA, 122 bp, Homo sapiens
attactgttattaaagagaccctcaaagccagaagttgaatcttgactgtagcacttgcacgtacacgcacactcttgcaactgaaaccactcagattgtcctaatgctgctccgcatagca

SEQ ID NO: 421951 - DNA, 122 bp, Homo sapiens
ggccccagggaactagacctgcaaacatgacacccacagccttgcagcaggagggcctggcggggtcgtgggtggcgtggccccgtttctacacctggggaaactgaggcacagcccaaggt

SEQ ID NO: 421952 - DNA, 122 bp, Homo sapiens
cagtaaaatacacacttccccagcctcacacaagacccgaagggcagccagcgcccgaggcgattccgagaatcagacaagtttgggaacctgctaagcgcaagcaaaacaaaaggtttcca

SEQ ID NO: 421953 - DNA, 122 bp, Homo sapiens
cctcggcctctgcaggtcctcgtgggaaaccgcgggggcacgtggggcggctgcagggtccgcaaagccggctgtttgcgaagggcgcagctccacctggaacagccgaggccgcccacgcg

SEQ ID NO: 421954 - DNA, 122 bp, Homo sapiens
acaaatgtcatctccattatacagatgagaagccggttccaagaggtgaaatagcttgcccgagaccacacagtcaggaagaagtcaaagtggaatccagagaaaggcctggtgctactctt

SEQ ID NO: 421955 - DNA, 122 bp, Homo sapiens
gggaaatcaatatctacgtatttcccatggcgtccagtggcccagagattcctacactatcggtggacacatcacagtaagattagactgaggattggcgaggggtgcgccgttcttgtgta

SEQ ID NO: 421956 - DNA, 122 bp, Homo sapiens
tggctgaggggggctggtcgccgggggtgcgttggtggccccatgtttcgcaggttcctccgggagcggcgcgtctccctggtgtggagctgccgggcacttccatgactttgtttctgtct

SEQ ID NO: 421957 - DNA, 122 bp, Homo sapiens
aggcagtttgaaagctctgctttctgcttgacctttggaagtcctatgagggaccatttacggtttcctcagtaatttccaccaggatgaatttccttctcatcactctgcctcaggtagtg

SEQ ID NO: 421958 - DNA, 122 bp, Homo sapiens
acttggccggggagaagtaactcttcctgaagggatggcgcggggtctcggggttcctcccgtcctgccagcgtctgcgtccgggaaacgcattggcggtttcggggtcctccctagcttgc

SEQ ID NO: 421959 - DNA, 122 bp, Homo sapiens
tgggaggctccccagtttgtgggtaacatctgactctccctccccaaagagagactccagcgagagactggggatttggaggtccaagtcatggcagaactgggttgcttgctaggacacaa

SEQ ID NO: 421960 - DNA, 122 bp, Homo sapiens
cgaatgcctgacctcaagtgatccacccaccttggcctaccaaagtgttgggaatacaggcgtgagccacaacgcctggccaagagcaattgttataattgctatcaccaataattttttca

SEQ ID NO: 421961 - DNA, 122 bp, Homo sapiens
ctagagccagcgtgaccaacgacagcggccctcgactggtgtccattgcgggcacgcgaccgtcggtgcggaatggacagctgctggtatcaaccgggctcccagccctagaccagctctta

SEQ ID NO: 421962 - DNA, 122 bp, Homo sapiens
tttcttcgtggcacggagcaccatctccaatggccttgttcatttagttaatttattttccgacttagttccaggtgctaaaacagtgttaccttggcaggcttcccatcaaatattgttgc

SEQ ID NO: 421963 - DNA, 122 bp, Homo sapiens
agggcggccgggcatcccccgtgtccccgctgcccttctcagccgaccccggcgcccgcacgttggagagctgccctggggtcataggcttgtactgtggtccaccaaagccgccttagaaa

SEQ ID NO: 421964 - DNA, 122 bp, Homo sapiens
gatatagttgggtctgtgtctgccacatcttattttctgtttcatgcacctcacggagcacgttgtttctgtatccttccttaactgctttcttttgcatggggtgaatattttctaatgga

SEQ ID NO: 421965 - DNA, 122 bp, Homo sapiens
actgtaagctccgtgaagtcagagaccatgtctttcaaagtcatcctatattcctgggctcggcacaagattggcatagccggttagtaagaaacattgatttggtagaatactaaaggctc

SEQ ID NO: 421966 - DNA, 122 bp, Homo sapiens
gaaaggcactcagtggtacagggctcggggcggggggtgggtgggggtgcctctgggctccgggtctgactgtccagcacagctgttcccgggggaggcccagccaggatcctcatcgcccg

SEQ ID NO: 421967 - DNA, 122 bp, Homo sapiens
ccaagaaagaaccccgccactcgcacagagaggggtgcggcccttggatgcacgtccggacgatcctgggccagggaaagggcgtttatctcagctctgcgccgtgccccttccccccacgc

SEQ ID NO: 421968 - DNA, 122 bp, Homo sapiens
aatgtgagggacgggggtggcgtgtggactgaagctctaggcacctgcgggacttgtctccggattcgttttggaggaccagtatccgactatgctgaagcctgcggtggccgagaaaggcg

SEQ ID NO: 421969 - DNA, 122 bp, Homo sapiens
agacccctcccactccgcccctcttggaatgcggctgagcggtggatgtcccttttcgggcgccgtaggcgcgttcctattggctagctttgttcggcgccaaagcgcggagcggaggccga

SEQ ID NO: 421970 - DNA, 122 bp, Homo sapiens
tgagggctggcaacacacactgctggaggagaagacttggggcacagggacaagcacttacgcagggtgcagtgcccaccacccatagagggcgcccagccagggcagcagccactcccaaa

SEQ ID NO: 421971 - DNA, 122 bp, Homo sapiens
cagggttttgttaccagtataaacaatcgtgtagcccgaaagcacagaccactgacaacccgtagccttcctgtcaaataatcgttaacccagtaacccgtggatggcccaaatgcattcca

SEQ ID NO: 421972 - DNA, 122 bp, Homo sapiens
tatcaatacattatagcagaaagatcctataatcatcttcacgggtgctaaaaaagcattcgacaaaatcaaaatccattctgatttaataggcccttaataaaatagaaatccatgaatat

SEQ ID NO: 421973 - DNA, 122 bp, Homo sapiens
aaagggactgaatggaccctggaacgctgccacaggaaaaacaaccaccacaactttgctcgccagcagaaacggccaaaagcagcaggaggagagtcttggcctctgaatcatagtggtgt

SEQ ID NO: 421974 - DNA, 122 bp, Homo sapiens
gggcaatgggggccatcgtgggacccgccctgcccccaccccgggagatccacgggaggacggaagatttggccgccgctgccgcaccaggcagctatctggaaacagagggagatgtcgtg

SEQ ID NO: 421975 - DNA, 122 bp, Homo sapiens
ctggggaagcccgtgcgtgatgtggctgccaaggtgtgtgcgggtcaagggtgtacaggccggggggtggtgggagctcccaggagcctttcttctaggattgactcaggctgtacccactc

SEQ ID NO: 421976 - DNA, 122 bp, Homo sapiens
ccccctgaattctgctgcgctgactgagacacactcaagggctgtgatttccagtcttgacgtggcacatttgctgcagactggggaactggcaatgaatttaggaccaggaaaagggggag

SEQ ID NO: 421977 - DNA, 122 bp, Homo sapiens
ggcctggctcagggcagcaaaagaactcttgctttcagagggccaggtccctccagtcggcggccaccttcttcctcagagtcagagaggtcagtgcctgcatgaggtcacccagcatgccc

SEQ ID NO: 421978 - DNA, 122 bp, Homo sapiens
tctactgccagagctgcgagggcatctggccagcaacacccggcttcttgggcgaacagtcgcccaagagtccacaattttcttgtgactcaaatagatggataggtgcatggatggatggt

SEQ ID NO: 421979 - DNA, 122 bp, Homo sapiens
cgtgcgtgccagcagcgcgccatccagccacagctcggcgcgcacgccgggtgcccccgccgctgctcggggaagccccttcgcttcgtgcacccacacgctcagccatgtctcttcccgct

SEQ ID NO: 421980 - DNA, 122 bp, Homo sapiens
tgattgcaccgcgagcgcctgaggtgatctcggcctacatcgcgtcagcggggccttgggcgtgagcaccgccccctgtccggacgcagggtactggggcacctcgaactgtggcacctcac

SEQ ID NO: 421981 - DNA, 122 bp, Homo sapiens
tttttgcctggcaaatgctagtgacacccgttctcagcacccagaagcagaggccaggagcggggcggctgtggctgcgccctccgccctactccgctaatcccggggccgcgcagtccctg

SEQ ID NO: 421982 - DNA, 122 bp, Homo sapiens
cggggaagcagaaaaagaagactgggagagatataaaggagttgccccaactgaccatggcgatcagccacaggcgagtcctgaagagctcagaggggcttcagctttggtggctgggggga

SEQ ID NO: 421983 - DNA, 122 bp, Homo sapiens
atactacatgttgccatgaatatcagctgcccctgtctccaacacacacatgcgtgcacacgcacacacacacacaccttgtaaaatactatcagatttagaataaacactgtaagatattt

SEQ ID NO: 421984 - DNA, 122 bp, Homo sapiens
gagagttcgcagccagggagctcgggtgggcccaacgctgtccgcccgcagcgccagccccgctgtgcacagggttttcctggtgtcacaggtagttacaccgcgctttgttttggtttgtt

SEQ ID NO: 421985 - DNA, 122 bp, Homo sapiens
gccatgaatacatcgatttggtacattggtgttcagtgacacattaacatccaccaagaccgacagtggggtttatggtccttgcccagcagctggttttggcctggtgtcattctgaggaa

SEQ ID NO: 421986 - DNA, 122 bp, Homo sapiens
ggggcaaacctcccggcgcggccatgcggggaggtaagtgatctgcctgtgcgcccagggcgtgggaaggcgcccgccctctcctctctccaggatgaaaggaaacgaagaatgccgcaatg

SEQ ID NO: 421987 - DNA, 122 bp, Homo sapiens
gggcctcagggcgacggttccagaacagacccaggctgctccggtcagcagcagccccgccgctctcccacctagcggggacccccagccccgccagccgcatcgctctgtccctctcatgt

SEQ ID NO: 421988 - DNA, 122 bp, Homo sapiens
aggggcaggggttaaaaagctacctattgaatactatgttccctatttgggtgatgggttcgttagaagtccaaacctcagcagcacacaatatactcatgtaacaagcctgcacatgtacc

SEQ ID NO: 421989 - DNA, 122 bp, Homo sapiens
cagcacatgaccttattgagcctcagtttccacatctaggatgattcctagccctgtcgccgcacttgactgtcctatgcttggtggagctctgaggccagcgggtggaagtgtctcctaac

SEQ ID NO: 421990 - DNA, 122 bp, Homo sapiens
tgcagacccctctggaggcccactctgcgcccagcccaggagacaaagcctagtggggctcgtccacgagggactcaggtccccaagaacgtggctgtccaggctgccgggagcctcctctg

SEQ ID NO: 421991 - DNA, 122 bp, Homo sapiens
tagtatacaaaaagtattcgggttgtatactgggctgcaggtgaacttcactagaaaatacggactatctcataatttgtttaaagtatgttttatatggatcaaaaaggtaccagtattac

SEQ ID NO: 421992 - DNA, 122 bp, Homo sapiens
cggcgcgcgccgcgccccacgcgcacacgcacgcgcacaggcgcgcgccggtcggccccgcgcgacgttcctcagcgagcccggccttctcacacacacgccgctggggagcttggccgtcg

SEQ ID NO: 421993 - DNA, 122 bp, Homo sapiens
ttttttcccagttttaattttttacctatgtatttctccttcatttaaaaaattttccttcgctgtctaattcttgaaaaatattatttattctctttattcttcagtatttttctgaaatt

SEQ ID NO: 421994 - DNA, 122 bp, Homo sapiens
attctgtctacaacatgagtggagatccatctcttccttacctctggtaaggggaccacacgctgcagccagtgagacagtggcatgttcttgttacaactcaatctaactcccccagaaga

SEQ ID NO: 421995 - DNA, 122 bp, Homo sapiens
ggagccgccagttctcccgccccggggtcgctggacaccccctcctgtcgccaggtcgggcgcccacggtcggacccgcaccccccaaccctggccctctgagaccgccaggccccggccca

SEQ ID NO: 421996 - DNA, 122 bp, Homo sapiens
tcctggctgtcaaatttgatttctgaggctgaaacatagcagggctcgctctggaggtaacgttccagctctaggcaggtctgtgcaaaatgaaccagagaaggcacgtgattgccatgacg

SEQ ID NO: 421997 - DNA, 122 bp, Homo sapiens
gtcgccccaaaacagccctgggactcccctgtcttgctcctcgagaccctcccccatcaccgtcctctgggcaccccatcctatgacccagtctcaggcatcttccgaaatgctcgatgata

SEQ ID NO: 421998 - DNA, 122 bp, Homo sapiens
tcaattggtcgtcgtcaacttccgatggccggccactacgcttctcatcttcaaggctctcgtctcctttgcaaaacttcttgagccaccactgcactgtacgttcgttcattagcagttcc

SEQ ID NO: 421999 - DNA, 122 bp, Homo sapiens
gtctggagttgtaagtggtttctgattgaacacagctgtctagctgctggccacggggtgcgcggaggaggcggggctagagggagaaaagggtgggggcgagtagcctggaggccgagcag

SEQ ID NO: 422000 - DNA, 122 bp, Homo sapiens
attttctgatcgtctctccaaaaccttgccaccaatttgcactcccacgaatcctgttaccgtgactatctcgccatgccctccctagcactgagcgtgatctctagtatcattttccatcg

SEQ ID NO: 422001 - DNA, 122 bp, Homo sapiens
cgcggcgcccgctggggagccggggcgcacacaggacagccgcaagccttctgggcctggcgccctcccacacccgctaggaggggaggaagcgcctccccgactccctgaggagggcgcca

SEQ ID NO: 422002 - DNA, 122 bp, Homo sapiens
cacctggaaaatcgggtcactcccacccgaatactgcgcttttccgacgggcttaaaaaacggtgcaccacaagattatatcccacacctggctcgggggtggggagcgggggtcctacgcc

SEQ ID NO: 422003 - DNA, 122 bp, Homo sapiens
tctcccacagtggaggaggtgttgtctccagaggcagccgctgcgccccagactcccagccgcggcttcggatgcagctggaataaggttccagtgttccctttcccgtcaccaggcagagc

SEQ ID NO: 422004 - DNA, 122 bp, Homo sapiens
atctctcctgctggaagagattggagcctcctttgggggctctggctttgccagccctagcggggagtgggaggtgggggctgttccaagagggaggcgaagtgcgctcagctctttaggtg

SEQ ID NO: 422005 - DNA, 122 bp, Homo sapiens
ggtggggtgaaggaggaggcaggtgggctgctgcagtgccccgaggtggccaaggctgaccggtggctggaggacagccggcactgctgttccaccgccgacttcggggacctcccactgct

SEQ ID NO: 422006 - DNA, 122 bp, Homo sapiens
catttctgggaaaatatgttgttgaccagctactgttatttgaccagttcatcctcactccgagtggcttttcaaagtatgtcactcaaaagtgtacatatattatgttccttggaattttt

SEQ ID NO: 422007 - DNA, 122 bp, Homo sapiens
cttgcaagcttctgttactagcgtgtgattgtccttctgcctcagatcttctgtctcattcgatacagcaaagtttacgacactgggactgatgtttacatctttggaaagacaagcatctc

SEQ ID NO: 422008 - DNA, 122 bp, Homo sapiens
gacatcttccagggtaggccgcgtctctacttatctgtggtctcagcgtccagcacatggcgtggaagagggggtggcgtcagtgagttcagtgactagggacggagaaagacttcgtggag

SEQ ID NO: 422009 - DNA, 122 bp, Homo sapiens
ctggctttaccagcacaacctccattgctcagaagggaaataagcatctagaaagggacacgagttgtccagcttcctaggatggggcaccctcgcttgggaagccctatgaatccttcccg

SEQ ID NO: 422010 - DNA, 122 bp, Homo sapiens
ctggccgcgggctcgcaggtgcagatgctttgaaatgaagaactcggaccaggccgacaacgtgggcgatccggcaagggaggctggccgccggatggggctgacaagcgcaccgctgtcga

SEQ ID NO: 422011 - DNA, 122 bp, Homo sapiens
ttacaattacactccttccccctaagtacagactgcaaagccagacagagctggcctggccgccaccactgccaatgaaaacgccttgggaaaagccaaaagtgctcactgctaaacaccat

SEQ ID NO: 422012 - DNA, 122 bp, Homo sapiens
caactccagagtacatcagggaacatctttgcaaacagaaagcctcagtcatgtaagggacgacattctgcagaaaatgttgaggcacagaacaatacaaaagaatggtgaataggctattt

SEQ ID NO: 422013 - DNA, 122 bp, Homo sapiens
ggcgggagctacgccggcccaagccccgccggggaccagcgagccgggaggaggagcaggcgccacagccgccccgcgccccgcgcccgcttgtaatccggtccgctccttattcagccgcc

SEQ ID NO: 422014 - DNA, 122 bp, Homo sapiens
aagcatcacagtgcatctcacagtgcgtgtgcgggagtggagatgcctggaacagaattccgataggactgtaagtgagagttcattgttctgaactctccattgttccataaaacctgtct

SEQ ID NO: 422015 - DNA, 122 bp, Homo sapiens
tctctggttcctcctcctcctcctcctctttctcttccagtgaaggcacctcctggggtccggggcccagcacccatggccccagctggtcctcctcaatggcaggcagcgtggcgtacatg

SEQ ID NO: 422016 - DNA, 122 bp, Homo sapiens
tcaggcaccagggtcccagaaggttccggctcctcttctgcgcccttacccagctcttttcgcctcgcaaagggtcacccagggagccaccagcagcagatccttcccttttgctcctcctg

SEQ ID NO: 422017 - DNA, 122 bp, Homo sapiens
cctcgccgaggcagaaaatagaaaaggaagaattcagcagattttccccggtggccccctcggcggcaccaagataaccagcgcagaaaccacaattggatccttattcctccagcccagga

SEQ ID NO: 422018 - DNA, 122 bp, Homo sapiens
ccaataaagcaatgtagcttggagccttggaggtctgaatctcaaatttgccctgtttcacgaatgaatgaattgtggcctcaggaaccacgagcgcatggtgtagcaccagtacaacataa

SEQ ID NO: 422019 - DNA, 122 bp, Homo sapiens
aagaatcaggcctggcactttaaccaccttcagtagtagacatcactttaattaaatgcacgtgttgctattatgtttgctaggaagccttgctgccacaagctgtctgtggcaatcacgac

SEQ ID NO: 422020 - DNA, 122 bp, Homo sapiens
aatggaccagtcgagacaccaattccagggttcggttgcgcttccgtcgctgtttcctttcgtcactttgtggggaaaagtggtagcaatcatacctcttcttgaagggctgcagagggggt

SEQ ID NO: 422021 - DNA, 122 bp, Homo sapiens
aaggtattccatgcagaggaagcagcatgtgtgaaagccacatgccatagataatctatacgttcgttgacttcttcactacttctctctttaaaaacagtgcaaagggacattatgctgca

SEQ ID NO: 422022 - DNA, 122 bp, Homo sapiens
ggagcttcttcacctttaggcggggtagagacatttaaaatggcccctaaacttggagggcgcgtaaagctcataggctggagcttcttaacctttaggcagggtagagacatttaagacgg

SEQ ID NO: 422023 - DNA, 122 bp, Homo sapiens
caccaataaaaagcacaaaaatgcaaaaaacacggcagtaaatatactgtgaaaataacacggcttacggtatgagagctgaaacaaggcagcagagcatctccttgatcaacctcacctgg

SEQ ID NO: 422024 - DNA, 122 bp, Homo sapiens
atggtatagctaaaaacaaaagcccataaagttggagatagggaccagagtttaacatagcgatctaggccagaattgacaatgtttaagtaatggtggaatctgtcaataagacttcccag

SEQ ID NO: 422025 - DNA, 122 bp, Homo sapiens
ttcattgttcttaggtatacttaattaccaggaaaactttatggatcgtacctaaataagcgttaagccatttaaagggccgacgtgatatgatgtaaacaatagtattctacataatagtt

SEQ ID NO: 422026 - DNA, 122 bp, Homo sapiens
ccccgtcggaagtgggggctgcctcccggagccgcagctgcccctcccccaagacgcggacgccctcctggagattcagaccctctcatggagatgcagacccctcccccggatccaaacct

SEQ ID NO: 422027 - DNA, 122 bp, Homo sapiens
accaaaaggaaaggaagattctagcaccgtacgtcagcattaagaaatcaggaaacgggccgggcgcggtggctcacgcctgtaatctcagcactttgggaggatgaggtgggcggatcacg

SEQ ID NO: 422028 - DNA, 122 bp, Homo sapiens
gcgttgcggccgcccgcggcgtacacgagcccgttgaacacgctcaggctgaagtgcgtgcgcttctggttcatgctggccaggtgtatccaggtgttgaagcggggatcgtatctggaaat

SEQ ID NO: 422029 - DNA, 122 bp, Homo sapiens
tatggtttggctgtgtccccacccaaatttcaagttgatgtgtatctcccagaattcccacgtgcgagggacctaaggggaggtaattgaatcacgggggccagactttcccgtgctatttt

SEQ ID NO: 422030 - DNA, 122 bp, Homo sapiens
tctatcttttaacctcatcacagtctctatcttcataaatgcatgtgtaatgatgctattcgtgacttgctcattcatattcataacttcataattcagtttacaagtcttcccaccatcct

SEQ ID NO: 422031 - DNA, 122 bp, Homo sapiens
ccatagcatcgggcagctccttcagggttcccagctcgaaatagttctgtgccccttgcacgttcttccctggccagggcttccttctcgctagtctccagctcccaggagtctcggccttg

SEQ ID NO: 422032 - DNA, 122 bp, Homo sapiens
aagcccagagcgccggtggatcgcgagccaaggcggcgggtggagcctgagccgtgaggccgtggccaatcgcgccgctccgggggaggagccccaaagggggaaaagaaagtgcggcggaa

SEQ ID NO: 422033 - DNA, 122 bp, Homo sapiens
gaggtctggtggggtgcgtgtcactgatgctactgcactagaaggctgagtgccttggcccgcccttcctttccgagcactcacccctgtttatttctgtttcattaaggtcacatcagcaa

SEQ ID NO: 422034 - DNA, 122 bp, Homo sapiens
tcagaaaatgattctgcactgggcctcgtgctctctgcctgacctctatctcaggctctgcgtcttgatcaactgtgaatggaaagcaacaggagggacaggattgtgattgtgaggctaat

SEQ ID NO: 422035 - DNA, 122 bp, Homo sapiens
tatgaggcttcattgatcatcatctataatagaattttctcaagctggatttggagttgacgattgaagtaatcagtacttcctgtacatgatattggtggggaaatcctaaaatgacaaat

SEQ ID NO: 422036 - DNA, 122 bp, Homo sapiens
gtgctgctggaggggaggggcggccagaggacgtgggtgaggtcgtgcagactgctgctgcgtccccttgccgggacctttggttaaggggaagaggtggagaaaagccgattgggcctggg

SEQ ID NO: 422037 - DNA, 122 bp, Homo sapiens
tcgtggggcttcagggagcccttgtgtgtgcctgggagcacaaccagacagccgttgttccggctgatgtgctccatcgccgtccaggcgcaaacgatgagatcgctgggcctgaaggggaa

SEQ ID NO: 422038 - DNA, 122 bp, Homo sapiens
ttgtcctcgggatggtttccaagctccttagcaagctaaacaaggccccttgaaggctgccgtctccaccctcatctcccaccacaccctgccttcacctgacccacttggaacaggaaggt

SEQ ID NO: 422039 - DNA, 122 bp, Homo sapiens
atttctgaggagaggttatggatgtagtgggacaggacgacggcgcggtcaaacaggtctcgaagggtcacctggcatcgggcagccccgccgggacagatgggcaagggggccacgctctg

SEQ ID NO: 422040 - DNA, 122 bp, Homo sapiens
aatgccacagtcaggaagataaagtcacagtcagggagataaagcagacacgagtggagacgccacgctcggtgagataaagcagacacgagtggagctgccacgctcagtgagataaagca

SEQ ID NO: 422041 - DNA, 122 bp, Homo sapiens
atcacgctttcgatcctgccgtgcgagcccgaggcgctgcgaacggtgcctaacgtcagacgtctcgaggctcgcgttccatggaggaagccctcccaatccgaaagcgcccgggcgccaag

SEQ ID NO: 422042 - DNA, 122 bp, Homo sapiens
gacgcgagccccccctcgctccgcttccgcccggctgctggggattgtagttctccggttcgtgaggccccgctctctggctgtagttgtgcaggtggactacaaagcccgagatgcatcgc

SEQ ID NO: 422043 - DNA, 122 bp, Homo sapiens
taggagataagacgacaagccaaagtgtcaaagctatgaagtcacagagctatgaagtggcgcaatctcggctcactgcaagctccacctcctgggttcacgccattctctcgcctcagcct

SEQ ID NO: 422044 - DNA, 122 bp, Homo sapiens
cgcctcagaggccccagcctggctgtgaacttggtctaaggcggactctactggcagctccgggatgttacagcctctgcctctggtccagagcagcggcggtgcggacaacccgtgcgctt

SEQ ID NO: 422045 - DNA, 122 bp, Homo sapiens
tgcacacggagtcctaggtcaatgccaacaccaactcacactgagccctaactatggaatcggagcaacatcattatttaggcccatggacaaaataccaaagtaatctgtttctatgttcc

SEQ ID NO: 422046 - DNA, 122 bp, Homo sapiens
tgtgctcctggcagcccctcggccgcggaaggcacaagtcctcttcgccatcgtggccagcgagacaagtagctgggacagggagaagctatggactctgtccctggaggccaaatgcaagg

SEQ ID NO: 422047 - DNA, 122 bp, Homo sapiens
aaagctttttacataggattaagaagacatcagattgttccattagtatattcctgctcacgaataagctttcgttatacatttccttttcccccgagccgctctaacaactgctgcatata

SEQ ID NO: 422048 - DNA, 122 bp, Homo sapiens
agacagctttttgagtaccagattggtgttgaagttgggcttctctgaggtttttctgcacgaagggcagcgcattggtgctctgccttcttctgagcagaggcagaggcagggcctgcaaa

SEQ ID NO: 422049 - DNA, 122 bp, Homo sapiens
gcggtggccgcggccgccgcctggggttagccctggggctgctgctggcgctggtgctggcgccgcgggttctgcgggccaagcccacggtgcgcaaagagcgcgtggtgcggcccgactcg

SEQ ID NO: 422050 - DNA, 122 bp, Homo sapiens
ttcctctggaaagatcaggatgaatattctgtgagcatggccgctgggttgtggccgagtcgtcagggtgcagaccctgctattgaggaagtttgggtttggtttatttccccagcaaagaa

SEQ ID NO: 422051 - DNA, 122 bp, Homo sapiens
ctccgtagcggggcggggcctcagctccagctgggcccgggggcgaggctggttggggtacggccatagtgggcggggcctggccggcgggagcgcaccgccttcccaaagggctcgggggc

SEQ ID NO: 422052 - DNA, 122 bp, Homo sapiens
acagggaggcactcgatctctggcgacccctgcagggcatagccggagttgcattcgaagcggacgatggcccccaccgagaagtcactgcccagcctcttgccatagcggggttccggcac

SEQ ID NO: 422053 - DNA, 122 bp, Homo sapiens
acccgtgtggttaagcggagctgagagaccatggctatgccccatgtgtggaccacctaccgaagttgcccagggtggcagtgcagccccgggctgaggtgtagcagtcatcgataccagcc

SEQ ID NO: 422054 - DNA, 122 bp, Homo sapiens
atatcccaaggcagttccaaacacgtcatggccagagtccagatctccatcagggctgatcgctattcacctatcaagtcttggtttcaaacacgctcgtgaagccttcgtcctctctcagt

SEQ ID NO: 422055 - DNA, 122 bp, Homo sapiens
agaactacgcatgcgtctcagcgctttcccgccagcacacccttagtgggtgggggggggcgattgaattcccacagtgagtccagcccaccgaagctgagaggattcctaaccttcctctt

SEQ ID NO: 422056 - DNA, 122 bp, Homo sapiens
caaggccggagcggttccaggaggaccctggtgaggagggctcggcccatgggtgtagaccgatggacctgggcacgaggggcggggcaggacaagggagcaggagaaatgaatagagaaag

SEQ ID NO: 422057 - DNA, 122 bp, Homo sapiens
ctcccgtgtattggccttaaatagtgtgttgaggccgggagtggtgcgtgcagctgtagacggctcaggtatgaggaaactggctgtgcagaattccctgcaggcacagtggctgcctgctc

SEQ ID NO: 422058 - DNA, 122 bp, Homo sapiens
cagctgcctgagtactggcacacagcgggcagtgaatctgaggagctgtggcctcacagtcgctgcaggctgagccagaaaggagggccaggggaggtaagactcactcctgcaggagcggg

SEQ ID NO: 422059 - DNA, 122 bp, Homo sapiens
tgcaaaccttgtatgacatcactgagacacctagcggaaaacagctaattctttctaagccgcccaaagcggggttgcgccggggcctccggggccgaggtgggcctgctcattggaagatc

SEQ ID NO: 422060 - DNA, 122 bp, Homo sapiens
gtaggccttctccacagctcatacagcagcattcaccccctgacaggagccaacaccttccggagctggcctgggtatgaattcctgcaacaggcacaacagtgcggccccatttccagcca

SEQ ID NO: 422061 - DNA, 122 bp, Homo sapiens
cctgggagcaggtgggtctctgggacgagggtccatggtggatggctctggagacgctcccgaggctgtgccgtcccgctgctgcacaggtcggagggtcaccgcagaggctactcgggctg

SEQ ID NO: 422062 - DNA, 122 bp, Homo sapiens
ctcggcagttccagagaccggctcctcacggagggtggcggtagagactgttaagccccgcgggcgccggggcaggccggactgtgccattcgtggggggtaccatgtgggaccgagccgcc

SEQ ID NO: 422063 - DNA, 122 bp, Homo sapiens
gtgggaggggcataagccggtcaagtatttcccgggccttccggagcaatcttgcctaagcgttcatatttaacgcattggactgggaaacatttggagatcattgattaagaaatactcaa

SEQ ID NO: 422064 - DNA, 122 bp, Homo sapiens
caggcaacccccggaggctggtgttgctagcacccctctgcaggagaagaagctggggctcgggagctgactggatctgctcaaaggcccaggaagaataagagttaggaactgggacagac

SEQ ID NO: 422065 - DNA, 122 bp, Homo sapiens
ctgaccctcgcttgcctgcctgggccccctccacagactacgcctttgccgcacatcacacgggcatcacagacaccacccgcgtgggaatcatcctgtcgcggggcacagcagccagcatc

SEQ ID NO: 422066 - DNA, 122 bp, Homo sapiens
ctctctacttctagagcaatggttttaaacttggggcgattttgccccccagggaacattcgaccatgtctggagacatttttggttttcccaacgaggaggttgctactggcgtctcatga

SEQ ID NO: 422067 - DNA, 122 bp, Homo sapiens
cgctggccctcggagcggtgcgcggcgtggaccggcgggctgggctgcgcagagacctgccgccgcccccccagctcggtcttttatacccggggacccgccctgcccggtgacgtcatgac

SEQ ID NO: 422068 - DNA, 122 bp, Homo sapiens
gcaggcagtatctcattagaccagctcacaaagactgacgtataaacgcaaactcaagtacgctaatttgcaaaggaatgcatttactgctactcaatctcacagcctacaccttctttacc

SEQ ID NO: 422069 - DNA, 122 bp, Homo sapiens
tgtccctctggggtcacagggcagagccagaaatgtcctcatccccagagacctcctcctcgggtcaaccctgccactacttagaccaggggtggtgattgcccaggcgggacatagtcagg

SEQ ID NO: 422070 - DNA, 122 bp, Homo sapiens
tctgacccctgctcagcgcgcgccatttcgtcgttgccaaacgaaatcaagccccgcgtgcgctccaggggcgaaggactctggactcaccccgaccaccgggagagctggcccctacccac

SEQ ID NO: 422071 - DNA, 122 bp, Homo sapiens
ttgttttcttgagtgatctagggtttttcacctgctgttggtttttccttagaagactcacgggtaagtgtgtcagacatggaccagaatcaaagtactatgcagtattttgaaaagagcaa

SEQ ID NO: 422072 - DNA, 122 bp, Homo sapiens
ttcatttgtcatcaccaccttggacccgccccctcgtctcaggccgtcgcacgcgttttgcgtcagttggcaaggcactttacggccgtcgtgccgctcgtgtcagtcaacatggaggcaga

SEQ ID NO: 422073 - DNA, 122 bp, Homo sapiens
ggtttacacatgtttattgaatcagcaataaatcaaaaatattttgagaaaaaaaatccccgaagtttcaaaaagcaaaaaactatgttgaatcgacacaaattgagtggcgtgtaggctgt

SEQ ID NO: 422074 - DNA, 122 bp, Homo sapiens
tctccacaggggtctgatctctctgctctgcttttccaaactatttctctttctctctctcgctctctggttctctctctctctctctctctctctctctctctctctctcatcagatggct

SEQ ID NO: 422075 - DNA, 122 bp, Homo sapiens
cattgagtgccagtcctctgccaggctctgtgttacaagttggggagggcggcaaagtcccgaattaaagatgtcagttctcaaggaccccacactccagcggcgggagacagctgtgcaaa

SEQ ID NO: 422076 - DNA, 122 bp, Homo sapiens
ctgctacgtggagtaacccaggcacagagatacaaacatggcacggacggcccccactcacgtgggaaacctcaacaaggccaactcgcagaagcagagaacagaacagtggtttccagggg

SEQ ID NO: 422077 - DNA, 122 bp, Homo sapiens
tgctaggagccagttagagaggctgcccttggagggacagaggtgggtgggatggatttccgagcagagtgagggcaccagagaaattcaccaggaaaaaaaccagcttttttgggctcttg

SEQ ID NO: 422078 - DNA, 122 bp, Homo sapiens
acctgtaatcccagcactttgggaggcccgaggttggcagatcacttgaggttagcggctcgagaccagcctggccaacatggtgaaaccctgtctctactaaaaatacaaaaattacctgg

SEQ ID NO: 422079 - DNA, 122 bp, Homo sapiens
ggtatggtttatctagagttacagactttgtaaggtttgcagctcagggcagttcttcaccgttggcaaaagttgaatccggcgagggctgggaattcacctgccctccactttcagctgcc

SEQ ID NO: 422080 - DNA, 122 bp, Homo sapiens
cttgtgctgccacagccagtcttcggccgctacgtcacgcgcgctcgcccactattcagacgagctctctcaggtccttcctgattggatctctgccagagagggctgaaggcgtcagccaa

SEQ ID NO: 422081 - DNA, 122 bp, Homo sapiens
tcagcgcggccgcggcggagtgtagtggcggggcgggctgctggcagggagcggccgagacgtgcagggccttcccgggggatcggaaggttgcggatgccttgggagccgggggcccttgc

SEQ ID NO: 422082 - DNA, 122 bp, Homo sapiens
gagagaagtgcagacatgggaggccacctgggtacaaagcgagaactgatgaaggcacagcgatgagagggaatgggagcatggaggtgtcagagaaccctgatgggaggcgacggacatgg

SEQ ID NO: 422083 - DNA, 122 bp, Homo sapiens
ttatttcgggaaaagcgattctccttaggaattatcttttctgataatcaaaactacaatcgattatgatttctttttagccttagaggaaactcatttgaaccatagcaattatgttgatt

SEQ ID NO: 422084 - DNA, 122 bp, Homo sapiens
gaacttgcacccaacgtcagggcgcgatggagtgaagcggcgacgaaggtggtacttccgcgttgcgctgcccgagccgagagcgcggccaaggccgctcccccacccccgggggcacttgg

SEQ ID NO: 422085 - DNA, 122 bp, Homo sapiens
acagactctaatggcttccggttgttactcaaccgttagggtcccttcccccttgcggcgcgcggtcccaaattgaccctgggtctcttgaaaaaatttctgcttgccacctcccacttcac

SEQ ID NO: 422086 - DNA, 122 bp, Homo sapiens
ggatgaggtggcccgcagtgctaagaagatggacgagatagtgcaggagaagaacacggccggagcactgggtttgttaaccgagcttcagaatgttctggaattactgcggtccacaggaa

SEQ ID NO: 422087 - DNA, 122 bp, Homo sapiens
cttctcagatggcagcatcagtatctgagcccgcataggttcagatttaaattgtttctccggttgtgacaaaaacaaggtgctgctctgcctacaagcattttctgccctgaataatgcct

SEQ ID NO: 422088 - DNA, 122 bp, Homo sapiens
aagtgatccacccaccttggcctcccaaagtgctgggattacaggcatgagccaccactccgggccacgctgttgtttcttaatgtctaacagcttaactttattgtgaaagactgcagcaa

SEQ ID NO: 422089 - DNA, 122 bp, Homo sapiens
tactttcaaaggaaaatagaagactccttatgaaatgcccaatggctgaaattcagcttccgctgtggcccaggtaaaaagagacagaagcatatgtgatatgtgcccttttcctttggagg

SEQ ID NO: 422090 - DNA, 122 bp, Homo sapiens
cctcccacccacccagcacccgaatcactcgaagccagcccaaccacacacctgcaggcccgcctggcccttccagcaaccctgttagtaacggcaaagaaacccggaggagcagcaagaga

SEQ ID NO: 422091 - DNA, 122 bp, Homo sapiens
tgagcctcgcgagttaggagttgggtagagagtcagcccggggcccggcatccgctttttcgttgaagcaacgactttggccggatgactccccagggtcggcatcagcgtgggactgggaa

SEQ ID NO: 422092 - DNA, 122 bp, Homo sapiens
cctcccagccccgcccgccggattcccggagccgcttgccgggctggggcgtgtagcgggcgggctgccctctgcccgctccgggctagccaccaggagacaaaaggcaggaggcccgcctc

SEQ ID NO: 422093 - DNA, 122 bp, Homo sapiens
ataagagaataaaagcaggctgcccgagctagcagtggcaacccactcggtccagttacacgctgtggaagctttgttctttcgctctttgtgataaatgttgctactgctcactctgggtc

SEQ ID NO: 422094 - DNA, 122 bp, Homo sapiens
agatcattcctgtgggcatcgatttttaggccgatctcttaaacagaaactgcaagatgccgtggggcagtgttttccaataaagaattgtagtagtcggcactcttcagggcttccgtcta

SEQ ID NO: 422095 - DNA, 122 bp, Homo sapiens
cctcctcctcctcccgggatgctggcacagagttgtgatcgagccccaagtggattgcagcgcataatggaacccgggtttaatgtgaccgggacggggggtgggcagctatgcgggtcagg

SEQ ID NO: 422096 - DNA, 122 bp, Homo sapiens
tcagccctggaagtatagaatggaggcaggtcctggggatcccccactgggcttccctgccgcaacatgtcaaacctatcaaaatgcactcacattctgctctgtgaattatgtgacaattg

SEQ ID NO: 422097 - DNA, 122 bp, Homo sapiens
cgctgggccctgatgggcgggagcggggtggagcggcctcgcctgccaggcagccctgggcgcggggctcggcggccacactctggagacagccacggtccaggcaggtgggggagggcgct

SEQ ID NO: 422098 - DNA, 122 bp, Homo sapiens
tggaagccgagaggcgcagacagcacgacgaggcggcgcgcaggttgctggagcccgaggcgcccggtctgtgccgccctccgcttccccgggactacgagcccccgtccccgtcccccgcg

SEQ ID NO: 422099 - DNA, 122 bp, Homo sapiens
aaagacagggaaggagggggaacgtaaattcctctttctaaatcgaaccatcacagaactcggcatttcaactgtcttcatctattatcagatccaaagcaacataacctcagtgattctgg

SEQ ID NO: 422100 - DNA, 122 bp, Homo sapiens
catagagaaactaacttccattttacaactctttaatgacagggagaatatccaacaaatcgcaagtaaaatagcatagaccacaaggaaagaaactaagacaagtcaaaaatacaccaagt

SEQ ID NO: 422101 - DNA, 122 bp, Homo sapiens
agtctatgccttgtcccttttccatctgcccccacaaacccgccaccagtggcagggtagcgttgaggaactgtctatagatgtgatactgtctagattttactgaactcctaaattctgta

SEQ ID NO: 422102 - DNA, 122 bp, Homo sapiens
aacacagcgaaaccccatctccaccaaaaaaaatacgaaaaccagtcaggcgtggcggcgcgtgcctgcaatcgcaggcactccgtgaagactgttcttgagagaggaagaaaatgggagcc

SEQ ID NO: 422103 - DNA, 122 bp, Homo sapiens
ttaagagctgtaacactcactgcgaaggtctgcagcttcactcctgagccagcgagaccacgaaccaaccagaaggaagaaactccgaacacatccgaaggtcagaaggaacaaactccaga

SEQ ID NO: 422104 - DNA, 122 bp, Homo sapiens
gggcgggacttccctgggcactgagtcaaagcttgaggggagtgttcgctcccgcattttcgattccactctcttccgtttctgtcgctgcagtcgtccgcgggtaaggccctccctagacc

SEQ ID NO: 422105 - DNA, 122 bp, Homo sapiens
tccttagccgccaagtcctcctcgcccatcctggggtttcctggggtttgtggcatccaccgagatttcggagttaaatctgcatattcctctgggtcccaatctcccctaagcgaactgca

SEQ ID NO: 422106 - DNA, 122 bp, Homo sapiens
ttgtgttacaggtaagcccgagaatttgcatttctgacaagatcccaggtgaggctcactcgtgctgctggctttgggatcacacttaactaccggtatagtggggaaagacagggtttggg

SEQ ID NO: 422107 - DNA, 122 bp, Homo sapiens
ccgcaaggagagctattcagtgtatgtgtacaaggtgctgaagcaggtccatcccgacaccggcatctcttccaaggcaatggggatcatgaattccttcgtcaacgacatcttcgagcgca

SEQ ID NO: 422108 - DNA, 122 bp, Homo sapiens
cccggaagccccgcctcccagaaagccccgccccgccacctccccggcagggagacgctgcgtttccctgacgacgacaggtagtccaatggaaatgtggcacctctttctcctgcgcgcgg

SEQ ID NO: 422109 - DNA, 122 bp, Homo sapiens
gtagatgcagaggggaaactggcccccggctgtggaatggttcaagttgaaggagaccagcgagagcagccttccttaaaccgctgagaaaatcgttaagcgagaacgtacctctagggagt

SEQ ID NO: 422110 - DNA, 122 bp, Homo sapiens
gttgtcttgtgcagtattttacagcccctcttgtgtttttctttatttctcgtacacacacgcagttttaagggtgatgtgtgtataattaaaaggacccttggcccatactttcctaattc

SEQ ID NO: 422111 - DNA, 122 bp, Homo sapiens
caaattaatccccccaaaaaccctgctatactttaggtgtagtgataccacccaacatctcgcaactgcccaagggagaacgctataacccaacaccttaaccctccccatccctccattca

SEQ ID NO: 422112 - DNA, 122 bp, Homo sapiens
taccctcccctgctgagagggcccatggcatcatctcatgggaacaggaatggctgacagcggggggaagaaggagagaactgtgaaaaggaggagagatggtgctggtcaccagggttgcc

SEQ ID NO: 422113 - DNA, 122 bp, Homo sapiens
accttctgcacttgcaccgagcaagcagcgaaatggctgtggcttcgtaccggtgactcgcgtcttggagattttaacactcctcaacgtccccaagggtgagggggtccaagggtggcgac

SEQ ID NO: 422114 - DNA, 122 bp, Homo sapiens
atgagcggcgaagctcctcctccccgcctatatataaagggctggcgcggggctcggcggcgccatttcgtgctggagtggagcagcctctagaacgagctggaggattctgcctaccgata

SEQ ID NO: 422115 - DNA, 122 bp, Homo sapiens
atacaaaataaaatgcattctttgtatgcagccaggaggagcggatggcgctccgtgggccggctggagctcatttacagtgtctcaggcggggctttcggggcctcttcaatttgaggaat

SEQ ID NO: 422116 - DNA, 122 bp, Homo sapiens
gacgctctgaagcctcaacagctccagagaccagtgggcagcctttccattcctgtgtgccggcctgacatccccccgcgtgaactcccttgcacacacacgaacacacacacacagagatt

SEQ ID NO: 422117 - DNA, 122 bp, Homo sapiens
taagattcttcatcttctgctcattgaataccctgttattgggtggtgttaataaaattgcggagaagatatgtggagacctcaaaggtatgaagctaaggcagaaaataaatccaaaggtc

SEQ ID NO: 422118 - DNA, 122 bp, Homo sapiens
aagagcgcaacctcttccagtctctgactctcggcgcccgccccccaccgccctcttaaacggaccctgtgaggacatgggcccccatcaccccggatgctctgccgtctcagggttcttat

SEQ ID NO: 422119 - DNA, 122 bp, Homo sapiens
gtttgaagacacatacatcctgtaatcggcggacccagaagcaacggctaagccgggccacgctgcagaggagagcagcagctggagtgaggtgagaggcccgccttgccccgccccacctg

SEQ ID NO: 422120 - DNA, 122 bp, Homo sapiens
acttgcctagtgggtggggagccagcaaaaaaaaaaaagaaaaaaaaaaaagctaaggctcgatttatccaacgctgatcagtgaaagagcagcaagtggaattcagacctgagagaaggag

SEQ ID NO: 422121 - DNA, 122 bp, Homo sapiens
tccagccgtgcgggggccgggcatcggggctgcagaggcaggagcagagggcgggcagggcggccaggacacaggcagggcacatggacagcctccaggggtgcatacagctgtccttccac

SEQ ID NO: 422122 - DNA, 122 bp, Homo sapiens
aagacaaaaaagacgctcaattccactttaaaattgctgcagtggctgggcacagtggctcgtgcctgtaatcccagcactttgggaggccgaggcaggcggatcacttgacgtcaggagtt

SEQ ID NO: 422123 - DNA, 122 bp, Homo sapiens
atcgcagtaggtgtacacccaaccggtgatattgatccgaatatcatctccagggggtggcgtatgacgttactcccaagatagcagtgggtgtgcatccacccggtgatattcctcctaat

SEQ ID NO: 422124 - DNA, 122 bp, Homo sapiens
catagattaatccatttgtgaaggcagatcctttatgacccaaacacctcttaaaggtcccgcctctcaatactgtgacattagggattaaatttcaacatgagttttggaaaagacaaata

SEQ ID NO: 422125 - DNA, 122 bp, Homo sapiens
acggtatctattttcttccaaacgtaataataattcttagaaaatagggactcctttttgcggaataatccatagggggcgaggccaactctcgcgagtcgaggtatcttctccccaaccac

SEQ ID NO: 422126 - DNA, 122 bp, Homo sapiens
tctcctgggctcaagcgatcctcccacctcaagcctctcaagtagctgggactacaggcacgcaccaccacgcctggctaatatcttttgttatagtagagatggggggtctcactatgttg

SEQ ID NO: 422127 - DNA, 122 bp, Homo sapiens
actcacgttggtggctcaccggcgggcccacactgccaacccattgcatcgctgtcgttgcggcaagacgttcagcaacatgaccaagttcctctaccaccggcgcactcacgccggcaaaa

SEQ ID NO: 422128 - DNA, 122 bp, Homo sapiens
ggtcctgcttctgttgcctttcctgccgctgctgctgcttgcagcccccgcgccccaccgcgcgtcctacaagccggtcatcgtggtgcatgggctcttcgacagctcgtacagcttccgcc

SEQ ID NO: 422129 - DNA, 122 bp, Homo sapiens
tgtgaatcggaagctacactacgcgtgcgccacaacaggccgaatgtgtgcgcatgcgcgcggcccatatggtaaatagtaatgaagaatagtttaggaaagtacctgtacgggtggcgccg

SEQ ID NO: 422130 - DNA, 122 bp, Homo sapiens
ttaatgtcatatggctcctaaagagctaggatatgcatccatatcttccagctccaagtacgagtttttttctttttaaaaaatattgtgtcacattataccctctaatgccaaattcattt

SEQ ID NO: 422131 - DNA, 122 bp, Homo sapiens
caaagtagggcatttcccaagtatcacttgaaaagagaatatgatggtacaaggaccacacgatgagattgtcatgcattttgatggcaggagcaagctccatacaggaagactaatgttaa

SEQ ID NO: 422132 - DNA, 122 bp, Homo sapiens
aagtgaggagcatctctgcccggccacccatcttctgggatgtggggagcgcctctgccccgccaccccgtctgggaggtaaggagcgtctctgaccggccaccccgtctgagaagtgagga

SEQ ID NO: 422133 - DNA, 122 bp, Homo sapiens
gccgcggttcggggacagccccgtgcctctcggcttgcctggcagctgcagcagacccctcgcccgagaggcagagtcgtagttaacaaagggtatggctcctttctggaatccgccccccc

SEQ ID NO: 422134 - DNA, 122 bp, Homo sapiens
gccctggccggcgcgcccccgactcctcagtctgagcatcacctgggccggggtgggctgcggagggcggctccacacctagcctgtcaggaaaaaatgcagaatcatgcccgtgctggcgg

SEQ ID NO: 422135 - DNA, 122 bp, Homo sapiens
gtgcttcctgagtttaacggtggcccatggcccatctcaggacccaacaccagccccaaccgttacgtggtgcttgaatggcactcagaacgcgcactcagtgcccagcgactccagacccc

SEQ ID NO: 422136 - DNA, 122 bp, Homo sapiens
gtaggacacaaaggggttaatgctgctgactgataggtttcttgggctcatcctacagtgcgagccatgtctacagggcaactacccagagtgagaaccaaatgggagttcacagccagatg

SEQ ID NO: 422137 - DNA, 122 bp, Homo sapiens
ttatacctccttctaccctagagggagtgatgagtccttcctcgttcacagtcactcaaacgaggaagcaagcttcagtgcattttctggaagaagcatcttttaaattcatctttgaggat

SEQ ID NO: 422138 - DNA, 122 bp, Homo sapiens
tcactctccagggagaaggacctcaaatcgccactctttgggcggcaggtgcggtccccacggccggctctacgaggaagagttctggctcttttgtccactgagatggtcttggtttttca

SEQ ID NO: 422139 - DNA, 122 bp, Homo sapiens
gcccactggctcatatctgccactgtgctaaatgctttgtatgcatgacctcctcatggacgcctctcccgagaaactgaagtccagagatacctggtctgttgcacgtagtccaagtcgct

SEQ ID NO: 422140 - DNA, 122 bp, Homo sapiens
gacttggattgtgagccagttgctgaggtttagtaattggggagcgcagtctctgagacacgtattcagtattaactaatcatgttcctactagtggaattcttccgcagagggtctacagc

SEQ ID NO: 422141 - DNA, 122 bp, Homo sapiens
gccacgcagactgctgtgcccactggggctgggctcaccaggaagtaggatcagcagaaacgcgggcgctcacaactggtgccaggttcggtttccttaggcctctacccgcagggccccgt

SEQ ID NO: 422142 - DNA, 122 bp, Homo sapiens
ggagcagcggaggcctccagcagtgtcaccgtgcagccaccgaagccaccgcccgtcatgcggctgccataaaccccaggcacagcaagcgcagcctccaccagctggtccagctctgggca

SEQ ID NO: 422143 - DNA, 122 bp, Homo sapiens
gggactgatgatgaaaagagtgagggaattctggggggcgatgaaaacaactgaaagctgcgctgtggtgcagctgtaccactctaagtttactcaaacccacagaaccatacacctagagc

SEQ ID NO: 422144 - DNA, 122 bp, Homo sapiens
cttctctaaggagcaggtgaaagagtgatggctgggatgcttcttggaaccgcgccagcgcgagaaatagccctggctcggagtcccaattagaggacggctgaactattttcagtgtgtgc

SEQ ID NO: 422145 - DNA, 122 bp, Homo sapiens
gaggagaggcgggaaggggcggagcacgtgtttcggatgggcgcatagaatggagacttccgggccatgtcaggccttttgcttttactgtgagtgaagccataggacgaccctgcacagag

SEQ ID NO: 422146 - DNA, 122 bp, Homo sapiens
tgggactgggaaatgggcattcgggtcgcatgcccaccgcagtggcccagagcccctgtccggaccgctaacaagttgcttagcaacccgccgcccggccctcggccaccgctagagggcga

SEQ ID NO: 422147 - DNA, 122 bp, Homo sapiens
tgagctctgtgtagacaaaataaaccatctgccggctgatgtcacaagggctgccccgctcggcagcctcagtgagctcctctctagaatggggatgaggatatccacttggaagcctgctc

SEQ ID NO: 422148 - DNA, 122 bp, Homo sapiens
aactcagacacaaaataaccacctcaagaagataaataatgataagaaataaatgttacgcgaggcaaatttattcacatggggcttcccaggccactttgtggtcagccgggagggacgtt

SEQ ID NO: 422149 - DNA, 122 bp, Homo sapiens
ctccgccccttccggcggcgcctcgcaccgcgtcggggtgagcgggtgcaagcgacgccccggcatagcggcaccattggacacttcctgcgctgcttcaatcgccgggattgcctctttga

SEQ ID NO: 422150 - DNA, 122 bp, Homo sapiens
ccagggagggggtgagtgcggggaggggtcagacccgtgtcttgcccggtgcgagctcaccgcctgcccaccgggcacgtccacagcagctcagtcccggtctgagcgcatcggagtgaaaa

SEQ ID NO: 422151 - DNA, 122 bp, Homo sapiens
ttacatactggctgtggctgctttcacaccaccacagcagcgagtggttgcgacagacgtcgtaaaacccgtaaagcccgagatatctgccactgggctctttacagaaaatgtttgccgac

SEQ ID NO: 422152 - DNA, 122 bp, Homo sapiens
ctccctgccgtgcaggcagctcgaaagccactctgttgtggggtcctcgcttcccttccacgtctcccggaagcggtagcagggccccggcgggtcggggaggaggtttactcagcttgggc

SEQ ID NO: 422153 - DNA, 122 bp, Homo sapiens
cgcgggaaaggcattttggggacacaggagagctgcgagggcgaagcacgggcgagctgtcgttagggcccaggaaaggcccgttgcggggcgcacaggcgggcaggggaactcgcgccccg

SEQ ID NO: 422154 - DNA, 122 bp, Homo sapiens
cagtctactttaatcctcaccaggacaatggattaagtttctcttccctggaccagaagtcgggttcggacttggggcaaaatgaaggaaaaggccatgatcaagaccgctaagatgcaggg

SEQ ID NO: 422155 - DNA, 122 bp, Homo sapiens
ggggacagccagagggatctaggcttccggtctccctcctccctgtctccaaagcggcaccgccctcgtgcgggttttctaaccgggcagagtcctggaagctctgccccagcctccttaag

SEQ ID NO: 422156 - DNA, 122 bp, Homo sapiens
agtgggtggaaaacagcacttgcctttctgggaccatggattagctcaagattcccacaccggtggggccctcaaagccacaggacaagcctggtgcttcttcctggagcatctgtgtctcc

SEQ ID NO: 422157 - DNA, 122 bp, Homo sapiens
ttggtacccttcaggccctaagacaagaaagactccttccagtgtcttctattttacaaccggaaactattttagcctctgggagtcttctgggtaccagccagtgatgactagctccttga

SEQ ID NO: 422158 - DNA, 122 bp, Homo sapiens
tgcctgccataggtttacctgccataggcttttacagtttcaattacaagataatcagtacgataagtggctggttaccagattaacggtggaaacaaagcaatgaaataggggggagagag

SEQ ID NO: 422159 - DNA, 122 bp, Homo sapiens
atggcccatgcttcccacacggtccaggatctccgagaaggtcatggcactggggcaagacgagccagagctgtgggcagggcataggccagggagaggtatatttgtgcctggtagtgcgt

SEQ ID NO: 422160 - DNA, 122 bp, Homo sapiens
tttccctcgcagtcgatttggaccaagactacccacaatctccccaccgcaggactgaagcgaggctgaaatcttagaatcaaccccacggaatgaagaggttgtcgtaattccagcactga

SEQ ID NO: 422161 - DNA, 122 bp, Homo sapiens
gcgactggaaggtttgggccggagaagctgtggaatcactccctcccaggaaagatgcggcgatgagagagctctaccgcctaattaagcaagcgaccctaataccggatggagaatttgag

SEQ ID NO: 422162 - DNA, 122 bp, Homo sapiens
agcttccacagcccgccacgtcccccggctacggctacgctcctgattggatagttagtacggcccctagtgcccctgattggataccgcttcaggtcccgccccctggggttagaaagaca

SEQ ID NO: 422163 - DNA, 122 bp, Homo sapiens
gggaggggccaggctatgggggggcgtagctggggcaggcactgagggggcgtggccagccgccgggatggaggggcctggcgctcaccttcacaggacacgcggtcagctcggagcctgaa

SEQ ID NO: 422164 - DNA, 122 bp, Homo sapiens
cggcaaggccagcaacatggccgtggtgtacggcaaggaggcgagcatctggaaggtgagcgcggcccctgcgcgcgggaagcaccagcctgctcggcacaggcccccgcctgggtcccgca

SEQ ID NO: 422165 - DNA, 122 bp, Homo sapiens
atatcttccttaaattccttagctgccttaaattccttttgaaatcaggcaacatataaacgaactcaaattaaaatatatttccttttctgccttagtatggattgtaggaagcttaattt

SEQ ID NO: 422166 - DNA, 122 bp, Homo sapiens
ccacctccaaggaattattcgtgattgttctcaacctgtcacaagcctgccctccccttccgtggaccgttgttgaagcatactttggtaggaggcttggtatctcattctgggcagtgaca

SEQ ID NO: 422167 - DNA, 122 bp, Homo sapiens
ggcaggccaggaaaccacctgagctttgtttgcggactgttgggctgcgcgatccgggctcgggggcgcctcggcctgcgggcagggcccggctgggcagggcggggtggcccggcgactcc

SEQ ID NO: 422168 - DNA, 122 bp, Homo sapiens
aggaaactgaggcccagagaggttaaggaattcgtccaagatctcacagctcgtaaatagcgtagccgggcgttcctgctctaaggtctgtgctctgtaccctgcgccgcgcccctcccagc

SEQ ID NO: 422169 - DNA, 122 bp, Homo sapiens
tggagtggggcccaggaatctgatgttttcaaagctccccaggtgattctgattgaggtgcgctgtgccccacctttgagaaacactgagtcattctatctccaggcaacctcatgaatggt

SEQ ID NO: 422170 - DNA, 122 bp, Homo sapiens
gttcaggatcaggaggagcatcgctgccgggagggggccctgagcctcctgcaacacctgcggcctcactgggacccccaggaggtgaccctgcaggtaacgcccacacctcagctctgggt

SEQ ID NO: 422171 - DNA, 122 bp, Homo sapiens
aattggcttttgccatctatatttgtcatttctaatatttttgaagtcttgattccatcacgcaaaagaacccagaaatttgtgtccattggtaaaacaatgtgcagttttgttgtgtttaa

SEQ ID NO: 422172 - DNA, 122 bp, Homo sapiens
gaaagatggccctgggctttgggcctctcctccgcgtggcccctcagcccttcccgttggcgcctgaatctcagatgggcagactcaagctcccatcaccatggaatctgttctttctctcc

SEQ ID NO: 422173 - DNA, 122 bp, Homo sapiens
cactgccgcccattcagggctgtcttagggcacacagaacagaccactcggtaggacttacgggaacaggtgtgtcacctgggagcaggtcccacacctcaccatcaagggcatcctgagat

SEQ ID NO: 422174 - DNA, 122 bp, Homo sapiens
gagcaggctacgatgggggagacctctgggggttccataacagcgcgttcgtgtcttcagcgtggcgctgctgccattgtttaataataaactgtcggtgccttcgtctctggcttcaagct

SEQ ID NO: 422175 - DNA, 122 bp, Homo sapiens
tgcagtcgctgctgtctccccgagtgcattcgcagacacggggccgcccactcccctttgcgccatgtttgtccggacaggcttagctggagaccaagaacccagtgcctgcgatggataag

SEQ ID NO: 422176 - DNA, 122 bp, Homo sapiens
gtggagacaggaagatcaagaataaatggtttcacaaatcgaagggattgtctcttgagacgctgattatgtacgtattgccagttgaatgggcagtattttcaaatacttgatctataggc

SEQ ID NO: 422177 - DNA, 122 bp, Homo sapiens
gaagtgaggaagagcagctgagctggtctcggtctcccagctcctgcagtctgaggaccccgggatgctccagccagggcagacccgcgcggggggtgcccttcccccacccccttccctgc

SEQ ID NO: 422178 - DNA, 122 bp, Homo sapiens
gtcaaagaaagggatgacagacagcacctggaagatcgagtcactcccacccaaatactgcgctttaccaaagggcttaaaaaacagcgcaccaggagattgtgtccggcacccggctccga

SEQ ID NO: 422179 - DNA, 122 bp, Homo sapiens
ccccttgaaacctgaggggccagagttcaaagtacggctaagttgatacttagggaagggcgtcactggtaaatctgggggagccttggaggaagtttgtccaggaaatgaattaaggagac

SEQ ID NO: 422180 - DNA, 122 bp, Homo sapiens
ggacgggacctgggcacgcggggcgcaccccgagggcgcgcagacgcacaggcgggctcgcgcccgagcccccgcacgggcccccgccaaacacgcacacgcacacgcacgcgcggaccggg

SEQ ID NO: 422181 - DNA, 122 bp, Homo sapiens
ttcagtgtatcagtttacacttggttgttgagtaaacaaagcaaacatatgtcacattttcgcgacagatggttcaaaccaagggctacttaagttctctctctctaacagtctaagttaca

SEQ ID NO: 422182 - DNA, 122 bp, Homo sapiens
gacatgctcatgcactatcctctgcgtcacctccttaacatttattgagcaatttctagacgccaaatgctcctctgtgggcttcacagacttacgaaagtcattttaattcccggcaatcc

SEQ ID NO: 422183 - DNA, 122 bp, Homo sapiens
cccaaggtcgcgggactagaaggtggcggggccaggattcgaaccatcgagctgagccgacgtactggcgaggatcccccaggggcatagagaggagacggagccggttagaaggggcgcgc

SEQ ID NO: 422184 - DNA, 122 bp, Homo sapiens
cccaaagttgggacagttattctcccttttcagggtgaccccaggactgattctgtgttacgccatgacaccccccattatatccctaagaagacattgtgctcagtgataacaaacttctc

SEQ ID NO: 422185 - DNA, 122 bp, Homo sapiens
gttcctggaccactgcaagcactagcgttataagcgttatcatcactactttaattatctcgcccaattccctccttgctcaagtgaggaaacagaggcccagagaggcccagctacttgct

SEQ ID NO: 422186 - DNA, 122 bp, Homo sapiens
taaattatctaaaatctatacaagtcttatgtaataaataatcaaaacaaaacaatgaaacgtgcatagaaattgagactcaccatctataaagtatgaaaattccaaggtgttgtggaagt

SEQ ID NO: 422187 - DNA, 122 bp, Homo sapiens
aatccacacagagcaatgctgggactagaatgagtcaagctaggtgcttaaggagacactcgctctcagtgttttgtgtgcacaggtcagcagctgagagtgatagcctccttaaattctgt

SEQ ID NO: 422188 - DNA, 122 bp, Homo sapiens
ctcaccatgttcctgccgcagctgctcctggggccacagggattgagatgcagcaccaagcgcccgcccttcctgccagcccctagtcactcaggagagaatccacagcgtctccagaagcc

SEQ ID NO: 422189 - DNA, 122 bp, Homo sapiens
gttccatcttgggttttctgacatttttatctagtgattgagtacactcatgatataggacgtaatagccattgacttgggccgtgaagctcaactgtgacacctcttcccaggatggaggc

SEQ ID NO: 422190 - DNA, 122 bp, Homo sapiens
cggcgacagagtgagactccgtcttaaaagaaaaaacaaaacaaaaacaaagcgagccaccgtggagatccacctgccgctgctcccgcgggggtcacttctctggctcctgcagccggcag

SEQ ID NO: 422191 - DNA, 122 bp, Homo sapiens
ctgtgaacttcctctgagtgaaggcatcccctccagcacctttcagcctgctagttaggacgacccgccgccaccctccaggacctccagccctgcactgcctttcctctcttttaaataat

SEQ ID NO: 422192 - DNA, 122 bp, Homo sapiens
taagacaatggacatttctcttacagttctggaggccagaagtccaaaatccagctgggccgtgctcccactggggcttgaggggagaatgtgtcctttgactcttccagcttctggtgact

SEQ ID NO: 422193 - DNA, 122 bp, Homo sapiens
caggctctctcaccttggcctgcagccggccgcccagagtggaccgggcgtgatagatgacgatgagcacgtctccttgcaccgtgacgcccaggggaatcaccgctttgccatcttcaatc

SEQ ID NO: 422194 - DNA, 122 bp, Homo sapiens
gtgcgtccgcgcgccgaggggcgcggcagatctgcggagagaggacctgcggggcgcggccggtcccctcggaggcctgttccgtcacacactggcgtcctgcctcctccgtaggcgggaga

SEQ ID NO: 422195 - DNA, 122 bp, Homo sapiens
gtgtgagaactgggcgtctgtgctgggaccctatagacactgagtgggagaactgggcgtcggtgctgggaccctgtagacactgagtgtgagaactgggtgtcggtgctgggaccctgtgg

SEQ ID NO: 422196 - DNA, 122 bp, Homo sapiens
cggggcctgtcccaggtctgcagtggggaacctgccgggccacgttggtggggcctgggccgcaccttcggtcagtgtggaggcccggtggctctggcccgactgggtggcgggtgtggggg

SEQ ID NO: 422197 - DNA, 122 bp, Homo sapiens
aatgagctccccaggcaaacgttggagcagaagggatcacaagtggcacagccaaaggaacggattccagaaacgtgagctggtggttgaaaacactcacgtgagcaattgaaaaggccgtg

SEQ ID NO: 422198 - DNA, 122 bp, Homo sapiens
tgtgggcccttgtcaagagctggaggccactcccaagagcctctcctatggcagctgggacgttttaaaattgggacaccaatttcaaatgtaaccctccagtggtggaaggcacaccatgg

SEQ ID NO: 422199 - DNA, 122 bp, Homo sapiens
ttacaggcgtgagccaccgcgccaggttggtgtttatttttcaaacaaggcgctgggaaacgcaaattctccagagctcttgtggagcggtggcagggaggggcggctcagccagagatggc

SEQ ID NO: 422200 - DNA, 122 bp, Homo sapiens
ctcgaactcctgacctcgtgatccgcccgcctcggcctcccaaagtgctgggattactggcgtgagccaccgcgcccaggcttttattgactttaaataatttcaaattaataaagaaaacg

SEQ ID NO: 422201 - DNA, 122 bp, Homo sapiens
ccaccaggcaggagcagaggcaggactgggacgccaaaagctgagaatcctcgatgcccgcgcgagagccccgtgttatggcgaggtgggacaacccttaggctggagatgcgcgagggagg

SEQ ID NO: 422202 - DNA, 122 bp, Homo sapiens
tagccgctccgcatggcggatccagccaatcagcgcgccgtgcaccgagcttcccgcctacgcgaggctgctcatccaatagaaaggagctttaccgctcgggacttgtcaattgacagtgg

SEQ ID NO: 422203 - DNA, 122 bp, Homo sapiens
gagcggcgctaacttatagcccgctttggggcgggccgggggcggggccccgcgggaaggcggcgacctgggaggccacccattgcccagtcccgggcccacgccgccagcgctggggctca

SEQ ID NO: 422204 - DNA, 122 bp, Homo sapiens
ggcgctggggtgggggtgtctgtgggggacagggtttcctggggtctcctgggtcttcctcgcgcacccccaggaggtgttgcagggggaggggagcgcgggtgggtgggaccgggccgggt

SEQ ID NO: 422205 - DNA, 122 bp, Homo sapiens
tgttggcctcttgcaggtagagtggccactccttggagggcaaggcctcttgttcttgttcgtcatcatatcctacgccgcagcggtgcctgtgcatgaaactgactggtgacagttctgct

SEQ ID NO: 422206 - DNA, 122 bp, Homo sapiens
ctaagccaggctctgtgctgacttcgccagagatgactccacagaccaagatactttgaccgtggcatttgaatacatggtatttttaggtcccggttggtttccctgaaatgaaactcact

SEQ ID NO: 422207 - DNA, 122 bp, Homo sapiens
aattcggttctccaatcccctgggtcactttgctcttgtgcacgctttccagtctttcagcgtaagccagagtcattcccaaggatgctggtttctctctgggggaagagctgctctgtgat

SEQ ID NO: 422208 - DNA, 122 bp, Homo sapiens
gcggccgctttgcgggtagtgggactgtggccttgcgctatgccctgtgcttccgtgggacgtgtctaggaacgggtgggctttctgcgggaggcgggggtcgggcagggctgctggtctgg

SEQ ID NO: 422209 - DNA, 122 bp, Homo sapiens
ccatcagaactactgaaaagagcctcctgtgagcacagggctcgcagtaagtgggggtgacggtggtcgcgccggcagcgccgccttgggcctgcgggaggcgcccgagaggcaggggcgac

SEQ ID NO: 422210 - DNA, 122 bp, Homo sapiens
gcctgagtatgatggatggcacagctggaggagctggctgtgttgcagacagcacagccccgcctatgccaattaggttgatgggtggtgactgagaaacatgctggatttactcaaataga

SEQ ID NO: 422211 - DNA, 122 bp, Homo sapiens
ggtacatgcgtaagtacatgtgtggtgtggtgggtgtgtgtgcatggtgtggaatgtgcacgtgtgtgatgtgtggcacatgcatatgtacgtgtatggtgcacgtgtgtgtagtgtggtat

SEQ ID NO: 422212 - DNA, 122 bp, Homo sapiens
tggaaacctggcagggatgaaaggcatgggctcgggatttgaggactgggaggctcttcccgggtggcagcatcttcaggaaatcaccaagagctgaggcttgagcagagcaggtttaaaaa

SEQ ID NO: 422213 - DNA, 122 bp, Homo sapiens
caacagtgtatattcttcaacatcttagattccatttcggatgcccccatgaggactgtgcgctcctgtactggaactcaagcgaccacttggctcaaaatccattgctattctctagaaat

SEQ ID NO: 422214 - DNA, 122 bp, Homo sapiens
cctctgtggctcggccacccctaaagcgaggcccggcgaggcagcgcagagggtagggtccgacctgggctcctcagggccccggggcaggctctctatccccagcagtgtttacccatctt

SEQ ID NO: 422215 - DNA, 122 bp, Homo sapiens
ccatagtgatgatctagttggagactcagccctattgccctctaggccacactttttgggcgcacacatccagctgcaagctctccccacctcccccaggcctcattgtgttcgattgaaat

SEQ ID NO: 422216 - DNA, 122 bp, Homo sapiens
ctgggggtcaaacacggaacaggcagtgcagtgaccacacggcggacttgctgtggccaccgatgcaagacgggtcctcgcccggccacagtgagcgcagggccagtgccgccggggggaac

SEQ ID NO: 422217 - DNA, 122 bp, Homo sapiens
ttctcggggctgccgtccaggatgtgtgtaagcagctccgggttgaagctggcggaatcccgctccctgcgcaggtccgggttcatggcgacgaccagctggcagcgaagtaagcaccgacc

SEQ ID NO: 422218 - DNA, 122 bp, Homo sapiens
agggagcccctggtgtggcctggttctgctgggcggaacactcaacactcccttccctgacgaagaggcgagagctgcttcgggaagaaccacctgccctcaccccactcggtctgggacag

SEQ ID NO: 422219 - DNA, 122 bp, Homo sapiens
ccaggaggagaagagcaaccgggtccttgtggtggacctgggtgggagctcgagcagacacggccccggaggcagcgcgtgggacggtgtgggtgggaggggtgcccagccctggggtgctc

SEQ ID NO: 422220 - DNA, 122 bp, Homo sapiens
cgagagccgggccgcgggcaagtgaggggctggcggggccggtggggacccagactcgcacgaaggtggggaaggagttgcaaggcagagacccccgaacccctgctccagggcctgcgcgt

SEQ ID NO: 422221 - DNA, 122 bp, Homo sapiens
tccttcaggtggacccgcctccctggatgtgaaattctggggtgcttgctgatgggcgcacgattacgtcaatgtttatcacactttacaaaaggacgtgcgtgtgtgtgtgtgaatgagtg

SEQ ID NO: 422222 - DNA, 122 bp, Homo sapiens
tgtgtaaagaaggagacagaatatttataaaaatccgttgccctatacaagacatatctccggaaggatacctaagaaactttaacactcatttcccctgtgaaagcatttctcctcatcta

SEQ ID NO: 422223 - DNA, 122 bp, Homo sapiens
ctagtgacacttggcggccaggccgggcagacttccgggtgggtgatccctggcgctgtgcggagccattcgctgcgctgaagcagtgcgcatgcgcactggacgcttcttaccagcgtcct

SEQ ID NO: 422224 - DNA, 122 bp, Homo sapiens
ctcacttcacaccttccagcagcccaggtgccgccatcacggggctcccactctcaactccgcagcctcagccccctcaatgctgaggagcagagctggtctcctgccctgacagctgccag

SEQ ID NO: 422225 - DNA, 122 bp, Homo sapiens
gggagacaggagagtcagtcgggggtgacggtggagggcgggagaggcctgaggggcagacgtcagcaaaggcctgtaggacgcaggagtcaattcactcgccacggagaagggcaatccag

SEQ ID NO: 422226 - DNA, 122 bp, Homo sapiens
tgggcctcttaaacctgtgctcgcgagccccacattgctctccggcctccacgtaaaactcgagccagtttcctggtggcaagtcctcactccttgggtgactctgagaaagcacccgtttc

SEQ ID NO: 422227 - DNA, 122 bp, Homo sapiens
gtgcgctacgagccggacagcaaggcgttcggcgtgggcgtggcctaccgcagcctgggccgcttcgagcaactgggcaagacggccgcctcctggtgcctgcacgtcaacaattggctgca

SEQ ID NO: 422228 - DNA, 122 bp, Homo sapiens
tctgaggaatgcaagcccctctaaattatcaggcccagagaggcatttaaaatgtaaaagcggttatgtctcactttccctgtgcttaatagttacctctggaagccacttgctttgcaggc

SEQ ID NO: 422229 - DNA, 122 bp, Homo sapiens
attaggcttaatctgtgtacatctttacttaccagtttatatttcacacagatgcaaaatcggatggtgattttactttgtaacctgaaacctgcaaagatgaggggagtattatctcaagc

SEQ ID NO: 422230 - DNA, 122 bp, Homo sapiens
tcgtcgccgcctcctctttgaaacggtacctcctgtcgcctcggattttccttgtctccccgacaaggtggaaatttcgggtcggatggaagcctttttcagcaccttctccttgtgccccc

SEQ ID NO: 422231 - DNA, 122 bp, Homo sapiens
agaccctgtctccaaaaaaagagacagaaaaaggggagggttaaggaatcatttcagactcgaagagaatatggcctctcaaattaaaatgggcagtttccgccgaactttcaaagccgctt

SEQ ID NO: 422232 - DNA, 122 bp, Homo sapiens
gcctgggcgctccaaaacattacataaaaacggtgagagcaggggcattcgcatccagctcgactttcataggaatgcgtctggcgtttcaaacactgtgaggttcactatggttttctgag

SEQ ID NO: 422233 - DNA, 122 bp, Homo sapiens
tcagtttctccatagggacaatgactacactaacagtgtccaccccggcaccgggagggccgggctcccggcagggcggggaccctctccccaaggcactcccgggtctccaggcctgctct

SEQ ID NO: 422234 - DNA, 122 bp, Homo sapiens
ccaggaggagtcctcaacaacgacagcggggactgcgggaccagggtaaagcggcgacggcggcgacggcccagcaaccgtgaggagaaacaaaagccttctaaattatagtttaaaaaaaa

SEQ ID NO: 422235 - DNA, 122 bp, Homo sapiens
cagggcagggaaaaccctcagctctggtcaaaagccaagtgagcgaaggaggcgatgcaacgtcaccctggtggccaaggcaggcacccaggtctcgaggttccaggagagggacgcgctgt

SEQ ID NO: 422236 - DNA, 122 bp, Homo sapiens
gtccgtactccccaaacgcaaccttccagtcccaaacccaggcgttctaagcgctcaggacgacgatttgcgctcacgccaggaccctagtcttcattggacccttcctcattctgtcctca

SEQ ID NO: 422237 - DNA, 122 bp, Homo sapiens
cctgtatgacaccctggacatggagcaccccagcgacagcggccccgacatggaggatgacgacagcgtcctcagcacccccaagccgaagctgcggtgagccctacagggcggggcgggga

SEQ ID NO: 422238 - DNA, 122 bp, Homo sapiens
tctttataaggcaaatccaaccacatccagcccttagtgaatgtttttagcagctcagcacgggccttggtagcctctgggcctgaccaccttcccgtcctcatctctggcttcacgcctcc

SEQ ID NO: 422239 - DNA, 122 bp, Homo sapiens
tgttccacctcagatcatcaggcattagattctcataaggatggtgcaacctagatcactcgcatgtgcagttcacaataggtttctccctcctatgagaatctaatgccaccgctgatctg

SEQ ID NO: 422240 - DNA, 122 bp, Homo sapiens
atgggtaaggcgtgatggctctaagcaggcctcagttgtctcgtccagagcaatgggcagcgacgcctgcccaacccctcctgagcgcccagcctccctttcccggccggccccgcccccgc

SEQ ID NO: 422241 - DNA, 122 bp, Homo sapiens
tcctcctctgagagcttgccacctaatgggcacactaataactacagaaaaggcagatgtcgtcagtgccccaagagaggcgtgtgcgggcattagttggcgagcgagcccatgccagccct

SEQ ID NO: 422242 - DNA, 122 bp, Homo sapiens
tgcgcccccctcggcgtctccccgcacgggccccaggctcagccagcttctctcgcagctcgcggctgattcgcacctccaccgccagccgcacattagacctcaggctgcggcggggacac

SEQ ID NO: 422243 - DNA, 122 bp, Homo sapiens
agtctccgccctcagagcctacgacaactctccagactccgccggagcaggcgcagggggcgtggccttggtggcaccacccccaacagagcctggtcagtgctgaagactgcgtcagtctg

SEQ ID NO: 422244 - DNA, 122 bp, Homo sapiens
cgtcgccctgctgagaaactggtcccacacctacgtggacccaggtttcctgaggagctccgctggacccgcagatcccgcactggccaaagggctccggtccccagcaggctcaactgcgc

SEQ ID NO: 422245 - DNA, 122 bp, Homo sapiens
gtataggtttgtgggtagagtgtggttcccactgagctatccttcaaggcaggggattctcggcctgggctcttgggaaaactcgaagtaggagggccaagttgtttgggaaaagtaacccg

SEQ ID NO: 422246 - DNA, 122 bp, Homo sapiens
gatgtgagtcatgccttcctcttgccctgatctagcttcccaaagcaaacccgatgccttcgccacacaggtgtgcagggccctggctctgatgggcacgtggcaaccagcctgggcctggc

SEQ ID NO: 422247 - DNA, 122 bp, Homo sapiens
gtcatgacgggccggggcgtgggcagggcttgaggggccaggggactgtgtggggcctgacgggccggtgggtggggcggggcttgaaggaccggagggtgtgtgggcggggcttgataggc

SEQ ID NO: 422248 - DNA, 122 bp, Homo sapiens
gctggcggcgacgaccccgcccggcgcaggagcagttggctgaggtcgtctctggagttccggcctgagcccgccccctgccccgccagggaccaaccccggtctccccgccagcgcatttc

SEQ ID NO: 422249 - DNA, 122 bp, Homo sapiens
gttctttctctccacggctatctgctttttggcagtacagaacagctgcagccagctcagcggcgcccccagagggttcagtcctcctatgccctccttcaactgacctacttgttcctttt

SEQ ID NO: 422250 - DNA, 122 bp, Homo sapiens
aagggacagagataactgggggcatagcccatgcaaatactcggtgaccaggagagtggccgtgtggagaagcagggcaggaatgtgaccacccagctgggtgaggggctgctggcgtggag

SEQ ID NO: 422251 - DNA, 122 bp, Homo sapiens
gacacacatgccgtctcttgattcctaaggatccattacccatttctctgcacagatcttcgggtatccaacctatctgtgcctccttcagccaggagcctccggatctttccagacttctt

SEQ ID NO: 422252 - DNA, 122 bp, Homo sapiens
ggcgacaggagactgtcacagcccagttggaattcactttatctttccctctgccctatacgctgagcaaacatgtgcagttggcatttcagcagtggaaattctctgaccccctttgctgt

SEQ ID NO: 422253 - DNA, 122 bp, Homo sapiens
ttctgggctaaatcggataggtgtgctcactctgtccaggccccagtgggctctctcggccgcccccagcgtcttcacccttgaaggctgtaagaccccagcttaggagctgggaagaggtc

SEQ ID NO: 422254 - DNA, 122 bp, Homo sapiens
tcctgtgttctccatcaaagcggcctggagtccgcctgcgtccccagcaagcagcactcccgccctaaaaccaaagggcgcagcaaggaaatgggagggctgcgctttgcttcctgtctgat

SEQ ID NO: 422255 - DNA, 122 bp, Homo sapiens
tattttcatcttaattaggtttttgtatgaatatgcaagaaggcatcctgattactctgtcgtgctgctgctgagacttgccaagacatatgaaaccactctagagaagtgctgtgccgctg

SEQ ID NO: 422256 - DNA, 122 bp, Homo sapiens
acctggaaatggaggctcggcgaaatgaaatgaggtccccaaggtcacatagcaggcacacgttgatttcaggaatttggttttaaacctcaggagtctggctcctgagctggggagtttca

SEQ ID NO: 422257 - DNA, 122 bp, Homo sapiens
caatttaaggtcaaggtgctggttcttctctctgcctcctgctctccctttctatattgacgtggttcatctgtgcatctctttcaaaccttgtcttagatttcaccttctatagctatgag

SEQ ID NO: 422258 - DNA, 122 bp, Homo sapiens
taaaattaaggccagctccctgctgtttgatctgtggctcagtttctctaagggctgccgcgggttccgcaaagactcactccagaatccccagctccctcgcgtcagcgaatgtcccgctg

SEQ ID NO: 422259 - DNA, 122 bp, Homo sapiens
ccgccgaggagaaaggaggtcaggagagctctggagcttttttctgctcggaaaaaatcccggtacgcgggagccctgagcttctgcggctggaatgaaccaagtgtccgcccggccgggga

SEQ ID NO: 422260 - DNA, 122 bp, Homo sapiens
cgaccatgctgggaatagaccgccataataaacagtcttttccgctgcctctttagccaacgtcccagctggaggagcacgccggccagatttggggattgaaagggatttcctgatacaca

SEQ ID NO: 422261 - DNA, 122 bp, Homo sapiens
ggctgccctccctgatcccagaatgtctgtggtgagtggtcctgtttagggctcaaggtccgccccagtcttgtctctggctgtagatgcctgtgtgtgctgacgactcacatttatgtctt

SEQ ID NO: 422262 - DNA, 122 bp, Homo sapiens
tgaaatacaccaaagggcgcggtgggggtggggggtgacgggaggaaggaggtgaagaaacgccaccagatcgtatctcctgtaaagacagccttgactcaagcatgcgttagagcacgtgt

SEQ ID NO: 422263 - DNA, 122 bp, Homo sapiens
aagacacgcaactgacacggtatctcccggccaaacaggagctacaaatccgcggggagtcggttttgtgcagcccgcgccaccagccccgcctccaacaaaacaggcgatggcggggcggg

SEQ ID NO: 422264 - DNA, 122 bp, Homo sapiens
gccgacacccactgactccacagatggaaagaagacaaaggtacgaggataacgcgggcgcgctcccttgagtacgtgtaagtgcagaattcaccaggcacccctgagaccccacggcccca

SEQ ID NO: 422265 - DNA, 122 bp, Homo sapiens
tcagccagtgtctgcagggtttcaggatttggggtaggaaacagaagatctcacacatgtcgtgctgattttaaataaggcatctgtctctgagacacctgggagagcacagccaccttcct

SEQ ID NO: 422266 - DNA, 122 bp, Homo sapiens
actgccacccacgataacagaaggtagcagccacttgtcttctctgctatattcctagtgcgtagcagaaaagtagagaatcttgtcccctttggtccacagaggatggcttattcttctgc

SEQ ID NO: 422267 - DNA, 122 bp, Homo sapiens
atagataggaggaccagggaaagagggacagagagacagagagggagagagagagagacacggaggatggggcaagaaagcaaaatgatagagtatatctgagaaccatgtcttggaaagaa

SEQ ID NO: 422268 - DNA, 122 bp, Homo sapiens
ccttgccctccccctttcctgggctcctttcacaaccactctggtatcttaccctccttacgagcaggtacaaggcgcgttccaggtctctccgccaatacagctgccgacattgttcaagg

SEQ ID NO: 422269 - DNA, 122 bp, Homo sapiens
gatccaggaatgcttcctaaaggaggcggcaatggccctgggccagcaggatggggggttcgactgggccaacaggcagagggttggtgttctaggcggggtgaagaggaggaggggggctg

SEQ ID NO: 422270 - DNA, 122 bp, Homo sapiens
tgggacttggaagccagtgtgacgcgacagaactgtgcctcacactctggctttagaactcgacctcagtgctgagatccatcaaggccaccgccacttacagaacctcccgccaccatgga

SEQ ID NO: 422271 - DNA, 122 bp, Homo sapiens
gataggcgctgggaaggctcagccaatccccttttcaggtgtgacacgagtgccctctgccgtccagaatggcgaacaactcagcatccaggcaggttcagaccagacgaggagatggggaa

SEQ ID NO: 422272 - DNA, 122 bp, Homo sapiens
ctccactgtgccatgactggctcccacccgaagcttcagctgagctggcttgtcagggctcgctaggaactgctgagctgcatctgtccttacttggcgtggcttcctcagccccctccaca

SEQ ID NO: 422273 - DNA, 122 bp, Homo sapiens
acaaatcctgaaaggaaagcagctttgagtcttgggctcggctgaaccccctgcatggaccggggctaacagtaccctctacgactcccacaggtctctctttgtgtccagatggatggcga

SEQ ID NO: 422274 - DNA, 122 bp, Homo sapiens
agagcagcgtgcggttctcgagtttgtccactgggatgcactgcgctcccgcgttggggacgaaaaggccagtagttgttagcccgctgcttgagccgcccccactcagggatgaagctgcg

SEQ ID NO: 422275 - DNA, 122 bp, Homo sapiens
aggaaatacggaagcgacaaaggagatacctttgcatctggcgaggggcagccgcgcagacggaaggctgtggccagcaggtggcgctgttgctcaacgcagaagccaaggctccaactcca

SEQ ID NO: 422276 - DNA, 122 bp, Homo sapiens
cacccatccgaggggagcaagcctcgcactctgggtccggccacgcagctgcggagaaagcggcaccgccagcgtcttccccgtcccaggaccgtccctgcacagctctcctctgccctcac

SEQ ID NO: 422277 - DNA, 122 bp, Homo sapiens
ggccctagggtgcaggatggaggtgccgggcgctgtcggatggggggcttcacgtcactccgggtcctcccggccggtcctgccatattagggcttcctgcttcccatatatggccatgtac

SEQ ID NO: 422278 - DNA, 122 bp, Homo sapiens
gtcgttcttcgttgtggcggcctgtggctctttgaaaaacacgacgaggcctgcaaaatgcgtttttctttttttcctttacgcatgtaaccacggtcctgcatcgtgaaacggtacgcgcg

SEQ ID NO: 422279 - DNA, 122 bp, Homo sapiens
caaaaaccaattatttcttctagagataccctcagtgctattcttccttttagagacatccgcagtacagcctaaatcagttcagttcatatgttttgttctaggtagtctgccaggccttg

SEQ ID NO: 422280 - DNA, 122 bp, Homo sapiens
cggggagaattttctgggagaactctcctgcatggggtctgtgagttccaggctgactaccggacttcctgatgcgtaaattctgggacggtataaaattacaattaagtgtgaaagagcgg

SEQ ID NO: 422281 - DNA, 122 bp, Homo sapiens
aacaagtgcaggaaactggccggcagtcatgggagaagccaaaaagacaggtgagcagcgcgtccgcctcccgcgcacaggtgagggctcacttctgcctgtcggcggcggcacacacagga

SEQ ID NO: 422282 - DNA, 122 bp, Homo sapiens
tcaacttgtgtttgtaagtatgggctttgacagtggtgctgtaaaaagaaaattacaccccgaagtgccgtgtaaaaagccattgtgtatggccctttgtgatctggaggaaatagtcccct

SEQ ID NO: 422283 - DNA, 122 bp, Homo sapiens
acattgggggtcaccggccgatggagacaccaaccgacaggccctggctgagggcagctgcgcgggcttatttattaacaggataacccttgaatgtagcagccccgggagggcggcacagg

SEQ ID NO: 422284 - DNA, 122 bp, Homo sapiens
acaggttgcatatctctgccatgctgttacctcaactctccctaacccccttccactggccggaaccctactgtcctacaatacctactgcatggcatctcttctagggacatttccaacat

SEQ ID NO: 422285 - DNA, 122 bp, Homo sapiens
agcagcagagccaaggagggctgaggccagcttcctttgctctcccactcattcccagctcgctatttaatttgacatcctggaacatgtgtttcagtgaattggttcataaaaatgttttt

SEQ ID NO: 422286 - DNA, 122 bp, Homo sapiens
caagcttcccacatccccaagccacaccccaggccctgtgctgggcacagcccccaactgcgtgccacctgcggtttggccaaacctgaaccgccacatgactcctgtttggttccttcttc

SEQ ID NO: 422287 - DNA, 122 bp, Homo sapiens
aagagggagtgggagataggggaagccagagagactgttactaatagccataattaaacacggaaatgctcagagattagctaaattttgctaattactgtaaatgatcagcagggagagga

SEQ ID NO: 422288 - DNA, 122 bp, Homo sapiens
gagtgctatttttgttgtctcacagtttgcaggcaattccaaactctgcgtttaccacatcgtggtgtctgtctgtatgttcttacagattgtttacttcatggaagtagggcctgggtcat

SEQ ID NO: 422289 - DNA, 122 bp, Homo sapiens
ttgggtttgaatctgctctactgagcagtcacccgggaagtgaccagatgatgggacttccgtgcctgagtttcctcagctgcaaagtgagaaccaacctcagaggatgatgctgaggatct

SEQ ID NO: 422290 - DNA, 122 bp, Homo sapiens
aaaggctgcagcggggcgatttgcatttctatgaaaaccggactacaggggcaactccgccgcagggcaggcgcggcgcctcagggatggcttttgggctctgcccctcgctgctcccggcg

SEQ ID NO: 422291 - DNA, 122 bp, Homo sapiens
ttagaaatcccaatttgatggtcaagtccaacgctcaccgcagacatctggctgaccaggcgctcgcggatggaagcgttcagacccagttggaaacttttcacaccgagccggcccacttt

SEQ ID NO: 422292 - DNA, 122 bp, Homo sapiens
agcgcactcgcggcggcgttggtgttatgctctgggccattcctgagctcgggtaaggctcgctgcaggaggaggctgggttgcttgcgggcgcctagatggaggggcccagattggccctg

SEQ ID NO: 422293 - DNA, 122 bp, Homo sapiens
ttcgattcggaactcgggtgaccgctgctgttcccagcctcctgggccgctgctttactgcggtggggactctggtggtcttgctgccccccctggctattttgcttcatggcagcacctct

SEQ ID NO: 422294 - DNA, 122 bp, Homo sapiens
ctacagcaacacacatcagaacagagtggatgaccactctctattccaggatgggggctgcgagacccccggctcggggcagtgttctgcaccggcccaagaatgggtcctgcaagcagtaa

SEQ ID NO: 422295 - DNA, 122 bp, Homo sapiens
cggtgcggagagcttggactgggagcccaaagctcggctgggcagcgggagaggaggagccgcaggagctgcagctctgccagcttgggccgagcctagagacaccggcctggctggtccac

SEQ ID NO: 422296 - DNA, 122 bp, Homo sapiens
cagctttggggtgggtatcctctcagctctgtctccgtggtcttggtctcacatctgtcccgggaaaaccactgcagagatgatggggtgggtggggtgagaaatgtaaggcatagtctgct

SEQ ID NO: 422297 - DNA, 122 bp, Homo sapiens
gttgagaagtacacagaggactggagacaggttggggttttgaaaaggaaactgcagcaacgcttttttagccaggggaagaggagcaaatctgtagacagaggacataggagaaggggcca

SEQ ID NO: 422298 - DNA, 122 bp, Homo sapiens
agagtctctgccctaggtagaccactgcctcatgatcccctctagagattggtaaaaattcgaattctcgggccccatcagaactactgaaaagagcctcctgtgagcacagggctcgcagt

SEQ ID NO: 422299 - DNA, 122 bp, Homo sapiens
atagcacttgtttgagaattacaagttagttccagaaatgaatcgagtgacctcacagcccgtaggcaggggtgggagagccagggtgagcccctcacctcaccccgcccccgccccggcag

SEQ ID NO: 422300 - DNA, 122 bp, Homo sapiens
agcacgttctaacatgttgctagagactaaatggtggactgcagaaaaatcacgagaccacgtgaccagggctacccattcagaagctgggtatggccagatcactaaatgccaaggtcagg

SEQ ID NO: 422301 - DNA, 122 bp, Homo sapiens
tttgcaccaattagtagcaggtgctacagcccaaaagacaaattgatgtccactgatcatcggtactggctgctttattgtactgtgttcgtcagcctgtctgatgattctctgttctgttt

SEQ ID NO: 422302 - DNA, 122 bp, Homo sapiens
ctgaaatttataattaaaatgaatccagctcagaatttaagagtgatttttgtggcagtgcgattcactttcatgtaacttgtgccttactggtgttgacattttatttttactccaattac

SEQ ID NO: 422303 - DNA, 122 bp, Homo sapiens
cgcagcagcaaggcagttgtctaagtcacttgatgtctcaagactgggcaaacctcctgtcgctgttaactaaacagcttcccttcccctgaggtttttctcttcactctctgaacttctgt

SEQ ID NO: 422304 - DNA, 122 bp, Homo sapiens
aagagcgcatgctcaccttgtagctcagccaatcaaagagaagcgaggcggccattcgggcggaaatagtgtttgcaaacaggaagtgtggcactccagctaccgaagcactggagagtgtc

SEQ ID NO: 422305 - DNA, 122 bp, Homo sapiens
tgggattacaggtgtgagccactgcgcccggcctgttttctgttttttgagatggagcctcgctctcttgcctaggctggagtgcagtggtgcaattatcggctcgccgcaacctctgcctc

SEQ ID NO: 422306 - DNA, 122 bp, Homo sapiens
tttttaaaatacagcaaattctcaaatgtgaaatcatttaaaatgatgactgaatgacttcgaggtttccttaagctgtgggctgtggacctcatcttgggcaagcagtgacaatgcagcat

SEQ ID NO: 422307 - DNA, 122 bp, Homo sapiens
ggtcagccgcgtttccatggagagcggaatgcggccttccggcttttcctcaggaggagacgcgtccgcgccggcgtcgcctcgccgctctgggggcggccatctttgagtacgtgacgtac

SEQ ID NO: 422308 - DNA, 122 bp, Homo sapiens
ctgactccctccgacctgggctccgatggagcagaaatagcgggacctggacttgtggcgcgcctggtgccacatctcgggctctgcgagcgtcctggcgcgggatcctgccgtgagaagga

SEQ ID NO: 422309 - DNA, 122 bp, Homo sapiens
acagggttggcatggctgtgcaggtgatcaaggggaggccacaggtggagaaatgggtggcggcggctcctgcaggttcagggcagagtttggattttatggcaaccactggagtgtgcaaa

SEQ ID NO: 422310 - DNA, 122 bp, Homo sapiens
tattctgaggcctgggttcttaaagcggaaagagcttttatttggaagcctgtagggccccgccaggcctacagcagtgtgccggctctcttgctgtgattgtcgcctgttaactacagtct

SEQ ID NO: 422311 - DNA, 122 bp, Homo sapiens
tgagtttaaaaccaaactttctttagctggtccagcggctaagtgcagctctgatgcatccgagcacggtgccctcttctctcccagtactgctctgtgcccatggaaaagggggcggaggc

SEQ ID NO: 422312 - DNA, 122 bp, Homo sapiens
agggtcctggtaccttctgctttgggtgtcatgcgcgtgaggccccggtggaaggacgtgcgtgcagctcctgtgccgggtgggatgcgggggtgccaggtggggcccgggggtgccgggtg

SEQ ID NO: 422313 - DNA, 122 bp, Homo sapiens
gttcctttaaactctcgctttcgcccccgctgacactttgcaaagccgcggcggcagcggcggggaccacgctgcggtgcaccaccttccgccaccctcccgcgctgggctggggtcgaggg

SEQ ID NO: 422314 - DNA, 122 bp, Homo sapiens
ggaggggcgagagaaaggatgggggtacagaaccggaagaaacgaagggctcgtccgcttcggcttgtcctaatttggtgcccaatctgaagctgggctgtaccattgcatacctgggggag

SEQ ID NO: 422315 - DNA, 122 bp, Homo sapiens
ggctggaactccacaagctgctcctgggagcatgctgctgcttctggatccacctgaccccgacaaccttccagcccttaacggagacaaatactctttaatttctaacaaagaatatttcc

SEQ ID NO: 422316 - DNA, 122 bp, Homo sapiens
aaatttcccctaagtgcggttgacagtgtgcaggcaggcgggggtgcgcggggcggtcagcgatctgcagcttcgcggggacagagatgtaacccaactcgttcacggatgttccgcgcgcc

SEQ ID NO: 422317 - DNA, 122 bp, Homo sapiens
tgttcacatggtatttttcttctactggggcagtgtgaaagttgttaagatattattcatcgaggcacagtgctaggtactttatatgcattacatcttccagtcctgcaacaacccttgaa

SEQ ID NO: 422318 - DNA, 122 bp, Homo sapiens
acatgtgggaacagcctataaaactaggaaagctaagcggccattgaaaacccatcacttcggatccaccagccacataaccctggacaggaagatgaaaagtaccttcttcccagcgctca

SEQ ID NO: 422319 - DNA, 122 bp, Homo sapiens
agttttccagagggtgtgacacttatttgagtgttctgtttttcctggtgccaatttttccgagtgtaatttcttcacttttggtttctgagatagaggccccagaatgttatcacgaaagg

SEQ ID NO: 422320 - DNA, 122 bp, Homo sapiens
ttggaaaggttgccaggaaaccgcgagcataacgcagaaagataaaacgaaagccctaaacgccgccgtgggaatttaagtccaaggggcagagaaaacaggaggggaattgcagatcggct

SEQ ID NO: 422321 - DNA, 122 bp, Homo sapiens
ctctcgcacaagccctcgtctgctacgggattggggtaaattggcgctggatccagagtgcgcgcgagaggcactggcgggcgggcttggcaccggcgggcgggcttggcaccggcaggcgg

SEQ ID NO: 422322 - DNA, 122 bp, Homo sapiens
cccacctggccactgatgggccctgccgcaggagcaacaagaatcacaaaccatagctcccggaaccagagataaaagaaattctttcctctggcagtgtccctccggcgccctctactgag

SEQ ID NO: 422323 - DNA, 122 bp, Homo sapiens
tgtagtcccagctactcaggaggttgaggtggaaggatcactttgagtccaggagtttgacgctacagtgagatatattcatgacactgcactccagcagcctgggcaacagagcaagaccc

SEQ ID NO: 422324 - DNA, 122 bp, Homo sapiens
cccctcttcaccttcaaggaaaactggtttgttgctacctctgcccatacctgaaacccccgggctctccagcgttggaactgtggctgctccgagagggggagggcagacgacatgtagca

SEQ ID NO: 422325 - DNA, 122 bp, Homo sapiens
gcccccgcccccgccccccccgcgctcactagggagaggctggggggaggcagtgacccacgcgcctcagcccgcggctgacgcaccttcgaaaagttgcgctccgaccttctcacgaccta

SEQ ID NO: 422326 - DNA, 122 bp, Homo sapiens
gcaatattggccgggcatggtgactcacgcctgtaatcccagcactttgggaggctgaggcgggtggatcatggggtcagatcaagaccatccgggccaacatggtgaaaccccgtctctac

SEQ ID NO: 422327 - DNA, 122 bp, Homo sapiens
atcttttgcgcatgcagatttacttcgctcattgccacataactcatccctaaaagccggcgcaggcgaaagcaggcgccgccggcggagccgctgccacagctaccgccgctgcccgcccg

SEQ ID NO: 422328 - DNA, 122 bp, Homo sapiens
cactcggcccaggtcaccaggaaacagggctgccggatgagacactcggcccaggtcacccgcaaacagggctgcggataagacactcggcccaggtcaccaggaaacagggctgtggatga

SEQ ID NO: 422329 - DNA, 122 bp, Homo sapiens
aaggaaaacagtacagcttgaaagaggaactgctcaaaagaatgagtcagtcgctactcacgctggggagaccctcttgatgagagttttacaggattactcacgaacggcccaggcagggg

SEQ ID NO: 422330 - DNA, 122 bp, Homo sapiens
gacgtgtgtcctccctttgacctccttttcccagcacacagtagtcacaaatcttttacgcggggttaggtgcaccctacccccgcccccagcccgctcaaactggattcaacgggtaaaga

SEQ ID NO: 422331 - DNA, 122 bp, Homo sapiens
accgcccgccgcccaagtcccctgcccagcctacttgggagcaggtcgtaggtcagctgccggtgcagccggtcttccagcaccagaagcagagtgagctggggaggcggcggggcgtggtc

SEQ ID NO: 422332 - DNA, 122 bp, Homo sapiens
ctggggcagttgaagtaaaggacgcgaggcggcgctgtcaccgcattctgtgaaccgcagcgctctgggtccctcccgctggtctagtatcatttcagtgaacgtcactctacattttttgt

SEQ ID NO: 422333 - DNA, 122 bp, Homo sapiens
ttttgtctactgccccaataaattggtttcttttcttagagtctgatgctaaagaagtctcgactcaggaaaaccacaagggtggacttgggaagactcaacaggttgtaatgactctccag

SEQ ID NO: 422334 - DNA, 122 bp, Homo sapiens
atgtctttataaaagatgcgcagaggagagacacacagagaagagcaggaagcaatgtgacgtgcagcgcagctctagtgatgcaacctcatgcccaagaatgctgcagctaccagaagcta

SEQ ID NO: 422335 - DNA, 122 bp, Homo sapiens
ggggccccggggcgggagggggtttttcccgcaccctgggatggcgaggagggaacttggcgacaagtttagtgaggggatcgctgtgttcctttctagtccagttaaaatgacccgagctt

SEQ ID NO: 422336 - DNA, 122 bp, Homo sapiens
ccccgagttttctgggagactgatttgagtaataatacaactctggtctcccgcacagcccgctccgcgcgtgaattaccctttctctattgcaattgccgtcttgataaatcggctgtgtc

SEQ ID NO: 422337 - DNA, 122 bp, Homo sapiens
cgccgcctccggggcccgagggcaccgcgggaaccaagggcccttgggggcggggcctggcgccgggagcgcgggctgaggcggggctgacgtgaggggcggtgacgcgggtggccaaagcg

SEQ ID NO: 422338 - DNA, 122 bp, Homo sapiens
aacctgccagccactcgcgttaatcccgcagggctattggccagagtctttgtttaattacgtttccttggagccgccctggcagtgaggcgcccaggcctgcccccagcacttggctccac

SEQ ID NO: 422339 - DNA, 122 bp, Homo sapiens
gaggccgtttcgggctcgaggttagaggccctgttagggtgaacaacctgcgcaaggcggcgccatacacagtgttaaaatgaggaagaagacaagctttcgctgcgcaagtagatccaggg

SEQ ID NO: 422340 - DNA, 122 bp, Homo sapiens
gtcgggcggcctagcgcctgcggctctgccgggcctgcgctctcgaccgacgccgggccgcgcaccgcctcaacttccctgccccggcggctcttccggatggagacgaggcagcggggcgg

SEQ ID NO: 422341 - DNA, 122 bp, Homo sapiens
acctgacccgctgcggggtgctcggggcgctgagggagttgcgggcgcacacggtgctggcggcctcgtgcgcgcgccaccgccgctcgctgcgcctgctggagcccttcgaggtgcgcacc

SEQ ID NO: 422342 - DNA, 122 bp, Homo sapiens
aaattacctccaacctaatggcttaaaacaacacaaatttatcatctgacacttgttcatcgcatgtctcagtggactaaagtcaaggtgtcacagggctgcatatctttctggaggctcta

SEQ ID NO: 422343 - DNA, 122 bp, Homo sapiens
tgggaatccgtgagggtagccgggcagctccctaaaccttagcaacagaaacaaaacacacgtacaaaaggcagtcctggaggggaagcgtggtcccggcccctcctccggtttgtactgtg

SEQ ID NO: 422344 - DNA, 122 bp, Homo sapiens
gacatattccacccactaagtcataccagaagccttggtaatcatggtggatggtgtgaacgcaaatcccttagatttccattctgcaacaagctttcttggaggaaggtgtgaatatatca

SEQ ID NO: 422345 - DNA, 122 bp, Homo sapiens
aagggaaaccagggaagaggggaaaggagggcggcggcagcagccgggcgcgtctcagcgcgggccccaaaggtcccggctccgcttccagcaccgctcgggccacgcctctccccagcccc

SEQ ID NO: 422346 - DNA, 122 bp, Homo sapiens
agataaataataacttacaaacaggattagttgtaaagtcacgctccggcgcgcagccaccgcggcaatcacgtctgccgagggccgccaccgcgaggcacctgtcaccggccgccaccgct

SEQ ID NO: 422347 - DNA, 122 bp, Homo sapiens
ccagtctcagcctaaaaacttggatccaagagtcctacggttgtggatgtgccagtcctccgcgaccctttcctgctggccttctgctttttataaacgaaaataaaagtttgatttaggct

SEQ ID NO: 422348 - DNA, 122 bp, Homo sapiens
atttatgcagtggttcaaagtctagagtccctacacttctggtacatgacagctgtgtctcgatggagtagactctcagaacagcgcagtttgccctccgctcacgcagagcctctccgtgg

SEQ ID NO: 422349 - DNA, 122 bp, Homo sapiens
ggggcggctgagagaggtcacctattttgggcgccctggccgggcaggcggcttatcttacggcccctgggtccctgcccgtcgtccgcctgtccggctaggaggggggaggggaccctctg

SEQ ID NO: 422350 - DNA, 122 bp, Homo sapiens
gcagcgacccgctgctgaagaaacctggtgcagccagtccactggccagccgccagaacacgctgcggagctgtgatccggtgttctataggcaggtgttgggtgcagagagcgcccctccc

SEQ ID NO: 422351 - DNA, 122 bp, Homo sapiens
gacagccgcctgcaaaatggcgccgcggaggggcgggccgggggcggggtgcagcggagccgcccgcccccgcgccggtctggggcccacctccctccccgcccccgacccctgccctcggg

SEQ ID NO: 422352 - DNA, 122 bp, Homo sapiens
gggacccatctggcccattgtgctgtgccctgctgtgcgttatcacatcaaggtgcgcgccggcagaggcttcagcctggagctcagggtggcgggcattcacaagaaggtgacccggacca

SEQ ID NO: 422353 - DNA, 122 bp, Homo sapiens
taaagataagagtctgtcaaaagagctcgggaaccaatgtgaaagagcgaagagctgagacgatctgagcagcaagataaagatagcgttacattttaagctagactaaaaacatccacaaa

SEQ ID NO: 422354 - DNA, 122 bp, Homo sapiens
tgagcagagcccgtggcccatagaaagcccaccccttcagaaggaaatcagatccttgggcgaaagaggtaaagaaaaaaagagcagctgttaaaacatttagtctgtttttctgctcagcc

SEQ ID NO: 422355 - DNA, 122 bp, Homo sapiens
ccccaccctccacccgccaggtttgcggtggccggggcggcaggtagggaggtgagcccgcgtctcctccgcagagctggagctggagctccgctcagaggcccaggctcagtgggctcctc

SEQ ID NO: 422356 - DNA, 122 bp, Homo sapiens
cagaagatcgctcacaactgcagacagagcgtcatgcaggaggtgggggccccgcgggcacggggcgggggtccctgggcccgggtgtgagtctcagccccatttcaagggcccagggacca

SEQ ID NO: 422357 - DNA, 122 bp, Homo sapiens
tggtcgccgcagatgggggcagagatgtgaaacagctgcagagcgggacaagggtgctgccggcacagggctgaccacagagcacatcaaaagaggtagggcacccagcgcaagggaggtga

SEQ ID NO: 422358 - DNA, 122 bp, Homo sapiens
ggggtctgaactcccagccaagcccggcctctgcacacagcagtgagaagccaggacctacgcacacccctggccggctccccgctggcccctctgcgcgtgggagcttccagcctcccggg

SEQ ID NO: 422359 - DNA, 122 bp, Homo sapiens
ctgctggcatctggattggttattttattggcatggaggggaaggtggagggtgttgagccgactacactcagttggaatgggtggcctgcaagtcgtagtgctccagcttggccaccagag

SEQ ID NO: 422360 - DNA, 122 bp, Homo sapiens
aggcatgccatgtgcgctgatgggcctcaggcaggatgcggaggtcaccccgagtcacagcggcgctggcagcctgggccatctccccgcagcgaacgtaccactgcggccgcagcagaggc

SEQ ID NO: 422361 - DNA, 122 bp, Homo sapiens
tccaataatggaacactaggcataaatgggttttaagcgccaagggagccacttcccctgcgtcccagaccatcacggacagcgctccgctgccgcctccacgacccccggcctgcacgccg

SEQ ID NO: 422362 - DNA, 122 bp, Homo sapiens
actccctcactcggtaggtaaagtttacttgtgtctgggaacttctctgttgtaatacatcgggagttttatgaatacataaaaaacaacagcagggaaactgggagctaggtctataaaga

SEQ ID NO: 422363 - DNA, 122 bp, Homo sapiens
gacttggaatactaggaaaaatacaggactaatgaatagtttccatgtgggacccagccccgcctccagctcctttgtcagaggtggcagagatcttcaacctgttctgactttgcactcag

SEQ ID NO: 422364 - DNA, 122 bp, Homo sapiens
aatcattgcacagtgaacgtcaccgatttatcaaaacacaccttccgccgtgtgctgcaacgtggccattacgcaacgtactcggagatccaagatgagatcctggatagtctgtaacaggt

SEQ ID NO: 422365 - DNA, 122 bp, Homo sapiens
tccagcaaaatgccggccaagctcaaggagaaacagcgtttattgtggaggggagctgggcggggctcagccctcggagaactggcagtacagccgccccagcctcggctccacccatagcc

SEQ ID NO: 422366 - DNA, 122 bp, Homo sapiens
agctgggaggaggcggtggccctgctggaagagttctgggtgagcctgacggggctgcgacgggggaggggaggaggcaggggagcggggaagccaggaggaagcggagggaaaaccgctgc

SEQ ID NO: 422367 - DNA, 122 bp, Homo sapiens
tccagtctggtgggtccctagaatataatacattgtgtgttgtcgtaggcgggacttgcacgctgtgcagttggctttacggttgacaccaggccaccagtggcctcctccgcctgcccttc

SEQ ID NO: 422368 - DNA, 122 bp, Homo sapiens
aataacggcgctgtgggctggggaggacggagttgccttcaggcttctggtctccagccgcggggcactcacagctgccgctatgaaaatgcagacctgtggggcaggaattccgagtccgg

SEQ ID NO: 422369 - DNA, 122 bp, Homo sapiens
tcctatgcgtgtgagtggtggattaatctcgtttcaccaacacctggtcacacaggaagccggggcagtgaggaacggctccgacatgatgtcgaaatgaccctcctcaccctttcttttca

SEQ ID NO: 422370 - DNA, 122 bp, Homo sapiens
agttcctgtcaccatcctgttggaacggatgcctgcccaccatgatccgcagattctggacggagactcaggagaggaagccgagacaacgacgccacagtgcagaacggagcctccctctt

SEQ ID NO: 422371 - DNA, 122 bp, Homo sapiens
cacttcccagacgaggtggccaggcagaggtgcacctcacctcccagacggggtggcggccggacagaggtgctcctcaccgcccagacggggtggcggctgggcagaggcgctccccatat

SEQ ID NO: 422372 - DNA, 122 bp, Homo sapiens
aagaggctgctccggatggggaggggatgaaaacccctgcgggttcgacgccgatgcccacgttgcccaggccttcacagacccccaaactggaactgccgggaccacgactgccaaccggc

SEQ ID NO: 422373 - DNA, 122 bp, Homo sapiens
gggacgcggacgcggggctacgggtcggcggcggggccacacttcggggaaggcgaacaacgccgcgcccccgccctgccccccgccagctccgcgggagtgagacaccagggcagcgaccc

SEQ ID NO: 422374 - DNA, 122 bp, Homo sapiens
ggccggcagtgtcgctacggtggtagccaggtgagcacgggcacagtcccggggcgggggcgggtagagcggccctctctcgggagctccggtgggtctgcgaacctgccgggagcggaagg

SEQ ID NO: 422375 - DNA, 122 bp, Homo sapiens
gggaacccgtggaatcgggttggatgcgcatgtgcgtgtctctttttccgggggaggctccgcccacggccccgccccgctcccaagtgcgcgcggacccctagctccctctgagttgcgct

SEQ ID NO: 422376 - DNA, 122 bp, Homo sapiens
cagactgctgtgctagcaatcggcgagactccgtgggcgtaggaccctccgagccaggtgcgggatatagtctcctgatgcgccggtttttaagcccgtaggaaaagcgcagtattcgggtg

SEQ ID NO: 422377 - DNA, 122 bp, Homo sapiens
aacaagttaagtaggatctgacctttcaggaaaatggtatctcagacagattttttcccccgtctcattttgttatataaagagtggccttaaaaacatttttgcatgtcttcatctatcca

SEQ ID NO: 422378 - DNA, 122 bp, Homo sapiens
tttctgagttttaaggattatgtgagacaacacgtgtaaggttcctagcacagaacccttcggaatgatggcctaaaagcggtctgttgactgtcttcctcaccccccaatcctcccccctc

SEQ ID NO: 422379 - DNA, 122 bp, Homo sapiens
tgtctgatgtgaaaggaaagaagtaggctttcagcaagcctcttgtccggagacgatctacgggggccgcctccagaggattctggagccgccatcttggcaaaggaagagatactcgccac

SEQ ID NO: 422380 - DNA, 122 bp, Homo sapiens
catcctaacaatatacgatggagattctgtttgggagtatctgagaagacaggaatcacacgtgatacctggagctgcagcagccgtcttatgacctaaggcaacaaacagcaaactaagca

SEQ ID NO: 422381 - DNA, 122 bp, Homo sapiens
gaccagataatataattggtatgccattgttgcgaataaataagaagatttaaatgatggcgagcacttctccatacagtgcgattgagaaaaccttcacacagtcctaggtgacactgatt

SEQ ID NO: 422382 - DNA, 122 bp, Homo sapiens
tgccttcccgagcactgcaaaatcgcagcagggtggagggtccgcctgcaaagcagagcgcgcaggcccgggttgcgggggcgagcccctccgggaacgcgcgacccgagacgccgctgccc

SEQ ID NO: 422383 - DNA, 122 bp, Homo sapiens
ctgcgcgagacctgggcgggaccctcggcgctcacccggccaggggctgcagcccgcacccggacccaggcccatttaaagccccacagcgtcgggccacgatcaatatatcagcccgaagc

SEQ ID NO: 422384 - DNA, 122 bp, Homo sapiens
gccgggagcccgcgcagaaacgacctgaccctccgcggcgccatcttcctctgcgactggcgctgcgcggagaaaacctagcctgccgatgccccgcccactaccccgcccccacccaccgc

SEQ ID NO: 422385 - DNA, 122 bp, Homo sapiens
cctcccagaaagcggcgtggagcttttaacagcaagcaacttctgtatttggagaagtatcgtcctaaaatgcggctgcgtttcaaagattccaacggtcatagaaacaactgttgcattca

SEQ ID NO: 422386 - DNA, 122 bp, Homo sapiens
ggtgagatcattcacatggtaaaattgcctcctctttcacaggctggttctcatgtatgccggattgttgaggacttgtctgagagctgtggaaagtatcagctgaagtgcattttgacact

SEQ ID NO: 422387 - DNA, 122 bp, Homo sapiens
aatcatgaggaatagctcatgacacgacacactatttcatttttgttcagcctgagggtccgccctggaagatcctctttacaacataaacaatgtgatgaccatggaattcagcagccaac

SEQ ID NO: 422388 - DNA, 122 bp, Homo sapiens
tcgtagacttccccatcccattttttatgttctatgctaatttctcaagaaaaataggcccggcaccgcctctgcgcacaaccttgctggtctggcccaggcggggggcggggccagcacga

SEQ ID NO: 422389 - DNA, 122 bp, Homo sapiens
gcagcaagcgcgcatcgcgcaccccagggtagcagcgcaggtctggggctgcgccacagccgcgcccgcagagctatttttagccgctgcagccagcctagccaccagacggggtgggcggc

SEQ ID NO: 422390 - DNA, 122 bp, Homo sapiens
ctctggaaaaaaaagcactgaggcaaatctagagacccagaggctttgcaacctgacatacgcaatttgattctaagatgtactttttttcttatttaacagttatatcttattttactggt

SEQ ID NO: 422391 - DNA, 122 bp, Homo sapiens
gaactttggagttctaaacaaaatcctgtaggtgtttggattctgccccatgtgttcggacgagctctctgttgctgacagcaccggccttcggtctccatgtcaggggtgggcgggtgact

SEQ ID NO: 422392 - DNA, 122 bp, Homo sapiens
agacgtcctgcagggagagggcgctgaggaggagccctggaggccgtgcctctgggtccccggcccctgcggcctggcacccgatggttaccgtggccaggatgtactcgcagttgccgtcg

SEQ ID NO: 422393 - DNA, 122 bp, Homo sapiens
cccacccgtggacgcaaaaggccaggactccacgctgctgaccctccagcgtcccatgtccggcaggcacgtggccgaatagcccaagactgaggactcacacttcccactttgcacctgga

SEQ ID NO: 422394 - DNA, 122 bp, Homo sapiens
cttcttgagaataggaggcacacagagagattttgaacttcagcagagggggctttgctgcggctccctctggagcaagccccgcctccatggccagggcaggtgctgctggcaaggcctcc

SEQ ID NO: 422395 - DNA, 122 bp, Homo sapiens
accctcattgggccagctccacgcccatcaccgccgcccccagacccactggttggtttgcgcgcccatctccaagggaagacgttagcaacccgaacgaagctaccttcccgagtccggct

SEQ ID NO: 422396 - DNA, 122 bp, Homo sapiens
gcaagtaggctcaggacggcgtatccggggaattctgggaaatgtagttcacacgctgcgcggggtaggggcacttccgctcccggggggcgaggttgctgcagtgcattcggtggtagttt

SEQ ID NO: 422397 - DNA, 122 bp, Homo sapiens
atctggatttcccttaaacatattctggatcccaccctgaatataccaaaaaactgtcatcgatgacaaatgttcagcctatgcagacttgtacactaacaacctgattttgcccagcactt

SEQ ID NO: 422398 - DNA, 122 bp, Homo sapiens
gcttgtaggagttggggcacgagccttgcccagggggaaggagtgtaggcggtcttttatcggctaggatgtaagaccgaaacccagtcatgggttttgatgacccatgactgatggatttt

SEQ ID NO: 422399 - DNA, 122 bp, Homo sapiens
actcaggaagtgcaaggggtcagggagttccctttctgagtcaaagaaaggggggacggacggcacctggaaaatcgggtcactccccgaatactgctcttttgcgacgggcttaaaaaacg

SEQ ID NO: 422400 - DNA, 122 bp, Homo sapiens
ggattggggaaatgatctggggggcagggagccttgaatccacagccttcatttcaataacgaccatttaatttgttccttggcagactgaagaacctggggtggggtgggggaggttgaga

SEQ ID NO: 422401 - DNA, 122 bp, Homo sapiens
tgatctcgctcggttcttcccgattagaggccgaggattggcagggctgggggaagcccccggagcaatctgggatccctggaatattgggcccctctggattagagcaggtagggatggga

SEQ ID NO: 422402 - DNA, 122 bp, Homo sapiens
tctgtctctagcactgctgttctcttatctcactcttctcatttattgtacatacttcttcgtgctaccttcaggtcatcatagattagcgttttcaaaaccctgttactatctcaggtacc

SEQ ID NO: 422403 - DNA, 122 bp, Homo sapiens
aatacattactgttaactagagtccacacatcatacaatagagctccagaatccattcgccgtacctgactgaaattttgtgctctttaaccagcatcttccaattcctcatcccgctggcc

SEQ ID NO: 422404 - DNA, 122 bp, Homo sapiens
cgcccgcagcccggcaggaagtgacgggggaggggcaggcgcccgcccccggcccccgcccgcctccaggcccggccccggccccacccccacccacggtccgaaccacaagttccggctgg

SEQ ID NO: 422405 - DNA, 122 bp, Homo sapiens
acctggaaacaacaaaaatgaccatccacaagacagtggataaatagcttatggtatctacgcagtggattaccaccaggttccaggtttaggtaagataaagtaaacatactccaccctgt

SEQ ID NO: 422406 - DNA, 122 bp, Homo sapiens
caatgctcagcacccagctggcaatgtgcccaggaccccctgcacttcccaagcagtgagcgcacacccaatgggtaagcccatgaacccagtttatgacactgcgttgggcaaaactcctg

SEQ ID NO: 422407 - DNA, 122 bp, Homo sapiens
aacacagatgcagatgtcatgaactatacctaggaaggccagcggttgtgtttgagccagcgtcttcagggttgcgtaagagttttacagacatccgagggtgggttgggcagtccggcaat

SEQ ID NO: 422408 - DNA, 122 bp, Homo sapiens
ccttggaaatgttgataagacacacgttgccagtgcacaaatcatacacagcacgaatttcgtctttgcacccaccaagccccaagccgaaagctccctagttgcaccaaggagagagaaaa

SEQ ID NO: 422409 - DNA, 122 bp, Homo sapiens
ttccttgggcgctgggattgcagtggtcaggagcaggcgcactggcccttgcctggagtgcggctgggcagtggctgctgggtgagacaggtcagtctcacttgagaagctgcagaggaaag

SEQ ID NO: 422410 - DNA, 122 bp, Homo sapiens
cagaggtcccttgggctagattttctcttctggttttgtttcttgttctgcctgactggccgctggcttccacaaaggagccctttgctcctggcctgggctctgatttcactgtgtggtct

SEQ ID NO: 422411 - DNA, 122 bp, Homo sapiens
cacaatgcgcatcccgggcgtgagccggggtctgtgctgggtctcgtggacagcacgccccggaaggctgcacagaatgttctgaaaaatgcttcaggagcccttgagagaggaagacccag

SEQ ID NO: 422412 - DNA, 122 bp, Homo sapiens
gtctctgcctggaggagactgtgtagggtccggcgtggggatcagccaggatgggctgcgcgtctccagcctctgcacacacattggcgggtggggtgcagggagggagaggcaggggagag

SEQ ID NO: 422413 - DNA, 122 bp, Homo sapiens
tgtgtgagaagggagaggaaccggcgttttccagcggggcgcctgggtgggataccctctcggggaagtgtctcggagctggggctccactggtgtagctacaggagtgggctggccctggg

SEQ ID NO: 422414 - DNA, 122 bp, Homo sapiens
gcttaatgtcattatttaaaaagggggagggaatcacttgacgggtgggcaaggtggggacggggttggatggaatggtcaaaaaaggtctttcagagttcttccaatcctgaactaactca

SEQ ID NO: 422415 - DNA, 122 bp, Homo sapiens
atttgcccaaggtgacccagcactgaagggagaagctagccattaagctgtccccaaacccgtgtactcaacgttgatggctactcgatggtggctgagaggcatccaacctggagcctggg

SEQ ID NO: 422416 - DNA, 122 bp, Homo sapiens
atgtggttctgatgtcagaaactcaagagagcctagtttgggagtgcatgcacggagggtcgccaccgggaggagtcggcgatctgaattttaataaaaatccttccttgctcgctgagttc

SEQ ID NO: 422417 - DNA, 122 bp, Homo sapiens
cttatccgttctcttattggtcaggttagacgtccatttctgacgccacagcctatccggcgctgcgggaggcggagggcgggctggatgaaggactgggcgagcaccgagggcgtgaaccc

SEQ ID NO: 422418 - DNA, 122 bp, Homo sapiens
ccattctctcctcctccctctgtcccgagcctggatcgcagttccaagtccaaggctcggcgggaaagtcctcagcctaggacgccctggagccccccagcccagctgcagcgaaatgctgg

SEQ ID NO: 422419 - DNA, 122 bp, Homo sapiens
caatgacccgtggggcccgtccagttctctgatgaccgagattgccgacctgacctacaacgtggtggccttctcggagatcatgagcatggtgtggaagcggctgaatgaccatggcaaga

SEQ ID NO: 422420 - DNA, 122 bp, Homo sapiens
caggagcctcagagcgagcgggcgaacgtcgcgacgaccggctgagacctagaaagacaacgaccactctgctacgcctgcaaccgtttaatgccgccgcgtccgcaagcgcgcgctctcac

SEQ ID NO: 422421 - DNA, 122 bp, Homo sapiens
aagttggcggtttgattatgaagccccgcgtctgtttgtattgttgtgtgcctgcatgggcgtgtgtgcgagtgctgtgcgtgggacaaaggttccagggaggacagccagtcacggacaaa

SEQ ID NO: 422422 - DNA, 122 bp, Homo sapiens
cacatattctcaagcacgtcaggtctcaggcttcctagagggctgcctgaagagggcagccgacttgggctggagaaaatacattctgataagaggtactgagaacacactatcccctctgc

SEQ ID NO: 422423 - DNA, 122 bp, Homo sapiens
tttcatttgaaagcaagtgggaagacaaaagcaaacaggctttttggctatgagaaaatgcgtgaccttccaagtaaggaattcaaactggagctttcaacttcagagaggaatgaggttgg

SEQ ID NO: 422424 - DNA, 122 bp, Homo sapiens
gctgacttacagagccagtgtgcggatcagagttccttaggagcggctgctggcgcttgacgggcggaatccttgctgaagagaacgtcaaggcccgggcttcgccctgcatcgaacttact

SEQ ID NO: 422425 - DNA, 122 bp, Homo sapiens
gagcggacctggcggccgggcagcatggcggggctggagctcttgtcggaccagggctaccgggtggacgggcggcgcgccggggagctgcgcaagatccaggcgcggatgggcgtgttcgc

SEQ ID NO: 422426 - DNA, 122 bp, Homo sapiens
ggggttcaagactggggcgagctatgatggtgcccctgcactctagcctgggcgacagggcgagactgtctcaaaagaaaaaaagaccaggcgcggtggctcacacctgtaatcctagcact

SEQ ID NO: 422427 - DNA, 122 bp, Homo sapiens
agtctcgctctgttgcctaggctggagtgcagtggtatgatctcggctcactgcaacctccgcctcctgagttcaagcgagcatatctggctaatttttgtgtatttattatttgtctattt

SEQ ID NO: 422428 - DNA, 122 bp, Homo sapiens
aggttgcaactgaaagtaggggaggggacctggcctgagcctcatgcgttggctcccgggcggcaagcttgatgggcccccagggttgctgctgtcattgccacagcctgggggctgggaat

SEQ ID NO: 422429 - DNA, 122 bp, Homo sapiens
cctgggcctttgtacagtgcacgaactccacaactgtacagagcagccgcacggtgggtacgattcagcactgcacattccaaaaacagagacacagagtccacccggacagcagcaagctc

SEQ ID NO: 422430 - DNA, 122 bp, Homo sapiens
gcagatgatgacgcctgcatcacggactgcatggtcgggatggcggagtgaccacaggctcgggaagtgacttgggacggtcactgtggctgagttagcagttggctgcttgttgttttctt

SEQ ID NO: 422431 - DNA, 122 bp, Homo sapiens
ctttttggtcagctgtgctgcagggtcctctggatctttctgttgctgagtcatcctggccgttgtctgatgggagactgatggaatacagcagaccagcatcatgacaccaaaacagaaac

SEQ ID NO: 422432 - DNA, 122 bp, Homo sapiens
ggggggaaatggactgactaactcctgacactaccagggcttcagattactcaatttccacgcttcctctatcaggggagagagtcctaacaaagactaaaaataacttaaagaaaccaaaa

SEQ ID NO: 422433 - DNA, 122 bp, Homo sapiens
cccacacagcagctcaccccactttagccacagattaggagccgcagactagcccctcatcgaagatcccctttggtcacattctctagggcctctgggccacttctcctacttggcagtct

SEQ ID NO: 422434 - DNA, 122 bp, Homo sapiens
ggaggagtgcccgcccatgcatcgctggggagggtgactgcgggaggagcgcctgtgcatcgctgtggagggtgactgtgcaggaggacagagtgccacaagggagagcagcagagtggttt

SEQ ID NO: 422435 - DNA, 122 bp, Homo sapiens
tccacgacacctccagagacctgagggcctcaagctgcagctccggggcacatcccgctgcgctcccacgacggccccgcggatggcaaagtcagcggtattattttctttaattcctttgt

SEQ ID NO: 422436 - DNA, 122 bp, Homo sapiens
caaaagaaaagaaaatagccatagttccttgtccgtcttagctgcattcgtgtctcactgcggctttgccaattttcctttcttttctgcaggttgcataccctgtcctgagggcgcggcac

SEQ ID NO: 422437 - DNA, 122 bp, Homo sapiens
gtgtgtgtgtgtgtgtgtgtgtgtgtatacacagcttatgtaaatcgactctccacagaacgggtgtgtagaccaccaagatcaccaaagtgcaacttgccactgggtcaagtttcccatgg

SEQ ID NO: 422438 - DNA, 122 bp, Homo sapiens
tcagcatggtactgtgtggaacttgaccctgtacaagctggggagcaaacatgctgagagcgctaactccttgtgagccactgttctaggcgaggtacacacatgaactcacttaattctca

SEQ ID NO: 422439 - DNA, 122 bp, Homo sapiens
tactggaatatgagctcttaggagcaaggacattgtgatcttattcactgctatgtgctccggctcctagaatactgcccagcacaatcaataattgaggactgaatggaggtttaaggcac

SEQ ID NO: 422440 - DNA, 122 bp, Homo sapiens
ttggccagaggggcggggcgtaggctgggggcggggccggagagtgggcggggcctggcgcgtgggcggggctccgggcgggccggccgccgagggtggggccgaggaggaggaggaggagg

SEQ ID NO: 422441 - DNA, 122 bp, Homo sapiens
cctagatagaaattctggaacttgcagcattttgcaatcccaaactgcactgcccagaaccgggtttcccaacctgtagaggccgcatccgcgtctcctgggcgggcagtgccggtaatccc

SEQ ID NO: 422442 - DNA, 122 bp, Homo sapiens
atttttaaaaaggcacctgctgggtgagtcctcactgtgcaaacgggagccacaggtgcccgattttaaggggctacaactcgggaaaacctaagtctgtaaaactaagtacgttaaactaa

SEQ ID NO: 422443 - DNA, 122 bp, Homo sapiens
cctcagggagctgccaatcattgtttcacttcacccccaggacagccccgccttcaagttcgttcagctgcaggacacagaacccacctggtggtggatcctgaaagtaccgccctctggat

SEQ ID NO: 422444 - DNA, 122 bp, Homo sapiens
gacgtaaaatctggcctggattccctaatcccagggccctgcccctcggcttcagggccccgcccctcggcttcagggccccgcccctcggcgttgcgcaaactctgttgctacctaagtct

SEQ ID NO: 422445 - DNA, 122 bp, Homo sapiens
tgtctccttttggaggcaaaatttttctgagatgattttcgtactaggaatacacacaagcgagctaaatacatataccggtggatttttaaggggtattagtgctaagtctgattgtgact

SEQ ID NO: 422446 - DNA, 122 bp, Homo sapiens
tgggtctgtcctccgcttcctgggacaggctggggctagaaggaggagcagcgcgccgtccgccccctggctggtagagcgcacctggagaggtcaagctccgcgaataagacccttcctgg

SEQ ID NO: 422447 - DNA, 122 bp, Homo sapiens
gctttatactcccttctcttttagatcttaatgtcttccttgagaaatgcacagcatactcgtctgctctcaggatctacctcatgtgactcttcactctttggaagccccagaagacccat

SEQ ID NO: 422448 - DNA, 122 bp, Homo sapiens
agggaagatgagaggctggttgacgcccacccttcaccagttttgtaaataacaagctggcgccccagaacccatccacagcagctttttcagtggcattatgcattcgtggtgcaagcatc

SEQ ID NO: 422449 - DNA, 122 bp, Homo sapiens
gcgtgcgtggcggaggaggcggcgtatcagtgacagtggtcactgcgtgtgcgtgcgtggcggaggaggcggcgtatcagtgacagtggtgactgcgtgtgcgtgcgtggtggaggaggcgg

SEQ ID NO: 422450 - DNA, 122 bp, Homo sapiens
agggccctgaagcagctctctggtgcactgaaaaggcagcaccacgtggtggatcatccacggggcagccccagggcaaacgtggtgaagccaggggtttgcgggagggacagccttgccgg

SEQ ID NO: 422451 - DNA, 122 bp, Homo sapiens
gggcagggcagagtattgcggtaattatccttctctgctaatgaggattaggccgtggttcgctcgagccccgccccagtagaaatctaattccaactgcggcccgctaagaagtcggtctc

SEQ ID NO: 422452 - DNA, 122 bp, Homo sapiens
tgtttctttctggtcctcctgtgccgtgtgcatgcgggggactggggtgcatgtgccgcgcggctgcccccaccccgctcgctccctgcgcctccccgtagcctattaggaagcttgtcctg

SEQ ID NO: 422453 - DNA, 122 bp, Homo sapiens
aaaagcacacatgcccctgctcccgatcacagctcgggctcccgagccacagcatgtggccgggacacagctcaccgtggtgacccgcagatagtactggtcttcgccttgcgtgaggtttg

SEQ ID NO: 422454 - DNA, 122 bp, Homo sapiens
agcagttggctgagttgttgcaacttttttcgaaagctgggtttcccgggagatcccaggcggtgacagagtggagccatggctagaggtatttgcccaagtggccggcaccggagcggctg

SEQ ID NO: 422455 - DNA, 122 bp, Homo sapiens
gctgcccgccgccgcccaggtgggtgcgccccagacacgggtggccgcgaggggccgggccggggctctctgctcttagataagaccacctggctgaccccctggcactgccagaatgtcgg

SEQ ID NO: 422456 - DNA, 122 bp, Homo sapiens
gactcaggaaacatttaggagacagtttctatttggtggctgaaaccacagaaatgcctgcgacggctctctttgagaatggctgcctcctaggggtatgggtgtgccataagactatcttg

SEQ ID NO: 422457 - DNA, 122 bp, Homo sapiens
tgcagcagttaattttaaagtggcatttcagggattgggatagggaaaggcccacctttacgacctttgaaaggtgagtgtagacgccttagtgcatgggggtgaaaactgaagacaagggc

SEQ ID NO: 422458 - DNA, 122 bp, Homo sapiens
actccaagcactactcaccagtcacgcccacggtggacaccgggcccacgcgccgcccctcgtggaggccatacaggtgcatcttgtatttgcgcccaggctccaggccccccacggtgacc

SEQ ID NO: 422459 - DNA, 122 bp, Homo sapiens
ccttcacaccgttcactggttaagtgcttagtacgtttgctattgggcaaggtcctcaaacgggaggtggacgtcagaatagtcaggttatcgactgagtaactgttagtggtggataattt

SEQ ID NO: 422460 - DNA, 122 bp, Homo sapiens
agacgagcccagggctgcactggacttgtgggatccagagactacccagaagggccctgccgtcgagggaccctgatctctgcgcgcttcggcggcgcccgggtggcagccggtgtcccgcc

SEQ ID NO: 422461 - DNA, 122 bp, Homo sapiens
ggtgcaccgtcaggttgctgctgttggtaaaatgcttcccgcagaactcacagctgcccccgggcccgcggctcttgccccctgacttgggcatctttttgggtgatgccttctggctgttt

SEQ ID NO: 422462 - DNA, 122 bp, Homo sapiens
tagagaaaaattatagcaaaacgagcgcaaaaagttaaggcccggttactcctctgaggtcgctccggagggactttgcactgaaatggcagggaagctctcactgtcttggagcgatcttc

SEQ ID NO: 422463 - DNA, 122 bp, Homo sapiens
ctcaagtcaactctttaaatcataatttgcacctcagcctcttccttcttgtcacccttacgtaagtgggatcccacagaatttgtccttctgtgtctggctaatttcactcagcatggtgt

SEQ ID NO: 422464 - DNA, 122 bp, Homo sapiens
cctcaccctgcagggtgttccagccggggtcacatggcctaaggctacagaggaggggggcgcccttaatccctacgtgcccgcccaccccgctcccacgccggggccctgtctggggtctc

SEQ ID NO: 422465 - DNA, 122 bp, Homo sapiens
atgggctgctcgaagccaggactgggtaattctttccagacgtcttgacttctccttccccgccgttgttgcccttctgcctcctccaacttaagggggtcttaacaagtgagctggtgggt

SEQ ID NO: 422466 - DNA, 122 bp, Homo sapiens
actgataagtttgctcataaaaccagggccttatccagggccacgcttacagaactcccacggacacaccatgattaggaccctgctgctgtccactttggtggctggaggtaagtcctgtc

SEQ ID NO: 422467 - DNA, 122 bp, Homo sapiens
gacaagcagagtcgcacgctcctgcaccacgcagtcagcactggcagcaaggatgtggtccgctacctgctggaccacgctcccccagagatccttgatgcggtggaggaaaacggggagac

SEQ ID NO: 422468 - DNA, 122 bp, Homo sapiens
gttctgcttcagggaacccttggtagaatcgggagccgggacatttcccccagaattccccgcatttgaatcttcagttctgtaatcggccagagaccggattttgcttgatttggaagttt

SEQ ID NO: 422469 - DNA, 122 bp, Homo sapiens
agagtaagcgccttgaatttggccaccgctttggccggggagctcccgcggctctcgcagcgcagctagaacttgcgtgttccctcagcagtgagttcgcagttacgggtttgttgccagaa

SEQ ID NO: 422470 - DNA, 122 bp, Homo sapiens
cctgtctcagctagcctggggtgacatgtggaggaggcacacatggaaggcgtggacccacgcagagttccccagattggaacaaggacatggagagggtcttggtctgacttaccccacag

SEQ ID NO: 422471 - DNA, 122 bp, Homo sapiens
tgcggagccccagaatttcctgcccaccctcttccccctgccccggggaggagatcctggcgccccacccagttggctccgtgaatgcagctcagcccgccaccccgcagggtgtcaggcct

SEQ ID NO: 422472 - DNA, 122 bp, Homo sapiens
tctcctggttccagtggcggcactgaactcgcggcaatttgtcccgcctctttcgcttcacggcagccaatcgcttccgccagagaaagaaaggcgccgaaatgaaacccgcctccgttcgc

SEQ ID NO: 422473 - DNA, 122 bp, Homo sapiens
acagtgtgatggccagataaagtaaaaagagaaatgtaataaaggagccaggggtaaatgcgcaagagttgtggggtgatctgtactttcaatggggtgcctctcagaaaccagaaaatctc

SEQ ID NO: 422474 - DNA, 122 bp, Homo sapiens
agatgagcattggcttgttcatcctaaaaccaaagagcccaggcaggttatatcagcacgcgcctctctcagaactcaccacgggaaacagcacggtctgcctgccgcagtcagcacctatc

SEQ ID NO: 422475 - DNA, 122 bp, Homo sapiens
tgcctggaaggagctctgggccaggctgaagtcccgagagctgtcttgaggtccctaagccgggctggggtccccaggggcgtcccaggtggatgcaggtcggactggcgttccgaggggtc

SEQ ID NO: 422476 - DNA, 122 bp, Homo sapiens
ccagccgggaaaacagggtgcagatccggggagtcagacaccggggatgggcttggggggcgggtcctcggggcagagggctccgggggctggggcgtgcgtgcctggcccgggaggcgccc

SEQ ID NO: 422477 - DNA, 122 bp, Homo sapiens
tctgcccactagtgaagtgactgctagaccttagatagcacactaggctcttgacaatcacgtatctcattagaatcatacaacattgattccacctccagaaaatgttagggtcctcttgt

SEQ ID NO: 422478 - DNA, 122 bp, Homo sapiens
gtgaaaccccttctccactaaaaatacaaacattagctgggcgtggtgatgcatgctactcgggaggctgaggcaggagaatcacttgaacccgggaggtggaggttgcggtgagctgagat

SEQ ID NO: 422479 - DNA, 122 bp, Homo sapiens
ggaccaatcagcaggatgtgggtggggccagataagagaataaagcaggctgccagagcacgccttggcacctcggtgggggtcccgttccgcacagttctttaggtgtttgcaataaatcc

SEQ ID NO: 422480 - DNA, 122 bp, Homo sapiens
aaagtgcagggattacaggtgtgagccaccctgcctgatccaaactttttctttttgagacggagtctcgctgtgttgcccaggctggagtgcagtggcatgatcttggttcactgcagcct

SEQ ID NO: 422481 - DNA, 122 bp, Homo sapiens
gctcgctaccgcgcccaccctcgccacggccgcgcggtccatggacggggccctcatgcgcgtccaagcaggaaaaaaacaggcagctcgcgtagactgcgagtctcggaagcgcgggatcc

SEQ ID NO: 422482 - DNA, 122 bp, Homo sapiens
tacacacgcctgtttgggaaaccccatttcatgcttagggaaaggaatactgcctgcttccgctagaatcttcctgaacaagcgaggagacgctgtctctggggctgacaaaaaggggcaag

SEQ ID NO: 422483 - DNA, 122 bp, Homo sapiens
ggccgcgttccggttccggtaggttgcccgggagacgcgggtacacagagaagcggctcccgtcggaggccgagtcgtcgccacgatcgcccccttggtggactcgcaggccgagcggcttc

SEQ ID NO: 422484 - DNA, 122 bp, Homo sapiens
tggcacatcatgttggacagcagcttggaggctgccgacactgaaatacgttctccatttcgcagatagtacagcctgggtgaggacaaggtggagtgaggaaagagaggttagctctttcc

SEQ ID NO: 422485 - DNA, 122 bp, Homo sapiens
cgggggaaaatggactgaaacgatgtcctttcaggacagggccagtggttgcctacaggtcgccaagcagcctcgcgcctgaggctgcatgtctgggtccctcctgtgactgtcccacctta

SEQ ID NO: 422486 - DNA, 122 bp, Homo sapiens
aaaggtatagagttgtattgttttcataaaggcagtattatctgtagggcagaagtgatacgcaattgtaaatgaacgcgatagtctgacaaggctgggaaagacactaagatgatgttttg

SEQ ID NO: 422487 - DNA, 122 bp, Homo sapiens
ggagttattttgggagagggcagcccctggttcagcgtggcgaggctgcgcttgctctcccgggcgggcgtccacaccctcctcgccgagatggagaagcccaaacccctgcagcgctcccc

SEQ ID NO: 422488 - DNA, 122 bp, Homo sapiens
ctctccttacctgcccagaccctgcagctggtccatagtgacggtcaggttggtgacaggcgacagtcccccggcggctgaagcgccaaatagcgccttcacgacgggctgcgacgcgggag

SEQ ID NO: 422489 - DNA, 122 bp, Homo sapiens
atgagtcatcccacaggacaaataaaacctcactcatcaccctgtcttccctctctgtagcgagagaagcaaacactggggccctggaaaaacatcagcaacttcttgtagcatctgtaggt

SEQ ID NO: 422490 - DNA, 122 bp, Homo sapiens
ctaaggagcatcatcttagctaatacatgctatgtatgcaataaatagcatgttctctgacgttcagtagatataatcaatggtttgatggtttgatttggtacatgttctattctgctttt

SEQ ID NO: 422491 - DNA, 122 bp, Homo sapiens
cccgtaagcccatcgcgcaggtgaggctgaggcttctcggggctgcacctccccggacctcgtggtgagggagaaagctggctttctggcctcagtcaccccgcctcacctgcctggtcacc

SEQ ID NO: 422492 - DNA, 122 bp, Homo sapiens
agaaagtaaatcccacccccaagcgtgcagtctgcccacaggaagtgattcatggtgctccgattcgggcagacctgactgcaggaggcgggaggctgggaaccaggtctgggaaaagaggg

SEQ ID NO: 422493 - DNA, 122 bp, Homo sapiens
taatgttgtgttatgtccaagataacacgaaagaacctggtagcgcggcggggaagatttcggcgctagaggatttgcctgcataaccttacttcttaattattatttttaccataatatgc

SEQ ID NO: 422494 - DNA, 122 bp, Homo sapiens
aagaaggaaggcttcacctttgagtaccgctacctggaggaccgggacctccagtgacaccggcccctccctctacccacccccttcccccgcatgctgatccccctgcccaggtgagggcc

SEQ ID NO: 422495 - DNA, 122 bp, Homo sapiens
tggggcgtggcgaggcctttgtgtaactgtgaacagggcagaggtcccaggctgggagcgcgaaggccagaaaggtaaactcaatcggcattttaaagcgcttgctctagtgattgagcaca

SEQ ID NO: 422496 - DNA, 122 bp, Homo sapiens
gtgcagttgattataatacttcagatagagccaaagcaacagaaatccatagcctagggccgggtggtgtctcgcgcctgtaatcccaacactttgggaggccaaggcgggcggatcacttg

SEQ ID NO: 422497 - DNA, 122 bp, Homo sapiens
atctcacctgctacacccagcaagggagctgcacacagcaagttgtctctgtcaccctgacgatgggccaggctaatgtggaacagatcaggagtgaggtctccaagcctggaagagctgag

SEQ ID NO: 422498 - DNA, 122 bp, Homo sapiens
gagtggcacatgatgctggaaaagcagagccaactcatgtttgtaattgtcctagcaggccgtggtgtactttgttaggcagccacagaacaatagagaaactcagcttattccccttccct

SEQ ID NO: 422499 - DNA, 122 bp, Homo sapiens
gcttcctaagtagctgcaactacaggtgtgcaccaccacatgcagcttcagcctggctttcgcatgtgtgcgtacctctgttcacagttacttctcctgtctccttaaatcttgcttccttt

SEQ ID NO: 422500 - DNA, 122 bp, Homo sapiens
ggcggaagatgttccaggctacaatccgctcagtggaaaacctgcaaagcagcaagtccacgtgaggacgacggctttaccgcccccccacccctgtcctgaacaccctgaccctggaccct

SEQ ID NO: 422501 - DNA, 122 bp, Homo sapiens
tctctccccgtgcagtggtgtccctgggagagcacccggagctgcggaagagcctgctgccgcctctcatcatccacacggccgccacacccatgtcgctgcccaagagcaccagcacgggc

SEQ ID NO: 422502 - DNA, 122 bp, Homo sapiens
gatggacgcagcctgaactgacccacaaacagaccaaaaaagtcactctcaaagagctctcggtaggtttgtaaatacttaactgatggtaaaatgtcatgaacccctacccccgatggatc

SEQ ID NO: 422503 - DNA, 122 bp, Homo sapiens
gggggttcactgtcttagtgacttgtgggtgtgcgggtggttcactgtcttagtgacttgcgggtgtgcggggggttcactagtgacttgcgggtgtgcggggggttcactgtcttagtgac

SEQ ID NO: 422504 - DNA, 122 bp, Homo sapiens
cgtagcgccgcttgtaggaggtcgagtagtacggctcgtagctgaaggaactcatggtggcggccggtggctccccggcccgcggcggcggtgggagcccggagagagaggacaggggagag

SEQ ID NO: 422505 - DNA, 122 bp, Homo sapiens
tactcctgacctcaggcttttccttatatgggtgtaccaggtaaaggcaggctccaccttcgttaaacagtgacttcagcattgggcagtggcctgccacctcttggagagagagaggacat

SEQ ID NO: 422506 - DNA, 122 bp, Homo sapiens
ggatcctgcccaaggtctgctctgcccggaagtgaaggagaagcccgttctcttccccctcgggctggggaagagctcacagcccaggtcacgccacagaaatcccctcctcatctggccct

SEQ ID NO: 422507 - DNA, 122 bp, Homo sapiens
ctacctggaaggcgggccagcgattggtaccagttcagacatgggtacacgttgacaggccgccggccgtcgactggcatgttgtgaccattcctggtgctggtcttggtactgttctttcc

SEQ ID NO: 422508 - DNA, 122 bp, Homo sapiens
cttacatttcatgaagtacttctttgataaaatctgttatgggctgaatgtttgtgttcccgtaacaattcctatgttgaaacacgaatcccaaggtgatggtatttgaaggtagggccttt

SEQ ID NO: 422509 - DNA, 122 bp, Homo sapiens
gttactcatggaatctgctcttcacaaatccattgtattatgacataaaatatggctagacgccaaggtttaaccatacataaaaatactaattctcggctgggtgcactggcttatgcctg

SEQ ID NO: 422510 - DNA, 122 bp, Homo sapiens
gtagcggtcagcttggctccggcaggcgaatcaggggatttctgggaaatgtagtccagacgctcagtggagtctcggtcaatttgactccggcaggtggatcccagggaattctgggaagt

SEQ ID NO: 422511 - DNA, 122 bp, Homo sapiens
gccccgctttccctcgcgttgcctgcccagccgggctgatgaccgacctcggcggctaaacgccttctccagctgaaacagagtccagagttccactgtttaacaaggaggaattggcaaag

SEQ ID NO: 422512 - DNA, 122 bp, Homo sapiens
ccctgggaatctccctctctgtttcctcctccgaaaagagaaccatgctcgccccgaccccgtaggaatagcagtgacttcctaccagccctctccagaaccaagagtgattctctggattt

SEQ ID NO: 422513 - DNA, 122 bp, Homo sapiens
cgtgatccgcccgcctcggcctcccaaagtgctgggattacaggcgtgagccaccgcgcccggccgcacttcattctcaagttttgtggccaacgatggataggaggtggattgtgatgtat

SEQ ID NO: 422514 - DNA, 122 bp, Homo sapiens
tcctcctggtcgaccctccgcgaatcctggcctccggataccatcctgtcgaccccgtggcgaggactggccttagcccggagttcgacgtgctgccacagaaggctcctccttcgcgaagc

SEQ ID NO: 422515 - DNA, 122 bp, Homo sapiens
aagagctttcagagctctaggggggccgggagttgctccttccatattcccagaagtcaacgccctggaggggaagcgcagggtgcgggtggcctggggagcgacatccgggtgggcctggg

SEQ ID NO: 422516 - DNA, 122 bp, Homo sapiens
atcccattgagaacatcctcctggtgctggggtgggggtatatgtgggatggtgtaattgcgcagcgtaccttgtaattaattccgtagctttcactgacgtccgaaaggattagagagaaa

SEQ ID NO: 422517 - DNA, 122 bp, Homo sapiens
tgccaatggaaaccgctggaaggtgcttcggcgattctctgtgaccactatgagggacttcgggatgggaaagcggagtgtggaggagcggattcaggaggaggctcagtgtctgatagagg

SEQ ID NO: 422518 - DNA, 122 bp, Homo sapiens
gcggcggcgacgcttggtgatgatggtgatggtgcgggtgagcgtgcgggcccagctcgtcgtgggccacgccggcgcccgggtacgcgtggtgcgggtgagggtggtggtgatggtggtgg

SEQ ID NO: 422519 - DNA, 122 bp, Homo sapiens
aagctctctccatggccttggtcctgtggattggactggaaggggttctaggcaggcaggcggttttgaaggctgccacagattcaagccctcccatagcaaaggagagattgctcctcctt

SEQ ID NO: 422520 - DNA, 122 bp, Homo sapiens
ggtgggttcctggagcggatgggccccgtgaggccgccctggagggtcgggagatgctttcgctgtgctgcgactaacgagaggctggaccctctggatgaggtcctcgtggtcagtccctg

SEQ ID NO: 422521 - DNA, 122 bp, Homo sapiens
ggcgggtggcttgcggtcgaagagctcgtcgcggctgttcaggtagatggcctgctgcgacgcggtcagcgtgctggcctgcgcgtgctccttctcctccgacgtggcgctgaagctggagt

SEQ ID NO: 422522 - DNA, 122 bp, Homo sapiens
caaaatgggacaataccttgcttcacaagcttgcaaggatcaaaagaactggtagtgggccgggcgcggtggttcacgcccgtaatcccagcactttgggaggtcgaggcaggtggatcact

SEQ ID NO: 422523 - DNA, 122 bp, Homo sapiens
ggcggcgccgggggccccggggtctcgacccgaataaggcggtgtgggggagagccgtggcgcgggggcggcgtgggtccgggggcgacaggggtggcgagggcggcggagccggacgaccc

SEQ ID NO: 422524 - DNA, 122 bp, Homo sapiens
aggtgttctccacagccggttatgaagtgagtaacctgagttcataaatgagcagttgggcgggctcctcttccaggctcttaaatggggagcagggcgtggtgctccgggataagagaaaa

SEQ ID NO: 422525 - DNA, 122 bp, Homo sapiens
catcagcacatcagccagaggctccttggagaacagaaggggctcagaaccctgcagcggcgtccactgcacacacaggaagaactcaagtgctcataggcagtgagtcatttccttaggca

SEQ ID NO: 422526 - DNA, 122 bp, Homo sapiens
acttgaaacagtgaggcaagtgggtgtgtggtgctgggctccccgctcaagttctcccagcgtgccagttcccggagccttatgtgcagggtgttggggaagggcgggctgaatcgtgggtg

SEQ ID NO: 422527 - DNA, 122 bp, Homo sapiens
tggaaattcagcagtgaccaaggctaccttatgcctgcttcatgaacgagttcaggagagcgaccagtaaatgagaaaacgctagactgtaaagacctgctggcctgtgaaccgggtgttct

SEQ ID NO: 422528 - DNA, 122 bp, Homo sapiens
aggtcacagatgggaactactgatttgcttctctccctctctcaacagtattttaataagcggaaaacctactttgctcacgatgcccttcagcagtgcacagttggggatattgtgcttct

SEQ ID NO: 422529 - DNA, 122 bp, Homo sapiens
tttccttgtttgtatttacccctttgaggaggaatcgctgtgtcttgagtgaaaggggtacgctgcttgcttgcattaaactgtgagggtccaggcgcattacggctgatttcagtaggtag

SEQ ID NO: 422530 - DNA, 122 bp, Homo sapiens
gcctggagctggaggctagaacaccccgggggggtggggcgtggagggcggcctgagtgccgcgcctggcccctgccctgggtgcgcaccaggccgcgaaagccgggggccgccttctcggc

SEQ ID NO: 422531 - DNA, 122 bp, Homo sapiens
tcagcaactccacctagagtttacagacagagctctcatttccctggtacagagcacctgcggagaggggcagctgcggtctcaggttcagccaacttaatctttcctgcctgctggctctg

SEQ ID NO: 422532 - DNA, 122 bp, Homo sapiens
gatgcttcacgcagtaagcgagtaagcgagccctggagaccggggccctgggtgtgcggtcggctcagtgccacgcggtgagataggcatggttatcaacccacgccaaggcggttgtgtac

SEQ ID NO: 422533 - DNA, 122 bp, Homo sapiens
gagtgcgcggcggcagcggtggccgccccttggggcttggggtgtgtttatttgcataagcgggcgcgcgccgtccgggctgggtggatccggcgggatttgactgctccgctgtccagagg

SEQ ID NO: 422534 - DNA, 122 bp, Homo sapiens
cctatgagtttgttcagaggcttctgaaaggttacatgaaggtaggtggccagtatcgcacggtgatgagtgtccattagaaacgcacctgcacagatcactttgtttactttctccacaga

SEQ ID NO: 422535 - DNA, 122 bp, Homo sapiens
atggacgacgggagccttctgaccggtcgtggcaatcccccctaggagccaggttgagcacgttttcaacctgagtttctggctctatactgggccgcggcctaatgactctaggagtcaga

SEQ ID NO: 422536 - DNA, 122 bp, Homo sapiens
cttgattgtctccacactgtacttccattattcacccgagtgctcggtggttacggcggacgtgcactgcggcaaaaatgtcctcggagccgctaattttgtggccactgcggcggctgcgg

SEQ ID NO: 422537 - DNA, 122 bp, Homo sapiens
tgacgcagggaaagtcactgcttattagtttgtgccaacagcgggggtggcagagagcagcgaggcagataatctgaggtagtggggaatgtaagaatcatctctatttggctgtggaaggt

SEQ ID NO: 422538 - DNA, 122 bp, Homo sapiens
tggcagaggtgggggtcgcagcaaaagcactggggtggagggcggccagtgtggggcagacgcctgtgtgccttcctcagatacgggcagagttgtggatgtgagaagggtctggcttgggt

SEQ ID NO: 422539 - DNA, 122 bp, Homo sapiens
gacccatccctgctttcctggcccccagagtaggtccccagtatcgggaattgctccctccgggcagccgcagaccccctgccgccctccagcgtgcccctagcccaaaaccacggcggatg

SEQ ID NO: 422540 - DNA, 122 bp, Homo sapiens
gcgtggggagttcggaagggcagagaagcccgttaatgcattgcttctttccctcttaggcgcctgggggcccggggcccaggccaaagccgcctgccccagcccccgactgcatcaaccag

SEQ ID NO: 422541 - DNA, 122 bp, Homo sapiens
cagagggctgggagggcccgggcctcgaggaaaggcataggtaggagctgtcaggccagacgcccgggcagctccacgctcgcctccgaggccatttcctttcctctctccccgacctcgag

SEQ ID NO: 422542 - DNA, 122 bp, Homo sapiens
agcacaaaatgactgaaaagccaagaaagatgggtaggggttcattctgcctgattctcccgtgcatatggaataaagcctccctgagctccatgccccttagataagggaaggctggtcct

SEQ ID NO: 422543 - DNA, 122 bp, Homo sapiens
ggtggcatcctcaccacccccagggcagatgaagtctcagcacacccaggctttgcgacccggtctgtgaacctggacacagacaccccgcacagtgcttttagaattcagatttggtccgg

SEQ ID NO: 422544 - DNA, 122 bp, Homo sapiens
caggccgcgaggtgctttccagccgcgagctgtcaggccgagtgtcaggccgggcaggtacgcggcgcgcgcccccggcgccccccgctccccgccgggacgccccgcgccgagccggaggc

SEQ ID NO: 422545 - DNA, 122 bp, Homo sapiens
cctcttctccatagcgacgtcatggcaaattcccaaactggacggatccggctcgggttacgtccagcagggccgagccggcccaggccggccccggggtcctcggtgccggctggaggggc

SEQ ID NO: 422546 - DNA, 122 bp, Homo sapiens
ataaccagcgaaaagcatgaaacacccgggcggcctcggggccttatatagggtagggcgcgctgtgattggtgcatcacctaggcaccgcccccgccccttggaggaggagtatttgtgtt

SEQ ID NO: 422547 - DNA, 122 bp, Homo sapiens
gaggcctgggtgcgccggcatgctttcttggcctgtgagaagacccggactgctgattcccgctctcggccctgcaggcccggaactgcagcacaaagccccttcccgctccggcggacacc

SEQ ID NO: 422548 - DNA, 122 bp, Homo sapiens
caccaggcctcactaactagattcccgctgccaggcccacaatgtccaggactccactgacgaggaccttactgacaaggcctcactgacgaggtccttactgacaaggcctcactgatcag

SEQ ID NO: 422549 - DNA, 122 bp, Homo sapiens
ccattcctttgctcctgggtgcccagagggggctagagatggcacattccaggggaattgcggctaagtggctgatcacctcccactggggcagaaaccaggaggcagaggccagggaggtg

SEQ ID NO: 422550 - DNA, 122 bp, Homo sapiens
agagaaacatttaagtcagtggactgggagaggcagatccacccttaatctgggtggacacgatctaatcagctgccagtgtagctagaataaagcaggcaaacgtggaaggacttgacctg

SEQ ID NO: 422551 - DNA, 122 bp, Homo sapiens
agatggccgccttctggcgtctccggcgctgttgaatggcgaaagctttattgttcccttcgggcaggagtgttcgtgtcctctatggcgctgtcaataaagaacggcagtttgaatcggtg

SEQ ID NO: 422552 - DNA, 122 bp, Homo sapiens
aaccagggatgccaggatccccgaggtcccatgctgggtctgtgggaaggcactttcgtccgtggggggacccaggccccccttctctgacgtgccattttgtttctttcaaaggtgactct

SEQ ID NO: 422553 - DNA, 122 bp, Homo sapiens
cactttgacatacagtatctcatttcattcaacagactttcaagtaggcattattttacacgaaaaaatcaaggagcaaagaggttaagtaagctgtccaagttcatataattagtggtggg

SEQ ID NO: 422554 - DNA, 122 bp, Homo sapiens
tttttttttgagacagagttttgctcttgttgcacaagttggagtgcaatggcgcgatctcggctcacggcaacctccgcctcccaggttcaagcgattctcctgcctcagcctcctgagta

SEQ ID NO: 422555 - DNA, 122 bp, Homo sapiens
attataagactgagagaatggattctttgtggcaataagatagcaaattataaacaagaccgagggctataacaggcaaaagttaagtcatgcatcccttacacttaaagaataaactatgt

SEQ ID NO: 422556 - DNA, 122 bp, Homo sapiens
gggctgaggctctgtcccttattggctgggtcagggggcgtggcgcggcttgaccaatcgcgggcggcgcgcttaggcacgtgtgtggacaggcctgagaatcagagaaaccttctctgggg

SEQ ID NO: 422557 - DNA, 122 bp, Homo sapiens
cagagtgccccctaaagaagtcgggggacgggctcgtggcctgagagccggagctccttccgcccggcaggcccttcttgtacccgatgccagaaccagtcccaacactgcacctgttcttt

SEQ ID NO: 422558 - DNA, 122 bp, Homo sapiens
gcacagagagcaccatctggagctgctgggccttgcgtccgccgaggccagggcccctcccggccatattcaagcccccgtgtccctcaggcccacaagaacacagcctgcagcagggaggg

SEQ ID NO: 422559 - DNA, 122 bp, Homo sapiens
tgggagggtgacgagcgtggcttcctgggcattgccttccaccccagcttccagcacaaccgcaggctctacgtctactactcagtgggtatccgcagcagtgagtggatccgcatcagcga

SEQ ID NO: 422560 - DNA, 122 bp, Homo sapiens
tcatccgctgccctccacccactccccctgcccccaggctccacacccacccggtctgtgcggcctgcccgtccgcgggtgccacgtgttcagcctgccagccccgcccaaacgcacccctc

SEQ ID NO: 422561 - DNA, 122 bp, Homo sapiens
aaaatacttttgttgggcaaagtcaagtcactcgacttcactagttaagaatctaggtcacgttagcactctgggacattcaaaaaacctgaacacagacaggcaagatcttttctcattct

SEQ ID NO: 422562 - DNA, 122 bp, Homo sapiens
ccttcaattttactattaagaagcttcttatgggtcccccttctgaaactgcccttgacacgttccacagcatccttccaaaaaactactatttctaaataaatttaaaaaaatccatgaac

SEQ ID NO: 422563 - DNA, 122 bp, Homo sapiens
ggcggctgccccggtgctcgttcttggcctccacgctgaaggcgggcagggtgtcgtcctcgctgcacagctccaccatcgtgtacgaacaggtgcccatcatgtcgtagcgacggccgtcg

SEQ ID NO: 422564 - DNA, 122 bp, Homo sapiens
caggggtcagattacaaggctgggagacaggggccttcagagccacggtaattgtccccacgttccgggcccctgcgatgcccacagacttcttaatgtctctctttgtaacaccccagggc

SEQ ID NO: 422565 - DNA, 122 bp, Homo sapiens
ctggacaggacggagaaccagatcagcagcctggaggccatggtaggcggccgggtgcttcgccctggagtgcaggtgcagctggaggcagctccgcccggctgcgtggacatcagaaattt

SEQ ID NO: 422566 - DNA, 122 bp, Homo sapiens
cggcccgcccgcgtctacaccgcacacccgtggcgcgccctccaggggcggtttttctcccggggtcctaagtctcactctacctgcttcacgcttagtggtcctgtagaaatacagacgcg

SEQ ID NO: 422567 - DNA, 122 bp, Homo sapiens
tgcgcgctcccgtcttacgggatggatttcgctctcaggtcccagtctcgtgcggcggggcggggaccgcagccggctgggcggggaagccctgagccggggaagtcacgtggggcgtgtcc

SEQ ID NO: 422568 - DNA, 122 bp, Homo sapiens
ccttcccgtggcggcaacctagttcgtatcttattcctacaaggtagcgtcgcttcgagtcgcatggacattggggtttagataatttaccccccacccaagcgatttaatggcttttaagc

SEQ ID NO: 422569 - DNA, 122 bp, Homo sapiens
tttccccacggcgtttcgtgcaacgccgcagcccgaccttcgactgcagggtgcgcccgccgttccaggcgccagctccggtcctgcctgccttcgcaggatgcaggatgcgtaacttcgag

SEQ ID NO: 422570 - DNA, 122 bp, Homo sapiens
gttactgggagcttgttttcctatctgtaagatagaggcaataaaacctagcttatcatgcgagactattgaatgcaaggagagaatattaaaattcatcccagtaagtccactgtagtcct

SEQ ID NO: 422571 - DNA, 122 bp, Homo sapiens
tgggagcgaggagtccccacccctggctgctttcagctgttgcccgcccgccgctctcggcggagacttggagatttccactgggatacctcggcagctgccgccattcgggaggggagggg

SEQ ID NO: 422572 - DNA, 122 bp, Homo sapiens
ccgcgagctcctcggcccggtcattgtggtagacgttttcgctggaaagttgggcggggacgttccggccgcaaacctgtaaggactgaaagttttcatcaagttgtgaaaactcctggcgg

SEQ ID NO: 422573 - DNA, 122 bp, Homo sapiens
ccgctaggggcggggattccggggagccgtcttcaccggttattccgggatccagctgggcgctggggctggcccgggcttcgctggggaccgggcggcgcggggcgggcgcggagacgcac

SEQ ID NO: 422574 - DNA, 122 bp, Homo sapiens
ctttcaaacactgcagcaagttgcagcaaggcgggcaaataccgacagcgcgcgtgggggcgggcggcgggcgccgcggggcccaccccctccccggtctccccgcgccctcgccgcctccc

SEQ ID NO: 422575 - DNA, 122 bp, Homo sapiens
cgccacctcccccacttctgaaaaccacaaaagcagaagcagccattattggatccttgacgtggagttttctgctctgagcctatttggagctgtcggttaacaatttgaaacaacatgtg

SEQ ID NO: 422576 - DNA, 122 bp, Homo sapiens
ctccacacgtcctttctgaggcacattcatcaaagggatgaataaggtcccgagcagcaccgaatatgcatttgatgtttgtcttcctgaaagattacctgtaaatgacccatgtaaaatgt

SEQ ID NO: 422577 - DNA, 122 bp, Homo sapiens
tccctgctcaggggccaccaaatatgtccatggtctctgctgcctggtcaacggccaccccgggctgccgtctcctggccagacctggagctcacaagctaattttagaaatgactggtcga

SEQ ID NO: 422578 - DNA, 122 bp, Homo sapiens
cttaagagaagcaacgcagagccagctttgccactggagaggtcattgagagcccccgtccgcagtctcgctccagcgcgcagcggacaccgggcctgccttcggccagagccgtagaatct

SEQ ID NO: 422579 - DNA, 122 bp, Homo sapiens
ccataatcgccttcttttagggccatccctccctcactttttccctccaaaaactggaggcgttgggataaggacggcgacgcttcgctggcgaatgaggtgcctcaatttgcccgaggcga

SEQ ID NO: 422580 - DNA, 122 bp, Homo sapiens
ctcaggggccaggcgcgcacgcgaggacagaagggaacctccttacccgcgtcctgtcctcgatctcgtagatccgcagctgcatgggcacgttaaagctgtgcaggatgtttccgccgaac

SEQ ID NO: 422581 - DNA, 122 bp, Homo sapiens
ctggcccttccctccctctatgtgcacaattgaatataccatgtccacaactgaatacaccgcgtacacaaaaatccagatttttaaggtaaagaaaccagaggccaggtgcagtggctcac

SEQ ID NO: 422582 - DNA, 122 bp, Homo sapiens
ccgcagtcccagcactccgtggcgatggcgggcagggttggggtggggggcccagccggccggtggcaggcaggagtgaggtgggcagggcgccggttccctgccgcacagcagcatgcagc

SEQ ID NO: 422583 - DNA, 122 bp, Homo sapiens
tgggggccgcgggacgctcgggaggagcccagacggcgtcgagtgtggtgggcgtgtacacgtgagttattaaacaccgactgtatgcagtgaggaggatgccaccaggcactcacagcacc

SEQ ID NO: 422584 - DNA, 122 bp, Homo sapiens
ttgcttctgatcccccacacctactcccataggtcacaactgctcagtttctggggctgtcgtctctttgtgcacactcagtggaaaatagcagacatacaagctgctggcagaaggtctaa

SEQ ID NO: 422585 - DNA, 122 bp, Homo sapiens
tatcacctctggcaaggtttgcagatgggttgtgggctccagggttcgagccaccggcaacgtcttgggctccccttactgcttcggcatcagcagcattagcaacaggttgaaaccagcgg

SEQ ID NO: 422586 - DNA, 122 bp, Homo sapiens
gggggccgcgagcgccagcggggactggctgggagcagggcaacaatgggcggagttttccgctcctccccgcccttggcttgagcgctccagctcgctagtggcccgggcgaactggagtt

SEQ ID NO: 422587 - DNA, 122 bp, Homo sapiens
gactttgcccgcttcatcaccagccgtgtggccgtggagggcaatgtccgcaggatggagcgtctgcgggtggagacggacgtgtagccctggcgaggccagccggcggcagcacagcctgt

SEQ ID NO: 422588 - DNA, 122 bp, Homo sapiens
ggcgggtactaaaagacaagcaaatattaaagatactcgcttccaaaacaaataaggccacgtggagctgtgcactggaatgggattctggatgcaattttatttgattgggtacaagaacc

SEQ ID NO: 422589 - DNA, 122 bp, Homo sapiens
ccccagcaggcttcctaggcttggctgcgccagcctttttggccttgggtttgccttccccggaagccgctttcttgttgagtttgaaggagccagaagcaccggtacctttggtctgcacc

SEQ ID NO: 422590 - DNA, 122 bp, Homo sapiens
tctcgtgtgtaccggcaaacggaaaagttctctcttgcccgcatctctggagctctcagtcgaatcccatcttttctttacctgggtaaagatccctgatgctccaccccgggaatttatag

SEQ ID NO: 422591 - DNA, 122 bp, Homo sapiens
ataaaaatggcagcttcacaaggcttgaccgaatgacaagagggaacttctgtggcttgccgccgagagtcctggagaaagtaggtttggctggcggccacgccgacccgcaggagtcctgc

SEQ ID NO: 422592 - DNA, 122 bp, Homo sapiens
gtttcctgaacagcaattggtggacggcaacaaagccttagcaaccggctcctagtgacccgcggggcgcctggtaactggggctgctgcggagaaaggagcggggctgtccctttaaggga

SEQ ID NO: 422593 - DNA, 122 bp, Homo sapiens
gcctaaggaaagggccctgtgttccactcagcacattctgcacagggccaggtgcagagccgtgcacacagcagccctcagtgcctccgttgactggctccttgggccaggggctcagagcc

SEQ ID NO: 422594 - DNA, 122 bp, Homo sapiens
ggatttacggggtggggtcgggggacaccctctcaccttgctgctcccactggagagtcccgcagaagttggggcctgcagagagccccagaacgggggcagggacgttgggtctcggtcag

SEQ ID NO: 422595 - DNA, 122 bp, Homo sapiens
tattgcatatgtaagatatacagtgatgacaatcatgtaaataatttctaccgggccaggcgcggtggctcacgcctgtaatcctagcactttgggaggctgaggcgggtggattacctgag

SEQ ID NO: 422596 - DNA, 122 bp, Homo sapiens
attctcagcagtgaatgatggaggcagagctcagagaagcacgtctgaacacgtaaggaccgagaggcgagtcttcagtgaaacacccacagagagccgtttgccccttgagattcctgagg

SEQ ID NO: 422597 - DNA, 122 bp, Homo sapiens
ccagtatatttactgactacagtgctttgagttaagttctttcataaataattgaatagccggagaaattttgcagtatcgcagtcatgttttgaaaatattgttcttggttcttgtctcta

SEQ ID NO: 422598 - DNA, 122 bp, Homo sapiens
ggctaggctctgggccgggcggggttgggggcgggggcggcggctaccagagccaagcggcggcgccgccggggaacatggcggaccctctttccctacagaggggctaagaccggcatgca

SEQ ID NO: 422599 - DNA, 122 bp, Homo sapiens
cgcacgtccccagccgcgaccacagatccagcgcctcagtcccaaacccaccgctgcctccgccgggctcctttagcactgctgctcggggctgccccacccacccctaccctcattgggcc

SEQ ID NO: 422600 - DNA, 122 bp, Homo sapiens
taataggattagggaggtgtttattttatggcatcttctctcatggagttcttagcacttcggacaatttgtcttttccccactttgtacagctgttatgtgtcattcaccagccggctgta

SEQ ID NO: 422601 - DNA, 122 bp, Homo sapiens
cgggatgggagccacctgagcaggttgcaaactcctggccaaagattggtggggccggcgcgctgtcagtcgcctcctgtctcatattggaatactcgagctcagtgccatggtgtgaggcc

SEQ ID NO: 422602 - DNA, 122 bp, Homo sapiens
ggtgccaccgcgaggcctgcagctccgtggcctgccctggaagcggcctaggcttcctggcgttcctgcgggccgcggatggcggtggattgagtgagaggccccagccaggagggcgctgt

SEQ ID NO: 422603 - DNA, 122 bp, Homo sapiens
agggccttcaggcatcgatggccccctggtccttggggctgggcctgccttggctgaccacggggcccctgcagggtatataccaggtgcagctgcgggcccttgagcacgtggatgggacg

SEQ ID NO: 422604 - DNA, 122 bp, Homo sapiens
gcccagcggggaagctagaactaaatgaccgctctgccgactggagccaacgagaatcggcgtaggcgcaatacgggcggaggatggggacccgcccccggggtgggcggggcgtcaggtac

SEQ ID NO: 422605 - DNA, 122 bp, Homo sapiens
gtcctctccaatggatgtgaggtttttattgctctctttcactgggtctgcctttctctgcgtgtgctggagtgaaaattaatcagcccctctggtcgtgagcagattgcatgtttgtgctg

SEQ ID NO: 422606 - DNA, 122 bp, Homo sapiens
ttgttctccatcacaccctgcaacagctgcagagaaggcaagaggggaggagagggaggacgaaggccgggagagagacagagaatcaactgtaggtggaaacagaagcaaatggatagaac

SEQ ID NO: 422607 - DNA, 122 bp, Homo sapiens
ggatccccaggcggatccccagaggcaacagagtcaaatatgcgggaaagaatctgattccggccagcagagggcaggagcgagaggaaactgggcatctcagcaacaaagcaggctgtgcc

SEQ ID NO: 422608 - DNA, 122 bp, Homo sapiens
ggcagggcgggggggctcacttacttggatgggcgccgtgctgaaatggatcttccggctcggggctgggtcctcctcctccgacagccccgggatctccacgcaccccgactcgggctcgt

SEQ ID NO: 422609 - DNA, 122 bp, Homo sapiens
caaggtcaaatagctcctagggtgatgaagacagcattcaagtctccaacagtggcaatccgactggaaagactgaactttcactgtcaccacagggcctctcacaagcagcagttgcaact

SEQ ID NO: 422610 - DNA, 122 bp, Homo sapiens
tatactggttcggagagttccccttctgcccatgactaggaagctggagagagtgctgcccgaacctaacaatacgaaaaggcctgtctcatcagacagctgaagcgtcagggccatggagt

SEQ ID NO: 422611 - DNA, 122 bp, Homo sapiens
ggactggcgcttgggggcggggccacggcggtgagcgcagcccgggactggagtttggggcggggcctcgtcggtgggcgacaccggggactagagctaagggtggggcctcgcggtgagtg

SEQ ID NO: 422612 - DNA, 122 bp, Homo sapiens
ttctctgattttgatttttaatttctgggcagatcactttcccacagttggcaacacacgcgcgcacgcacacacagacacgcgcgtgcgcgcgcacacacacatatgcacacatacataaa

SEQ ID NO: 422613 - DNA, 122 bp, Homo sapiens
aaaatcttgaaacacatcactatatggaacacgactatactttcaaaagatgaccaatctcgtgaccatctaagaaggcacattctctagaggggaaaagatatactttaaaattgcttcta

SEQ ID NO: 422614 - DNA, 122 bp, Homo sapiens
cctacaggatgagggagtggtgggtccaggtggggctgctggccgtgcccctgcttgctgcgtacctgcacatcccaccccctcagctctcccctgcccttcactcatggaagtcttcaggc

SEQ ID NO: 422615 - DNA, 122 bp, Homo sapiens
aggaaatccatctcccagcttcgggggaggggacaggaaagcagtagccccggcaggacccgtcagagcagccagcagcacagcggccatgtggcagggcacctgcaaggcttccggagcca

SEQ ID NO: 422616 - DNA, 122 bp, Homo sapiens
gagcgggccgtgcaggcctacagagcgttgaagcagcggcagcagcagctgcacggggagcgaccccacctcacttcccggaagaagccagagccgcagctgtgatggagagacacccgggg

SEQ ID NO: 422617 - DNA, 122 bp, Homo sapiens
tcactatcacaagaacagcacggggaagaccggcccccatgattcaattacctcccctgccgggtcccttcccacaacacgtgggaagtctgggaggtacaactcaagttgagatttgggtg

SEQ ID NO: 422618 - DNA, 122 bp, Homo sapiens
tggagcaggtgaacttgccggtggtggggtcgtagtggtttccgaggttggtgaccacgtcgtcgaacttgagcacctcgtagccttcatgctgccgcttgaggccggcgtagaaggcgatc

SEQ ID NO: 422619 - DNA, 122 bp, Homo sapiens
ttctacggtaactgaggttcccgtgttctttttcaccatggtctctccgttttaatgtttcgggtttttttacccaggcccctgttttatgagccctgggtacgtccttcctgtgtcccgtt

SEQ ID NO: 422620 - DNA, 122 bp, Homo sapiens
gaccaccagggacgaaaacgtgttaaaatccaggacaaacattctgcagcatctcggggccgggccacgtgtctgtcccgcactgcagccttgcggggtgggaacgtctgttctgccccaaa

SEQ ID NO: 422621 - DNA, 122 bp, Homo sapiens
cgctctcctggcgcagctctcctgccctacggggcggggcggggcggctccaggtactcacgggctcccagcacccgggcccgaccctccctgctaggccgtggcttggatttttcttgaca

SEQ ID NO: 422622 - DNA, 122 bp, Homo sapiens
ggcggccgcgtcctcgcgcgcggggatcgcacccccgctggcgctcggcgcctactcgcccggccagagctccctctacagctccccctgcagccagacctccagcgcgggcagctcgggcg

SEQ ID NO: 422623 - DNA, 122 bp, Homo sapiens
ggtgctttgttctttgagatctttctctccaaccctgacttggtggcttccacggtgactcgtcctggtttccctttccagtgtcatttccctttgagggcacaggccctcaaaccactttc

SEQ ID NO: 422624 - DNA, 122 bp, Homo sapiens
acagaggctggccgagaaaccaccagcaactaagctgcattcagctggagttcctcggaacgggaggactcgcagctctccctttccccagccaggatgagggaattagacaatggaagtcg

SEQ ID NO: 422625 - DNA, 122 bp, Homo sapiens
agcgggccgcggacgcaggacagcaggacacgcagggcggccatggctctctggactcctcgcccggccccgcggagccgccccctcgcctatagcctttcagggctcgctccgcccacagg

SEQ ID NO: 422626 - DNA, 122 bp, Homo sapiens
gcctctgatgctgcgaaagccacatcaaagcacacaggacaactcgagtcgaatacaaaacgtgtgtcacagaaagacacagacataaaaatcgagccgacacagcacaccacatgctctag

SEQ ID NO: 422627 - DNA, 122 bp, Homo sapiens
ggtgagggtgatgctgcaccctccaccgtgtgccagacaagggtctgcagacagagggaacgtgcatggggaacccacgtgtggcgccttcctcttcccccagaggtgggagcttctccacg

SEQ ID NO: 422628 - DNA, 122 bp, Homo sapiens
atctgctggccggctctcagtccccgtggcgccccctttcctcttgtcccagagcgctctcgactccaccatgccaaggggattcctggtgaagcgaactaaacggacaggcggcttgtacc

SEQ ID NO: 422629 - DNA, 122 bp, Homo sapiens
ttgcctcctccgggttttgctccagcttctccttctccagcttcacggcaccaggggtgacggtgcagggctccggggaggccccatcggagttgctctccaccccgactcctgcttcgccc

SEQ ID NO: 422630 - DNA, 122 bp, Homo sapiens
atttcacgactttcaacaagaccctctgccctacccacccacacaggtgcttttgctgtgcgtggtaaaactcaagctatgattttgtgtacttcaagctcatgtaaggctgtgacatcagg

SEQ ID NO: 422631 - DNA, 122 bp, Homo sapiens
aaatccgcacagagactaggtcttccttaggcttctacttgaaataactgaagggcaggacgagagtccactggagacatttcacagaatggccatatcaacaacatagacaattctgttcg

SEQ ID NO: 422632 - DNA, 122 bp, Homo sapiens
tcacggagcctaacagagagctgggaagggagcaaaccagcgggccggtggtgcactactcgagggccagcacctgcagctgcttctttgggaaccccctggtccccgcaaccgcctcagag

SEQ ID NO: 422633 - DNA, 122 bp, Homo sapiens
agactgccagaaagagccttatatattgattaaaagtgatttcctccttttgtatcaagtcgatggaaagagactcacatttaggcacaccaggcaaaatgagcgaagcattcaggctgagg

SEQ ID NO: 422634 - DNA, 122 bp, Homo sapiens
gtgaaatggtggtatctgcatatcatgagatcagtgcattggctggactctgccccccaccgcggtccgagggtggggtgtccctaaactccatcaggtgaagtgtgtctgtgtcgtctttg

SEQ ID NO: 422635 - DNA, 122 bp, Homo sapiens
gcacgaagcggccgcaggccctgggcccgggctacgggctggggaggagggaggatgaggcgtgcagacactgaaagggcggctgcagagacttttttgtccagaagtaacccagagcgagc

SEQ ID NO: 422636 - DNA, 122 bp, Homo sapiens
gatgccaggcaagctttccagcttcacagagatctgacttagccttccagctgatgcacacgcaggggaagccagggctgtggcaggaaaaggggcgttcccagggtgtggcaactagtgcg

SEQ ID NO: 422637 - DNA, 122 bp, Homo sapiens
tgtgtccccagatgcccacgggatggacctgtttgcagtggctgtccacgagtttggccacgccattgggttaagccatgtggccgctgcacactccatcatgcggccgtactaccagggcc

SEQ ID NO: 422638 - DNA, 122 bp, Homo sapiens
gacctagtgaaagtaaacagttcatgaacccagctgggagcttgaccagcagagctgcctcggatttgggactcatccttggaaggggtggccccaggcatcgcccctctttgctcttgtgc

SEQ ID NO: 422639 - DNA, 122 bp, Homo sapiens
cccaccccgccccacccacccgggcccaccagcacctcacctgtcccaccatggtcttggcgaggatctcagccctgcgcggcccactcagcatgtctgccgccttcaggaagatctgggcc

SEQ ID NO: 422640 - DNA, 122 bp, Homo sapiens
tcctctcctgccccttgtcccattccctggcttctgccctaccccctcactgcccagacacgggctctcacagggccacccaacagcccaggaccccagcctcccgcttccttctttcctgt

SEQ ID NO: 422641 - DNA, 122 bp, Homo sapiens
gcactgcgtgttgtctaattcctcaaggtattaactgcagggcatctctcactttctctccggatcctagaccccaggcatccctctggatgccccattcccagagcatcccccaaactccc

SEQ ID NO: 422642 - DNA, 122 bp, Homo sapiens
cgcgaccccgcgaccccggccggactgccgagcgcggggggagtcactgcgctggccccgcggcccagcccgaggactcggttattgaaagggtccccctcatgggacccgcctggccgcgc

SEQ ID NO: 422643 - DNA, 122 bp, Homo sapiens
ctcagcctggcccgcagccaaggagccagacgccaggccccgggctctcagcagtgggagcggtctctgggctgggtatacaatggtattatctcaagccaacctcggctgcagaaactcgc

SEQ ID NO: 422644 - DNA, 122 bp, Homo sapiens
ctcctcacatcccagagggggcggcagggcagaggcgcttcccacatctcagacgatgggcggccaggcagagacgctcctcacttcccagacggggtggcggccgggcagaggctgcagtc

SEQ ID NO: 422645 - DNA, 122 bp, Homo sapiens
tagggccggcgccgcagtgtcttccgggaaacatagtctttaggcgtaaaggcagcagcccggccttgaagccggatctcgcgatgtttcagggtgagccggacgcaggcgtgcctgcgcag

SEQ ID NO: 422646 - DNA, 122 bp, Homo sapiens
tctccgcgcgcagaacccatggcagcttttggtcttacgcgtggctgtgagctgggctcacgctgcgtggcgcatccacccctcgattgacgcgcggagaagcatttttcattttttctttc

SEQ ID NO: 422647 - DNA, 122 bp, Homo sapiens
ctgtctccgttgggcggatgtggaggctggttgaggttccttgcaacgcttgccatcctacgcatgatgcagggaccccggccctccgcagacagcaggagctgccgagctccgagtgctgg

SEQ ID NO: 422648 - DNA, 122 bp, Homo sapiens
cacctacggggagaagggctgcggggttagcgacaggcaggacgatggctccggaggcgtcgaggcggggcgtcgggcaccgcaggccccagcaggtccggtcccaagcggacccaagtcct

SEQ ID NO: 422649 - DNA, 122 bp, Homo sapiens
ccagggttaacgtggcagtaagcgaggtcagctgtttcccaagacggtgcagcctctgaacgtcttccatcacagctagaatgatacagctgaagcagccgaagtgatttacaggaaaccca

SEQ ID NO: 422650 - DNA, 122 bp, Homo sapiens
ccccactgccctggccccgggtcccccgggggcctcgacctggcccgtctggggagctgtcggactctgagcccccctcgggacactcgctggcactgtggcgttcctcgtcctcgcttgtc

SEQ ID NO: 422651 - DNA, 122 bp, Homo sapiens
gcgccattggcggccgtccattctacaaatgacctgcctgcttgcctaaatgcgtcctgacggggccgagggaaggccgcacccctcgtgtgagatgctgtggatgtgttctggagatttct

SEQ ID NO: 422652 - DNA, 122 bp, Homo sapiens
ttgctgtggagggtaaagtggaatgtaggggacgtactttggaggcacgaggtcctaagtcgtggtcccactagaagagagttgatatctaaatcaagatgttggcctttttgtccttagta

SEQ ID NO: 422653 - DNA, 122 bp, Homo sapiens
ggtcagcatctgggcccagggcagctgcctcattcaggtggtggcagtgtaaggaggagtcgtgtaacgcgtgtcatcagattccagttcagttcctgggcatacaaatatgaagacttcat

SEQ ID NO: 422654 - DNA, 122 bp, Homo sapiens
aggagctgaggagacatagcgagaagcaaccagaaaagagtgcgagccttctgttatgcccggacaggtccatcagagggctccttggtctagcggtagtgttagcgtcaaggaaaaacacc

SEQ ID NO: 422655 - DNA, 122 bp, Homo sapiens
ggaatgacatgacttactttagatttagctgtgatgtcctcacagtgaaaacattttcaccgagttaccctgagaaggtctgagatgagtaagaagatgtgcctgaattcttacatgggggc

SEQ ID NO: 422656 - DNA, 122 bp, Homo sapiens
agcagatgtgtgttgccgggaggaggaaggactgctccagtcagggctgaatttcccacccggagcatttctgctgtatttggtgtagcgcctgctgcttaaagctctgattcccagttggc

SEQ ID NO: 422657 - DNA, 122 bp, Homo sapiens
gggcctctcccatcgcccacgctgaggctggcagggtcctgccagcactatgcaggctgccgtggcctcagccactgcatatgtctctgcaggacttggacgaggacgactttgacgtgggg

SEQ ID NO: 422658 - DNA, 122 bp, Homo sapiens
gagctgagaaatcagaaactgtgtaggtaaattttaagtttccttaatttaaggaacgtgcgccccctaattctgccgcgccaggaaggagggcgatctggagtgtttagaatacaatagag

SEQ ID NO: 422659 - DNA, 122 bp, Homo sapiens
gatggcagagttggcgtgcgtgcgtgagtccaccagtgtggcatgggcatgtaaggtgcgcggagggactgcaccttctccatcaggtgcagaaggtgaggatggggcagggggctaggagc

SEQ ID NO: 422660 - DNA, 122 bp, Homo sapiens
acaataatcaaagaacatacagagggatttggaaatacctgtgaggtacacatacttcttcgaggtgggggtcaaggaagacattgaaaatgaaccaagccttctatattcgttcgcagcct

SEQ ID NO: 422661 - DNA, 122 bp, Homo sapiens
ggctgcggccgagagagaagccttattagagctttctcaacctgcagccctcatctccgccggcgagtagggccaggtgttgggaggtgagtagctctccggcagctctgcaacttcatttc

SEQ ID NO: 422662 - DNA, 122 bp, Homo sapiens
ggaaaattctggttattcaccacttctacagctctcctgccgctccctgcagaggatgctcgttttgcagagaaggcagtgttcctctattcccttcttccgaattaaaaataccccctcag

SEQ ID NO: 422663 - DNA, 122 bp, Homo sapiens
acaccgtgtacgccaagggatccgagcggaagagtagctctccggggcgcagcggggtcacggcgcgcagcccgtttcccctcttggcggttgcgaacttttccaccttcagcggctccatc

SEQ ID NO: 422664 - DNA, 122 bp, Homo sapiens
aagtggaactccttctccagctccagtgtctggtagcgcgtgtaggtctggcggcctcggcgcccatggctcccatacacagcacctacgagcagaaacggccgggcgccggtaagccaggg

SEQ ID NO: 422665 - DNA, 122 bp, Homo sapiens
atgagagagttccgggcggaacgtgggacaagaccgagtctcaagggcctggaccagtgtcggagagggctgcttggctgtcctggtgggtcggccgccctgggccggcccctgccgcctgg

SEQ ID NO: 422666 - DNA, 122 bp, Homo sapiens
agaattgtaaaagattagtacatttaggatcttgtcttttatgtaagtgaaaataaggaccgagtgttgatgctttggattcaagagccagctgtgcaaaattaaagtatcctattattcac

SEQ ID NO: 422667 - DNA, 122 bp, Homo sapiens
aaggatttaaataaaatcttgtgaaagttcagtttggctccttcagggactcggccaggccggggggcagcacaggagacaggctgactcccctgtacagatggatggggaaacacaggcag

SEQ ID NO: 422668 - DNA, 122 bp, Homo sapiens
agcgagtgagccactggcgtctacgttctcatcccgcagcaggaaccccccactcacagccgtcccccacaaaactccgagagctccatagcgtcaggtccccaacacccagcgctagaggc

SEQ ID NO: 422669 - DNA, 122 bp, Homo sapiens
gggaaactgcacagaccccaaccgagggaccctgcctggagggagctgggaacagcttgccggcaaaaccttgccagcaaacacaagctcagaagagccggggtcgattttctgtcctgcca

SEQ ID NO: 422670 - DNA, 122 bp, Homo sapiens
gttaggtctgtatgcgaattccacctctaccactttatatctttgaggccttgggcaagccgtggagcctgtccaagctctggtttcttcatatgtaaaaaaggcatgttatatctacttac

SEQ ID NO: 422671 - DNA, 122 bp, Homo sapiens
ctgtggtataggggaagcgctccgggcctggaatccctacgcgtccctttgggtttagcacgatgagctcaatcggcactggggtgagttcgctgtctgtcggtgtaatagtttaacctaag

SEQ ID NO: 422672 - DNA, 122 bp, Homo sapiens
cgtcggcgtgggtcctgcgcagcctgccccgcgagcgcccgctgcaagtgcgaggaaacccgcggtttctccagatacagttaaactgttagctctctctaggagtcacagaagatgaaaca

SEQ ID NO: 422673 - DNA, 122 bp, Homo sapiens
agctgggttgggggcaggtgaccctagaggagcagagtgggtagccggagcctgtggactcgggcctggctcttgagccaggtgccctcaggcctggaggccgggagccgctgtgcccaccc

SEQ ID NO: 422674 - DNA, 122 bp, Homo sapiens
ctcgcctctgcgatgtccgtcccaccctgtctcacccctgcagttttctgctctgtggagcgatgattgacacatggcagggggacactggttttgacatttgagcctgtgcccagcccttg

SEQ ID NO: 422675 - DNA, 122 bp, Homo sapiens
ggcagagctcacagtaatgctctgacgggggcggagctcacacagtaatgatgacgggggcggagctcacacagtattgatgacagggggcagagctcacagtaatgctctggcaggggggc

SEQ ID NO: 422676 - DNA, 122 bp, Homo sapiens
actccgccccgctgccattcaaagacggcggggggtccgggctgcaagggtggttccatccgggttcttccccgcccccaaggcgggcgcgcgggaaagccacgaggccccaggagtgcgac

SEQ ID NO: 422677 - DNA, 122 bp, Homo sapiens
ctttacatgaatctgttgttcaatgatttgaagcttctctagatcttattcaaagcaaggcgtataggctcagacagcctgctccacccctggatacttatatagaataatcatgtagaaat

SEQ ID NO: 422678 - DNA, 122 bp, Homo sapiens
ctggagtgcggagagatggagaaagctgtagggtctggcagacatatcctgtgcttaccacgatcaccactttgggggtggggcccttaacctcccgctgtacggtgccaaaccgctggctg

SEQ ID NO: 422679 - DNA, 122 bp, Homo sapiens
agggcagaagattgtgtagacaggcggtcaaccagagcagcgcggggcaggacccacgagcgcgaagccaggtgccgcgcggtccgcgccccggctccgggcgacgcagggactttgctggc

SEQ ID NO: 422680 - DNA, 122 bp, Homo sapiens
gcggcatcgcccggtggcagggtgttcccagggtgaagccgcagggttcccgggtgggggcggggaaggctaaatgcggccggccggtgagtggcgggagcagctgcagccccgcccgcgcc

SEQ ID NO: 422681 - DNA, 122 bp, Homo sapiens
tctgagtagacagtaaaaataagcaaaggatttaccatcatggagcttctgggactataccgaccacgggtcactctgcgctgcgatctgtaacctagtcagttctgagatgcacggtggct

SEQ ID NO: 422682 - DNA, 122 bp, Homo sapiens
aaaactaacacctttaagagacaatgtaattcacctgcgcttccccgccccccccgcccgcgccaaccccaccccccgccaaccccgcccccgactccgcgaacgccgaggggcccgtggtc

SEQ ID NO: 422683 - DNA, 122 bp, Homo sapiens
aaccacgcggccagtggcaggtgaaaacaggcttgggtccactcgggagaaccaatcggtcgtgagttcacctcagtcacttccactcacacatccggtacggcgctgctaggattcccttc

SEQ ID NO: 422684 - DNA, 122 bp, Homo sapiens
tcaaacaataatctaaagaaatatgtgtgccattttagatttcaacattattcctctatccgcatgagtcatttttagctgactgcacatataaagtttaaggataaatgttttaacatttg

SEQ ID NO: 422685 - DNA, 122 bp, Homo sapiens
cggacctgacttgtgcgccgccatcttcccggaaatgccgttttgttccttctaggctgtcgaaaccatagagacgtccgcgggaaccaaaatcacggtttttccaggagaaaccattgcgg

SEQ ID NO: 422686 - DNA, 122 bp, Homo sapiens
gcagcgctgtgtaaggcacatagtaggtgctcagtgaaagagacccctcactgcacagcacgcccgcggccggcaggggcacacgttccctcgttagcagtgttgccaactctgcctacttg

SEQ ID NO: 422687 - DNA, 122 bp, Homo sapiens
gcctttcctctgcattggtgccctccccaggaggcatctgagctgcaaaaggggcgaatgcgatgtagacacttgggccccgggactcgcctgtgtcatctgggctgggccccacaaacacc

SEQ ID NO: 422688 - DNA, 122 bp, Homo sapiens
gccgttccaggcgccagctccggtcctgcctgccttcgcaggatgcaggatgcgtaacttcgagcctgagctgagcccactgagcatgagggaggagcctgcctcaggttaccaaggcggaa

SEQ ID NO: 422689 - DNA, 122 bp, Homo sapiens
cggcgcacagcccggcccctggccccggcctccctcccgcctgccccgacccctccctggcgcctgcgctcccagggcccccggccttaccacagccgctcgctccctgcacccggtccccc

SEQ ID NO: 422690 - DNA, 122 bp, Homo sapiens
ttcaggccaggctgcgttccgaggagccgccacgtccccccacctccgcttcccgggccgcgattgcaggttgaaaactactcccaaacatcacagggcaggcagaatgcaactacgaccca

SEQ ID NO: 422691 - DNA, 122 bp, Homo sapiens
aggcttctatggaggaagtgggatttggctgtacttctggtctccctctactaatgcttccgttcctaacatctttataattctgtgtgggtccacctcctaatctaaattacattcctggc

SEQ ID NO: 422692 - DNA, 122 bp, Homo sapiens
agcagcgtctgtcttggagcgggaacccaggaactgaggatcggcgatgtccgctggctccgaccatccccacacgtgatgaccaagcggggccgctgtggggtgggatctccacctgcgtc

SEQ ID NO: 422693 - DNA, 122 bp, Homo sapiens
ccgcgcccggccccaagaaacatctttgcgggagttaggaacattacaggggtgagccaccgcgccgggccccaagaaacatctttgcgggagttaggaacattacaggcgtgagccaccgc

SEQ ID NO: 422694 - DNA, 122 bp, Homo sapiens
ttgatctctttttatcgccattccaggggcctcaggtcctactggggaaacttcctataccggagctccagtttctcttaagctgcccaatttcacagagtacaaaatagttgtaggggaaa

SEQ ID NO: 422695 - DNA, 122 bp, Homo sapiens
aagaggccgcgtcaaaacatccatccccagcaaattcacaatgctcttccctggggtctccggagataacggcgcacccctctacccattgcttaccctcactccatccagccgccgcgccc

SEQ ID NO: 422696 - DNA, 122 bp, Homo sapiens
aaaagatttgtgaccttggcagcattgatgtttccagattgaacttttcttccggattcacgctttgtgttctggcctaaaatagacaaaaacacaagtcaacagcccaggactgccccatc

SEQ ID NO: 422697 - DNA, 122 bp, Homo sapiens
tattctttttcttctcttgcggatgtgaccgtgcttatcccgttgtcctgcccatcagaacggagatggcgggagttttcccttccgcccccggtctgctaagacactgttagaggttacaa

SEQ ID NO: 422698 - DNA, 122 bp, Homo sapiens
cagcagcaatccacaggagatgaagtaaaatgatgaggggaaaagttggggattttaggacgttgtccgctttggagggggctctccttgcactctttgtagagatttacatgactgcgagc

SEQ ID NO: 422699 - DNA, 122 bp, Homo sapiens
gttctgagcattccttagtgaggaaagggaaccagagctgcatgatgggcagggggctggcgagatgcgtcaggattcacatggcaggacctggagtttggcagggactttgaggtgcaaaa

SEQ ID NO: 422700 - DNA, 122 bp, Homo sapiens
tgctttctctggtgcaggatgaggctttgactagggctgtctgaggcgggaagtgccctccgggcctttccctgcgtggtggctgcccagtgaatgctgtctgtgtctgcctggctgtgtga

SEQ ID NO: 422701 - DNA, 122 bp, Homo sapiens
gttgaggacccacaaccactggcaggggcatcgggggcagaatcctccagatggctgtggcgggcgagggtgtctggcagagcccctggtggcccggccccgtggacccacgatgcgagtgg

SEQ ID NO: 422702 - DNA, 122 bp, Homo sapiens
tgggaatcctcctcaccccctcggccccatcaagggctttcagattttacagaaacgttccggctcttgccatctcagccacatcaggcccgacttaggaccctctgggacctttacaaccc

SEQ ID NO: 422703 - DNA, 122 bp, Homo sapiens
actagaatcatgaaaattaaggccgacagcatcaacgccgcagagcccacactctgctgacgggaaggcagaacagtacgaacgccggaaaactgttcagcaggttcctttaaggtaaaaac

SEQ ID NO: 422704 - DNA, 122 bp, Homo sapiens
tttctgtttgaacccactgacacctgaatctttaatcttgtggttctgcattctgatttccgaaacctgcctcaaccctcttcatctgaagcttcatttgaatcctcttctctgactctgac

SEQ ID NO: 422705 - DNA, 122 bp, Homo sapiens
aataataaaggctgtaaggatcagccttttgaacggtccagccgagaactaaccacagagcgcgttttagtggagtggtacttatttttaaataaggtaaaaaacgattatacttcagtaaa

SEQ ID NO: 422706 - DNA, 122 bp, Homo sapiens
gaacctttcgagaagagccgctgcagcgtcgggctccggaggcgggggcgggaactggggcgcgctgggagctgtagtccggatcctatcgccgcctgcggcgtccctgcgcggggcgggag

SEQ ID NO: 422707 - DNA, 122 bp, Homo sapiens
cgcagccccagacaggctggaccccagggacggtaaagggtgcacaccgcttgccccactcgtactctgcgcccagcagctccctggatggtggccgggcaggaggctgtcctgactgatcc

SEQ ID NO: 422708 - DNA, 122 bp, Homo sapiens
ctgactgccgaggaaacggtagcttaggacagttggctgttaagtgacactgattctccccgccccgcctgacccccgagaaggaggcttgtcccccgctgcgtgagggggtggggaagtgg

SEQ ID NO: 422709 - DNA, 122 bp, Homo sapiens
attggggggggatccctacagtgcaaaagggacctcagggtagctcggtgacactagccacggcacgcaggcctcagctctccttgctccaattccagattcagcaagcgtccttctgatta

SEQ ID NO: 422710 - DNA, 122 bp, Homo sapiens
gcacctagagggtccccggatcctggcgctgcgtgggtcagtgtctcgggagccggggaccggcactggccgtgctcggttgctgagtgtgcctcactaactatcattccgttcttccaggt

SEQ ID NO: 422711 - DNA, 122 bp, Homo sapiens
aacaagtccaccaacatgatttcagctaagctgggtgtatgtactgatgtactgaatgggcgaccatttccttccagaaaggctggagtcagccctccgggatggctgtctctgtgtgactg

SEQ ID NO: 422712 - DNA, 122 bp, Homo sapiens
ccttccgcgcctcgaagtaacgtcagcacgtcgacgcggggcttttctttagccgggtcccgctaactcggctacggtgtatctgcgtctttggtcaggttgttccttggctaagagggcag

SEQ ID NO: 422713 - DNA, 122 bp, Homo sapiens
ggcttgctcacgttcttggtcaccttgtggcccttgttgaggcccacggccataaggtagcgcagagccatggctgctgctctccatggcggccgtggcggaaggccaaaaatattttttaa

SEQ ID NO: 422714 - DNA, 122 bp, Homo sapiens
cccgcggcgaggtgagctcgggcggggtgggggcttccgggcttgcagcggcgggcgcggcgtttccctgtggtgacaatccggtttccgctttcggtgcgctcacggggccgtgccaccgt

SEQ ID NO: 422715 - DNA, 122 bp, Homo sapiens
ggattcatttgtcttgtcggctctgacagttggattctcccagagctcttcctagtggatcgccctgggattttaaaccggatgaaacacattccgacaaggaacagcctctttattaatgc

SEQ ID NO: 422716 - DNA, 122 bp, Homo sapiens
ggatctatgccttgagaatgatataaaattgggccactaaaatcttttttatttccttatcggatagcattttaaaaccaaatttacatggacacatagttgaattggtcaattaatcctgt

SEQ ID NO: 422717 - DNA, 122 bp, Homo sapiens
ggattctcaccgccgccaacaggaggaggaagtagggcggaagcgatgacgtcttcccagcggccagaggtggtggagtgcaaaaagcttcctacttgcgaccgaaaaaaagggagaagaaa

SEQ ID NO: 422718 - DNA, 122 bp, Homo sapiens
aaactgatgatgcgtgtcctctcaggccgcggagggtcgatgctccctctccagtgtgggcgaccctaagtgtcacggctgcagagacccggaaagaaaaatcacaggattctagaaaccgc

SEQ ID NO: 422719 - DNA, 122 bp, Homo sapiens
ttttttttttttttgctgtccattgcacaagcaagtggactcccggaagccagccctgctcgtcctctgggccctcctttccctggtcctgcaggtcttgctgcttgtcaggcctctcctcc

SEQ ID NO: 422720 - DNA, 122 bp, Homo sapiens
ggaaggcggtgccacagagcttggagctgtgagtggactgctcagccaccccagccggggcgggcggcgggcgctctggggaccctccttgaccagtccttcgttcctttcctttcccaggg

SEQ ID NO: 422721 - DNA, 122 bp, Homo sapiens
caccttcaggaaaagcaagagataaaccattgcatgctgagctctgcagggaactggaggcggacaccatccattctgcaaacctgcaatggtgacacttctggaatctccttgcctcttcc

SEQ ID NO: 422722 - DNA, 122 bp, Homo sapiens
tttcagagaatgttatattatcaggtcatttactcacagatatttttgcaccacctaccacgtgcctggctgcgtgtccctgtgcatgtgtgttggtggtgtggatggctggagagtgtagg

SEQ ID NO: 422723 - DNA, 122 bp, Homo sapiens
gctccgccctcccaaaggcacatggcgaccgcgcagggcgccgaaaggcgcacccgaacccgaatcctaaacctaacgctgtcctaagagccctggggagaccttagggaacaagcattaaa

SEQ ID NO: 422724 - DNA, 122 bp, Homo sapiens
agagaaacctaagccctggccacatggcaagtaggcagatggcagtggtggggtccccctcgaccccggccctgcctctgaacaagcagcattttcctcccaagtcacactgtccttccttt

SEQ ID NO: 422725 - DNA, 122 bp, Homo sapiens
ggagccgggaggggaggcgcacgttgactacgggccattcaagtgcgggacagcgccctgcgccccggatctgcgctccaccagcccccgccctggccagcggcctctccccctcgcccccg

SEQ ID NO: 422726 - DNA, 122 bp, Homo sapiens
ccgccgctcccctcacgccgctgcggacgacgacaagcggccaatcgtccccgccccccgcggcccgccgccgcgccgaacctggtcacacccacaaggagaggagaaccctcgcagcccct

SEQ ID NO: 422727 - DNA, 122 bp, Homo sapiens
gaagaggagggaaggcaagcctagagcgggggcaacaatgcctgcccgcagaggggcgcccgggattcggccagggcgttgggggctgtgccgaggctcttcctccgccctcagccagcgcc

SEQ ID NO: 422728 - DNA, 122 bp, Homo sapiens
ttgaacacgcagagcaaaagcaggcgagcacgggcggaaggagccgggaggccctgaggacgtggcctggaaactattcacagcacaccgcaggcaatctatgcaggacgaccgacgaccga

SEQ ID NO: 422729 - DNA, 122 bp, Homo sapiens
acggggaccgtgacccacgtctggccatgcagagcggcacgtgtgggcccagcctctgagcgcactcaggccagtgaccatcgtctgctcggacacacactgcgcgtttgtggctctgacag

SEQ ID NO: 422730 - DNA, 122 bp, Homo sapiens
ccggcccacttcctctttcctcactttaaggcgcagacagcggtccctctcaaaacaaaacgtacaccaaaacaccattttttttttaaacaggaagtccagaggcccgggtccagggcatc

SEQ ID NO: 422731 - DNA, 122 bp, Homo sapiens
cctgcccttcacatctggttcagggctctgccgaggccttctggggcaggtgccaattatcgctcaggaactgctgcttgcttcccagggctggctttctgtgaagggacgggcacatctca

SEQ ID NO: 422732 - DNA, 122 bp, Homo sapiens
gctgctggaattggagataggatgttttgcttcccactgcaggagagctgccccctttcacggggttggggaagggtccccctggcctccagcaggagcacagctcagcagggtccctgctg

SEQ ID NO: 422733 - DNA, 122 bp, Homo sapiens
gtgacaaagaccagcggatccctcccacacacatgcttgggtcactcaggggccgacttacgcgtcggaatcctcggagctcgagtcgtcatggctctgctcggccttccatctcttgtacc

SEQ ID NO: 422734 - DNA, 122 bp, Homo sapiens
aggtgggccgcctggggcttggggcgggcggggcagggtgcgtgtggggcctcgggccgtcggtctactcatttctgatgttaagaataacgacagcctggttgccaagcgcttttccgtgc

SEQ ID NO: 422735 - DNA, 122 bp, Homo sapiens
gatcaatgatttttatggcaaccactttctgagtccaactgtcaatgccttagaacacctcgccaaaggagcccttcccaatgttctctagttttgtaaaaagactttctggctctctgctt

SEQ ID NO: 422736 - DNA, 122 bp, Homo sapiens
gccacctgcaggctgctgctgcaataccctgtggagccaggcagctcctgactcagctggcgccgcccgggctgcgtgggaactccccagggggcctcccgaccccaggaggggggcgcccg

SEQ ID NO: 422737 - DNA, 122 bp, Homo sapiens
ccccagtagaggtgttgagaggggtcacgaaagggggtccaggagacgaggtcagcgaaacgcgcctggtaaacagttaagggccgcgcagcactacccacaccggctcccgccccgggacc

SEQ ID NO: 422738 - DNA, 122 bp, Homo sapiens
gcgcccgcggagcccacccggcagttcgcagcggcgggtgagtgccgggccgcgggggcgcgggcaaagtttgaaaaaaaaagaagaaagaaagagagagaaaaaaagaaatggaaaaggag

SEQ ID NO: 422739 - DNA, 122 bp, Homo sapiens
atctttcttcatttctgggaagcaaaaatctccaatgtgatgacttttatgtctttgcaacgtccctgtgtggatcacttctcctgtaatactgtgcctggttgatgagaactccatcatgg

SEQ ID NO: 422740 - DNA, 122 bp, Homo sapiens
aaaagccagccctcccccacccttccccctgagccctcccaagccacccacccacatgggcgtggtcgtggcccctaagcaccctcagactttgtcacagagggcaaggtgggcggggcacg

SEQ ID NO: 422741 - DNA, 122 bp, Homo sapiens
gtcatacctcagcctgccctcacggcctcctgggaagcagaagaacacctcccggccatgcgggggcgctctctcatgtgccacgcaattcttccggctgctctgccgggaccccgccatct

SEQ ID NO: 422742 - DNA, 122 bp, Homo sapiens
cttcgccccaacattcgtcatctactgcggcctgcggttcgtggccgcttttgggatggccggcatctttctgagttcactgacactgagtgagtccccggctcagcgcgctcctgccatgg

SEQ ID NO: 422743 - DNA, 122 bp, Homo sapiens
ctctctgggggacgtacctgagcgtgtccgcctcctccctggagaacaggaagctctgttcggcagagctggactgagacttcagcatcttcagctccatctccagctaggagaaagcaaag

SEQ ID NO: 422744 - DNA, 122 bp, Homo sapiens
tgtgctctaactttgttctgttggaactttataatgacggaagagcaacacaaaaacatacgaaagtggggaaaatagagggaaatagagggggaaaaacctccatccataacattatcagc

SEQ ID NO: 422745 - DNA, 122 bp, Homo sapiens
aaataaatgactcaaattggttttgtgtgagaaacaaatcaaagcattaccggggcgtgccgggctgacctgcagtagcttaaccatttcctgagcaatgagaagctgctagattggatggg

SEQ ID NO: 422746 - DNA, 122 bp, Homo sapiens
acttgctggcggcgaggcgcgggggcctggggccagccgcgcggctcccaactccctttccgactcttgcaaaggagcgaaacacgccccacgtcagccacatccctttcgacttttccaac

SEQ ID NO: 422747 - DNA, 122 bp, Homo sapiens
cagcaggtgggcagcccggtcagcccggggtcaggctgacgtcctggagaggtcccccggcgccccccgggtcacagaaattcgcaaggtgtgagcagcgcctcgggactcacacgcctcac

SEQ ID NO: 422748 - DNA, 122 bp, Homo sapiens
ccaagtctggaaccccggggtcagtcgggaggggtcggccagaggactcagagctggaggcggagggggggtcctggctggcgctcaaatgtagacgccggcgccggatctgttcccggcac

SEQ ID NO: 422749 - DNA, 122 bp, Homo sapiens
gagatggaaggtgcttgtcagtcacacacactggtttacggacagatgcaggcagggctgcgccagccagctgatgagcctcctgcacagctgaggacttgatttgcatttctaggggagag

SEQ ID NO: 422750 - DNA, 122 bp, Homo sapiens
tgcagaatttaagtgccacataagtgaccacgtgggcaacgccctcggggccttaagccgcgccatttttggggctaggattggttggaccctccgtcacgtgacatgcagtcgccggatcg

SEQ ID NO: 422751 - DNA, 122 bp, Homo sapiens
cagctgctgggaggatcagaaaagggaggtgggacagaaaggcaggatgcgacgacctcccgggtcccaacttgcttggtagctagctttgtgtcttgagccttatgagaatgtaagccacc

SEQ ID NO: 422752 - DNA, 122 bp, Homo sapiens
ctggagggcactgagcagcgcggggaggtggggccgctggtgggtgcgaatgaaagctaccgtccggtcggcgctggaggcgaaggcctggagataggcggccacaccatccgctgcctgca

SEQ ID NO: 422753 - DNA, 122 bp, Homo sapiens
ccctcagccctgctccaggattgggccgtttccgtcagtactctctctgattggctgtcccggtttcgcccgagcaggagatggggagtgaacccctttactgccaatcagcggttgccgct

SEQ ID NO: 422754 - DNA, 122 bp, Homo sapiens
cggagaccagaattggcagggagagcccatgacttgtggggcagttcccctggttgggagcggggaaatgcatggtcctggcccagcctggctccatcgagatggaggaagggtctaaatga

SEQ ID NO: 422755 - DNA, 122 bp, Homo sapiens
agcctggctcccgaccgctgcaggcaccactgcgcacctgactcctccctggcccccttccggcacctgcaaccttgcctcttgcccacccgctccaggcagctgaggtccgctggaggcgc

SEQ ID NO: 422756 - DNA, 122 bp, Homo sapiens
aataaatatacatatgttaagatacagactatctattcacacatagaacaaggagaatttcgatatagtctgacctgaattttacatttgagagcactttcagcttctggcaattgggacat

SEQ ID NO: 422757 - DNA, 122 bp, Homo sapiens
ggaccactcagcggtcccagcaggtgaggctgaccagagcctgcctgggctaagaggctgcgttcaccagtgccagctgtggttggtcaccaggatgcctgagcgcgctggcacaggcccag

SEQ ID NO: 422758 - DNA, 122 bp, Homo sapiens
gggtgggaaagatgggaccgtcgctctcgccgccgcggccaccacagacactgccgccgccggctcctctcagccacggaagctgcgggcccgcccaccacgcccgcctcccgtcctgaaga

SEQ ID NO: 422759 - DNA, 122 bp, Homo sapiens
cgtgatctgcccgtctcggcctcccaaagtgctgggataacaagcgtgagccaccgcgcccggccaggtactttattattattttttgatacggagtctcactctttggcccaggctgagtg

SEQ ID NO: 422760 - DNA, 122 bp, Homo sapiens
tacaggtgtgagccaccacgcccggccagaaaattgaactttaacagcacagtgtctggccgggtgtggtagctcatgcctgtaatcccagcaccttgggaggccaaggcgggaggattgct

SEQ ID NO: 422761 - DNA, 122 bp, Homo sapiens
cgctctcccacgcccgccgctccgggcctccccactggcccgctcctccccgcggagggccgcgcccccgccgcagcgccggcggccctacctgcagcatcactttgtactgctcctccggt

SEQ ID NO: 422762 - DNA, 122 bp, Homo sapiens
gcaagcgctgggaccccgaggccagtccaggcatctggatctccgacacagaggcagccacgcagtgattccctggcgaccctcagactcacgtgttcagcccggacactccgcaggctatc

SEQ ID NO: 422763 - DNA, 122 bp, Homo sapiens
cagatccccctcctcttggcaccgcctgcggagctggtccctcaacgccgatccttggagcgcctcgtccagccgacttgccacctggcaaccccgctcccccgtcaagaggcggagcacac

SEQ ID NO: 422764 - DNA, 122 bp, Homo sapiens
gagccccaggaagccgggagaggcaggaaggacgcgccccgggagcttccagagggcccccggccctgcggacaccttgattttggacttccgcctccggagctgggaaggcatatatttcg

SEQ ID NO: 422765 - DNA, 122 bp, Homo sapiens
cttaacaaactatggctaaaccatccactcattcattcatgaagccgggtcttaccttcacgatggagactccagagccgatattgacaagaagataggggaaaatgtgggggtggttggtc

SEQ ID NO: 422766 - DNA, 122 bp, Homo sapiens
agggagaggagaaacgaagttcacgtcctagtctggcaccgggttggattgtcgctgggacggcagtcaggcatttggtgtggtcgcctaaggggtgggtccttcggcgggagctccgggaa

SEQ ID NO: 422767 - DNA, 122 bp, Homo sapiens
ggtgggtctttaaaaagctcgccactttcctcattgcacacaaacacgcagatgtgccctcggaacatcccttgtaaggatccatgctggctagcgtcagatcgaatttctagttagggtgt

SEQ ID NO: 422768 - DNA, 122 bp, Homo sapiens
ccgccctctctagccacgccgaggcataggaggggccctgcccggcagccccagcccaggcggggagttcctgcgcttccccagggcttcccaaacttcagctctcaaacactgacaagtgc

SEQ ID NO: 422769 - DNA, 122 bp, Homo sapiens
tatgagctgtaacactcaccacgaaggtctgtagcttcacttctgaagccagcgcgaccacgagcccaccgggaggaatgaaaaactccagacgcactgccttaagagctgtaacactcccc

SEQ ID NO: 422770 - DNA, 122 bp, Homo sapiens
ctgtgcaaggattaaataaaggcctaatgaaattcagagaaatccaagaggacagaatgacggggaagccagcagttgctcagcaggcatgagacacagcctgccacattaactgctaggtt

SEQ ID NO: 422771 - DNA, 122 bp, Homo sapiens
ccagatctttttttagtggttcctcaaatgtacttccttcaataggttttctataaccaccgcatctaaagtaggatttcctcactcattattctttacctcattcctgttttactttcctc

SEQ ID NO: 422772 - DNA, 122 bp, Homo sapiens
tgcggctctgccgaccagactgtccactgtaggctgttttatagggggctcccttcccttcgaatagcggccagaggtcagcagctgttgattcctttatggccaggttcaaacattaactc

SEQ ID NO: 422773 - DNA, 122 bp, Homo sapiens
ccggggatggcgcgggttgtgggcggccgaccttgctccagggatggcgcgggttgtgggcggccgaccttgccccggggatggcgcgggttgtgggcggccgaccttgccccggggatggc

SEQ ID NO: 422774 - DNA, 122 bp, Homo sapiens
gttgcccaggctgcgatgcagtggcacaatcttggcttgaatccgcctcctgggttcaagcgattctcctgcctcagcctcctgagtagctgggattacaggcatgcaccaccacgcctggc

SEQ ID NO: 422775 - DNA, 122 bp, Homo sapiens
tcttcccaagttcttagataacaaaacaaaatcaagacctagaagtttgtttcttcctgacgttactatataagcccgccttagggcaagacttttatgtgacctttcctgagaaaaaggtt

SEQ ID NO: 422776 - DNA, 122 bp, Homo sapiens
cttgcccttctgacacatgtcaaagtcagagatcacagcatgatcaaggcatagggatgccgaggagggagggatgtgttttgctgagggtagacaggctgcatccaaggagggcttaggga

SEQ ID NO: 422777 - DNA, 122 bp, Homo sapiens
ggagccggggagggaacttgtgtattttacaactgcgatgcctatcgggaatgtggcaatcgccgaggtggggcctgacagtaatcttgacaaatgtgtgaagtgtcagctcctcctgcgct

SEQ ID NO: 422778 - DNA, 122 bp, Homo sapiens
gaggacagagagataaatcaggaccaccccctgctgtaaggtagctaagtgggggtgagccggaggtatgatgagatatacacacagtatgatacaaggtaagaattttaaatgaaaaaaaa

SEQ ID NO: 422779 - DNA, 122 bp, Homo sapiens
attccgcctgaacaatccggccgcccagtggctgagggtcgctgacgtcggaggcagagccggggagtagttgggattttgctctgtcagtaacacatgtgtaagagccgcggagggagcga

SEQ ID NO: 422780 - DNA, 122 bp, Homo sapiens
caagtgcacctaaccatgccttggtattcagttgctagtgagaaggtaatgtattcaggacggcagttaggcctcatgagtgctggccactctatctcacagaacttctcagagtccaacag

SEQ ID NO: 422781 - DNA, 122 bp, Homo sapiens
ccacggtctgttgtccagcttgcattcatttctgtttataaaacccataaaagtcttgagcgaaaacttccttggaaaagtttttataattcaaaaaagtcatcaactcaaaacccagaccg

SEQ ID NO: 422782 - DNA, 122 bp, Homo sapiens
gtggggacaccagtgcgggctgggcacctcgggagtgtccaggcaggccctggcggggagcgctgggccctggcaggggaggaggccgggctgccctgggtgtggctgcagcccttccctcc

SEQ ID NO: 422783 - DNA, 122 bp, Homo sapiens
catttctattttcttccttgtctgaggcttctttatcaagggaattcgaaaagacacattcgtacctttgggcacaggaactggttcctggactttttcaatgttgttcttgtttctgggcc

SEQ ID NO: 422784 - DNA, 122 bp, Homo sapiens
ggaggggagacgcgtgcaaatttagattccgctgcaggatgtggacagtgggagggcagacgcgtgcaaatttagattcgctgcaggatgtggaccgtgggagaggagacgcatgcaaattt

SEQ ID NO: 422785 - DNA, 122 bp, Homo sapiens
ctcggctggcggtgggagggcagggggcgggcactgggcccgagggccccacccccagcccgagctcagtgtcgctgtttctgcccgaaaacctagtgtaatcaggacgaaccaggcaaagc

SEQ ID NO: 422786 - DNA, 122 bp, Homo sapiens
ctgctatagccccacccctccgggcgaccccacccctccggacgaccccacccctcaggacgaccccacccctcaggacgaccccaccgctaccggcaagccccgcccctcatcagcagccc

SEQ ID NO: 422787 - DNA, 122 bp, Homo sapiens
tcggcttccccaggccccaacaggcagcctatgggacctactgctacgccgagaattaggcgcccaccgtgtcccctccagcgcgcgcgaagaagcttgggagtcgtggcgggggtctctcg

SEQ ID NO: 422788 - DNA, 122 bp, Homo sapiens
gaaagtttctcgtggggtgggggcccagaggggatggcagggtgggctccgacgcctcctcgcctttaagcgggtggccccggctcttcctccgttacctggagcggggaggggcttgggaa

SEQ ID NO: 422789 - DNA, 122 bp, Homo sapiens
gcagtaacactgtgccctgtccttccaaccactgccactaggtgaaagcagagagagcatcgcccagatgggctagattcttctcacaggctcactgctagaacgaacattcttgagacttt

SEQ ID NO: 422790 - DNA, 122 bp, Homo sapiens
gcagaggctcttgatggtggactaagcaatttcccccctcgtgcgcatctcagaacccatcggtaggcaaaggaaaatacgctcaggtggttgtggtgtagactgtgtcaggcctacggagt

SEQ ID NO: 422791 - DNA, 122 bp, Homo sapiens
ggaaccccgctttagcagcagtcccgagtccgccatgctgggtcctcagggcctaccgcgcgagaatctcgcgagatcccgtcggtccgccccgctgccctcccagctgccgaaaagagggg

SEQ ID NO: 422792 - DNA, 122 bp, Homo sapiens
ttattatcttttgcacttaagtagtgtgatagaatcttctgtccagcatttggaagtcagcgattatctatgggcattatctaacaatgggataatttgttttttcagtaattgttcaaaaa

SEQ ID NO: 422793 - DNA, 122 bp, Homo sapiens
atgagtgaatggatgaagaaaggccccttagaatggcaagattacatttacaaagaggtccgagtgacagccagtgagaagaatgagtataaaggatgggttttaactacagacccagtctc

SEQ ID NO: 422794 - DNA, 122 bp, Homo sapiens
tggggcgagggtgtgctcagtgtccctgggccactcaaggctgtctgggtatcagccctgcgccatcgaggaccccctccggccctctctcggccgtgcgccctttccctgcgccatcgagg

SEQ ID NO: 422795 - DNA, 122 bp, Homo sapiens
cccggtcgctttcctggacacggggaagccctccctgtccacgtcctgagggcgcgcggccgacccaagtgtgtttgggcaacgctagagagaaatttcccaaatccgagttgctctgggga

SEQ ID NO: 422796 - DNA, 122 bp, Homo sapiens
agggagattccctttccgggtctgctaagtaacgggtgccttcccaggcactggggccaccgctagaccaaggcctgctaagtaaccagggccttcccaggcactggcattaccgctagacc

SEQ ID NO: 422797 - DNA, 122 bp, Homo sapiens
gggacactgtatgactctcctctcctgcaggtgtctatccacctggggtatggcatctaccgacctgtctccctggggtcacatgctttgtttccattcttgtcctggctggaccagccact

SEQ ID NO: 422798 - DNA, 122 bp, Homo sapiens
tgaacccgggaggcagaggttgcagtgagccgagaccgtgccattgcactgcagcctgggcgacagagcgagtctccatttcaaaaagaaagaaagaaattgaagacaaattaaagtcacga

SEQ ID NO: 422799 - DNA, 122 bp, Homo sapiens
tcatctcactagggccagacagtgggcgcaggtcagtgggtgtgcgcaccgtgtgcgagccgaagcagggcgaggcattgcctcactcgggaagcgcaaggggtcagggagttccctttccc

SEQ ID NO: 422800 - DNA, 122 bp, Homo sapiens
cccctgggctctggagttctgtggtgcgcgtccctgacccatcagcacagtgggtattcacgcccctcgtggtcacgctgtggtgccaggccgctctgcctcaaggcaggtcctgttccctg

SEQ ID NO: 422801 - DNA, 122 bp, Homo sapiens
cggagacccacagagctattctgtgggcaccggccatgaagcacggcaaccaaactggctcgactgattcttttcttggagcctgctataattgtggccaacttggtcatacccaaaaaaac

SEQ ID NO: 422802 - DNA, 122 bp, Homo sapiens
tcttttgaatgggtgttttgctgtgagatttcatggagagggaacatctggagaacctaacgtagtcagtaagtttttgtattactgccaaaaaggccaagaaatgagtcaccgggaatttc

SEQ ID NO: 422803 - DNA, 122 bp, Homo sapiens
tccctgcgagaatggattgaggagtctgagctctggaaatcaaagtggctaagcgagcaccgttattgctgttaagaaaacctgcaatgcgcgagttgaaactttctaagtttggatctgct

SEQ ID NO: 422804 - DNA, 122 bp, Homo sapiens
gtattctgtctctgtggggatgtttcttcgccgggcggtacctccgaagtttctgcctcccggctgtgaggctaggaaggaagcggctggggtgagcggcagcggtgtctggctctcgcgct

SEQ ID NO: 422805 - DNA, 122 bp, Homo sapiens
ctgacaggtcccctggcatcttgtgggaggctgtattaaaacaagaggtcttagtgtctccgccaataactaaaggacacaggagagcaacattttaaaaagagatttgctgaagtctagga

SEQ ID NO: 422806 - DNA, 122 bp, Homo sapiens
ctgctgacctccttgttctccttggagggcagtgggagtgacggggggcagaaatcagctcggcagcatgcaagcagtagtggtcattcgccgtatgaatgggaccgctaaaaactgaacag

SEQ ID NO: 422807 - DNA, 122 bp, Homo sapiens
gtggtgtccccgttgccccttttctattcccttccctcgcacgcactgcagttgctgggccgctgtcccgacttaccggcaaaccctgagctctgatccctgcagccagcgccctgcacagc

SEQ ID NO: 422808 - DNA, 122 bp, Homo sapiens
ctgtctggaattctgtttcgagtcaggtgttgtaatgcactggaaattgatgcatgctgtcgcctgtgtctgttcctttagttgctgagtactgttgtctggatggaccacagtttgttgat

SEQ ID NO: 422809 - DNA, 122 bp, Homo sapiens
ggggcgcgcgccgggccgggcgcgaggagccgcgggagaaggggcgggggcgacgcgcgccgcctcctgttaaagggggaacagcgccagccgagccgatcgtgccccccacctccccgcct

SEQ ID NO: 422810 - DNA, 122 bp, Homo sapiens
tcctaatgtgcaaccagagcttagaactgctgccccagagaattgcttgaacccaggaggcggaggttgcagtgagctgagatcgcgccactatactccagcctgagtgagagagcgagact

SEQ ID NO: 422811 - DNA, 122 bp, Homo sapiens
agcatggttcctcacttccttcaggacttttctggaagcgcttctcagtgaggtcttcctcgatgatcaatcctatataaaatagcaacctccacctctgctggtattcaggggccagctca

SEQ ID NO: 422812 - DNA, 122 bp, Homo sapiens
cgccacatgattctgttgaacagcaatgattttacaccaccccgacatcagatggggccacggggtgagaatgagcaaagcaaaaacaagagtgcagggaagttctccaggtggcctgagac

SEQ ID NO: 422813 - DNA, 122 bp, Homo sapiens
aaaatatctcaggaatgagagcccaactggagtgagggctgcagtcagggcaggtgggagcgggaatagaatccaggcaagaacacagacccatagtgatcaggagcacggattccggagca

SEQ ID NO: 422814 - DNA, 122 bp, Homo sapiens
taatactcaaattgtctcatcttgagcaagagggatctttagttaatcttgtaagtttcccgctccagacatggaaatagccatttctttaaaaacttttgcctcttttagcaggaaatgat

SEQ ID NO: 422815 - DNA, 122 bp, Homo sapiens
taccactactcctcagcaaccatccccaggaacctcactttcaatatcacgaagaccatccgtcaggatgagtggcatgccctacgtaagtgcacctgagtctcagtggctgtgactgtgct

SEQ ID NO: 422816 - DNA, 122 bp, Homo sapiens
cagcgacgctggagttccagcttcttcaggcggttggggaaatggagggataggaagaggcgaagggaactcagttaacttccaacagggggtggggggaagtaaagaaaaaaagtggcagc

SEQ ID NO: 422817 - DNA, 122 bp, Homo sapiens
ggttccctttagaggcctccaactggttacaccttacgaaggactggcctgcgaccagtccgaggctgaagtggaaacttctgccttgttatcagaggagcgaggatgtggcctgtgtgccg

SEQ ID NO: 422818 - DNA, 122 bp, Homo sapiens
ggtgagggttggggaggaggcttcccatagagtggctggttggggcaacagaggcctgagcgtagaacagccttgagccctgccttgtgcctcctgcacagggaatgctggcaggataagga

SEQ ID NO: 422819 - DNA, 122 bp, Homo sapiens
ctgtcgatgtacttctcaaggatgtccgggctggttattgcccatcatggactaattatccggagatctgcatttcagaagcacagactggcttgaaaaggaaggtggaggacagtaccaga

SEQ ID NO: 422820 - DNA, 122 bp, Homo sapiens
attggctgggccctggcagccggaaatgtcaccagccacacagcgtggagctggctctcccgcggccaccacagacctgagcccaggaggctctgtgacaaggcacagacctaccacagaga

SEQ ID NO: 422821 - DNA, 122 bp, Homo sapiens
acagggaagagagagacgggccagggacagccaccatgtccttcccacactttggacacccgtaccgcggcgcttcccaggtaagaggcgcctctatgggggataggggacagactgggtgg

SEQ ID NO: 422822 - DNA, 122 bp, Homo sapiens
gttatttgttgccatttgtgcaaatgatcaattgtgcttctagaccaaatttcttccagccgaggctccggctaaatcactgggctttgtacaaagccctgctcaaaaaagtgtttggcatg

SEQ ID NO: 422823 - DNA, 122 bp, Homo sapiens
agtctgggctcagtcctgatcactggcctggtctgtctacattcatctgccccagatccacggctgaaacactgacctaaaccctcagactagatcctccgtgccagtaccttcactaggat

SEQ ID NO: 422824 - DNA, 122 bp, Homo sapiens
caccttgggaggcagaggcgggcgcatcccttgagatcacgactgggtgacacagtgagacgctatctcaaacaaacaaacaaacaaacaaacagttacacgggcagcatgcgaactcagcg

SEQ ID NO: 422825 - DNA, 122 bp, Homo sapiens
tttcacgcaggctggagtgcagtggcgcgatcttgactcactgcaacctccgctccactccgcgccaccgcacccaacccgggtgcaagtgattctcctgcctaagcctcccaagtagctgg

SEQ ID NO: 422826 - DNA, 122 bp, Homo sapiens
aggggatatctggggaaggcctctttccaggctcagagttggagagttgtacaaactctacgggtgggtggcccagctggagttgggcttagaggcagagggagaaaacaggaactagcctc

SEQ ID NO: 422827 - DNA, 122 bp, Homo sapiens
ctcccacctcaggcaccggtgcaacgtttctgcagccaggccgcctgtcaccccactgtgcgcgccccagcggccccggcccagagcgctccacactcggagctagccagctgggacagagc

SEQ ID NO: 422828 - DNA, 122 bp, Homo sapiens
aatgcgggggactgagttccctccctcgacttagcgtggtaatgacaggacccgaggaggcgcgctgcttccgggcagttgcccagcataacacccgcaccctacttgcacctaaatttctg

SEQ ID NO: 422829 - DNA, 122 bp, Homo sapiens
gccagctctcaggggccggggtgcggataggggacctgcagggggcctggtctgccttgtcgggagggcggatgcccaccaccctcggactatttgttcagccaatcagagcagccagccac

SEQ ID NO: 422830 - DNA, 122 bp, Homo sapiens
cccagggaggaggtaggggttccttccatagagatggtgaagaataagggaggtagtgatcgtctctgggatccagttagatctgcgtttgcaggcagaaagaggctggggcacatggagag

SEQ ID NO: 422831 - DNA, 122 bp, Homo sapiens
gtggtgggtgtcgtcaccccttttaccaaggaggaagctgaggttcagggacgtgaagcccgctaccccacacgacctctcagcccagaaccactgcctactggggactgagggagtagagg

SEQ ID NO: 422832 - DNA, 122 bp, Homo sapiens
cttgagagctatgccagaacccagttcagtacccagatattgtaaaggtccgataaatatcggccaaatttgttaaaaattcattgaagaacaggccaggcacagtagttcacgcctgtaat

SEQ ID NO: 422833 - DNA, 122 bp, Homo sapiens
cgccgggatccagggctcctgggtgagcgggcgctgggctggctggctgtcctggccccacgcctaccggtcttaccgtcccagggggagtggttggttttccaggggatctgccgaggaag

SEQ ID NO: 422834 - DNA, 122 bp, Homo sapiens
gcagcgtccccctcagaagtccaagcaacagccgcgcagcagccccctcagagggccaggcgccagccgtggggggtcccccgtcaaagcttctaggttctggtaacaccatctcttccctt

SEQ ID NO: 422835 - DNA, 122 bp, Homo sapiens
tgggcgcgtggtggggggcgcgcgatgcggagggggcggcggcgcagccaatccgagaggcggccggcgccccctcataccgccccgcggcctcgccgcctcctcccgctttcctcctccag

SEQ ID NO: 422836 - DNA, 122 bp, Homo sapiens
gtgggagctgcacggcgcaccatgggcacccaatgcccgcagtgcttgcaccgccacacgcgcctactcgctgctgagcgtcagctccgacctgccctcctgggggaggccccgacccaggg

SEQ ID NO: 422837 - DNA, 122 bp, Homo sapiens
ggtggcgagaggtggagtgggggcggagaccgacccagtcttcgcaactctatttgcatacggaggcgactcgcttccttcccgcccctccgccgcgctcttcttccttccttctccagtcc

SEQ ID NO: 422838 - DNA, 122 bp, Homo sapiens
tcacacatctccctctcttcttggttcctggaaccatcaggaaaaccttccctcagagaccgctgcctagtctggctttgaacccttcctcggaggtggccagtggccgtgataaaatctaa

SEQ ID NO: 422839 - DNA, 122 bp, Homo sapiens
gcctccctctttcattcttttcccgtgattccctctactgggactcctgaccctcctagtcgccagatcacaggcccaacgcatccctttccggagggatttaggaagtctcggcgttggtc

SEQ ID NO: 422840 - DNA, 122 bp, Homo sapiens
catctgggctcagctctctctgtccgcggggctgtctccctggtggtgccggccccagagcgcatggccacagccagcctggtccacccgacattgaagcctccctgtcataattggcaatt

SEQ ID NO: 422841 - DNA, 122 bp, Homo sapiens
ttcacaccagttttcatggccccacctgtgcactatccccggggagatggggaagagcaacgagtggttatctttgaacagactcagtatgacgtgccctcgctggccacccacagcgccta

SEQ ID NO: 422842 - DNA, 122 bp, Homo sapiens
aggtgtcactggacaacagaatcccctaaaaggacatctccctacaaaatcagaaaaaagcgcagccaatgcgcccccggcccaactccaaacagtcacaccccaaccccatctctgtgtaa

SEQ ID NO: 422843 - DNA, 122 bp, Homo sapiens
cccgaagggaaacgcaacattcttgaccgagctgaggacccctcatctctgatcatctcacgcggagagcccctggctgctggtctttgctcaggtctcacggcggccccattgatgtccga

SEQ ID NO: 422844 - DNA, 122 bp, Homo sapiens
ctgcacagcttgcagctccaaaaggaccccttccttccacttgaggtgagggaagaaccacgaggactttgtcttgaatcttggatgccaggtcacccacagcaggacaaagcatcagagtc

SEQ ID NO: 422845 - DNA, 122 bp, Homo sapiens
tcctgggacaccagcctggtcactttcctaggaccgctcaatgccttctcctgtcagtgtcgcaccccactgggttcatccttccactttcacacttggggcgcggggaagggctgaatgca

SEQ ID NO: 422846 - DNA, 122 bp, Homo sapiens
cccatctgggcctctgctaactttaagccaagtgaacagggcctggtggacaaaggccagcgtgcacatgaagggggccattagaggtgtggcctgggggagaggagaacccaggggtcccc

SEQ ID NO: 422847 - DNA, 122 bp, Homo sapiens
gggggtttggcagcctcctttcccatggtggtaatttgcagggtcatggctcaggggcaccgcagtctgcacctccgtccctggatccgtgcgtttgctgtgtggcctcgcagtaaatgctt

SEQ ID NO: 422848 - DNA, 122 bp, Homo sapiens
gcggccaatggcggggcgccgggcgcgggggctccggggctccgggccgcacaatggccgcgcgcgggtgcctctgtccccaattagggcctggcgccgccattgtcccctcacccgccccg

SEQ ID NO: 422849 - DNA, 122 bp, Homo sapiens
ctttagctagggagaataagtttaagagagctattgtagagacactgaccttcagcgcctcggctccagcgccatggcgccctccaggaagttcttcgttggggggaactggaagatgaacg

SEQ ID NO: 422850 - DNA, 122 bp, Homo sapiens
gcggaagatggctgcggccgaggtggcggacactcagctgatgcttggagtcgggctgatcggtgaggacgtaggcgccctgcctggaagcccgcaccctggttctgcctctgctccacctc

SEQ ID NO: 422851 - DNA, 122 bp, Homo sapiens
cccaggccgtagggcaccgggaaggcgaacttgtccttcttgagcagcgtcttgggcttgcgccgcggccggtacttgtagtcggggtgctccttcatgtgcatggcgcgtagacgcttggc

SEQ ID NO: 422852 - DNA, 122 bp, Homo sapiens
gaatcaagtctgtataagccaaagggagtttggcttatacagacttgtactctctgcttccgtagagacaccttgggactacttatcccagaagtagtccttgcttgtagggcttcactgag

SEQ ID NO: 422853 - DNA, 122 bp, Homo sapiens
gaggagcgcagaggagtcagaggtgagtgatgctggcgtacaccgggcggtcagccaccgcgccccggtctccggacccactgggagcgcggacccctatttgagcagaaaaagaaagggcg

SEQ ID NO: 422854 - DNA, 122 bp, Homo sapiens
tttagatctgaagatctgtgggaacccgcctaccaatgagattgttcgttagggacactacgtgatttggaggacaaacaggattattacaggttctgaccaaccctggctcaaaggacagc

SEQ ID NO: 422855 - DNA, 122 bp, Homo sapiens
aacagcataaaaggatggactcttttgtcagccaaatctcagtttgcacacaacacactccgtctcaaattcgctaggtgacccagggccagtcaaataacttttctaaaactctccgtaaa

SEQ ID NO: 422856 - DNA, 122 bp, Homo sapiens
ttggacttttctgtgattcttacagggcaggaacaaagctcaagacagctagtgggcttgcggggattgaacgggctgacagaggtgggaataccatttccttatatgtgaaacagggttta

SEQ ID NO: 422857 - DNA, 122 bp, Homo sapiens
ggggaggaagggatggtggggatgaacatttattgaggacttgctgtgggccaggccctgcgatcatcactttatgtgggctatctcatctggaatattaagatagaggcttagagtcatga

SEQ ID NO: 422858 - DNA, 122 bp, Homo sapiens
cagcttcagcgacagcacttaggagcgtcttgaaggctggtgccttcccttccacttcctcgtacctacacccacttccccacctatccaagtccgcgtgaagatgccactgtttcctgcca

SEQ ID NO: 422859 - DNA, 122 bp, Homo sapiens
ttagaagtattcgggaggcctacgttcaccgctaacatccttgttgtgaaggcctgctgacgtttgccattccaggaccaagtggacaatgagttaagctaggccaggagggggttcagctc

SEQ ID NO: 422860 - DNA, 122 bp, Homo sapiens
aagatttcctacatcccggatgacgaggtgagctgcccttcgccccctcagcgagcccagcgtggggaccactcttcctgggagcaaggccaagcccctgggggctcttctcaggccagaca

SEQ ID NO: 422861 - DNA, 122 bp, Homo sapiens
ctgctccctcaactctcaacatccagccgagcctcggagttgcgggtcgccgtagcgctgcgcaatggagatgagcctcccggggaacccggcccaagcctcaccctcacacaggaaagcag

SEQ ID NO: 422862 - DNA, 122 bp, Homo sapiens
cgcgactcccttcctggtttctccgagggcaagaggggtcctcccttgtcttaaaggtgccgcagccgccggcccccccacgcccagcccgccccccccagcctggcctcggaggccagaac

SEQ ID NO: 422863 - DNA, 122 bp, Homo sapiens
accgtctccacagtgaaaatcaccaggaatacgtactccacctgctcctgggggtgggaccggggggcgggtcgggaagtcggggagttatttgaaggcgaggtttgacgggggcgtgggga

SEQ ID NO: 422864 - DNA, 122 bp, Homo sapiens
tacccctttgtcttcacaaggaagcccagactctgtttgccagtggctgggtcctggggccgataacttcaagctaaacattcaatatcagtatggtaggtgaggaagattttctcagagtg

SEQ ID NO: 422865 - DNA, 122 bp, Homo sapiens
aggccatagagaaaaacgcacactgtgcctctccaccgggcctctggagacgaggctcctcggggatacaaacagtggggagaacatgagggacatcctgaccgtacactgcgtcctccttt

SEQ ID NO: 422866 - DNA, 122 bp, Homo sapiens
cattgcccggggtcggagccccacaacctgcccgtctgcatgctctcccagaggtgtgagcggcagagaaccaaagaagcaagccacacgcctatcgcatgccctgccagggggataagaga

SEQ ID NO: 422867 - DNA, 122 bp, Homo sapiens
tgaagtttaatcaaagttacaaacgttggtgggttttccgggacaaaggcccctcctcgacgcagggttcgcttgggcgacgcgtcgactctcggctccctgcagtcaaggcgcggcgcggc

SEQ ID NO: 422868 - DNA, 122 bp, Homo sapiens
ttggaattctttctgttgaagacttggtcccagcccagtggttctgggataagaagaccccgcagaggggcccagcgccgcgttcctacgagacacctgagctgcactgtgtttccacgggc

SEQ ID NO: 422869 - DNA, 122 bp, Homo sapiens
agaggaagacaagtaagcctgaagggatggactctcccgccagccacaggctgggacccacgcccgaggtccactcactgcttccctcaaggctgtgggcatttccatttcttctttctgca

SEQ ID NO: 422870 - DNA, 122 bp, Homo sapiens
gctgtgcagaagctttttaacttgatgtgaccccgtttgtccatttttgctttggtcgtccgtacttgtacagaaccttgtcttaaacatcacaaggaataaattcaaaatgtctttatatt

SEQ ID NO: 422871 - DNA, 122 bp, Homo sapiens
aggctgcctccctccttccccagtgctcccccagcttgcctgtctaaggcagcacagggccgtgctgccagccacccctagggtcagccccagccctgttctgagcctaggtgaggtgcctc

SEQ ID NO: 422872 - DNA, 122 bp, Homo sapiens
cctcagcaagcgctcagggcagttggcggcggcgggcgcggcccgcgccgactgcggcgccggccaggcagaggcagggccagctccgcccgctccccaccgcccgttcccggccgcctgaa

SEQ ID NO: 422873 - DNA, 122 bp, Homo sapiens
ggaaacagacaggacagagaatcttaaaatagagcagcaaatatccgcggctcgccgccccgggctctgtggcaccatcagcagcttgcgcaggacacagacgtcggctcacgcgccgcagc

SEQ ID NO: 422874 - DNA, 122 bp, Homo sapiens
gccaaccagggacagccagggttccctgggccctgtgcatgcgtggtgcggagacactttcgcccttggtgcgggacttctgcctcgtcctttgtgttatccttccacaacacaggtacctt

SEQ ID NO: 422875 - DNA, 122 bp, Homo sapiens
tggtgggctggagggggattctgtgatcttacatcccaggatgtcatgcataacctgaaacgagaggaagtaaaatgccatttgactccagtgctgggtctcctgtgccttctcattacagt

SEQ ID NO: 422876 - DNA, 122 bp, Homo sapiens
acgtctggaacttgtttaattgtgattgagtctgtcggtgacagtgagctctgaggagcccgctggtggacgctggtgtctgtctcagcccctcctctctgggctgggcacgcaggaggtga

SEQ ID NO: 422877 - DNA, 122 bp, Homo sapiens
ggcatttttatagttgcctccactgcaagaggacctgaccactgagatacatcttcctgtcgtgacctacttaagggaatttcattttagggaaagaattcaggaagattatatggtctgta

SEQ ID NO: 422878 - DNA, 122 bp, Homo sapiens
gacagcacttcagcagtacacttgggggccattttaaacaattaaatcactgataggctccgctccgctcagggcggccccagacacgggtttcccatggcagcaccacggcacgcccggcg

SEQ ID NO: 422879 - DNA, 122 bp, Homo sapiens
ggaggataccatggggggacagtgagatccagaaccactcggtgtgctaaggacttttcacgtcttatctcagaacaaccttatgaggtgggtaggaaacctaagaaggggtctgtgaaaaa

SEQ ID NO: 422880 - DNA, 122 bp, Homo sapiens
atcccactacccccactgtagcgcccactcctctgattcctggcccagcagcttgacctccggtcctcctctcaagcgtgcaagtcacacccccggaatccgtagatgtgcatctgtgcccc

SEQ ID NO: 422881 - DNA, 122 bp, Homo sapiens
attatgacatgcagaaaagtttttgttttgttcttaactgcaacggtatatatttaaatccgatttaaagtattatatgtcctgggcccaccttaccagttgtgctgtatagcagtgtaatg

SEQ ID NO: 422882 - DNA, 122 bp, Homo sapiens
aaagaacaaaattatgtgctttgcagcaacatggatgcggctggtggccattatcctaagcggattaactcaggaacagaaaaccaaataccacacattctcacttataagtgggaaccaaa

SEQ ID NO: 422883 - DNA, 122 bp, Homo sapiens
ctggccagacccctatttttaaaaatttacaaaatcaataaattaggtgttaagcaagtccgattgaaatacaaaggggaaagaataaaggcattaagcaactttgcagatttctaatcacg

SEQ ID NO: 422884 - DNA, 122 bp, Homo sapiens
ccaggagaggggccattggtcttgcagacacaaaggccccgatggtgtgcgggtggggcccgtcaaaatcattaagtgcggaagatgggagccggcagacttcagatgggaccagtgggttg

SEQ ID NO: 422885 - DNA, 122 bp, Homo sapiens
agcgtgaggccctcgatgaaggcgtctggatctccaaggccgggagataagcccgctaaccggcaccttagtgctccaggacgctgggctggcatgctgtccgtgtcggcaaatagtgccag

SEQ ID NO: 422886 - DNA, 122 bp, Homo sapiens
gtacaaggaggtttcaaacaattcgtcattgctcttgggaaacctatggatttgtgcgtgcgtgtgtgtgtgtggtattgtgtgtgtgcattcacattgcggacaagaaacagaaggggtta

SEQ ID NO: 422887 - DNA, 122 bp, Homo sapiens
ctggctgtagaaatccaagaagtcctgctatggggtcggaacctggaagccctgctttgccgctgaatgcctctggagatgggcactttcctcacttaacagacagacaactacggcccaga

SEQ ID NO: 422888 - DNA, 122 bp, Homo sapiens
cccttcccgggttgagacggtttttctgcctcaggcttccgagtagctgagattacagcccggctaatttttgtatttttagtagagacggggtttcaccactttggccaagctgatctcga

SEQ ID NO: 422889 - DNA, 122 bp, Homo sapiens
gatcgtgctttctcaggcaaaatgaggtcactttcttttctggtttccactgcaccccaacgctgcttaacctttccgccctccctcgcacagaatgctttgtcttaattttccttactgct

SEQ ID NO: 422890 - DNA, 122 bp, Homo sapiens
ggccagctccccccacggccccctgctcaggggcagcgagaaggcgggggcttcgcgccacgtgcgccccactcctcgggaaaccagccctgatctgccaccaaagggcagcccgaggtgga

SEQ ID NO: 422891 - DNA, 122 bp, Homo sapiens
gcggcatggggcggtaccgctcacagccagccggctcccgccgcggcttcccaccccgggcggggtcccacttgcccaaacgcccccgaacgcccccgtgcacagcctcagccggccgcgcc

SEQ ID NO: 422892 - DNA, 122 bp, Homo sapiens
aacgcgggggtgggcgcgctccgggtccctgtgtctgccttctcccgctctgcctgcgcccggcccctcgggcctgaccatgggggctgcacctcccacttgttgccagcgttttatttttc

SEQ ID NO: 422893 - DNA, 122 bp, Homo sapiens
gcgggcttggagcgcgtccacgggagtgggcctccctctgcgcgcctctgggaatgtttgcggtgcttaagtcagacccggattgctccaagcccagcttatcctccccagttctgccaggg

SEQ ID NO: 422894 - DNA, 122 bp, Homo sapiens
gtaatgtcgagccagcagctggatgagcatggtctgctctagccagcagctcatgttaagcgccacgggcagctgcggggtgacgtgtggcagtcggtgtgctgcacccggcggggccagaa

SEQ ID NO: 422895 - DNA, 122 bp, Homo sapiens
agccatgttgagagagccagactgcagcacgcttggatgagagacattgccatctttatccgccggggccccctccccgcccccgcgccctccctccgtcccgtccctcctccccagccccg

SEQ ID NO: 422896 - DNA, 122 bp, Homo sapiens
gccgcctccggagcagctggcgggcgggggactccgtgtgttctctcagggatggggggtcgctggggaccctgctgcatgactgtctgctgtgccagccagcctggcccggcggggctttg

SEQ ID NO: 422897 - DNA, 122 bp, Homo sapiens
tacatattgcatcatatccatgaaaaggctgctccctgggcttgcgcggtgggcagcctgcggggccgtatactgtggccctgggtgacatgaacttgaagcctcttttcctttgagagtct

SEQ ID NO: 422898 - DNA, 122 bp, Homo sapiens
tttctgaatgcccccaacataatcttccaaagtgctgaccacggaaaaactccgcactcacgactcagctcaggcctgctacctagctggtgctggaattgtggggaatcttgtgctccagc

SEQ ID NO: 422899 - DNA, 122 bp, Homo sapiens
gtcggcagcacagagactagaactatgatgatcctatcttcccagctacctgtcagaacacgtagtctggtaatccagcaactccattagcccagatatttattccacttactctgtgccag

SEQ ID NO: 422900 - DNA, 122 bp, Homo sapiens
ttgagaccttccggaggcggtggctggtctgaggacgacgcggaggacgtcactgcgggtcggtgcttccttacaggtgccttctggaccggggtccttggcacctcccctgctcctgccct

SEQ ID NO: 422901 - DNA, 122 bp, Homo sapiens
tggctagcggggtgtgcgttttagggaggcgggaagtgtggtcggggatcgggggtcgctcgttttaacccctttggatccggaccctcttcaaactgaagtgaggcattcccacccaccgc

SEQ ID NO: 422902 - DNA, 122 bp, Homo sapiens
cttgtcccacaggaagtccgtgatggcggcgacactgcggccggagtcccggcacccccgcggcgacgaaatgctgctccacccccccaacccgggaccctgggacctcccgccccgttccc

SEQ ID NO: 422903 - DNA, 122 bp, Homo sapiens
tatgctcagagcacgatgctgagctatatatgttaataacaaagctaacaaaaagaaagacggcacttggtcctatttcatttgccaactgggaaatgaaatcatcaacatgctttataagt

SEQ ID NO: 422904 - DNA, 122 bp, Homo sapiens
gccacctgcctggtttctggccggacaccggacttcccctggaagttgctcgagactgcgcgcccccagcaaaaaatcaggtcggttctccgagcccagtctagcgcttcccgacccgcaaa

SEQ ID NO: 422905 - DNA, 122 bp, Homo sapiens
gggagccgcaacagccgggcgccgggggccgccggagcgggactcggcgggcggaagaggcgaccgctccgggagccagcaggcccctcgctcaaccccacgctggcagccaccgcggccct

SEQ ID NO: 422906 - DNA, 122 bp, Homo sapiens
tccttaacctttgagctaatctcttcccctattcatcccaccctgccagtccttccatctcgaagcttccctcatggacgccctgctgaatgaccggcctgagttcgtgcgcttgctcattt

SEQ ID NO: 422907 - DNA, 122 bp, Homo sapiens
gaaatcccacaattctataactggtcttagacacaagaccagtaagagataggcgaaccccggccccgccccgcagtttgctccatgtgatacacagttcacactgagtgctagcagtaggg

SEQ ID NO: 422908 - DNA, 122 bp, Homo sapiens
gggcttggatagggatgctgccagctctggtgccggtgttgctacaggtgcgcaggatgtcggcagagccagaggcccacgctagcaaggctaggaaagacaggccaggtcttattccatct

SEQ ID NO: 422909 - DNA, 122 bp, Homo sapiens
cacccgcgtctagaacggcttggggacaggaaagcgcagccgcgcacgggtttcctctcacgttggcgcaccactccgttacgctcctgaccaggctgttctagctgcaggcggtgttctct

SEQ ID NO: 422910 - DNA, 122 bp, Homo sapiens
cctgcttgttctgtggacccctgtatctttccaggatgaggttttaacgcctcagtcctgcgccgtccttgtgctgtttttggcgtggctactcgcatttctgtacctgactttcgagtgcg

SEQ ID NO: 422911 - DNA, 122 bp, Homo sapiens
atacccgggtgcacatgttgagcagccgtcggggggcaggtctgcagctcagggagaggccgggctgggagctctcggcgtggaaagatgagactcgaagccactccattggatctgcctcc

SEQ ID NO: 422912 - DNA, 122 bp, Homo sapiens
gcgcccaacggaccaggctggggccgtgaggtaactgttgcagccagcggaggtgggaggcgacactgagtctccagtcccgagaggtgcccgagggaaaaggaggcggcagctaaactggt

SEQ ID NO: 422913 - DNA, 122 bp, Homo sapiens
gtcgttatggttaagcgagtgtgaatctccaaatggcccagggggccgtcataccgaacccgcagaaggcaggcaggcacggggccgcacaccgcagcagggatttgcagtgtccttaatgt

SEQ ID NO: 422914 - DNA, 122 bp, Homo sapiens
actgaacatatcttgtccctgttttccttctgatttcaggacatataatgatttgccttccgtaactgcagatgggtgggggccctcccctttcccttagcacccttcttaaattctttgct

SEQ ID NO: 422915 - DNA, 122 bp, Homo sapiens
cccacctcctgagtcctctcggcacccagcaaggtaggcactctttgcgtctggttttagcggtggggacgcctgggcgtggagagggggtgcggcgtgtcgggtctcatagcttagcggcc

SEQ ID NO: 422916 - DNA, 122 bp, Homo sapiens
cctagaaagtaccaagtctgtagttgcaaggtgattacacagcatttgcatttgggcagccgggtggaaggatgattcagaatgagatacttgcttttgttcgcaaaacagatgcgatgtgc

SEQ ID NO: 422917 - DNA, 122 bp, Homo sapiens
ttcttcacgaagcgctcactcgcaccctttctctctctctctctctctctctaacacgcacgcacactcccagttgttcacactcgggtcctctccagcccgacgttctcctggcacccacc

SEQ ID NO: 422918 - DNA, 122 bp, Homo sapiens
cccgtggacctccacgtggtaggtggtgccgggcctgaggtcgggcaggctgacggtgcgcgtggtgcccggcacagtcagctcaccgccggggccctctgcaggcggctgaggccgccagc

SEQ ID NO: 422919 - DNA, 122 bp, Homo sapiens
tggcctttcccaggtaatgggaggaagtagggctgctggggtggggggtgctcggggagtcggtggagccccctggcaggtggatctcacccgggagccagggatctccccactggcagcct

SEQ ID NO: 422920 - DNA, 122 bp, Homo sapiens
tgacccagagaagggaggcctcgggagaaggggtgctcgtaagccaacaccagcgtgccgcggcctgcacaccctgctgacatcccaggcacgagggtgtcgtggatgtggccacacatagg

SEQ ID NO: 422921 - DNA, 122 bp, Homo sapiens
accagggcagcgtaaactacagttcccagagagcgccgcgtcgggagcggagccttttctcgctaacaccgctcgccctctccgagtcagttccgcggtagaggtgacctgactctctgagg

SEQ ID NO: 422922 - DNA, 122 bp, Homo sapiens
taaaccagtgccgacggccctgcggttgcgcgaggccatcctagggttcgggtgcagggacggctttggggggcacttttctgaccctgcgcttcttcgggacccagcctttgtccccatca

SEQ ID NO: 422923 - DNA, 122 bp, Homo sapiens
cctgacctcaggcaagctgcccacctctgcagggtggatcacctgaggtcagggcagagtcgctggaaacagtccatgacacctggcctgagctgtttcttaaaaatatatcagaagggccg

SEQ ID NO: 422924 - DNA, 122 bp, Homo sapiens
ctttagacatgtctaaggaatggaagagggctgagaaacctgctcctccagctgggggcccgccctgagccctgggaagctgcggttaatctttaagccagccttgcaaacaagtgcggcca

SEQ ID NO: 422925 - DNA, 122 bp, Homo sapiens
ccccccacgcctgttctccacagggcagattttattaatatatttctaacattggggcctcgtttcagtcttcaagttttttcttttttagcgcaaactagacgcgctctgagagccaaaat

SEQ ID NO: 422926 - DNA, 122 bp, Homo sapiens
atttccctcatggcagagatcgtaacgaatttatctatccactttctcacagcgccacaccgttccttacgcacagcaggaatgcaatcagtatttgtcgatggttccccaaactaacagga

SEQ ID NO: 422927 - DNA, 122 bp, Homo sapiens
accgcaggccccgttacggagcttggagctcagtgtctgcctgggatacatgaggggccccgagggctcacatgtcccccagcctgggaagtcactcagccgggcctcggtggggctcagca

SEQ ID NO: 422928 - DNA, 122 bp, Homo sapiens
aaaattttcatgggattcctccatgggtcttcaagtactttctactaactcactctattacgttgtagtcacctgagaccctttttgagtaaaggatgagtaaagaaaaataaccccccatc

SEQ ID NO: 422929 - DNA, 122 bp, Homo sapiens
ctaaaagactggacgatttgcctaaggagatgtcttagcaaagagttgaaggtgctgtctcgttttctctagcagtacatctatagagtggggagataaattaaaggaaggattgttaacca

SEQ ID NO: 422930 - DNA, 122 bp, Homo sapiens
attagctattcgtctgtttgccttcctctctaattgactatgaactctttgggggcaggacggtgtcttattcaactttgtatgaccagcccttgatagagaagcaagcacaaagcagttgc

SEQ ID NO: 422931 - DNA, 122 bp, Homo sapiens
agcgcctgcccagacgccctccgtagttttgcaacttgtggaagcactctggagagaggccgagaggattcctcgacaggaaatttgggaattctctgggtgatgcatcagtgattgcaatt

SEQ ID NO: 422932 - DNA, 122 bp, Homo sapiens
aacttactagactttcccgaattaattgctcccacccgggagggatctgggtaggccctccgggtctcaggaacacgaacagcaacattatttaggaattgagaaagcccaggggagcagat

SEQ ID NO: 422933 - DNA, 122 bp, Homo sapiens
gtgcacagtgggtgcctgctgaacgtggcactgtgctgagtgaggtgggctcagcaattgcgctagcacagggcgctcgggctgagacccctgtgggagaaacagaggcggggaggggcctt

SEQ ID NO: 422934 - DNA, 122 bp, Homo sapiens
gccagcagtgctggtctctaagacggttgcccagcaaggatacgctgaaccccggcgtcacgtgacgatcgcggggctgcgtacttgccagcatttcaagggcagagggcggcgggacgtga

SEQ ID NO: 422935 - DNA, 122 bp, Homo sapiens
atcttcagatagaattcagcacaaattcaaaggtggctccccagaccctatctgtcacatcgccctctcatctattagtatctgaagtcaccttgatcatttatttgtttacttgattattg

SEQ ID NO: 422936 - DNA, 122 bp, Homo sapiens
tctatctcatcttcagcttcttccagatcaatgatctttatggcaaccactttctgagtccgattgtcaatgcctttgaacacctctccaaaggagcccttcccaattttctctagttttgt

SEQ ID NO: 422937 - DNA, 122 bp, Homo sapiens
tgacagatgaggatgcagccgtgagaagttaaatggcccaccctgaaccctactgctgagcggggcaggctattcctgggactctattgaggcccactgacatggtcctggtttgcattgtc

SEQ ID NO: 422938 - DNA, 122 bp, Homo sapiens
gaggctgggcctctaggagctgacggcacagagcagtgaagacgatagctggatctctggcgtcagcgagagacaatgggcccgccaaagccggaagccggaaaccgtcctgttcgctacag

SEQ ID NO: 422939 - DNA, 122 bp, Homo sapiens
ctgagccaagaggactctggccctagtatccacgtgaccagagcatcctcaagcctgcctcgtcagcccctgcactgtcccccaaaggtccttgcatttgccagcccaagactgtcaggggc

SEQ ID NO: 422940 - DNA, 122 bp, Homo sapiens
atttccagcaaacacccaagtgacgtgccagcatccctgttctcatgccatctctgtgtgcgaaaccctaactcactcgtggccggtgctcctacctccttgtcactctgcagagaatgcag

SEQ ID NO: 422941 - DNA, 122 bp, Homo sapiens
acgcgcgccgagacccgctcctgcagtattagttcttgcagctggtggtggcggctgaggcggcatggatctcagcgagctggagagagacaatacaggccgctgtcgcctgagttcgcctg

SEQ ID NO: 422942 - DNA, 122 bp, Homo sapiens
gagtccccccaggcgccccgcagcctggcctcgggactgcccccaccgacagtgcgtgcgcggggagaggtcacttaaaactgcattttcgaacattagtgccccggacccgcacctttttt

SEQ ID NO: 422943 - DNA, 122 bp, Homo sapiens
ttatcactggactttgtctatacttgggattcttaacatgttgtattttggttaagtatgcgtattcatgttttttattagattttgagtgctttttagtactttgttttacttgcttatgt

SEQ ID NO: 422944 - DNA, 122 bp, Homo sapiens
tccctgactgctgtgactcaccaccaccccaggcctctgaggaccagtccatgtagctctcggaaccactgaaagctaccccttgtccttgaggacacctggaaccccagccccactgaccc

SEQ ID NO: 422945 - DNA, 122 bp, Homo sapiens
cctctctttacctctcagcctcctcgggcacatgttttgtttgtagtgtgtggttgtcctcggcgggaacagtggcctccgagggccacatgctcccatggcaaaaccggagcccctgctga

SEQ ID NO: 422946 - DNA, 122 bp, Homo sapiens
agaggcctccttcagatttgttcttgtcctcactgaccgccgagttatgtaggtgcagggcgagctctccccctgcgaatgagcacctctcacaggattctgtctgtgttctctcgccgcgt

SEQ ID NO: 422947 - DNA, 122 bp, Homo sapiens
aactgacctccaccagtcctgcctcaggtcgttaatggtaaaaattctgtatgtcagccgcgttttgaggcctgtccaaggtgcttgtgagtcccacatgttggagtcgcagggcttttcag

SEQ ID NO: 422948 - DNA, 122 bp, Homo sapiens
tgggaggcctagctgggaggactgcttgagcccaacagttggacagcagcctgggcaaaacggcaagaccccatcactacaaaaaataaaaatcagccaggtgtggagggcacctgaattcc

SEQ ID NO: 422949 - DNA, 122 bp, Homo sapiens
ggtggggaagagtagatactgtgtagaaggggcactaaactctatcagagcacttttcttcgaactctgtaggacaggaggcttaatctatggggacagggaaaataaaacacttttgctat

SEQ ID NO: 422950 - DNA, 122 bp, Homo sapiens
tgtgggtagcgccggggctcaccaggcggaggcggggcccggcgtcaagctccgcctccgcgccccattggctggcatcacctccgcgcgcctgactgacagcgcgcataggggcggggcgc

SEQ ID NO: 422951 - DNA, 122 bp, Homo sapiens
gcttgtcagcaattagcatctttttaaaaccccaactctaacatttgggaacattccccccgtgaagcccagggcctggcactttcccaaggacagatattgagctcacgttaaaggcccac

SEQ ID NO: 422952 - DNA, 122 bp, Homo sapiens
acattcattataccagcagtagtctctctgtgatcacactcattagactgtttactaccacgaattctgggagaaatggcctgggacattaaaagaaacaaacaagctaagagggctgtcta

SEQ ID NO: 422953 - DNA, 122 bp, Homo sapiens
gagcttcaaagaggaaccaggagttacgggaggaacatgaaagtggacaaggagcgtgaccgttgaagcacagcatcacagggaggggtttaggactccagatgactgcgggcagactggga

SEQ ID NO: 422954 - DNA, 122 bp, Homo sapiens
cgtgagcgccccgcgcggagcgagctcgggttcccctcggaatgtccccggggcgcccggcgcgctgaccccgaagccgcctccgccttcggcgcctgctgcctccctcggccaggcttgtt

SEQ ID NO: 422955 - DNA, 122 bp, Homo sapiens
ctgcaggatggcacaggttccgcagccagagggtgggcgttcaaatcccggcttaatacacgcgtctgctcaacagctgtgagacctgccaagccacttaacctctctgtgcccatttcctt

SEQ ID NO: 422956 - DNA, 122 bp, Homo sapiens
aaatgtagtgttaacggaagagtttaggtcctgcctcactgtccgggaaacgcgtgccctcgggggagcctttgccaagccggtttttcccgaaggtgaccagatgctcctgggccactgcc

SEQ ID NO: 422957 - DNA, 122 bp, Homo sapiens
tcaccgcgagggtctgcggcttcattcttgaagtcagtgagaccaagaacccaccaattccggacacaaagtgaccaaatagggtctcatgtggtttattcctagaggccgacggatcccag

SEQ ID NO: 422958 - DNA, 122 bp, Homo sapiens
caacctcagaaagtctcaggcacgaagaactgtcctcgggtggagcatgggacctttattcgttaagacatcaggctccagatatgaactttcagcagaagcgcttgccgggagcaaaggga

SEQ ID NO: 422959 - DNA, 122 bp, Homo sapiens
ctcccgcggcctcccaattcttgcctaatttggaagagagccgcagcccttctgctgatgcgcgcgcgctggcgcctttttaaggcaactggcggagtggcggctccaccagagcctgggag

SEQ ID NO: 422960 - DNA, 122 bp, Homo sapiens
gcctggcggccggctggactgcagatgtctcttccaggcgccctggagcctcgcagctgccgccacctccaactcaccccatcccccagtaccggggctggggcccgcccgaccagcattta

SEQ ID NO: 422961 - DNA, 122 bp, Homo sapiens
tactgcggccccggcgtgggtggggcgcttgcaggtccctccccgcgcaagtgctcgccccgcccccggggccgcacccacagccccggctaccccggagaagcctgacttgagaacccttt

SEQ ID NO: 422962 - DNA, 122 bp, Homo sapiens
caggcttgtgaaaggctcagatttgacttggcataagctcagccgtgcaattattcccaccgggacactgagttctctttcccggccaaaggacttggcagagcccaaacctcatggggagg

SEQ ID NO: 422963 - DNA, 122 bp, Homo sapiens
cagccctcctcccacctgtgtctcaggaggtcctgcagttcatcatcttgtctgcctccacgtccatacccagactgcccaagtgaggccatggctcccaaactgaccccaatattatcata

SEQ ID NO: 422964 - DNA, 122 bp, Homo sapiens
acgttctctctttgtttcaggcctcatccaaagagtgttgtggcacaggtgcagcactggcggtgggagggaggggaggactggggcgagaggggcatgaggctctcatcagctctctttag

SEQ ID NO: 422965 - DNA, 122 bp, Homo sapiens
cttccctggggccctacaagcactgagactgggactggggatctgagtatgtggccccaccgtgggggtccaggcagggtggccaggttgagcaactaaaaattcaggaagtgcagttcaat

SEQ ID NO: 422966 - DNA, 122 bp, Homo sapiens
cagatttgggggatcagataacatattaactgcacttatcactgtgaattacaaagccttcgaaaaatgcaattacccatttagataaacaaagacatgcactttttggggcaaataacctt

SEQ ID NO: 422967 - DNA, 122 bp, Homo sapiens
cgctctgaggagctgccggggacacactgaccacactccacgttatgggcccagagtccgcgctctgagaagctgccagggacacactgaccacactccacgttatgggcccagagtccgcg

SEQ ID NO: 422968 - DNA, 122 bp, Homo sapiens
agcgccagagtgaccaggcaacctccccagcctccaccctctagcccgggctcccacctccgtcctccggcccctcgagtcacgtcgtcctactaaggagttgggccgcagcgccccgcgcc

SEQ ID NO: 422969 - DNA, 122 bp, Homo sapiens
catggcgccgtcggggctggctggggccgggctggggctgggtccgggtccgaggaggtccgcagcagccgggcttcctccctgctccccctcgcgctggcccgagctccttaagtgcggcc

SEQ ID NO: 422970 - DNA, 122 bp, Homo sapiens
gggccatgagtggccctaccatggctcttccccagcatctcagggagtatctacctcgtgcgaggaccaggcttggacaccaggtcccgattccattgtcatcttggtggaatcactttgct

SEQ ID NO: 422971 - DNA, 122 bp, Homo sapiens
caaatcttactctactcatctcattctcattaattttgggaaatcatcagaagatgtgttcgttgagtaagagattaaaagaaataagctttttgacccctgccaacaccccatgcccaggg

SEQ ID NO: 422972 - DNA, 122 bp, Homo sapiens
aagggggaagccttatttccccagaagtatcgcttttactgcaagctgtttccagctgcacggaatgccctccatctcctcagacattgagccctatggtgaattctgagttgcttgtgtga

SEQ ID NO: 422973 - DNA, 122 bp, Homo sapiens
tgtggggcccaagcttatcaccacaaccccttatcctggcctgggctgaccaaacagtgccgcaagaggcaactggaatcagcatgaacctcccttctctttcggccactgctgtattttta

SEQ ID NO: 422974 - DNA, 122 bp, Homo sapiens
ttgattttaaaataataataataattttttcaccctagttcggttgggtgctccatcttacggagccccaaacttattttgagaggccgccaccgtgttatgggcgtgcgcaactgcctcta

SEQ ID NO: 422975 - DNA, 122 bp, Homo sapiens
ggaacttagcatctagtagggaagacttaaaatggaatgaacaataatgataatgtgtgacgattgatttgatgagaagtacatgataccatgaacaggtgcatccaacccagtttgcaggg

SEQ ID NO: 422976 - DNA, 122 bp, Homo sapiens
acacctcttatctctgatctctctgtaatctccttttctgtttctaatctcccttattggcgcatggtagtaacccaaagcgtgtgaaccgtcaccgtcgctgccgtgtgcgcgctgtggct

SEQ ID NO: 422977 - DNA, 122 bp, Homo sapiens
tgggctttaatcaaaagaagccactgtctgtttgattgatccaaaaaagtcgggaaggaacgcctcattgggggccagcgaggctttatttacacttttttcagagcaaaaatacatatatg

SEQ ID NO: 422978 - DNA, 122 bp, Homo sapiens
atgccagctgtcaactcagggttgggaaggaattactcttgcagcctcccagcattcactcgagggcctttcacatagtaggtactcaagacaaatccgttcacttgagtttatggagcatt

SEQ ID NO: 422979 - DNA, 122 bp, Homo sapiens
ttgggaaaaggccttttctcctggcgcctgttcaaaccgccacacttcaggccaatccttcggcctgaccattcccggatcttgttatgccagcacagcacattcgagggctctggggggca

SEQ ID NO: 422980 - DNA, 122 bp, Homo sapiens
atgccagtggaagagaaagtcagggctgattcctgaccgccacttccccgctctgagcaccgcatatagggatctgctctgagacctttatctttaccttcatacagagcttctccttcctt

SEQ ID NO: 422981 - DNA, 122 bp, Homo sapiens
ttatacaaacatacatgttccttgcactttgattaaatggaactgattcttgatccttatcgattatgtgcttctattgtttttttaacagctttattgagatataatttatatgttatata

SEQ ID NO: 422982 - DNA, 122 bp, Homo sapiens
ctgacaggcaccagccgcaggagtggtgggttccagccgtgccagcaaagagggcatcgccgtctgggggcaggcgggcagcacgtgctcccagtagggtgcctggggcggaaagcacagcc

SEQ ID NO: 422983 - DNA, 122 bp, Homo sapiens
gcggcccgaacccctgggtcacccccgaattacaaacaaaaaccttaacgccattgctcgcgggttagaaggcagctgtgcgtgctcaggaaaagaagccacgcacaagagaccgcacgcgg

SEQ ID NO: 422984 - DNA, 122 bp, Homo sapiens
gtctaggtttgggggctgtgtctttaaggctgaaacatcagcagacaacctctgctgggccgtcttcaggggagggggaggggggctggtcagcccattagcagcagagctggcgccaggca

SEQ ID NO: 422985 - DNA, 122 bp, Homo sapiens
cccgctaggacccaaaatgcggactggtgggccgcccatcaagggttgcccgcggtagggcgggggctcccgtgagctgctcccaaaccccactcgcaggatgctgccctgacgcccagggc

SEQ ID NO: 422986 - DNA, 122 bp, Homo sapiens
atcatgatctcctaaatagtgtctgtaaataaagtcgcctctaatggcaggcgcgggaggcgaggctgaggacctctccgcgtttgtatcgcggcgattggcaacataactgccttatttac

SEQ ID NO: 422987 - DNA, 122 bp, Homo sapiens
ttaagagcattaccttctgtccagaggctctaaaggactacacagctcatttcacctagacgctccttccccttttctcttcctgacagccccaaaaatttcactttcatttctcaggcagt

SEQ ID NO: 422988 - DNA, 122 bp, Homo sapiens
cccaacccctggaccctggtccagcccccagcctgccctgactcaccagaccccggggggcggcacagggagcacaggtacccccacatgccacttgaacccacccggctgctgcctcggaa

SEQ ID NO: 422989 - DNA, 122 bp, Homo sapiens
gggttcgaccaaggggtgtggcgagcccggtttcctaggagacggcccgcgggttgctctcggactgagagcgcgaggcttcgggactgagccctagctgctgcgctggccgaagttttctc

SEQ ID NO: 422990 - DNA, 122 bp, Homo sapiens
agccggagccgcggctggtggggcctgggaagtgcagcgtctccctgacgcttggaggagcggcgtaaagttccgggacagcgattggtgtagagcgcggtcactcaggcccagaaagtgct

SEQ ID NO: 422991 - DNA, 122 bp, Homo sapiens
tgtttgtatttttagttaagatgaggtttcacaagttagctgggctagtcttgaactcctcgcctcaagtgatccacctgcctcggcctcccaaactgctgggattacaggcatgagccact

SEQ ID NO: 422992 - DNA, 122 bp, Homo sapiens
acagtatttttcagattgaggctgtggaagggcattgaagactggtgtttagccacctaccgtgttttaatgtaggtggcagcttgggtgcttcaaaatcttgttcctttcgtatatatttc

SEQ ID NO: 422993 - DNA, 122 bp, Homo sapiens
taaggtgggagaggaaaccacataaaactggagaatgcgggcatcgatcccgctacctctcgcatgctaagcgagcgctctaccatttgagctaattccccgtgtgggaaaacgtctcttat

SEQ ID NO: 422994 - DNA, 122 bp, Homo sapiens
tgaaaccctgaggtgctgtcttgccttatgatattaaaaaaagacacgatgcagctagtgcggagttttattggctacaaaatagatgcaaaatgatgagaatctgaaggctgcagtaggaa

SEQ ID NO: 422995 - DNA, 122 bp, Homo sapiens
acgaatgaacggcgctgcagagccctctccaggcggaatgaaagtgcaaacccagcgtttcgggcggcagagtggcgggggccacctggcgcggccgcgcggccagggtccggtttcgcttc

SEQ ID NO: 422996 - DNA, 122 bp, Homo sapiens
aaaatagcccatgatgtcaccccaaggccttcccattggctcgcgtcgctctcaggggggcgggcccgcccgtcaccatggagactccaccctagaagattcttctctgggcccgcggaggc

SEQ ID NO: 422997 - DNA, 122 bp, Homo sapiens
gcccgcgaggaccagctgcagcgcaaggcggtggtcctggagtacttcacccgccacaagcgcaaggagaagaagaagaaagccaaaggcctctctgccaggcaaaggagggagctgcggct

SEQ ID NO: 422998 - DNA, 122 bp, Homo sapiens
aagccaatcgcagcgcgcggacccgactgtgggcagcgagttcaaagcaaactttgccagcgccgcccggagcgcagctcccagggcccggcggggccgggcgggggcgcgccgtgcccaga

SEQ ID NO: 422999 - DNA, 122 bp, Homo sapiens
gtccggatgccgcggcgcttggcaggtggggagagagggattgtggatgtcaggagcgcgcgtttgcaagaaaaaggaattgatgcagtagctgacaccttctgtcccccgccacctccgcc

SEQ ID NO: 423000 - DNA, 122 bp, Homo sapiens
cacatggggctgagcaaggcagggtctccgtgtcccccggtgcgacggggtctccaaccacgtgtgtggttgtttcagcgtgtgtgtccctgagtggaatggctgtagctgggcgtaggtcc

SEQ ID NO: 423001 - DNA, 122 bp, Homo sapiens
cgccgggtgcagacagtggtgctgtatgggacagtgggcacaggcaagagcacgctggtgcgcaagatggttctggactggtgttatgggcggctgccggccttcgagctgctcatcccctt

SEQ ID NO: 423002 - DNA, 122 bp, Homo sapiens
cgcattccgcggggaagtgtaggctttaggcctcttagggcctcagtttccccgtctgttcgaagactgcggaggcaccaaggagtgcgggccccccctgtgctggagttggaggcttccac

SEQ ID NO: 423003 - DNA, 122 bp, Homo sapiens
acggggacagccccagatggctccttggtctggggacaaaggctgtgctgtgcctggccccgggctggcctcaggctggtcatactgagcccttctgtccccacttgggggtgaggggtaga

SEQ ID NO: 423004 - DNA, 122 bp, Homo sapiens
tttggttccctggatgctgctctttctaaaacagtgtctttggctgggcacagtggctcacgcctgtaatcctagcacttttggaggccaaggcaagtggattgcttgaacctggggggaca

SEQ ID NO: 423005 - DNA, 122 bp, Homo sapiens
ctcccactcgctccccgcccggcgctagaggagcgagttcggactcggaccccaaggcctcgagtcccgctgccttcctaagccgagcccgggctacctcggtcgtccccagcaggcttggc

SEQ ID NO: 423006 - DNA, 122 bp, Homo sapiens
cggacacagagccggagctccaggggacgcagcccgacgcgagaacgcaccagcagcccccgctcgaggtggggtctcccggctgtcagaaaccccacaaagtctactttgcggcgccgcgc

SEQ ID NO: 423007 - DNA, 122 bp, Homo sapiens
ggacgactctagcggacaggagttgaggggcggggctagacgggagggaggggttaagtgcgcgcgccgctagacttggacagccatcaggaaaagcgcctccaggtgtagagaggtgggct

SEQ ID NO: 423008 - DNA, 122 bp, Homo sapiens
tgcaaattaacataacaacgagttaacgtttgtgtgaggcagaataatggcccctaaagacgtctctactacatcctaatctctagaacctgtatgttacattatgtggccaaaaggacttt

SEQ ID NO: 423009 - DNA, 122 bp, Homo sapiens
tgcggctgacacctctctctgtctccccctgcagcctgtaactgcaacctgcatgcccggcgctgccgcttcaacatggagctctacaagctttcggggcgcaagagcggaggtgtctgcct

SEQ ID NO: 423010 - DNA, 122 bp, Homo sapiens
ggctgcagctggggcttcagaacccagctgagaataaaaccgggatagagtggagcaccacgctgccattttgctccctggggctgtacacggtggggcaggctttgtcctagatcccaaaa

SEQ ID NO: 423011 - DNA, 122 bp, Homo sapiens
atggttggggggagtctgaagggggtgtgatcccagggagggtggcctggcttaccttgccgaaccagcgggagagccatatctgcttcattgtcatgtgatcagggagaacttcattgtca

SEQ ID NO: 423012 - DNA, 122 bp, Homo sapiens
ccacaggcaatacataaaagaatgagtgggctgtgttccaataaaactttatttataaaacgaaaagggggccggacatggcctgtgagcagacaaccggagctcatgcctgtccccttcag

SEQ ID NO: 423013 - DNA, 122 bp, Homo sapiens
gtggttgtcaacattattgctattattattgtcactatttcctcatttctttgaggtcctcgaactctaattgtctacatctcgccatccacgagttattgccattgtcttctgttattctt

SEQ ID NO: 423014 - DNA, 122 bp, Homo sapiens
tgctgctccaagcaagaccagcccttgtagaagggcaagtgcagtcagtcccctaggaaacgggactggggagtgatcgtttcaatgagagataaatcaaactgatgctaaacatgaacaat

SEQ ID NO: 423015 - DNA, 122 bp, Homo sapiens
gagcttcacaaagctgccacactctgtgggccgacgccgctgccacgctctgtgggccgacgccgctgccacacactgtgggccgacgctgctgccacgctctgtgggttgacgctgctgcc

SEQ ID NO: 423016 - DNA, 122 bp, Homo sapiens
agaaagctccaaagtctttgagattagccacgctgactgctattttcttcatacatcagtcgtcccacactctttactccctaaacacaacaggagtttagagcactgctttaattcagcag

SEQ ID NO: 423017 - DNA, 122 bp, Homo sapiens
atattaattgatttcaactggcattggcttacagtatccttacatgaaccaccgtagctccgagtcttgcaagattcatttccttatcacacttcaggttgattttatgggagtgatctcat

SEQ ID NO: 423018 - DNA, 122 bp, Homo sapiens
tccaggcctccctgtgtccacatcaggtctcccggcttttcacaacagtgaccttgacagcgcccagagtccgcggcttccatccagtcccctcttcccctgcgaggccgagagggtgcaga

SEQ ID NO: 423019 - DNA, 122 bp, Homo sapiens
cccacctcctcctgctcttctgggctttaccatccacgttagcccttgtgccctaacccccgatctttagattcagcacctaggtggtggaacctcatgaagtagaaaggccagggctatag

SEQ ID NO: 423020 - DNA, 122 bp, Homo sapiens
accctggaaacagcttagctccaccccttcaggatcgccaaaggagcaaagactctgccccgcccatcttaaaagagaaaaattgacgcatgcgcgatgggcatacaagcctaaagctaagc

SEQ ID NO: 423021 - DNA, 122 bp, Homo sapiens
gtggacggggacagcccgtgtgtgatggaaggacatctccgtggacggggacagcttgtgcgtggatggaaggacatctccgtggacggggacagcctgtgtgtgatggaaggacatctccg

SEQ ID NO: 423022 - DNA, 122 bp, Homo sapiens
ctctcctttatccacttttttgcttgtctccctaaaccatctgtgatgctagctgagactcgaatttacataagagccagaaaccatcaacccaacctcttcacacactaacgtctacattc

SEQ ID NO: 423023 - DNA, 122 bp, Homo sapiens
actactgggccaggtgggctcagggagtggaggtgacggcggcctgccgagggctagagccggggagagaaggcgcttcctgcctggttcctttgttagtctgtggaccagcctttctgcac

SEQ ID NO: 423024 - DNA, 122 bp, Homo sapiens
cgccgccgggggcggggccgcgggccgggcgcggagggcgcgcccagggtgcggcgcccgcgtggcctgtcgccccggctgttcggtaccccagcacaggttcagggaaaagggtgccacca

SEQ ID NO: 423025 - DNA, 122 bp, Homo sapiens
gcagctaacggctctgctcagaatttctcccgacagaggccggagtgttcaagagcttggcgatacagaaatttctgctggtgttggggcgggtgcgggaactgaagacgggcgagtgcgag

SEQ ID NO: 423026 - DNA, 122 bp, Homo sapiens
gagacccaggcctcagcgccggtgtcccccggcggtgagctccgagccgttaggcggccccgggttctccggcccagggcccctgcccccaggcccccaccccagaaggtcgggccagactt

SEQ ID NO: 423027 - DNA, 122 bp, Homo sapiens
tttcctacggaaccctcgtaggcaaatcagtcaaagcccgtcccggttctggtgtctccccgggttactcgtggctgaggtctcccgctgggtgacaaagttttcttccttttgcaaagcta

SEQ ID NO: 423028 - DNA, 122 bp, Homo sapiens
gctgcgtatgcttggtccagccacgaagacataatcctctgcgggcagcatcacgtggagcgagggtcaagtcctctgcctggtgcgcctttatctgcacaagggaagaaggaatcctgagt

SEQ ID NO: 423029 - DNA, 122 bp, Homo sapiens
ttccctcatccgggaactcggattgctcatcccaccaatggctgccacccgccctcgggacgcgtccttgagacttcagccaatgagcaagcgaagaaaagggtggaggggcgggcgcttct

SEQ ID NO: 423030 - DNA, 122 bp, Homo sapiens
gacgaatacagtgtgggccgtgagagcgatgacgacccacgctgcaccgcagctgagccgcgagggggaagtcagtcactgaggacagcatgccgtgtgactccatccaggagaaacgtctg

SEQ ID NO: 423031 - DNA, 122 bp, Homo sapiens
gcgggaggtcactttcctggaggcctcccgctttgcccaggagaatggtgagggctgtgtcgtggaccaggtggtggtgggggtggacagtccacagggaccatgggtttactggctctcag

SEQ ID NO: 423032 - DNA, 122 bp, Homo sapiens
ataggctcccgctgcctggcgctctgcggctggggagtaaatttctccctgtcatcaggtcgcggggagaggaggaggaggaggagtttgttaatgttcagtttgttcagcgggatcgatgt

SEQ ID NO: 423033 - DNA, 122 bp, Homo sapiens
taatttaatgaattcgcaattgaggatatgagtcaggaggaattcaggagattggggttacgaaacttctaagagagaattttgttgtccattccaaagctggcattcttcctttgcaagag

SEQ ID NO: 423034 - DNA, 122 bp, Homo sapiens
cgcgatggtccgagaccacgctctgggacagcaagcctcaagcctcgcacaggagagggccgcggagcttcctcgacccgccccgccgcccttcccgcgggaggccccgcccccgccccccg

SEQ ID NO: 423035 - DNA, 122 bp, Homo sapiens
gtcaccgtcactggcttgaaatgagcccttctaaggccactcagcatggctccaaccttccgtctttgcatagtactttacacgtgcctagatctcaaccctcaagcccttgccccttccct

SEQ ID NO: 423036 - DNA, 122 bp, Homo sapiens
ccttctcgatcacccgcagcgcggcctcaatgccatacgtgttggctatggcgtggatgtcgttggagtagaggcggcgcagatccaggacctggagagaggaaggaagggatttatttaga

SEQ ID NO: 423037 - DNA, 122 bp, Homo sapiens
ggtttcctctccctctccacgaaggcagtaccagccagtactcctgctctgctaaccctgcgtgcaccaccctaagcggctaggctgacagggccacacgacatagctgaaatttgttctgt

SEQ ID NO: 423038 - DNA, 122 bp, Homo sapiens
ggagaggacgaacatccaaaccaaggcagaagtattcggtgaaaatacatgctggctgctcgcagaaaaaagcagagatctttgcctaggcattaagaaatccgtatcgattctcaaactct

SEQ ID NO: 423039 - DNA, 122 bp, Homo sapiens
attaaatatacatcataaataaggcttataaatataaaactgataaaaattgataaaaatcgataaattagtcatgtccctccaaggaactggcctcgcagtttctgagaccccctctagga

SEQ ID NO: 423040 - DNA, 122 bp, Homo sapiens
cggtggaggaagagaggcggggaacaggttgtagtttaaagcaaaagtgcaggcgctgggcgctctagctgctaggctgggcttgagagtttggtgtccccgcggagacctccctagccagg

SEQ ID NO: 423041 - DNA, 122 bp, Homo sapiens
ttcagccttcttcatttaatgacagttctctttctcggccataggtaggcctccgccttgcgcgctcctcggcccccgccgccgcccactccctgggcagcaccatttccgccccgagggac

SEQ ID NO: 423042 - DNA, 122 bp, Homo sapiens
tgagcagctcaataaaacccaggtagatcctgtgaaacgccacccagacacccatgactccggaatgcgaatcccagcccctctctccggttccacctcacgaacctggctgccccgcccgc

SEQ ID NO: 423043 - DNA, 122 bp, Homo sapiens
cagctgggacaacagaccagggagacatataaaagccaacatccctgagcacctaacacacggactcactcactcactcactcacccactcactcccatctcctccagttcaatccccagca

SEQ ID NO: 423044 - DNA, 122 bp, Homo sapiens
gggagccccaccttgagctgtctgcgcactttttcgatgaagaacttccaacatgtttcccgagtgtcattcatgccaagggacttgacttggggtcgcatggaggagatgatgttctccac

SEQ ID NO: 423045 - DNA, 122 bp, Homo sapiens
agaattttaagcatgttactgcgacatgttccaaagccactttgctcaccaggaaccctgcgtgcaaagcagccgaaatgcaaagtcgcagtccccctcctctccccagccccgagtccccg

SEQ ID NO: 423046 - DNA, 122 bp, Homo sapiens
gccctgggttctagttacagcttctagtcctgacctggagcatgtcactcagccatcctccgtgggtacctcctcctgaaaataatattaaatctacatatggaaatcacatccacccacct

SEQ ID NO: 423047 - DNA, 122 bp, Homo sapiens
ggagctgccgcacgtgggagggcgctggccaggcagccactgtggcctctgcggctaggccggctcgagactcccgggcgcccaggcgctgccgcccgcctcgccgccccacgccgaaggac

SEQ ID NO: 423048 - DNA, 122 bp, Homo sapiens
ctgtagttgggcagctgctcttggtctagtgaccaccagcctggacagctacggagaacccgccttaggtagaaagaaagtgatttttttcctttgcaagagtttgacccgggaccctaact

SEQ ID NO: 423049 - DNA, 122 bp, Homo sapiens
tccaccccataataaccctgccagtgccagggtgggctggggactctggcacagtgatgccgggcgccaggacagcagcactcccgctgcacacagacggcctaggggtggcgctcagaccc

SEQ ID NO: 423050 - DNA, 122 bp, Homo sapiens
gcatagctcgggtcagcactcctagtgctagtcgcagtgggtccgtatcccgaccggcaacgtggtacccgccaaccagaaggggtaacaccgtaccgcctatgggacccacacctttttat

SEQ ID NO: 423051 - DNA, 122 bp, Homo sapiens
cccgattggcgccgactcctctcagctgccgggtgattggctcaaagttccgggagggggcgtggcccgaggaaagtaaaaactcgctttcagcaagaagacttttgaaacttttcccaatc

SEQ ID NO: 423052 - DNA, 122 bp, Homo sapiens
aggtaccaggttcatctcactagggactgccagacagcgggcacaggacagtggatgcagcgcaccgtgtgcgaaccgaagcagggcgaggcattgcctccctcgggaagcccaaggggtca

SEQ ID NO: 423053 - DNA, 122 bp, Homo sapiens
gtgtgcccgactggtgtgtgcgcccgacgggtgtgtgtgcccgacagtggtgtgtgcgcccgatgggtgtgtgtgcccgacagtggtgtgtgcgcccgccgggtgtgtgcccgacagtggtg

SEQ ID NO: 423054 - DNA, 122 bp, Homo sapiens
ggaagtggggaggagggcgctcttgaccgtgtctgcgtgtctaagcaaaggatacaggggcgcaaagggaaggagtggccaggggtgcccgtcccaggtgtgctcttcttcacggcgcccct

SEQ ID NO: 423055 - DNA, 122 bp, Homo sapiens
cacatcccctcccccatccgttacctgagggctagggatgaactcagattattttctgggcgttcgaggagacagacaggtgaggaaggtagaagaaaaacatccagagaggtcgagtagtt

SEQ ID NO: 423056 - DNA, 122 bp, Homo sapiens
agtgaagaaggtgcttgcgggggggcactacctgagaggctttcccatgctcctctgactcgttgtcaggccgggatgctcggggcccagggaggagacgctgcctgtggtggaacaagaat

SEQ ID NO: 423057 - DNA, 122 bp, Homo sapiens
caatttagcccttcctcttacctggcctaaatattctaggcgccaggcccagaggtgggacgcgcctcggggtcacgaggcttttggggaggcagatcggggctttgggtcgcgggtcaggg

SEQ ID NO: 423058 - DNA, 122 bp, Homo sapiens
atatgtaccccacccctgccatgtaagactgcatcctgtttcctcagcaaaattgtgtgacgtctgtgcttagggactatgtcctttcctgcctccaaatctcctccccagctggggttggg

SEQ ID NO: 423059 - DNA, 122 bp, Homo sapiens
cgcgcgctgctgttcccggcctactgggccctgcaccagctgcagggtggctgaggagggcggcgggcggcgggcggcgctgctgctgctgctgctggtggtcggcccgcccctggcgctgc

SEQ ID NO: 423060 - DNA, 122 bp, Homo sapiens
gctgatgggggcccggctgatggggggctggctgacggaggacccagctgatggggggcccggctgacgggggcccggctgacgggggcccggctgacggggggcccggctgacggggggtc

SEQ ID NO: 423061 - DNA, 122 bp, Homo sapiens
tgaggtccggggtgcgggtttagttcctgagaggaatggccaggttgtgtgtgtgtgttccgtttggtcacttgtctgggacgttctgaacatgacttgtaagagcacaccctgggtcccct

SEQ ID NO: 423062 - DNA, 122 bp, Homo sapiens
caccgcgtgggtctggggtccccagtacctgggtgccagagccgccgggacgggaagtttcgtctcgcggggaagcggagggccggcgcttttatggtggccaggcgggagtttccgggaag

SEQ ID NO: 423063 - DNA, 122 bp, Homo sapiens
ctggttccacagaaacccggagctccttggcccactgttaccccagcagacctaaatggacggtttctgtttttcactggcagctcagaactggaccggaagaagttcccctccacttcccc

SEQ ID NO: 423064 - DNA, 122 bp, Homo sapiens
ccagaataaggagtaagaaaactgggcagagctggattgagactcctgggatctcctctccgttcactcatccctactcctttgttaaactgccctctccactttcctaaaatttaagggca

SEQ ID NO: 423065 - DNA, 122 bp, Homo sapiens
cagtcttgatcttctgaccttgtgatccactcccctcaacctcccaaagtgctgggattacgggcgagagccaccacacccagccacaaactacagtcttaatgataaagagcaaagagcaa

SEQ ID NO: 423066 - DNA, 122 bp, Homo sapiens
tccttttcttataaattttaaaataatgttgtttgtgtatatctccaaaaaatcttgctgcgatattggtagaaattgtgctacacctatatattaatttggtatgaattgacatctttagg

SEQ ID NO: 423067 - DNA, 122 bp, Homo sapiens
tcctcccctttccctgggctgggaggctggtcaacagcacaagggccgagtcccaccagccgggagcttgtgcacctcgcagggaggtggtggagaccagacggggcgaggtggggcctcgc

SEQ ID NO: 423068 - DNA, 122 bp, Homo sapiens
cctcacccctcaccccgcctgagcttggagcttggcgtggaggagtgctgcttcggtctacgtgtgtacacggcactccatgtgcctgtggttgtgcttgcgtcagcctgggagtgcgcagg

SEQ ID NO: 423069 - DNA, 122 bp, Homo sapiens
ttcagccaacttactccctttgaccaactgtcatttttgaaaagctgcccagtctctttgcggtgattttcaaagagagacccaggactaggttttctttcagtgacagcaataggtaggag

SEQ ID NO: 423070 - DNA, 122 bp, Homo sapiens
gctgcggaaggtaactggggacgtcgcaggctgtgcagctttcgcgaggcaccgctttggcgcccggaccgaggtgcgccagggtcaggaggccgacgcagcgggaggaagccgcgccgtcg

SEQ ID NO: 423071 - DNA, 122 bp, Homo sapiens
cacctgtgtagccctcgttcattgggcagttggtttggatgacttggctgccctgtaccacgaggcgaggtggcccagggagagaagagggatgaggcgcagagggagtgggaggcccgtct

SEQ ID NO: 423072 - DNA, 122 bp, Homo sapiens
aagatttcttccagctggtgggaggctggatgagaaggtgttatgtttttaggtgaaaatcggaggtggcgcaggacatggtgagatgattatccagcttgctaatctgccagcgggcacca

SEQ ID NO: 423073 - DNA, 122 bp, Homo sapiens
ttgcagatgttttcacttccagccccagcaaacacacgtataagctaacccttttaataacgaaccagggcagccaagataaataaaaagtcttctgctttaaccagagtgggggtaggtga

SEQ ID NO: 423074 - DNA, 122 bp, Homo sapiens
ctgtctcaccttgcgggccctcctgtgagcgtcgcgtcaatcacatggtcgttatccatgcggaacatgtacacaccacggttctgagggaaaagtcagtcagtaagtcatcaatgtcgacc

SEQ ID NO: 423075 - DNA, 122 bp, Homo sapiens
cacattgcctgactttaaattatactacaagtctatagtaagaacaggatggtattggtacgaagatagacacatagacccacggaacagagaacccggaaagaaagtggtccgtctccagc

SEQ ID NO: 423076 - DNA, 122 bp, Homo sapiens
ccctggtgcaatggtgtgctctgccggcccccattctgtctgaactttaatggtacaccacggtccaaaccatccggccggccctgggccatcctgaagacctgcacacatcttaaatggaa

SEQ ID NO: 423077 - DNA, 122 bp, Homo sapiens
tctgctccagcctggcttccccaccctctcgctgtcacccagacaacctgagggcctcatcggaccattagggacatacacacctgccaggagaggggtccaaggttcctcccccacgcccc

SEQ ID NO: 423078 - DNA, 122 bp, Homo sapiens
cagcgcaatgctgttacttcctaggatgttcgagaagctgcgagttcgagggcgggccggcggaaggcttgcctttccactgtcactccacgaacccagcccagaggcttcggtttgtctgt

SEQ ID NO: 423079 - DNA, 122 bp, Homo sapiens
tcactatgcagttgacatcgaggccagcctctctggagtttaagaattagctaattcttccgttggaggagagggaagtctgcaatacccactaaaattgcagctgacttcctctttggctt

SEQ ID NO: 423080 - DNA, 122 bp, Homo sapiens
tatactagaattttattatactcgggttcacaggcgcccctgctgctgctgctgcctgtccggagactggtgaatcagtggttgtgtctgaaaaggagacaaataggatggaaaaaatatcc

SEQ ID NO: 423081 - DNA, 122 bp, Homo sapiens
gtgggacaggctctgggccctgtggtagttcacaagctcgggcaggctgaggaaggacaccgcctcgttcaggtgcagccggcccccggcacgccgccagatcttgtagtgccgcacagcct

SEQ ID NO: 423082 - DNA, 122 bp, Homo sapiens
ccacccaacacccccttggccatcccacacacctagcggcatatatcttggtggcaaggtcgtctctcagcaggactcccctggaagcagttttggagccatttgggtaggaaatctcagag

SEQ ID NO: 423083 - DNA, 122 bp, Homo sapiens
tcctcactaattcctaagagcatgcagagatctgaaaccaaaacgtttgagaaacgatgacgtaactcctagctctggattaagggagaatgtgtgacaaagagcatttggtataggaggag

SEQ ID NO: 423084 - DNA, 122 bp, Homo sapiens
ctgtctgtcccagtccagggctgaaagggtgcgggtcctgcccgcccctaggtctggaggcggagtcgcggtgacccgggagcccaataaatctgcaacccacaatcacgagctgctcccgt

SEQ ID NO: 423085 - DNA, 122 bp, Homo sapiens
gctgcaggctttatgcttctgtgaacccagtttcccagttattcattgaccctgaacatacgtttacctgtgcaaatacaatctctcctaacctatttatacaattatgtgtctgccggtcc

SEQ ID NO: 423086 - DNA, 122 bp, Homo sapiens
tgttttcagtgtggtctcagagtgaaggtttctatacagggtttagtctgagaaacaactcgggaaacagatgaaaggcatttcagatgattaccctagagacacagtggttctcaagactt

SEQ ID NO: 423087 - DNA, 122 bp, Homo sapiens
ttgtgtaaaggccctggggcaagatggcgcctggcatggtagaggagcagcaaggaggcccgtggggctggagcagtgaggaggaggagagagggaggaggggagggcagggaggggacagg

SEQ ID NO: 423088 - DNA, 122 bp, Homo sapiens
caggcttttccagccaaaatgaagtttaatccctttgtgacttcccaccgaagcaagaatcgcaaaaggcatttcaatgcaccttcccacattcgaaggaagattacgtcttcccctctttc

SEQ ID NO: 423089 - DNA, 122 bp, Homo sapiens
agggcggcggtctgagagtcctgggtgccgacctgttgggacccaaattccttgtgggaacgatgataaggagcaggtttacagatcataagtgcaaaagcgggcgagaagggaaacccaag

SEQ ID NO: 423090 - DNA, 122 bp, Homo sapiens
gccgctctgtgggatggggtcggtgacccggaaccccgaggggagacagtgctttcggggcgccgcggtggagagaacagatcgcctccggaagcgtggggtctgggccagggaggcgatcc

SEQ ID NO: 423091 - DNA, 122 bp, Homo sapiens
tcagccccccccacaagctatttctcactgtaccccagaacactaatagagtccccccaacgagctccacactaccttctcaaacgtccacaccgtgcctctcatagtactccctcagcccc

SEQ ID NO: 423092 - DNA, 122 bp, Homo sapiens
ggcatccgctccatcaccgaccaaggtaggggctcagaggctgggcgtgtggatgtgcagcgtctgcccccgcactctcgcggaggtcccagtatctgcagcctcagggacactgtctttcc

SEQ ID NO: 423093 - DNA, 122 bp, Homo sapiens
gggaaatctgggtacttatcctggcttaacttctttaacagatgtgtatgtgttggtggacggggggcaaagcacttaatttgtctaaggttccttgtctttcaaatgaggaaaaaatacct

SEQ ID NO: 423094 - DNA, 122 bp, Homo sapiens
cgcaccaggcgttggaaaggcaacttgcggatcagcagctcagtcgacttctgatagcggcgaatctcgcgcagagccacggtgccgggacggtagcgatgaggtttcttcacgccgccggt

SEQ ID NO: 423095 - DNA, 122 bp, Homo sapiens
gtcctgccttggggcaggtgaaatgaggccagaagagagattctgattcctgaggcctgccgaggccgaacacacccaatattattacaaaagaccgaaacaagggaatataggagctagga

SEQ ID NO: 423096 - DNA, 122 bp, Homo sapiens
ggctttccggggactcgggactcggttgtcgtggtgcgcccccgagctggaggggcgtggcggagtgggcagggccccccgagcccacctgtcccactctgggccactccagcgctcgccca

SEQ ID NO: 423097 - DNA, 122 bp, Homo sapiens
cctccatctgttcgccggggtcctcgctcccctgccggggccggcgagacggcgtgaggccggagggggatttgcaaggaaacctgcctgcttcccgctcccattgctccatccccgctgcc

SEQ ID NO: 423098 - DNA, 122 bp, Homo sapiens
aggctctggccgggaacgcatacaacgtcaaagcagtgaataagcgatttctgcagttcccgtagctgccagcctgtgcagtcctctgtgatgcttggggaccggctcctcggtcacacccc

SEQ ID NO: 423099 - DNA, 122 bp, Homo sapiens
agctcagtcccagaagagggcaccgttggaagagaaattgctcttatcgacgtgcatgaccgagattctgggcagaatgggcaggttgaagtttttgtcctgggaaatctgccatttaagtt

SEQ ID NO: 423100 - DNA, 122 bp, Homo sapiens
tccaggccccgcctccgcccggcgctcgggcgggaacccgggcgcatccgcacgtgcgggcgctgctgcaggtgtgtgcggctcagcccctgcctggacagcgctccctccccaagcctgag

SEQ ID NO: 423101 - DNA, 122 bp, Homo sapiens
aaatacaaaaggtgactggtgcagctgacgcaaggcaacagaaacgccaccccagcctctcgccctcgcgtggaagagtgagtttcatccagggcctgacgcattcaaaccacacgctcggg

SEQ ID NO: 423102 - DNA, 122 bp, Homo sapiens
caagaatgtggggtcactaagagatgcaatttgagattcattgtatcctatacttcttcccgccttttgtacctgttagcacctgggacccccaggcagtccctcctccgagctgaaatatt

SEQ ID NO: 423103 - DNA, 122 bp, Homo sapiens
gccactgtgcccggcagtaactaatgttaatagcttttttctcatttcttcctgtatattcgtacatgtacatacacctacagacatacaaattatgtttcttttgaactttaaattaatat

SEQ ID NO: 423104 - DNA, 122 bp, Homo sapiens
tcccggctcaaagaccgcagagcccgcgggtccccagctcatacattaaatatgtggaggcgttgggactgcgtgccacaaacatgaagacaaatttttaatcccgagcaagaacatgctgg

SEQ ID NO: 423105 - DNA, 122 bp, Homo sapiens
gtgtctgcattttctaatcctttttgccccaggcaaggtccctgtatctctgagacaccccgattggctggagaattgacttgggagagataaggagggagggcgggtgccagcatgctatg

SEQ ID NO: 423106 - DNA, 122 bp, Homo sapiens
tgtgagaggccacgtgggcgcaggtgcggggacactgggagcgcgggtgcagaacccctccgtgcgcatcccgggcgcttcgtgtccgaggacctcctgtccccacggcctgggtgagcctg

SEQ ID NO: 423107 - DNA, 122 bp, Homo sapiens
ggaaaaatatcgacattcatttataaaatatcttcctggtatcttcctagacagacgttccgtttaatgaactagagagctactagcttccctcccatcactgcagaaatcatacagataag

SEQ ID NO: 423108 - DNA, 122 bp, Homo sapiens
cccatagtgttgggattacaggcgtgaaccatcacattcagccctatatgcattttagaacgggctttttttttggcggggggggtctctgttgcccaggctggagtgcggtggcacgatct

SEQ ID NO: 423109 - DNA, 122 bp, Homo sapiens
gtgcacgctctgccctgtccagcaggaatatgggctgctgtgagggctgtggggctgtctcgcatcgcactgagtgggtgagtcagaaggcaatctgcttttctaatgagactgctgcctgc

SEQ ID NO: 423110 - DNA, 122 bp, Homo sapiens
ttccgtggttgttgctggggcaacagcaggctcctcccctagctttgtactcgctctgcgcgctactaattggtgctagccgtctgcggggggcggggtgaagctgtgatggacattttcct

SEQ ID NO: 423111 - DNA, 122 bp, Homo sapiens
atgagcagccatgagttgctcctcactgagctcatgtttgacaatgcactgagcaccctgcggcctgaggagattgctgccttgctctctggcctggtctgccagagccctggggacgctgg

SEQ ID NO: 423112 - DNA, 122 bp, Homo sapiens
acaaggtcacaagccacatgccacaaaccacagccaagccattcaacgcatgctgcgcctcggctggccgcatcagaactcctgatgccagacaggaagatgggaacaggccggggcagcac

SEQ ID NO: 423113 - DNA, 122 bp, Homo sapiens
gcctgggaccgcggccggcgctaaccacagaactgagctttaagactcaaataaacccaccgtcctctccagcgatttaagcagtctcactctccctcctttccctcttttccctcctcttt

SEQ ID NO: 423114 - DNA, 122 bp, Homo sapiens
ctggactgagagagcaaagagaaaatgagtcatggatattgtgttaaatatataagcgttcgctggctttctttgaaatgttttctcatctaaacttgggagctgctggctttgtatttact

SEQ ID NO: 423115 - DNA, 122 bp, Homo sapiens
ggcaggcctggggcaggggaatctccggtaacatccctcagtaccgaaggcaggatttcccggccacttccgtcggttggaattctcttaagcattgccctgagtctattttcaaatgaaag

SEQ ID NO: 423116 - DNA, 122 bp, Homo sapiens
ttctcccctcggacacaagcagcctctgcagcctccacttctgtcccttgccggagggatcggccagtgtgactcagccatctgttgtgcttggactccttaggacactcacgcgcacgcag

SEQ ID NO: 423117 - DNA, 122 bp, Homo sapiens
tcttcgaacaaaaacactttcaatcccctcattctcattttgtggggattcccagctgaacgggcctggctttttgggagaagtttccagcccgtagctgccttggccaggagtgtgggggg

SEQ ID NO: 423118 - DNA, 122 bp, Homo sapiens
gagccctgcccccttgccccgcggggaggtggctgaggcccagcgaaaattcgagcgcggcgccggcgggccatcactgttgggggacccagtgcaccctccgcagctgctggcccgggtgc

SEQ ID NO: 423119 - DNA, 122 bp, Homo sapiens
tatgggtgaagaggcctcaagcttagtggggtgggcacttaagaagtgtgaacatttatgcgctttgacccacttgcaataatttattctccaaaaacaactgaaagttcaacagaaggcaa

SEQ ID NO: 423120 - DNA, 122 bp, Homo sapiens
gcgacggggccaggtgcagccaggagccaaggcctgctgctcacagccgtcccctccagccggccccttgaagtgtccctaattcgttagtagcaatgagacgtctggctctgagcaaccat

SEQ ID NO: 423121 - DNA, 122 bp, Homo sapiens
ctgcgtgaggcgcacaaaagggcggggagccgggtgagcctggggcccggccgcaggggacgcggcgggaggtgtggtttggggttgggaggtggccatcggggctaagccggggcgctctt

SEQ ID NO: 423122 - DNA, 122 bp, Homo sapiens
ccgcgcgcctgcagcctccccccttcgtcgctgtgcgggtccgggggacggctccacgtgcgaccctcctagctgcccgggctgcgcctctgggctctggcctctgccacctccgccgccgc

SEQ ID NO: 423123 - DNA, 122 bp, Homo sapiens
actgaagtcacgtggtggtggaccccgcccccagggcccggttggctgtggccccgcccccgagccctggggtcggtgcttgctgcctgcggctctcagaagcctctgctccaccgcggcga

SEQ ID NO: 423124 - DNA, 122 bp, Homo sapiens
cctgcccgcctaggacccctcaccgagcgcacgacccggccagggcttcccgggcgctcgcgctgttccaagctgttccaactgaaggttggggtctcgtgaagccagaggctgggggggtc

SEQ ID NO: 423125 - DNA, 122 bp, Homo sapiens
caggccgtccttatgcctcccctccctcccttggtgcccctcaagttaccccgaccaggccgtcccacacagattttctgcaacacgtgtcacattctgtagggaacgttgcagagagcttc

SEQ ID NO: 423126 - DNA, 122 bp, Homo sapiens
caatgttttctaagttctttaattgaaaaggcccttccagcagctgtatgaaggtgtggccgaagtgtgggaggcaaaggaggggaagtgagaaaccggccagagtcccagaggagacccct

SEQ ID NO: 423127 - DNA, 122 bp, Homo sapiens
ccggggctctcctccggcccatggcaacacgaccgctggacgaagcttcccggctcggcgcgtgcagtttccgggattcacagttcgatccccggaagtgacgataagcgagcccaagtagt

SEQ ID NO: 423128 - DNA, 122 bp, Homo sapiens
ttattttactatgtatcccatcaggattaatgcgtgtgtttgttcagtctcattcctttccgttgatctcagcttctatttttgtttctgctcttagtcactgcccagcagcgccaaaggaa

SEQ ID NO: 423129 - DNA, 122 bp, Homo sapiens
gcagctggaaggtgcagtgcctgtcggaggcacccgtttccccaccaagggcctcatgttcgcatgcccactccacgttcactccatcatccatctcactccgttttctattgaaagcaccc

SEQ ID NO: 423130 - DNA, 122 bp, Homo sapiens
cccagtcggggcaactgcagtgcagccagatagggtctggactttgcgtaaagggacaggcgggaactgaagagcggaggtggggactgggagggagggaaggtatgggggtgagcaaaggg

SEQ ID NO: 423131 - DNA, 122 bp, Homo sapiens
catttttgtgcttaacttaccactgactcttcttttcaaggtcactctggaatatagacccgtgatcgacaaaactttgaacgaggctgactgtgccaccgtcccgccagccattcgctcct

SEQ ID NO: 423132 - DNA, 122 bp, Homo sapiens
ctgaaggctccccacaagcgcagtgagaatgccacactggaggacagagcctgggctccccgcctcagccacatatggtctagccctgggccccttgtgacattaaggaggcagatgagctg

SEQ ID NO: 423133 - DNA, 122 bp, Homo sapiens
tgtttcaacagcctacgggaggtgtctactgaaaagggaacctgcttctttactccagaacgctgttctttaaagaccaagattactgcattctcaattagaaaactgcaatttggttccac

SEQ ID NO: 423134 - DNA, 122 bp, Homo sapiens
cttcaacctggtcaaggacagtgccacggggctctccaagggctacgccttctgtgagtacgtggacatcaacgtcacggatcaggtgagtccccggtcgctggccgctgccgcgtctgtcc

SEQ ID NO: 423135 - DNA, 122 bp, Homo sapiens
gagctttacttagggtgaagcaatattaggtaaggtattaagaagaaaaacaatccctatcggatggtgcagatagcactcatttatgactgaaagattggatgtggaagttttattttcat

SEQ ID NO: 423136 - DNA, 122 bp, Homo sapiens
ctaaataaataaatagacctgagttggaatatcggctctggagaccttagtgtaaccatgcgcaagtgtttactcacctattaaatgagactaaaggtattttcttctcatgactatatata

SEQ ID NO: 423137 - DNA, 122 bp, Homo sapiens
tcttgtcaggggaggatggggtgccaggggctcctgtcagtctggagctggagagctccccgggcttcattaacatgcaaattagcaagttctgactggctgtggcagcgacaggcagccac

SEQ ID NO: 423138 - DNA, 122 bp, Homo sapiens
ggatttcgaggttgcagtgagccgtgatcgcgcccctgcactccagcgtgggcgacggagcgagaccctatcagaaaaaatggggtttatggcaatacaagaggggacaggcctggtggctc

SEQ ID NO: 423139 - DNA, 122 bp, Homo sapiens
ataccatgagtcattgccgtaccacatctcattgccataccatgtgtcattgccgtaccacgtgtcattgctgtaccacgtggtgttggtgtcgttgaacggcgggggccagcgcacacact

SEQ ID NO: 423140 - DNA, 122 bp, Homo sapiens
cgggagtataaacttaagaaacagttttccaaaaggcttcctgtttctctaccactagaacgaaattgtaaacctgggaggaaatatatacacgtgtatatatacatacaggcatacctcgt

SEQ ID NO: 423141 - DNA, 122 bp, Homo sapiens
aaatgctgggattacaggcgttgagttactgtgaccatctctttttataaaagaacacatcgtgttgcaatttgccttcatcacttcacattgtaacttggaatcactattttatcagtatt

SEQ ID NO: 423142 - DNA, 122 bp, Homo sapiens
aacaacgagcacatccacggggagaagaaggagtttgtgtgccgctggcaggcctgcacgcgggagcagaagcccttcaaggcgcagtacatgctggtggtgcacatgcggcgacacacggg

SEQ ID NO: 423143 - DNA, 122 bp, Homo sapiens
cctgccccctcctgcgggtcccaactctctctttcccatcgtgcgtcctctggagaagtgcgcgcgtgtaagtgtggcgagtgtggccaagggtgccggaggcagggttcgggtgcgtagtc

SEQ ID NO: 423144 - DNA, 122 bp, Homo sapiens
ctctatctcctgacctcatgatccgcccgcctcagcctcccaaagtgctgggattacaggcgtgagccactgcgcccggcctcataagtgttcttctggcctctaaaacccaagtacttatc

SEQ ID NO: 423145 - DNA, 122 bp, Homo sapiens
cggcgctaacctggatgttctggaagtcctgctgtagatcctcccagtcccgcaggcagtcgcccagcgggcccgggggcgggggctgcatggctgcagcgccagtagccagtagtggagga

SEQ ID NO: 423146 - DNA, 122 bp, Homo sapiens
ggctcggctgtcccccttccgccgcgggtcgccgccttcggtcgcctccgggactccagccgcctgcacgcactcccgattttaaaaacaaacaggcgccgtcgcctccccgcggcgctcgc

SEQ ID NO: 423147 - DNA, 122 bp, Homo sapiens
tccagaaacctgaattaccccactcctcagctggccatactgaatctgggtgacccggggcggggggtgccctgcctgtctgatacaaggaggacctggttttgtcaggtggttggtgctgg

SEQ ID NO: 423148 - DNA, 122 bp, Homo sapiens
gaccggcacatcatgctgaccttcagccttcggccttttggctgtggcatctgcaacaagcgcttcaagctgaagcaccatctgacagagcacatgaagacccatgctggagccctgcatgc

SEQ ID NO: 423149 - DNA, 122 bp, Homo sapiens
tttcctattactacattttatcggtgctgtttgtgttatgcaacggtagcatcgtgtctccggaagataaaaaaggtctcgatacaaacatccataaccttccacccactccgtcaggaaca

SEQ ID NO: 423150 - DNA, 122 bp, Homo sapiens
acccggcccaacaaatgttttagaaagccatctggatgatagtccatgactgctgaacaccggctgaggtccacaaaactgcgctcaccgcttggggactttccagccggcctttactctcc

SEQ ID NO: 423151 - DNA, 122 bp, Homo sapiens
aatgaggagagacatgtgcagaggaaagaccatgtgaagagaaagagagaagacggctcccggccaaaaagagaggcttcagaaacctgccctgatgacactgtgctcctggacttccagct

SEQ ID NO: 423152 - DNA, 122 bp, Homo sapiens
caggcggtgaagttagttgcgcagtgaatggtgccggtctccgcgttctcaggactgctccggttgggagatggagagaggcgaatcaggactacgtggcgcctcaggttctggagggttcc

SEQ ID NO: 423153 - DNA, 122 bp, Homo sapiens
aaggcacaataaaatgaaacaggcccagggacataagtcttggtgggggtgtatgagaatcgcgtatgcaaaaggtttaatgattccgatgtctgaccaccattctgtatcacttcttccca

SEQ ID NO: 423154 - DNA, 122 bp, Homo sapiens
aaggcagagctctttctgacagtgatcaggtagcagggaactaacaattgcccaaggaagcgagtggaaggaaggcttaacaagagcgccatggacacagtgcataggactattttctacca

SEQ ID NO: 423155 - DNA, 122 bp, Homo sapiens
cccggcccctggcacgcggcggagactcgtatttgtgctgcctccggtacaccatagacgcgtccacagagtgggggaccccaggcttccttccagataatcgccaggccccgcgagcccca

SEQ ID NO: 423156 - DNA, 122 bp, Homo sapiens
ttctgtacacatttcacttataaaatacttgtgcaatatattaagaccaactggaatggacggtttaaaaagcaaagtataaagagcacatcactgaagattactttgtatttctatgatga

SEQ ID NO: 423157 - DNA, 122 bp, Homo sapiens
cttcttctgggacacttttctttattctgtttttcgaatcctccctttcttcaagtaacacgacaagtcttactttaactagtgacaccttctagaacctaggcctgcactcttcaatacca

SEQ ID NO: 423158 - DNA, 122 bp, Homo sapiens
aaaagaaaaacccaggaagaaagacttctagcccagcaggtaccttttaaacaaagaagccggtgcctgtaacccaacttcatataaacaagaggagcctaggattctaacccagcctctag

SEQ ID NO: 423159 - DNA, 122 bp, Homo sapiens
agcttataaaggctttcctcttggttctctttcaatcttattttgttgcgaggttctgagcgttgtctgtgtttaaccttgatttcagtcatgtctggtcgtggcaaacaaggaggcaaggc

SEQ ID NO: 423160 - DNA, 122 bp, Homo sapiens
tgcggcttcattcttgaagtcagtgagaccaagaacccaccaattctggacacattttggcgaccacgaagggactttcgcctatcgcccagtggtatgacaatcaccatgtggtgagacca

SEQ ID NO: 423161 - DNA, 122 bp, Homo sapiens
cgtgaggtgatggcacggtgttggaggggtgttcactataggcagagggcgccaggaggccggtggtcgcgtaggacagggaaggctgcagttggagagcaaacctggaggagcagccgcgg

SEQ ID NO: 423162 - DNA, 122 bp, Homo sapiens
atctgagaagatactaatatcaatgctttaaaaagtgagaggagttgaagagggggctttcgttcatccctcagtagctgcgaccaaataaggtgtagtacttggcagggttcttgccacag

SEQ ID NO: 423163 - DNA, 122 bp, Homo sapiens
aggtggggctgttggtttatgaagtgatggagagcctctcctctttccatttcttacacacggacagacttttctagaattatgactaaatccaaacaattggcttttaggaaattcagatt

SEQ ID NO: 423164 - DNA, 122 bp, Homo sapiens
ttcagtgcgcgtcaccctgaaggactcatggacactccccggtttccgccaggtgctgctcgggcagccaagttcccaccctgggtcccaggaggcctttgtggcctgggcacccccggact

SEQ ID NO: 423165 - DNA, 122 bp, Homo sapiens
gtgctctggaaaatgtagtgttgtgcaaacacttgggtttctatgaccactgctccatgtcgtctccttccctcgtgtccccagggccagtctaagggtctcaggtggagggcttacctcca

SEQ ID NO: 423166 - DNA, 122 bp, Homo sapiens
catctcattcagcttccagcttcctttttcttttccttttgagacggagtcttgctttgtcgcccaggctggagtgcagtggcatgatctcggctcactataacttctgcttcctgggttca

SEQ ID NO: 423167 - DNA, 122 bp, Homo sapiens
tccatgtccagagctgtctttacccaggcccaaggcccagccctctgccttcagcctccacgcagccctctgtcttcagccgtggccactaccactcaggaaggtctggaagagcctgctga

SEQ ID NO: 423168 - DNA, 122 bp, Homo sapiens
aaaccaggtgggtggaggaggatgtgcgggggagaagactggaggtttgggtgaatgaggcgagaagtcacagttacccatttaaacccgcacagagaaggctgcctcaatctggggctgac

SEQ ID NO: 423169 - DNA, 122 bp, Homo sapiens
tcagaccagagggaaggaggctgcagcgggccttccgcaagctggagacgctccaggaggcgaggggagcagaccgaggtgggagggagagagctccgaaaggagagtggagaagcggggcc

SEQ ID NO: 423170 - DNA, 122 bp, Homo sapiens
tcccccttccatctctgattccatctccaatttggatcccgggaggccgagcatctctcacgcggttgacacctctccaggctggagcgcgaagccggcgcctgcccgggtaatcagggagg

SEQ ID NO: 423171 - DNA, 122 bp, Homo sapiens
gggcgggccggcagtggtgggaaacttgtccgcccctcccggtgcagggcctgtcgaggccgcgcccacccggaacttgcgctggcccgcgagccggttctcgcctgcgcgtctgtctccac

SEQ ID NO: 423172 - DNA, 122 bp, Homo sapiens
cccggtcgctcgtcaggcgggcggccctggagcgtgcgcgccacccaacgccgcgctgggcggccgcccggccccgccccaggtcacagccctgccctcggccccaccgcggcgggcggggg

SEQ ID NO: 423173 - DNA, 122 bp, Homo sapiens
tatgacttttacacctcaactgtttcgttgagaggacctttatcttagcaaaactttggtcggaaaagttacattgaaggtctggtatctagtctctgttttcttctctttctaccctagaa

SEQ ID NO: 423174 - DNA, 122 bp, Homo sapiens
aattagttgtcaacatttagaagatattatacttcacaatcagatttctaaattttcctacggttagaagatgtggcaacactaggcctaaatacagagcaccaatcaggtgggtaaggctg

SEQ ID NO: 423175 - DNA, 122 bp, Homo sapiens
ccttttatggaggaaataatttgggatccaatgataaagatgggcaatctctgaagaaaacgtcacaatttcttaagggacatggcctgggcacaatgttaacaaaactccctattttcccc

SEQ ID NO: 423176 - DNA, 122 bp, Homo sapiens
tcagaatcggacggctaggaagaaatgaccaaaaggagcctgatagccccctattctgcacgctgttcctggaaaccgcctttgcaaagacagtgagagaaatctaacatggctcactccat

SEQ ID NO: 423177 - DNA, 122 bp, Homo sapiens
gcagtacgcggagtccttcgtggataacggctacgatgacctggaggtgtgcaagcagatcggggacccggacctggatgccatcggggtgctggcgcccgcgcaccgccgccgtatcctgg

SEQ ID NO: 423178 - DNA, 122 bp, Homo sapiens
cctctcccctcccacccggggcctccgcggcttttaaaactgtctgctgtgtgctgtgcacgtgctgggagcacagtagcgaagccgggacagataaagttcttctagtcactgccctcttg

SEQ ID NO: 423179 - DNA, 122 bp, Homo sapiens
cgtggcctgcgaggagggctggaccctgactggctgcagtgccctccctgggacctcccacgtcctgggggcctacgccgtagacaacacgtgtgtagtcaggagccgggacgtcagcacta

SEQ ID NO: 423180 - DNA, 122 bp, Homo sapiens
gggacgctgggctggaaaccgtccaatcagacacgaagctggagcggacagggtggcttccgggtttggcgggtactttgtctctcgctctagcccgagctgcaggtctcgtcttccctggt

SEQ ID NO: 423181 - DNA, 122 bp, Homo sapiens
gatgcagctcaggagtcagccctgaagctccctctcttcttatttccctgcagcctggcccgggggaggcttggcttcaactggcagctcgatttagccaacttcaggacaggccaccaggg

SEQ ID NO: 423182 - DNA, 122 bp, Homo sapiens
gtcgcggtgcactctgggaaatgtggttttcgcggcgctctctggggcttgaccccgaagcgggaggggcggggcccagagaggagggtcgtcaagggactggggcgcggcggggcagggag

SEQ ID NO: 423183 - DNA, 122 bp, Homo sapiens
atttttaaaacaggaaaacgtttcccttactcgaacgctaaagtgcaaagctgctggtgacgctgccttctcccacctccgcactccactgtccttgcaaactttggacagaggaaaggtgg

SEQ ID NO: 423184 - DNA, 122 bp, Homo sapiens
gcttggcaggaggctcccggcggaccaaggaggaggagctgcagtgctaagtccagccagcgtgcagctgcatccagaaaccggccactacccagcccatctctgcctgtgcttatccagat

SEQ ID NO: 423185 - DNA, 122 bp, Homo sapiens
atataaaactaggccaagccacccactgtttttataatcctagataactagctcatctcacgaacgggtatcagggactgaaagaggaactggatgacacagaatagacggttcagcagaaa

SEQ ID NO: 423186 - DNA, 122 bp, Homo sapiens
gtgagcgggcgagtgggcgggtgagtgaatggcgaccgcgccgccgccttggcacaggggcgcgggcgcgggctccacttccctctcccgccagctggtggcctcgagaaggtggcggcgcc

SEQ ID NO: 423187 - DNA, 122 bp, Homo sapiens
cccgaggaagagggcgccgagaccggatgggtgaggggtgtgtagtgcgcgggggagccccggaagaactgggcccccagcccgttggacacggctgctgcctgggagcccggggtgacggc

SEQ ID NO: 423188 - DNA, 122 bp, Homo sapiens
gcggtgaggccccgggcccagatgacggaggtggctcaggctgcggggttcgggctccgccgcggcttctccatcacaacatcccccgcccaggagcgcgcgggccgcggggccgcgccccg

SEQ ID NO: 423189 - DNA, 122 bp, Homo sapiens
ggcaccgggcaccggctgagtggcacagactggcaccaacgcgcgagggtgggcagggggcgacctgggctcagcgccagggctctggggtggtgaaggggcgtccgggcgctggggttggc

SEQ ID NO: 423190 - DNA, 122 bp, Homo sapiens
ggtggaggaggcggtttgggggcgcgccaagcgtgaaggcggccagggtgctgcacagcccggcggcccgccagggccgtggggagaggcggcgcggcccgtactgtaataataaacctgca

SEQ ID NO: 423191 - DNA, 122 bp, Homo sapiens
ctgaagctgagccaattaacgtggagagaattgggtggatcgcagagaagctggcaagaccgtgtttaccaattaggttttttttatgatgcaaatgttgcacaccatgcggcaggaataaa

SEQ ID NO: 423192 - DNA, 122 bp, Homo sapiens
aacttaggagagaggaatcaggaagccaagatggagaacaaaggtaacattggggacagacgttgaggccatgtatgaagcactcttaagaggagcagtgagagactgtacaagcagctagt

SEQ ID NO: 423193 - DNA, 122 bp, Homo sapiens
ctgataatacattgttgattcatattcaactctctgttggtggccgggcatcgtgactcacgcttgcaatcccagcactttgggaggccgaggcgggtggatcacctgagatcaggagttta

SEQ ID NO: 423194 - DNA, 122 bp, Homo sapiens
attttgctcacttgacctagaactcttctgcttacacctatcaaggaagaattcagtagacgtcccatctagttcacttctaggaacaccatgatcaactaatcaacaccacaggtctctac

SEQ ID NO: 423195 - DNA, 122 bp, Homo sapiens
gggtaaagagtggaggcagtgttcagggagtgagccatggtcaatgccaaggctccatcccggcagctttactgatttgctaaagctgccttttgtatcccctattccacatgcaaaagcat

SEQ ID NO: 423196 - DNA, 122 bp, Homo sapiens
atcaaccggtaaagaagaaaagtaatggttgccactccagagggggtggaagtacagaagcgatcagaggagaggaacaatctttaacacagttggcttaacgcagtgcctgtccgtttcgc

SEQ ID NO: 423197 - DNA, 122 bp, Homo sapiens
ggagaccgcagagcgtagggagacacatgggatctagcatggccccaccaccaggtcttccgggcgcgtcggaatcctcggccgcatttttgctcactggcctcattgccagtgggctaatt

SEQ ID NO: 423198 - DNA, 122 bp, Homo sapiens
agtgccagacagtgggcgcaggccagtgggtgcgcgcaccgtgcgcgagccgaagcagggcgaggcattgcctcacttgagaagcgtgaggggtcagggagttccctttctgagtcaaagaa

SEQ ID NO: 423199 - DNA, 122 bp, Homo sapiens
gcctggcgctaaataataagtcgttgttatgtgttatgtatttatgtggcatccaccacacgcctccgagatcctgggcgttttgaggttaaaaatgttcaggcttggagaacctacccctg

SEQ ID NO: 423200 - DNA, 122 bp, Homo sapiens
gtacagctacagtgccacctactggcaaggggaggaatggctttgcagacaactgctttccgctgatgattcttctgattaaggcttccaataaagcaacttcacaggggaagacctcctga

SEQ ID NO: 423201 - DNA, 122 bp, Homo sapiens
accccgcccccggttctctgagttacttcagggctcgagttcgagccagtacaactgttacgtcaccggaatccagccaatcgcagacgacagaaggagggcgttgtttggtctttcagcac

SEQ ID NO: 423202 - DNA, 122 bp, Homo sapiens
ggggcaactggaagaggggcagagatcagacagcagatggtgcgagggaaagatgctcttcggtaccttggagttcacattttgcaaggatcacctttatgtgggaggaaatgatttagttt

SEQ ID NO: 423203 - DNA, 122 bp, Homo sapiens
gccacgggcttcactgacgcgactttccaagacgtgggggtcaccatgggcagaggacatcggttcggagccagatcacgggccccataagcatcagaccataagcagcgccgccactgaga

SEQ ID NO: 423204 - DNA, 122 bp, Homo sapiens
aaactaccacggaaagatactgcgtagcaaaaacgttggcagcaagttccaaagccttggcgaggacaagcaaggagcgcgcgcgtgcagccatacctggggcccgcccagcgcagccgagc

SEQ ID NO: 423205 - DNA, 122 bp, Homo sapiens
ctcgcgttagccccaggccatctgagccgtggagcccacccaggcccgctgcctgcaccccgggggagccctcccacagcgtctcgggctatgaccctggcagggttcctgcattctcctgt

SEQ ID NO: 423206 - DNA, 122 bp, Homo sapiens
agcgggcccctggcgagccgcggtgtcagggcccttttctcctcttcccaccgtgggaagcgaattcagtggcgtcaagggccaagagccagacctgagtttgtctctcaccccccgatgct

SEQ ID NO: 423207 - DNA, 122 bp, Homo sapiens
aaatggagcccatgttttcctatttgccagatgcccatggtctcttttagtcctgtgtatcgccttcccagcccctgcagccatctgaattggtgggaccatgctcctacagtgggcctcat

SEQ ID NO: 423208 - DNA, 122 bp, Homo sapiens
tccctacagtcctagggagtgaaagatccgcaacacccattttacagatcagaaaactggcgctctaggaggtagggtggtgttaaaatgtaaagtctgaggatcaacaaaacttttttaag

SEQ ID NO: 423209 - DNA, 122 bp, Homo sapiens
aattcctttccacttcggctttcccctctacatcccatcggttctgtggagctcgaggggcgtcactgtgtgtgtggcagggcacggtgggggctgagatcgtttcctgttggaacttctgg

SEQ ID NO: 423210 - DNA, 122 bp, Homo sapiens
agaccgcggcagctgggcaggatggccgagggcaagaggggtggcaccttggcaatgtcccgggcattgagggcctcttggttcaccacgtgcagtgcctccagctcatgtttggtcctcac

SEQ ID NO: 423211 - DNA, 122 bp, Homo sapiens
cgtccgcgcgaatccagtgccccgcgaccacgctctcctctccagaaggagccccctccccgggctgcgaccactcacccagactgtgggacccaagtgccccgaaaccccgggagagcggc

SEQ ID NO: 423212 - DNA, 122 bp, Homo sapiens
ggggggcggggcccattaaagacgctgttcctaccagtggaaagtgcctctgtgggcgagcgggacgtggggggccctgctcgcccctcgccagggggactgactgtgtgccctgggcctga

SEQ ID NO: 423213 - DNA, 122 bp, Homo sapiens
ccctttccacgctttggaagttttgttctttccctcattgcaataaatcttgctgctgctcgctctttgggttcacactgcccttatgagctgtaacactcaccgcgaaggtctgcatcttt

SEQ ID NO: 423214 - DNA, 122 bp, Homo sapiens
cgcctggcccggacgagggcgacgttcccgctcgcggctcctgccccgacgaggcgtttccgatctttgccgcagtccggatttcctgggtctctgggcactgaaggggaaatgccctcggg

SEQ ID NO: 423215 - DNA, 122 bp, Homo sapiens
atggaaccaaaatgatactccagtagctccatctaaaagctcaagtggcagctaacagcacggacaccaggggcatcccttgccagcttccaatgccatggtgagagacactcatcatggtt

SEQ ID NO: 423216 - DNA, 122 bp, Homo sapiens
gggcgggcagccctagcgactggaatgaatcagaggatgccctgcaggccccggggggcgcggccctgcaagcatgggggaggggaggacgggggaaaggctgcttattgggctgctcagca

SEQ ID NO: 423217 - DNA, 122 bp, Homo sapiens
caggagcaggagaaggagcggcagatgcggctggagcagcagaagcagacggtccagatgcgcgcgcagatgcccgccttccccctgccctacgcccaggcatgtgccatcctcccgccacc

SEQ ID NO: 423218 - DNA, 122 bp, Homo sapiens
gtacgtttgaggctaaataactgtagtactagggaatgacaacacgctcacccaagacaccgcagcctggtttactctgtcatgataggaatgaggattgtacatttgaaataggtttctgc

SEQ ID NO: 423219 - DNA, 122 bp, Homo sapiens
gtacagaactcttcctcagctcagattaaatgaagatttaagtgcagttaagtgtatacacgtgcactagagagtagacagaatcttcttgccaactgcttcatactaataaggacactgag

SEQ ID NO: 423220 - DNA, 122 bp, Homo sapiens
gtgtctccaagtccctgttcactggaggagcatgcaggccctcctgtgaccccagaagctcggccagtttaacgagggcagggtgtccacctgagtgccagacaggtgcatggctcctccct

SEQ ID NO: 423221 - DNA, 122 bp, Homo sapiens
ctgtgagagtttctgatcttgacaagcaacttcgaattgaaaacatgaatgttctgcatgcgtgtgttgaggattccttaaagatttttacatttgggttgaggaacactgattggatacgt

SEQ ID NO: 423222 - DNA, 122 bp, Homo sapiens
tccttttgagcttgtggacaagctgaatgtcaggactgacttcgccagctcccagccctgcgggggtgtccttggcatcccatcagcagaggagatgcgtccctgttgcattttggcgtttg

SEQ ID NO: 423223 - DNA, 122 bp, Homo sapiens
acacctggcccaggcccccacatccaagccagcaccccatgtctttgtgccaggacaatacgacacctgtccccatctgtgtctaggctgaggtcccctagtgactccactttgccgaggtg

SEQ ID NO: 423224 - DNA, 122 bp, Homo sapiens
atggtgctgaaacctttgtggggaatcgtggccaagtgcactgactctgtgggaaaacggcggcgtgaagggatgccaacagctcctcgccgggaagggaaccgcctcaaattgggaccatg

SEQ ID NO: 423225 - DNA, 122 bp, Homo sapiens
taacatggtgaaacgctgcctccactaaaaatactaaaattagctgggcgtggtgacaggcgcctgtagtcccagctactcgggaggctgaggcagaagaatcgcttgaactcgggaggtgg

SEQ ID NO: 423226 - DNA, 122 bp, Homo sapiens
gattgcaaaggcagaatactgttcctttttgaaaaattgcataacttttaggaagagatgcgattcatatgaccatggatcctaaatgagagattccctagatgggctttgtttgcctggca

SEQ ID NO: 423227 - DNA, 122 bp, Homo sapiens
actgtgttctacctccttatagaaaagcaattagtgcctttttagctttggaaccatgcccggtggtgtgtgtgtggacagaactgctggctggttgttaagttgctactaaacacagtgtt

SEQ ID NO: 423228 - DNA, 122 bp, Homo sapiens
tgcttcaaatcaactttctgcactatgcagagaagccactactagtatttttttattcttcgtttaaaaaaaaaaaacactctcttgataaaccacaatctctagcttaaatgagcttggaa

SEQ ID NO: 423229 - DNA, 122 bp, Homo sapiens
cctttacttaggaatgtaaaagtcaaaaatttaaaacatgactagcattccacaatacagcgtaagaaggaacaaaccaccatgaccaaatagggcttacctgggaaatgcaaaaatgcctt

SEQ ID NO: 423230 - DNA, 122 bp, Homo sapiens
gagaagcagggcggccgggcctcaggggcctctgagctgtcccacgggaaagcttgctgacgtgagcgtgggggccggagcgtttgagggccagcatgaggtgccggaacccagcaactcca

SEQ ID NO: 423231 - DNA, 122 bp, Homo sapiens
agaggaatggggttggggagggagtagtgagagaaataaaaccctgggaaaaagaaaacgcggaatccggttgctcttctcacagtagccagaaggaagggcagagctgatctctggcaagt

SEQ ID NO: 423232 - DNA, 122 bp, Homo sapiens
tgcggagatgtcttctccgacctctgtgctacactgggcaagggagagcccagcttcccccggaggaggtcagccatgagccacaggtctccccggacttagctgggcagggcagggttctg

SEQ ID NO: 423233 - DNA, 122 bp, Homo sapiens
gtgcgtcgggtcgcgggacgggggctgcgcatgcgccttcatttcgtcagcccgctgttgcgtgctgccagcgggaactgtgtaggggtagattttcgctgcagtgttccccgagcctgtta

SEQ ID NO: 423234 - DNA, 122 bp, Homo sapiens
cctactagagactaatctgatatctaacttggtgccgtgactaatcttccttctctgtctcgctaccttctagtcactagaaacatataagtgttggaatgggcaggacatttgaattctca

SEQ ID NO: 423235 - DNA, 122 bp, Homo sapiens
cgcccgggaatcgaacccgggtcgcaagaatgggaatcttgcatgataccactacaccagcggcgctgttgacatgcccagccgccacagtattttaggaggaaatagaagcagacgttctc

SEQ ID NO: 423236 - DNA, 122 bp, Homo sapiens
ctgggcttaactcactggggcctcccccgggtggccgaggttcttttcccacgccctgcccgacagctgctctccagctgtcctccttggaagctgtccagtgccgggagagctctgggcct

SEQ ID NO: 423237 - DNA, 122 bp, Homo sapiens
gatgctgaggaactgggtcatggtcagctcctgcgggaccaggaacttggttttgtccagcgggggcaggaacgtctccctggggtagcgctccactaccacctgtcaagagtgtcagtcct

SEQ ID NO: 423238 - DNA, 122 bp, Homo sapiens
gggccgggcccggggccgggaggggcacgctagaggcgcgggccgggggcccagaggactcgcgtcccgccgccctggggccccggcgggggcgcgcgggccatggcccggcccgagccgcg

SEQ ID NO: 423239 - DNA, 122 bp, Homo sapiens
tgctttgctggaaggtaaactcagcctgcgggtttctaagccctgaaggccaccaggactcgcaggaccccctctgtacatgttcatggcccaggagtccgggaggcacatccggcgaggct

SEQ ID NO: 423240 - DNA, 122 bp, Homo sapiens
tggtgggggcttggcctaaggaccaggttgccaagtggagcacatccccacagtccgcaccggagaacgggagcccgacctggggtacgggctgcttcacccccgcgtggacctccccctca

SEQ ID NO: 423241 - DNA, 122 bp, Homo sapiens
cacacagtgatgaaattgcctaacaacacatttctcagaaatcgccccgcggttaagcaacgcatggctatatctttggattcccatgtcataactaaccttaaataaactgcctaattggt

SEQ ID NO: 423242 - DNA, 122 bp, Homo sapiens
agcaactcagtcccagcccagtccttcctagagataaaggtgggaatcgggtcggcctgacgtctctctttaaaggattcccagccaagccccttctgcagttagtagttgaagtgtaaagc

SEQ ID NO: 423243 - DNA, 122 bp, Homo sapiens
gtaaggcagcccttgtgagacagaagagccacccagctgtggcgctcacctctgtcctaccgctccagcctcccgccctggctgcttcctcctgccccttccccaagccgaggcggggggaa

SEQ ID NO: 423244 - DNA, 122 bp, Homo sapiens
taagaatttttctttctctaacactctaaagaaatgttcttgagctaggaaaggattactcgcgcctcgttagaatcagacatggcttcaggggatgcaggacgctcccctgagctgcctgt

SEQ ID NO: 423245 - DNA, 122 bp, Homo sapiens
cctcgctggaccagaggggcatgggaggggaggacgaaggacggagggagaggagcggcccgagacattctgccaggcctggcatcctgcggagtttcaagtgacggagccacccctgggtc

SEQ ID NO: 423246 - DNA, 122 bp, Homo sapiens
gcctcttggcggggctgtgcctcggacccttagatggaccgagataggtcgggccccgagcgagagctgagatccctctggggctgggaccaaacccgcctttcccaggtgtacggtactcc

SEQ ID NO: 423247 - DNA, 122 bp, Homo sapiens
aacgtcgtcgagtttgctgatgttagtggctgctgctacgtagcctacattccaatctgacgactggtttgatttttataaacatcctccaagaaaatgcacgtggaataccaggccatgtc

SEQ ID NO: 423248 - DNA, 122 bp, Homo sapiens
tcccatttcttctacagggggactcccccaggtctggtagcccaaagctgctgctacagccgccatgggggggtgaattcctcatcccccaatacaggtaagtattcactcctccctaccct

SEQ ID NO: 423249 - DNA, 122 bp, Homo sapiens
gcggaggcggtgcgcgcttacctgtcgccggtgctgctgcggcggggggtgtggaggaggcgcctctgggcagcctcggccgtgctgtcctccccgccgccgccgcctctgcctctcgctgc

SEQ ID NO: 423250 - DNA, 122 bp, Homo sapiens
taatacttctgggtttatttagaatcatatcccacgatcacaccggagagcaggaattcccgggatatggaggggactgaaggattctgtttgtttagttggtgagggctggcagggggtag

SEQ ID NO: 423251 - DNA, 122 bp, Homo sapiens
ctggggaaatgtgggtttgggggcgtgtttgggggactccgggagcgtgggcttcacaggcgaggagcggggcgagaggcctctcaggccggggtgcgcccaccgccccggcctcagggagc

SEQ ID NO: 423252 - DNA, 122 bp, Homo sapiens
gaagggattagaccccacgaccatcggagaccctcgggtgcctggaggaaagcgggctcccgcaagtcccaggacacccttcccacaccaggggagggagagtggaaaggagccagggctct

SEQ ID NO: 423253 - DNA, 122 bp, Homo sapiens
ctgagctagggtgggtagggccgggacccacggcggaggtggggccgggccgagcagcctcgggggatccccgaagctacagcgccttgcctccctgcacgctccgcgcccccggcctccga

SEQ ID NO: 423254 - DNA, 122 bp, Homo sapiens
caggcccccgagtgtaggggctgcctatgtcacagctggggcgatacaagatgactcctccgtgggagcaatcatctagttattcaattaacaaaatattactgttaatattttggcctgtt

SEQ ID NO: 423255 - DNA, 122 bp, Homo sapiens
gcggggggctgcggcccaggtgggtggcgtggatgcgcagggccgcctcgggctggctggcgaagccctccacgcgctggtagatggcaccaaggtccaggccgctgccctgcagcaggttg

SEQ ID NO: 423256 - DNA, 122 bp, Homo sapiens
gcatgagttttagacaagcctttctagcctgcttcattttcccaccttgcaagtgcctcccgcctcctactcagcaagttttaaatcagactattgtctcccctcatgacacagatgcgttg

SEQ ID NO: 423257 - DNA, 122 bp, Homo sapiens
ccgggccaggcgctctcgcctccccgatccccggctcccccgcttccccgcgcgcgccgccgacttccacgcccctgcacgccccgcacggccgactccactcgcgcagcttttgaagatcc

SEQ ID NO: 423258 - DNA, 122 bp, Homo sapiens
gaggacgaggcagaaaggctaggatggttgcagtgaagggacctccccttaggacccccccgctcaagtgcctgtgattccgcacccccgcgggctgccgttcccggcacacacacagcgct

SEQ ID NO: 423259 - DNA, 122 bp, Homo sapiens
gccgggcccgggagacgcgccccgcggggtccgctctctggtaaccgggccggggcaggccgcgctctcggaatccagccaaccagccagagagggctgtaagccagacctttcctgggaag

SEQ ID NO: 423260 - DNA, 122 bp, Homo sapiens
caggaagaagctactcttctccgaattacacagaggtgatgtgttcgtattgcacgtagacgtgtgtataacaggacctccttccccgcgccccgccaccccgacacacacaggagctgcct

SEQ ID NO: 423261 - DNA, 122 bp, Homo sapiens
aacctgatttgctaggcaaaggcttgtagcttgcagcttgcagggagtccaggaagcacacgatttgtatcacagatggccctgggacaggcaaaacagagctatccaccctgcatagccca

SEQ ID NO: 423262 - DNA, 122 bp, Homo sapiens
ccggagccagacatgagttggaaaactaatttgctttcagagcccagatggcccgatctccggagcctaggcctctctgaagtgctcccacattctctccgcctctcgggggtgggttagga

SEQ ID NO: 423263 - DNA, 122 bp, Homo sapiens
cgagtgagataacgggggagaggaagggggagacgtgatccacggaaaagctcagctgctcgggtcttatttccagagacagccgtgagccctcagacaagaatcactgcttccacctccgt

SEQ ID NO: 423264 - DNA, 122 bp, Homo sapiens
gaggctacgcacgcacgtattcgggcgcgaagggtggggcactgacgccagacgtcgccccgccctctgtggtcgctccgcccccggccccactccaccttcctcccaccccgggaacccgg

SEQ ID NO: 423265 - DNA, 122 bp, Homo sapiens
cggctgtggtacatgtcgttgctggctttgttgtactcgccgacggcaaagtccagtgcacgccgcacaccctcctcctccacgctggcgtccatggggcctcccactaggcgcggcggctt

SEQ ID NO: 423266 - DNA, 122 bp, Homo sapiens
acatttattgcgcaactctgaggccggggcggacccagctggggagatttactgtgggaacgtctggcccggccccttcctcccctccgggcgccgctggccgcctccgttcccggtccggg

SEQ ID NO: 423267 - DNA, 122 bp, Homo sapiens
tacccaagtctgtcctgtctgtggaccatgggcatcaccacctccgtcctatgtgaggatcgcatgggatcatgactgaaaaccttcgacacagtacctgccacacagtacatagggatccc

SEQ ID NO: 423268 - DNA, 122 bp, Homo sapiens
catctgtggcgtaaaaatcaagacagaatttaaataaagtaataccacactaacttgcctcgtcctctgtttctgggaaaactcttgagtctgccttgaggagtaaaaggcgacatgccagt

SEQ ID NO: 423269 - DNA, 122 bp, Homo sapiens
gcagccgaaagagccgcctccccgcagacagggccgtggccctccacccgaggcttcagccggaaggagagccttctgcagatagcggagaacccagagctgcagctgcagccagatggctt

SEQ ID NO: 423270 - DNA, 122 bp, Homo sapiens
cgtgaggcggcgggagccatgggccggggcctgggcgggctgggggcccggggcggcgggcggcgctcagcagcggccgcctcccgggctccggagcgcagccatgttggctgccgcggcgg

SEQ ID NO: 423271 - DNA, 122 bp, Homo sapiens
tgcacaacgatttgggtttcatctggttcggcctgcacgttagtcacagggtcagcgtctcgtgggttctggtgtctactgaggtgaccatccagggctgcagaatggattgtagcagggga

SEQ ID NO: 423272 - DNA, 122 bp, Homo sapiens
aatcccctcagcctggtgtgtgttacaaatatcacataaataaaatccactcttcagaaacggcatgcgattgcttagctaggtttttccaacattccgtgttttccatttctttttcaact

SEQ ID NO: 423273 - DNA, 122 bp, Homo sapiens
gcaagacgaccgccaaggcgcacgcacagctcaccttcccgcccggcacgtcagaagacccgagattccgtgagtgccaccgcaccttccggttcccgccggaagtttttcaaacgccagaa

SEQ ID NO: 423274 - DNA, 122 bp, Homo sapiens
ccccacctttgtgtaaatctatgcgagcaccgatggggcatgtcccagacccattggctccgcccacctcacctcctcgcctatcgttagttctctgcgaaaccgcgaactgggggcgcggc

SEQ ID NO: 423275 - DNA, 122 bp, Homo sapiens
attcccattctctggatgagagcaccaagcctcagcaagataaacgtctggaagatgtcacgcagctagcaggtaaaaaaaaggtaggtttatcactcccaaagctaatatactttcagttg

SEQ ID NO: 423276 - DNA, 122 bp, Homo sapiens
cccgcgctctccggcgccagggggcgccagcccgcggccacgtgaccccgcccggcccagcgcagagcccggctgctgagtccacacctgtggaatggggacgacgaactgggaggatccag

SEQ ID NO: 423277 - DNA, 122 bp, Homo sapiens
gagtgcgcaggaccccgacgtgggcgccaactcagtacagacctacgagctcagccccagcgagcacttcgagctggaccttaagcccctgcaggagaacagtaaagtgcttgagctggtgc

SEQ ID NO: 423278 - DNA, 122 bp, Homo sapiens
ccaacttccaagcctctggattgtgcttggcagtgtggctcagtggaaggactgaatgggcggggaagcaggaagcctgggttcttagttcctgcccctgcaactgacatgtgttgtgtaac

SEQ ID NO: 423279 - DNA, 122 bp, Homo sapiens
gggcttggggtcgtgccggcaggtagtgtcacttgagagtaaggggcctcagatgagcagcgagccagccggtcacctacaccggcctttctccctgggtgtcccgcaggaagttgccgctg

SEQ ID NO: 423280 - DNA, 122 bp, Homo sapiens
ggggtcacttcatagcagcatcagctctttcttttcatccttcttgcttgagtctgcctccggtcctctggatggagcaggctacaacggacgctcggagtaatgaagtgaattgctctttc

SEQ ID NO: 423281 - DNA, 122 bp, Homo sapiens
cagaatttgaccaccttgagggcagggattctattttattttttgctatacaaaagcatacgtaatagtgctattgttgcattgaaaacagcaaaaagaaatcaagaaggtacttatcttcc

SEQ ID NO: 423282 - DNA, 122 bp, Homo sapiens
gaggccaagtgcctgctctgaaggaggaactgaacagcaagccacgtctccagaatgccacggctcggcaagacttccctcacatcatcgcaagaaggttccagaataccacggctcggcaa

SEQ ID NO: 423283 - DNA, 122 bp, Homo sapiens
cccggcaccgtcctccctccacgccccctcctgcggctgccgcttcccctccccctcccgcgctcccggctctctcccggctccggattcgcacagccgggaagctgaaccgccggcgggcc

SEQ ID NO: 423284 - DNA, 122 bp, Homo sapiens
ccttaaggtatcaactatgtttttgttttgtcatcattcaatcctaagtgcacagaattccgggcatattacaggttccccatgaatgtttctttctttattaaaatgtatgaaaactctcc

SEQ ID NO: 423285 - DNA, 122 bp, Homo sapiens
gcgcgtggctatcgttgtgagtagagtgacctgtcagaaatactgaatcaccgttaggctcggtgtacaaaaaatgatgtctttgcaatagctgttaatgtatgtttggagatgctgaagtt

SEQ ID NO: 423286 - DNA, 122 bp, Homo sapiens
ccttctgatctgtttttcagttacataacaagccttaagatggcactgtttaaatctgtccggcacattttgcggtctgagcagggtcacgtggccttgctccgcaccgggcaccccccccc

SEQ ID NO: 423287 - DNA, 122 bp, Homo sapiens
agcacaacaattcagtcccattcttcagccacttgcagcttggattcctgttgaaacactcgagttcatgtttcgattcatttgtccttattgcccagccttttgctgctaacagattccct

SEQ ID NO: 423288 - DNA, 122 bp, Homo sapiens
ccgggtggcggcggcaaccgcccaccgccgcgctctctcacaacccagcccagcccggcgcgtctgcagagccccggtacttacggctcctcgccatccgccatattgttctccgcctcttc

SEQ ID NO: 423289 - DNA, 122 bp, Homo sapiens
aggctggtctcgaactcctggcctcaagtgatcctcccaaagttctgggtgtgtgagccacggcaccagaccctctttacccttaatagttaatctcctattaataagtaagtgattcttta

SEQ ID NO: 423290 - DNA, 122 bp, Homo sapiens
cttccgggctcacatttctgcatccggagtatgagaaccctcaaccaggctgaccggatccggaagtggattgcgagccaggaggaggaagccggcggtggccccgtcagcagccggctgct

SEQ ID NO: 423291 - DNA, 122 bp, Homo sapiens
atgagcagcagccccatcccgccaccgcctccgcccgggcccctactcccgcgcccacagcgccgctttcttcacgccgccgcccccgctgcctccattttgaggacatcgggcggctgggt

SEQ ID NO: 423292 - DNA, 122 bp, Homo sapiens
cagtacgcgcttttctcttccgactttgggccaaagccttgtccggagatcacagtgtctcgctcggggacacgccctctctaggcccagacttggtccccactggagttcccagcccccct

SEQ ID NO: 423293 - DNA, 122 bp, Homo sapiens
ttattgcaaagagcgaaaaaagaaagcttccacagtgtggaaggggacccgagtgggttgcgggtgctggctggggcagcctgcttttattcgcttatctgaccccacccacatcctgctga

SEQ ID NO: 423294 - DNA, 122 bp, Homo sapiens
gcccctcctgccgtgggtctgaatccgtcacctgccagtgacgaggacgcgaggaacacgcgcttctcagagtccagtcacacacgaggcagcaggacaggaaccccaggtgcctcccgtca

SEQ ID NO: 423295 - DNA, 122 bp, Homo sapiens
cagggtgcgggggcgctctggggaggccgggggcggaggcggtgtcccgcactgtcccaccgcagggccgacctcggcccttatctgctccggcagcttccgccccccaactccagcccccg

SEQ ID NO: 423296 - DNA, 122 bp, Homo sapiens
cggggccaggccccgccccttaaagggggcgcgccccagcgcaggctcagcaggtcagctcgcagggactcccttgcaagaagaccccggactctgccaaattttccctgccgggtttccgg

SEQ ID NO: 423297 - DNA, 122 bp, Homo sapiens
tccttgattagcatataatcaagaaataactatacatacactcagtcaagcagcccataccgctgctctgcctatgaagtagccattcttttattcctttactttcttaataaacttgtttt

SEQ ID NO: 423298 - DNA, 122 bp, Homo sapiens
gaacccaccaggaggaacgaacaactccagacgcgccgcctcgagagctgtaacactcaccgcgaaggtccgcaacttcactcctgagccagcgagaccgggaactcaccagaaggaagaaa

SEQ ID NO: 423299 - DNA, 122 bp, Homo sapiens
cttgcggtccccgccccgcggtccttcctccaccctcagccagggcagctgcagcccgagcgaacagccacggagcatcctccgcccgcccgggccgcgccaccgcccatgctgcagccagt

SEQ ID NO: 423300 - DNA, 122 bp, Homo sapiens
ccccactcgccggcccccaggcctggtccccgctcccggcgggcggcaggctgcttttaccgtccggtcgaaactcaaactccaggaactcgtggccgaacttgcccttgtgccccacgtag

SEQ ID NO: 423301 - DNA, 122 bp, Homo sapiens
gcgggtccccgcagtccgggcggcccctccacacccacctgcgtccagccgcggcctctccggcttcctcacatcccagcgaccaaacccggggactcaaagagaggcgctcccaccctccc

SEQ ID NO: 423302 - DNA, 122 bp, Homo sapiens
cggaggcagcagcacctgtaatggttaaaagctcagattctggccaggcatagtggctcacgcctgtaatcccagcacttttgggggccaaagccagtggatcgcttaagctcgggagtgca

SEQ ID NO: 423303 - DNA, 122 bp, Homo sapiens
gagggaaataatttgggggatttcttcttggctccctgctttccccacagacatgccttccgtttggagggccgcggcaccccgtccgaggcgaaggaacccccccagccgcgagggagaga

SEQ ID NO: 423304 - DNA, 122 bp, Homo sapiens
gcgctcccgccgcgcctggccgccgagtgcgcgcgcccgtcccgcctgccttctgctcaccgctactctgtctgcgcctgcgtgctttggctccctggatctggtaggccgagttctgttct

SEQ ID NO: 423305 - DNA, 122 bp, Homo sapiens
tccttctgaagcaatcctctctctcccatgaggccccctgagcgcactaagcagaggtgccgcctctgagtggaatgtgccaggccccagagctgcctctgagtctgcaggagtgcagagtg

SEQ ID NO: 423306 - DNA, 122 bp, Homo sapiens
actaccccggctctagcgtactggcggagacagacgtgagagctcggcgcctggggttcgcgcccgggcacttgaggggctttggctcctggcccaaggactcctcagatttctcctgccct

SEQ ID NO: 423307 - DNA, 122 bp, Homo sapiens
ttttttttttttagtcagaatctcactctgttgcccaggctggagtgcagtggtgtgatccggcccggctaattttttgtattttagtagggacagggtttcaccatggtggccaggatggt

SEQ ID NO: 423308 - DNA, 122 bp, Homo sapiens
ccccgagctggcctaaggcgctagtgctgggcgaaaaggaggcgcaggagaagcagacagcgcggccgcagcagctcccggactgtcccataaacaaagtttggagcaaactcccaccccca

SEQ ID NO: 423309 - DNA, 122 bp, Homo sapiens
gcggggcggggatcaagcaggggcagggctggcgctgcggccggagatgctgttgggccgcgacagcgcttggcagccaggagctctgcactgaaggcactggggtaaagtgaatgccgaag

SEQ ID NO: 423310 - DNA, 122 bp, Homo sapiens
ggagcgcagaccgtttcgcagaccagcgggcagagatagcagaactgacagtgctggaggcggggacggggagagagagtgagcgtggggcgtggccgggggcggagttaggatggggccgg

SEQ ID NO: 423311 - DNA, 122 bp, Homo sapiens
tatcttttggtctagcaaagggcttaatcatccgttttacggcacagttttaaacatggccgccccaggtaggagtcaagtgggcgtcgccatcatacctccaattacagctttgagaaacc

SEQ ID NO: 423312 - DNA, 122 bp, Homo sapiens
ccattctccaagttactagggtggcgcaagcgcctctccctttaactgcccaggcagccccgcctgctatgcccggcagtcaaaccaggtccagaccccggctgtgccgcccccacccccca

SEQ ID NO: 423313 - DNA, 122 bp, Homo sapiens
aaaaacaaacaaacaaaaaaacactggcgcttgggtccgtcgctgcctcggtgtccctgtcgggcttcccagcagcggcctagtggaaaagtaaaagatgtctgaatatattcgggtaaccg

SEQ ID NO: 423314 - DNA, 122 bp, Homo sapiens
ccaaagagtctaagctgctgcctttggggaggacgcatttgtctcttcttctgtggaaaacgcgcgtggattcacctttgcagctagaagttgcattccatgtgtgcggctggcagctagtt

SEQ ID NO: 423315 - DNA, 122 bp, Homo sapiens
aaaggttcacaaagaggtacttgaatcccttgttaagaactgaacaaacaaattcatcatcgggcctctctcctgtgtggccccttgcagttcagtctgtattcataactagaaattctctc

SEQ ID NO: 423316 - DNA, 122 bp, Homo sapiens
cctctctctggagtcggctagccggggctcggggagcggggtgcgcagggctcggggccacgccttgccacctgcagcgcccgggtgggccgcgggggcctcggcgggacgcgctcggccct

SEQ ID NO: 423317 - DNA, 122 bp, Homo sapiens
ctgcttttacagacgctcactcattgagtggacacttccccctttcccagctaataaaaccgaggtgtagagacaaagtgatttgccaaactagtatgggaggaccccagagagcagcactg

SEQ ID NO: 423318 - DNA, 122 bp, Homo sapiens
gagcctgagcgtcagataccgtgagcggcgtgcagagggcggagcctaggagtcagataccgcgagaagtagtctcccgaagaggttcggacaagcgcaggcgcactacaattcccgccctg

SEQ ID NO: 423319 - DNA, 122 bp, Homo sapiens
gtaaatgccaactcagcgggagggctctggctgtcgcccagagccgtttctcggctctttcgcggttgccggcgcgctcgggacaggaggaacccgcagcccgcgggagtcagcggagaccc

SEQ ID NO: 423320 - DNA, 122 bp, Homo sapiens
cgggctccttgcagccagagacgtggtgtcctttgagcagcctgagttctcggtcagccgcggggaccaggtggcccgcatccctgtcatccggcgtgtcctggacggcgggaagtcccagg

SEQ ID NO: 423321 - DNA, 122 bp, Homo sapiens
ctccgggtcttgggagcacagtagttatcgggagcgtcgcctccggcgtgggctctcgggcgcgagtttcggacgaggcctgggcgcggtggcaggggtctgcccacgccgggatctctgcc

SEQ ID NO: 423322 - DNA, 122 bp, Homo sapiens
acatcagtttacaaaataaaagttcttacgtaagaaatgttagtcaccagtgtgatgaaacgtagaatgaaaccttaaactgtgttaatagaaatgtggtgtcagaatcatagatggtagtg

SEQ ID NO: 423323 - DNA, 122 bp, Homo sapiens
gggaaaagaaagagtctaaaattgatcctgggtgactgagataatagaaaagtcacaaggcgtaggtttccagggaagatgagtttttagcctatttgttagtctcatgggatgagtgaaga

SEQ ID NO: 423324 - DNA, 122 bp, Homo sapiens
tttgcgccaacttctcttggtgagctctctctagctgcgcagaccctctaggaacattctcggtatctctctgcctccctctccctctccctctcccaggcaatgctgctcccattagagga

SEQ ID NO: 423325 - DNA, 122 bp, Homo sapiens
tttactataacgctagaaggtaaattctgttacgagccccatttcatagaggagaagtctcggtgtgaagattaaagtaaactgtacagggttatgcacctaggaagaagcagggctgagac

SEQ ID NO: 423326 - DNA, 122 bp, Homo sapiens
agcagcggaggggaccgaggggccggccctgatgcgctgcctttcgggctgtagtggatccgcttacttttaggagtgcagttactgcagcgatgctgtcgccgactggctgattttcagaa

SEQ ID NO: 423327 - DNA, 122 bp, Homo sapiens
aaccaaccaatccagagtccataccctaactacctcctttattaaacaccgagacaaggccgggcgcagtggctcacacctgtaatccaagcactttgcgaggccaaggcagtcggatcacg

SEQ ID NO: 423328 - DNA, 122 bp, Homo sapiens
tcaggcagctagaattccagcccactgatatttccatggacttggcatgttgacatccctcggactcagtttctctcctttgcaaaataagataaataatatggtctagtcagctggcacca

SEQ ID NO: 423329 - DNA, 122 bp, Homo sapiens
ggggcgttacggagacaaggccccaggaccaatcgtattggccagtggggggcggggcctcgttgccagctccagaccggcgctatgggcactccttttgtcaaatgagagacgcagcaggg

SEQ ID NO: 423330 - DNA, 122 bp, Homo sapiens
gctccagcccagactccctcgctggcgctaaatgcaggctccgggcgggcggagatgcgccggcatccgctagcagcctggccttgcgaccggcagttcccggcacattaggcagtgcgctt

SEQ ID NO: 423331 - DNA, 122 bp, Homo sapiens
ttgccccactgcgcatgtcccttgcagtcaaaggtcctgccctacttttcctaacacacacgcacacacacaccctttccggttccttctcctcggagcaggtaaattacttggctcaggtt

SEQ ID NO: 423332 - DNA, 122 bp, Homo sapiens
aacatctccttcaacaagcacatcggcacccggggctggcaggcggccgcccacatgatgcgcaaggtgggcgcctctcggcttccaggaagaggcagctcaggctcccagcacggggaggc

SEQ ID NO: 423333 - DNA, 122 bp, Homo sapiens
agtgcggggagggcccagtgggaggagggccatggggtggggacctgacggggctgcccacggagggagcaccactgctgcattgctctctgcaaacaaagactcttgatcaagagggaggc

SEQ ID NO: 423334 - DNA, 122 bp, Homo sapiens
cggggcgggcgccccacgccgatgggtccatggtgaaataaaaaacagtgctcacggctgcgtcccgtatctctgcgccggtcagggcgggttctgatccgggtttgaggcccgccccaccc

SEQ ID NO: 423335 - DNA, 122 bp, Homo sapiens
acttggtgaggcctccgggctcttgcttggtttggagccaggtgcttagcgccccgagcccggggccattcaccctgcaggagctgcacgcgcccctgacctcggcttttccctggcagcag

SEQ ID NO: 423336 - DNA, 122 bp, Homo sapiens
gagacggggttttaatatatctagactggtcttaacttgactcaagtgatccgtctgtctcggcctcccaaagtgctaggactacaggcgtgagccaccacgcctgacctagtgttagtttt

SEQ ID NO: 423337 - DNA, 122 bp, Homo sapiens
gtgaggccggcctatgacaaactctgcaggattttaaagccgtactacgggctggggtgccgggaggcggggtacactctccttgtctccccttctctaagttccccatcccccgcggcatc

SEQ ID NO: 423338 - DNA, 122 bp, Homo sapiens
agaagctaactagtacacaacctaagtttaatggcacgtattttcataaaggctatgaaacgcaaatcaactacatttcctcccttttccttctgccaagacgtattaatggcatcaactcc

SEQ ID NO: 423339 - DNA, 122 bp, Homo sapiens
tgcattcatggatgtccacgggggcaagggctttgtgttgcttaacccagcatcctgaaccgtgtttgttgaatgaatacagaaccccgtttgctctgggagagcacagaaaacagtcttct

SEQ ID NO: 423340 - DNA, 122 bp, Homo sapiens
cagcctcaacttgcaagggctctgagtgattgtgctactcttgaggatctgtgaagcctgcggccaaaaccaatctcagtgcaaaaaccatactggaacccttccattcatgcattcattca

SEQ ID NO: 423341 - DNA, 122 bp, Homo sapiens
agcactgccgagcacccgcggcgggtagagcaagtttctggatggcccggggcaggcgggcggggagaaggcgcaggcacccactgagacccggctgtcgtggcggcgactcctggctgcca

SEQ ID NO: 423342 - DNA, 122 bp, Homo sapiens
gctccaagaagggtagctctgggatcccgggcaggaaattggtgacaaggtgacaaggtgcgcgtgtcacagctgcccagttcacggcttattcagtcttctccctccccccactccccacc

SEQ ID NO: 423343 - DNA, 122 bp, Homo sapiens
aagacagaagaggaaaaaacactaccattgaatcacaagtgtgctcccatgttcttcctccgggaaacaaagacaagacaccttgggctggctgacatggattgaggatcagagtatactcc

SEQ ID NO: 423344 - DNA, 122 bp, Homo sapiens
ggtttcgctttgttggccgggctggtctccagctcctaaccgggagtgatctgccagcttcggcctcccgagttgccgggattgcagacggagtctcattcactcagtgctcaatgttgccc

SEQ ID NO: 423345 - DNA, 122 bp, Homo sapiens
gccccgtgtgtgcgtcgatggagaagggtccatcaccctcgctctgcctccggttgatctcgtaagtcacagccccattgacaccagcatcggcatcagatgcgaacacctgcaagacagga

SEQ ID NO: 423346 - DNA, 122 bp, Homo sapiens
gtaaatacattagaactgctctcatggttactgtttggcaaatttgggacaccctgacttcgtgcttaggattgtagcccctttttgttatggcttagcgtagcctttgggtttttttttga

SEQ ID NO: 423347 - DNA, 122 bp, Homo sapiens
ggagctttgtcttgtccttcaaagttcggctgcccttgaagtgatttgtcaggcggcccacgggtgacagggaggatgtgcagcggggagcgggggcgggacatgccggggggagcggagag

SEQ ID NO: 423348 - DNA, 122 bp, Homo sapiens
gcgtggccaggcgaagggactcatcggggggcgtggccaggcggaggggctcaacggaggcgaggccgggtggaggggctcctcgggggcgtggccaggtggagggactcatcgggggcgtg

SEQ ID NO: 423349 - DNA, 122 bp, Homo sapiens
cgcgctgggcttgcagcccagctttcagattgctcctgtgccggagccctgcgaatcatgcgaatcatgaaactgaagacctggccctgaagtcccagtgcatatgaggagatccgttgtct

SEQ ID NO: 423350 - DNA, 122 bp, Homo sapiens
taaatgggtcacctagcagctggcaaaagaaaaaaaaaacccaggaaatggaaactataacgttagagtcccaagacaagggtgcccagagttggctgtggtggatagatacttaggtcagt

SEQ ID NO: 423351 - DNA, 122 bp, Homo sapiens
ggtttcactccattctggagacgtccaccctgagggagggagtgggagcgggacgtacatcgagcgccctccagccacctatgggcatggcaaggactgggtcgtctctgatactggggtgt

SEQ ID NO: 423352 - DNA, 122 bp, Homo sapiens
ccgggccaccatgtcccactcctgcatgtgagggatctgctcagacatcagcatatagatcggcctttcatgactacactcgggaaaacatctgcgtctaccccggcctggcctgtgtgttt

SEQ ID NO: 423353 - DNA, 122 bp, Homo sapiens
tctcaggaatgaatgaatgaacaaatgaaccaatgaatcctgcaggagtcagttgggaggcgaagagcctggaggccgccggacggcgggacccacggcctgcgccagccccctgcacaccc

SEQ ID NO: 423354 - DNA, 122 bp, Homo sapiens
gctgtccatggctctaccgggccccactcccaccgcccgtggtccggtcccgcctgtgcacgctatgcctccattaatattttaaagctgccaccgcacgctctttgcaggagggagtcatt

SEQ ID NO: 423355 - DNA, 122 bp, Homo sapiens
gcagaccagattatatttgcctttatgctttaaaaattagtcattgatcctggagttctgcggaataataattaaggcttgggttttagatccaaaaggtaattctggcacttggagactat

SEQ ID NO: 423356 - DNA, 122 bp, Homo sapiens
gccagtttgatgatttggcattggaagctctgggtgccatagccactagttgtgtaacaccgactcaccataaatagcaccatttatttaggatctagtgcagcttgagcacttttgtttgc

SEQ ID NO: 423357 - DNA, 122 bp, Homo sapiens
aatgaattttttgagattttattgagtagatgttttttcatttattatttgcccttggcacgatttctggaccctttcaatggtggttttataatttttaccagcttcactgggttaggggg

SEQ ID NO: 423358 - DNA, 122 bp, Homo sapiens
cccatgctgggagaggttagcacagcagctgcagcccactcccctgtctggggcactgagcgtctcatctcaaaatatctatgttcccaagaacacactttaagacctaactctgagtgacc

SEQ ID NO: 423359 - DNA, 122 bp, Homo sapiens
gtgccggggctcggccgtgaccttgcgggtctgtccccggctcctctcctttccccgcctcggaggccctccgccgctgcagcgccactcacttcccaccgggtctgaaatttgtgccccct

SEQ ID NO: 423360 - DNA, 122 bp, Homo sapiens
actggtgggcgccgagtactccgatctggggtggtgacaagccatatcagagtccgggctcggggtgcttgggtgcctccacatggccatgcctgccccagcaagagtggtagatgcatccc

SEQ ID NO: 423361 - DNA, 122 bp, Homo sapiens
cccttctgccacagccacagcaacagttctattcctgctgcccttggtctggggaagaaacgaagagcttaaaggctgcacaccacagccaccatgtggagagatgaatctctcctccctgt

SEQ ID NO: 423362 - DNA, 122 bp, Homo sapiens
tttcatgaagagttcttaactccccccagctaatgctaaaaatgtgtcctggttcttacacggcactgctagtaacgtggcaacctgagactgttcccaggctcaattcacaggagcccatg

SEQ ID NO: 423363 - DNA, 122 bp, Homo sapiens
cttcatagtctcagcaaggacaaaccagcatgacttcacttctttttgctcatctgccctcgggttccttatctcttggctaacgtggcatgtgtggacaatcttctctgaggagtccagct

SEQ ID NO: 423364 - DNA, 122 bp, Homo sapiens
aggccagtgtagacatatgattattagcttaggtccgcagctcacacgagggttcctgcccgtgctgtcctctctgtgggtttggacaaatgtccgtgccgtgcacccaccgctgtgtatca

SEQ ID NO: 423365 - DNA, 122 bp, Homo sapiens
gctgtccttgtctctgagtccttttgcccttgtctcccacaggtcctggtgcttgatggtcgaggccatctcctgggccgcctggcggccatcgtggctaaacaggtactgctgggtaagtc

SEQ ID NO: 423366 - DNA, 122 bp, Homo sapiens
ggtctcccggcctccggaattccaatctcttgccagacccctccctcacatcgttcctcccgaggaaacgtgacccatgccggccgccgtggccgccccaacctactagttcgcctttcctc

SEQ ID NO: 423367 - DNA, 122 bp, Homo sapiens
ccgcgaccgctttctgcgaagtcggggagggtgcgggcgttgagaggctgcagcagagggcgctgggtcgccagcctgggccgcgtctcccattggtcggggctggggcgctgggctggaga

SEQ ID NO: 423368 - DNA, 122 bp, Homo sapiens
aatggggccaagtttggtgtctattaacttgctttatcagccaccatgggaagttggggacgtgcctgcattccaccttgccagtgcatgctatggaggagaaaatgtgagtggttctatgc

SEQ ID NO: 423369 - DNA, 122 bp, Homo sapiens
aactcccaacctcaagcgatccacccgcctcggcctcccaaagtgctgggattacagacgcgaaccaccgcgcccgactgtcctgtgttttaatgcttgaaaataatctgaatatggaaaat

SEQ ID NO: 423370 - DNA, 122 bp, Homo sapiens
ggcgccgcgaaggctcgcaggaggctcggccccgggcgcgcgccccattggcccgcgctgcgcgtcacacgtcccgccccgccctggccccgccctggccccgccccggcccgcccgcgcgg

SEQ ID NO: 423371 - DNA, 122 bp, Homo sapiens
cctcgtacttccgagaccttacaggcagagctggagctccctcgcctctcgcactggccgcggaagtgaggtcactaggggcaggctcctcttggccaccaccatcgtgtgcttgcgtttct

SEQ ID NO: 423372 - DNA, 122 bp, Homo sapiens
catcccaaagaagctgctaaatgcttgatcactcactccacctcctgctccaaagcttatcgtgtctcactgcaccctcatagagaatggaagtgtgaagggttgatgtgaaaatggagttt

SEQ ID NO: 423373 - DNA, 122 bp, Homo sapiens
cccctatgtagaggaagctggacattttctcagtcatgctgcttcatgttccacagtggacgtccctcttcttccctgcgccctcgccgccctctctccagggagccgccgcggcagaagcg

SEQ ID NO: 423374 - DNA, 122 bp, Homo sapiens
ccacccctctccacccaatcctggtacctgagggcgtcaagggtgacctgggaagacatccgagagtgaggcagctggtgaggcccgcgtgcccttgtggcagttccgtcttgggacgataa

SEQ ID NO: 423375 - DNA, 122 bp, Homo sapiens
tattctcctcctacagatgaaaaaatgaggttcagagagataaggtttttgccaggaatgcgcagccagacagtggccctggattgacccacttcaccattcctgcccctcattcattccct

SEQ ID NO: 423376 - DNA, 122 bp, Homo sapiens
tgattcagaaggttgagaactgggcctgagaagttttttttctaatggattcccaggtgacgctggtactgctggtccatatagtatttcccaaatttgcctgaagctgattcacctggggt

SEQ ID NO: 423377 - DNA, 122 bp, Homo sapiens
agatggatcattttcacaaaggttctcatccaggtggaaattgcaccagaaagaaactaacgttatctcattccccactcttaagaggaaaacatctactagcaaagccagatgtgaataca

SEQ ID NO: 423378 - DNA, 122 bp, Homo sapiens
gacgaagggaagagtcttttcagcgctgaggactggcgctgaggaggcggcggtggctcccggggcgtttgagcgggctcacccgagcccgcgggccaacgcggatccaggcccgactggcg

SEQ ID NO: 423379 - DNA, 122 bp, Homo sapiens
aaggctacatctccctaatcctttgataataatttagcctcctgggagggccccaagctgcggtaagtagtgactgacaataaggcaaaattaggtgggcagcagaccattaggatagaaaa

SEQ ID NO: 423380 - DNA, 122 bp, Homo sapiens
aaaatggggctgatgatcataaagccacaggtaagaagtaggcaaccgcctattgcagcacgtggcacatgggcactgcctgagcaccagctttcctctcttgctgccgtgatctaggggta

SEQ ID NO: 423381 - DNA, 122 bp, Homo sapiens
catccccttgtgagagaagaaatcacgatcgcagggctctgaagtttatgtaaaactcatcggaacgggtggccgtgagaccgaaccaacagctcggagaacacccttctgcagctgcacag

SEQ ID NO: 423382 - DNA, 122 bp, Homo sapiens
ccgaattgtggaaatccggcttggaggggagcggtgatgggtcccgggaaacgcgcgcggcgcccctcttccgagctcctggacccagggctgggtcaagttgagtagggtaaggcggcacc

SEQ ID NO: 423383 - DNA, 122 bp, Homo sapiens
ccctgcctcaggctattcctggcaatgcgttcagtcagggtgcaagctgtgtttggtatacgtgtgtgtttggtatacgtgttgtgtgtgtcagacaagcaggattggctgatggcgttttg

SEQ ID NO: 423384 - DNA, 122 bp, Homo sapiens
gtttacagatggaatgctgcacagtcctgccaagtccaggcggttattcctctccacagccgaaggaaactaaggctcgggtggggaagtgtccccctggggtctctccgcttaggctgcag

SEQ ID NO: 423385 - DNA, 122 bp, Homo sapiens
agaacttttatctatcttaattaccctataggaggtgcttaactaatgtttattgcatgacggtgaattctctagtcagtgaattctcaattagccataccaatggaggggtacactgatgt

SEQ ID NO: 423386 - DNA, 122 bp, Homo sapiens
cccgaggaggccagctgagtttcaagatataaaagcaacttcgggtgctccttttccagccgggacgtattaaagggaccggagcggggcagttcccgacgccgcagcgctcgctttccctt

SEQ ID NO: 423387 - DNA, 122 bp, Homo sapiens
tgccacctggtggatccgcggcgctcagagagcccattcaagcgcatccagttcctcccgcggagaccaagcccggtcaggcaagttccgtgttctgcagctctgggcagctcagagcttct

SEQ ID NO: 423388 - DNA, 122 bp, Homo sapiens
ggacatcccggagcccgagccgagcccgaggcgcgagcggcggagcgcaggcggcgcatgcgcgctgacaggaaacgcgaaaggaaccagctaccaggcctcgcaggaaaattaatccggcg

SEQ ID NO: 423389 - DNA, 122 bp, Homo sapiens
atactagctccaaattactgatgccaatcaacagtaataaaaaatatgaatgatatgaaacgtgatattaaaatgattagtaaatcactatagtccataatgggaaaactcattccattatg

SEQ ID NO: 423390 - DNA, 122 bp, Homo sapiens
ggcctcaggagtgaagctgcagaccttcatggtgagtgttaacagttcataaagttggcgcgtccggagttgttcgttcttcccgtcgggagttgtttgtccctctctgtgggtttgtggtc

SEQ ID NO: 423391 - DNA, 122 bp, Homo sapiens
cattaggcatgcttatgaattatttggttttataatttcagcttactttgcctgcacatgcgtgccagaaaaaaatacccatttaggttgatgccaattagacttattttttaaatttccac

SEQ ID NO: 423392 - DNA, 122 bp, Homo sapiens
gcgtaccaggccaggccggccctgaggggcaggggcaggacgccaggagctgacccccagcgtccccgactgccagtgcccctgtcatgcaggccgaggccaaagcacgaaggggcctcgct

SEQ ID NO: 423393 - DNA, 122 bp, Homo sapiens
cctggactcaagcctctctcttcggccttccaaagtgctgggattacgggcgggagccaccgcactgggcactgcacttaaatgagatagtgcatgaacgctgtcagcctctccctacacag

SEQ ID NO: 423394 - DNA, 122 bp, Homo sapiens
aggaaattccaaggtggttttctttacaggctcctccgcttctgtggccagaggggacagcggaggagcccaggtacctaagccaactcaagagaagatggaattgaatatttcaaccacct

SEQ ID NO: 423395 - DNA, 122 bp, Homo sapiens
cctcgtgggtattaagggagccgctcggaaactcataaacttgtctaaggcgatggaagtcgtccaggagcccgatgagtcaacaggagcatttttagagcgcctccaatcggatttacacc

SEQ ID NO: 423396 - DNA, 122 bp, Homo sapiens
gctgaaggggggctgtctgtatcctggaggtgacactgacccaaaggaagggccagcagccgtggccttatatagggggacctaggctgtgctattggctgggaggggttgtccccagggag

SEQ ID NO: 423397 - DNA, 122 bp, Homo sapiens
tcccagtcccactcgcagaaaaattatattccacaaagaagaggaagaagtgagaagattcgccagattttagccttatatgtaattccttcacatttgggcagcatggacgagaaggaaga

SEQ ID NO: 423398 - DNA, 122 bp, Homo sapiens
ggctggagctgcagcaggagccggagtgggagttggagccggagccgtccccggggtatccgcggcacgtggaagaggtggcctgtgagatgctgcgctgggcttgacctagagcagccaag

SEQ ID NO: 423399 - DNA, 122 bp, Homo sapiens
aaaggggaggaagcccttccccgaagccacgctacccagtcaatcaagacacgtccgcgtcgggtcccgccctctgggggaggattgacaaggtctgtgcttccagcctcccagacagctcc

SEQ ID NO: 423400 - DNA, 122 bp, Homo sapiens
accaggctgaccctgaggcctggagactgccgagatccctgttcaatgtctggagagcagcgggcgcagctggtagccggaccctgcgtggtttggagcagcgggacactcactttgagaca

SEQ ID NO: 423401 - DNA, 122 bp, Homo sapiens
gccatggagacagcaacagtccccagccgcgggttccctaagtgactggttactctttaacgtatccacccaccttgggtgattagaagaatcaataagataaccgggcggtggcagctggc

SEQ ID NO: 423402 - DNA, 122 bp, Homo sapiens
gaggccgctggagaaaaggaaaaaatgccgtcgcgggcggggcagacccacgagcctgcacgcagccccgcgccgccccgccccgtccgcgcaaacacgcgacctcctcagctcccattggt

SEQ ID NO: 423403 - DNA, 122 bp, Homo sapiens
ggtgagggggcggcgcccgccagccaggacagcatcctgccgccgtgacaagcacgcctccggttgccaaaacaacccaaaaatgtgcctcaaaacacgttcgcaaagccccgggccggccg

SEQ ID NO: 423404 - DNA, 122 bp, Homo sapiens
tcgtgccgtgttgtcatgcagatgccaccttcggaggtgccctccgctgtgtgagccacacgccggctgcctctcagccaccgtgtgtctgtggtgtgtgatcccgggtgtctgtccctcgg

SEQ ID NO: 423405 - DNA, 122 bp, Homo sapiens
agctgtgtgtttctaaagggccacagtgaccaccagggcgtcagctggcggccaggtacccgccttctcctaggcctcgggatgggaggcaggtagagctcacagaggagcctccaccgcag

SEQ ID NO: 423406 - DNA, 122 bp, Homo sapiens
gaaagcagcacgtgggaaaagttcaaggtgccgtcgttgaggacagagatccttgggtggcgggaggcgtggctgagcactgtcccattgggcagcaaccacttcacggaggacataggggg

SEQ ID NO: 423407 - DNA, 122 bp, Homo sapiens
tctcgggacccggcgatcgccacaggttgggactctgtgcggcgctggagttggcagccccgggcgctatggctcccttgaggagtggggagggaggtggccggggggttggcgcgcccctc

SEQ ID NO: 423408 - DNA, 122 bp, Homo sapiens
tgtgtgtgcacacagcctcagtcacaggggagggcagtcattccctcacccaggcacctgcgcggagttacacacacttagtcactgcagatcccacagtggctcagagctacgcacagata

SEQ ID NO: 423409 - DNA, 122 bp, Homo sapiens
gacctcccaaccaagccctccagcaaggattcaggttgttgagtgcttgggagggacacccgcctccactctgcaagaactcataaagggagatgaggggatcgtgggagggagggaggagg

SEQ ID NO: 423410 - DNA, 122 bp, Homo sapiens
ttaatatgaatttatgcacattctacaaaggcattaccacacctgcagaaaaccattgttcgtacttggagggagttttgatgatcattcctgttctgtgtatagttcacatttttacatgg

SEQ ID NO: 423411 - DNA, 122 bp, Homo sapiens
aaagttgaacctgcctcccaaactttctcctgtagtccagacggggacgccctgagggagcgtttgtgtcagtaatgggaaatctgcaagctagacggaaatgacctgctagtgattgcgct

SEQ ID NO: 423412 - DNA, 122 bp, Homo sapiens
ctgcataaagcctagatgtgacctccagaggacagccaattcaggttcagctggcctccacgtggtgataaaaccaaaatgtaaatcccatgaaagtaggaactttgtttacttctgattcc

SEQ ID NO: 423413 - DNA, 122 bp, Homo sapiens
gctctctgggtggggcacagctttgcagtgaagggtacacagaagaatgcagcttcccatcgggaaggggctgctgcttcctgggttgaaggctcccctcctcccagcgtgatttgccccaa

SEQ ID NO: 423414 - DNA, 122 bp, Homo sapiens
tctcccacggaagcacgacccctccagagccaggactttacaatctaaaaagctcagagtcgtggggagaagatatacccgtcaccaaaccaatgctgtggatggggataagaggagcctct

SEQ ID NO: 423415 - DNA, 122 bp, Homo sapiens
agacttggagcggctgtgctgtgccctgtcttgggggctcttagcctcaagggaccatggcgtggctccatggaggaggcggcctgtgaaacccctggaacggcaggaaaagcactgtctga

SEQ ID NO: 423416 - DNA, 122 bp, Homo sapiens
gctccctccctccgtctgtccctcccgggccggtcccctcctcccctggctcttctctcccggagctttgtcctcaacaattactctcgcaaaaggtgggtgggggtgggggggtgggcatc

SEQ ID NO: 423417 - DNA, 122 bp, Homo sapiens
atgcccagccctattgttttctcaatctacttcacataaaattttttgcttcccctattccggacgatgccgccaaggaggtggcggcgcgctctggaggtctgaagccgctgctggctgcc

SEQ ID NO: 423418 - DNA, 122 bp, Homo sapiens
gtggctcatgcctgtaaccccagcactttgggaggctgatgtaggagaattgcttaagcccggaagtttgagactagccagggcaacatagtgagaccccatctaaaaagaattagctgggt

SEQ ID NO: 423419 - DNA, 122 bp, Homo sapiens
gttcctgcccgctccgtgtgggctaccgctgggagtgcacgggcaggatggagggacactcggggggtgagaatcgccacctgggagctgccatcccctccaccatcggcctcagcttcctc

SEQ ID NO: 423420 - DNA, 122 bp, Homo sapiens
tcggaaaggcaccgcggggccagcattagggctgagctagttctgtggcctcgggtgggacgttcaatctctctgggcctcgccattctctttctttttattgctttttgtttgtttgttta

SEQ ID NO: 423421 - DNA, 122 bp, Homo sapiens
attgtagttagtcaatggtatgaatttagacaaaccctccagtggtctggaatggttgcacgttttctgctgtagctgcacttagagtaacaggaactaccagggaatacattgttaaatct

SEQ ID NO: 423422 - DNA, 122 bp, Homo sapiens
tcctcatctaaatcccactttcaagttgtcatctgcgccttgcgtaaaatgttctggtgacgtaagagcctgggcctccctcctcttagggactatcccacgcgatcagccagtcgcagcgc

SEQ ID NO: 423423 - DNA, 122 bp, Homo sapiens
gtggctgtttaaacagctgcacagatgccgggggaggcagtgcctttccctagcaatgcacgggagaactgaacaggaaacactttacctcactgcccgaacaaatcactccaaatggtttt

SEQ ID NO: 423424 - DNA, 122 bp, Homo sapiens
gcttaaataagtcactacagcaactattatctcacagtgaaaatgttcctctttaaaggccgctaaataaatgaatgaccttggacatacatttatttcctcacttttcagtagtttacaag

SEQ ID NO: 423425 - DNA, 122 bp, Homo sapiens
aggggaatttgtttttgaagcaaaagagtctcgttctccctcaggtcagagacccctcatcgcccccctcacagaatcctcagacccttcacagaaaccttttcccccttcaccaaactgat

SEQ ID NO: 423426 - DNA, 122 bp, Homo sapiens
atagtattgttctctgtatagttctcagtatcaaaattatatagcctatatgatacacaccgttttttaaaaaaagtcacacttggagagatgcaagggccttgaagagataatacacagac

SEQ ID NO: 423427 - DNA, 122 bp, Homo sapiens
gtgacaggctgtgccagtcgcaggctctccaatcaggaggctgccgtggggccaggggcgcggctccggttcccacgcggggcgaattccctctcccggtagtctccccagccccgccccgc

SEQ ID NO: 423428 - DNA, 122 bp, Homo sapiens
tcagttctttccttatcccaaaatcctaagtatagtttgaaaagaaagggctttggaggtcgattagttatgattcattgccatgtagacatggcctgcaatttggagacttccaaattcag

SEQ ID NO: 423429 - DNA, 122 bp, Homo sapiens
tgcttccttttcattacctgtgaactggagacatttatagtatctacttcatagggtttgcgaagctgaaatgagttaatttatgtaaagtgcccagaacaatgtctggtgcataagtactt

SEQ ID NO: 423430 - DNA, 122 bp, Homo sapiens
cgcctcacactggctgcctcgggaacactccagatgagcagaggctgctctacttcttggcgtccccagggccccggtttctgagtccttctgtgcacctgacccaaatccctgctgtcgcc

SEQ ID NO: 423431 - DNA, 122 bp, Homo sapiens
ccagggtccatgcctgtgatcgacgatcgtccggcagacgcgggctcaggggcggggctgcgtgtgaacacttctgaaggggttgtgctcctgagttactcagggcagaagaccgaaggccc

SEQ ID NO: 423432 - DNA, 122 bp, Homo sapiens
attatcgcgagatcagggccactatttgagcgcatgcgcaagacatgctagtctcttttccggttagcgcggcgtgagaagccatgaggtgagttggtcctgaaagccctatccgcgttcat

SEQ ID NO: 423433 - DNA, 122 bp, Homo sapiens
gcccccactcccaccccagccgcacagttcccacctcctggcacctccctcccctggggccgccaccccttctgggctcgtgatggtggagctaaggtccaggcctctccctcccgagtgca

SEQ ID NO: 423434 - DNA, 122 bp, Homo sapiens
ggtagagagagaaacacagggcccaagtggatctgcttgatggagtctggggctggtggtcgagggttggccggcagcccctgacctgccgaaagcccagccccgggacggtcaacgtcagg

SEQ ID NO: 423435 - DNA, 122 bp, Homo sapiens
gggcccaggagggagggacgtcgcggtgggccccgcatcgcggagggaacaggacacttgcgctctgggtctgggacaggaacggggatgaggaggggtggggtgggggcggtggtcaaggc

SEQ ID NO: 423436 - DNA, 122 bp, Homo sapiens
tgactgaattccaccgtgggctgaggccaatggggcgtcacgcaggggctggggaggggccgccttccctaagcacacggctgctgcccggagcctgaacaaatctggccttggtgagccag

SEQ ID NO: 423437 - DNA, 122 bp, Homo sapiens
tttctgccctcggagtgcgcccggacgcccgggagtttcagggacttcttgggagcctaccggaggaaggcccggctttgctccaagccgcgtccctacctgaggtctccacgggaggagcg

SEQ ID NO: 423438 - DNA, 122 bp, Homo sapiens
agcccccgccgcctcctccacccgcgtcccagcagccaccacccccgccacccccacaggcgcccgtccgcctgccccctggtggccccctgttgcccagcgccagcctgactcgtgggcca

SEQ ID NO: 423439 - DNA, 122 bp, Homo sapiens
ttcggagaaactcgacttcccaggctcggagggccagtttgggattgttatagaacaaaacgtgggcggcataaagtgctccgaagtggagatcaccttgaagactgggcccttggctctgt

SEQ ID NO: 423440 - DNA, 122 bp, Homo sapiens
agcataaaccaatgcgaagaaatacacagaactagtggcacttgaaccaagcaggcatagcgccatttcagaataacaagcaactttattctcaatttaccagaggttatagctctaaaaat

SEQ ID NO: 423441 - DNA, 122 bp, Homo sapiens
cgcgcacgggctggtctctgccctaatgcggcggctggcggcgagaggcgctgcaggggacgcgggggaagtggcggcgccggcagcggacagctcggacagcgcccagggccggagcccga

SEQ ID NO: 423442 - DNA, 122 bp, Homo sapiens
aacctaacgaggccctcatggactgacggagctgcgagagaagcctggcctcaccccagacgcctctgagaggaggagcagtcatgggcagcgaccgattccattccagagcagtggaaatt

SEQ ID NO: 423443 - DNA, 122 bp, Homo sapiens
agcagaactttgattggaaagtcccatttcatatattacactggtagtattttcttctaacgaaaaaaaaaaagcccttgtgccaccaccttgacatgtacttaaacgtttacccaaatcac

SEQ ID NO: 423444 - DNA, 122 bp, Homo sapiens
caatgctgcctgaccccaaatattgtctgcacctgatacccggaatgacaccattggagacgtatttctttgtgttagccattctcttacttaggtttctcttagatttctcttccttgagc

SEQ ID NO: 423445 - DNA, 122 bp, Homo sapiens
gtttactatctgtctctcccactagaagataaacttcataagagcatgcctcttaaagaccgtgttcttggctacgtccatagcatccgcaacagtgcctagcacataggtgctcaatcagt

SEQ ID NO: 423446 - DNA, 122 bp, Homo sapiens
agggaagagaaacggcttttgctctgtgtcctttaggataatgtggctaactctgtctaccgtgaaatggtggtatctgcatatcatgagatcagtgcattggctggactctgccccccacc

SEQ ID NO: 423447 - DNA, 122 bp, Homo sapiens
cctcacagctacctggaccaggtggagcctccctgagggtctctgtttcctacacacacgcgcgcaggaacccaggtgagtgaacgttaagtgtggtttgaattgtgccactcgagtgctca

SEQ ID NO: 423448 - DNA, 122 bp, Homo sapiens
gatgctgttgtagtaattgtgctccaaagagtcctcctcgtccccccaggccgactcctccggccctgccagcctgggggacagacaacaacggccatggcacaggcagggcccaagggggc

SEQ ID NO: 423449 - DNA, 122 bp, Homo sapiens
ggcaggaggccagagggctccactctgtccgggaacttaaggacggggagaggtggctgccgttaatgtcctcatggacaatgtcccagagatttggcagcatgcactgtgtgatcccagtg

SEQ ID NO: 423450 - DNA, 122 bp, Homo sapiens
cgtgatctgcccgccttggcctcccaaaatgctgggattacaggcgtgagccactgcgcccggcctactctttggccttttatggaaaaaagttgctgactcctggtgaatatattaagaaa

SEQ ID NO: 423451 - DNA, 122 bp, Homo sapiens
gttttgttttctgtgtctctttctccctaagccaattattctgcaaggaaatgactgttccgtggttggttgggaataaaataaactctgtgtttgttcacttagcctttcaactacaggga

SEQ ID NO: 423452 - DNA, 122 bp, Homo sapiens
taagtaattttaaaagacaacttcatagcactaccgtacgtggaaagtctcacttgccaccgagagaagctagccataaaaataaaaggtgaggcacggtggctcacacctgtaatccccgc

SEQ ID NO: 423453 - DNA, 122 bp, Homo sapiens
agacaggcggtcacagacacacgcagattggtctgtccccagagggcgcttggagggcagcggaaggattcgggcctggataggggcttgacctagccctcctcctcctcctcctcctcctc

SEQ ID NO: 423454 - DNA, 122 bp, Homo sapiens
caccaggcagctaatggtgattgagacagatctgccactattcccccatagaacctggtccggcatgtatgctgggtcatgtcaaaataccaggtagtattgaaggcaacagatagacagca

SEQ ID NO: 423455 - DNA, 122 bp, Homo sapiens
caaatcaatacactagttgtttctacccctggctgctgtggtgtctttgttggtggacgtcgctgtgtgtactgaggtgcagactcgtgggcatgcgcgcgcgtacacacacacacacacac

SEQ ID NO: 423456 - DNA, 122 bp, Homo sapiens
aacacgaaaggatgatgccaggatcctgctctccaggagaggcaagatttgttgagtaaacgctgcaacatcaatggagagagggaactctgctggtgaagcatagagtcagcactgatgtg

SEQ ID NO: 423457 - DNA, 122 bp, Homo sapiens
ccatgtggtttttcttggctcacctgtatatcctggtaggaacagctaagagccactcaacgcacccttctctttttggagaaaccccagggagttgtgttgcttggggctgggccgcttgg

SEQ ID NO: 423458 - DNA, 122 bp, Homo sapiens
ttgtatatggaaagacaaagatttcagatgggcttggttctaggagggcgggatggtggccgtgctttagactgtgtggaagttctttctgtgtagtttatacagggggtagaggttattca

SEQ ID NO: 423459 - DNA, 122 bp, Homo sapiens
catttacacatgaactcttttcaactgaaggcaaatcaaaaacacagtactcacagcacgcgaaagcgcagcgtctgtggagggccggctgcgggacctcagaacgcacagatgtgggtgtg

SEQ ID NO: 423460 - DNA, 122 bp, Homo sapiens
gccgaatccccggggagcggcggtggcggcgtcctggggccaggaggagcgaacacctgccgcggtcctcccgccggcgctgggtgagtgcaccgcccgccctatccgctgtgcctggctgc

SEQ ID NO: 423461 - DNA, 122 bp, Homo sapiens
caacagtgatggagaaagccagacgggcattaaaaaacaaaacaggagtctctcctaggccgcgcctacacgggctcgccgcgctcgctcgtcaccaccgacaccccaccccctgccctccg

SEQ ID NO: 423462 - DNA, 122 bp, Homo sapiens
tcatatgagtaaatatgacccatatgagtaaatatgaccttttgattacttcacttcgtgcggatcagggaagactttctaaggaagtgataggcaattcagcaatgtgactacctggagaa

SEQ ID NO: 423463 - DNA, 122 bp, Homo sapiens
gtatcctgtgtgtgtttgatacctcagattcagcatctactacagcacgaagtgcttatgcgtgtcctgaattataggagagtcggattcaccaccctgcccagaaacagaagcattccaga

SEQ ID NO: 423464 - DNA, 122 bp, Homo sapiens
aacatcctggctatccgggaagcctccacgtagacaccaacattgaggcttcatctcactcgtgcttcaagccatgtttacctgagaaacaaaatgtgctgaatagaggggaaaactggcaa

SEQ ID NO: 423465 - DNA, 122 bp, Homo sapiens
caagctccaactgctcataagcagtcaaccttgtctaagtccaggtctgaagtcctggagcgattctccacccaccacgaccactcacctactcgcctgcgcttcacctcacgtgaggattt

SEQ ID NO: 423466 - DNA, 122 bp, Homo sapiens
gggcaacatggcgagactcctctgtctctgcaaaacaacaataacaacagccaggcgtggcgcaagccggtggtctcagctattcgggaggctgaggtgggaggatcgcttgagcccagggg

SEQ ID NO: 423467 - DNA, 122 bp, Homo sapiens
ccaatgggcgtggaggaggtgggtcggctggcggctgtcaccctccaggggacgggagcgcggagaccgggagcgcgcgagctgtcgccgcgccccgggccgagggggaggagccgggggag

SEQ ID NO: 423468 - DNA, 122 bp, Homo sapiens
gagtcgtaaacatcacgagcggtgatgaacttgcctgtatgatcgctgctgtatctccaacgcctggcacatatagaagctcaatatatatttgagtgaatgtttgaagtttatctttgctt

SEQ ID NO: 423469 - DNA, 122 bp, Homo sapiens
gtgtggaagagccacatccttgctggagcagaggcggctgtgtgggagccgaggcgagtgcgacacatgggccgtggcccactcagcttcccctcagccaggaggccaggaggcggggacag

SEQ ID NO: 423470 - DNA, 122 bp, Homo sapiens
cgcacctctgagaaggaagagtctttacacaggtccaggtcgcggcagaagttacagctgcggcagatgacctcaggaagcacgtaggagcggcaggggtctcggaactgggcctcctcgga

SEQ ID NO: 423471 - DNA, 122 bp, Homo sapiens
aggtgctggaaaatgtcacggtacagctctgtcagctgttggcgcatgacctccagggtccggtctgcctccccgcgggccctgagaagccgctcccgttcattggtcagccgctccagctc

SEQ ID NO: 423472 - DNA, 122 bp, Homo sapiens
tcgagaccagcctggccaacatggggaaattccgtctctactaataatacaaaaattacccgggcatggtggtgcgcacctgtaatccaagctactctggaggctgaggcaggagaatcgct

SEQ ID NO: 423473 - DNA, 122 bp, Homo sapiens
ccctgactccttgctttgtgcatttggggatgtcatagttccgtgtttgctgttgtttctcgtggatgtacatttgtggctttgctttaaaggatttattatttatcccagtctttgctgtc

SEQ ID NO: 423474 - DNA, 122 bp, Homo sapiens
gtgttgagaaaaactggagcaaagacagcttaggactaagcctggtggaacgtgtgtgggcggatagcaaagtggttcccacaagacgccttccaccctaggatgccccagaggatggcctt

SEQ ID NO: 423475 - DNA, 122 bp, Homo sapiens
ggaatctgaaagagggctgtgcggtccgcagagagcgaggcttgggagcccgacccaaagcgtgccctccagggtgcagcaccgacgggtgccgcggcgtttgcaggcggggagaaggcggc

SEQ ID NO: 423476 - DNA, 122 bp, Homo sapiens
cctaattccagcacttgctgccagtgcttggccataccccctccagtccttttccagtttcgtgcacactggttccaggcgtgctttcattccctcctgccagcacccacatcatattctca

SEQ ID NO: 423477 - DNA, 122 bp, Homo sapiens
tccagtatttcagccttgtttgctttgcaattacgggttggcttgtggctacggtgccaccggggcaaatctgcagccgctcgctttctcctctgcgctccgggcgggtggaggaagcgacc

SEQ ID NO: 423478 - DNA, 122 bp, Homo sapiens
ccaccccggtgcgcgggtatggcggccagcctgtggatgggcgacgtgagtgagggcagccgtccggggtctgaagacaaggaagcatctcggtttcgcgagagaggaaggatctgagtggg

SEQ ID NO: 423479 - DNA, 122 bp, Homo sapiens
gaagtgcaggctcagagagatgaagtaacttgtccaagcctagttggcaagtgtcggagccgggactacaaactagacctcccagagtgccacgctcagaacgcagcaatgcaagaggccca

SEQ ID NO: 423480 - DNA, 122 bp, Homo sapiens
gggcaacgcgcggagttcctggcacttcccggcggtgtctcttgttgtctgcccggggaccgacttcgcatgctctcaggctgacctgtccaagcccgaacaccgggaccatgcactcagcc

SEQ ID NO: 423481 - DNA, 122 bp, Homo sapiens
agaagtgaataactgacacaacaatgattaaagtttgtgagcagcttcaggaaatggcagcgcaactttatgttcaaaagatccaaggcaggagagtgtgaggccttccctttcccagatcc

SEQ ID NO: 423482 - DNA, 122 bp, Homo sapiens
tccttattactggtgaatcactcacatgttctcatttctctcttagtctttcaagaatgacggaataagagacctgttttaaaaaggaactgcagcaatctttgaaagacttccaaagaatg

SEQ ID NO: 423483 - DNA, 122 bp, Homo sapiens
gtagctgttttgtgagcccacatttcattgcagctgcaaatccttgggtaacctcaccggcgtttggtccaagaatatgaaatcctatcacccgatcctttaatacagaaacaaaacaaaga

SEQ ID NO: 423484 - DNA, 122 bp, Homo sapiens
gtctggaattcctgacctcaggtgatccatcagcctcggccgcccaaagtgctgggattacgggtgtgagccatgccgctgggccaacagttatatattcaattcatttggaaacacagctc

SEQ ID NO: 423485 - DNA, 122 bp, Homo sapiens
ggatgccttctcccgagtaccctccgccccacacccttaacctccaggcccccggcaaggcgcgaacatccccaccgcaggactcactccgaagattcgatttcgatcgacatagccgtatc

SEQ ID NO: 423486 - DNA, 122 bp, Homo sapiens
tgcctgctcagtgcagacagggtgcccgacgtgcctgctcagtgcagacagggtgcccgacgtgtctgctcagtgcagacagggtgcctgacgtgtcaatgttggacatctcaaaaggtggc

SEQ ID NO: 423487 - DNA, 122 bp, Homo sapiens
atccgaaagcacagggaagcaagtgggcctcacccaggagcttcgcacagagcatgccgtcgagacatctttgcataatgagtgaacggatccatctgtgagccgtgaccttttctggccat

SEQ ID NO: 423488 - DNA, 122 bp, Homo sapiens
ttaatgatttattttgattaacgccgtcacagtgacgccttagagcagtccctgttcacccgggtcccagcctcgaccccgcacggacagcgagggtgggtagctgggggcggacgcaggaa

SEQ ID NO: 423489 - DNA, 122 bp, Homo sapiens
tccaacagccaacgtatagcatctgcttgaactcattcattccctcactcattcaacaaacgtttggagagcttgctctgtgccccatcctcaattcgtggccctaaggagctcacagtcca

SEQ ID NO: 423490 - DNA, 122 bp, Homo sapiens
aggcacaagcaagggctgccctgaaggaagctccaaagagaaaggagggcaggaagcccacggcccacaggggtgtagcccgagacccacctgcagcccccagcccttgccaggaaaggtaa

SEQ ID NO: 423491 - DNA, 122 bp, Homo sapiens
gctcaaagccctataatccgggccctctgaaaggccctgttcctgcagactctgcagcagcggggcttcccctgaacttgtacttgagctaaatgaagaaactggctgagtaagggctgtag

SEQ ID NO: 423492 - DNA, 122 bp, Homo sapiens
taaattgggtggcggtggtggcatgtcctgttagctgtggagtcttttcctcttatcttgcgcctccggttgtgccttaatgacacttttgacattgtgtatcacaaccaactggcaaaaac

SEQ ID NO: 423493 - DNA, 122 bp, Homo sapiens
tctcctctctcagttatttgcttctttccaacgtttggcgcccagctcccgccatcggagcgccccgcccgagaccactgatctcctggggcctcgcagccttgcttccgaacgccaaggtc

SEQ ID NO: 423494 - DNA, 122 bp, Homo sapiens
gggcggcgcactggcttcactgctctccaggtggccgctgcagctgcccgagagcgcaggcgcagaggcagaccacgtgagagcctggccaggccttccggcctagcctcactgtggccccg

SEQ ID NO: 423495 - DNA, 122 bp, Homo sapiens
cgccgcctcgccgcccttctccggtgccggccgcggggccttgccggcaacggtcggtaacgggcagatcccaggagcgaagggccctcagagactaccccaccaacgcactccgactccgg

SEQ ID NO: 423496 - DNA, 122 bp, Homo sapiens
ctggggtgaggagaccccagagcggagcgcagcggctggtagccacgccctcgccgtttgcgcagcgcccctccgcccgccttcccggcggcgcccctgattggacattgcactcttggacc

SEQ ID NO: 423497 - DNA, 122 bp, Homo sapiens
cactgggcctgggcgagctgggagataagacctttgccaagctcagaatcattaggtcatcggaaggggaattagcaccgtggatctggagggcagaaagaaggctcattgggcaacagctt

SEQ ID NO: 423498 - DNA, 122 bp, Homo sapiens
ggctattttcctcctgccgttccgactcggcaccagagtctgtctctactgagaacgcagcgcgtcagggccgagctcttcactggcctgctccgcgctcttcaatgccagcgccaggcgct

SEQ ID NO: 423499 - DNA, 122 bp, Homo sapiens
gcaggctgggtttctgcgcgggcgtggagctggagcgcatgcgctcgtccgttaccataacgaccagaagacgctgcagccactagggaggagagcaaagtaatcagaacctcccaaggatg

SEQ ID NO: 423500 - DNA, 122 bp, Homo sapiens
aggagtcctcattccagggagtgtgaccgcatcgtggtgctaattcccttcccttggcctcgactgccaaggaaccacaggaggaactggcttgggaagtcccctggcatcagagtaaactt

SEQ ID NO: 423501 - DNA, 122 bp, Homo sapiens
agatagatcctcggtccctttcaacagcattttgacctttgcgagaggacatttgattgacggccctgcacgctctgccactcagagccgggcagagctgccgagggctcccacctgttagg

SEQ ID NO: 423502 - DNA, 122 bp, Homo sapiens
gaaaatcaagaaagccagactctttagtaacccttgcttgtgagaactaatccattcccacgacagcaagaatgagaactcactcaccccagtaggagggcattagtttattcatgtgggat

SEQ ID NO: 423503 - DNA, 122 bp, Homo sapiens
tttgtgaggagctgtcagaatgttccatgccccttctcaggagagtggtttagtgatgcacgggtaacacaagttagaccaatgggatgtagtcctgggacttttgttgacagcatcaggga

SEQ ID NO: 423504 - DNA, 122 bp, Homo sapiens
tttctctctctgcctgatttctccagaattcagaaactatttgtgaatattcttaattcacggcaatgtggttgtttgcatatgttcaataagaatctgttttctagctaggtgtagcatat

SEQ ID NO: 423505 - DNA, 122 bp, Homo sapiens
aagtctcccatgcagaatacactactttccaacacagtaagaacatcattctgtcatttccgtgatacaatggtagctgcacctgtacatattgacaagatggtgaacaactgtgatggcct

SEQ ID NO: 423506 - DNA, 122 bp, Homo sapiens
gggaaactgaggccgggaaggtgtctggatactcctgcattgctgggtattctggggcaccgccggtcatacgtgggcttctgggtgagccagatgctggtacacgtgcaggtactcacatc

SEQ ID NO: 423507 - DNA, 122 bp, Homo sapiens
ctgtccccgcgtctcgcggaccgagaccggcggtgaggatgggctgcctccctcatcctgcgctaaactcgctttgtctgtcgcctctaggctaagtgggactgaccggggcccagagtgga

SEQ ID NO: 423508 - DNA, 122 bp, Homo sapiens
caggttttagatgtttcaaatgacttgtccactgaatgtcacttgaccttgataagaggccgcctgcacacagagcccagttaattctccgcacctcggttgtgtgcttccgaatgggctca

SEQ ID NO: 423509 - DNA, 122 bp, Homo sapiens
tgcttctggcttccgtcaactgacatagttgcccttttgctcaaactcgcagctccagttcgcactcgagagagctctgctgggtgtctgctgctgttccgcggcgggaacgtgtgggggca

SEQ ID NO: 423510 - DNA, 122 bp, Homo sapiens
ctctgtctgctgtccacattgctgcctgcccagagagaaaaggagctctttgtggtctttcggttcttctagtggaaaatttctatagactaagcagagagatagcacaaagcagaccattt

SEQ ID NO: 423511 - DNA, 122 bp, Homo sapiens
ggagggagggctgtgagcagagtcctgccctgccccccagatgtccatgggcacagcaagcggggatggtcctctgtggccaccagagctggcctcctacctggggtggccggacatccgcg

SEQ ID NO: 423512 - DNA, 122 bp, Homo sapiens
aaggagtgctgagcgcggggagcccaaaccacagccttggggaacccaggaggggccgggcgggtgcaggacccgcatgagggattccgagagcacgatgtttaaatgttgggggaaaaaat

SEQ ID NO: 423513 - DNA, 122 bp, Homo sapiens
agtggaaaaacctacactcaaacccatactgattgcctctgaagcctacgctccattagtcgtgacagcagttagttgtgagggatgagggaaaaatcttggcttattcgcaggtttatagg

SEQ ID NO: 423514 - DNA, 122 bp, Homo sapiens
cgccagcccgggctgtgggcagagcgcgccctctgccgggcatgatcggaaacggcgcggcggcgactcccggaccctcgggactccggacccgactcccacccggctgagctttaccgggt

SEQ ID NO: 423515 - DNA, 122 bp, Homo sapiens
ggtgacaagggagaggcgtctgagggaccgggattattcagctgacccggtgcggggccgcgttctcagcgcgggcactagggggcggcagaggcggaggcgccagcgccgaggagaggctt

SEQ ID NO: 423516 - DNA, 122 bp, Homo sapiens
actcagttcctcactcagttcctcactcagttcctcatagttccacactcagttcctcatcgttccacactcaggtcctcactcacttcctcactcagctcctcatagttccacactcagtt

SEQ ID NO: 423517 - DNA, 122 bp, Homo sapiens
agcggcgagaactttgacaagttcttcacgcgggcggcgccagcgctgacccctccagaccgcctagtcctggccagcatcgaccaggccgatttccagggcttcacctacgtgaaccccga

SEQ ID NO: 423518 - DNA, 122 bp, Homo sapiens
caggccagaataatgcttccccaggagagagccgaggcaagctgaagtcagtgcacctagcggtgtgggctcccggcaccactctccccactgggtagctggtgactaatggatgagcctct

SEQ ID NO: 423519 - DNA, 122 bp, Homo sapiens
tttcctcgcttcctctgccctttctggaaacaagggatgaatgtaaagaactgggaatggcgccagtgtggatcagatggggtgacctagtggcagttagtctagactccgcactagtggtt

SEQ ID NO: 423520 - DNA, 122 bp, Homo sapiens
tggacactgatgtcctgcgggagatgcaggaaggccacggcggctggaaccccaggatggcggaggtgagccgccccgccgtggagccctgtgtgccctgccctcccagccctccgccccct

SEQ ID NO: 423521 - DNA, 122 bp, Homo sapiens
tattcccgcagtgttccaggctgaggctgggcgtgttcccgcggtgtcccgggctgaggccgggcgtgttcttccggtgttcttccggtgttccgagctgaggccgggcgtgttcccgcggt

SEQ ID NO: 423522 - DNA, 122 bp, Homo sapiens
taaagtatccgaggaagtgatgcagggcaggtaaacagctggtgctcagcagcgagaggacgcgtcactctgccgttctgcagggtgacgccctccccgtacctcgctgagagccacctgca

SEQ ID NO: 423523 - DNA, 122 bp, Homo sapiens
aaactaaaagcatctgcatcaactgcaagttgttcgaaatgcaaaatctcagttcccacccgaccaactgaatcacactcagtttgggatcttccaggtgattctaaaacagtttaagaatc

SEQ ID NO: 423524 - DNA, 122 bp, Homo sapiens
acagctgcactttctcagaggcgcttgcggctctggcaggcagaaagaatgagatcctcccgagattaagggttatcgagtcacatcacacgtagggagggtgccagctgcccggcacaggc

SEQ ID NO: 423525 - DNA, 122 bp, Homo sapiens
cacgctgagggcccccgcgtctccatttccagttctcgcctctccctcgagctccagatgcgcatgtccagctgcctcctggacatcttcctttgaatgtagcaaggcgggtccattcctgc

SEQ ID NO: 423526 - DNA, 122 bp, Homo sapiens
gttgccgccgccgcagctgctgccgcggttggtggggttgggtgagaggaggagctgtcgcggaccctgtagagtcggtctctgttgctctttttgcctgaggagtcttccatcctacgtcg

SEQ ID NO: 423527 - DNA, 122 bp, Homo sapiens
caaattccatgctgggaggaaacgcctgcagctggctcttctgggcatcactgaattccacgctgaggggaaacgcctgcagctggctcttccgggcatcactgaattccacgctgggggga

SEQ ID NO: 423528 - DNA, 122 bp, Homo sapiens
ttgatcgtggctgggtcgggcccaccgggtaggcactgggggccagggtgcgggccggcgcgcaagcctcgcctcgtgatcttgccggcgatccttccccacccactccctcccgcacgccg

SEQ ID NO: 423529 - DNA, 122 bp, Homo sapiens
ttaaaaaaaaaacaaaacttttgtaggattagaaaggcagagggagagaaaacaaacagacgttcgagatgcatatttgaaagatgggcccacatgtgtaaaagtatttggcatgacaatgc

SEQ ID NO: 423530 - DNA, 122 bp, Homo sapiens
ctggggggaatgggccctgacacggccccccaggcccaggtacgtgtgtatgagccccgtcgggactgctggctttcgctaccctccatgcccacaccctgctatggggcctccaccttcct

SEQ ID NO: 423531 - DNA, 122 bp, Homo sapiens
tgcacagatttaaaagcctgtggatcctggaggagctgctcggcgagacggcttggcagccgctgaacagaactgaaggctcggccaccggctgcctgtggattaagtgggcggacagagag

SEQ ID NO: 423532 - DNA, 122 bp, Homo sapiens
tattttgtagggtacttgaaatagttctaccctttgaaaagagtgtggtagcatatcgtccgtgttagcattacaaggcattgctacagcttgcaataattaaaggctgttaccgttaagaa

SEQ ID NO: 423533 - DNA, 122 bp, Homo sapiens
atccaccacgcagccactgggggcttcttcagggagttcttaactgtgggactctgagtgcgttgaattgttgtctgcaggtccagggggtcttgggcagggaacaggagctggtgtggggg

SEQ ID NO: 423534 - DNA, 122 bp, Homo sapiens
ccctccccgaaactgcacatgtgacccatgaggtagcatgaagagataacttcccatgcccgaggactttttccagccctcccttttccttccaccagtcacctactaataccagaatctaa

SEQ ID NO: 423535 - DNA, 122 bp, Homo sapiens
aggcctaacgggattttcgccttccggcaggagtgggaccaggggcggggactgatgttgcgtatacgaggagcgagctgacgactggcgtggtgcctccgcccccctttcttgttgcatgg

SEQ ID NO: 423536 - DNA, 122 bp, Homo sapiens
aggcgcctttaccaggtttcattttccgtttaggccaaaatccccgcgggttggtcggggcgggggcggggctcggtgggcggggctgaccgcgggggcggggccagggtctaacaccctcc

SEQ ID NO: 423537 - DNA, 122 bp, Homo sapiens
tctctgtggctggctaggcttctttacatgtatctctgttggtaattatactcacttccacggttacaaaatgcccactttgtcctggctcaggccctcatggcttcttagctggattgaag

SEQ ID NO: 423538 - DNA, 122 bp, Homo sapiens
cgggagcagagcatcgagcggcttttagctggggttcgggcggaggacctgggacaaccgcgggcctcgctcctccccggacggggcgggacggggaagtcccgcccaccaggcccaggccc

SEQ ID NO: 423539 - DNA, 122 bp, Homo sapiens
ggatcgggacccctttctgataacaccaggagacaccctgggtggatttcctgaaccgaccgatagatgagccttccacgcgggagacctggatccttatcgtctttgtggccccttccatc

SEQ ID NO: 423540 - DNA, 122 bp, Homo sapiens
ccccatgaagccggatgctgctggacaccacagtgtaagggccggtgggatgtggcgcagcgtccaggcaagtgaaggaggaagtctgaggcgggtggtggcagaagggaggaggagacagg

SEQ ID NO: 423541 - DNA, 122 bp, Homo sapiens
aagacgactcctcacaggcaggatggatatccagttgtatgtatgtcggtgtgctggggccgggaggctcctaataacaatgttaccgctgcttcaagtggaagaaagctgaggctcagaga

SEQ ID NO: 423542 - DNA, 122 bp, Homo sapiens
gggagaactttatgtgttgcactgagggcagtctccggaaacgcgattcgcagcgggcgccggaagcggtgttgtgtctgcagctctggcagaggactgttccactagacacgctgaaggga

SEQ ID NO: 423543 - DNA, 122 bp, Homo sapiens
gtggaaactcaaaagagacgtgaatggagcctgatatctgcaagctacaccgacagggggcgccagcccctacaggtgactccatgaatcttcggctccactcggctcttcttcggctgagt

SEQ ID NO: 423544 - DNA, 122 bp, Homo sapiens
aggctctgagatgaggatgtatctttgattaatttaagaaaatgatctaagggaagacagcggacgccaaggaagagtgaaatctcaggtgaacacccctcagaggatagcttcagcacgat

SEQ ID NO: 423545 - DNA, 122 bp, Homo sapiens
tcccccacgaggccttccacaggcacggtgagtgtggctgcgctggactcccttccggggcggctccctcaagtctttctgaagagtccccaagctttgctgggtgcccaccgcgccaggga

SEQ ID NO: 423546 - DNA, 122 bp, Homo sapiens
tacatcgtgagcacaggcgatgagactcctggcccggcccacacggggcgggaggctgtgcgccccgatggcagcctggacatccagggcatcctgccccggcactcaggcacctacatcct

SEQ ID NO: 423547 - DNA, 122 bp, Homo sapiens
cagtctaatcatgagaatccaccagacagacccaaattgagggggattctacaaaatacacgacccgcactcttctaaggtgtcaaggtcatgaaaaacaagactggaaaaccaacacagac

SEQ ID NO: 423548 - DNA, 122 bp, Homo sapiens
gatggtcgtggtctcttgaccagcctcccaaagtgttgggattccaggcgtgagccaccgcgcctggccaatgaatgcatctttatttttgtgttcattttaatctggtaaggtaaattcca

SEQ ID NO: 423549 - DNA, 122 bp, Homo sapiens
caagagaaataggcccaacatgtactgtagcattaagatagcaggttgcagtggctttttcggtggtgaaacatttccagaaataagaaaataagtcccatcaccaggtctctagctgtgtt

SEQ ID NO: 423550 - DNA, 122 bp, Homo sapiens
aagctgcgatctgaaaagccctcctcccaagtcggggctctccttgtgttgggggcagagcgggaagagccgcagctcaggaggagctgcaggttgatggcagagcccgtctggggctagtg

SEQ ID NO: 423551 - DNA, 122 bp, Homo sapiens
acttgtctcgacgcaggggacgcccacttgtctgacgcaggggacgtggctgaagtcagtcgggccgcccgcttgctgcacggcagccgtgggactggcacaggctcctcggcagcattatg

SEQ ID NO: 423552 - DNA, 122 bp, Homo sapiens
tgctgatgctggagcagccagcggggagagctgccaggccactcctgacagccccgcacccgctctggatggaagcttctcgctcccagccgatacgggcctgctgcctgctgctggggctg

SEQ ID NO: 423553 - DNA, 122 bp, Homo sapiens
aagtcccactgtcatctcctgggttttctctgctcttttatttggtgatcctggttctttcggccgttcacgtcattgtgtgcacctcagctgaaagttcgtgctacttctgtggcctctcg

SEQ ID NO: 423554 - DNA, 122 bp, Homo sapiens
acagccacttccctcaccccacttttcagatccaggagatggaggccggggtggaagtctcggaggagggtggatggggaaggcggggccttagggacccctcacctaacgcgtgcccccga

SEQ ID NO: 423555 - DNA, 122 bp, Homo sapiens
ctgggcccggtcccggaggtcagctgttgtgtggatgcacccctggacctgcgagaggctcgccggcttataaccaagttctcatgttagattcttgaccccgatttcatcaccaggaggaa

SEQ ID NO: 423556 - DNA, 122 bp, Homo sapiens
tgcgcggccttttgaccccatttcgcatgaaatctgcagagcgaccgccccaaggaccagcgagcgctaatcagatccgtctgtgtctgcagagcttcacctgaggcctgggtccccgaggg

SEQ ID NO: 423557 - DNA, 122 bp, Homo sapiens
agcacagctgttagtgtgcttggtacacagagtttactgtgtcttggatctgtcttcccacgctgggagtagctggagggcccaaggttgggtacagttgttgtcaaacctcagccaaacct

SEQ ID NO: 423558 - DNA, 122 bp, Homo sapiens
tgtcattcgaacggttctggtgtgagccagggtacagctgggccgcctggggccccttgccgagtttccgttccacttcaggtgtcgcttcccgcggcccattgggcccttgccccgccctc

SEQ ID NO: 423559 - DNA, 122 bp, Homo sapiens
tggttcggtggcagcttctgggctccccaagtccttcagccaactccccacggtcctgagcgaggtccccagtcccagagaagcagatgtcttgggggagcctccacgggtgtctgtggtct

SEQ ID NO: 423560 - DNA, 122 bp, Homo sapiens
tctactggcctggacttgagctagtcactttattttctgagcttcagtttgctcactggacgagtaggaaagtcattcctgtctggcttaactagagggcctgtggtgaggcataaactgga

SEQ ID NO: 423561 - DNA, 122 bp, Homo sapiens
cctctggtgcaacatctgaaagcccacgacaagcctcctgggcttttccatgaatatcgccgtgcccctgcctacggatatgctgatgtgtgtatacaatattctgtgagaagcagagacgc

SEQ ID NO: 423562 - DNA, 122 bp, Homo sapiens
agatttctgcctgtgggcgatggaagtgaggttcactggccagcggagccggacacagaacgcgcaaaacgccgtgtaggcctggaggagccgaagagcaggcggaccccctccgcggggga

SEQ ID NO: 423563 - DNA, 122 bp, Homo sapiens
cacacgcaaccgggaaatgcccctcccgaaggggctctgctgccccctggcggtgtgactcgagaaacgcagcaacagcccaggtctgattccttatttagaacagagggtgttaagggggc

SEQ ID NO: 423564 - DNA, 122 bp, Homo sapiens
tgaggaatgctcaggctaggggaggtgggaagtcactaacactgagggagaaatggtcaacgtcatgagagcatcacaaagaggtgaggtcacaggttgcaaggatggctcttgagcgagag

SEQ ID NO: 423565 - DNA, 122 bp, Homo sapiens
aatatgggcatgtaaactaataaatatgcactggatacatatatggatttatgaagaaggcgatttagtcaagaggatgtaattaaaatatgtggtctctaaaatattccagttacaagata

SEQ ID NO: 423566 - DNA, 122 bp, Homo sapiens
gagacgggagtcttgctctgcaagctggagtgcagtggcccacgctagaatgcagtggcgcgattgcggctcattgcaacatctgccacctggggtcaagtggttctcttgcctcagcctcc

SEQ ID NO: 423567 - DNA, 122 bp, Homo sapiens
tcaccagtccccttccctgttcttatctcccccaacacaccacccccaccagcactggcccggacctgttcccaaaggactagtttctggccatgttccaagccccctggaaacacatccta

SEQ ID NO: 423568 - DNA, 122 bp, Homo sapiens
tgtggcctctggtcatcattactttatatcacataaagtgttgtgcgactcctgccaatccgtggttcaggagggatgcatgtggtaggatccattctcccagcttggacagttacagaagc

SEQ ID NO: 423569 - DNA, 122 bp, Homo sapiens
cactgccattaacagccccgctaagacgggtgccggacttgtttgtaattcacctccccccgccagccaatcttgctcaaggctgagggtttgtaatcaaacactgtgtttgtgagtcactg

SEQ ID NO: 423570 - DNA, 122 bp, Homo sapiens
gctctgccctctgcgggcccggcactcggcctctagactctgtggcgggtgggcggcggccgggaggagatgtgcccggctccctccaaaggaccctcagatctgtcagtctgcggacgcca

SEQ ID NO: 423571 - DNA, 122 bp, Homo sapiens
agggatgtctgtgtggatggcagctgccgggtgagtggtgccccagcccctccctgcctccgggctgcctgggggctcagtgcgggtgtttccctgtccatcacccataggcccaggtagct

SEQ ID NO: 423572 - DNA, 122 bp, Homo sapiens
tagtagaacgaccgggcttccggtacttacaaaggagtttcccttacaaacgcagggggacgctcactgtttctcaaagtatcgtcctctgagacaacaccagaatcccttgagtcctgcgt

SEQ ID NO: 423573 - DNA, 122 bp, Homo sapiens
tctactccaccgtcctcaccagaaccctcggcaccatcacctacccgaggctcttgcctgcgagatgacagtgtgttcagtaattccctttggatttgcaaatcggccccgcagtcccacag

SEQ ID NO: 423574 - DNA, 122 bp, Homo sapiens
tgccgtgttcctggtgcaggacgacacatccaacatctacatctgggacctcctccagagcgatctgggtcctgtcgccaaacagcaggtctcccccaacaggcaagtggggaagctctgga

SEQ ID NO: 423575 - DNA, 122 bp, Homo sapiens
atcccctgttcccgctccccacgagggcccgggcagggaactcccgtccccctatttcagcggaaaagctgattgtgaagccagatagatttgggttcaaatcccggccgtgccacctcgcg

SEQ ID NO: 423576 - DNA, 122 bp, Homo sapiens
gggaaaacctcccagatcctggcggggagctgctgtgagctgtggggccgaggaggctcccgacgcccagtagtaggctggggggacctgcagccgcaggaccaagggattgatttctttct

SEQ ID NO: 423577 - DNA, 122 bp, Homo sapiens
cgcgcccacgtggctgcccaaagttccgagtctccgggctgcaggttctagtcacggaaccgagttgggagagtcataggggctgggacttggaggatcggctgaggtccggtgctcttggc

SEQ ID NO: 423578 - DNA, 122 bp, Homo sapiens
ccggccgcagtgtggggctgggctggcagctggaactccaagcgtcctgtcccgtccctgcgcggcgactgcggtcccagccccggagccctctctggacaactccgcgcccgcagccccgc

SEQ ID NO: 423579 - DNA, 122 bp, Homo sapiens
gatcagcagaggctgggctccatgtgtaatttcagggctcatggccacacccagcattgacgcggagcagggaaaaattctgcacccactcttggcgggggagggcgggaacgcactgcaaa

SEQ ID NO: 423580 - DNA, 122 bp, Homo sapiens
cctcaaagatacacaaatggctagttttcaaaattattcccagggaaataaacagttcgtcgcattgtcaaagtaggattttcatgactcggcattggatttgcggatttacacatggatga

SEQ ID NO: 423581 - DNA, 122 bp, Homo sapiens
ttgaacactccttttcctttggtttagcgtcggagagcggacgccaatttgccaggagagcgcggaaaattcagcttttttttttttttttttttttttttttttccgctagtgcactagga

SEQ ID NO: 423582 - DNA, 122 bp, Homo sapiens
aaataaatggggacagaccccttaaacatattagaagtccagtgaataagacaacttgtgcgcagtgaatgttgggtggggtttagtaaaagggaagatgttgagttccatttgacacaagc

SEQ ID NO: 423583 - DNA, 122 bp, Homo sapiens
ccctttaccatcccactaccctgactcttgaccttgaaattatggtcattgcaccattcacgatggctgacactggtgcagcactttacagtgtaacagagctcctcacacaagaagctcat

SEQ ID NO: 423584 - DNA, 122 bp, Homo sapiens
gcgtgggctcccgcgtggtcacgggcgaacctcgtgggaggtggccggcaaagggtgccccgtggtcctcataggtcagggggctctgccgcggcttacccagctcaggcacaatgaccggg

SEQ ID NO: 423585 - DNA, 122 bp, Homo sapiens
gtaagcggccgcagccatgatggttagacccgagtcgccaacggtacggtgtcgggcggccgcgggctggtctgcggcatttgggaccgggcaaaaaacgtgttttattgtcatcataaaaa

SEQ ID NO: 423586 - DNA, 122 bp, Homo sapiens
gactccatgcgcatgcacgtaggcccctccaagccacgtgcaggatataatctcctggtgcgccgttttttaagacggttggaaaagcgtagtattcgggtgggagtgacccgattttccag

SEQ ID NO: 423587 - DNA, 122 bp, Homo sapiens
ttctagtccagcatctctggacagggttgctgtgggtatgtgggcaggacagtttttagtcgttattgacatattgcaggatgtgtagcgtccccagccctacttaaatgtcaataatgacc

SEQ ID NO: 423588 - DNA, 122 bp, Homo sapiens
cgccagccggcggggactctgcctggctttctcggagcgggcacctagagaggctgcctccgtgctgtgagcggagatccgatgccagccgccgccccactgcgaccccagccccagcccta

SEQ ID NO: 423589 - DNA, 122 bp, Homo sapiens
gattgaccctagctgaagaaacaaaatacatgatcaaaaaagccaactttgaatttgcctcggacccttaaaaactctgcctttagattgctcaatgcattaggcggttttggatcccggaa

SEQ ID NO: 423590 - DNA, 122 bp, Homo sapiens
acccccgccgtctggccccggcgcgcccgctcggctgggctgcctatggagccggccgggcgagctgcactgaggaatgcgccggggaagaaatctgctccgacacgttctctgtagctgcc

SEQ ID NO: 423591 - DNA, 122 bp, Homo sapiens
ctcctgagccccggtgggcgctgcccgggctttcccgtcccctgggaccctcacagcagtcggtagcagaatcagcttttggaattggtgagaaaccgaggcccagaaaggttcagcgaatt

SEQ ID NO: 423592 - DNA, 122 bp, Homo sapiens
gccgccgcgctcggctgaggctcgtggagcgccactgcgggcccggagcggccggcggcgcgaccctaccaggagcccgaccccccgcggatctcgctgccccgcgcccatcggggctcacc

SEQ ID NO: 423593 - DNA, 122 bp, Homo sapiens
ggaccccgccggccgcagcttcccgggaggtcgccgcagcgcagccggtgactgcttggtcgcccgcaactgccactcccccgggattgagactcctttagggagggctgaggaggtgcgag

SEQ ID NO: 423594 - DNA, 122 bp, Homo sapiens
agtcgtagacggaatagtaggacctgaggaagacatccccgaggatccacaggggctggccgttctgggaggacaggtaggtgggctcgactcccacggtgcagtagccgttgttctgctca

SEQ ID NO: 423595 - DNA, 122 bp, Homo sapiens
cccgcgaagaggtcagccgcggccagattgccgagcaggtagtagatgggctggtggaagcggcggttggaggcgatggctgctatgaccagcagattggtcagcagcaccagcacgctgac

SEQ ID NO: 423596 - DNA, 122 bp, Homo sapiens
actatatctagtgtgtctgatttgtaaccctgtcattgaaaacatggagatgcagaggtgcggtttgtgagatgtggttcatttgtgtagtacatgcatatatgccatatgaacacaggaac

SEQ ID NO: 423597 - DNA, 122 bp, Homo sapiens
ttccaactctagagacctcaataaataatagtacaaaataaaaaaggattaaaaccacaacggagataagaatgtgcctggggcattggccgaaacaaaatttggacacgttcctcaacggc

SEQ ID NO: 423598 - DNA, 122 bp, Homo sapiens
aagcggagaacggaagtcggatgttggaccgctgggaagaggttgaaccttcgcctcaaacgatgttgcgcagacgcagtgggccattctagtgccttctagaaaaggttgtaagaagggtg

SEQ ID NO: 423599 - DNA, 122 bp, Homo sapiens
tggggttgatatatacacacacatacatacatactcaggacgtgcaaaggagaacgtggccgtgctcgaagtgtatcaaactatgacttctaaattcctttccatcaaatgccagtagaagc

SEQ ID NO: 423600 - DNA, 122 bp, Homo sapiens
cattatacatctttttgtttatccaatctatttagcctagtttttaactttaacttagttcgagtttaacctatcttttttttttttaaaaggagacaagatatcgctctgttgcccaggat

SEQ ID NO: 423601 - DNA, 122 bp, Homo sapiens
aaccagcttcccaggctggattttgcagttcacgaactcttgagccatgcagatgggctgcgatctccccgggaagaatcctcagttgcaggtactgcttggggtattgagccacgataatt

SEQ ID NO: 423602 - DNA, 122 bp, Homo sapiens
agaggtgcattttaggatatcataaatacacttcatttaggatgctttattttctttttccggttgtgattaatgtttcttggtggaaaagcccacttgaagaaagctggtttcttggggta

SEQ ID NO: 423603 - DNA, 122 bp, Homo sapiens
acgacctaatcaagcaatcaagtcggaggagattgcagcgtgacccgggcagccatctgccgccgagcccgcatgcatttccgcgccgcgcggggcgggggccgcgaggggctgccgggggg

SEQ ID NO: 423604 - DNA, 122 bp, Homo sapiens
ccacaatgggggaggtgagtccagccccttggaacaggcttgcccaacatggagggatggcgttggcagtgccagcctccccagcctgtgccaagcttcaacaggggcaagaggaggggccg

SEQ ID NO: 423605 - DNA, 122 bp, Homo sapiens
gagggtggggtgggggggctaccattttgttgttggcaactagatcaaaagggatctgcccggcagagcccctgcacctgatttgctgtgtagagtgggtttattttggagctttccctgtt

SEQ ID NO: 423606 - DNA, 122 bp, Homo sapiens
tgcgcaggagggagggggtgggggagcgggaaaaaaaatagaagaccgaaaggtgccgggcggctcagctcgccagaatccagctccgggctccagcagggctaagccgccacagtgtggtt

SEQ ID NO: 423607 - DNA, 122 bp, Homo sapiens
caacaggaagcccatgtgtgcagggccagaggacatagcccatctaaggtgctaagcctccgtgaagagggagcggagtctggacgggattccagccccagggtccaccctttctgggaccc

SEQ ID NO: 423608 - DNA, 122 bp, Homo sapiens
gaaacgttaaaattagaaggaaaaggtccagaattagtggggccatcagagtctaaaccacgagggacaagtcctcttccagcaggtcaggtgcccgtaacattacaacctcaaaagcaggt

SEQ ID NO: 423609 - DNA, 122 bp, Homo sapiens
gggctgaagtcgcgggtgcgcaatcggggtggggactcgcgagcagggcctgggaagcgccggagtggcggcgggggatgacgtcactgtctgtgagtggccgggcgtggcctgcgcctccc

SEQ ID NO: 423610 - DNA, 122 bp, Homo sapiens
tccagactccagactcttgggtccagtggccaactagtcacccccaccagagttttcaaacgtgtcttggcgtcacatgtccaaaaccaaactcctcacgtcctgcggtctccccgtggaag

SEQ ID NO: 423611 - DNA, 122 bp, Homo sapiens
ctctgagaataccactagacataggtaactgggcatcctctggagacaatttgtctgcatcgtctctggtcgtagataccacagtcatcataatctgtatcatctcatcatcaaatatcaca

SEQ ID NO: 423612 - DNA, 122 bp, Homo sapiens
tcagttctgggctcgggcccctcatgggagcggccctgctgggacagtgttttcccaagacgccccaagccctcgccctggcagctccatgacaccccatgcagactccaacaggggcttcg

SEQ ID NO: 423613 - DNA, 122 bp, Homo sapiens
ggagtcatggggccaacttggcagtggcccgctccaggcgagaggtgacaggtaggcagccggtctctggcctccgcccggctgtacacaaactgcctgcctgtgtgcttgttttcctgacc

SEQ ID NO: 423614 - DNA, 122 bp, Homo sapiens
tgtctgcttccagcagaatctattgattgctgttgtatgcctgtgtagatagtgcaatgccgtttagactactgactctcaatcggtgttgattgccgagattaaaacggtttaccccaggg

SEQ ID NO: 423615 - DNA, 122 bp, Homo sapiens
aattttattaaggtttattcaatgtcacagaggaaagaacggtttgtagttttgcttacccgcagtgctggcaggtcacagctgtccaaccatgatccattcacatgctctggccccgtgcc

SEQ ID NO: 423616 - DNA, 122 bp, Homo sapiens
cctaaacccacctgaaagtctgaggcacactgtgagcgggaacgaagccatcacctgccccggaaggccccttccgcttggagcagcaccgtctgcccggagttcccagcagtctcccaaag

SEQ ID NO: 423617 - DNA, 122 bp, Homo sapiens
aatggagtttggctttaattaatgatctgaattaataaaaacaacaaaatgctaggccagcgcaggggatcatgcctgtaatcccagcactttgagaggccgaggcagatggatcacttgag

SEQ ID NO: 423618 - DNA, 122 bp, Homo sapiens
aggaccagccattcccacatctcctaaaaattctggagttctagacaccctccctgtctccgccctcctcctcctcgaggccccgtcctcaacccgcactgccctccccccgccaccgggcg

SEQ ID NO: 423619 - DNA, 122 bp, Homo sapiens
ccgccagtgaggctggagcagctcagcagtcagggaaatagtacctccctgagaagtcgccgtgtggcggtaattggatccgggaaagttccttgctattgaaatttattttagcaatttaa

SEQ ID NO: 423620 - DNA, 122 bp, Homo sapiens
taagaggagggaggactttagggtgcgcgccgcgggcaagccgtcgtgggagcctcggagcgtgcatccgcgttcgcggagatgttccaagcccagaaatgcgcctgaatggggggagatcg

SEQ ID NO: 423621 - DNA, 122 bp, Homo sapiens
tccacagtcccctgacgtctgtccccagcattgagcagcggaagccacagattcttgaagcgggaattcaagtcctcaggcaaaggcgcattgtgactgtctgatcagcatttcctattgat

SEQ ID NO: 423622 - DNA, 122 bp, Homo sapiens
ctcagccctgggtgtgggtattcagctctcagtcccagggatactgcagcaccggaaaaacggggctcagctgcgagcaaagctcccacccccaacccaccgccaccctccgcgcgtcacgt

SEQ ID NO: 423623 - DNA, 122 bp, Homo sapiens
ttcctgtctccataggcacacaacccttctcccacttcttcccggaagcattcccaactccgacaccagcaaccaaggcactctggccttgtcatagtatatttataataagatgtgatatt

SEQ ID NO: 423624 - DNA, 122 bp, Homo sapiens
ctgacagacagaaagacagatggacagacaggtgaacacaaaacactgatcgcgagatcgcgattaagtgtaaaattcagcagtaaaattcgcacccaccacctccacctcccaagactcca

SEQ ID NO: 423625 - DNA, 122 bp, Homo sapiens
ctggcggtggggtggggccggccgtgacacccgagctcagttttctcgggacctggtttacgctaggtgctgtgggtcggccctggggctgttcaggcactcagggcaggggagaggagaga

SEQ ID NO: 423626 - DNA, 122 bp, Homo sapiens
gcagaaaaaatgccctggttgtaaacccccctgcagtggagatgggtgagaccacagcagcggagcccggtccccagccacgaggcgggcggccgcacacccacctgccgagtcgtagcctc

SEQ ID NO: 423627 - DNA, 122 bp, Homo sapiens
cctgcgttttgctgcctgggatccctagcgtgagaagggctcctttacactcagaggtgccgtaatggagccaagggacggcatcctcggggctcccgagccccgagtggagaagcttgggg

SEQ ID NO: 423628 - DNA, 122 bp, Homo sapiens
ggtgggctccaaagcacagtcctaaccagcatgctctactgcctcctctgaggcaacagccgaagtgcagaccactgggaataaatagctgcccggtcttccccactcctaaattctcccga

SEQ ID NO: 423629 - DNA, 122 bp, Homo sapiens
cctgtatgcgtccagcatgggccccaggatgtcccttctaagcgagggtcgaggggtgctcgcccagacgggatccccgggtctctgctttgttagcagctttggtggctggttcaggaggt

SEQ ID NO: 423630 - DNA, 122 bp, Homo sapiens
aagtagtagtcagagctcaaaccggagtcctgtaccctaagtccagggcccgcacatcagcgccaaggcatcttcctcaaaagtaggggcgtgtcttatacatgtttctgcttccctccaca

SEQ ID NO: 423631 - DNA, 122 bp, Homo sapiens
gtcacatctgttccacataggtttgttctggagactcaggctgaagagacaacagctacgcgagatattttctccacatatgaatcacctgagcacaggagccaactcaaacagcacgagca

SEQ ID NO: 423632 - DNA, 122 bp, Homo sapiens
agtcgcttctcctgtctaagcctcagcggggcatatgaacggcccccagagcatcataaacgctggaggagaggactgatggctgtggatggacacagccggtgcctgtgcataggaagctg

SEQ ID NO: 423633 - DNA, 122 bp, Homo sapiens
acagtcccccagatcgtgtgacgaaacctgcttcggcggcccgaggtgggggttttgagtcggttagtggaggcagtgggagcaggatgggcggagcttctgttccaaaaatttcccctaag

SEQ ID NO: 423634 - DNA, 122 bp, Homo sapiens
aaccagcatggggcacggccgtcctgcagcaaccagccggcgggcaggggtgcctagccacgccgcccccaccgccagacagcagcgggccggatgacagatgctcctctccccatcccaca

SEQ ID NO: 423635 - DNA, 122 bp, Homo sapiens
tcgccctcgggggctgtcaggttggtggctgcgggaggagtgggccaaccatgcccagggcgggaggccgggcgggcgcaggaccccgggaaggtcccgagcccggcgtgcccacctccctc

SEQ ID NO: 423636 - DNA, 122 bp, Homo sapiens
tgacggtcacggccaccgttcccgcctcccagccctgcccagagcagcggcttagggtcacggccaccattcctgcctcccggccctgcccagagcagcggcctagacacgcgcttgctttt

SEQ ID NO: 423637 - DNA, 122 bp, Homo sapiens
gtgttcagtttttctccaggattcagactagagagtttcttccggcgtaaggaacttcaacgctcttcacggaagtaaaagtgtttttttggttgttgttgccgttgtggctgcccgcattc

SEQ ID NO: 423638 - DNA, 122 bp, Homo sapiens
cgcctccccacccccagccccgtttccggagcccgcgatggagctttgtgaagatgcaggcgttggggctgctcggcgatgatgacatcatcgtgtcacacacaggagccggctgccggggg

SEQ ID NO: 423639 - DNA, 122 bp, Homo sapiens
aatgcaaaaggaggcggagcaacgcgcgccggcgcggggtgcattgtgaggaaatgcgtgcgcaggtgaaaccttcgtcggtctcctgggctccacgctgtgggcaaagccagttaatgcct

SEQ ID NO: 423640 - DNA, 122 bp, Homo sapiens
cgcgcccctccggcgcttgtcgcagaggctgccgggagacgtagtcttgtaacgctctctcgccggacattcctaatggttagcgcccagcctgtgaagagtcgggggtcggggagggggtc

SEQ ID NO: 423641 - DNA, 122 bp, Homo sapiens
tcctcaacttcagcattgtgggtattttgggctagaaaattattcacggcaggggctgtccggtgcactgtaggatgtttagcagcatccttagcctctaccgtagatgccagtggcaccaa

SEQ ID NO: 423642 - DNA, 122 bp, Homo sapiens
gtgaccatggaggtcacgtcgcatgtggccgtggaggtcgctgtgtgactatggaggtcacgtcccatgtggctgtggaggtcgctgtgtgaccatggaggttactgtgtgcctatggaggt

SEQ ID NO: 423643 - DNA, 122 bp, Homo sapiens
attcagggacctaactttggggaaaatcaccaaaggtagcaaggacgggatccgggctgtcgccaggtggagggggagggggatgtgatcagaagacccggatcactagcgggaatcctgag

SEQ ID NO: 423644 - DNA, 122 bp, Homo sapiens
gagtcccgccctctgaatgaatcagccgggccgtgtagctgtgctgttcacaggaggagccgtgggaactagaggcattcccactcaatctcccttttctcttgagtctcaggatcttgtta

SEQ ID NO: 423645 - DNA, 122 bp, Homo sapiens
cgttgggctcgcagatcacctgggggcgtgtgcttgctctggaaatggtaagacttgccccgccccatagccagagcaggatagtgtttggcccaccagcgttaggcaggctgcggggtaag

SEQ ID NO: 423646 - DNA, 122 bp, Homo sapiens
ccagggctattttggtcactgctgggctccagcactttccaccaaacaatatttattgagcgcttattatataccattctaagagctttacctgcatattctcattgcctgtgatcccatca

SEQ ID NO: 423647 - DNA, 122 bp, Homo sapiens
cagccgcggggccagctcctgacgcacatcttaacatggcggcaggtgagagagaacaagcgtgagaaggaggaactatcagacacttacaaaaccaaatctcgtgaaaactcactatcagg

SEQ ID NO: 423648 - DNA, 122 bp, Homo sapiens
gaattccttcagagggagaagattgataagggttgctaggaaacaggagcgtctgcctcccgcctgacccagagattgttctgcacaaaccctctccaggggctcgcagtgtgcagttgagt

SEQ ID NO: 423649 - DNA, 122 bp, Homo sapiens
aggggagggggagagaggccgagagatgctcgtagggaccgaggcaaaattctacgaccccggaaatccgtaaacgcggggaaggaggatcgaacgcgtgtctcgcttggagaagctgccca

SEQ ID NO: 423650 - DNA, 122 bp, Homo sapiens
cctggaggcctcggggcccgggtcgcctcagctttgttcggtcagcggggcgcggggacgcggacacttaccgtacaccccagcgaggaaaagcaagagcaacgcagacctccaccgcggag

SEQ ID NO: 423651 - DNA, 122 bp, Homo sapiens
ccctgaagctagggactcggctcaggaactgctgcttgctggggcgtcgaaagccaagcgcgctcaggtcttcaaagccaccgtttgtgcttgggctgcggattctggctagtgagatgctg

SEQ ID NO: 423652 - DNA, 122 bp, Homo sapiens
aaccctccgagcttagcaaaggtaacgactcctgatggcaagctgaggcacaccggccgccgtcagcgccgcctcagtcttcgttctctcgcctcggccttcagcccagtctccgttagatt

SEQ ID NO: 423653 - DNA, 122 bp, Homo sapiens
tgggacttcagttttcttcgcccagggtcgctagttctccaagattatttccaataggcacgcgtaggctcctttttagcccatcggaagaacctcacaatcggaagccatagtgtactgaa

SEQ ID NO: 423654 - DNA, 122 bp, Homo sapiens
ggccccacccagcagggtctaagtattccgtctgcaaaactggcaggccaccaacggccgcgtcccagggcggcctgaaggatgctgataaccgggagccccgccctgggttcggctatccc

SEQ ID NO: 423655 - DNA, 122 bp, Homo sapiens
gacaggacctcaaagacgaaaactgcgtctgcctgcctggccgcattgggaggcccagcgcgccccctggtggcgcgaggagatccgcccaaggcgactcaatgattccttcaagctgcgca

SEQ ID NO: 423656 - DNA, 122 bp, Homo sapiens
cttgtgattttcctcccagagtttccacaaggccaccttggacgtggatgaggctggcaccgaggctgcagcagccaccagcttcgcgatcaaattcttctctgcccagaccaatcgccaca

SEQ ID NO: 423657 - DNA, 122 bp, Homo sapiens
gctgctgcttcacaggcagcctggtcagaaacgtactcctgtcgaaaatggagggtgaatcgcatgaaatcagcgttacgtttgctcctgctgcatttcatgagtccagcggagtctgttcc

SEQ ID NO: 423658 - DNA, 122 bp, Homo sapiens
tggggaccaggagcactagactcacatccaagccccctggccttcagagcccagggaaagcgtcacaaaagccggaagtgcgtcacacccgccttccggagctgcgctccgcttcggggtcc

SEQ ID NO: 423659 - DNA, 122 bp, Homo sapiens
cgcagaaggcggggccctgggagcgacaacggtgttatccaatgggccgacagctggagccgcccctggccaatgggcgcgctcctccgcgatgggcggaagtggtgaggcagctctgaggg

SEQ ID NO: 423660 - DNA, 122 bp, Homo sapiens
gataaaagtatcaatcagagtgaaaggcccttataagtcaggcgtttgcaaggacaggggcgtggtttagaggccagggaggcgggacttcacttatagttgtcttaagcgtgcccgaggag

SEQ ID NO: 423661 - DNA, 122 bp, Homo sapiens
tcacagccagcccggcactccagggcccccataagtataaaataactattctgtcttttccgtaggaggagccagcatttggatcccaagggttgtttattttgactcactgctgtttttgc

SEQ ID NO: 423662 - DNA, 122 bp, Homo sapiens
ggagggtggagcccagcagcccttactcccaggagaaaggcccagtgctgcagaggcagacgctcctgaaacctgaaatccataggagtccaggtggtgaaggcttcagcactccatcttgg

SEQ ID NO: 423663 - DNA, 122 bp, Homo sapiens
ctccctctgctgcaggagctcgtccaggaggccgacttcgtgggtgaagagcctgggattcgcggctgtgccggacagagccccttgccccgggcgagcttgaggagggggtggcgggacgg

SEQ ID NO: 423664 - DNA, 122 bp, Homo sapiens
cgcttgaagcattcctcttagatgagaagctcaacacacttccctttattctttgggaaacgtttttagcttaagtcaaattctcacccctaggaatgaaaaaaaattgactcccaaacctc

SEQ ID NO: 423665 - DNA, 122 bp, Homo sapiens
gcaggcgccccaggggccggctgcaggggtccagagggcggttacggggccaggcaggagcgggatgggagggacactcacaaatttcttagatttgccgccgtcgccgcccgccgagggca

SEQ ID NO: 423666 - DNA, 122 bp, Homo sapiens
ggctcttgtaagctttaaataggttattatacataaagagctaatagtgatgcctgtagccgttgtctaagtgctagctctgatgatggtgacaaagaagtaatagcaatcagtggtttaga

SEQ ID NO: 423667 - DNA, 122 bp, Homo sapiens
caaaatgccaacaaggaaattcaacatgtttatgttttaaagcataaaccttcctagatgcgagagatgtaaataaagggtaaccctgaaccatgttaggtatcgcacagaggggactgaaa

SEQ ID NO: 423668 - DNA, 122 bp, Homo sapiens
cccggtctgggagccacggcccctcccccactcagcgtccggcctgctggggtttcctgccgggcctccctcagagcccacggctccccaggtggctctggcccgggagccacaggcacaac

SEQ ID NO: 423669 - DNA, 122 bp, Homo sapiens
ctgttatttttccttgcctggaggaacagctccttgagggcagggatcattttttattatcgtactcatacccagctactgcctggcatacaatggatgctcaaaaaactttgccaaatgaa

SEQ ID NO: 423670 - DNA, 122 bp, Homo sapiens
tccgcacctccaggcgggtgcgatgcggcgccgcttttggggcgtattcaactgtctgtgcgccggcgcgttcggggccctggccgccgcctccgccaagctggccttcggcagcgaggtcg

SEQ ID NO: 423671 - DNA, 122 bp, Homo sapiens
tactaagaaaatgcctcccagatattgttaaagcaaatagtatcatatccagcacaaaaccgcagtgaattgatttaatcagacattatcagagcaaggaagaaataacattctggttttaa

SEQ ID NO: 423672 - DNA, 122 bp, Homo sapiens
ctggggtgggccggggtggggagggtgcgagttaactgtggcccggtctcgcccggacctcgccctaggtgggagcacgcgcaccgggtctgagaacctgcaagagcctcgcccggcgccgg

SEQ ID NO: 423673 - DNA, 122 bp, Homo sapiens
attcttcaatatcagtggcactctctgggttaaacgtgcagcaataggtcagaggacacccggggtgggcattcccaaccagtgatctggccctggggaatttggggtaaacaatgatttga

SEQ ID NO: 423674 - DNA, 122 bp, Homo sapiens
tccgtaacactcttccccacctcccgggggagcgggagctgacctcgcaagatccaggaacgaatcgagcacctccttgctgggggcattttcggcactgcccgcggctcccacggaggcgt

SEQ ID NO: 423675 - DNA, 122 bp, Homo sapiens
ggcccactgccgctcccggcccgcgctcgccccggagggggtctggcgccctgtcccagtcgaacccacctctggggagcctcagagcgtcccggggacctgcttcctgctcttcccggcga

SEQ ID NO: 423676 - DNA, 122 bp, Homo sapiens
attatactcctttttaaagaaaaatgtgtatttgccccctggtttacccttcctggctcccggaatggctgtattggcagaggcagggcctcaggagacctgagttctagtcctggacctgc

SEQ ID NO: 423677 - DNA, 122 bp, Homo sapiens
tccctcccagtcatcaggccaccgagaatgtgccccttgacccagatgagagggtgagcccgccaaggtcaagcttcccatcctaagaatcacagacagcccggccatgcaccaccacttcg

SEQ ID NO: 423678 - DNA, 122 bp, Homo sapiens
ctgaggtcttgtgcacagagggtgtgaagagtggaagaaaatgggtgggtgattgctgtgcgatcaaggagtaaataagcagcacttgagtacctagtatttaataggccatgaacggcagt

SEQ ID NO: 423679 - DNA, 122 bp, Homo sapiens
tacagcagatccagatccaacagcctcagcaacagatcattcaggctattccaccacagtcgtttcaactccagtcagggcagacgattcagaccatccagcagcagcctttacagaatgtt

SEQ ID NO: 423680 - DNA, 122 bp, Homo sapiens
gcttgagatgcaatcctttgtcttttcaaacatgattcttttggttttgttttgttttctcgctattcttactgacgtctttgtgtggtgcagcggctgggatcccactgcatctacatggc

SEQ ID NO: 423681 - DNA, 122 bp, Homo sapiens
agcgaaactccgtctcaaaataataataataataataataataataatcacccatacagacgcgcaggactcaacgcaggactgccagctccactgccctgagccccccggtgccaggccca

SEQ ID NO: 423682 - DNA, 122 bp, Homo sapiens
tgttttgaaggcgagtgcgttcctcttgactgctgaactttcattctatgaaccgacctccgttgacctgttcccctctgaatggaggggtatttgagctcttcccaggttttggtgatgag

SEQ ID NO: 423683 - DNA, 122 bp, Homo sapiens
gctgtcggctgccagcagtgcttatgctttaagtgcggagcgggtggctgcggagccaggcgcggcgcaggatggtggacagcgtgtaccggacccgctccctgggggtggcggccgaaggg

SEQ ID NO: 423684 - DNA, 122 bp, Homo sapiens
tggccgtcctcgtttcctgcatcttcgtgactcccggccatcagtgcagatggggctccccgccactgtccccaagatatcccggggctcagcatttcatgtagttatttccggaccccagg

SEQ ID NO: 423685 - DNA, 122 bp, Homo sapiens
gtttgggagttatgggaaacgtgccccctcgcgtgcttgggagtgatgctcatggggaggcgtctcaccagaagcaccaatccggaaaggctcaaggcggatggaaggaagggaagctgacc

SEQ ID NO: 423686 - DNA, 122 bp, Homo sapiens
ctgccctcctactcccttctgataaatcacgttcatcccccagctccaggtatcatgagacgttcccacccatggctgcaactccttggaacagggcgcgtctctaaatctgaaccaaccag

SEQ ID NO: 423687 - DNA, 122 bp, Homo sapiens
cgctgggcgcgcagcgcggggagcagacgcgccgtgggtggggcagcgcggtgctgctggcgcccggcccccgcggggtgcagctctgcgcgttctcatgctgtctctctctctttccctcc

SEQ ID NO: 423688 - DNA, 122 bp, Homo sapiens
cgggaggcggctgccgagggtctgggatctcaggaggccgaacggccgggggctggcggccggaacacctaagggctcagtgtggctgcaaagttgagatcgcaccccctaactgcacgccc

SEQ ID NO: 423689 - DNA, 122 bp, Homo sapiens
gtgcggatcaccaggcagcacctggacagctccagagtcggggaagcgccatggttcctgcgcagaaaggatgcgggttggggccggcagatcctgccaggactaggggccttccctttcca

SEQ ID NO: 423690 - DNA, 122 bp, Homo sapiens
gaattcccatattcattcgtttgtatgtctctggcattgtatctaagtaagtcatgttctcgccttgtttcccttttagagtatcaagttccttgaggtcaggagctgtatcttgatcagct

SEQ ID NO: 423691 - DNA, 122 bp, Homo sapiens
ttgctgaatgaccccaggctggtggcttcccctctctgagcctcagtttccaaatgatgacggagttagaccggatggtcattatgggtcctcctgccaggacattctccaattcattcatt

SEQ ID NO: 423692 - DNA, 122 bp, Homo sapiens
ctattttacctaacacattgcaattcagaccagccacattccaggcacccagtagccacacgtggccaatagctgccacattaaaatgcagctctgatgtcaggggggtgaagaagagcctg

SEQ ID NO: 423693 - DNA, 122 bp, Homo sapiens
atggggcggctgccaggcggaggggctcctcatttctcagatggggcagccagtcagagacgctcctcacctcccagacggggtggtggcggggcagagacactcctcagttccaagacggg

SEQ ID NO: 423694 - DNA, 122 bp, Homo sapiens
cccactctggtcaaggtgcacgtgggttttctgtgtctctgttctttttaccccactccccgcagcctctcctccagccagggctacaggcccccacccacggcccacccttcggggacctt

SEQ ID NO: 423695 - DNA, 122 bp, Homo sapiens
gtaccatgtacatcacctgccaccagctggaaagcactgctgcacgtttctgcacgaggtcgcaggtgcgtgtggccggcaacatcacgaggggagcgagtgctctggaatcaagttgctcc

SEQ ID NO: 423696 - DNA, 122 bp, Homo sapiens
tttcccctgcgcccccgggggcggtgcaggccgggcgggggctacctttggaggaggcggcggcggccagcgcgtgcatatagggggtctcccagcgctccatcaccggcttgcccaggatg

SEQ ID NO: 423697 - DNA, 122 bp, Homo sapiens
gtggatcgtttctgctgggagggacggggactgcaggtggatcgtttctgctgggagggacggggactgcaggtggatagtttttgctgggctctgcaagcagaagcatttggtgcagcagc

SEQ ID NO: 423698 - DNA, 122 bp, Homo sapiens
cccggcctggccattggccgcagagctcgggggcgtggtcgagctggggctgggggcgcccgcggtgcccgcccgcgagtctcgctgcctccctcccggggctgcgggcccggcggccgggc

SEQ ID NO: 423699 - DNA, 122 bp, Homo sapiens
ggccggcgtgaggcccacacagtcagggcctcgcatctgggcgcccgccgcccggtctctcgctctcaggtaccccccgtccgggcagacagggctgtcatcctgtcaaaagggaaatccca

SEQ ID NO: 423700 - DNA, 122 bp, Homo sapiens
ggttgtttcaatatcgtgctaaaagatactgcctttagaagaaggctattgacaatccagcgtgtctcggtggaactctgactccatggttcactttcatgatggccacatgcctcctgccc

SEQ ID NO: 423701 - DNA, 122 bp, Homo sapiens
aacccggaagccgtccagtccgctccagctgcatgcctgattggacggtttccagcccagcgtccctggttggataatgcttaaatccccgccctgtcaggctttgagtgacagaagatgtg

SEQ ID NO: 423702 - DNA, 122 bp, Homo sapiens
aacccaaggaaacaatgatagtgatgcagggcaggcgagcctcaaaactggtttgtagcccgggaaatttcttccagactgtagtttccttggctttgccaaggaaagaattcaagggcaag

SEQ ID NO: 423703 - DNA, 122 bp, Homo sapiens
cagctaatttttgtatttttttgtagagacgagttctcactatgttgcccaggctgttctcgaactcctgggctcaagtgatccttctgctttggcctcccaaagtgctgggattatacgca

SEQ ID NO: 423704 - DNA, 122 bp, Homo sapiens
ctcccgccacaaacccctgtgggtctgcaccacgcctgctcctcgggaaggtgattttcccgacctcgggccctcggtgggcctccatgatcggtgccccttcactaccacagtagttgaag

SEQ ID NO: 423705 - DNA, 122 bp, Homo sapiens
aaagggctattaaagggccagcgtcgatctcgcttgtctatcacgatagtcgcggtgctgcgactgaacgcgcctgcgcggaaagggaagcatccacccttgccgattgccacctctttaaa

SEQ ID NO: 423706 - DNA, 122 bp, Homo sapiens
attttaataaaattgtctcatttaggagcgagcttctgcgctgcctctgtcgtcggagcccgggtttgccacggcaaagtctgtaatcagagaaaaataccagctttgttgagggttagaat

SEQ ID NO: 423707 - DNA, 122 bp, Homo sapiens
taaaagctagctttgataaaacaaatttttacctaatatttttcaactgagattccacttcgtcagcatacatagtcattttcatgcttttctttggtgaaggcgtggaaatcattttcagt

SEQ ID NO: 423708 - DNA, 122 bp, Homo sapiens
agtgaggggagggccggtctgctgaaccccatcccagtggctgcgttgctcatgctctgacggtgggttccaggactctgtgtccatgcagccccacggctggccctgagcagtcaccctct

SEQ ID NO: 423709 - DNA, 122 bp, Homo sapiens
ctcagcccaccctgggggaacagaccccgaccgaccctctcccacgctgcagagcccccccggagcgcaccactctaccagcccgctagcccgccagcccagcgtcccacgtccccgggcgc

SEQ ID NO: 423710 - DNA, 122 bp, Homo sapiens
tacactgggggcggggaagtggaggtgaccacacgagcgccccatcactgagcgccgccgcgaaatctgcgctctttgggtcacttggagcgcggccagtttggcagatttgtttttttccc

SEQ ID NO: 423711 - DNA, 122 bp, Homo sapiens
tgttcagggcagcctcttctgtgtgagacatgttgcaacacagggctcttgtctctacagcgtgtggacagcgcgcgccctctacagcgtgtgggtgcgcgtgctctctacagcgtgtggat

SEQ ID NO: 423712 - DNA, 122 bp, Homo sapiens
ctcgtgtttaatctgctccaagaaatgtgccgcagggacatgaagaaccggtttcttgggcggcatcctaggaaaagagtgatggctatgcccacaatcagcagggcgaggggcggaacacc

SEQ ID NO: 423713 - DNA, 122 bp, Homo sapiens
tcgtcaagggtagagacgggaaaaaacgagaagtcctgaggaacatagattcccctcccccgtacattttcccggatggaagcccgaagtttgagggagaaacttgtgaggaaataaaggaa

SEQ ID NO: 423714 - DNA, 122 bp, Homo sapiens
cttggcaccgcgatatgcagggctttgtcgccaaaggaagtgcgacatcgccgattgtcccggttccccgggccctgaccccacctccaccattctgggcccttacccgcctctaagaatga

SEQ ID NO: 423715 - DNA, 122 bp, Homo sapiens
tggcttagaaagtaatgccgtttcgatagcaacaaagcaccaaattgtacaaagcagggacgacactgtgtgaggagccattccataaatctaacgctaagcactgaacagtgcattctgtt

SEQ ID NO: 423716 - DNA, 122 bp, Homo sapiens
caaatgagaggttgtctcgtttgtggggttgggggaggaagagtgaggctgatctgacttcgagggaggagtaaggactgatacctcaatctgcatcatctggggtggggcatgggagctgg

SEQ ID NO: 423717 - DNA, 122 bp, Homo sapiens
tccccctctctcgggatgtcggaccggcactctcaccatttctaggcttccaggggctcccgggcgtcttagctgtggatctcccaatacctgcaggacacagggccacagaggctgggcct

SEQ ID NO: 423718 - DNA, 122 bp, Homo sapiens
cactgcacccactgtcatcacctaagaagacaggcctgatgtggtacgtccctccacccccggacccatccaagtcatctgattgaagagcatgacagaaacaaaatgtattcaccaagcat

SEQ ID NO: 423719 - DNA, 122 bp, Homo sapiens
atgtcccagagacaggtcttaaaactgcacctaccttagctttggaagagctgcatcggccgttaagagttctttttacacgtccagatttttctagggaacccgaaacgaggtatgattca

SEQ ID NO: 423720 - DNA, 122 bp, Homo sapiens
agcaacttgcgtctaagtggtggacgccgcgaagagactggcgcaagctccgaagactttcggccttagaaggccccgcggcttccgctttcttcccccgccttccttgttcgtttcaggtg

SEQ ID NO: 423721 - DNA, 122 bp, Homo sapiens
tcaacctcttctaagaacactcgtccctttcatgagggtagagtccacatgacttaatcacgtccccaaaagccccgcctcttaacactatcacattgggtatcaggttccaacataggact

SEQ ID NO: 423722 - DNA, 122 bp, Homo sapiens
ggttcccatccctgaagaagatgggccaagacaggcgaaagagggcatgagctgaagacacgcactgagcagttgcctctcatcttgctgtgagtggctaggcagaggttaaggtttcctgt

SEQ ID NO: 423723 - DNA, 122 bp, Homo sapiens
aggagggccttgaaatcacaggctggcctgtgatgtctccatgaccccatggcctgcaaccggtcacttgtccactcagctctggccctggcctccctgcagtttcttcatctggccagaca

SEQ ID NO: 423724 - DNA, 122 bp, Homo sapiens
gccacactgcgctagccctggagctggggttccgaccctcactgacggaaaggcgcggagcgaccctgcaaccacggaccggtacggcggcgttaggagcgtcccgtcccggcgcagcgggt

SEQ ID NO: 423725 - DNA, 122 bp, Homo sapiens
tctttcggaagaggcggagtcttcttccgaggaccattcggaagaggcggagtcttcttccgaggaccattcggaagaaggcggagcctacctctcatcaggaccagtctgactgcacctgc

SEQ ID NO: 423726 - DNA, 122 bp, Homo sapiens
agcccttccacgctccgcactgcaagaactgcctgtccggaagggtgactgcaccagctccgctccggatatcttggcaggacgcgccctctggcggcgcctcgctcataggtgggccccag

SEQ ID NO: 423727 - DNA, 122 bp, Homo sapiens
ctgcggcctaatctctaagtccgggccgcggtcggcgttctcctctggggctccgcgccccgaaccttggcttcctcatctgccctgagatgggataatccccacaggtacctttctgcgtc

SEQ ID NO: 423728 - DNA, 122 bp, Homo sapiens
gagcaggggatcggtgggcagcgactctagggtcagcggcgccgtctcggtctccatggccgccatcttgcctggcccggtgcaggtctggccccgccctggccccgcccctgccccgcccc

SEQ ID NO: 423729 - DNA, 122 bp, Homo sapiens
tggcatacaggtccttcctgatgtcgatgtcacacttcatgatgctgttgtaggtggtctcgtgaatgcccgccgactccatacctggggaccgcggcggggagcgtgagcagaagctcggg

SEQ ID NO: 423730 - DNA, 122 bp, Homo sapiens
gggaggaaacgcctgcagctggctcttctgggcatcactgaattccacgctgaggggaaacgcctgcagctggctcttccgggcatcactgaattccacgctggggggaaacgcctgcagct

SEQ ID NO: 423731 - DNA, 122 bp, Homo sapiens
gtgttttctgagcgctctgggttttggctgtggactggaatcatggcacagggggagtcacggcacggggggagtcacggcacgggggggagtcacggcacggggggggggtcacggcacag

SEQ ID NO: 423732 - DNA, 122 bp, Homo sapiens
gtgatcctcccacctcagcctcttgagtagctgggaccacaggcatgtgccaccacaccacgccaaactaattttatttgtttgtttgtttgttttacagatgaggtctcactatgttgccc

SEQ ID NO: 423733 - DNA, 122 bp, Homo sapiens
ggctcgggaaagaaggggacgcggctgggcggggcggtgactaaggtgaggggctgctcgcgggatccgcaccgcgggagcagctcggaggggcggccctggggggcaagggcgggccgcgg

SEQ ID NO: 423734 - DNA, 122 bp, Homo sapiens
aataatccagtgaaggaatgccagagagtggaaagtggaggatgactgacaaaggacgcccgagtacgttttcacttcaagctctacaggtaagtagggcgctcggaaaattccagggtaac

SEQ ID NO: 423735 - DNA, 122 bp, Homo sapiens
ccacaggaacggtggtgtggacacactgctctttaaaagtgcaacagcctcaaaaacaatcgagggcacaggagaagtcactggagagccattgttttatttaggaaacaaactctgaagca

SEQ ID NO: 423736 - DNA, 122 bp, Homo sapiens
cctctgagcccctcccgccgccccttcagggcacctctcccctcccccgctgctaccccacgggatgtgtactttgtcacccgccctgtgcgttgccacctccaccaagtcccctcggctga

SEQ ID NO: 423737 - DNA, 122 bp, Homo sapiens
tggtaagattttataatcaccctttggatttagacctccaagactatcattccatttttacgaaaaaccgatttagaaccaagctgatttcttttcactgaaattgcccaagaagactcttc

SEQ ID NO: 423738 - DNA, 122 bp, Homo sapiens
atctcagctcactgcaacttctgcctccagggttcaagtgattctcctgcctcagcctctcgagtagctgggacgacaggcgcaccaccatgccagctaatttttgtatttttagtagagac

SEQ ID NO: 423739 - DNA, 122 bp, Homo sapiens
ttgctccttatgatgtttggatgtgttcggagtttcttccttctggtgggtttgtggtctcgctggctcaggagtgaaactgcggaccttcacggtgagtgttacagctcttaaggcagcgt

SEQ ID NO: 423740 - DNA, 122 bp, Homo sapiens
gggagccgaggggaggagggcgcccggcggagcgttgaatggggcgcagcaaggctcggccgggctttgtgcagcgagcccgcgggcacccctcccgctccagcctcgccccgccccgcagc

SEQ ID NO: 423741 - DNA, 122 bp, Homo sapiens
tcacgcacgcacagagccacactcccatattcacactttctaactcgtaagctccgacagcgcctgcattttctttgggagccgcttggaggttcattaatatcattagcatttaaccccct

SEQ ID NO: 423742 - DNA, 122 bp, Homo sapiens
tccaatttctccacatcctcaccaatacttgttatattgtattaaaaaaaattgaccaggcgtggtggcttatgcctgtaatcccagcactttgggaggctgaggtgggcggatcacctgag

SEQ ID NO: 423743 - DNA, 122 bp, Homo sapiens
gacgcgcagcccgccactgcccccgtggctgggctgagtgcccgtctcctaccttcccctcgagctcggtgcgcaatcgtcaccatacagcccccaccacagacaccacactcagcaggcct

SEQ ID NO: 423744 - DNA, 122 bp, Homo sapiens
gggagaaacaaagcaatttggcctccagtgctcctgaaagtgggctacagagcagattaccggtacatagcccaccatagttcactgcccacttttatgtaggcctgacattttcactctgt

SEQ ID NO: 423745 - DNA, 122 bp, Homo sapiens
ggatagggtgcgcagacctgcacttctcagacaaagagccctcagggtttcagctcctgtcgctccttgggaaggtcctactctagctaaatccccccacattgaaggaaggtatgtaagct

SEQ ID NO: 423746 - DNA, 122 bp, Homo sapiens
gtggcaggcacagtgccagttcaggcccagccacttcctctagccttccccccacttcttcgaggacttcgccccctgcctacccgaggccttgtgccaagaagtacctccctcagcctgca

SEQ ID NO: 423747 - DNA, 122 bp, Homo sapiens
gcaggatttatttcaggtgacggaggaacatacacggaatatgaatttccgcaggagtggcgccgtgattccttccctctccctctcggccgccctctcctcagggtctccctccttttctg

SEQ ID NO: 423748 - DNA, 122 bp, Homo sapiens
agcaggtgggcactggtggccagaactgggtcctgacagcttctggaagggtagggtcaccgagacggccctgcaggccaggctgtgggagccagcggctcaggtccgtgtcacgctccttg

SEQ ID NO: 423749 - DNA, 122 bp, Homo sapiens
ctcgcctggtcggcctgcagcttctcatttcctgctgctgggcctttgcctgccatagcacggagtcttctcctgacttcaccctccccggagattacctcctggcaggcctgttccctctc

SEQ ID NO: 423750 - DNA, 122 bp, Homo sapiens
cagtctatggtactgtgttatggcagcctgaatgaaaatgcccaggattccaagtttaagcggattttgttcagagatttggcagaaacacaaaaatattgtgtataccccacagcattata

SEQ ID NO: 423751 - DNA, 122 bp, Homo sapiens
aagtcctttgtatctctggatgtttcctgaaaaggctggatgcttccagttcagaatccccgcccccactcccatctaaggagatgtcatataattccaggtgagctgctgttgcccaaatg

SEQ ID NO: 423752 - DNA, 122 bp, Homo sapiens
gctctgccaactcctagccacccaaccctaaatacctgaaactgtatgcatcagtttcttcgtctttaaaatggaagcaataatagatcttcagagtaatactttcttaaagatagtgccca

SEQ ID NO: 423753 - DNA, 122 bp, Homo sapiens
actttggcctcagtttctttatctgcaaatgagaagttagagacagatcaggattccaagcgcaaccctgctgtttatgagggaccttgagtaagttacttaatgtttctgaccaaagttca

SEQ ID NO: 423754 - DNA, 122 bp, Homo sapiens
ctagcaaggctcccatttattcaaaaaatagctagtaaattggaggctagggattctcaccgtaagaattttgagagtctgatttttgtgtggtaccaggcatttataaacatatgttgaat

SEQ ID NO: 423755 - DNA, 122 bp, Homo sapiens
gttaaaaccagtctttcttaatttgagtattatctaccttgactttactgttttgtcccccgtataccagcattataaaaggagtcatgcctgtaattccagctttgggaggctgaggtggg

SEQ ID NO: 423756 - DNA, 122 bp, Homo sapiens
ttatttatatcccccgcagctgctggggaaacatccgctccaaggtcgccgacaggaagccggcagatgtggctttttggccaacacagtgccttttggtttttaaaatggggtggaattca

SEQ ID NO: 423757 - DNA, 122 bp, Homo sapiens
tgtgttgaagctcaatgactttctggcagaagtgaacctccagcttcgttttctgacagccgtggttcttcacaggcctggtttcccactccggaccctccactgcccctggtggcggccac

SEQ ID NO: 423758 - DNA, 122 bp, Homo sapiens
gccaggcagcccagggtactaggaacacacacagtgtgaagaccgcagctccaggctgtgcgcgcggcgttatctcctgctgccccgacctgcttttgcttgggagcctctgcccaggtcac

SEQ ID NO: 423759 - DNA, 122 bp, Homo sapiens
cccgtgcttgtctggatgcggctctgagtctccgtgtgtctttctgcttgttgctgtgtgcgggtgttcggccgcgatcacctttgtgtgtcttctgtctgtttaaacctcaggatggctcg

SEQ ID NO: 423760 - DNA, 122 bp, Homo sapiens
taggattctggacgcctacatctttgaatttctgacctaccactccatgacaccgaccttcgccctttcatttggagatagacttaccagaaattgatccatatggcaggccgggcactttg

SEQ ID NO: 423761 - DNA, 122 bp, Homo sapiens
gcggtgcggtgggggacctgagagagttttaaaagcactggtatttgtcccacacaaggtcgcccgctccaagtcactgttccccgctccccgggtaggcttatagccaaagaggcttctag

SEQ ID NO: 423762 - DNA, 122 bp, Homo sapiens
gcagcttctccagtggcttagctggagatccaggtggtccaaccttgagagtacaaagtccgcactttatctataggtccctgttctggtaaagggccataaaacattggacacagggtatc

SEQ ID NO: 423763 - DNA, 122 bp, Homo sapiens
gcgcagtgggaggggccggaaatgtttacaacctgaccggctggatgcctggaggccaggcggctccttggctggggcccgagccccctggcaagtcggagcgggttcccccaacagctgtc

SEQ ID NO: 423764 - DNA, 122 bp, Homo sapiens
cggcgcgccgatcggtatctgcatgggctcgcccggggggaaggtctcacccaatgggaccgttcgccgaggccttcattagcatgccgggggcggggaggggcggggcggccgacgggggc

SEQ ID NO: 423765 - DNA, 122 bp, Homo sapiens
gggggctcagggtgttctccgtgaggagcgggcaccggggggcggatccccagtgaggagcgggcccgggggggggtccccagtgaggagcgggcaccggggagggtccccagtgaggagcg

SEQ ID NO: 423766 - DNA, 122 bp, Homo sapiens
aacaacgaatacatctgggttttcacgggggcggggagacgcggggtgcacttctcgccccgagggcctccggcgaagcaacccggcagccgcggcgcccgagggcctggcgctggtctggg

SEQ ID NO: 423767 - DNA, 122 bp, Homo sapiens
ttattaaaagagtatttaagatgaaagaaaattatctgaatgaaaatcccagaagctccccgatgagtgttgtatatgagctttggagcataaacttgacttctgctttggccattcttggg

SEQ ID NO: 423768 - DNA, 122 bp, Homo sapiens
gagcaggcggagggggtaagctgcgattacaagcaggaaccggcagcagctgtgagtccccggctggggctagggctgggggaggggagcggcgcccgggctgggccccaggggtcgcgggg

SEQ ID NO: 423769 - DNA, 122 bp, Homo sapiens
cgtggttctggagtagcctccagctcggaggacttgtgttcaggggtcctgggccccgggcgaggtcccgccctcccgtggtcactggctccgcccccagcaccaggcgcccagtggagccg

SEQ ID NO: 423770 - DNA, 122 bp, Homo sapiens
gggcggtgccgccccaggtaaatcagtccaggagcagggcccgggcctggcgtacactctcggaaaaatgggggccagagcaaacaagaagagcgaaagcaagagggctaggcagccagagg

SEQ ID NO: 423771 - DNA, 122 bp, Homo sapiens
cctgccaacacttcttgaaagtgatctcataagagaccctgaaccaaaaccacccacttacgtggcttctaatttcttgatccacaaaagtgatgcaacatattaaacactggttgttattt

SEQ ID NO: 423772 - DNA, 122 bp, Homo sapiens
gcaccggaaaggctcgtatcggagaacggtgtggccacgagagtctagaggaaaccaacccgcaactcactggagctgaagggctggtagtcaggccgaatctcgcgagaattggaactatt

SEQ ID NO: 423773 - DNA, 122 bp, Homo sapiens
gctaaaatgcgctcagccaatccggcagctggcgcagacacgtggttcgggggcgcgctccgttgctggccctggatgctaaccctaggaaggcttttcaaagagaaaccagattcgctcct

SEQ ID NO: 423774 - DNA, 122 bp, Homo sapiens
ccttaaagtagagggacaagggttctcttccctatctgccacttattagctatgtgacctcgtgtaagtctcttttctttttgagacagggtctccctctgtcacctaggctggagtacagt

SEQ ID NO: 423775 - DNA, 122 bp, Homo sapiens
aacccttcacaatctggaactggaaagagatttctagcccccacgaggaacaaagcttgacgatgaggaaatgacaacctcccttgtttgctaactattctcaggctaaaaagagagtgctg

SEQ ID NO: 423776 - DNA, 122 bp, Homo sapiens
gaatcaaaagggctaaggctcgggaggccaaggcaggtgaatcacttgtaatcaggagttcgagaccaccctgaccaacatagtgaaaccccatctctactaacaatacaaaaaattaacca

SEQ ID NO: 423777 - DNA, 122 bp, Homo sapiens
ccgtcctcattaacggatcggcactcaaatcaaagcccagccctctggggttcatgatcacgcacccccgggacccctagcgggggcgagcctccgacctcagtctgtctcctcccccaggt

SEQ ID NO: 423778 - DNA, 122 bp, Homo sapiens
cgtgatccacccgcctcggcctcccaaagtgctgggattacaggcgtgagccacggcgcccgggcaagaaaaaattattcaagggagtctctctcgagcctattctggctgcctataaaaaa

SEQ ID NO: 423779 - DNA, 122 bp, Homo sapiens
cggtggtgctcgggccgccgcagtgcagcgactgcccggccctccctcccctgcctcacccggtcgggtcccggctcttcctgtgtggaggtgatggtacctgccacaccacagctgcgcac

SEQ ID NO: 423780 - DNA, 122 bp, Homo sapiens
gagggagacaaatggcctgctatggcccgcaccctgggagcggcttagccatgctggggacggggcagacaaaaggtgagcccttacctctctgagcctcacctctgacatgggaaggcccc

SEQ ID NO: 423781 - DNA, 122 bp, Homo sapiens
cccactagagacagctggattgctccatgtgccggactcaggacttagcgaccccttggccgggtctgctccagctgagaaaactgctctgctggaaaagtcggtttagacttccagccccc

SEQ ID NO: 423782 - DNA, 122 bp, Homo sapiens
atgccagaccagcacccctgcctgagaaaattccagtctcgggccgggtgcggtagctcacgcctgtaattccagctctttgggaggctgaggcgggtcaatcacgaggtcagaagatcgag

SEQ ID NO: 423783 - DNA, 122 bp, Homo sapiens
ctggtctcaattaccagagaattggcaagaaacctgacagctggggcttaggattccctgcgccagacctccgagctacaccagagggcgtactttccttactcggcctcggccacatccgg

SEQ ID NO: 423784 - DNA, 122 bp, Homo sapiens
gccttgtagcagcagcttccctgagcagaaagcatgaaggcctaaatatgagggtgggggcggtttggtgtcacccgacagtccccagcattagtcctaacacatcccaacatacttaaaaa

SEQ ID NO: 423785 - DNA, 122 bp, Homo sapiens
ataacagcagctaccatttaccgagaatatattatatgccaggctctggtctaagcattacgttctttattcttcaaagcaacctcatgaggtgggagctatcacaaccctgttttaaaact

SEQ ID NO: 423786 - DNA, 122 bp, Homo sapiens
gctgtacactttgcacccatgatgaaaagcgtcacttttgcagcattccagctggagatgcgtgaccttcggtctgcggcaggcggaagggcgagagacttggacaggaggtgcatcttgcc

SEQ ID NO: 423787 - DNA, 122 bp, Homo sapiens
gggtcacagaagagaaccgcggaacccagcgactagtgttcagctcgattaggatgaacccgggcacttagccgtgcaggaacaatggtgagcctttagcccgatcgggagcggcaatgggc

SEQ ID NO: 423788 - DNA, 122 bp, Homo sapiens
agaggtgtgtgaagtcacagccctggccccagctgccgtgtgtgtaacactgggcccatccgtcaaaccttctgagcttgcctcctcctcatcaggaaatggaggtgtggcgctgactaagt

SEQ ID NO: 423789 - DNA, 122 bp, Homo sapiens
cgtgaggggacttgggttcctcttagcattggcaggccagtataaacccccagctcggatcgagctatgcccgatgctgccttaagccttatgaggtcaccacagaacggcaggtgagggcc

SEQ ID NO: 423790 - DNA, 122 bp, Homo sapiens
gatataaaaactgtaatgatgatgatgttggttatgaggacaacagcacccatcacttaccgagcagttgctaatcatggtcattatgagaaggctcatattttccctccctgtgttttcaa

SEQ ID NO: 423791 - DNA, 122 bp, Homo sapiens
ctcgggctcgggaggatgctgggggcccggtgcccatgagcttttgaagctcctggaactcggttttgagggtgttcaggtccaggtggacacctgggctgtccttgtccatgcatttgatg

SEQ ID NO: 423792 - DNA, 122 bp, Homo sapiens
aagaccacatctaaaaaaaaaaaaagaaaggaagaaaagaaaaaaaagaaaagagaaatacgcaaaggggaatgtggaggcagaaaagttctgtactcacacagagtctaaccaagttggtg

SEQ ID NO: 423793 - DNA, 122 bp, Homo sapiens
ctcgaatatgttccacacgtacgcaccaatcaaacttgcccacttggtcttcgtagaccgcggccgcaggaatcagcagcgtagcccaaagccagaaacgagaagcccactcagccgccatg

SEQ ID NO: 423794 - DNA, 122 bp, Homo sapiens
tagacactgggtatgctcccccaggatgtggcgatggggcgcccggccgccctggctacacgtcgaaccagtggtcccccatgcagacgcggttccactcgcagccacagttccagcaccac

SEQ ID NO: 423795 - DNA, 122 bp, Homo sapiens
tgcgctgcccccgcgggtttcgttttcggcacctacagctcccgaggtgcgaggctgagtcgttcctgccgtggggaccgggggtcgagccgcccggtccggaccccgccggactccccgcc

SEQ ID NO: 423796 - DNA, 122 bp, Homo sapiens
aggccctacttccgctttcaccttggagacggcgactctctgcgtactgattggaacatccgcgaaatgatacgcctctctgcaatgctattggtcgaaatgcatgtcaatctcccagcgtc

SEQ ID NO: 423797 - DNA, 122 bp, Homo sapiens
ttcgagcctaaggagttaagcatcctctctccgccctggctggtcacgctgcccctagcgcgacctagtataaaccagaccgagtcccgaaggactgggagaggtctaaaacgaaatgcgag

SEQ ID NO: 423798 - DNA, 122 bp, Homo sapiens
cccagtcttgctgagcgcaaggcggtggaggcctgaggcctgaggcctggggcggggtggcggccgggctggccttggcctcgcgccttcccctgcggccgccgcgggctccgcgggcggta

SEQ ID NO: 423799 - DNA, 122 bp, Homo sapiens
tcagggcaaccgcatcatgccgtcctatgtggccttcactcctgaaggggaatgtctgatcggcgatgcagctaagaaccagctcacctccaaccccaagaacacggtctttgacgccaagc

SEQ ID NO: 423800 - DNA, 122 bp, Homo sapiens
gccggccccgctcccccatgtgcacacacactcttgcacacagccggccacctctctctccggacacacacagtcagaggcgcgcacaaacacagtcccttggccgccgagcgcacgccgcg

SEQ ID NO: 423801 - DNA, 122 bp, Homo sapiens
gagaattgaaggggagttgggacagcaggaagtgtgttagaagacagatattcccaagagcgtgcagtgttagaccaggtgctttgcaggataggcctgaaatgttcagacaagatataagt

SEQ ID NO: 423802 - DNA, 122 bp, Homo sapiens
ttctttaatctttttccttgccaaagtaccaaagctgattctatcaacctaacttgacatcgtacccagggaaagcccatactggaaacccagggccgcagatcaagattgtgaggggtgca

SEQ ID NO: 423803 - DNA, 122 bp, Homo sapiens
tcccgacctgcggcatccgcccagaagtgcggctctcggcagccgggcggggcgtgggggcggctcccgttccgatccagggggctttgctctggaccgcaattgctcaggtggtctccgaa

SEQ ID NO: 423804 - DNA, 122 bp, Homo sapiens
cgtcagccgtgacagcatgagtgaggtgctcaagtcagcccgtgactatgtgctcatggccgacgtcaggagctgccacagcgcccgggtcctggggggatgaggaacccggcaaggcgtgg

SEQ ID NO: 423805 - DNA, 122 bp, Homo sapiens
aggcaaagaattcgtaggcttgacatcaaaagcataatccaggctgggcgtggtggctcacgcctgtaatcccagcactttgggaggccgaggcaggcagatcattgaggtcaggagttcga

SEQ ID NO: 423806 - DNA, 122 bp, Homo sapiens
gtttaacatattcttaatcttgggagtcagactcttgactactgaaatggatgcccaggtcgatcagaccctcctgatgaggtagggaaacctaaggatttaactctgggagctcaacatgc

SEQ ID NO: 423807 - DNA, 122 bp, Homo sapiens
gcccttccaggaggccagttttctagtgaagacagagtgcacctgacactgccatcacatcgtcagtatcactgcctgtctctgccaccaaactaagatcaaaggaggggctcagctccctg

SEQ ID NO: 423808 - DNA, 122 bp, Homo sapiens
ccgtcctcgcagtcctcctgtccgtcgcagaggtagtctctggggatgcagtgcccattgcggcatgcggcctcctggggcccacagggcaggggcctgacggaaccgggaagcaggggctg

SEQ ID NO: 423809 - DNA, 122 bp, Homo sapiens
gcggggtagaggcggaaacacaacctgcagggccagagcgaggcgcgagaaggacggcggcgtgagggggcggggcgcgcagcgcgagaaggcaggcacgaggggcgagcgcgaggcggggc

SEQ ID NO: 423810 - DNA, 122 bp, Homo sapiens
aggagaagcccggatgtttggacaaaagcaacttccggaagctggggacgtggacgggggcggggaaaaatctcgcgatatttaagattccaggaggcggtgcgttgccacggagacggagc

SEQ ID NO: 423811 - DNA, 122 bp, Homo sapiens
gcccaccatcaccccccagcacccaccccacagacggccgctcggagctccacgtgcgagcgggccctgcagaagctggagtttcccctacatcctcgccagaaaaaatctttccccaagcg

SEQ ID NO: 423812 - DNA, 122 bp, Homo sapiens
gcagcagcggagacggtcctgtggcacccagctgtttaacttccaccgaggcagggggcccgagcagggacagaagaggccggggtgaacatcaccctttctacagtggctcgatgccttgc

SEQ ID NO: 423813 - DNA, 122 bp, Homo sapiens
gtcgagcgcgttgtttgcgcctgctaacctttcccttggtgttcggttgctgttccaggccggcgcggtgaacaagcagggcgacagcattctgtgccgctgagccgcgctgtccaggtgag

SEQ ID NO: 423814 - DNA, 122 bp, Homo sapiens
tataacccattctgcccctctttgagagctgcggggcacccagaggcttttggagaaaaccggtttggggaagagttttggggtgctgctgggagccggtgtgctgagtaaacttagaaacg

SEQ ID NO: 423815 - DNA, 122 bp, Homo sapiens
cgagaaaccagtcaccgcacagctgtggttgcctgaaatgattaagctcattaatcaccccggagtgaggacagactcagatgaaaaccagcaaaagccctggaaactcatgtgaccctgcc

SEQ ID NO: 423816 - DNA, 122 bp, Homo sapiens
agctgcagtagaacagcccacagaagtcctcatgggcctggctcacccttttcatgggcacgtggctcccacaggcacgcagccgatcagaagaggccggagttggtggctcgcagtggggg

SEQ ID NO: 423817 - DNA, 122 bp, Homo sapiens
tctgggaaatggacctagcagaacaggctccaaggcttagaagtattgcaacatcctcagcggggcatgaggggtaatccagggttagatccagaacagtaatagccccaaaggagtcatcc

SEQ ID NO: 423818 - DNA, 122 bp, Homo sapiens
gcggcctttcccccattggtgctcactcctgggtcttcaggggcctggggaggggtctgccggttcaggctcggcgaagaaggtccgggatccgcacctggaaggagagggccgaggggcct

SEQ ID NO: 423819 - DNA, 122 bp, Homo sapiens
ctgagggaggaacagtgacctggctaaggcgtggcctcagggtggggcctctaccgggggcgtggccttgggctgcttggggacggactcttagcgggcgtggtctagatctgcatggggtg

SEQ ID NO: 423820 - DNA, 122 bp, Homo sapiens
aatgggaggggagccgggtgagacaataccatttttaaaagacccggcagggcacgggggcggatcaagaggtcgggagttcgagaacagcctggccaatatggtgaaaccccgtccctact

SEQ ID NO: 423821 - DNA, 122 bp, Homo sapiens
cagaagctggagactaatattggcactcaggcctgaggccatagaaaatctcctttccctcggatgcatcttcctgggttgaagtccagctcctaggctcgctcatgtggcccccttgagca

SEQ ID NO: 423822 - DNA, 122 bp, Homo sapiens
accggcctgggccccgcccccgggcgtgaggcgcccaatgcgcgtgcgcggcggcgtcggcgccagttatttctgtcccgccccccggcctcggctctttctgcgagcgggcgcgcgggcga

SEQ ID NO: 423823 - DNA, 122 bp, Homo sapiens
ctccgcggccacctgaggcacaggggagtctgctcggccaggacagcctccccgaagtcccgtgccctcgcctctgcactgcgggacgccagcgctcggccctggcggaggcgtcctcggaa

SEQ ID NO: 423824 - DNA, 122 bp, Homo sapiens
ggaaaagggcagggctactttactttgtctttgcgcttcggatttcctgtgctaggaaaccgcagcacttcccactcctgcccctgatgtctgcgggaaaaggaacttgatgaggggcccta

SEQ ID NO: 423825 - DNA, 122 bp, Homo sapiens
tctcgtgcctgcagttgctcttcagccagcccagggacttgcagtcggccagtgaggcctcggttcccgtgcactggacctcatccagcatgatggggcctgatcctgtggacacagcagat

SEQ ID NO: 423826 - DNA, 122 bp, Homo sapiens
ctggggcctggggtcacctcccctctctgggccaatcacctgttgagtctggagcactggcggctattcttaggggtttctatatttaaaatggggcctgactggcttgaggtcatctccag

SEQ ID NO: 423827 - DNA, 122 bp, Homo sapiens
agaattattaacatgcctaataggagccctaaaaactaatccaggtctgcaaaagccgatcgacaactctgtagtgatttagaagagaattgcaagacattaacacagagcgtcctaagtga

SEQ ID NO: 423828 - DNA, 122 bp, Homo sapiens
ctgagggtcagtgataggcctgtcagtgtgcctgggactctcacttaggtaaccccatgtcgattcccagagtagtcttaatgttatcattattacacagataaagaaactggatcccaaag

SEQ ID NO: 423829 - DNA, 122 bp, Homo sapiens
gagggcgggggcgggggcggggggggaaggccgccgcagctgggaggagggaccagggcgcgcggctacagctgtgcggccccaacctcagcgcgcggacccaggcctcacctgcgagccct

SEQ ID NO: 423830 - DNA, 122 bp, Homo sapiens
ccctacttctgctctgtctcatcaaagcagcaaggctgccacgccctgcctgagatgccacgccctgcctgagttcccctcctgtatcacaatctgcaaagcagcttcagaaagaaagctgg

SEQ ID NO: 423831 - DNA, 122 bp, Homo sapiens
taaacagaacacgaatctgcattcaacggtcgatgcttccacagtgtttcctccaatactcgagaatctgctccacaggtaaacggacttctccaactggtgatagaaatggtggtgcccgt

SEQ ID NO: 423832 - DNA, 122 bp, Homo sapiens
tcagaccagatagaaaagcagctaatatctctggcttttcagagctgcaaagggcaacctcgatcttacaggtgccccctaggtggcatcaaaggatcatgcctcaaaaagaaattccaaac

SEQ ID NO: 423833 - DNA, 122 bp, Homo sapiens
gtaatataccacatactgtctccttaattaatttataataaggtacagtccctctttaaacggtggttgggcattaaataatacaagtaacttttaagaatttgcttacagttgttaattgt

SEQ ID NO: 423834 - DNA, 122 bp, Homo sapiens
accggcctgcgcctgtcttccagcccccttcctctttactcatttcctgccctcaggggccggggttcccgggtaacttgagtcacagaaccttacattcattccatccagatccttgtacc

SEQ ID NO: 423835 - DNA, 122 bp, Homo sapiens
tgagcagctcccctccccccaactcacaggaatgcaggcactccacgatagtggtggcgtcgatgaagtaccccccgcagagggcacacatgaggtgggggttcagctctgtgattttgatc

SEQ ID NO: 423836 - DNA, 122 bp, Homo sapiens
aggaggaggaggaggtggaggaggcgcctggccccttgggacctgcttcttctttcagttcgcgttttctctgtcgtgtacagctttggagggacacctttgggttccagactttgatgaac

SEQ ID NO: 423837 - DNA, 122 bp, Homo sapiens
gccttctatactaattctttggataccacaattatagtttattgagtcttccgttccctgcgctgcctatctctggggtccttttgttatggtggctggtgtttgctttattttatttaggt

SEQ ID NO: 423838 - DNA, 122 bp, Homo sapiens
tcgggagggactgcggtgcgactaggagtgaataatttaaaggggccgtgcctgcggagccgggcggaacgctagcggtgttggcgcggagtggaccccggctgcggcccctgggtgagtct

SEQ ID NO: 423839 - DNA, 122 bp, Homo sapiens
ataatgaaagagtttcaggagaaacctgtctggttctgttggaaaaactccgtctcctggcgcaggacagccccaaacacctctccctgcaagtggctgtgcacgtggcccatggtgttgtt

SEQ ID NO: 423840 - DNA, 122 bp, Homo sapiens
agcggaaggaggcggtgctcgggtggcttagcggtgcatgggttctgctgggggcaacctcgaggttcccctggagactcccccgcccgccccaaatcagagtccagacaacacagtggggg

SEQ ID NO: 423841 - DNA, 122 bp, Homo sapiens
cggcggagcctttccccgaccccgtctggggatagaatccggcgcccggtctcccgatgtcgggtcttgacactgtggtggtcgtgaacacaagtgcccaagcctccagcgctggtgctttg

SEQ ID NO: 423842 - DNA, 122 bp, Homo sapiens
aggtagtgatgtgcctgcctcggcctcccaaagtgctgggattacaggtgtgagccaccgcgcccagcctggaatttttaagtagctaaagaattagatttgtttttatgtgaaagatatga

SEQ ID NO: 423843 - DNA, 122 bp, Homo sapiens
acaaagttgtacagcccctgaaaaagatgtcacagaaaaacagcctgcagggcgtccccccggccactcctcccctgctgtctacagctttccccgtggaagagaggcctgccttggatttc

SEQ ID NO: 423844 - DNA, 122 bp, Homo sapiens
aacctccagagcgtgtgctatcctttcctctcagtcctgccatctagctgccttgggtctcgcgctccgcagagcgttccgacactctccggcctcgttctgccgcctccgcgcgctctccc

SEQ ID NO: 423845 - DNA, 122 bp, Homo sapiens
cagctatggaggagctttacaacttcccggcctgcagagccgggcgcagcaagggccagacgcggcgcgagctggcgctgcgagccaacgggccggcgcctggcgggcacgatcgcaaggtc

SEQ ID NO: 423846 - DNA, 122 bp, Homo sapiens
gatgaaggtaaggacggggcataggagcggggcggctggttgctggtgccaggactggcacgggactctgggtcgcctaggtttgctgattgcagggcagaagtagtgtgtcttatccagag

SEQ ID NO: 423847 - DNA, 122 bp, Homo sapiens
tgggctcgagggaaaaaaagcaaatgcagccattaaataaaaatgtcccctacatccgcccgtacccgatccggatcccgagcgcgcgagggcggaagtggtggtggcccgcgcggccggaa

SEQ ID NO: 423848 - DNA, 122 bp, Homo sapiens
gtgggggagggtcctggagccttattcaatctgtcagagtaggaaccgtcctatcaggcacgcagttggggaggagggcgtggcttccagcgtttggcgcggcctttgtctctggctcaggc

SEQ ID NO: 423849 - DNA, 122 bp, Homo sapiens
cccacgtttcctctcgcaagggatctggaccacccccggcagccaggtcaggggtctgtgcgtggcctcccatggggctctctctcagaacccgggagtggcagtggggatggcgtgcaaga

SEQ ID NO: 423850 - DNA, 122 bp, Homo sapiens
ttcgtcttgggtcttccttctttccctttgggaagcccacatggtgttcatgactccagccgtctctcgggctccatgtagggcagggagggtgtgttgtccactctcgcctatgtcgggag

SEQ ID NO: 423851 - DNA, 122 bp, Homo sapiens
agggaggtcttctctctgtggccacgcttcgggacagggtccccgctcagccccagcctccgcaccttcaaggaaactatcacagagctgaggtcaccttgtgcccatacacaccaaaagca

SEQ ID NO: 423852 - DNA, 122 bp, Homo sapiens
gagcacaaggcagccacggcaggtgactgaacagggctcacgctgcagaggcagagtctgcgaggcagagacagcaccggccaccgcaccaccgcacggggacccaaccgtgaaccctgtag

SEQ ID NO: 423853 - DNA, 122 bp, Homo sapiens
ccaggatctgcatgacctccaggtcattgcgagacacagactcgtgcagagcggtccagccgcggttgcagcggtggttggtgtctgcattgtgctgcaccagaatcttcacggcctccgcg

SEQ ID NO: 423854 - DNA, 122 bp, Homo sapiens
gatatcttcctattaatatgcacgatgccctcgtctattgccttcctttcccgctgccttcggttttccagtcgaggggcttcctaatgtgtccctgtccagctgggatggctgcaagggag

SEQ ID NO: 423855 - DNA, 122 bp, Homo sapiens
cctggaaaaggtcaggagcgcctgctgcaggcacggttgccgaaggccaggccttcctggcgcaggggagggccaggggagggaagcggatactcagtcgctgtccgacggcgagttttcgg

SEQ ID NO: 423856 - DNA, 122 bp, Homo sapiens
taatgtcaaaaggcaattctgtgtatcaccccacacagagagttaaatgttttggcttggcgcatttgtaactttagatatattgcattctattttattttatagatactaattccattaat

SEQ ID NO: 423857 - DNA, 122 bp, Homo sapiens
ggactttttgacaaggtagtacatcaaaaaattaaatgattcattcaattattttgttttcgtttgtgcaaaggttgcattttggatgtataccctgtggtcgtttagtaaatctgttgcta

SEQ ID NO: 423858 - DNA, 122 bp, Homo sapiens
gggtccccctgcagcagtgcccactcatactggacgatggcgtggtcatctgtgctctcgcggccgtctagaaccaccccgtctgtgggcagatgcagaaccacatcctgcccagccttgct

SEQ ID NO: 423859 - DNA, 122 bp, Homo sapiens
ttaaaaccactaaagggcagaacaagagattgcgggcaggctgcaatgtccttacctccacgttataaaaaataactaaccttaaatatagatttcttgaatccttttcggattctttttga

SEQ ID NO: 423860 - DNA, 122 bp, Homo sapiens
cggggacccccagaggctctgactcctgggtaaacaggcgcaggggcggagttaaccctgcgggggtggagtaggggcttggggaggacgcagtgtcctgggctgggacccaagagaccctg

SEQ ID NO: 423861 - DNA, 122 bp, Homo sapiens
gggccatgtcttctgagcattctcagaatcacggggcagcggtcagaccatctgttaatccggaagctctcatttcatggatataggctgacagtcttggccagacttgactccctttcctg

SEQ ID NO: 423862 - DNA, 122 bp, Homo sapiens
taaaccgaagcttgtggaacttgaacgccattttgaagctagttccttagacgattcggtcgaagatctgtctctcggctgccctctatagagctctaaacctggcttcaaggagttctttc

SEQ ID NO: 423863 - DNA, 122 bp, Homo sapiens
cggagcgaggcggggcgaggcggggcggaggcggtgcctgccagagcccggacctaaaaccgcggttcgattttccttatttcctcccagcgcttatttcccctgagcgcgatgggtcaggc

SEQ ID NO: 423864 - DNA, 122 bp, Homo sapiens
cgggcacatcctcaccggggcacaccctcacccgggcacaccctcacccgggcacagaatcgcccagacacagcctgacctgggcacaccctcacccgggcacaccctcaccggggcacacc

SEQ ID NO: 423865 - DNA, 122 bp, Homo sapiens
ctcattccctcgttcattaagggtatccctgaagccctgctcagtgtcaaagaaaacaatcgattctccagttattcgtccgcccaaggccaggttatccgggtaatggactggagggatgt

SEQ ID NO: 423866 - DNA, 122 bp, Homo sapiens
gtacaaagtatgactatcaagggtacaagatgcaactaccaacttataggtatattaacacggcagaacagataacatttccaacaatactcaaaatggttttgccaccatttttaaaccgc

SEQ ID NO: 423867 - DNA, 122 bp, Homo sapiens
ctgcccgggactcggccaggagggcgcccatgccaacgcctcttgcaggattagtgccttcggttggcaaaaggcggataaaggaagagcgaaaccacatcaggaagctaagggtggtccac

SEQ ID NO: 423868 - DNA, 122 bp, Homo sapiens
ctgggcaagagtgaggccctgtctcaataaaaacccgcaaaaaactttgggagcatcgtacggttgccagtgaataaggttataagataaaaaacaggatgctcaattaaattcagctaaac

SEQ ID NO: 423869 - DNA, 122 bp, Homo sapiens
cagctgtgggcctgcgacaacgaccccgactgcgaagatggctcggatgagtggccgcagcgctgtaggggtctttacgtgttccaaggggacagtagcccctgctcggccttcgagttcca

SEQ ID NO: 423870 - DNA, 122 bp, Homo sapiens
gggggcaccccgggagagagcgctccaaagtgcccggcgcggcgccctgcgcgcagcgagcgccccagccagggtctggttatgacttggctggaccagctccatccctgtcgccccctccc

SEQ ID NO: 423871 - DNA, 122 bp, Homo sapiens
acagatagggagcactgaggcaaggagaggggctgggcctaggcaggaacacataggggccgatactgcccacatcctgtgatctggccaagtggcaggcactgtgctgagtgccttgtggg

SEQ ID NO: 423872 - DNA, 122 bp, Homo sapiens
agtctcgagttctcaggttacccctcagtgacagccctttcttgagttccttctccttcgcgtcagtctctcgttctcccaccccgcccctctagaccaggtgaggtttcctccctcacact

SEQ ID NO: 423873 - DNA, 122 bp, Homo sapiens
cagctttactgaaaaaactataagctcagagtctctgctggggcaaggataaacaaagcacggttctttccaacaggaagccctcagtctagcaggacaggtaaatcaggcgagtgatttat

SEQ ID NO: 423874 - DNA, 122 bp, Homo sapiens
gacagaaggatcacaggccctccctcaattcccctatccccgggccccacctccaccccccggcaatgagtcccagaagacacagctagaagcattcccattgctccggctccacttaccat

SEQ ID NO: 423875 - DNA, 122 bp, Homo sapiens
gccgcgccagtgcgcgcccggccgcggcaggttcaccgcgtccggccgccggcccgtggccgcctgctagcccatgttctcgggaccccctagtcctgtcgccacgccgctgagcccctcgg

SEQ ID NO: 423876 - DNA, 122 bp, Homo sapiens
gggtgcctgatccggcccagcatggcctcggaggagctgctgctcgaggtgcagcacgaacgcctggagctcactgtggctgtgcttgtggcagtccctggggtcgatgctgacgaccgcct

SEQ ID NO: 423877 - DNA, 122 bp, Homo sapiens
gacttaagctcatcctccttctgctccatcccggctgtgcacacctggagaccaggccctcgagcctccaaacgccgtgagcagcctcctcctgctgtggcttccaaagagacgtcaccaga

SEQ ID NO: 423878 - DNA, 122 bp, Homo sapiens
gtatgtgtggattttggcatggagggcttccttaaaggggagcatgcctggaatctctcacgggggctggaactgctgggtggggtgagtgccaggactgaggggcttgccccactgtggtc

SEQ ID NO: 423879 - DNA, 122 bp, Homo sapiens
gactcactggacaacaggaactgggagatgcgcctggcttattttggcttcccacggggtcgtccctgccagggcagagtaaagtttcaggaattattttatgcatttcactcctcactccc

SEQ ID NO: 423880 - DNA, 122 bp, Homo sapiens
ccagtccctagctccgccttcccgggccctgcgccctagtggcctctgcgcggttcttcccgacccgcaaacacgccgccacccaaagcctctgtgtcccggcggccacccggtcaccgagg

SEQ ID NO: 423881 - DNA, 122 bp, Homo sapiens
tgtcaagtgaacaaagttaggcgcccacgtgatcctccgagccaatggccgccccgcctgcgattcccggataaggaaatctgctcacccggaccccactccagccaaagaggtttatttcc

SEQ ID NO: 423882 - DNA, 122 bp, Homo sapiens
gcagagggtggaggaggttcccggggacctgatggccaagagaatgtcgctcatcttgcacgtgcaaaagttgccctgggaccacgtgccttgcctgcggaggacccggcaaaacctgtacc

SEQ ID NO: 423883 - DNA, 122 bp, Homo sapiens
tgattaattacccgactaattaattactatcttatgttgtcttttcaactggatttcaaacgcttgaggattatttcgcttccaagtttcctttcaaccctataaacatagttatgtttaaa

SEQ ID NO: 423884 - DNA, 122 bp, Homo sapiens
caagggcaggggcagggcgcggacaactgtggggatgggcgggcaaatggcggggatgggcggggacaatggcgggatgggcggggacaatggcgggatgggcggggcctaggggtcggact

SEQ ID NO: 423885 - DNA, 122 bp, Homo sapiens
gtcctcctgcctcagcctcccaaagtgctgggatgacaggcgtgagccaccgcgccccgccgtttttaagggtatagttgcaacccttgcttatgggaagagaagcaccttcagcctctgac

SEQ ID NO: 423886 - DNA, 122 bp, Homo sapiens
tcgctcctcatttgctggtccaccttaattgacaaactgtacgcccaacgaacggccaaacgccactactcctggctccgcccaccttcccagacgccgctcgctggctgaggtgcgacccc

SEQ ID NO: 423887 - DNA, 122 bp, Homo sapiens
acagaggtggcacaaaaggccctgaagtcagggatccctggggaacgatgcccagtccgacgtgcttctcctgagccgattttgggtttcccgttttctaaagccagctccccagggaacgg

SEQ ID NO: 423888 - DNA, 122 bp, Homo sapiens
tcgtggcgcgagcctgtagctcgctacttttgaggctgaggtcggaggatcgcttgatcccgggaggtcgaggctgcggtgagccgagctcgtgcccctgcactccagcctgggcgactggg

SEQ ID NO: 423889 - DNA, 122 bp, Homo sapiens
tatacaaaacactaactagacaaattcctggagtgctttctgaattgccaagaggaacaacgtcatataaaaattccttcgaaatgctaaaattccatttctagtggtctctcataatcttc

SEQ ID NO: 423890 - DNA, 122 bp, Homo sapiens
tgccatccccactgggaccgtccctgactcccgacacctgcagaggcaagcagcacttgacgcaggggctgagggccaccaagtctccttggacaaggtttccactgatctcgacccttcca

SEQ ID NO: 423891 - DNA, 122 bp, Homo sapiens
tgtggcagaaagggcagagaatgagccgacccgagtcccacagaggcctggaacggcgggcgttccacgaggtgagggccatggctgaaggaagtcttacgccagggggccagacattcctg

SEQ ID NO: 423892 - DNA, 122 bp, Homo sapiens
cactcaataaacacagagtgtctactacatgtatcaggcactatcatagatgctaattaacgaaactgaaatggccaggccctcacagtggctcatgcctataatcccagcactttgggagg

SEQ ID NO: 423893 - DNA, 122 bp, Homo sapiens
agaggctggtgtagacctgtcctggcgggagcagagggcatcagcagggccctggcatgccgataatgggagctttgtgttgctgggagccgggaagcccagtggagcccagaccttggcgg

SEQ ID NO: 423894 - DNA, 122 bp, Homo sapiens
cccacctgggaggagtgcgtcacgcggtgtttccacctgtttggagcatgtccgacctgccgggaactcagagcttagtaacattcagaagactcagctcaaacgaaccgacacgcacgggg

SEQ ID NO: 423895 - DNA, 122 bp, Homo sapiens
gcggggcggagtggcccgccagctgggaccgcagaggaccgcctttccgaggccaaaaaacgctccgcggcgctgccaaatcgttcctcctcggcgggattctgacttagagtcgttcagtc

SEQ ID NO: 423896 - DNA, 122 bp, Homo sapiens
ttacagtagagaaacggcgctgtacggacactgctggttttgtgttcacaggacttttctcgcactggcacatggatcacagctttacaaatgccacatcctcaagaaaccacagcagacag

SEQ ID NO: 423897 - DNA, 122 bp, Homo sapiens
tattcattgaactttctatgtatgtggggcaaaatattacatccacaacacagaaccaaacgtggtgatgacactgttgtgacactgttgcatgctgacacaaaacctcacagcatctagtc

SEQ ID NO: 423898 - DNA, 122 bp, Homo sapiens
agcggtggctgccccgcaccatggtccgcggcctctagcccccagctgtggcgcctgagtcgtggcctccgccaaggttggaggaggagaaagaaaacccacaaaacttcccaaatgagagg

SEQ ID NO: 423899 - DNA, 122 bp, Homo sapiens
tatgctggaacagcacattaaatggatccccttggtcagaggtcccagagggggcccaggcgacttcctctcaaaggacatgagtagtcagacctgccttccatttttttctgcccttacct

SEQ ID NO: 423900 - DNA, 122 bp, Homo sapiens
cactgaagggctcccccgggtgccccctcggcccggcccccctgctgagccctcggccctcgcagccagagcccccccaccggtaggatccacggtgcggccccccagttggggggcctaga

SEQ ID NO: 423901 - DNA, 122 bp, Homo sapiens
acctctgcggaaggcagcagaccctcttccagccatggatggagttgaattctctataaacggttcaccagcaaaccaccaatacattccattgtttgcctagagagaaatttaaaaataaa

SEQ ID NO: 423902 - DNA, 122 bp, Homo sapiens
tcctgcgcccccctcggcgctcacacgcgctcagccttcccggctgttgatagttgtaagcggagctgcgcactcataggtccaacttgccagaagaggtggagacagcccccggcgaggcg

SEQ ID NO: 423903 - DNA, 122 bp, Homo sapiens
tagacttaatatgttcttggcaaaaaaaaaaaaaaaaaaaagaaatcttccacttatgcacggaatacagagagagtgaaagaaacgtagacacctcaacccggggctctcttttaaagttc

SEQ ID NO: 423904 - DNA, 122 bp, Homo sapiens
tttgtccaaagaggagatcatttatattttaggcaatgtgtcaaaaattttagcctgatccgcacaataagacgaaagagtcataaaaaagatacacttgggttcttcattattggtgggtt

SEQ ID NO: 423905 - DNA, 122 bp, Homo sapiens
gggttccggtggtgccctggcggccatcgctggaggccgcggttgctatgggagacctggcgcccggcctgggagcgacaggaaggcgagctgtggccgcgacgccttccgagaaagcaggt

SEQ ID NO: 423906 - DNA, 122 bp, Homo sapiens
cccggcagaaccgaaatgacctgttccaaccacagattatctaagcgagctccctccctgcgtcttgctctttgggtatttgcatttcagccaaatttgctccgaattgctagagggggtac

SEQ ID NO: 423907 - DNA, 122 bp, Homo sapiens
agatgggtccccaaggaggccctgactggtgagcgcacagctccgccgccctggaggacccgtccccagcatctgactgtccactcccgcccgctgtccagacgcccctcctggatggagag

SEQ ID NO: 423908 - DNA, 122 bp, Homo sapiens
gattgcatactttttctccctgtcatttctcacttgaagttaagaatcaacttctgttcacgtaggaaaaaagatgagcgccttcacttgggcatctacctttcccttcccgcccaccaccc

SEQ ID NO: 423909 - DNA, 122 bp, Homo sapiens
gagccgggcaggatggatcaccaccagccggggactgggcgctaccaggtggtgagttcccggcctcctgtgcctcccgggactgcctcccgccgcggcgtcccgagagtccctttcctcag

SEQ ID NO: 423910 - DNA, 122 bp, Homo sapiens
gcgctcgggggctcaaactgcctggagacaggcggggctcctgctgaggcttggtccgcccggacgagtaaggagaggagccagggaggacctgctggcgtgagacgcctctgcccggtgat

SEQ ID NO: 423911 - DNA, 122 bp, Homo sapiens
aagtatctcctttcgaactcaagtcacttgggcaattggctttacaaagcaaattggctccgtttaaggattcttgactcctgaaatccgcaaggaagtgggttcttttagagccagcgcca

SEQ ID NO: 423912 - DNA, 122 bp, Homo sapiens
cagtagctgtaggagggggtgggcgctccattgggcgtttctcttggtttttcctttccgcgcggcttgggcggacgtctcgtgagacgtgggacttctcgcgggaactgcattcaaatatc

SEQ ID NO: 423913 - DNA, 122 bp, Homo sapiens
tataaacatctttctcttcccagtatttctaagcatgtgacaatgaatatgcaaaggaagcgcagcagtccaccaggtgtgggatatgtgtggcacaattcaagacaaagattaaacctcca

SEQ ID NO: 423914 - DNA, 122 bp, Homo sapiens
caaggtcatcaccatcgagtcccagaagaagatcgtgatctactccaagcagcccattggcgtggacgaggagatcacctacgactacaagttcccactggaagacaacaagatcccgtgtc

SEQ ID NO: 423915 - DNA, 122 bp, Homo sapiens
cttgtttgtgtggtccctgtaattgccatttgtcctggtttgattaaacattttaaaattcgtgttatggaaccacattgaaaatgtaagtatttgccctttggtgcaatagttactagaac

SEQ ID NO: 423916 - DNA, 122 bp, Homo sapiens
ttgtctactgctggagctgctaataaagtttcattcgaatacttgagctgccgcgccctgcgtttccctcatgagcttcttccgcccgcaacacgagactcagcaccacacaatcagcgtgg

SEQ ID NO: 423917 - DNA, 122 bp, Homo sapiens
tgagggagcgaacggggagtgcttgctgtccccgtgtggctgcaccggcacgctgggtgccgtgcataagagctgtctggagaagtggctttcctcatctaacaccagctactgcgagctgt

SEQ ID NO: 423918 - DNA, 122 bp, Homo sapiens
ctgggaacccgtggaatccgcctcctgggaacccgtggaatcgggttggatgcgcatgtgcgtgtctctttttccgggggaggctccgcccacggccccgccccgctcccaagtgcgcgcgg

SEQ ID NO: 423919 - DNA, 122 bp, Homo sapiens
ggaaggggccaggctatcagggcatgaagcacgggagaaaatgggtccgaagagggagagcgtccgagagaaaaggaaaatcagagattaggaaaatcacaaccgacacaaagacaagaaga

SEQ ID NO: 423920 - DNA, 122 bp, Homo sapiens
cgggagcgctcagcgtctagtctgcgggcccttcccggttccctccctctctcctcccgccgcccgccccctgccgaggccatccgcctcacagtagcaaggttgtctctcgtctactccct

SEQ ID NO: 423921 - DNA, 122 bp, Homo sapiens
gttaagccagaagagagggcggggccttggcccgcgcgggaggcgggagtggagtccccccgcaggctttctcttttagccccgcctgcttcccggctccagctggggccggagaggctgag

SEQ ID NO: 423922 - DNA, 122 bp, Homo sapiens
cgccccccgcggggctggtccccaccctttctccgccccctcacctccggcagccgactccggctgccccctatgggtctagggaaacccctcgagacttcccccatgctcactctcaaatt

SEQ ID NO: 423923 - DNA, 122 bp, Homo sapiens
ccttgaggaggtatcaagccaaattctacttaacctggaatggggaaaaggtgggcagaacggtcattgtcggcatcgccaaacgggggtcacggcagatccccttagctgttggatttctt

SEQ ID NO: 423924 - DNA, 122 bp, Homo sapiens
gctagtaagccacgaggcagggcgtgtagcccttgtcttccggcccctctctgtctaaagcgcctggtggtcaccttggagagtttttacatccagtccattccatttccagaagctacacg

SEQ ID NO: 423925 - DNA, 122 bp, Homo sapiens
acgtcaacctgttctacccattgcagacaagggctctgattggaaaccctctgactcctccgtgcttcttggcctttgacaagtttatcacagatgggagaaggacattctgtttcttcagt

SEQ ID NO: 423926 - DNA, 122 bp, Homo sapiens
ccagccaaccatcctgactgtcgtgggaaattgctgcgacacgctctctttctactccaccgcctttctgtcacaagcaagagaaggatctaacagctgtttctacgcgtaggcttttttcc

SEQ ID NO: 423927 - DNA, 122 bp, Homo sapiens
gtgataccaacatagacgactagactaaagcctcctaataaggctaaattgaagatagtgcgaaggtgttcatcctcaacataccagttcaccctcaagtccttcaatagctgggaaagccc

SEQ ID NO: 423928 - DNA, 122 bp, Homo sapiens
tcctgcccggttaccctgcaggtgacccagtacccccgaagggtccacctggataaaagtcgtttggtctggcagcatccgggtcatatatctgagaggtcgtttagaagtctttttttttt

SEQ ID NO: 423929 - DNA, 122 bp, Homo sapiens
atttagttcaaggttcagaaagacagtcacttacccaaaggcatataggtaaagccagaccggggacttgaagcaaagcttttctgacttctccaatgagtgcttctcgattatgctacact

SEQ ID NO: 423930 - DNA, 122 bp, Homo sapiens
cgaagcctttgcgcttctggagcgtaaggcagtgctccccggggactgaatacagggcctcgtgcgcaccccccaccatgatgaccacggcctgcccgagctggggctgggacaggatgaag

SEQ ID NO: 423931 - DNA, 122 bp, Homo sapiens
ggcccggctgggcaccaattccggacctatgaaaccgagcgagatgcaagcacccgcgtacgtgaaaggtgcctagggttttgagctcttagatgaaatgacaagcatcagatagaacgttt

SEQ ID NO: 423932 - DNA, 122 bp, Homo sapiens
ctggtttatactgccacattcattcttggaggtgagtacatttcgatcttggtccggctgcgcagagagtcaaagcaggaaaatcacagattcttcccagcagtctacagcctacacagcgg

SEQ ID NO: 423933 - DNA, 122 bp, Homo sapiens
tcttagggccttcatcactcacctagattctcagttcagtaattctcagccttaggtattcgtcccttgtacatttgtttgtagataccacctctggggaaaatcccccatctcactgttct

SEQ ID NO: 423934 - DNA, 122 bp, Homo sapiens
agcgtgaggcatcagcacgagaaaagcaggtatgagagatgatgtttgctttcaataggacggggggccggggagaagcccataggtgtaagattccatgcttttctgtgatttatacttta

SEQ ID NO: 423935 - DNA, 122 bp, Homo sapiens
gtcccagggttcgcccttggaaagctaatggccctcacacctcccaagcttcccggggtgcggctggtgctcccaggccttagcgcgctgctctgagctcaaagccaccgccacggctaaaa

SEQ ID NO: 423936 - DNA, 122 bp, Homo sapiens
ccccaccccggccacggagatcaccacgtcaggagatatgtatgcgtgtgcatgtgtgtgcgcgcgtgttcacgcgcgtgtgcgaggtacgcttctgccccagactcttcccccgcaccgtt

SEQ ID NO: 423937 - DNA, 122 bp, Homo sapiens
gacggctgctgcaactcgagccccacttgctgccaggaaacctttcccactgaggacacccgggcatgcggcgcagctccaggtccagggggaagcaccccacccatctgccagagagacaa

SEQ ID NO: 423938 - DNA, 122 bp, Homo sapiens
gtcaaaggacgatgtggtggttgcagggtgacccgaggtcacgtaggcaaggtcaaaggacgatgtgggggttgcagggtgacccgaggtcacgtagggaaggtcaaaggacgatgtggcgg

SEQ ID NO: 423939 - DNA, 122 bp, Homo sapiens
cagggaaccacttggggaagactcatagcctagagacaccctccgaactcccggggccagcggaggaatgaccgaggagtgtgtcatctccccagtgcggatgacgggccttacctctgcag

SEQ ID NO: 423940 - DNA, 122 bp, Homo sapiens
tagtgaccggggctggaggctggcagcctcagggagggctggggactctgcgggaacgcacgtgccgctgggagtgggggcaggggaggtgcacatgccggtgtgcgagctggcgggtgggg

SEQ ID NO: 423941 - DNA, 122 bp, Homo sapiens
cctggggcatcagcctcaggacccagccaccagcgctggaaggggcatcttctttgtggccgagggagaactcggtgatctgaatcctctaggatgtggattcagaaaaccctccctcttaa

SEQ ID NO: 423942 - DNA, 122 bp, Homo sapiens
cccgtctgggatgtgaggagcgcctctacccgggcgcgaccccgtctgggagttgaggaacgtctctgcccagccgccctgttcgagaagtgaggagaacccccgcccgggcaccgccccgg

SEQ ID NO: 423943 - DNA, 122 bp, Homo sapiens
cggcggcgcctaggcctctggggagctggcccagaactcagagcgcagctggcgagggcgcgctggccgggtgcgcgccgggcccggccccggggctgcccctcggctgggggcagtcgagc

SEQ ID NO: 423944 - DNA, 122 bp, Homo sapiens
aaaattattgagaaaaccattggtccccggctgcagaccccaaggttgggagctggttcccgtttcctcccagagccggcagggggggcaccaggcaaagtttgcaagacgcgcctccctcc

SEQ ID NO: 423945 - DNA, 122 bp, Homo sapiens
ctgggccaggaccttcccgctcttccaatccgcctgtcccactgggttagcaactgcttgcggtttctggcacacagaagggtcccgtttgttgaattagttaacgaattatcacgggtctc

SEQ ID NO: 423946 - DNA, 122 bp, Homo sapiens
gaaggggaaactgaggcatggaagcatgaaataacctgcccaggtggcgccgtccgcacacggaggaggcaggaacggaacacgcgccgcctcctcgccctccaccaacacggaccccaggg

SEQ ID NO: 423947 - DNA, 122 bp, Homo sapiens
ccatacttgttacttttttcctactgtgcacagacagggagtcttatggcagtttgttcacgcactgtctcaactcctaacagcgttctgctctctcaacattcccacctaagtgtggattg

SEQ ID NO: 423948 - DNA, 122 bp, Homo sapiens
cccgccgcctggaaggcgctaggccccccgcgtctctcgtttccatagaacccatggggacgcctcatcctgataccagaattttggctgctttccataacttagcgtctgcgaaggtggct

SEQ ID NO: 423949 - DNA, 122 bp, Homo sapiens
ctcataatctcattactagagagaaaaggagaaagggaagcatcaaggtagtatttgagacgaatttaagaagaccactcattcaataaaagtttggtgggccaacaaggtgccatgtattg

SEQ ID NO: 423950 - DNA, 122 bp, Homo sapiens
gctccttcacattttgggtctggtgtccggagtgattttgactcagagtctcgggttcttcgtttctccaccagacagcatcctctgtgctcctgagggcatccaggcccgcagcctcccag

SEQ ID NO: 423951 - DNA, 122 bp, Homo sapiens
gaccgacccgtgggagcgaggccaaaccctggcccgcatgagggcgaacgcctgggattacgtcatcggcgcgtgacgccagaggctggggaatcacccgcttgctgcgtgacgtcatcgcg

SEQ ID NO: 423952 - DNA, 122 bp, Homo sapiens
taccatctttcaaatcccagttctggtatcaactcccaagaagacagtctttcctcatttcgacactctattttgagcaaccataatactttgtatatatctccctaatcacattacatatt

SEQ ID NO: 423953 - DNA, 122 bp, Homo sapiens
ggattggatggcgaactcgggccggtaggacccgcaccacacctgtgggcatgttgggggcgtggctacaggtggcgtggtggggtggccaggaggggtgggggagggtctccactatcccc

SEQ ID NO: 423954 - DNA, 122 bp, Homo sapiens
gttctcagctccagcttcaaacctcgagtctcgagagggccacggggtggtttttatgaccggaatcccgcttcctccctcacgtctgatgtcctgaaggtgcagtcccacctgtacagccc

SEQ ID NO: 423955 - DNA, 122 bp, Homo sapiens
gggaaagttccgccagtgcacagcaaccaatgggcggaggggtcctttgcccctgggttgcgtcaccctcatgcttccagaacctggaggatccagcaggaccgtcccacttgtatttgcat

SEQ ID NO: 423956 - DNA, 122 bp, Homo sapiens
ctcccgagaggccaactcagaggtcaggcggagggcgaggtccctgccctgggtcccgcccggtccactggggccagaacctcccctgctcggagtcatttttcccacgaacactgcggggt

SEQ ID NO: 423957 - DNA, 122 bp, Homo sapiens
aggccctcatttccttctcatccccaaatttgtccctccaggaagtgcagccaggaaagccggtgcttggagcctggctcacccgccgcggagctggggacctcgtgcacgtcaccgaggct

SEQ ID NO: 423958 - DNA, 122 bp, Homo sapiens
taaaaaaagaggtagcccagggtagtttactttgcatgtcttttattctgatgcattgcacgttcttccatgcattgatgaggcgtgtgctccttcctcagctggcagtttactgtcctggt

SEQ ID NO: 423959 - DNA, 122 bp, Homo sapiens
atgaggcttttgaccttcagagcaatgatgaaacatacacagtggtgttagccacagcagcgctgaatgctacagaaatactacaagtgacaattctgtctttaacgagatacaaaaccaac

SEQ ID NO: 423960 - DNA, 122 bp, Homo sapiens
cgtctgctcctagctccacaccttctagctcaaagaccatctcggaagacacagagacgccgccggacgggtgcctctgcttctggctgtccaccctcaggtcactgcaaacatgggagagg

SEQ ID NO: 423961 - DNA, 122 bp, Homo sapiens
catggcgaagatatcaagttatttcatccatttgaggcttttttgaaccactgaataaaacgcacaattcagctattttaactgttaaccagtgcccacgatgttgtacaaaacagccagtc

SEQ ID NO: 423962 - DNA, 122 bp, Homo sapiens
cctgggtgggtgccttagtgcccccctcactgccatgcctgccaccctcctacccctccacgttaaatatgcacgctggcgagcaggcagcggagaacacagaccttagagttccttggttt

SEQ ID NO: 423963 - DNA, 122 bp, Homo sapiens
agatattcttagaacagagagggagctatctggctcacaccatttaggaaaccatggccccgaggagacagtgctaaagtgaggcaggaaagccacctttgcacatttgaaaaactgtcatg

SEQ ID NO: 423964 - DNA, 122 bp, Homo sapiens
aatatgataaaatattatgagcagatgatatgctatttattataagcgggtgatatatgacgccatattacgattatggatgatgatgtattgtgtatcctggcatatgtgggagattatgt

SEQ ID NO: 423965 - DNA, 122 bp, Homo sapiens
aacacaacctttacacgcttagtttgaacacaaccacatttgtagttgcccaaaaccaggcgcccctggttagccttcagaattgtgcactccctgggaaacagcctctcccctttttttca

SEQ ID NO: 423966 - DNA, 122 bp, Homo sapiens
tttggagctctgcctgagaacctaggctgggactgtgtggggaggaagggccggcgagagcggatgtaggctgagccagcctcggctggagaccggccctggcactgactgcctggggtcac

SEQ ID NO: 423967 - DNA, 122 bp, Homo sapiens
ctgatggcgtggggcttccctggctgggcccatgcaggtttgcttaggccggtacactcgcgtggggtccacactgcctgaggcaggcacccccgcgccccatccttgtaggtttgtaatat

SEQ ID NO: 423968 - DNA, 122 bp, Homo sapiens
ggcacaagtctgcaagagcagccaggaagcctgggtgggctggtgcgagggagtgagtcgcggagcacagagggtggcactggggggtatggcgggcgggagcgctcttgggggaccttgtg

SEQ ID NO: 423969 - DNA, 122 bp, Homo sapiens
cacacatggcaatcaggaatatagtatataaacgctaacaatatactgaataaaatggtacggtaaagacggaaatccttcttggaagaactgtggtttaaatgcaatttacagaaaataaa

SEQ ID NO: 423970 - DNA, 122 bp, Homo sapiens
tactatgcattaaagcatgccaactgttaaacccctaagcccagtccctctcttggactccgattccggtttaggaacagaacgatgaaagaacggtcacgtgatgggggtcgagcgccgca

SEQ ID NO: 423971 - DNA, 122 bp, Homo sapiens
gaatgggggatagggacgggcgtgtggcggtccagcgtgagaaacagggctgccagtcctcggcgggggtgggtgattcacacaagaccccactttctgggtcgttgacttgaccaatggtt

SEQ ID NO: 423972 - DNA, 122 bp, Homo sapiens
cggcgtcccccgaggcagaaagcgcggaccccgcctgtcgccgccgccgccgcccgctcccggactcgcgccccccgcgcgtccactctgatttctcggcccatttttcttcctctcctgtc

SEQ ID NO: 423973 - DNA, 122 bp, Homo sapiens
tatcatcctcgtcctccctgaatattaagaacagtatcacagcggtgtttctactccctgcgatattgggtatcatatcctcctctcccacgttgcaattagagacaatatcagtgggggcg

SEQ ID NO: 423974 - DNA, 122 bp, Homo sapiens
cggaagtttccgggccgccccggaccccattggctttaggggccgcgtctccgagggctccgatttgggccctagattttggaatactgtgttttgtccgtcccagccttcaccaggcggat

SEQ ID NO: 423975 - DNA, 122 bp, Homo sapiens
agagaaaagagacatagaggatgtggagtagctggatgcctggaggcccacggcattccacggcttgtcctttctgcagcaaattgccatcgcaagagagggggacctgctgacaaaggagc

SEQ ID NO: 423976 - DNA, 122 bp, Homo sapiens
ctttctcggaagtttaggccgcacccacccgcgccccctttccaggattatacaagtgcacgccagggtttcttatttttggtgtgtttttgagaccaaagaaccatatccgctaagcctga

SEQ ID NO: 423977 - DNA, 122 bp, Homo sapiens
ccgtctatgcgcctgcgcggatctcaggctttgtagcgaggttgcttagggaggagggagcggcaggacccaggcgacgtgactgcagtcaactaactggtgtcagaacctcaactacccgc

SEQ ID NO: 423978 - DNA, 122 bp, Homo sapiens
tgagcggcgggatctgcggccgcccggggccctcggccaacatcccagcatcctctgcgccgcgccggccccggactccatttcccagcggcccctgcggcctgccctagggctgcggcgcc

SEQ ID NO: 423979 - DNA, 122 bp, Homo sapiens
ccatggcgaagtggcggaggtgagcacctagaggcgaccctgcccggggaacagctggcgcgaccgcggacagagcttcccaccacgcccttccccgcctttggccagcctttgccgtatgt

SEQ ID NO: 423980 - DNA, 122 bp, Homo sapiens
ctctgtacccttgaggaaacaaagaggacaaataagaagcagcagtgataggaggctgggcgcttctctggaataacactggctaggtagtggagcattgatagtgagtgtgcttggttggt

SEQ ID NO: 423981 - DNA, 122 bp, Homo sapiens
tatttttttaatctaaattatatctatacacaggaaaggaatggaatgcagtacctttttcgtcagaatgcacttttctgttgagaatcatttccccagcatgaacaaagcacgggtttgga

SEQ ID NO: 423982 - DNA, 122 bp, Homo sapiens
tccggcccccgagggatggcagctgtgaggcttggccacggtctcaggccaccaggcccccgggctcgccagcgctttcaccggatggccaccggctgggcagttctcgggagtccacttgg

SEQ ID NO: 423983 - DNA, 122 bp, Homo sapiens
gcagagacgccagcgctcgcaattgactgcatgcgaaggacctccgcacacacactcacccgccgaggaaattaagggacgcgcagcttttgtattacagcctccaggccccagcactctta

SEQ ID NO: 423984 - DNA, 122 bp, Homo sapiens
cctcgaccagggatacaagggcaaccgctaactagattcctgattcctgatggctggcggcggctgacaccaaaggtaaaaggccttttagggaaagaaaccatttgtgaaaagctcttggg

SEQ ID NO: 423985 - DNA, 122 bp, Homo sapiens
attgaactcctagaggtgtgtagtccacagttttaaatctccctgtgttcttgactcccacggaagttttctttctgggaccccttttattccttctttcctcccatttcttgaaataatca

SEQ ID NO: 423986 - DNA, 122 bp, Homo sapiens
ctcaggtagggggcctggcccgaggcaaaaacctccccaaatttcccctgccactccctccgcctcccagacctctggggccatgaatcatttatgaggcaaaaatgaaaccaattaaggac

SEQ ID NO: 423987 - DNA, 122 bp, Homo sapiens
tgccggcgcggaggagggcgaggagggcggaggctgggagcccacagaactctgctgctgcggacctggccagtaatgttagctgcaaaagacgagaggtagagagaagaaatgatatgggg

SEQ ID NO: 423988 - DNA, 122 bp, Homo sapiens
tccgaagtgtgcaccagcacacccggctgaccccagagagggccagaggctctgcttttccgtgcttgcgggatctccagggtcatcaggactaaatgactcaagctgaaatgatctactca

SEQ ID NO: 423989 - DNA, 122 bp, Homo sapiens
tccccacctctcctgcagcccctgcgtggacagcccagtctgtgtcagcacctcttccctcgggtgacctacaaggtcctggagaggaaaatggtagcaaagaatgtgcaaaaaaccatgat

SEQ ID NO: 423990 - DNA, 122 bp, Homo sapiens
tgcgggaccctctgttgggggttctaattcgttttggcctgggctccttacatttctgtccggccaggcgcttttggacagcttttcgcagcggtgtctaagcttgtgttcggtgtccttgg

SEQ ID NO: 423991 - DNA, 122 bp, Homo sapiens
cagccacgccccgtgggccctagggggctgctctctccctcctgagaatagccctcaacacgtggcagataccttgtctatggcatagggggagggggaggatccatgcttgggaaggtgga

SEQ ID NO: 423992 - DNA, 122 bp, Homo sapiens
tcttggacttcttttgtaaggcactaatgccatttatgagggttcacctcatgatcaaatcgccaccaaatcccgcccactgctaatactcgtcacattgtggattaggattcaacacatga

SEQ ID NO: 423993 - DNA, 122 bp, Homo sapiens
actgagaaaggagagggaggggggatgggaggaggggaggagcagagaaaggagaggaggcggagacggttagtctagcctctctgtggggcctctctgctggtacccagatgctgagcgct

SEQ ID NO: 423994 - DNA, 122 bp, Homo sapiens
caattctacacttttgcacatagaaaaattaaatttgaaatatagacattatggattggtcggtgctagggttcaagtcaggcctttgttaggggctctgttgaaccaagaataccgtctgc

SEQ ID NO: 423995 - DNA, 122 bp, Homo sapiens
cacagagctggttcatcctggagctgcgtttgaacgcaggcagtctccctacactctctccggcacgccatgcacaaactataccatcagcctccagaaggggcccagcttccctcccaacc

SEQ ID NO: 423996 - DNA, 122 bp, Homo sapiens
ctaatgcaagggtctcgctgaagacttggaggattagggaagagagatggggtgtgggggcgagggatcagaggtctgatatggacaatactagttaagaaagctaacaggatgtgaaagtc

SEQ ID NO: 423997 - DNA, 122 bp, Homo sapiens
atcagatgcctgtattacagaagcatctaatgcaaagcaaaataaaaacacttgcatgagcgcacagaggtaggtgtggaagaaagtgaaacactattttaggttttagttacactctgctg

SEQ ID NO: 423998 - DNA, 122 bp, Homo sapiens
cggcgggccggctccgccagacccgggtagtgaggggcttagcacccgggccagcagctgcggagggtgtgcccagtctcccagcaatgccggctcaccggcgctaccttcgaattctcgcc

SEQ ID NO: 423999 - DNA, 122 bp, Homo sapiens
taatctcattcattattctctgtaaactccacgagagcggagactttgtgtcttcttcatcggtagatcccccatgcctactggcactagtagttgccctaaattcacttatcaaaggcagc

SEQ ID NO: 424000 - DNA, 122 bp, Homo sapiens
ggctgtagccctgcagaaggagcagatgcggggactggtacagcgagtaccgcatggcgtcggggccgggctcctcggggccctgggcggcagcgggcagggcgttcactgggctcaggctg

SEQ ID NO: 424001 - DNA, 122 bp, Homo sapiens
gtgtgctctgagatgagactttttttttctttttatacctttttttccgcccgtctggtgcgtttgccgacggttcttctcggccctgtgtctcgggagagtcggctgccgtctgggcctgt

SEQ ID NO: 424002 - DNA, 122 bp, Homo sapiens
gagacgggaaggaaaagaaatagcggttggctgagaggcaagccaatccagctagggctgcgtcgactccaaggaggcggtcctaaggaagtactggccccgccatttaaaggcccctccct

SEQ ID NO: 424003 - DNA, 122 bp, Homo sapiens
cacagcacagcctctcctggggtcccagggatctgggatggagacgcctctcctgggccacggcaggagactggcctggctccacccaggagtcccgaagccctgctctgtggaaggcctgg

SEQ ID NO: 424004 - DNA, 122 bp, Homo sapiens
agacatccgagagggtcgacggtagatgtggtgattgggagctgaaaaggatttttcttccgtattcagacataatagacatgatgcaaactaaagtacagaacaagaaaaggcaagtggct

SEQ ID NO: 424005 - DNA, 122 bp, Homo sapiens
ccttttagcttgtgatctttataaatgtccctctattaaattagaaaatgattctcttctcgtttaattgtattctttcgtttcttatttccaattaattagtcctatcgacgttgcaatat

SEQ ID NO: 424006 - DNA, 122 bp, Homo sapiens
taggcctcctggggaaaccgactcgcgccccatacccgacctagcagatcggaagcgctgcgactgtgcccgcaggttgaccttgccaagccctccaggtgatgcgcggccatgccgggtga

SEQ ID NO: 424007 - DNA, 122 bp, Homo sapiens
cctgtgctcagcctgggctctctttctgcacgacagggacgtgggacagacagcatggagcgatgctgtgctcaggaagagaccaggtaggtggcgggaggcacaccagctctggcctgcct

SEQ ID NO: 424008 - DNA, 122 bp, Homo sapiens
ggttgtgcaaatagaaaaccatggtagtgaatctgctacccagttttctaagaagagctgcggttttgtttcatcctgtctcagagctttattaatcagccatattgtaggtgacatgctcc

SEQ ID NO: 424009 - DNA, 122 bp, Homo sapiens
tggatactaaactgacttttttttgactatccagggccacccagtgctcctgcagaagatcgttcaggaacacccgacagcattgcttcctcctcctcagcagctcacccaccaggcgttca

SEQ ID NO: 424010 - DNA, 122 bp, Homo sapiens
tgaatccgtctgcccatctccatctctcgcgctctctctctgcagaggctcccgcgccggcggaattcaatcaataaaccccgaacccacggccgcgcgttttaggactttgaaggctcaac

SEQ ID NO: 424011 - DNA, 122 bp, Homo sapiens
gcctgccacatgaggaaaaccccatcacctggaactcggcgaactcctcacagttcacaccgccactgggcgccgccatattggacaaacacgaggaccccgctgcaggccaatcaccgcgg

SEQ ID NO: 424012 - DNA, 122 bp, Homo sapiens
ccccggtctctccacttttataggcgtaggaagctactgcggctggggcaccagagtccccgcctctccgggtcccccgcgtgcccggcccgccccggcccgcttcccgggcgctgtcttac

SEQ ID NO: 424013 - DNA, 122 bp, Homo sapiens
acgacaccacgggggcggggctaagatcgtatgggttacaggagcgaagacccgagcaggcgaggcaaaactggaaagggcggggcgcgtgggcggggcgcggagtgtggcggctcagaccg

SEQ ID NO: 424014 - DNA, 122 bp, Homo sapiens
agcacagacttctatgcagcacatacttctataatcagtaaacttaattcacaaaattagcgcataagggtattaagtgcatgggaagtaaacacagttatgttacacttaaaattactttt

SEQ ID NO: 424015 - DNA, 122 bp, Homo sapiens
cagaggggtggggcctgtgggcgtcctggtgatggtgcctagcaacgtcagggccagggccgcgaggtagttggcagaggcctcggggtcctcctggaaggggcctcatgacagattcggac

SEQ ID NO: 424016 - DNA, 122 bp, Homo sapiens
atcgtctctgcggggcttgcccaggtcagcgagttttcctttgtcctggggagccgggcgcgaagagcgggcgtcatctctcgggaggtgagtggcttccccccgcggagcgcttctcgggc

SEQ ID NO: 424017 - DNA, 122 bp, Homo sapiens
gcgggcagtgagtgtggaggcgcggacgcgcggcggagctggaactgctgcagctgctgccgccgccggaggaaccttgatccccgtgctccggacaccccgggcctcgccatggtgagtga

SEQ ID NO: 424018 - DNA, 122 bp, Homo sapiens
tggcctcacagacggccctcctctagatgcagtgggcccagagggtgagacggagtgttgcgggccgccagtgggccagctgctcctgccctgcgcaggctctgcccctcctttgaggaagt

SEQ ID NO: 424019 - DNA, 122 bp, Homo sapiens
acacacatcagacagcaggcagggagggagccgcgccccaggagaaggaagcagcaactccgctcacaggagaaggaagcagccgaaggcatccctggtgcctcaaagaggccagagtgcgc

SEQ ID NO: 424020 - DNA, 122 bp, Homo sapiens
cctgcgcctacgggggcctcagccttgcaaaatgtcactcagcagagcctgctgctgaaacgtgggagttgaaaaaggtacagcacctgcctagcaatgaccagctcctttcgtcacaagga

SEQ ID NO: 424021 - DNA, 122 bp, Homo sapiens
cctccgaagcccatttctcttgtttgctgctcctgaagcactccctctccctggaggggccgcgggtctctctaacgccccagtgggggacctggcccaagttcctttccccggtgataagc

SEQ ID NO: 424022 - DNA, 122 bp, Homo sapiens
ttcccaatcctgttattacgcaggtgaaaatggcctgcttggtccgggtcctcctgggcacgtcagcccccaacctgcaaatggcaggccccggttaggggatgtgccaaatccactcgaat

SEQ ID NO: 424023 - DNA, 122 bp, Homo sapiens
cacatgggtgtttcacatctgctatggagacagattccttgtcaagagactttggagacacgaaattgatactttcacaactgctggattaataactaccacttcctgagtgcctagtctgg

SEQ ID NO: 424024 - DNA, 122 bp, Homo sapiens
tttgatgccctgatctctaagatctatcctagccgggaggaatacgaggcccatcaagaccgagtgcttatccgcctgagccgcctgcacaaccagcaggcattgagctccagcattgagga

SEQ ID NO: 424025 - DNA, 122 bp, Homo sapiens
agggtgtagattagtggattcagtacaggggtgacggcgctatacatgatggccattatccggtcctgaatcatggaggtggctgaagcaggacgaatatatgtgaagcccacaggtccata

SEQ ID NO: 424026 - DNA, 122 bp, Homo sapiens
cagaggcggcttggaaaaccactcggctgggaatccgcaggcctggggcctgacccaggacgggctacaaagatgccaccctcccccaccctagaccctcagtttctcccttgcataaatgg

SEQ ID NO: 424027 - DNA, 122 bp, Homo sapiens
aatttgggcaacatgcagtgccgtgtgtgagcggaacacgcattcccgtggggttagaaacgtccagctccttatgggggtcatggtcagaatggcctggaccttcactacggccagcccct

SEQ ID NO: 424028 - DNA, 122 bp, Homo sapiens
ccaaacgcgaagccacgcccccacgcgcgtccgcctccgcgcggttctttctgacctcggcggcccccgtagctccgcccatcggagaagcgaccttacagcgcctgcctctttctgagcgg

SEQ ID NO: 424029 - DNA, 122 bp, Homo sapiens
gtctaatttctaataattcataaaacattataagacctctgcaccctcatctcccattcccggatctactcgtaaaatagggggacaatgtaaaaaggctgggtgtactgtccccgaaccaa

SEQ ID NO: 424030 - DNA, 122 bp, Homo sapiens
gggtgcaagccagagcagggctcccaggtccatgagggtgcagcagatggaaggccagcccggtgaccatgtggtgatagcacagggcaatgatgactggaggctctagggtcacagggatt

SEQ ID NO: 424031 - DNA, 122 bp, Homo sapiens
tatgccagtgttgaatgatctcccacccttatccctgaccccacagtccagtaaacaaagcgacagtgcatataggggaggggtggcttacagcaattgcacaccatcccttccttgaaacc

SEQ ID NO: 424032 - DNA, 122 bp, Homo sapiens
gaaggatggtaccagcacaggtactcagtctatggcctttgttcacgtagcactttcttccgtaattctaaaaattttctacctgagcaccacctatgaaggagctgcaaaattcatttaaa

SEQ ID NO: 424033 - DNA, 122 bp, Homo sapiens
actggattcttttctaaacattttgaagtttttattccctgtcatcaggtcattccaaaacgataaagcactaacttaagctagctggaattagagattagggggaacagtacacaaaagag

SEQ ID NO: 424034 - DNA, 122 bp, Homo sapiens
ggggtctcttcctgcctcctccggcttctaggtatcatccctgctgctcagccgggactccgacacctcggacacccgcttcactagccgcggctgccgggatgtgtttttagggtctcggc

SEQ ID NO: 424035 - DNA, 122 bp, Homo sapiens
cgtggagaggcctggagccgggcttggaccggaagcggtctgaaggccaggctgtggggtcgggatgggcagaggtagagccggcagaggagagatgggaggaggcaaaaagagatacgagg

SEQ ID NO: 424036 - DNA, 122 bp, Homo sapiens
ggcgcgcctcggtggcgtcagagcggcgtcgggcctggcgggaaagtcgaaaactacgggcggcgacggcttctcggtgagtaagtggagcaatggtcgtagtctctcgaggccccgctccc

SEQ ID NO: 424037 - DNA, 122 bp, Homo sapiens
cagtgggttacgggtgaacctgaatcttgaacgcacccaagcctccgcctccgcgcgactcggcggcaggagggaaagggcgagaactgatgactttcaatactctttttttttttcgagat

SEQ ID NO: 424038 - DNA, 122 bp, Homo sapiens
tttactaatcattttcacatatcttcatgcttaagtcaaaataatgtagtcaatattccccgtatgtttcatgcattcctacctccaagcctctgcacgtgtccttccttttgtctggaatg

SEQ ID NO: 424039 - DNA, 122 bp, Homo sapiens
aggaccaaaaaggacatacctcaactgaccactcacgttggaaggtcttgcctggtttcacgaaaaaatgttttcaaatgacactcccctatagtcagaggacaaaagcacatgcacattcc

SEQ ID NO: 424040 - DNA, 122 bp, Homo sapiens
atgcatgtggatgggttctcagatggcctgatgtttctcctccttcctctgtgtggtgggcgacgactttggctgcccagatgttaacatcagtaagcagaagctcagtcagtgttagcaaa

SEQ ID NO: 424041 - DNA, 122 bp, Homo sapiens
ccttccgctccccctttcgcctcagagcggccgacaactgcatgtcctggtaagggtctgcgaccctatttccttcctgacccttaacttctcttactctctggctccacatcctcgaaggc

SEQ ID NO: 424042 - DNA, 122 bp, Homo sapiens
ccaggtgaggcgagtaggaaatgctggatctggttaatgattcgccttgttccgggagtgcgagcgtggcaagaggaagctggtgaagtgggggaggatgcgtgctccggagggccgccacc

SEQ ID NO: 424043 - DNA, 122 bp, Homo sapiens
cggcgggacgtgggctggggtgggtggcggggctatggcctggctgactgccacctcccccgatctctcccagagggctacatgaccagccgcacggtccgggaggcctcgggcctgctctc

SEQ ID NO: 424044 - DNA, 122 bp, Homo sapiens
acaaggagccacataagaataaccgtaatcaagacaatagtgaagttgagaaacagctcccgggtgtttatccccattttcacagcggcttggtgagaactgcaggcagatttctgagggca

SEQ ID NO: 424045 - DNA, 122 bp, Homo sapiens
accagtgtaccagcctgcgggtggcaggactggggcctctgcctagtgttgaaacgggggcgcacagatgcttttctaaataacttttgaccccctttctggtaaatctttttttcagagtt

SEQ ID NO: 424046 - DNA, 122 bp, Homo sapiens
acccaggctggagtggagtagcgtgatcacgactcatggcagccacaacctcctgagctccgctgatcctcctacctcagcctcctgagtagctgggactacaggtgcataccgccatgccg

SEQ ID NO: 424047 - DNA, 122 bp, Homo sapiens
tcggcctccaatgagcttctagagtgttatcacgccagtctccttccgcgactgattggccggggtcttcctagtgtgagcggccctggccaatcagcgcccgtcagcccaccccacgaggc

SEQ ID NO: 424048 - DNA, 122 bp, Homo sapiens
ctggcatttcagtggttttctttaaggggggtcctcatttgtgaccagctttgtcattaacggaaatcaatctgaatgccccattgtgcatcttttttctttccttgcagtctgagattgcc

SEQ ID NO: 424049 - DNA, 122 bp, Homo sapiens
ctcgctctggcggaatggcctagttcccgagagagcaggtgattaaaagaatggcttcctcggcttctgtctcttgcttcttctctcaccatgtgtctctttacacacgcccggtccccttc

SEQ ID NO: 424050 - DNA, 122 bp, Homo sapiens
acctttccgaagcctggtggaatggcttgtgaactgatctcaaaagcagcccaagtcatccgtcgctgggccggggagggggacaccgcggcggccccgccgagtgctacctgggcactgag

SEQ ID NO: 424051 - DNA, 122 bp, Homo sapiens
atttagcgtttctttttgaagtctgaagatttatggaacaataaacgtcatttaatgctgcgtgctattttggattcctcactggttttagaatttgggtaaaactacttagctgaaagttt

SEQ ID NO: 424052 - DNA, 122 bp, Homo sapiens
ggagcaggagctgcgggagcgggccttcttctcgtgggccgagttcagccgcttcttcgacgcgtggtgccagcagcggctggcgctcttcttcgtcaagagctccatgcacctggcgcgct

SEQ ID NO: 424053 - DNA, 122 bp, Homo sapiens
gtggcagtctcgccctcaggttcgcctccccgctccctgctcccgctccctgctcccgctcgccgctcctgctccccgcccccggggtgcagacatcttagtacagggctcccctgcagcag

SEQ ID NO: 424054 - DNA, 122 bp, Homo sapiens
tggtcatttttctcctaagcgaaggaagaacctcgtgctttccccatcacggagagggggcggagcatcctctaggagcttggaagaaagctgcgcccagccagtcttcggggaggagctgc

SEQ ID NO: 424055 - DNA, 122 bp, Homo sapiens
tgggattacaggcgtgagccactttttctaggccttttctaggctgggtgtggtggcttacgcctgtaaccctggtattttgggaggccgaggtgggcagatcacttgaggccaggagttca

SEQ ID NO: 424056 - DNA, 122 bp, Homo sapiens
cttccttttaaggggcggggggatcctttgatgtaactcaacaaaagcatacagcaatttcgtcacgtcacaaacatctgaactcgtttaccgaaatctaatctgaggcgtttatcagaagc

SEQ ID NO: 424057 - DNA, 122 bp, Homo sapiens
cttcccagcacgccctgcagggctgtgcgttctggtgtcgggttagactagcaggcggggcgggggggttggggcggcggggcgggggagactagggcttatatcagcccagatccaggcaa

SEQ ID NO: 424058 - DNA, 122 bp, Homo sapiens
ggcggctggcactaagcggtcctgaggctgtggctacggctgctccggagctggtggcgccgcgataggagagccgatggccaagtggggtgagggagacccacgctggatcgtggaggagc

SEQ ID NO: 424059 - DNA, 122 bp, Homo sapiens
gtgatggcactcatcattacaaggaggaaaatcaggaatgtctccaagttagagaaggtgcgtttggccatttcttctcaggtacagcagagatggaagaagaaatactgaagaggaagaaa

SEQ ID NO: 424060 - DNA, 122 bp, Homo sapiens
tgtggggcgcgcctctgccccgccgccccgtctgggatgtgaggagtgcctctgcccagccgcaaccccgtctgggaggtgagaagcgtctctgcccggccaccccgtctgagaagtgagga

SEQ ID NO: 424061 - DNA, 122 bp, Homo sapiens
ggcccctggcaaccacagatccacttcctgcctctgcagatttgcttgttctggacatttcgtctatttatttttatatagtttttaatttgtttttatttattttttttgagacggagtct

SEQ ID NO: 424062 - DNA, 122 bp, Homo sapiens
ccatggaggggtaagggtgtccggccggggccggcctgagggcacagcttcgcggggccccggccccctgcgtacacagacatggccacagcgcaggcaccgctccctcccaccgccctcac

SEQ ID NO: 424063 - DNA, 122 bp, Homo sapiens
gccccctgggaaagccaggggctccaggagaacctgggccacaaggccctattggggtaccgggggttcaaggacctcctgggatacccggaattggaaagccaggccaggatgggatccca

SEQ ID NO: 424064 - DNA, 122 bp, Homo sapiens
tgacgtcgagaagaggcccggctctgcctagtggagcttgtctcctttatccttgatccccgcgccttggctccgtctgttcttccccttggctgcacattggaatctcctgggcaactttc

SEQ ID NO: 424065 - DNA, 122 bp, Homo sapiens
gagtttcttgaggaaaggacacttgagggtaatgtgagttgggagccaaaggctcccgtgcgaaatccacagtctgtgctggggagaaagcatggttagttgaatgttcttgaaagacagcc

SEQ ID NO: 424066 - DNA, 122 bp, Homo sapiens
tacagtcttttcaacacccactcaagatataggagctgttccatttcacagacgaggaaacggaggctcagagactttgcattagtctaccaggtcataaagctagtgttcacagaactgag

SEQ ID NO: 424067 - DNA, 122 bp, Homo sapiens
ggaagaggggtccccagcatcgacagacttcgagttctcctgatgttgttccgtgagtagcgatttggcgactgggagagaggacgggcactctttgcagagaacagagccggcaaagtaaa

SEQ ID NO: 424068 - DNA, 122 bp, Homo sapiens
gcagggtgggaagtacacctcatcccacagctggatcttagatcctcaagagcatctctccgggaatatttgatgacccaaaaacacagaagacttaagaagtgaaatgtggccgggcgcag

SEQ ID NO: 424069 - DNA, 122 bp, Homo sapiens
atattcctggttatactcgtccaattatacatgtgccataaacagcagcctcgcctggtgcgctttttcccagtgtctgacgaacgtcaccagccccattgtgctgacagctcttgtctctt

SEQ ID NO: 424070 - DNA, 122 bp, Homo sapiens
ccagcctcttgctccggggtcctgcgtgttcttttctcactgagctcagtcccgtggccccggctcctaattcatcttcagagcttgttaaaactgtgctttccgatgtatttcctcaagga

SEQ ID NO: 424071 - DNA, 122 bp, Homo sapiens
cagctatccaccgaattaagcctactataatccccttccttccacactacaacctatccacgcatctgtcctcttactccttagcttccatcttacatgactaagagttgtttccccaaata

SEQ ID NO: 424072 - DNA, 122 bp, Homo sapiens
aggctggaagacttagccagtctagtccctccacgttcctctgcctgcttttatcctagacgtgctggcagctgactagatggtgctcacccggatagagggtgggtttgcgtcttctagcc

SEQ ID NO: 424073 - DNA, 122 bp, Homo sapiens
tagggaggaggggaaggcagggagagaacacagaggcctccggctctgcagcatggagaccggccacaccccaggcctggccataggcaccctgcacctgtgcccagtgagtggcccccacc

SEQ ID NO: 424074 - DNA, 122 bp, Homo sapiens
accatgtgcacaggaggtccctgggagaacctttgggagcgcccaggacctggaggctgccggcggtcggggacatcaccgaatgggtgcagtttggcaggagcctcatagactcctcggtg

SEQ ID NO: 424075 - DNA, 122 bp, Homo sapiens
cccgcgtcggggaaggcggttccgggttgggggacggaggcaggaagctcctagggcgagcgggctccagccagcgaaaacagcctcccgtgctcacctctgccgaagtccgtgcgcggcgc

SEQ ID NO: 424076 - DNA, 122 bp, Homo sapiens
gacccaatggagcagcagagagggggcgcggcagcagctccactctaagtgacaagtgtccgtcttccaggccctcgtacgaaatgacacgtactcggaccaacactgtcgtgttcgtgaag

SEQ ID NO: 424077 - DNA, 122 bp, Homo sapiens
ggctactgaaaggaatcgagttaacgcgccctagtggcaggtggcgaatggccggagatccggcctcccagtggtgtccaccgccacgggcctccgctcgacaggcttatttccctccatgc

SEQ ID NO: 424078 - DNA, 122 bp, Homo sapiens
gcctgctggagatttgtggatggcagagcaatggtggcttggggacagatcaggtcagatcgtgtgggagatgtgggtgggggcgtggatggggaggggtgtgagaggagccatttctctct

SEQ ID NO: 424079 - DNA, 122 bp, Homo sapiens
tgctcattttgagtttggcataagcaggcagatgaaggcaaagtggtttgagacccaagtcgagaagaatttcttctggacagatgctaaagatcattctcccactgggctatctcatttac

SEQ ID NO: 424080 - DNA, 122 bp, Homo sapiens
ggtaaaaggtagcggggtgcttccccagctggtcgcaggaatagtgcgttttctttgtcgcgcaaggggcgtggttcatttaagccggtagttgaagcgctgggggcagctgtagtgggagt

SEQ ID NO: 424081 - DNA, 122 bp, Homo sapiens
ggttctggagcgggacattaaggggtcactagcgatgcccagttaccagcatgtatcgcacgtatgtcccatgtctaccgtaggcaaaacagatagactttgggcacttttccaatgccttg

SEQ ID NO: 424082 - DNA, 122 bp, Homo sapiens
gccaggagatatgggcacgacggtccgtatcctggcccaggagtgggtcacgctgggcgccgtcacagagctccagagtagcctctgtgcagcggaggacaactgctccccgacttctgggt

SEQ ID NO: 424083 - DNA, 122 bp, Homo sapiens
tattgtacccttaaagagcccaatgagcactacatgcccaagagaaaatttaccttctgacggatgctcaaagccacagtcgacaatggcccggagcaactctggcttgagcaggaagtcac

SEQ ID NO: 424084 - DNA, 122 bp, Homo sapiens
gacgccgctgtcgctttacagaaattgagcgcagccgaggcgggacccgggcgcagagagcgataaaggaaaagcatggtcgtgctctaatcattacagtctaagggacgacacgtcgagac

SEQ ID NO: 424085 - DNA, 122 bp, Homo sapiens
gctgtgcccgtccacctcgggaactaccgagaagatggtggctgagccaggagaggccggcggcgccatctttgatgtagtttttcttgctgcggagtttcctcagagaagaatctcagatt

SEQ ID NO: 424086 - DNA, 122 bp, Homo sapiens
aagaaataaatattatttacctaagtgggtaggtgatgaaagaggagttttcaagagagacggagtaggtaaaggaagagagctagttgatttagtctgaaccttaagggaggaaaaaattt

SEQ ID NO: 424087 - DNA, 122 bp, Homo sapiens
accctgactcataaagaccactattgcattgaccagcaagctacccaagccttggtgattcggtagagaatgggctggtttagaaatcatactgacttgagtttaagtctcagctctccttt

SEQ ID NO: 424088 - DNA, 122 bp, Homo sapiens
tctaaaacttaagctttgaaatgagtaccttttgctgagcaacgacctagaggtgattttcggtggccaaaggctggacctgtctcctctcgaggggttccagctagttagttaaaacggag

SEQ ID NO: 424089 - DNA, 122 bp, Homo sapiens
aagtagtttttgagactttcttccgacccaagatcacaaacatcaggaagcaacttactccgttccatcagataaagctagtttctaaatagaaaacttactaggcatatcaatttttgtgt

SEQ ID NO: 424090 - DNA, 122 bp, Homo sapiens
cgcggccatccatgctaacagagactctgtgctgacggtccgccacacattgcagctgcccggccctgaccctgcctaaatgtgcagcttctcctttctatccatggccattgagacattag

SEQ ID NO: 424091 - DNA, 122 bp, Homo sapiens
gggactattcctagtttatgaggtggttaaggatatcggtggggtgggctggagcggtgtcgggttaggtctgagagaaggcctcgcacaaaacactgtacaaacccgaaaggaagtctgag

SEQ ID NO: 424092 - DNA, 122 bp, Homo sapiens
agctgttctgcccagcaaacactgcatgtggttctaaagaatagaactgaatctcagccacggccctgcatacttaagattaggagacagctctgcatgcacctcctcttgatgcaaaaaaa

SEQ ID NO: 424093 - DNA, 122 bp, Homo sapiens
cccaggagttggagagcaacatcacaacaccccatttctactaataatcaaaaaattggccgggcatggtggcatgtgcctgtagtcccagctacttgggaggctgaggcaggagaatcgct

SEQ ID NO: 424094 - DNA, 122 bp, Homo sapiens
aggggcgtttttagggatcccagtagttctcgtggtgctgcgcggcgatgatgatgactacggtgaggatggtacagagcaccatggccgcgatgcccacggccagggagatgaaggagaag

SEQ ID NO: 424095 - DNA, 122 bp, Homo sapiens
ctttgtttcttgagggatgttctgattccaatggaaacaggtgggaaatctcaaggggagcgtggacaaggtggtatgtgcagcaggggaatagactgcttggatttccaaatggtttctgg

SEQ ID NO: 424096 - DNA, 122 bp, Homo sapiens
cactgcccttcacccgctgaaggacggggacaagcaggtatgaggaccgcactcctgcagcggctgcaagggtgctggaccgacattccagagacccatgggtgcccctagacttctgcccg

SEQ ID NO: 424097 - DNA, 122 bp, Homo sapiens
cacattccggcccggggaccccagcctcaccttgaagcgcaccggcatgtcgcccggcgccggagcccccgctactccgacagttaactggagaaaaagctccgagggggcggggcgataac

SEQ ID NO: 424098 - DNA, 122 bp, Homo sapiens
agggcagtgattaactttccggtttctcctccgccaatgtgtgggcgaaaggaagtgatccgctacagaccggcctcgccctgcagcaggaaagggaaggatgaaacaaaaagcgcacaccc

SEQ ID NO: 424099 - DNA, 122 bp, Homo sapiens
tgtgcgtccgcgatggtgcgcgaatgtgcacctgggatgcagtgtgcgcgagtttgagggcgagggtgacgggccacaagccagtgtgattctttgtgtgtctctgggtgtgtcccagagcg

SEQ ID NO: 424100 - DNA, 122 bp, Homo sapiens
atttcccataaatagaatcacagcgggttcccttttgtgtctggttcccttcatcatcgtcggacacgtgaggcgccccacgctgttgggtatatcaacactcagttcatcattactgttca

SEQ ID NO: 424101 - DNA, 122 bp, Homo sapiens
ggagatacatactgtttatgaaagaggtgacctaattttcttcttttttgttccataatgcgtcctggtccaattgtgttctcaatctaatactggctccacacaaaactttaaaaatacta

SEQ ID NO: 424102 - DNA, 122 bp, Homo sapiens
ggcgcacgcccgcaagaggcggcgaggtgacaagtttggagtgcgcccccttcagtactgcgcgttctaagacttttggcggagactttcttggcaaaacccattccccaaagctacgcttc

SEQ ID NO: 424103 - DNA, 122 bp, Homo sapiens
gtgcacacccatgttataaaccacactaaatgcacaaaaactgtctgcaagtttggggtgcggggaacagctctgggtgggaggttggaaatttggtctgggggacccactcggctccctcc

SEQ ID NO: 424104 - DNA, 122 bp, Homo sapiens
aagcggcggcggcgtcccgggttccctgctcgggtctcgatgttacagctgcccccgccccgtctccccagcactcacatcccgccgccgtaagactccgggcctcggcctctagcgcaatg

SEQ ID NO: 424105 - DNA, 122 bp, Homo sapiens
cttcctccgcgcccacttctacctcaacccccgggccgcccgcccggcaggcctggcccgcgcgccgccctcgccttcggctcagccccgccaggccagggctggcccatcccgggcgggcc

SEQ ID NO: 424106 - DNA, 122 bp, Homo sapiens
agttttcttatctgaaataaggaggggtaacggtgcccatcctgcctcccctggcaggtccgcttacgcatgtagtgagaaaatacaggcaggcttgcagggaacaccgctttaaaagtata

SEQ ID NO: 424107 - DNA, 122 bp, Homo sapiens
tatttttttctcctttcttcaaatgtatttttcctacacataatcctaaacaatgccaaccgctaaatcatgaggaagtttaataaaaatatgcttaggttcttcatcacataggaggcagc

SEQ ID NO: 424108 - DNA, 122 bp, Homo sapiens
aagactcaccaaactaaagggtgattcttgcaagaatgcacatggagtaatatgagtagccgcgttctcatggaatttaataagaattataaaacaacaacctcaaaaatatcattgatgaa

SEQ ID NO: 424109 - DNA, 122 bp, Homo sapiens
aaagcacgataccaatgtgagctctttttccattaattctgaaacgtggcgcattctgtccggcctgtctcgtccctcctcgggccacccatctgtattctcgtattctcggtacacacagc

SEQ ID NO: 424110 - DNA, 122 bp, Homo sapiens
tgctcgtaggggcacgccgccccctgctggtggagccagtagccgcagcccttccgggaacgtgggattgagcccgctccctggcacccctgctgtgggccgccccaggatggtgaggggtg

SEQ ID NO: 424111 - DNA, 122 bp, Homo sapiens
ttactctcacttactccacccaatgcgttccaatccatgggcaaagcagctggtggtccccgctgaggggtgacggcgcgtccccgtgtttacggtccccgctgaggcgtgacagtgggtcc

SEQ ID NO: 424112 - DNA, 122 bp, Homo sapiens
ccccagcccgtccttgatagccccgatatcccggagaccccgcggtctgtgtgtatgccccgaattgcatgcaatcagcccccctcggcggccgcaccgacaccgcaccccaagtcctaccc

SEQ ID NO: 424113 - DNA, 122 bp, Homo sapiens
gtggaggcgtctttaagtgtgaggaggcagcaccacctgcacgctgtttgtgatgaccgtcgtcgtaaactgagcccccacggcacctcacaggcggaacttccatctcccacagcccggaa

SEQ ID NO: 424114 - DNA, 122 bp, Homo sapiens
tttgatcagcttccgcatctgctgacgggagttggcattggcaatttcactggtctcattcgggtccaaccagaccttcttcttgccacagcagaggacagaagaggcgagcctcttctgaa

SEQ ID NO: 424115 - DNA, 122 bp, Homo sapiens
tttaacatacaattttccatctctgacctgctcgcgtgcacagttctgtggcattaaccacgttcaccgagttgtgcaaccatcaccaccgtcctctctggaacactctcgtcttcccaaac

SEQ ID NO: 424116 - DNA, 122 bp, Homo sapiens
tccggaggagaaggagactgcaaggataggcccaggtcggtgcgagggacggtggtggggcgggggtcggaacgtaaggaaagcccagtctgagaccccaaccccctccaccccatccccca

SEQ ID NO: 424117 - DNA, 122 bp, Homo sapiens
ggcctcatttgatagcccttgttcaagggagtcagtggtgggatctgacgttggatcaaacggattacccctcccaccccctcctaacccaatgttttggccgagctccccctaggcaggat

SEQ ID NO: 424118 - DNA, 122 bp, Homo sapiens
ctgctgcaacggctgcacagcctcaatggcagcatcctgtggatccctgccttcatggcccggggcggcaaggagcgtgttgagtgggtcaacgagcttatcctgaagcaccacgtcaacgt

SEQ ID NO: 424119 - DNA, 122 bp, Homo sapiens
gaaaaatgttagaaaagtgaaagtttcttgagatgcattgagaaggtctgatgtgagcaccgtggcattcttgtagtggttagatttttctacaccaaacagatggaagacgtacaactgtg

SEQ ID NO: 424120 - DNA, 122 bp, Homo sapiens
ctagtccacctcttcttgctggcataggtgggcactttgcttctttctcttccagggctgcgcacctgccatgccagccgcctccccctgagacccatctcccccgggaacagacccacaag

SEQ ID NO: 424121 - DNA, 122 bp, Homo sapiens
gcttgggagactgacttggaagacagaacggcaaggaagcggcgtctcagcgtcacttcccgcggggaggggcagcgtttggcgtcttctgaggctgacttctcagcagaggatccctgtgc

SEQ ID NO: 424122 - DNA, 122 bp, Homo sapiens
gcaagcaatcttaaaggaactgggaagagttctgactcctgtccttcttccttaggactgcgagtagactgtgagaaaaacaggttttctggacttgagatgtgtacaaatggcacaaagaa

SEQ ID NO: 424123 - DNA, 122 bp, Homo sapiens
gctcctaaaggcgactctccaagacccgctctctaaggtgctcttcccctttaagactcacggctcttcccgtcaggctgcgtcgcagtcttaaggccccgccttttcagacagcttccgct

SEQ ID NO: 424124 - DNA, 122 bp, Homo sapiens
gctcccagagacatgcaccacaagggctgtggaccaatgtcctttcctctaacccctctccgctgcctcctgactgcaaaacacccatttctcccttgggagggtggggactctggctgatg

SEQ ID NO: 424125 - DNA, 122 bp, Homo sapiens
ccagagcttcggaggataatgggtttcttcaaactcggtaaggatggacgacggacgattcgcttagagctgatggtggcggtggtcttgcatgccatccctgacctgttgcgcgtcttccc

SEQ ID NO: 424126 - DNA, 122 bp, Homo sapiens
agtctttattccagcatcctctcctcttcagaagaattgtatgtatcgtcataacagcatcgtcctgatccatcaggtaaaagagaggatgctacctagtggagttattcttgcagccccac

SEQ ID NO: 424127 - DNA, 122 bp, Homo sapiens
taaatctttaagggattaattcacaactctgtagtaggtaggggccctgggaccacttgacgggcctttgcaggcagttctgtacagagtcctaacccgtaacgggcctcaaccccggctgt

SEQ ID NO: 424128 - DNA, 122 bp, Homo sapiens
ccaggccggacacggagcaggtcaaactccccgtgttgggcgacggtgggaccgcgcctgcgagcaacgcctgcagttccgcccgggacatccgacgagacccggtctcttttaacttccct

SEQ ID NO: 424129 - DNA, 122 bp, Homo sapiens
atagcagtcggactccactgcccgctccctgaagaagaagtagaccttgtcgtcgtcccccgtgaagctgcccacactctcaggtacataggcagagcctacaaagtgaggttctgtgggaa

SEQ ID NO: 424130 - DNA, 122 bp, Homo sapiens
gataatattgttttatatatatatcccagataggaatgatgagagtacatctttctgtttcgctcagcttaaggaacagagcattatcgcttctgttgaagctctcagggtgccccttcctg

SEQ ID NO: 424131 - DNA, 122 bp, Homo sapiens
ggggcggggagggctcccgggaggcaagtggtcacggtgagagtcactgggcttggagaacggggctggcgccgtggcgggggtgggggtggggtgtgccggcgagcttggggtgaggcgtg

SEQ ID NO: 424132 - DNA, 122 bp, Homo sapiens
tacttgcccccttcgccaccactccccaccaagaaggagaattgctggaaacccaccccccggccagagcccaggttccgccacccagccctcccacagccactcccagtagctaatccttt

SEQ ID NO: 424133 - DNA, 122 bp, Homo sapiens
tttcaccagatatcctagtccatcactcttaactttcacccttcataaagcctctgggcacggacactgttcagcccagttatttgctactttataacaagggtggcctttgctctagtttc

SEQ ID NO: 424134 - DNA, 122 bp, Homo sapiens
agcttctatgaccatacacaggaaacatgaacccaggacgccaggtgagagtgtttcactcgagtcaaaggggacagggtctccacagaggccacccagccgagagtttcagcagtgccagt

SEQ ID NO: 424135 - DNA, 122 bp, Homo sapiens
ttctgtaggaggacggagtcccagagaactacaactcccatcaagcacttgggggatcgccgcggctgagggagagactatggcttaggaaccaccattcgcgtgaggctctgctccccgcg

SEQ ID NO: 424136 - DNA, 122 bp, Homo sapiens
ttaggaggtgtctttcaggggttttttttcccttccgggagaggctgttaggccttgaaccgaggccctctgcgctgctcactctgttgccttccagagcttgtgtccgggaaaaggggccg

SEQ ID NO: 424137 - DNA, 122 bp, Homo sapiens
catttgagagccctggagtcgcgcttggcttggcttggggcgccggtgcgtgggtacactcgaggtgcggggtgcctatccgccaccccgacacctacacccagacagagcaggcgcggccc

SEQ ID NO: 424138 - DNA, 122 bp, Homo sapiens
gaggcccagccctgggcctgtggagccctcatcaagcaggtccctcagactcctgcctgccgccgccaatcaggcaacaccagccttccttttggatgatggaaacagttctatcttattta

SEQ ID NO: 424139 - DNA, 122 bp, Homo sapiens
ccctctaagtagaagcagtgaagtcagaaaaagtgaactcagagctgatccactctaccacgttctcatgccagaaccccctggatgacctgttcaattcccacacaagcgatgacttctag

SEQ ID NO: 424140 - DNA, 122 bp, Homo sapiens
aaacactggggatttgctcttaagtgaaacactagacagggaggagctctgcggttccatcgagccttgcgtgctacatttgcaggtgttaatgcaaaaccccacgcagtttttacaaattg

SEQ ID NO: 424141 - DNA, 122 bp, Homo sapiens
gaagctcggggagccctgcagtggctggactgggccgcggctcagccatgtctgcagatccgggcgtctgtacagtcctatgggggtcgataaggaaatgggatgcttttcacataaatatg

SEQ ID NO: 424142 - DNA, 122 bp, Homo sapiens
ctttctgtaatcctacaaactgggttagatgtttctttttagtgatgctatgtttccttacgaatattgctgtcccttcattttaaaaattgacttatgattattcccgtgtctatcttctc

SEQ ID NO: 424143 - DNA, 122 bp, Homo sapiens
gtgactgaggccgcggaaggcaccatctgctcactaaacccaagacctccaaaaacgcagcgggcctgaaggtgtgaacacggccacatgcacctctagcttgtccttaggttctagcccat

SEQ ID NO: 424144 - DNA, 122 bp, Homo sapiens
tgtgcttcctgaggagcaggccggatgtaagttatcaactataaataaaaccaagacttccgttctggctctcactctagtttcctggtgcattttttttttttaaagttcttaatcaaggg

SEQ ID NO: 424145 - DNA, 122 bp, Homo sapiens
cggcggtcaacgcgctttattccgaggggcttcagatacagatgaccccagccctgcatccgcccggaaggcgtccccttactcccatggggcacctcgataccagctgccctgccctgact

SEQ ID NO: 424146 - DNA, 122 bp, Homo sapiens
tcggactcgggggtcgtgcgctccatctctgcctcccccctggggcccgcgaggctggtccgggctttctgagctgggcgttcggctttaggcccaatacctggaccaggaatttcttctcc

SEQ ID NO: 424147 - DNA, 122 bp, Homo sapiens
gggaaagagtggggcttggccaatgggagcgccgtgagcttcgtagcaacggaggagtggcggtggctgtggccaatagaaagcctcagtggccttggcggggctggcccggagagcagatg

SEQ ID NO: 424148 - DNA, 122 bp, Homo sapiens
cccctccggaaaaaggaaaattgaagccagatgctctctgggatcgccatttgaggtgggcgtggctattaggacgctcagagagcccagcgcggtgaggaaagcgacgaacttaggagccc

SEQ ID NO: 424149 - DNA, 122 bp, Homo sapiens
aggtcaggcgccgtgcaaggtacatcttggcacccggaagaggcccagtacagttgcccccgaggtgacccgacctcccctaccaattgaggcgcccttgttgccaggcttgcggcggggga

SEQ ID NO: 424150 - DNA, 122 bp, Homo sapiens
cgcattttcttctcactgaaactccttttaacacgcaaggtaatgatccgcgcgtaacctcgcagggaagagcaagcgctcattacccagctgttcagacggaaatttacatcaatatttgt

SEQ ID NO: 424151 - DNA, 122 bp, Homo sapiens
cagatctttatagatctatatcctccctggacaaacctaaatgcagacacttttagcacccgtaggagttaggtaggattaaataaaaacattccctcccacttgggggcacattcactggg

SEQ ID NO: 424152 - DNA, 122 bp, Homo sapiens
ctgcccggctcctgccccggcgtcagtccagacgctgtgtggaggagccggaacgggagacgccttctcggaccccagccggccgactaccagcctgccccgcacagcacctgccttcctca

SEQ ID NO: 424153 - DNA, 122 bp, Homo sapiens
cggctattttcgggagctgccgggtcaaaaggggtgtaaatccgataagcctcctggaggcgctctaaaaacgttcttggtgacttatcgggcctttggacaacgtcggtcgtcttagacaa

SEQ ID NO: 424154 - DNA, 122 bp, Homo sapiens
gacaggactccagcaagcactgtttgaaccccaggagttggagccacctgaacggggtgtcgtcgggtgtgtagcgaggtccaatctagggctaagattttagggaaggtttttacgacctg

SEQ ID NO: 424155 - DNA, 122 bp, Homo sapiens
tcctcacactgggtttgggatcccgaaacccctgaacaaaatggcgaaacctaatatggccgttccggagtgattgacgcgcaaataacattcttgttctctttctttctctttctatgtgt

SEQ ID NO: 424156 - DNA, 122 bp, Homo sapiens
tacacttggattctttcacaggtaatgctgagaaatttaaaaccaaaaacggccgggtgccgtggctcctgcctgtaattctagcactttgggaggctgaggcgggcggatcacaaggtcag

SEQ ID NO: 424157 - DNA, 122 bp, Homo sapiens
catatggagcatgcccagtgtgggagtgcgtcctcctccctccgcctcccccctccccctcgagatctccaaagataaggcttgaactttgcacttgcaaatgtcactgcatacgtttttgc

SEQ ID NO: 424158 - DNA, 122 bp, Homo sapiens
gccaccaagagtccttttataccacggtaagaaatgatcagggggcgccggcagtcctaacggtgcgctcagaggcagcggcggcggggctccgagaccgggccccacattctccatgaaag

SEQ ID NO: 424159 - DNA, 122 bp, Homo sapiens
ccgccgcggccgctgcctgcgctcctcctcctactccactcgctgctgccgccgctgcttcgctattcccaatcctgttattacgcaggtgaaaatggcctgcttggtccgggtcctcctgg

SEQ ID NO: 424160 - DNA, 122 bp, Homo sapiens
ctcccgtggatgaatcatttgttctgagctaagcttgggccatgggccagactccttcctcggagcctgtggggagcaggtgaggaaggagtatggataatggtgcccgttactcctgcacg

SEQ ID NO: 424161 - DNA, 122 bp, Homo sapiens
gcagggctaaagacaggaccctgggggccagttcaaaaataatgcatgtggtcaggcagtcgaatgtcaggccacacaaccagccttttatggccaagaaggcagataaatatagcagcaga

SEQ ID NO: 424162 - DNA, 122 bp, Homo sapiens
agggcagagctgtcactccccgctgcctcccgcactgctctgacgctggcggttaactagcgtcacccgaggctgtgtccgtgcagtaagcaaccagtgttctgtcctgggaccactatcac

SEQ ID NO: 424163 - DNA, 122 bp, Homo sapiens
aagaagcagcgattgagtggccgaggaagctcccaggcaagctggtcagggcgggccactcgggctgctgtggccacacaggagcaggggaatgccccggctgtcagtgagccagagctgca

SEQ ID NO: 424164 - DNA, 122 bp, Homo sapiens
aaagactgcggggcagcagagcagcagaaatcggagtgtgagaggcggtggagtccctcccgaggggaccgggactctcccggtccaggaaagcacgaggacagcttccgacagaccaaatg

SEQ ID NO: 424165 - DNA, 122 bp, Homo sapiens
gcggcggcggcggcggggcttttcctgtccggttacgttaaggtcacatgaccgagagagcggagagactagtgcaaagaggctgcgagcggctcccgccgggggggagaggcggcgagaga

SEQ ID NO: 424166 - DNA, 122 bp, Homo sapiens
tagacgttacggcagccgaggtttttaatgagattctttctatgggctttacccctcccccggaacctccttttttacttccaatgctagctgtgacccctgtacatgtctctttattcact

SEQ ID NO: 424167 - DNA, 122 bp, Homo sapiens
tctggggaggccggggaggctcctcattacgctcccagcacaaagcccaatcacagacatcgcacacggatacactagaccctgcctgcggggagagtggctgccagccggggcacccagac

SEQ ID NO: 424168 - DNA, 122 bp, Homo sapiens
cagagctgagaacttatgtccacacaaaaacctgtgctcagatgtgagagccgctttattcgtcattgccaaaacttggaagcaaccaagacgtccttgtgtaggtgactgaataaaccgtg

SEQ ID NO: 424169 - DNA, 122 bp, Homo sapiens
caagagggccccccagccccggctcactgaggccctccccgtggaggagcgtatcctgtccggtccgcagctcaaatatccagagatcgggagaccccggccctggccccacccccgcccca

SEQ ID NO: 424170 - DNA, 122 bp, Homo sapiens
cagaggctaaaaataagcgaagaaaaaaaaatccctttctcagccaccaaggagaggctccgttctggccaatgagccacaaagggaaagccttctgtgggatcgtctgacaaggacagagt

SEQ ID NO: 424171 - DNA, 122 bp, Homo sapiens
acctaagcacagcccatcctccagtttagatgtctctcaccatgtcccactccccaaccacggcctgtgtgggccgccaccatctcccctagggctgctggggcagcatctaggaagtcaca

SEQ ID NO: 424172 - DNA, 122 bp, Homo sapiens
aggcttattactaactagaagctggactttgcctcgccaatacctcgtctaagagctcaacgcaaaaggaaatgagaggtatctctaggagggacttccctaccctcccaagccacagggtt

SEQ ID NO: 424173 - DNA, 122 bp, Homo sapiens
aagccctactgggtgttcctctttaagttcattccaattttgttcaaaccccaacacatacgccagaggtaactctttgctctactgtgtggaattgtaggagggttcagccacggagaagg

SEQ ID NO: 424174 - DNA, 122 bp, Homo sapiens
gctgagtgagggagagggtgctgcgagctgctgggctgcacacgcacacgcacacgcacacgcacactgatgcacacggacctggacacagacatggacatggacacagaaaccacagcact

SEQ ID NO: 424175 - DNA, 122 bp, Homo sapiens
gttgggaagggagcatccgaggacagacagagccagggcccctgagtcactgcaggaggacgcccccgctgggactcggcgtccgctgcgctgagccgctaaggagccggtctacttgctcc

SEQ ID NO: 424176 - DNA, 122 bp, Homo sapiens
aggcaaggcaagaacagattctccccaagagccacaggaggtacagtcctatccgcacctcgatttctgcacagtgaaactaattttggatttctggtgcctaaagcagtgagagaatacat

SEQ ID NO: 424177 - DNA, 122 bp, Homo sapiens
gatgcggttctcattgattgcattttcaatctcctgcagtttcttcagtgcattcagatacgaggttttcctttgtttcttcagttttttgctgacgttggggtcactggctaggcggcggg

SEQ ID NO: 424178 - DNA, 122 bp, Homo sapiens
cggccaagatgtcccctacgacgtcctcgccctcctcgagggctgtaagcgccatccactcggcctcactgagccgcccaggcacaatatccacctgcggcactggcacagtgggcggccgc

SEQ ID NO: 424179 - DNA, 122 bp, Homo sapiens
ttccccccaattccccaactcaactaagttggaaagaatcaagccaatatacttttagtacgacaggtacataaactaacaacatatgttatattcaagtgacaatttttttctcaactaaa

SEQ ID NO: 424180 - DNA, 122 bp, Homo sapiens
ggtactcagccccctccgtcccgtgggcacctcttccccggcgccccccctcaccctccccgcttgtcctcagctgccccccaagagggacgagacggccctgcaggaggaggaggagctgc

SEQ ID NO: 424181 - DNA, 122 bp, Homo sapiens
tgagtgggctccctaggttcaggatggaagtaaataggagtaccatcttaccttcagggacggcccaggagtggggtagcagccacagaagtggtaacatctgtagcagcgcagctccttgg

SEQ ID NO: 424182 - DNA, 122 bp, Homo sapiens
cgtgccgtgggtgtgggcatgcttgtgtggagatgcgcgccgagtgtgcgcgtgaacacacgtgcacatgtgagctggtgtccgtgtgcaacaggcagccacctgggggagcgcttgcagtc

SEQ ID NO: 424183 - DNA, 122 bp, Homo sapiens
ctggtccacatcattctagcctgatcaatggtgtgcctggtttgaggttggttttggccccgcctccagctctaagagaaaaaaacgaaaactcacagctggatttcctataaatcctcttt

SEQ ID NO: 424184 - DNA, 122 bp, Homo sapiens
ctacagccgccgcctggccaggagcgcgtcgcggcctaatgttgtcatccgccgcgtcgccgcctttctgggcacccagaaccgcgaagatccttcacattctagtgccctccccctgcccc

SEQ ID NO: 424185 - DNA, 122 bp, Homo sapiens
tgcagggcccttccagccggggccggggggggccaacgctggttcttcatcaatttggagcgccaggagagggcggggatctagtcctgccggataccacccccctttgggctgcccacacc

SEQ ID NO: 424186 - DNA, 122 bp, Homo sapiens
acgtattcaaatttttttagattaagttacataaagcatgcacaccatttggcacaggcccggcaaacaatcagtactcaacatcacctgttattttcctgattttccaactttagagtcaa

SEQ ID NO: 424187 - DNA, 122 bp, Homo sapiens
ttgcggcgtggtggccgacaaaacccgggaccctgatcttggcgcctccacgccaccgcccggaggccaagacccccgagcgccgcagcatagcgtagcccagaccagtcacctcatccttt

SEQ ID NO: 424188 - DNA, 122 bp, Homo sapiens
gctgggcctgcggagggatgacccacacgcccctcccctcgcttccttggcctggtttcacgcgactagagaaagttaaagacccgtgtgactgaagaggagctcacagttcccagcgtctg

SEQ ID NO: 424189 - DNA, 122 bp, Homo sapiens
cctcctggactagatggtttatattatcaaatatgataaagccttcttattattgaagtgcggtcctagaacaagcagcattcactttctctaggagcctgtttaaaatgtgaaaatttagg

SEQ ID NO: 424190 - DNA, 122 bp, Homo sapiens
gcgcgcccgcgtttctaaactttgtctggataaggcgcacgcttggcgacgtcgaaggtccgtccgcagttaaggaagcttttgcagccggacaggtcgcgaagcacacatggggcagggtc

SEQ ID NO: 424191 - DNA, 122 bp, Homo sapiens
gccggaaggaagggaggtgtggcaagcaatgcaaaccaatgggaagcggatctcggggagcgagcgggacctggagagagaaggaaaggcctggcggagagggcagggcagagaactagggg

SEQ ID NO: 424192 - DNA, 122 bp, Homo sapiens
acctccggggtacggggcggccttcagcgccgcacccgtaggggccctggccgccgcaggcgccaattacagccagatgcctgcagggtccttcatcacaggtcagctggtgttttcctacc

SEQ ID NO: 424193 - DNA, 122 bp, Homo sapiens
tcgccgctgcggcgactactgcagagcccgctgacccgacccgacgttattctcccccctcgtaacccgacacagcctagcccacctgccctgccagcgcgcacgcccacctctccgctaca

SEQ ID NO: 424194 - DNA, 122 bp, Homo sapiens
cgggaagattagacccaggcggtccggctccccggggcctgtcagccacctgctctctgccggccgcctggctcagcacagttgggaaaatgaaaggtcctgtgtggagtccttggcgcggc

SEQ ID NO: 424195 - DNA, 122 bp, Homo sapiens
caggcatcctgagaccctgggtcctgtctttcatctctgcacccttccggtctgaaacagcggccagttcttgttcgatgtaaggaacactagtacccaagggctcaggagttccgcctctc

SEQ ID NO: 424196 - DNA, 122 bp, Homo sapiens
cactgagatacgcacgcattcccattggggtactcacgatctcacacagtgagatacgcacgcattcatgctggggtactgacgctctcacacactgagatacgcacgctttcccgctggga

SEQ ID NO: 424197 - DNA, 122 bp, Homo sapiens
agagggtggccgggggagagtgggggctgtgggatcaggggtccagggtcacctgcaggccgcctcctgtaccctcttgttgccatccaggatgcgtttgagcagctctgtcatcaggggct

SEQ ID NO: 424198 - DNA, 122 bp, Homo sapiens
cagtgctggacatgtagtaatccttcattaggtatttgaacaaaggaaggactaaatgaacggttttgtgttgttacatgctgtgatcatcatattcaggtagcttagaacgtatacccaac

SEQ ID NO: 424199 - DNA, 122 bp, Homo sapiens
gtggaagtggccaaacccggctatggtggtggcggctacgccagctgatggtgtgggagccgagggggagccacaggccccggggggtggggaggagctggatgagggcaggagtgggctca

SEQ ID NO: 424200 - DNA, 122 bp, Homo sapiens
caaggtagcatctgcctgagcggacaccacctgtgacttcagctgaggatccgggagacgcgggagcagcagatgcccccccggccttgctggggtgcgctttggtccacgcactggggcca

SEQ ID NO: 424201 - DNA, 122 bp, Homo sapiens
acgtgtactgcacatctcagggctcgaccacttactggatgagaacagagtgccggacctcgcacagatgtaccagctgttcagccgggtgaggggcgggcagcaggcgctgctgcagcact

SEQ ID NO: 424202 - DNA, 122 bp, Homo sapiens
tttctcaaatgaaacaagcacctcacatgtcagatagtggtagagaataaaacatcccaacgccataaaagtcaccctctctagaagatagcactacaagtactgtacaacccactatatga

SEQ ID NO: 424203 - DNA, 122 bp, Homo sapiens
tgttgcaatggcatgacggtgacctgttgacgtaactaagccttacagcaaggcatgtgccgcacgtgctccgtggtacttagagccctgggggccccgctcggactccgggtctccctagg

SEQ ID NO: 424204 - DNA, 122 bp, Homo sapiens
gcgcgcgcgcacgtgcgctcacgcgtttacttctgtgtgattgtatcacatacaaattcacgtatccaccaccacaatcaggatacacagcagccctgtcttcccgagaggcctgtgctact

SEQ ID NO: 424205 - DNA, 122 bp, Homo sapiens
ggagctgcagcccccgagaatagctacaggctggggggcattgcggtctgagccttccctcggcgcttcttcccgccgcctcagtacatacaactggaggcaagaatcttgcacggtaattg

SEQ ID NO: 424206 - DNA, 122 bp, Homo sapiens
agagcgccgggtctgcgaggagtgtgcctgcccagctgcagtacactagtggccgggaaccgccctgctggcgagcaccacaaacttcctctccttccagctagcgctggtgcctcctggta

SEQ ID NO: 424207 - DNA, 122 bp, Homo sapiens
ttaaacgcctccaggggttctctcatcctggtttaagtccacggcctggtaagcacggcccgccccttctcacttcctactgtgctctcaccacttccacttcccccaacatgcctgtgccc

SEQ ID NO: 424208 - DNA, 122 bp, Homo sapiens
cccgagaggcgcgaggaggatgagcctgccagatgccttgtgcgcatctatctccagggccggggaggctgggcgaactcccggggaggagactgggtcagggacacctgcggaactcggcg

SEQ ID NO: 424209 - DNA, 122 bp, Homo sapiens
ccagcgtccctggctgggagcagagctagccgagtagggcgcccggctgtcaaaactggccggcgcagtgcacgctgggccgccccggagcggtcgcagagcccgtcgggagtcgtagtccg

SEQ ID NO: 424210 - DNA, 122 bp, Homo sapiens
gcaagctacttttcataacaacaacaaagcaacgacgccttgatgccacattcatgccaccgccctcaccacttggcccccgcagcctcggaagcctgcccacctgcaggtgtggtttgcac

SEQ ID NO: 424211 - DNA, 122 bp, Homo sapiens
gcaagaggtgagccctctgtcacgcccccataaggaccacttgagggctccttggtcaagcggtagtgccagtgtttgggaagacgcccattacttagcagaccgcgaaagggagtcacctt

SEQ ID NO: 424212 - DNA, 122 bp, Homo sapiens
cggtcaaccccgcactttccagatgggaaatctagtcacagagagaagagcccgcgccctcgcgggggtcacacgacagggacaggaatgagaatcggataaaatccttttgtatcgggaga

SEQ ID NO: 424213 - DNA, 122 bp, Homo sapiens
caggctgggtgcaagagccacacgcccagcccacccaactcctccagccagaagcacagccgtggctccaaagaggcatccaaagaggacgccgactgcccctttgacagctgcgggaaggc

SEQ ID NO: 424214 - DNA, 122 bp, Homo sapiens
gtggtaaaatacagaggagcttggtcatcaggaaattaatggtgcactgtggggacgaggcgaggggttgcaggcaggcaggggatccaaagtacctgactctcatgctcagaagggtttca

SEQ ID NO: 424215 - DNA, 122 bp, Homo sapiens
ttagcttcaagccaccacctttccaaccagcctgggccagttcttccagacagccgcctgcgggcacaacaggaaagagacctgcgccccggctcagacacctcacacccagctggctctca

SEQ ID NO: 424216 - DNA, 122 bp, Homo sapiens
gaatacttggctcgatattagaaaggagctcaaggtagtacacttcacgtgccccggtaacggtgagcctccttcagcaggtatgttttttctctctctttttttttttaagcaggaatgga

SEQ ID NO: 424217 - DNA, 122 bp, Homo sapiens
tatatagaaatataactgatttgtgtattttaatcttgtatcctgtgacctttctgtactcgataattctaggagtttttggttagatttcttgagattttctatttagacaaccatgttgt

SEQ ID NO: 424218 - DNA, 122 bp, Homo sapiens
ctggcactggggaacgttggcacccatccaggggattgcctgggtctcccttctttaaaccgtgggctcctcttgctcaccacagaactctcagtgcccagcatcgtgtctaataattgtaa

SEQ ID NO: 424219 - DNA, 122 bp, Homo sapiens
aagactgggagtgaggctctcagcctgagggcacaccacgggaacgcgggaacgtgggaacgcaggctttggtgacatgtgttagaaaagcatttaataactggttaatctgtgcagctcgc

SEQ ID NO: 424220 - DNA, 122 bp, Homo sapiens
gttttgaaaccctctttctgaaggatctgcaagtggatatttggacctcctttgggtcttcgttggaaacgggatttcttcgtataaatctagacagaagaattctccgaaatttctttggt

SEQ ID NO: 424221 - DNA, 122 bp, Homo sapiens
gcacagcgcgtgtaagccagcccagctgacctaaagcgacatgagactactagaaagaaacgacacccttccccaagcccccacagctactccaacccaaacaacaaccaagccagtttaat

SEQ ID NO: 424222 - DNA, 122 bp, Homo sapiens
aggcccccgcagaggggctcagctgacgggagggcgacaacacaggcccccgcagaggggcgcagctgacgggacggcgccgacacaggcccccgcagaggggttcagctcaggggacggcg

SEQ ID NO: 424223 - DNA, 122 bp, Homo sapiens
tggatggttttccggaccgggcgtcccagcgccccggttagctatagggagacgtcagagcgctctggtccgcgatagaagagccccccagcccccccgcccgggcttccatataaagtagg

SEQ ID NO: 424224 - DNA, 122 bp, Homo sapiens
gctgtgtgctaagcattctctacatgcactatttagctgatctgttttcttatctgaaaacgggctcaaatgaatttacctttttttttttttcttttttggagagtctcactctgtcaccc

SEQ ID NO: 424225 - DNA, 122 bp, Homo sapiens
gtcccggggtcgcgcgttgctccgggtgccaggttcagcccgcgcggcgacagcgggcttcggcccgatttgatgtatgtttgcgtctagacgtcgtcctcactgtcatcgcgctttgcttt

SEQ ID NO: 424226 - DNA, 122 bp, Homo sapiens
gaaggcggagctggaagtcgccgccgggccccgggggaccggctcccgcgcttcctcccgcgccccccgcacagtgctcatgcgcacggcccagcctttatagcggccgcgggggccttgcc

SEQ ID NO: 424227 - DNA, 122 bp, Homo sapiens
aggccttcactgatgcctctgaaggcagatcagttagctagttacctggttatcgaatgacggttaggttagtcatccagtgctgtgatgttgccaatatgggtggaatggacagcccacca

SEQ ID NO: 424228 - DNA, 122 bp, Homo sapiens
tccagccctgacactaccgaggcaccagccgctgtggttagcttaggtgggctaaaagtacgaatatttttgtcgggattcaagtgatggcgttgggtgtaagtcagctctgccaggtgttt

SEQ ID NO: 424229 - DNA, 122 bp, Homo sapiens
gcatgcgctcgccacagcccgcccgccccggctcggctgctgtgccgggggcagccttcgcgcccatcccgcggagcccgttgcccgccggtccttcgtcctgcaccagtccccggagcccg

SEQ ID NO: 424230 - DNA, 122 bp, Homo sapiens
gggctgggagggggagggctgggggtcagcgcgggagggggccagcttgcttgcccggctcgctcacgggtcgttgaggccggtgacatgtctgtgagctgcggaggctgcggcccccaggt

SEQ ID NO: 424231 - DNA, 122 bp, Homo sapiens
gcaggcagggtcaggagctgggcagcccaggaccccagggaggcggggctgtggctcggccggaatgtccttccccgtgactcggctttcttcccctgacccggccagtcctggccccagtc

SEQ ID NO: 424232 - DNA, 122 bp, Homo sapiens
aaagggaggcatttggtaggcgaggggtctcctagcagctgaatcaatgtaacttaagcccgatcgccggctgcattccctggacgggggcagccaggctgtgcggtttcgcatctgggccc

SEQ ID NO: 424233 - DNA, 122 bp, Homo sapiens
atggggtaaagcaagttttgcaaggtcattgcagcctgaaagatcactatgatttcagttcgtgctggaagttttcaaaaattgaaatcctgaaaaaaaaaaactgctaacatatagaagat

SEQ ID NO: 424234 - DNA, 122 bp, Homo sapiens
tagaacgggtttcctaagggagtaaggcacagaacgaggcaatgggccgcctggtctctccgcgcgtcagtaggactcggggaaccagactccgcccagtgctccccagaaacccggctcct

SEQ ID NO: 424235 - DNA, 122 bp, Homo sapiens
gacgacgacggcggcaggaactcgaccggcgccggacagctcgcaacttgccttaccaagcgtaaatctcggttcctcccaactacccgcggccacggcctccgcagcagagcgccggaagc

SEQ ID NO: 424236 - DNA, 122 bp, Homo sapiens
ccctcacacggtctgccttctcccaggtgctgcagccgggactgcggctctccagcccgacgccatcaagctgcgccccagtcagccaatcagcgtctacatccacagccccgcctcgggct

SEQ ID NO: 424237 - DNA, 122 bp, Homo sapiens
cgagggagcgcgggggtatatggcggtcggggataagttgagaccccaggctcggagccgcgggttctgggttgtggtcgtccttcccacgctcagccggctcctctgcccccagcactgcg

SEQ ID NO: 424238 - DNA, 122 bp, Homo sapiens
tctgcaactattaacctttagctttcttcaacactttcttggactatcttggtctaaatccgaactccccaggaaagaactgcaactagaggccaggtgcagtggctcacgcctgtaatccc

SEQ ID NO: 424239 - DNA, 122 bp, Homo sapiens
gtctgcagaggctctcgtgccagccgaattcaatcaataaacctcgaacccacggccgcacgttttaggactttgaagactcaaccagctccgctcggttctcgagccccaatatttacaaa

SEQ ID NO: 424240 - DNA, 122 bp, Homo sapiens
ccttctacttctctccaaccttggtttccagctggagctggttggagagtggagggactacgctgtgagccctggagactctgtgtggggtacatactcctttgtttggaaccaaacacaaa

SEQ ID NO: 424241 - DNA, 122 bp, Homo sapiens
ggtcttcgcaggggatgtggcctgtgtgtccctccttcgtatcctgacccttgcgggggacgggcctgtgtgtccctccttcgtgtcctgaccctcgcgggggacgggcctgtgtgtcctgc

SEQ ID NO: 424242 - DNA, 122 bp, Homo sapiens
gccgttcatgtctccgagctccggggtaccggcgctgacagaaatccccactctcctggccgctccgtcggcggcagttcactctgcacaccaagttagctgcatggcagaacaccaactgg

SEQ ID NO: 424243 - DNA, 122 bp, Homo sapiens
cagccctgaagaggcgcccgcccggcgtgtcccctgtgcttcgtcatcgcccttcataagcgtcccagaggtcatggtgaccattgccatcttgtggacaggacattgaggctctgcatccc

SEQ ID NO: 424244 - DNA, 122 bp, Homo sapiens
ccaggctcttgaccgactggatcttcggacttgacctttcggccagaacccacccctctgcgagaagcaaagcacacagtagtagcttcatgagttagtccagcaacagagggagggcatgg

SEQ ID NO: 424245 - DNA, 122 bp, Homo sapiens
agagaatgctgttgctttatccaatcagtggcgctggcgcgggaaccgcccaatcaggggcgcagccggagaggagggcgtggcttccgacattccgcggggtctttacctcttgctcccgc

SEQ ID NO: 424246 - DNA, 122 bp, Homo sapiens
taaaagtacccatgctgttaaatttgcatgatgttttaaatattttaagatgaattatgccggtgcagctgtcgtgaaagtttacttgtgttttgctacttgcaaaggaaatgttcatgttc

SEQ ID NO: 424247 - DNA, 122 bp, Homo sapiens
cctccggacggcgaagtgtccctagggacccagacgcctcgggagcgatccgggccgctgcgaagccctgcccaccaggagtggatccccaggattcacctcccggctgcctgctctgagct

SEQ ID NO: 424248 - DNA, 122 bp, Homo sapiens
cattcagttaacggtcctctttacttccaaaaataatgtccgatgacaaaatttcggctgcggttgggaatctggtacaccccgaggggaagatcaaagccgatcaaacatagtaaccagag

SEQ ID NO: 424249 - DNA, 122 bp, Homo sapiens
ccttcggaagcagctcgcattattagaaggtccatcttccatgtcggagccgaagagcagcgcggccgcggcggcgagggcgaagctggcgccctggggacgccgcggagtttggccgccgc

SEQ ID NO: 424250 - DNA, 122 bp, Homo sapiens
gaggcctcctgcctttgactgccgtgcgtccagcctgcagcgggcctcagggggccgcctcgatccagcctgcccgaggctcccaggccttcgcccgccttgcgtccagcctgccgggggct

SEQ ID NO: 424251 - DNA, 122 bp, Homo sapiens
acaatgagcaataaataggaataggatggaagaaggaaatattgtgattgaagatgaaaccgttgtttgggaaagtaaagacaaaacaactggaaaaaaattttaagctggggaaggaggca

SEQ ID NO: 424252 - DNA, 122 bp, Homo sapiens
ctccggtgcgcgcggagctggttttccgggttcccctggacggagctggatcctgcttctcgccaaggcaggaagtgagtttcgcactgcaattccgggcggtgtcacgagtgaaaagtttt

SEQ ID NO: 424253 - DNA, 122 bp, Homo sapiens
ttgtttttaggtgcatctacctcatcacatggctaccggccacacagcaactaacagcaccgaggaaacacaacagcctgtttaccttcagccccgccactaacccttggccaaagggaaag

SEQ ID NO: 424254 - DNA, 122 bp, Homo sapiens
acatgtgttacagcatgtggagttcctgagagatgtggacgtgtagtctcagctagcaaccgccctcccaacagcagacacagagaaaaagagactggaaagaaacattccgtcatcctatt

SEQ ID NO: 424255 - DNA, 122 bp, Homo sapiens
acagggtttttgctgcccggggcctagtctacctcggcacgcttttctctgaaggagacacgcacttgcacgacgtgggcctctgtgcagctctactttgtccttaactcctctgactcaac

SEQ ID NO: 424256 - DNA, 122 bp, Homo sapiens
aaacgagaattgtgggattttttgtcaatcgagagtcagccaacttcctctcccactggccgctcacacagaatgcccaccgtgccctgcggtgccctgccacggagccaggctggcctgct

SEQ ID NO: 424257 - DNA, 122 bp, Homo sapiens
cacccggccctgccgacgcgaggtggcgccgcacagccaggaagcccgaggcggcgcctccgcgcaccgctcccagagcccggcagtgggaggttttccaccggacctcatcccaggcggca

SEQ ID NO: 424258 - DNA, 122 bp, Homo sapiens
acacatatgcttcaaaacctcgtgtggtagttcaagcctgcttagaagcttttaaggcctcgtgccaggtttccggtgttttcatagatttctcttgttcagttattgtcgcctccaaattt

SEQ ID NO: 424259 - DNA, 122 bp, Homo sapiens
gcggcgtggagccatcttccctcacctcctaccggcaccctagcttgctcccggcccatgcggcccccgcgggctcccggccccggcttcagaactcagccctgcacctgagcgcggggccc

SEQ ID NO: 424260 - DNA, 122 bp, Homo sapiens
ctacggcctgaagactggagaggttttctagtacttttccatcagaggaagggacgctggcgttgatgtttcctattacaaaggagcaaagagaacttactttgtgttagcttattttgaga

SEQ ID NO: 424261 - DNA, 122 bp, Homo sapiens
cactggtagtcttcgtttggatactcatgttctgcatcccagacgccagccggctctcctcgccctccagcagcttcctgtaggtgggatttccatgtccaggaccagcctgacgttcatca

SEQ ID NO: 424262 - DNA, 122 bp, Homo sapiens
ggggttggagggtgctacgtgcttggcttctctgtaggcgacctccagccttgtttcaggcgtgtccctggagctcctttctggtggtcatggtgggcatatgtcctcctgtcgcctggtgc

SEQ ID NO: 424263 - DNA, 122 bp, Homo sapiens
gcggccgcgagggtctgctcagcccagccccgcggtcggccctgggcgagaccgctcccacggctcagttcacgttccgaaaggtccggaatccaccgggtccccgaggaggggcgatgtca

SEQ ID NO: 424264 - DNA, 122 bp, Homo sapiens
gaggtgtttgctcaacttctgaggacgtcacgcctctgcctcccgtagccaatcagcagccgccctgagggaacaaccttctcatctgccaatcggcggcgctgccagttgctacgtcatgc

SEQ ID NO: 424265 - DNA, 122 bp, Homo sapiens
ctagaagcaaggtaatagggcacagggctgggagcggggatttctcccctttctgttggccggggaccctcagccttgtttttaaccaggccgaggcacgagtgcctgcccaagccaggaga

SEQ ID NO: 424266 - DNA, 122 bp, Homo sapiens
agaacattctgcacaccatcatgcctcatggaattgtggcctggcagacattaaaatacccgtttttcaaatagaggaagtgggttctttgaaatgaacagaattcagaagcactctgcagc

SEQ ID NO: 424267 - DNA, 122 bp, Homo sapiens
atctctgcatgttgtttggagatagatggaaagggcagggccacagagcagtcaggcattcggcctaccacattcttcccgaggtgtagtgggaaatctaagaattagagaggtagataagc

SEQ ID NO: 424268 - DNA, 122 bp, Homo sapiens
tgaaaaggagaaggaaaaaaggcccaagtagtttccccactgaggaagaaccctggttagcgaggcaagtcacgtgattttgggaatcgtgttgaatctacacccatttaaggtggaagtct

SEQ ID NO: 424269 - DNA, 122 bp, Homo sapiens
acagtgacgggctctgagtatgagacgatgctgacggagatcatgtccatgggctatgagcgagagcgggtcgtggccgccctgagagccagctacaacaacccccaccgagccgtggagta

SEQ ID NO: 424270 - DNA, 122 bp, Homo sapiens
gagcttttgcagtttacactttaattctaatgttgtgtcggaacattgggtggaatgatccgtttgggggtagagctgctgctttacttcttaaagcaattgtatcatctttgccctctgaa

SEQ ID NO: 424271 - DNA, 122 bp, Homo sapiens
gccgcggggtgggtgcgccaggcctgggtgtggcctcacgggagcgagtttctctccagccgcctggcccaccgctttggaacagtgaagctcgagttggggtctcctgcacgccaagggga

SEQ ID NO: 424272 - DNA, 122 bp, Homo sapiens
accagcctatttatagcccaggaaaggaaaaagctccactggaggcaggaaaactaagttcggaaagaataggaggaagtctgcctgccatttagccaaacaacctttaattcattgagctc

SEQ ID NO: 424273 - DNA, 122 bp, Homo sapiens
agccagccactgggcgtcaggaccctcgggaagagcgggagagggcactgggatgcaccacggtcagaacgacaatcacagcccgaacccctgcgctgcactcctctgtcctccccacctct

SEQ ID NO: 424274 - DNA, 122 bp, Homo sapiens
gtcgctggcttggagacaggtgacggtccctgcgggccttgtcctgattggctgggcacgcgtttaatataagtggaggcgtcgcgctggcgggcattcctgaagctgacagcattcgggcc

SEQ ID NO: 424275 - DNA, 122 bp, Homo sapiens
ttcaccaattcaacagggaagcaggaaatacagcaggaacataatctgtgtctgcatcagcgatatttctggtgacccagccagaaatcacagtaatggagtaacagagatttgagctcagg

SEQ ID NO: 424276 - DNA, 122 bp, Homo sapiens
aaagtttagctacaaatccgggtgcgggaatcccagccctggcagggcggggagtgaggacgccgaaccggggtcccacgttgggcggcgcaaactcctctagcatccggccggggacgggg

SEQ ID NO: 424277 - DNA, 122 bp, Homo sapiens
gggtttgctgctgttgtcctgagacatcatgggttgtcttagaattctagacgtgagacgcgcagcctggaggcggctgtgcttctgtctgctggagtgtcaggtgagatgcctgatgtatc

SEQ ID NO: 424278 - DNA, 122 bp, Homo sapiens
gccggcctgatgttatcctcgaaggggcgtcacgccggcctcatgttatcctcgaaggggcgtcacgccggcctgatgttatcctcgaaggggcgtcacgccggcctcatgtcatcctcgaa

SEQ ID NO: 424279 - DNA, 122 bp, Homo sapiens
cctgccccagcccagtgccacagaaacatacttgccaagggacatcaatgaaagcagcagcgtggtgcacctcccaggggtcaggctgcacccttgtctcatgggcttctgcagcccctgtc

SEQ ID NO: 424280 - DNA, 122 bp, Homo sapiens
tgccagaattcccaagtgttgtaggagggacccagggggaggtaattgaatcatgggggccggtctttcccatgctattctcatgatactgaataagtttcaagagagctgatggtttatca

SEQ ID NO: 424281 - DNA, 122 bp, Homo sapiens
tctttccccttggtacttgtgtgctcaggtctctctcattacaagattctacatcagccacgcatcacccatatgaacaggccctccgcctcccctctgcccccgtcagctgccccagcctc

SEQ ID NO: 424282 - DNA, 122 bp, Homo sapiens
taatcaagtttctcaccatcctcatagtttttgagatagtaatccgggcccgggcccccgcggcttttcgccgggttcctcaggttctggaactgcaggaagtcggtccttttgcccccgaa

SEQ ID NO: 424283 - DNA, 122 bp, Homo sapiens
cccgcgctcaagagattcttctgccgcagcctccagggtagctgggattaccccagagcccgccactgagcccggctaatttttgtatatttattagagaaggggtttcaccacgttggcca

SEQ ID NO: 424284 - DNA, 122 bp, Homo sapiens
ccctgctcacatgcaccccagctcccatgcatcccgggctcacacacaacttgactcacacgtctcaggttcatgcatccgtcccctggtgcgtctccgggccgccctccaccgggctgtgc

SEQ ID NO: 424285 - DNA, 122 bp, Homo sapiens
ctcaaccttggccccacaatgaatcacccgagaaaattaaaaaaccaccagggcccgagccgcagcccaggctggaaagtggggtgttcaggaagaccccagtactttttaaagctgcccgg

SEQ ID NO: 424286 - DNA, 122 bp, Homo sapiens
caagtcggactgcgtgctcttccgcgtgcagttgggggcagcgcagaagttcggcatcgtcgcccgcccgccggccggcccagccctcccctccccgcctcctcagggcagtccgcccgccc

SEQ ID NO: 424287 - DNA, 122 bp, Homo sapiens
ggttgagaggccagaggtcagctctaagcactgtggatggaaggggaatggactggcctgcgctgggcagttggtgccaacattcagttccgcaggcagagcttccttccaccacgaaaaat

SEQ ID NO: 424288 - DNA, 122 bp, Homo sapiens
cgggggctcgggggtggggccgggtctcgggggcggggcctagctcggtctgcgggggctcgggggtggggccgggtctcgggggtggagccgggactcgggggcggggcctaggctcccgg

SEQ ID NO: 424289 - DNA, 122 bp, Homo sapiens
tccatggcaaagccacactgccagcgtggctgtggcctacacaggccgggcaacagcaggcgcaggccctaccccccacgccacgactcaaggcccaagcctgctgggtgcgtctgagtgtt

SEQ ID NO: 424290 - DNA, 122 bp, Homo sapiens
agcttggggtggaggaggtgcagtggtattcctggactagcacgcccatgctgttgcctgcgtttgtggaaacagagacctttatgggacactgagcaaggggattggtgatgtagaaatat

SEQ ID NO: 424291 - DNA, 122 bp, Homo sapiens
gaaagtgatggagttgtgattcaaacccaggccagtctgataccaagcctttggccttcccgtgtgctagactccgggaggacgacctagaatagttgaagcaagagctgtcatataggtga

SEQ ID NO: 424292 - DNA, 122 bp, Homo sapiens
ggttcactgtatcaggatattcacctagcttatggccttttttccctcccaaaaacaaaacgaccccccttctccactcccctccccccaaatctaaacagcaatagtgacaggtttcaact

SEQ ID NO: 424293 - DNA, 122 bp, Homo sapiens
gcccttgcggcccgcactgcttctcctcggaagggagatcgggtgctggcaagggcacttcgcggccaccggagtgtccttcagggcaccccccccccgatagcgcccctaacccgccgccc

SEQ ID NO: 424294 - DNA, 122 bp, Homo sapiens
aatcccgggcccggcgaggggcgggtgccaacggcgtgtgggcggggcctagggagtgagcggggcgcatctcccgctaggagttcctagtaaagtggcgggagccgcagctatggagccgc

SEQ ID NO: 424295 - DNA, 122 bp, Homo sapiens
aaggaataggggtaagacccctggcctacgggtagaggccagtgactgagactctcattgcgggagggggcgattagtcgcaaagccgcccattccaggatttggagatgcagctccagcac

SEQ ID NO: 424296 - DNA, 122 bp, Homo sapiens
ggctttctgagcactaagtggaaataggatgtgttaaatgggcttgattctctgattgcccggggaacaaaaaaaagttctgttagaatgtccactgctccctggagcagcccgagcttcca

SEQ ID NO: 424297 - DNA, 122 bp, Homo sapiens
tgtgccctgcctgggtggggtcagccacgcccccggaccactgctccaaccagcgttcgtcgtcagccccttacacgggacagggcactgcagaccggcccgggaacctggggacacctcac

SEQ ID NO: 424298 - DNA, 122 bp, Homo sapiens
tgtagcccacgatggccgcgtcctgacaggtcccgtccgccatgaggttgtcgatgtaggcgttccacccggccatggcgctgctactggggctgctctcggcgctgctgctggggccgcgg

SEQ ID NO: 424299 - DNA, 122 bp, Homo sapiens
gctggtggggggaggggtgcagcactgatgttctcatgcctttgcttctagaaacaaacccgtgacacttgtcctcctcacctaaattatccagaaagatcctatagacacagtctcctgac

SEQ ID NO: 424300 - DNA, 122 bp, Homo sapiens
caatgtatgttttatggctaaaggtgtggtctattttcataaatcttctatgtgctctcacgattatgatgtattcgtctgtcattgaatggagtgttccataagttacaattagatcaaat

SEQ ID NO: 424301 - DNA, 122 bp, Homo sapiens
acgtcccatgaccctgtgtctgtcactgtgcactcaggagcatggcagggccacaagcagcgccaccagcctgctcggcaggcgagccgtggatgcctccgccaggccctacccaggcgccc

SEQ ID NO: 424302 - DNA, 122 bp, Homo sapiens
tttgtggtttcattcaatctttattaaatgtaaaccaatcaaaacccagtagcgttttttcggactgtttaataaagccgggaaatactcacactttgttatggtcatgacttttgaaaaac

SEQ ID NO: 424303 - DNA, 122 bp, Homo sapiens
gtcctctccatcctgccatggcgtcctggcctgtgaggacatggggcgcctgggagcgggcggggaggctgggcagcactgggccagaggcgtcctggtcactgctccacctggtcactgct

SEQ ID NO: 424304 - DNA, 122 bp, Homo sapiens
actccctccccagtgcctctgtgcattaggtcgcgtgcctgtacgtaccctacctgagaccgcccctccgccaagtgcgcccctcgacaggtgcccgtcgcccacaggctcctttcattgta

SEQ ID NO: 424305 - DNA, 122 bp, Homo sapiens
cccagaacccatgttctattctgaacctctatatcctccttgagctctgacagatcaccacggggtcagaaggagggctagaagactcccgtagtgccatctctggtagtcctaatagatct

SEQ ID NO: 424306 - DNA, 122 bp, Homo sapiens
gcaattgcctttctctccctaccatgagatttatttctgatcctactcccttatgacttacgaagccccacataactattctttccttccctcgtgtgaagtttcccctttcatgacagact

SEQ ID NO: 424307 - DNA, 122 bp, Homo sapiens
cagccgccttctctcagcgctactcacttactgtactgccctcagcctgtaaacaaatatcgctccgccaggaaacatactccccagatgcaagcccctctccccagcagggaacctggccc

SEQ ID NO: 424308 - DNA, 122 bp, Homo sapiens
gatgatcccaggcagatgcggatcccagtgccgtgaagaggcgcttcccagatccgcagccgggctccactcagctctagaccaggactcccagtcttagtgcaaaatatatgcaggaaaga

SEQ ID NO: 424309 - DNA, 122 bp, Homo sapiens
cgtgctggctcaccgaccgcattgcggcttggttttctcacccagtgcatgtggcaggagcggtgagatcactgcctcacggcgatcctggactgacggtcacgactgcctaccctctaacc

SEQ ID NO: 424310 - DNA, 122 bp, Homo sapiens
cgtatttgttttttgtttctaaatctgctgattgaaaggaagcctgtttatgctttcttgcgaacaccatgttcatatgggaactggaccatgtttacattgggaccaccatgtccttacat

SEQ ID NO: 424311 - DNA, 122 bp, Homo sapiens
cagcccctgcgaggcagcctctgacatgcggatcggccagggctcgagtttataagtgcccggccctccctccctggacgttcgggaaaaggaaggaagtgcctggtgggaagggctgatgc

SEQ ID NO: 424312 - DNA, 122 bp, Homo sapiens
ccggggatgcccaagttgcacttgcagaaagtttgagcctggcctgcgcgcgcagcgccccgctcttccttgacgcacctcgcggagcgcgcgccggcacgcgggcagagggcgcggggtgg

SEQ ID NO: 424313 - DNA, 122 bp, Homo sapiens
acgctgactggtcctccagcgtgagctagaacagacgtctctatggtcaagtaaacagagcgtgtgctgtcttccccatgtggtggggttgcgcatgatcagtagctgcaccactagaaaga

SEQ ID NO: 424314 - DNA, 122 bp, Homo sapiens
acacacgtgagaatccctggcaaagggagcagaactgaaccggctttaccaaaccgccagcgaacttgacaattgtattgcgatggcgtgggctgcgtgacgtcacctccggtcgtgtctct

SEQ ID NO: 424315 - DNA, 122 bp, Homo sapiens
taccctcacctgcatttcacagaagcatgcagaggtatcaggatggtaatgggcacattacgtctgtgaattatcctaaatgtccactttggcaaatgaaaatattctctttaaagtaggga

SEQ ID NO: 424316 - DNA, 122 bp, Homo sapiens
tgatagaaaggagatataaggtctgtcaaacactgtcacttgttcaggcatgtctttagacgactggcaccatttggggatggttaaatgtggagagcggctctccactgtttctcagatcg

SEQ ID NO: 424317 - DNA, 122 bp, Homo sapiens
ctgtgcccccacaggcttcctggactcaccctgaaggggggctggattttctgcctgtcccgatgagagggctgcaggacagtccccagcgagcccttctgagggctgtaacctcttcccct

SEQ ID NO: 424318 - DNA, 122 bp, Homo sapiens
agcattcttctcccccaggctgtgagtttatgtgactaataaactgctgtcaaagtgatccgtccagggtcaagtgtcatgtgtttggccatctctaaaacccttggatgggactcaaggcc

SEQ ID NO: 424319 - DNA, 122 bp, Homo sapiens
tgaggcagcagagacccaacagctcctttccgcccaccccacccgtccatctgtgtgacacgggccctgtgtgagccgtgctccccagcgtgaggcttcgccacaacacactggctcttcct

SEQ ID NO: 424320 - DNA, 122 bp, Homo sapiens
accttcggctggttaattacctgttggggccttcacttatgtacctgaaaatagggatctcgttctcttagcattgtcatgaaaacctctataagtcagtggttcccaatctggctgcactt

SEQ ID NO: 424321 - DNA, 122 bp, Homo sapiens
cccacaggagcaccctgctcgctcggggacaatgcctggtgggaggtggtgtcaggacctcgcccaccactctgggctagaggatgtccccccggaggctgctggccaccaccggctccact

SEQ ID NO: 424322 - DNA, 122 bp, Homo sapiens
ccgcgagcggggaagggcgaggacactccctcctcggggacccggtccccgtcgcgcacacggtgtcaccagcacacctggcccagtacccaaagcaccctcgaagtgggtagtaactactt

SEQ ID NO: 424323 - DNA, 122 bp, Homo sapiens
cgtgtcgaaattgatggcccactcaggatgcctcatttattaccagagatgtgatagagacgcaggcaggcgtgaccgggagaggctgcaggcggccaggtggtcatggcctcctgccaccc

SEQ ID NO: 424324 - DNA, 122 bp, Homo sapiens
ctttctacagaaacctacaccctgtatgctttatcactcagggaataagttctgctggaacgtcctcgatgagctatgcatagcaaagttaagtcttgttcctcaaatagctcattctccag

SEQ ID NO: 424325 - DNA, 122 bp, Homo sapiens
aggcgatgtgggagcgggaattacagagcacacctccctgacacagaagttgtcaatatgcgcacagctggtggggaggctcaggcgaaggggggactattaagagctgcgcgggggagcag

SEQ ID NO: 424326 - DNA, 122 bp, Homo sapiens
acgcaggctttggtgacatgtgttagaaaagcatttaataactggttaatctgtgcagctcgcgacccacactcacctccaggcatcacgaggccgacatcctgcacggtgagcacggacag

SEQ ID NO: 424327 - DNA, 122 bp, Homo sapiens
gttgccatggtgatcactatacacagggctctgttacctcagagggctgataggcccacccgtagggaaaagaggccaggagaaagccaggattgaggccaggaaaaggcaggaggggcttc

SEQ ID NO: 424328 - DNA, 122 bp, Homo sapiens
tcacagtcttccttccggataaggggctaccaccagctaagcacatccctccaaaagccacgtcatatctcacaggcatttcacaggtgacgtgaggcacgcgcagacacgtccctagcatt

SEQ ID NO: 424329 - DNA, 122 bp, Homo sapiens
gctccgggacccccacttggggtcctgcgcccccctccccgcccccagccgcggccgccgcgcctcgggaaccaggttcggccgcttggccccgcccctgccgtgcccattggccgccgctg

SEQ ID NO: 424330 - DNA, 122 bp, Homo sapiens
gattttcaaatgcctgttagtccttcctttgttaaaacaagaataatatatgaagtggctcgtgttggtcgtttaatttgcattacctcactactacgccatttgctattcaaaatgacatt

SEQ ID NO: 424331 - DNA, 122 bp, Homo sapiens
gcccatcatccttacggccccaaatgtccacacgaataaccccgaacacacctgtgtggccggaaaggcacaacggatttttgccttgagggaaatgtctgagtatgttatgggaacatgaa

SEQ ID NO: 424332 - DNA, 122 bp, Homo sapiens
atttttcctttagggaaatcatggggtctcgtacctggacctcccagcgagatgctaccacgttcagtcccctaactgcgcgccaacctctggagataccggctgtccccaaccgcgctgag

SEQ ID NO: 424333 - DNA, 122 bp, Homo sapiens
atgagccactgcactcagccagatccagtccttttactaatttacttctctacacccttgcgtgccttttagaattctatccaactggtcagtttcttcttatcagagccttattccttctt

SEQ ID NO: 424334 - DNA, 122 bp, Homo sapiens
cccaccccacacctgcacccccaccccccaacacccatacccccatccaggcaggatccccggttccgcccccgctttcaaccaaggaaagccccagctgcccggatgtgatgccactgact

SEQ ID NO: 424335 - DNA, 122 bp, Homo sapiens
ggaggtccggacaggcctgtgcttccgggacacacatcacacacacccctggggcagctccgagagggggctgtgcctatccctgcatcccaggtctgacggcacagaacggtggacaacgg

SEQ ID NO: 424336 - DNA, 122 bp, Homo sapiens
acagtaccaactaggcccaagttcagaatgggattttgtaaaaaaggccatattctctggcgaacgtaagttgaaagagttctaactttgaaccatgttgaagctcattggtggaaggttga

SEQ ID NO: 424337 - DNA, 122 bp, Homo sapiens
tgctcatatcgtgggtcaggatgtctacagtagtgatgtttgcaggaatctgaattttgtcgaaatttatatagaatgcttaggttcactccaagttaaaatgtgtgacgtgcctgttctgc

SEQ ID NO: 424338 - DNA, 122 bp, Homo sapiens
ccctcccgggctcccttcgccgtccccgcccgcacaggcgggcaagcagccggagagaagcggcctagcctgccccccgcccccgagccacccaccccggccagaggcgccgccaccgccca

SEQ ID NO: 424339 - DNA, 122 bp, Homo sapiens
ctgttgtgcctgcattcttcaaggcaaaagttttacatctggacccgcctgttctggctgcgtgtgacaaactttctgtagactccaacacgctttggggagaggtggcctagttgagggcc

SEQ ID NO: 424340 - DNA, 122 bp, Homo sapiens
ggacatattcccacctggtctcagattatctcatgtattttcctgtatacctcaagttctcgtctcagtaaaatccttgagatacgtagcaagcaattggattacactccaagagacttgga

SEQ ID NO: 424341 - DNA, 122 bp, Homo sapiens
cagtcagctgacaagctgggcacaggggagcggctggatggggaggcggggcggcgcactcgtgggccagaggccgagctcgtggtcatgcggcggctgcacctgtccgagcgccgagactc

SEQ ID NO: 424342 - DNA, 122 bp, Homo sapiens
caagtctgttgtcatgggaaccaaaccttccaacttaagaatctgggggcgactttctagcgtgggaggaagggtggtgtgcacggttgctgagatggaagcagggttttgttactcagagc

SEQ ID NO: 424343 - DNA, 122 bp, Homo sapiens
ttagtaaagtgtgccaagtgctcacactgagaccagtccagttcaaattagtgtactccacgagggtgttttctgtgcccagcaaggtcatgaagggccttgacttttcttggttaggccgg

SEQ ID NO: 424344 - DNA, 122 bp, Homo sapiens
ctctttactgactagacatggctggtcttctcttctatttcaaaccctctactctcttggcgaattatcccattttgagtgataaaaccatctacttgaaatgattttttgtagggacatag

SEQ ID NO: 424345 - DNA, 122 bp, Homo sapiens
ccagtgagtcggtgaagagcctgaccgagctggtccagcagccctgtccccccatcgaggcgagcaaggacagcaagccaccagagcccagtgacccgccagcatccgactcccagcccaca

SEQ ID NO: 424346 - DNA, 122 bp, Homo sapiens
ctcaccccaccccaccccaccctgcttttttcaggttcatcaaggtttgcgcagtggatccgcggtaagtgcgtgtccccacgccgcgggaaacgtggggctcctgagactgcggaaagaat

SEQ ID NO: 424347 - DNA, 122 bp, Homo sapiens
ccaggaggggagccaccgctgtgatgaacgcttgcaggagccatgaggggcggctttccgcgcagtgtttgcagtgatttatgggagtcaggggctgccagagagggatgtggatgttagca

SEQ ID NO: 424348 - DNA, 122 bp, Homo sapiens
gctagcacactttaggcttcacggacataaggaatgagtgcccagcactagagccacacccgatacttaactggtattgaacaagcatttgtaaaactaaactgaaaacaaataacagaact

SEQ ID NO: 424349 - DNA, 122 bp, Homo sapiens
agggggcactgcaggccccggggagattggggcggagcgctgcgaggggccaggagctgtcgccccgctccagagcgcggggggcgctgtgcggggcccaggctgcggctccgctcccggcc

SEQ ID NO: 424350 - DNA, 122 bp, Homo sapiens
atcacgttaaaacggtgtaaggcacattacatcataggttaaaaggcctagaaaactccgcgctccccttgccagaactgcagactcgcgagcctaagtctccgagaactcagggattgtga

SEQ ID NO: 424351 - DNA, 122 bp, Homo sapiens
tctccaccctactttcatctccctccaggcaaagagagtaaagctgaggctatcccgggacgcctcgctccaaccctgccgatttccttccagttgctcgctggggcaaccggctaggctgg

SEQ ID NO: 424352 - DNA, 122 bp, Homo sapiens
aaaaaacaatgccaacagcccagcgtccgtgagcaacccaacagtaacaaagcatgcgttcgggatggaggaaggtaaggccacacgtttccatttgccgcttgctcgtagggctgggcggc

SEQ ID NO: 424353 - DNA, 122 bp, Homo sapiens
ttgagtttctttattatctgcccccttctccccaagctggtcttgtacaaacatgatgcacgtccattgggtgacaagtctgtcgtaagtgaaacgtttacaggcactacaggaatgacctg

SEQ ID NO: 424354 - DNA, 122 bp, Homo sapiens
gtgactccccacggagtcaccatccagcagccgctcaagtgcagtcagtcccacttcacacgtgtaacccatttaccaacctcactgtgcagctgcatcaccgttcaccacctcagctgccc

SEQ ID NO: 424355 - DNA, 122 bp, Homo sapiens
gctagccgcaattcaatacctttctttctaattaatgcacaacaaaagagggttaaaaagcgatcagcactgactggtgtctaccgatgctggcactgagttggtaagggattcattccaga

SEQ ID NO: 424356 - DNA, 122 bp, Homo sapiens
gtatacctgagatcaagaaacagaacactgccagaaccacagaatcccctgctgtgtgttcggctctccttacacaacttctcatcttccctagagctaaccattattctgatttctgaaaa

SEQ ID NO: 424357 - DNA, 122 bp, Homo sapiens
cctgttggggcagccagggtgagggtgatggtgggggtcttgggtgaaggccaagttggtcgccactccacgatgatggtaactgccaggccccactgcttcactatcctctggggccagag

SEQ ID NO: 424358 - DNA, 122 bp, Homo sapiens
cagagcaagagacaggatcttgctctgtcacccaggctggtgtacagtggcatgggaaggcgtgagcctgagaaggtgtgagccacctcacctggactttcttatacattaattaattttgt

SEQ ID NO: 424359 - DNA, 122 bp, Homo sapiens
agctctcccactgcccagcctgtggtgtcaaatgttctgcctcttcgaacgtgcttggatcgatgatgagtcccccataaaaacattccttggaaaagctgaacaaaatgagtgagaactca

SEQ ID NO: 424360 - DNA, 122 bp, Homo sapiens
gctattattataatctctgttactgatgagaaaatcgaataataaaaatttgcccaacttcgcatagctaacaagaggtggatctaggatttaaagcaagccagtctggctctcaaattact

SEQ ID NO: 424361 - DNA, 122 bp, Homo sapiens
cttaaataagcccctcaccttgctgcctcaggaccttcaagattccatctgtgggctggccggcaagatggcaccagtggggacccacaccctggctgggcagaggtgctgctagcaacctc

SEQ ID NO: 424362 - DNA, 122 bp, Homo sapiens
ccagagacccagcgcacacctaaagtagaccatgcttctttccttccactgccaggttatcgtcccgggaagccccccaccccctcgctttcctcctccgctttccctaacccgtctcgcgg

SEQ ID NO: 424363 - DNA, 122 bp, Homo sapiens
aaagttaaacaaacacaccctggcctgggcggccggcccatctcggcgcctccatctcggcgcctccgcacaggcatgatcagagtcggcacagacaaggaggcggcctggggcgcgattcc

SEQ ID NO: 424364 - DNA, 122 bp, Homo sapiens
cacctcacagccagctcggacctggcgcggtgtgaggtgccttccgagggcaggccgggacggtgtccctagcattcccacgggaactggctttgtctggggccccaggcctcacctggctg

SEQ ID NO: 424365 - DNA, 122 bp, Homo sapiens
ccacactacctgtggtggtgatgaaggcgtaggacttggaggtctgccccgcccgcaccccgtggacctccacgtggtaggtggtgccgggcctgaggtcgggcaggctgacggtgcgcgtg

SEQ ID NO: 424366 - DNA, 122 bp, Homo sapiens
cctgtcccaagccctttccagactatgtgaaattcttttttgccagttgtttccaagacacgtgaaagcaatcaagctcccctgggttggcgcagaacttgagcacttaagagctggaagag

SEQ ID NO: 424367 - DNA, 122 bp, Homo sapiens
gatgacgggctctcgccccagggctccgtctgcctggtaataaatactttccttttgtcacgattcaagggagagccagagcgataggcgaaccctatcaagtattccgaggtggagtcaag

SEQ ID NO: 424368 - DNA, 122 bp, Homo sapiens
cccctgccccagacccgcactgggagatggcagctggaggggcccccgcagcaggcctgccgtctctccgcagggggaaaggcgaggcccgggccaggctgaagcggtcgcagagcttcggc

SEQ ID NO: 424369 - DNA, 122 bp, Homo sapiens
gggctgagatgggggaggcccttggaagggcccagaggaaccccagggcctcacagaggacgtgctgtgtacggtgcctcctccctgcggcctgccccgcctgtgcttggagctgcatcggg

SEQ ID NO: 424370 - DNA, 122 bp, Homo sapiens
taggcctctcagatgaccagggccagggtcagagtgaggccccgagtccggagccgtggacggggccctaggcgacaccagggcgccctgactgcggcctcccactccgagacgcgagtttg

SEQ ID NO: 424371 - DNA, 122 bp, Homo sapiens
cccggctgagccgctagcgggtcactcgggcggctccgacgtctctatcagccgcgcccgcgccgcccgcctccccgcgctgctgcccggctctcgggctctcgcttttttttttttttttt

SEQ ID NO: 424372 - DNA, 122 bp, Homo sapiens
gcaagcctggtgtgtgtgtgcgcgcgcgcggctgcaagcgcatgcatacgccagccgggccgcctgtttgtcaacgtgtgtgtgtgtatgtgtgtatgtgtgtatgtgtgtgtgtgtgtgta

SEQ ID NO: 424373 - DNA, 122 bp, Homo sapiens
gacacggtgaggcccagcctggctggggccacgggtgtttggggccgggtgtcgcggccgcgcccgtgcacgagcagtccctggggtctgtagtggcctctggagagcccttctccccaggc

SEQ ID NO: 424374 - DNA, 122 bp, Homo sapiens
gaaggaccggtgtctaggtcaccctggagcgctcaccccaccggcacccgtgcccaagcccgcccctgcaaaggcaggtactcgagcacactccggagagggcggcctctgagccccgaacc

SEQ ID NO: 424375 - DNA, 122 bp, Homo sapiens
aattagcaagtgaaagcagccggttagcaggggaatgccaggttggcctagagccaaccccgaggacgaagaaagaaaggggctttgggagaaaggggtccgtggaggctgggcaggaatgc

SEQ ID NO: 424376 - DNA, 122 bp, Homo sapiens
ggtccccgggtggggaacgagctgtgcgaggtgaagcacgtgctggatctgtgccgcatccgggagtcggtgagtgaagagctcctgcagctggaggccaagcgccaagagctgaacagcga

SEQ ID NO: 424377 - DNA, 122 bp, Homo sapiens
ggacaaccccagagcaataggagcggctccagggagaggccatgctttccaggtcttctccggcactccccacaaagccagcgactccaattatgactcctgagctgagaggcctgccaagg

SEQ ID NO: 424378 - DNA, 122 bp, Homo sapiens
gaactcctgacctcaggtgatccgcctgccttaggcctcccaaagtgctgggattacaggcgtgagccacagcggctggtgctttcaactatttatttgacatggcttcaagcttccttgcc

SEQ ID NO: 424379 - DNA, 122 bp, Homo sapiens
aatcggttttcatagcacattcattctattaaagaggactgtttggggctcgctaattgccgggggatcccactgagctgcacatttttaaaaaatgcacgcgggattcctgggccgaggtc

SEQ ID NO: 424380 - DNA, 122 bp, Homo sapiens
gccacgcggggccggggctgctgggtcccgaggcccgcaccgggcgcgggagccgccgcgcgatcggttcgctccaggatctgtggcgtctcctttcaacagccccatttcccagatgagaa

SEQ ID NO: 424381 - DNA, 122 bp, Homo sapiens
gggcaaggaccccgccactgagcttgctattggctaagagagcagggttggccttgcgttcgcctgagcaagggagtagacagcacagcggcagcggagggagtctatgcgagctggacagc

SEQ ID NO: 424382 - DNA, 122 bp, Homo sapiens
ctcccagctgacatgtggtggcacgtgctctggggttcccggggtgctgtagggagccggcgcgcagctctctcgtccaggacacacgagcaggagtgacctgcgtccagaaggtccatcac

SEQ ID NO: 424383 - DNA, 122 bp, Homo sapiens
atattggcatacatcatgtgagtggaaaaaaaaagttgatggtggtgatgacaatacgatcgaaactgcttttgctccgtggaaagccctttgagatggggacctggctgtgcagtttgcgg

SEQ ID NO: 424384 - DNA, 122 bp, Homo sapiens
ctcatttctcgccttcattttcctgggtggctcgttattttactgagagtacttaggggtcgttggtcgtggtgctgcttgcaggctggtgtgtttcagtgtttcctggcctctcccctgag

SEQ ID NO: 424385 - DNA, 122 bp, Homo sapiens
tttcctttgagactcttctctctttaaagaacaataataaaaaatatctcaggcaaaaaccgtagcaaaaaagtacaaaagtccctttctttaaccaatgtacaagaaattactcactaata

SEQ ID NO: 424386 - DNA, 122 bp, Homo sapiens
gagaaagtgagctagagagatgccaggctcttttaaacaaccagcccagctctcacgtgacgtaatagaacaagaactcactaattaccaacgggaaggcaccaaaccattgaggagggatt

SEQ ID NO: 424387 - DNA, 122 bp, Homo sapiens
ggccccgtacatgaatgagaaggaaggtattccttaattctccggcacgaacgccaacagcgttgctttcttcggtgtcacagttcttaggcaaacagcagtgaatatttacgcaatgtggg

SEQ ID NO: 424388 - DNA, 122 bp, Homo sapiens
ggaggtgggtttggctgggcacagcgggcacgtgtgggtaagcgggtggggccggttgtgcgggtggcctatctggggcaagcagccgaggccgactgtgtccggcgtgtggttgagcacgg

SEQ ID NO: 424389 - DNA, 122 bp, Homo sapiens
gagatttgaggggtcagggggataatgacatagttgggctgtcccctccaaatctcttgtcgaaatgtaatccccagtgttgaaggaggggcctgcaaggaggtgtttaggtcatgggggcg

SEQ ID NO: 424390 - DNA, 122 bp, Homo sapiens
aaggttaactgagcaaggtcacagagcgaacgcatcacaaagtcaggatgtggtgcagatcggtccattttcaatacaagctctttctaccacgacaggttattttgcacttggggacagtt

SEQ ID NO: 424391 - DNA, 122 bp, Homo sapiens
tagcctcctgcctgggcttggccaggggcccctgtgtggccgcgccatgtggctcctggccgtgacaaggtttggtctgtcgatacccgtcagggccgggcgcccacagagcgcagggacct

SEQ ID NO: 424392 - DNA, 122 bp, Homo sapiens
ttctatagctatggaaatataccctgcttcactcttgtacatacttctttactctcctcccgccaagttcattgaaagagaacccatgtgccggtccagagcatcgctgcatccgtaagcag

SEQ ID NO: 424393 - DNA, 122 bp, Homo sapiens
ggcctgggcaacagatcgagattctgtctccaacaaaaaagaaaaaaaaaaaaaagaaagcgactaatatcctatgactgaacccaaacataaggaggagttattctttttttttgtctatg

SEQ ID NO: 424394 - DNA, 122 bp, Homo sapiens
caattgagtagagcaaactttcattcagaatttgttcctctatgtgatgtcaagtcagcccggatggcagaagttattgcagtcaacagagctcatcaataagccaaagacaaggattaaac

SEQ ID NO: 424395 - DNA, 122 bp, Homo sapiens
tccctcattattttggaataaatcacatattttatatcatttcatcatcactaaattgttcggcatgtatctctaaaagataaagacatatttttccttctaaacatgaccacaataccatc

SEQ ID NO: 424396 - DNA, 122 bp, Homo sapiens
gcagtgctgccatggacctgggacccatgcgcaagagttaccgcggggaccgagaggtgccgccgctagggccaggcctcctgcaggggcgggggaaaaggggtccccggagtcatctacag

SEQ ID NO: 424397 - DNA, 122 bp, Homo sapiens
tattttgcagctcaccaccatcttcaaaatagttttcttttagattcagttaaggttttccgttggtattcatgttcataacaactccagaattctccaagaacaatctgcaatgtgcttaa

SEQ ID NO: 424398 - DNA, 122 bp, Homo sapiens
catcttaggaaattcgcactccagccgccttaaggcctggcccggtgggtttaggaaattcgcactccagccgccctaaggcccggcccggtgggttgagaagatttaggaggcttaggcct

SEQ ID NO: 424399 - DNA, 122 bp, Homo sapiens
ccttatgtttaaattcacagatacaggcagaaaccctcaagccagctgagcaaggctttacggaggcaagggagttagccataagactatctgtggttgagcattccaggcaggcagcagca

SEQ ID NO: 424400 - DNA, 122 bp, Homo sapiens
cgtgggcggtggacgctggaatgccttgggttccgagggacccagctgcctgaatggacacgagtaggaggtttttgctgggcgtctttgcggtggcgggaagcggtgagggagggaaagaa

SEQ ID NO: 424401 - DNA, 122 bp, Homo sapiens
ggaaggtctgctggacgtgttctgtatgcgggtgacgccgtgcccggatagtgaggctgccgtcctcccgcagagccgaggtcaccgacgtcgggtccacgtcctccggcagctggcacttg

SEQ ID NO: 424402 - DNA, 122 bp, Homo sapiens
gtcgagaagccctagtttctcaaacccttagcaccaaatttttccctcagttacactgagcgtttcacttctgcagtgatggagaagggagatcccttatttcttctcatgagcatctctgg

SEQ ID NO: 424403 - DNA, 122 bp, Homo sapiens
tatctccccaaaccgggacagtcaagaaccacagaggaccgaagtgcacagtggacggagcggtcgttctgcccctccttggctcgtggaaaccacccgccctcacctgggcggtctcctgc

SEQ ID NO: 424404 - DNA, 122 bp, Homo sapiens
gggcggagaccgggaggcttctcctcaggccgcacctggccgagtcgactgatccgctggcgaaccaagtagatgttgggcgccatactgcgtgcgccgcgcccccttccctgcggttcagc

SEQ ID NO: 424405 - DNA, 122 bp, Homo sapiens
cgggactgggcggtagtggaggcaggtccttggactgcaggctgaggctttttccccccacgagcggtttgggccctccaggagcccctgcgcgggggtcacgtggattacgctaggtgaga

SEQ ID NO: 424406 - DNA, 122 bp, Homo sapiens
tggccggggcgacccgggctgctttttcagcaggccccacaatgaggatcggctgaaactcgctttcatttctgggccggggacaggcagacactgagtcctttcagccgggaaatcctcag

SEQ ID NO: 424407 - DNA, 122 bp, Homo sapiens
caccatcccccttttgcagacgagaaaacagaggcttagaaaagttggttaacaagagctcgtcacactgctgtattagaatccatccagcctctgattcggaagcccttgcatttaaccac

SEQ ID NO: 424408 - DNA, 122 bp, Homo sapiens
ctctgatagcagcttcattttagcccagggagacccattttggacttgtgacctccgggacggtaagtcaataaacctacattatgtgaagccactaagcttgtggtgatttgttatggcag

SEQ ID NO: 424409 - DNA, 122 bp, Homo sapiens
caaagagcctatggtcaggatgacagttgggggtaaagacattgattttcttatagataccggtgctgaacattcggtagtaaccggcccagtcgcccccttatccaaaaagactattgaca

SEQ ID NO: 424410 - DNA, 122 bp, Homo sapiens
atttacacctaatcctcgcaaaacactactgggaagatcctcatttgacaggagcaattccgggtcacaaaggctgacaccacaaagctagtccgtagcgggttcgaccacaggcgcccaca

SEQ ID NO: 424411 - DNA, 122 bp, Homo sapiens
cgcggaggccgggtacacctgcgcgtggagcgcggaggccgggtacatctgcgcgtggcacgcggaggccgggtacacctgcgctcatcgcacaccagcgcccacgcccaggacgtactcgc

SEQ ID NO: 424412 - DNA, 122 bp, Homo sapiens
gcatggctggggaggcctggggaaactcacagtcacggcagaaggccaagggggagcacgcgcgtcacgtggctggagcaggaggaagagagcaaagataagggaggaggtgctacacactt

SEQ ID NO: 424413 - DNA, 122 bp, Homo sapiens
acgaatacgggaccgtgtggcattttacttcagtagagtaagttctcgtaccatgtcatgcgtactttcctagagcgtttccactgaccacatgtgaaggcccaaattcatgctgcatctac

SEQ ID NO: 424414 - DNA, 122 bp, Homo sapiens
cggcgcccggccgcaccccctcccagcccgcggcgccccggcacccctctccctccccggcgggctccgcggagcattgtactcacatccggggctgggttttgctttaatgcgaaacgtaa

SEQ ID NO: 424415 - DNA, 122 bp, Homo sapiens
cgcctgcgggattggagtgccccttgcggctgtgggaggggcagtcgggggctggggggacgcaggtacgcctgtcgccaggacgcctctaccctggacggtaggaggttgccgtgggaacg

SEQ ID NO: 424416 - DNA, 122 bp, Homo sapiens
gccagacactccaaggctgcggccccgatgacacagccaggcctcacggaaggtgggcaacggagtccgtagggggaggcgacacgggacccccactcccgcgctgcgggacgcgccgccct

SEQ ID NO: 424417 - DNA, 122 bp, Homo sapiens
tcacggcgaaatgagactgttcgtgagtgatggcgtcccgggttgcttgccggtgctggccgccgccgggagagcccggggcagagcagaggtgctcatcagcactgtaggcccggaaggta

SEQ ID NO: 424418 - DNA, 122 bp, Homo sapiens
tgttcactggtaatctttggtgttgtttggcttatagatgcatcactccaatctctctgccgccatcgtcatatgttgtgtgtgtgtgtgtgtgtgtgtgtgtgtgtgtgtgcacctgtaac

SEQ ID NO: 424419 - DNA, 122 bp, Homo sapiens
tcatttcaggcacaacttttttatttttttttgttttgtttttaaatcagtaaaagaaaccgggtcctagaagctgcagtgatctaagcagcagcaagtttgtgcattcattttttttgttt

SEQ ID NO: 424420 - DNA, 122 bp, Homo sapiens
cgggctggtgtgtgtctcagtgagcgaggctgggggaacgcgcctgggctggctcctccccgaacttgcatcaccagtgccccctctctccacccgccttcggccccgccttggcccctcct

SEQ ID NO: 424421 - DNA, 122 bp, Homo sapiens
aattccaggccttggctcctggatgccatttctagaccagccctgggccagaagggagctcgctaccctaaaaggagagacccaggccttgcaggattcaccacaagatgactaaagagccc

SEQ ID NO: 424422 - DNA, 122 bp, Homo sapiens
cagagcacccagctcccgggtctggtgcttaggctgcctaggagggtctcccaaggaggccgggcactcaggcacagtctaagacttttgtaattccagggcagggtgggccgggtatctat

SEQ ID NO: 424423 - DNA, 122 bp, Homo sapiens
gatccgcccactacccccaggacttgtctcaccttcctctgatggccatggtactgaaagcgtctgctctcatcgtccccctttatagtctaaacatgttttctgtctgcttccaccgtcac

SEQ ID NO: 424424 - DNA, 122 bp, Homo sapiens
gagggtaggcatcaaccctggcatttatcctaaggtgatgcagcacacacttgtattcagcgatagagacttttccgtaatgcctggtaatatctcattgtattttcttttgatgctcctgg

SEQ ID NO: 424425 - DNA, 122 bp, Homo sapiens
ccccctcctcctcagaagactcaactgcccttcctccctgcctcccagctacccaggttccgggtcccacatcattcctcactgtgattcagtgcagcccccaatgggagcaacgtgcccac

SEQ ID NO: 424426 - DNA, 122 bp, Homo sapiens
agcaatccctaaaactgagaggatgggctgagagtgctgacactggagaagctcctctcccgggccaaacacaagcacataacagcgcccctgcgcgcccctgggaggggagtcaaccggag

SEQ ID NO: 424427 - DNA, 122 bp, Homo sapiens
atacttaagggtgtatgaccactgcttgaaccttaatggctaagtagtgagtcaaggacacggtgcccagccaagaagcaggtatccttgatggccaagtggtgagtcaacgccatggtgtc

SEQ ID NO: 424428 - DNA, 122 bp, Homo sapiens
gaaaaacaggacaccagagcccaccagacagtgccggccagcagagaagcagagagccagcgccacacaacatcaagaaggccgacaaccaggttggaaaccaagacggagctcagacccac

SEQ ID NO: 424429 - DNA, 122 bp, Homo sapiens
cgaccaagaggcttgggagtctgtacctttcccgaccgggccactggaagttggagcctccgccgagtcgcagacaacgcctccgggagggtaatcctcgccttcccccgaccactggaccc

SEQ ID NO: 424430 - DNA, 122 bp, Homo sapiens
accgttttcctccactttcagcctcagtgcaaaccctctgcccaaagcctcgctccagtacggaggagctgcgccttcaacacactttctctgttgccaggtaaccacttctccctcagcct

SEQ ID NO: 424431 - DNA, 122 bp, Homo sapiens
gtactgtttagtgctgcacagcaggaggtgagcggctggcaagcagtactgcctgagttccgcctcccgtgagatcagcagtggcattagattctcataggagtgcgaacttccttgcaaac

SEQ ID NO: 424432 - DNA, 122 bp, Homo sapiens
actgaattctggggtccttcttgatttcttgttctcttccttagctggaaattatgggagcgaacaggatgaaccaataaccactgtcaggatgccaaaggcccaggtgagggtacccagtt

SEQ ID NO: 424433 - DNA, 122 bp, Homo sapiens
gtgttgctcctgccctgccggcatctgtgcctgtgccaggcctgcactgaaatcctgatgcgccaccccgtctaccaccgcaattgcccgctctgccgccggggcatcctgcagaccctcaa

SEQ ID NO: 424434 - DNA, 122 bp, Homo sapiens
cacctcgttccgtagcgggtccatcttgtacactgactggagctggttccgaagcctcatcgcgatcgcaatctggcccccctgaggagacgccatcttaaaggctgatcccagccggccac

SEQ ID NO: 424435 - DNA, 122 bp, Homo sapiens
ccaaaggagtcctttagatctgacccctaccctcttcgcagctagactgacatcaggtgacgttgcaagtgcccccagcccactaagcgctatcagtaggaattggccctcagccccgtcac

SEQ ID NO: 424436 - DNA, 122 bp, Homo sapiens
tatagggaagctgtagagccaggaaaccatgtggaggcccatcttcaaatcagggctagacggggtaagaggaggctggtgctagatcacggggagggctgccagtctctggtgtcagccct

SEQ ID NO: 424437 - DNA, 122 bp, Homo sapiens
agaatggcttgtttctcccagtaatgatctctgcagttgttcccttttaatctggagtcacgtgcagcctctgatcaggtttcctctggcctccctcctgccacgcctgcagcatacctctc

SEQ ID NO: 424438 - DNA, 122 bp, Homo sapiens
aacatcacaggtggggtgtacaccccctgtgatattgggagtaatatcatcctctcccaacgtggatattgggaacaatatcacaggggcctgtacacttcctcgatattggtagtaatacc

SEQ ID NO: 424439 - DNA, 122 bp, Homo sapiens
aaaaataaatttatttacatatgttatttcctgtggtagtgcagcctcggggcaagggcgcgttccctatcgcaggatcacttgctatggtaagccgcccaccctgcgcgctcctccgcgcg

SEQ ID NO: 424440 - DNA, 122 bp, Homo sapiens
tgagtcagccaacttgaaggaagccatgccaggccctgcgcttgtttatgctttgactaacgggacttacggtatgatgctgaatgtatctgactctgagcgttttagtaatgaccactgaa

SEQ ID NO: 424441 - DNA, 122 bp, Homo sapiens
cctcctgcctcggcctcacaagtagctgggacttcaggcatgtgccaccaagccgggtatcgttattcttaatagaaaagcaagagtccccctatttgaagcactcctccctctgcatcctc

SEQ ID NO: 424442 - DNA, 122 bp, Homo sapiens
gctacttgggaggctgaggcaggagaatcgcctgaacctgggaggcagaggagctgatatcgtgcctcaaaaaaagaaagatttgaaggggaagagattagaggtaaagaaattaggttagg

SEQ ID NO: 424443 - DNA, 122 bp, Homo sapiens
tcgcaccctcgcccgcgctcctgggagccggcccggctctcactctctcggcgagccggacgcttcggttcaggctctttcagcgctcatggcgcatcctccgccagaaatacgcacgcagc

SEQ ID NO: 424444 - DNA, 122 bp, Homo sapiens
agctgatccagagcaaaccactttgggagccaagctgaagagcagccctcagcctaacctcgtggagcaggctgctgctgcttgcctcttgaactgtaatcccagcactgggatttgaccat

SEQ ID NO: 424445 - DNA, 122 bp, Homo sapiens
aagcaccatgcaataatgagttccaacctgagttctcctgctctgctaaggggtcctgcgcgctgggtagaggccagggagacagtgttgatccacagacctgggaggaagaagtcaccagg

SEQ ID NO: 424446 - DNA, 122 bp, Homo sapiens
tgagcactgacatccctttggcctgtccgagagccagagggctcattacgcacaaagaggcgtatatgtctgcacggggcatgattgatagcagttcttagaactctaaacagggtggagct

SEQ ID NO: 424447 - DNA, 122 bp, Homo sapiens
ctaggcagggccgggggacaacagcttctgcgagtctgcgattgtggcggccggtatattcggcggtttacggtaatgggcgggccccaaatccccatgtggtcccgacatcattgacatgg

SEQ ID NO: 424448 - DNA, 122 bp, Homo sapiens
cactctcctcctgccccaatctccagccggagtcagggtctcctgtatgtgcacccactgcgtggtggaggtagggcagagctagtgaccgcccacctggcgctccctgggcgtctgagtgc

SEQ ID NO: 424449 - DNA, 122 bp, Homo sapiens
aggctcttgcatgggctagtaacagcagagagaggagccacagctgagaagggacctgaccgtgaaactgaagagagaaggaaagaacagtaaagccaggcaggcaatagagagatggaagg

SEQ ID NO: 424450 - DNA, 122 bp, Homo sapiens
aattaatgtctggttgaggactgttatcatggcagttgggatcccagcagtagtggagatcggtggctgtttccatagtagcctcatatcactgccaaatctcatctgatctgagaggaaaa

SEQ ID NO: 424451 - DNA, 122 bp, Homo sapiens
agtttggtagtgagttcaatcacagcggtgttcaaccaatttccagaattctgttcatctcgcaaaactgaaactgtatactcattaagtaactcccgttttcccctccctttatcgcctgg

SEQ ID NO: 424452 - DNA, 122 bp, Homo sapiens
cagtttcaaaggtcttttaatgacaaggatgtatttggcgacatgaaagaaaaaaatgtccggagtttacctctgtggctaggctcagaatgagtcaggcttccaccttccagcctcggcca

SEQ ID NO: 424453 - DNA, 122 bp, Homo sapiens
aggttgcagtgagccgagaccttgccattgtacctcagcctgggtgacagagtgagactacgtctcaaaaaaaaagaaaaagaaaagaaaaaggaaaaaaaagaaaaacacccatccctctt

SEQ ID NO: 424454 - DNA, 122 bp, Homo sapiens
gcggctgtgacttccctgtcatgctgcttcctaagaatccagaacagattcaggtcagtgcgtttcgaggcagctaagtacaacggcagcgtctgtccttaaacttgagtgcagagccaggg

SEQ ID NO: 424455 - DNA, 122 bp, Homo sapiens
aatgctgctgatcatgataaaggatattatccccagccttctccataagcaaagataaatcgtaacatgtaccatatacaaaaactgtccaaaacccagtatatgcacactgaggatgtgtg

SEQ ID NO: 424456 - DNA, 122 bp, Homo sapiens
cagaggatgaccacgaggcttgatgtgtggccagaccctcttgggactcctcggcgcggccggtgcaagcccgccctggtgtccagcagcccccacgccctgcacagggagctcagggcttc

SEQ ID NO: 424457 - DNA, 122 bp, Homo sapiens
cacagagaagaagacggagcagcagcggcggcgggagaaggctgtgcacaggctggtgagcgcctgggccagcggggcctgcctctgatgcctcgcccccttccttccttcctcccaccatg

SEQ ID NO: 424458 - DNA, 122 bp, Homo sapiens
tcagcctcggtcagcagcaccctcaggcgcagggcactgtttgggcattgcctagagatccgacaccccgcccagatcagcgcagggaggcgaaagcgacagccgggcgcgggaggagacca

SEQ ID NO: 424459 - DNA, 122 bp, Homo sapiens
acaaggcgcaggggtcgtgaccctgcctccaccctgtgtaaagtcacagctgcaggatctcggggcaggacgcacactccccaggcagcgccctgtggcctccctggagaagcttggtgctc

SEQ ID NO: 424460 - DNA, 122 bp, Homo sapiens
cagtggtcgtcccgtcttcagcacccagtgcaggcacaaggtgataacacagcccaaggccgcgggccccgctcaccccgatgccgtagtcccagccgtggcccttgggctcgtgaggctgc

SEQ ID NO: 424461 - DNA, 122 bp, Homo sapiens
cgtcctgggaagtatcagcctttaccagctaccggaagtaactgcgcacgaaatctcccgcgggagctaagcctcttcgacaagaattctatagcgcgagcaaatcagtatctcgcgagaaa

SEQ ID NO: 424462 - DNA, 122 bp, Homo sapiens
cggcccggcccgccccgccccgccccgccccagcccggccgcccgccagcccgcccgccccggcctcgaactcgaactcccgcgtcctagttctaactcaccagaaaaaaacctctgcactt

SEQ ID NO: 424463 - DNA, 122 bp, Homo sapiens
gggagggtccccttgacttgctcccttccgtggggagacggtcaggctttccccaggaagcgtgctgtaggtttccatagattcgagacggtcaggctttccccaggaagcgtgctgtaggt

SEQ ID NO: 424464 - DNA, 122 bp, Homo sapiens
tggacgagctcaccttctcgccttccccgggcccctcgcccgtcaatcacactgcttgctcgccacctgacctctgctgcgccccctttcagtggtgtaacacctggcgctctttcgcgccc

SEQ ID NO: 424465 - DNA, 122 bp, Homo sapiens
ttgcggagattctgacatttttctgggtcatttgcagagagattaacattttgagctgcacggcgtgaacatttgtagctgaggtgcaaaagaaccatgctctgttatcttgtttcagctca

SEQ ID NO: 424466 - DNA, 122 bp, Homo sapiens
gtggcccttgccccagatgcatatagcacgggttccagcagtgcttctagtacccttaagcgaactaaaaaaccgaggccgccttccttaaaaaagaaacagaccaccaagaaacccacaga

SEQ ID NO: 424467 - DNA, 122 bp, Homo sapiens
gtcgctcagaccctgattagggaactgggggaaggaggggggtcgggacccaccgaggcccgaagtcgcccccaccatcctgtgggaacaacatcctcaggcacagccattcccaaccattc

SEQ ID NO: 424468 - DNA, 122 bp, Homo sapiens
tggcgcggcggcgggctcggggagagcctggagcagaggtggcagcgcggggacgcggctcgacggtcgagcaggcgcgggaaggcggggcgagacgagcagccacgagcccgcgccgactc

SEQ ID NO: 424469 - DNA, 122 bp, Homo sapiens
gcactttttttacagtgaaattctggccagagcccagtgggacccgtgacaggctgtttccgagtcctcccaggctctgctggaggctgcacacctacgttcggtcttgtgcctttgtccca

SEQ ID NO: 424470 - DNA, 122 bp, Homo sapiens
ccaagtttctagggcggccctaagctcaggatggcaaaagggggagaaaaacaacaaagacggagggacgccattttgtaatggagaaagaggacttaaactaaaaagccacccggctctgc

SEQ ID NO: 424471 - DNA, 122 bp, Homo sapiens
tctggtggcaatgcaggggaggggcagaggtcaggagtagcaaccctgccaggcaggttccggaagctcaacggggtcccagcgcatacccggtgcagccccaactcaatgccacctcagta

SEQ ID NO: 424472 - DNA, 122 bp, Homo sapiens
gtgtacgcggagtgtcgatctgcctgcgtgtccttggatgtgcctgtctaggtgcccacccgcgcgcgccaccacatccccaggcctctggaacgcagctgctgtgtggcccggcccgaagt

SEQ ID NO: 424473 - DNA, 122 bp, Homo sapiens
tcctagaaatgccacttccttcctcctcccgccgctccgggcctcccgagccaagacaagcgcaggttgggacttgcacgggaaagctcacctgagaatgtttccagaaacccctccccagc

SEQ ID NO: 424474 - DNA, 122 bp, Homo sapiens
aagcttcctccaaaaggaaagccagaggcacgcaggcctaggttgcctcgccgccccctgcgccttttcctgcagactggtgcatagtatttttaaaaatattgcgaggacaacgtcttctc

SEQ ID NO: 424475 - DNA, 122 bp, Homo sapiens
ccctcggcacctcacaatgtccgggcggctccctccctccgattggctgcggcggcagcgcggacctggctgcgctttcgccacaccacgcagcctgcgcatgctcagtgctggctagggaa

SEQ ID NO: 424476 - DNA, 122 bp, Homo sapiens
gaagaaatatagaagcccaagtcagaaggcagactttcttttcccccacatgggctacttcgtggtctttgccttatcttcacatatatgatcgatcccccagcccagccgatagacaggct

SEQ ID NO: 424477 - DNA, 122 bp, Homo sapiens
ggggccaatgtgggccccgcccccaaccattgtgtcggagagggaagtggacgagctcctcggtaagaaccaatgaggatgtggtatgcaaataagcaagtggaggccgccagccgacttcc

SEQ ID NO: 424478 - DNA, 122 bp, Homo sapiens
ctggcccaagctggctatgaggtggttgggcttgactggacagtggccccaaagaaagcccggtaagccatggaagggtgaggccttgaggttgaggtgggggtgttggctgggggagctgc

SEQ ID NO: 424479 - DNA, 122 bp, Homo sapiens
gtggtgctattgtgtccctgggagtcactccacgtcgcattgcacggtggtgctgaggagcgagagtttgctttatcatgggctttcagttcccacctgcgagctgcaaactttgatcttgt

SEQ ID NO: 424480 - DNA, 122 bp, Homo sapiens
ttatctgactaggatcttgttatccttcacctatgacctaggtacacttttctcaacacacgtatttatgataatagaaagctaagtccatatcccaaatagctaaataatgaaatttctct

SEQ ID NO: 424481 - DNA, 122 bp, Homo sapiens
ggctgaggcagagtgcctatgagccctgtccctctgtgtcccctgccacaggcctatgaacgctctgagagcttggaggtggccttcgttactcagctggtgaagaagttgcttattatcat

SEQ ID NO: 424482 - DNA, 122 bp, Homo sapiens
catgcccactcccctccccaccttctcttcttccaccctccaccctcgccttctgtctctcgcccacctgactccgctccgcccccagccttaggctccgccccgctgggggtcacggggcc

SEQ ID NO: 424483 - DNA, 122 bp, Homo sapiens
aatggtgaggcagcggtgtgcactgtgacccgccttcccgggaaagtcagagcacagaagcggggtgaggaccgcacctgccaagctgccggtcaggagcacaccaggtgcagcagccggct

SEQ ID NO: 424484 - DNA, 122 bp, Homo sapiens
ttttaatagcgcagtcaggaaataaagagaggagccagggcgcaagataacgccagcccccgcgtccctgtgatattaattactcgagacacgtgcatgacatgctgctcatttgttcctca

SEQ ID NO: 424485 - DNA, 122 bp, Homo sapiens
tggcagattgaatttaggtggagggagagaaagatgttctaggtagctccaatgtttggccgccataggtttatgagaagtgggagaagcagatctagtttgtccagggggcattgtccagt

SEQ ID NO: 424486 - DNA, 122 bp, Homo sapiens
aaacaaagttccgtaagtctggccggtaactacatctttccttcctaacaaagaataagccgcaattcactctctctggcacctgaactttggggtaacgattaactgcgatccgaagcctt

SEQ ID NO: 424487 - DNA, 122 bp, Homo sapiens
aaaatgtgtttcaagagagcaacctaagctaagtcactctgcgatatttcttgaaaataacgaccttgtcttgtatcagtggaagaagtaagttgcttagaaagggaaaagtcaaattgttc

SEQ ID NO: 424488 - DNA, 122 bp, Homo sapiens
ggtgtgagtggaggtaacagtcctatctctggacttgcagaagagacacatagggaacaacggagtgagagatagctgaggggatggtcttcccttgccagtgtctgctttattgtttttct

SEQ ID NO: 424489 - DNA, 122 bp, Homo sapiens
tttaaaaattctcaactggtagcttgcttgctgtgcgtcttccaaactaaagcctgcaagcgccacaattctaagtgccgccttccattttttttcagtatgttttcactggcttatgtttt

SEQ ID NO: 424490 - DNA, 122 bp, Homo sapiens
gaatggtagctggaaggtttaccacatgtctctggggagttttctagaagtcaaattcagcgttggttggacaagcacagagcatggtcccagtttacacaagtaggccagagtgcagtgga

SEQ ID NO: 424491 - DNA, 122 bp, Homo sapiens
gctgctgcaggaggcaggactggaggagcccccagtgcagcatagctcccacaggtgaggcgtcttgttggcctggacctttcccctctctggcctcagttttcccatctggtccctggcca

SEQ ID NO: 424492 - DNA, 122 bp, Homo sapiens
ttgtttataataattttgaacagctttgtatcacactgagttaggggaaaggagaatttacgagaaatgcaccctaagtgaggccagtgtataaggatgtaccacctcacatgtgtgggata

SEQ ID NO: 424493 - DNA, 122 bp, Homo sapiens
tccatccattcaaagaggagcgccaggatttcccaagcgacaagaacagggcgagctctccgatcctttctccatccccccaaacctcccctggctctcgagaacaccgtcagtactcccta

SEQ ID NO: 424494 - DNA, 122 bp, Homo sapiens
ggcttgttgacttcgcagccccgggcggagccttcccgggcgggcgtgggaggagggaggcggcctccatgcactttatgtggagactactggccccgcccgtggcctcgtgctccgcaggg

SEQ ID NO: 424495 - DNA, 122 bp, Homo sapiens
attctcacaaagagcgctccgtaagtacaaatgactgtttgatcaatcatttggcctcagcgtgggatttggttagaattaaagccatctggctggggttgacggggggtacggagggagga

SEQ ID NO: 424496 - DNA, 122 bp, Homo sapiens
aagctggatatcacagacaaagcagacagtcctctgatgagctatgatgtgatctttgtgcggctaagctttaagaggaatgatggagttcacaagctggaaaagtttgctgtgaaattcct

SEQ ID NO: 424497 - DNA, 122 bp, Homo sapiens
ataaattaccagagtagtttaggattttattaggatatttcctcggaagtttgggggttccgtgttctatcaggtgatgcctaatagatgcctgatatagctcataagtcaatgagaggaca

SEQ ID NO: 424498 - DNA, 122 bp, Homo sapiens
gcccaggaagggcatcgatctgccaccaaaatgatgcatccgcccctgtgttaaggggcccggcactctgccccgacaatcccccacagggcccagacaaccacttccaaggcccatcttct

SEQ ID NO: 424499 - DNA, 122 bp, Homo sapiens
ctgggaggtgatcagtgatgaacatggcatcgaccccaccggcacctaccacggggacagcgacctgcagctggaccgcatctctgtgtactacaatgaagccacaggtaagggcaggagcc

SEQ ID NO: 424500 - DNA, 122 bp, Homo sapiens
agcggccagcgcgcctcacatggcggctccggtcacgtcacacaatgcggctgctccgggcgcccactgcccagcaccgcaggcctcctctggccgcccctcaagcaggtcgcgcaaacgcc

SEQ ID NO: 424501 - DNA, 122 bp, Homo sapiens
ttcttgcctggcccttcctccctcatcctgccctgctctgccttgcccaggatggaggcccgctgacctctaggccaggtccccattctgtggcttcgtggaagcctgtatgttagtggaaa

SEQ ID NO: 424502 - DNA, 122 bp, Homo sapiens
gtgaggattagagatgtaaaaccctgaaaacatggtggctagttaattaatagcagtcatcgctcttgttgttatgagtctagagtggtatatcagagttaatttgtgaaaggccttacagg

SEQ ID NO: 424503 - DNA, 122 bp, Homo sapiens
acctgctcagccctcttgaacccttcccttggcttttccagaacactggcccccccaccccgggcctggaccacacccttcaggtctgtctccggtacgctgggagcctgcaggcagggtgc

SEQ ID NO: 424504 - DNA, 122 bp, Homo sapiens
aaacgcgaagaccgcagacgcttgccgcaagtttcctcgctctgcgtttacttctgggcccgaagaatgccccgcagaggccctaggagctggttcatgggacttcacgcgcctccagtgtc

SEQ ID NO: 424505 - DNA, 122 bp, Homo sapiens
ccgcttgcgctcagaaggcaggccggaaggggctggcttcagcagggtggacgccgttttcgattcattggcctgaccctttgagcccagagcaatgaagtctcctgggggagggtgccctg

SEQ ID NO: 424506 - DNA, 122 bp, Homo sapiens
gagaaagcgtagggcacccctcagcctccacatccccgcccgcccagcaggcgtcccctgcgctccatccctggccacgcaggccatgcaggcttctctgcgcaggcccctctgcacaggcc

SEQ ID NO: 424507 - DNA, 122 bp, Homo sapiens
agaattcatgaccccttggcaaccttagaatcacattaccagccaacccatgggctctagcgagcatttaaagcacatgacttagacttagtcctcatcagaaggagatgggaatctatatc

SEQ ID NO: 424508 - DNA, 122 bp, Homo sapiens
cccccacccccttgtaacttagcagctcggatatatctcaactacgtaacgcaagcctcccgctttcgggagtcccctcctccagccctcctccgaggctcgttgtttgtgtggtagggagg

SEQ ID NO: 424509 - DNA, 122 bp, Homo sapiens
cagattgcccgtgggtgctgagaagggggagcccctaaacggcccgggatgaagggaggccgtgagctcaagggccccgcaatcttccgctgacaccctcctctggggtcgcaggtatgaat

SEQ ID NO: 424510 - DNA, 122 bp, Homo sapiens
tcccagtttgaggaaggggcgggctgctgtctacctctgtgaatctgccctggaccaccccgggagagaaggagggctccggggaatctcgcacattccaggcaaaggctcccgggccgcag

SEQ ID NO: 424511 - DNA, 122 bp, Homo sapiens
gatcttatcccaagctgatttacaaagcagggtcaggcctgtcatttctaccaccagctccggcccatctgcctccctggaattgccttcttcgcactgccagtccccacacctttgctctg

SEQ ID NO: 424512 - DNA, 122 bp, Homo sapiens
aaacttaatggatggacgagcagcgcgctactgcagctttcttccgccttaggaaggtggcggccagggatgaggaggcccctaagcaagtgcggaatggagccggggggcggagatgccag

SEQ ID NO: 424513 - DNA, 122 bp, Homo sapiens
gaacagagttcagggctggcgcggtggccaaaggccagtctgggtggccccaacccgggacggggagggagcgggccctgggccaggatcgcggggcggaggccggggctcacctacggtgc

SEQ ID NO: 424514 - DNA, 122 bp, Homo sapiens
caactgctaaagtcttttccaaagtgtctaccctgttttacattcccactagaagctgctcgttcttgggctcattattcgtgtttatctttaaacacagaacgtgactccattcatatgac

SEQ ID NO: 424515 - DNA, 122 bp, Homo sapiens
cacctttcgtttcccttttctttctttccattctacattattgatatttgagactgattacggcacagcaggaggagattcagagaaatctccttggcttaatgtggtcaaactctctcaat

SEQ ID NO: 424516 - DNA, 122 bp, Homo sapiens
atgaaaacagcagcctcaatctgttttttgtagtttatagattagtaaatttcaaactctcgtatgtatcagaattacttgcagagcttgttaaaacacagattgccaggtgccacctccag

SEQ ID NO: 424517 - DNA, 122 bp, Homo sapiens
tccagggtcctaatgacagatcagtccaacgagaagacacggtgatcctaaatgtgcatgcgtggagtatgtcccgttaggacaggggtgaggaacaggctgcggctgcccacacttgtaag

SEQ ID NO: 424518 - DNA, 122 bp, Homo sapiens
ggctcaagccatcctccctcctcggccttccaaagtgctgggattacaggcatgagccaccgcatctagtggaatctgcattttaataagttccccagaggattctcatgcagcctgggatt

SEQ ID NO: 424519 - DNA, 122 bp, Homo sapiens
gataaatacaaacatggggttaagagttaacgattggagccagactgtctaagttactcccgtggccactgctagggacttggatgactttgggcaagtcattaaactgaacaacggtagtg

SEQ ID NO: 424520 - DNA, 122 bp, Homo sapiens
ggcttcctgcccggcaggaaggactcggccggcgcctgcgggcaaccgatgagctgaaggcgccgcggctgggccgtcccgctctcccgccgccgagcgcgctgtcctcccgctgcccagag

SEQ ID NO: 424521 - DNA, 122 bp, Homo sapiens
ggccatctggcccaatgagcgctactggctgctgcggcgcagcacggagcactggtggcacgtgcggcgcgagcctggcggccaccccttctacctgcccgcgcagtacgtgcgcgagctgc

SEQ ID NO: 424522 - DNA, 122 bp, Homo sapiens
ttcttcggcgcggtcccccagaacatcagaacttcttcgggatggacgagtcgctgggcccggtggcagtgagcctgcggcgggaggagaaggagggcagcggagggggcaccctgcacagc

SEQ ID NO: 424523 - DNA, 122 bp, Homo sapiens
acgttcctcgctcggcctcgcccagcaggagccagaccttttactttatttggttcaccacgcggtctctgctccagagagcgcgccggcggcggcgcactcgggccctcgcgcgcactcgc

SEQ ID NO: 424524 - DNA, 122 bp, Homo sapiens
tcaaatttctaagaaaaggaaaccattcacaaatattggtaaatattagtgcttggaacacgcttcaaaattgatgtgagcacatgagagtgtcagtcaaatgctttaacaaactttccgtt

SEQ ID NO: 424525 - DNA, 122 bp, Homo sapiens
gccaacataaatacctgaagccctggcctcaccatgagtctcttaaatgccattgaccttcggatttctccacataaatgtcaatcaatcatctcatatttaaacaaaacttttatttcaaa

SEQ ID NO: 424526 - DNA, 122 bp, Homo sapiens
aggtaaaacctggggattaccaagatcttgggaaactcaggacccaagttggaaaacatacggcaattggggctggagaaaatgggcatttttcaggtgggagggacttggagataaaggca

SEQ ID NO: 424527 - DNA, 122 bp, Homo sapiens
ggctgttactgtgagaacaccgatgggctggtgtatgttgtggacagtacagacaaacagcgactggaagagtctcagagacagtttgagcacattttgaagaatgaacacattaaaaatgt

SEQ ID NO: 424528 - DNA, 122 bp, Homo sapiens
gctcataaatgagctttgggaagatgacagggttatcacgccaagcaagaggccaggcttcgtgcaaagaagggcagcatctcgccccgagcgccaacaccgcctggcacgtctctgtgctg

SEQ ID NO: 424529 - DNA, 122 bp, Homo sapiens
aattaaaaatatataaaaaaatagtaaaataaatggtgtgtgtgcgtgtgtgcttgggcacgcgtatgtgtacattaaagaagggccagcaagtttactctccagagtgtagaccagcagtc

SEQ ID NO: 424530 - DNA, 122 bp, Homo sapiens
ggagggccttggtttctgaaaaatgtcgcttaccctaaatgtcgcttagaggcagatgaccgtaaactagttaccagatgtgtcagcctctttctaaatctatgggacaaggcagaataaag

SEQ ID NO: 424531 - DNA, 122 bp, Homo sapiens
acagcattccaagctaagaaaaatgatcaagcagaaaccttcatggcagcccatgataaacgacaaatctgaggttaggaacctatggtttatttttaaatggggccatgttacatttcctg

SEQ ID NO: 424532 - DNA, 122 bp, Homo sapiens
aaatcagggctttcctccctgaaaagtctggttgttaagacattcaccagcacaccacctcgacttaggccgttcccttttgccctttgcctttcgaggcatgctttttccggactgtgttg

SEQ ID NO: 424533 - DNA, 122 bp, Homo sapiens
gatggggtgggcggtgactggcgctctctggggaagggcctctggctggattaaacctatcgcgagtcaggattgaagccctttgtttcttactgagcagctgttctccagttatttcatcc

SEQ ID NO: 424534 - DNA, 122 bp, Homo sapiens
cccgggagggacggcggggacccgggatgggggtctgcgaggggtgacagctgggagcgccgtggggcgaggggcgcggggagggaggaggggtccgcggggcgagcgggggcggggcctcg

SEQ ID NO: 424535 - DNA, 122 bp, Homo sapiens
cgtccatggctgtcaggacccgggattagcacgtgggctcctgcggggacttgggctgaccgcaagcgctagaagaattggaatcactagacttccattgttagtttcttccagtggttcag

SEQ ID NO: 424536 - DNA, 122 bp, Homo sapiens
cgtgtaaaatcccagacaacgaccctccctgagcgagtgtcctgaacatgaccacattctcgtcgccgtctcgggaccttcctgccgcctgagtgcaccgcctcccgcccggctgttgtcac

SEQ ID NO: 424537 - DNA, 122 bp, Homo sapiens
caatgcagtgggctgggggccgtgttccccaggaggctggcactgccagtcctgcacctgcgggagagccatggctggcatcgggcacagcagcctctcaggctctcactcagggtattttg

SEQ ID NO: 424538 - DNA, 122 bp, Homo sapiens
tctcattaatgttgctctgcccggcagcagggcgtcaagctcagggcttgagtcgggaggcggtcattctttccggggatcctggcaatggaggttcctctcgagcctgacccagcctgcag

SEQ ID NO: 424539 - DNA, 122 bp, Homo sapiens
tttagtccagtgataatttataatagaatccttttatgatcattgctaccatgtactcatcgcttacctggttatgcttacattactctgatatacacattacccttattcattcattcagc

SEQ ID NO: 424540 - DNA, 122 bp, Homo sapiens
aagagaatgtgcttcttggcataaaagagatgcctccttccagctaagccatcctccaaacgtgctgccaaagaagaccattgagttctttcaccactatgtcaggcctagaaagaagtaca

SEQ ID NO: 424541 - DNA, 122 bp, Homo sapiens
tggctattttcaagctgctggctagctggctgggttgaagggacttcctgttcacctcctcggtcaaggtagcatgagtgaatggttcagtttcattcaccccagcagggggatagctggca

SEQ ID NO: 424542 - DNA, 122 bp, Homo sapiens
cgccgcgcgaacgtgtagttggccgggtggagcggcggcgacctgggcaccgtggagcgccgttggttccgtcatagcagctgtcggagtgggggttcctccccagcgtccaggcggcctgg

SEQ ID NO: 424543 - DNA, 122 bp, Homo sapiens
gccttgcacaggggctcaacggccaggagtctcaggtaaaaccacaactcccagaaatcccgggcccggcgaggggcgggtgccaacggcgtgtgggcggggcctagggagtgagcggggcg

SEQ ID NO: 424544 - DNA, 122 bp, Homo sapiens
tgcctagtgatgccagagccaccatagggccatcatgcaatgtgttagcttttctctgttcggatacacaaacacccttgtgtcacagttgcctacagaattcaatacagtcgtgcgatgca

SEQ ID NO: 424545 - DNA, 122 bp, Homo sapiens
cagcgggcacagaccccacggaggacagcgagccaggtggacagaccccatggaggacagcgagccaggggacacaggccccacggaggacaattagcagcggggacagaccccacggagga

SEQ ID NO: 424546 - DNA, 122 bp, Homo sapiens
cctggacctcaacctcatctcatcagctccccctacggagtggggcggaggcggcggaaacgctgaacgctcagggtcgacaggagcaggggctgcactgcccgccacctagtggccaaagt

SEQ ID NO: 424547 - DNA, 122 bp, Homo sapiens
cagtctgtttcctcagctgtgagatagaaataacttggagaggtttctttaaggattacacgaataggccaggtgcggaggctcacacctgtaatcacagcacttttggaggccgaagcggg

SEQ ID NO: 424548 - DNA, 122 bp, Homo sapiens
ttggggggtcgatgggactgggcacccgtggagcaggggtggcgctcataggggaggctccggccgtgcaggagccctcagcggatccggggaggctcaggcatggcgggctgcaggtcccg

SEQ ID NO: 424549 - DNA, 122 bp, Homo sapiens
cgccttcccgcgaggagacggaggccgagccagccttgcaagttagcgcccgagccagtccgcgcccgaagatgccagctgtccctgggccggaaggtggtgtggggtttgttttgtcttct

SEQ ID NO: 424550 - DNA, 122 bp, Homo sapiens
tcttccagtttagccttcctggtgcccagtagacattcatggagtgcatggaggatggcacggtctgacgcccacaggctcccacgtggaaatcttgcacctctcaggggcctgctggggtg

SEQ ID NO: 424551 - DNA, 122 bp, Homo sapiens
agaggcctgttgctgccatctcgactcgtggatggtgagtagctgaagcacggtcagctgcgtcaccaggctgtccgtggcaggctgcagcccttcgtctgaacccatctccgcggtgtggc

SEQ ID NO: 424552 - DNA, 122 bp, Homo sapiens
ctactagggaggctgaggcacgagaatcacttgagccctgaggcacaggttgcaatgagccgagatagtgcctctgcactccagcctgggtgacagagtgagactccatctcaaaaaaaaaa

SEQ ID NO: 424553 - DNA, 122 bp, Homo sapiens
tgattgttcatcttttcattctcggcttgtgcaggagtccagagctattttaaacagcaccgttagaaccgtctctgcaaacaacatctactgctgtgctgaccgtggacaggtctccgcca

SEQ ID NO: 424554 - DNA, 122 bp, Homo sapiens
tcagtctttgggcttgcacctcctccctggcagcggtgtgaccggagggaaaggcagcggcgagggccttggaggacctgcaggcagtgccccgcccacccagatttgggtgactttctggc

SEQ ID NO: 424555 - DNA, 122 bp, Homo sapiens
gtagccctgcctccaggaagcaggcaggcggggacctctgggcgctcggaggggcagctccgagggcacagggtacagggagaatcagccagatccctccctgccccgggcagccgcggcgg

SEQ ID NO: 424556 - DNA, 122 bp, Homo sapiens
tagccccaagaaaaggagagtataaacccactctacctgctttaactgacttatttaaggcgctgtgtgctgccggctggtaattcttaggtggtgtggcttgctggaggtacatggagtat

SEQ ID NO: 424557 - DNA, 122 bp, Homo sapiens
aggcccatgccaggggcaccctcaccctggacaggagatcagcctgtaggagctagcgatcggcctgtctgaggctcttcttcctctgatggggaagtccaggccacccagccaggaagtgc

SEQ ID NO: 424558 - DNA, 122 bp, Homo sapiens
ggccacagatggcaggcagggcaggcgtgtcctccgcgctcagttattgtctctggtgtccgaggaggcacttccgaacaagatgtcactgtcctgggacacgctcagctgcgacttggttt

SEQ ID NO: 424559 - DNA, 122 bp, Homo sapiens
ttcagctcctccaagttacagctaaattcccgcagggagagtctggaggggtgcgaaggtcgaggccagggattaaagaattcgtccagggccgcccaagcgaatatgtcaggctcagggac

SEQ ID NO: 424560 - DNA, 122 bp, Homo sapiens
tgaggtgggactacactaaacatggaattctatttataagtaaaaaccacaaaaagtttgcgtaagaatatcactgtatttattttccctcgggtaacttttctatggcttcaccattttct

SEQ ID NO: 424561 - DNA, 122 bp, Homo sapiens
gcttcggggagccccggggctggggcccgcgggcggggcgggaggggaggctgggggcggcgggcccctcctggccattttggccggggaatctgtgtaaagtgtttaaaaagaaaaactct

SEQ ID NO: 424562 - DNA, 122 bp, Homo sapiens
ccttatttagtgccgttaccagactcaagcaggagagaatgcagtagttacagagccgggcgtgggctttgctgccttgtaattcggccttactcacatttttagaatttcaaatctagatc

SEQ ID NO: 424563 - DNA, 122 bp, Homo sapiens
gtatgtgaaagtctagttgctctgcatcacaggcttacaaaccttttctgtaaagggccacgtaggacatatttaaggctttgtgagttacatggtctctgttgcaatgactgctcttgtaa

SEQ ID NO: 424564 - DNA, 122 bp, Homo sapiens
actcggagagctcaaaatacaaatccatggagctttggaatctgagcgagatcttaccaccgccccctgctgccctgagagagcaacgggcacaaggagcccggcgggtccctcgcttggtc

SEQ ID NO: 424565 - DNA, 122 bp, Homo sapiens
gcagccccaatacccagcttccttgttgttggcaggtgttggcagccctgagtgccagaacgccagggagccagccactgggaacatgctagggtggtgagcaggagccaactaatcagggc

SEQ ID NO: 424566 - DNA, 122 bp, Homo sapiens
ctgtaccaagctctgctcacagggggaggtgcctcgcagcaacttcaggaggctttgccccgcccagcagtcagaaactgatcctgagtcatgaggaaaatgtggaaagtgcctctaccaga

SEQ ID NO: 424567 - DNA, 122 bp, Homo sapiens
taagatattctcccccccgccagccctccgagaccgcgagagccccgagggtgggagatccgggggaatgtctccaccctgccctggcccgctacgtccatctgtccgtctgtccgctcccg

SEQ ID NO: 424568 - DNA, 122 bp, Homo sapiens
ggcctcgccccgcccccttgcatagagcccggttggccccgcccacctgcccgcccctcccgcggcagcctgaccccggccccacccccgccccaggtagtctcgctgggcctgtacttcgg

SEQ ID NO: 424569 - DNA, 122 bp, Homo sapiens
agggttgtctgaggctgatcttggaggcggtgcgctggtagaggcaccgcacacaggcatcgtttcacacaactgttacttaggttttccaatagtaaagttctaagtggatgaatgaacac

SEQ ID NO: 424570 - DNA, 122 bp, Homo sapiens
cctcctttcaggcagctgtgaatgacaaacggtcgctggctgccgtgacacccattgtcccgcgagagtgccctagctgggccccagtgcactcgaggcggtccctgctcgggtgcccctcc

SEQ ID NO: 424571 - DNA, 122 bp, Homo sapiens
gcattgctggctgagtccagggctgagaagaaccgcctctggggccctttggaggtcaggcgcgtgggccgcagctccaagcagctggtcgacatccctgagggccagctggaggcccgagc

SEQ ID NO: 424572 - DNA, 122 bp, Homo sapiens
ggtagcatcccgggtctcagcagtcataggtgcgcgtgaacacagggcatgcgctccacccgccgtcctcagcggcgcacacgcacaggtggtgttcagagtgtgacgacagctggggtttg

SEQ ID NO: 424573 - DNA, 122 bp, Homo sapiens
cggacggccacaactatcctagccttcttccctatgggctgcaaaggtggcctcgggttccggtgggagccccaactctggaccgcgattcgcgagcctccccggcgccgggccgcgccatc

SEQ ID NO: 424574 - DNA, 122 bp, Homo sapiens
actagatgcggctaatggccagatgagcagctacatttcttatgagacacttctgtggatcgcctttttcctccctcttccaggggttagggcctggggaagggcgccacacgtctgaatga

SEQ ID NO: 424575 - DNA, 122 bp, Homo sapiens
caggtctcacgcctggtgcctacctgagtggcagagcctgcccgagccctccttctgccacggcccctctgtgcagactgagctgagcctggtcactggcctctttgcccccttaggttccc

SEQ ID NO: 424576 - DNA, 122 bp, Homo sapiens
ggccggcacctacagctacgcgcaggtctcggactacgctggccccccggagcctcccgccggtcccatgcacccccgactcggcccagagcccgcgggtccctcgattccgggcctcctgg

SEQ ID NO: 424577 - DNA, 122 bp, Homo sapiens
caggtccctagtcaggaccgagcaggggagtaggataggaatccccgccgcacctttgtacgagcctgaccccttccgtgggtttgttcctgggtcgccgtcaagctgcggtctctcctccc

SEQ ID NO: 424578 - DNA, 122 bp, Homo sapiens
cccaggaagggatgctgcatgctggggaaagaatagggggtctgaggggaggccctgtcacggagtctgggtcagcctgccaagtcagggtgctcccagcatctggaattgctagatgggag

SEQ ID NO: 424579 - DNA, 122 bp, Homo sapiens
acccaggacgcctaccaggacagccgcgcacagaggatgtccccgtggccccaggacagccgcggcctctacaactccacggacagcctggacagcaacaaggccatgaacctcgcgctgga

SEQ ID NO: 424580 - DNA, 122 bp, Homo sapiens
tttttaaactgcatgtggttagatgctgcaggtagatcttaggatgctgccaggtcaccacgcagcccatttagggtaaaatgagataaattttctgaatatacatgttgtgcccaagtatc

SEQ ID NO: 424581 - DNA, 122 bp, Homo sapiens
agccacggagccgaacgctaaacgcagagcgaagtcacgccaatcccctgcaaaaccacgcgagtggtccactgggagcgggacagactgaaaaaagggcagcatttgagtgaagtcagata

SEQ ID NO: 424582 - DNA, 122 bp, Homo sapiens
acaatgggccttaccggttatgctagattaaatagtaataaagacgaaaacaatcgtggccgttcacgtgggcaaggctgtgaatcatggccattcactggggaaggaactcaggtacaggt

SEQ ID NO: 424583 - DNA, 122 bp, Homo sapiens
acctcaggtgatccacccgcctcttcctcccaaagtgctgggattacaggcgtgagaccacgactggccaagtctgagcagaatttttaagtcttaaaaaataagtggcctggccggatgcg

SEQ ID NO: 424584 - DNA, 122 bp, Homo sapiens
tcctggccatgcggaacacgaaggtgagtgctggcgcccttctgcaggctgctgtgtctccgtcctgcagccgcccccagcaccggccctcaccgcccctgcagccgcccccagcaccggcc

SEQ ID NO: 424585 - DNA, 122 bp, Homo sapiens
aggattcggaggctatagaagtgtaaagacgaatagcgttctgaactcacccattcgaagcggagcggggcccgcacagcctcctgtggcaccatcccgagcaaggggggaaaatgagagct

SEQ ID NO: 424586 - DNA, 122 bp, Homo sapiens
cgcgggaggcatttccgggccgggagtggcgggagctgcgagcttcccatggttttgtcgcgtgtgtaaggcgtggggagtgggtgagtttgcgcgtcaccttggctgggccacctccaccc

SEQ ID NO: 424587 - DNA, 122 bp, Homo sapiens
gagcctcctgcggaggatcgcggcgatgaggtggtcctgaggcagaagcccccgacgggccgcaaggttcagctgacccccgcaagacagatgaaccttggatttggtgacgagtccccaga

SEQ ID NO: 424588 - DNA, 122 bp, Homo sapiens
cgtcaacacagatgccaccattgtagctgcagagcagagggtgggcatcaggtggccccccgtggtatgccaagtcccacccacccctgctgtggcccccagggtgccactcaccaaggcag

SEQ ID NO: 424589 - DNA, 122 bp, Homo sapiens
cagctaaagcccggagcgtgggatccgggcccggaggaacgggatggcgaacgcgagctgcgccgcggccaggagcccgccgcaccgggcatgctcagtggcgcggccggctgggtggcccg

SEQ ID NO: 424590 - DNA, 122 bp, Homo sapiens
ccttgggtgaaaggggaaggagggaaacacatgactggcagtgtttgccagttccaggggcgtaagtatttcctctggttaatttcagattaccagagatgtcactgaacctggagctggaa

SEQ ID NO: 424591 - DNA, 122 bp, Homo sapiens
gaggcctgagccaagctcgccattcgccctgggctggatctcagctccggaaggagacgtcgagaagaggctgccaaagagcctggaggggccacttcagagcagcgccttgaagaggaagg

SEQ ID NO: 424592 - DNA, 122 bp, Homo sapiens
agatttctaagacattcagcaggcacaatcattaaactaatttgtgtttgattgtttgggcggacggagggtagttttattgcgctaagcattcaagcaggcacgcatcgctgattaccagt

SEQ ID NO: 424593 - DNA, 122 bp, Homo sapiens
tcaggtgaggcggaggcgagggcccactggacgagacgggggtgttaacggtcctaggagcgggggcgcagtcccttcagtggagaccctggtctctccgttttctttcgggtcgcgctcat

SEQ ID NO: 424594 - DNA, 122 bp, Homo sapiens
caaatgtcaaggaattgactgaacaaactaagagctcctggatgggtccgggaactcgcccgggcacaaggtgccaaaaggcaagcagcccgcctcgcggcctggggaaagaaccgacagga

SEQ ID NO: 424595 - DNA, 122 bp, Homo sapiens
aggggtgacaggggtgtagaggaaaccaaatgctgctgttgtttcagcatcccctgaagacgcatcccaaactgatctgctgccgctcctcatttctccatgtttaatgttcatggttcaca

SEQ ID NO: 424596 - DNA, 122 bp, Homo sapiens
agtgccaggcgctcaagcccatgtaccaccgcgtggtgagcggcttgggcttcggggcgtcgctgctgccccagggcttcgacttccaggcgcccccgtcggcgccgctcggctgccacagc

SEQ ID NO: 424597 - DNA, 122 bp, Homo sapiens
acacagcatttaacagactgaaacgtgccactctggagctggggacttcaagccacatttcgcctgcagcccgatcgccttcaatctttagcaaaatcctctttctcatgcaaaacagtgca

SEQ ID NO: 424598 - DNA, 122 bp, Homo sapiens
gggggacgagcctgagacggggtgggccggggcagggggcgggcgcaggctggagacccccgcccagtccccgcgcggccggggcacggcgggagggggcgcccgcggccctcccgacgctc

SEQ ID NO: 424599 - DNA, 122 bp, Homo sapiens
gactctgcatgtgaccagtagtgacattttactcactgaggctcatattgaggttaagcccgaggtccattggccttgctgagatcgtgtttagaacacagcactgtgcagtaagagactcc

SEQ ID NO: 424600 - DNA, 122 bp, Homo sapiens
accaccccacttggctcggatccctaagagagaggctctgattggcctccacttgggtcacgtccatcatttggcccagagagggtgtgacatcttgatcgccagacccaccaagactgtgg

SEQ ID NO: 424601 - DNA, 122 bp, Homo sapiens
cacacatgcccggattgtgacgtccagtctggttgctgtggcaaccccatcccatcgttccggcagcgcgactagttaacagcagagaacaagttgggggactagtcctgagccgccgggtg

SEQ ID NO: 424602 - DNA, 122 bp, Homo sapiens
cccatttcaccgactactccaaactcttcaggcccatatccgtccccatttgtggggacacgctttctcttagccactaaaagccctgcacctttcaccatttgctccccaccttccttcct

SEQ ID NO: 424603 - DNA, 122 bp, Homo sapiens
gttcagggtggccctcgtgtgcgcagcctctgccgggtcagagccgccgcctcctggcatcgacgcaccagacccacctgtgtggggtgtccctgctgtggatgggtttcggagtgtttgca

SEQ ID NO: 424604 - DNA, 122 bp, Homo sapiens
ttactgtgccttaaacagaacttggatcccctctattcccactacattcctccttgtcctcgtaatggcctctccatcacccagttattcaggccaaatgcctggataatccttgccctttc

SEQ ID NO: 424605 - DNA, 122 bp, Homo sapiens
tgccccgtcatgtccttcctgtatttgttaaaatccaggtccagtgaaggacggcgcccccgtcagctgtccacccttctcagtcgtctctaatccacccagttgttggtttttgttttgct

SEQ ID NO: 424606 - DNA, 122 bp, Homo sapiens
cgctaccggtgagcgagtggttgtaagcgtgagggaccgggagggcaccctggaaagtggcgggtctccgcctggtgacccaactccaagggtcgtctgcaccatgaaactctttaggcacc

SEQ ID NO: 424607 - DNA, 122 bp, Homo sapiens
gtttcactgtgttccaaaagaaaggtccagtcattcccacaccgggagtcgaacccgggccgcctgggtgaaaaccaggaatcctaaccgctagaccatgtgggagatgacaagtaaccgtt

SEQ ID NO: 424608 - DNA, 122 bp, Homo sapiens
aggttcaagcccttaaaagttaattataccaaatctgagatcctcaatgtagggccttcccgtgtttagagagggtaatggcaaacacagaaagatttttaatctaacatagacccatcctt

SEQ ID NO: 424609 - DNA, 122 bp, Homo sapiens
gaattgtgcccaatctagactaaatacattactagaccctagcagcatcagctgcaccaccgtcaaaagcagtcttccattcttccatgactcattcattcatgtattcacttgtggtattt

SEQ ID NO: 424610 - DNA, 122 bp, Homo sapiens
atggtctcgatctgaccttgtgatccacccgcctcagcctcccagtgctgggattacaggcgtgagccactacgcctggccagaggctggtttcaaggctcacctccccacccccttgggga

SEQ ID NO: 424611 - DNA, 122 bp, Homo sapiens
cgcggtcggcctgttttccagggcggagacggagcggggcctgtccaggaagcacataatcgaaggtgaggacgcgctcgggcacctcagggcccccatacctgtgggatcatcctcggagg

SEQ ID NO: 424612 - DNA, 122 bp, Homo sapiens
tttggcatggatgacacacaggttggtgtcctcaaacagccccaccaggtaagactcgcacgcctcctgcagcgccatcacggccgagctctggaagcgcaggtcggtcttaaagtcctgag

SEQ ID NO: 424613 - DNA, 122 bp, Homo sapiens
tcaggacagcctaaccctcctttactaatttttatattagcacactgtacatttggccaccggtacctcaggttccacatccacagattcaaccaactgcagatggaaaaattttttaaaaa

SEQ ID NO: 424614 - DNA, 122 bp, Homo sapiens
ttccgcttagctgccccgaaaggcaggcaatgatgaatggcgcctactacaaaagaaagccgcaggcacacatgggcccggtgttgtttctgtcagggcagctcaaagggaaggccgcacca

SEQ ID NO: 424615 - DNA, 122 bp, Homo sapiens
gctgttcgctgggcgtggcgggcgggtgtggccaggggtgtgggtctgtgagggaccggtcggaagggcgtcgcgcggcctcgggtgacatgcggggggcggcgagcgcgagtgtccgcgag

SEQ ID NO: 424616 - DNA, 122 bp, Homo sapiens
gagcttcctgtatatcttagttctggtccttggaatcacggaataaatctaaatgctcatcgttcatgattgaagatagctcccgagtgcaatgtgttcatggtgaggccactgtgttggaa

SEQ ID NO: 424617 - DNA, 122 bp, Homo sapiens
aagagatctagaaatttagggatttaatcccagctctgggaagagccaggctggaggacacggtcgtgggtttgagatctggcttcccatacacttggaaaccttgagaaacgagtcctccc

SEQ ID NO: 424618 - DNA, 122 bp, Homo sapiens
cccaagcaatcctcctgccttggcctcccaaagtgctgggattacaggcttgatacaacgcgcccggccgacactgtagcattttctaataggcctacgtaaaaattatctaattctctagg

SEQ ID NO: 424619 - DNA, 122 bp, Homo sapiens
cccctgcacaatcacagacctgaagtcggggatgccagaggcagtgctgatgccggcacccgtgtggaacaccacactggaagactgccagaccagcctcgccagttcccacaccttccgct

SEQ ID NO: 424620 - DNA, 122 bp, Homo sapiens
ttgagctggaggatgacctggtggtaaagctgagagtgaaagtagaacttacacttggaacgtatacttggaatcatcctgctctgactacagtttgctcccagcttgagtgggccatttta

SEQ ID NO: 424621 - DNA, 122 bp, Homo sapiens
cctaaagccatcagctaacaccctactggggactactttcaattaggtgagatgcctttgcgaagaatgaaagggactgaaagaaaatacttgtagggacaagtaaatcacttattcttttg

SEQ ID NO: 424622 - DNA, 122 bp, Homo sapiens
ctgctggtgaggtcggcgatccgggtgtagctggggttgcaggcttggcaggcacggcggcggtatcgggaggcacagcgatcttgagggactcaaaaggctgggacaactgagaccccgtg

SEQ ID NO: 424623 - DNA, 122 bp, Homo sapiens
gggaagagagagacagaaagctacagagagagccggaccccagcgcagatgagccgaccacgtggagaagggatagcctctcctcccagaccccagactcacgctgtctctcttgccatctg

SEQ ID NO: 424624 - DNA, 122 bp, Homo sapiens
tttgcatgcttggttcgtccttatggaaaatagacaataagcaggttcccggcgcccctccgctgtctgggtggcgcatctccaaccccaccccgttccggcgctctggccaggacgtattg

SEQ ID NO: 424625 - DNA, 122 bp, Homo sapiens
acttggcctcctggacaccggtcttcttcagtctcgtttgctgatttctccttttctccccgcttcttagaatgccctcgggactccgtttttgaacctttactcttctcagtatacactca

SEQ ID NO: 424626 - DNA, 122 bp, Homo sapiens
cgcggcccgcgctgggaagctgcactgtctgcgcttcctggtggaggaagccgccctccccgccgcggcccgcgcccgcaacggcgccacaccggcccacgacgcctccgccaccggccacc

SEQ ID NO: 424627 - DNA, 122 bp, Homo sapiens
ttgggcctcacgtagtgggctggacagaggatggagcctcttggcgtaagcgcggttgggcggggcattcctggattggcccactccggcgtcgcagaacgcttggcgtatcgtccttcagc

SEQ ID NO: 424628 - DNA, 122 bp, Homo sapiens
tcaataaaaaataaaatgaaataaaaattacatagaagactgtcaagctgaaatcaccttcggatttgaggccagcactgaaggcaaggaccagctcacaataggctttgaatgccaagcta

SEQ ID NO: 424629 - DNA, 122 bp, Homo sapiens
gggatttcagcagattttcattacagtgtccaccctgaaagtgtaggggccagagttccacgctggttaatctctcttgctgtgtgaacttatacctgtaatttccacctctgcacctcaca

SEQ ID NO: 424630 - DNA, 122 bp, Homo sapiens
ccaagggcttaccattttcctgcaggatgtttataaatagttcctggcaaaggaggttgccgtatagggtcctacaagtaacctaggtggcagcatctcctcccagcgtcaggtctaagcac

SEQ ID NO: 424631 - DNA, 122 bp, Homo sapiens
tcctttcccggcggcgctggcccgcttctggggcggctcctcctcctttgtctgggttcgcggcccgtcaggggtacagctggcccagccccgccccgactcccgctacggccgcggcgggc

SEQ ID NO: 424632 - DNA, 122 bp, Homo sapiens
gcccgcagtcccgccgccgcccaccccactcccggagctcggtacagcggctgcgaccaccgctgcctccacaggtttagaggcggccatgacaagtgtcctctgccaccgcctccctgtct

SEQ ID NO: 424633 - DNA, 122 bp, Homo sapiens
gcctgaggacgcggcttccaggcgcagccagtggcggggctgccaggagtggtcttgggacgccagggaccctgtgtgtgtggtaggggggccactgctgacaccaacacagacagggttag

SEQ ID NO: 424634 - DNA, 122 bp, Homo sapiens
atatgatccacttacagggtgcaggctcagtcaagtagaactggtaaatcattaaaaatgcgccttgatgctatgcctgctgagtaaaacatcatgctaacatctctgcctcccacccccaa

SEQ ID NO: 424635 - DNA, 122 bp, Homo sapiens
tggagtccagccgcttcaaataccgcacagagattgcgccgggcaagggtgacatgcccacgctcactgacaagggccgtggccgcttcgccctcatcatctatgagaacatcctcaagtat

SEQ ID NO: 424636 - DNA, 122 bp, Homo sapiens
gcacaatctttgtttagatatgctgatgccttccttcgctgggaacggtccagtcctgcccgcctggcgctcagctctgcggatctcaggggatggagtggcaatctcattgctcccgcctc

SEQ ID NO: 424637 - DNA, 122 bp, Homo sapiens
aatcagaggggtagcaagcaaagagaagtaggtcagagcttctggctaccatccatatttcgacaaggtagaacaaggacacgtcctgagcagggtgacacaaggaaccagaaggattataa

SEQ ID NO: 424638 - DNA, 122 bp, Homo sapiens
tacccacgtgactgtgtggcccggcatggcatgagaggatcatactgaatattactagaccgggaaaagatcaaaactcagaattcaaagtacagtttctgttgaacatgtactgctttcac

SEQ ID NO: 424639 - DNA, 122 bp, Homo sapiens
acatctttttccatggcttgctaccgataggcattgaagcctagcaactgttacttcccacgcatgctatcttccaggacttcctgagaaatgcttgcttacagttcaaattctgtttcact

SEQ ID NO: 424640 - DNA, 122 bp, Homo sapiens
ctgaggggccctgcgctggccggccggggcgaggcgggagcagaatggggatttctaggccgccgggtcgggctggtgggcggcgccccgggagcctgagggtccccgccggcccgggaggg

SEQ ID NO: 424641 - DNA, 122 bp, Homo sapiens
tgagcactatgtgctagcattccccatgcaaagtgctttccagggttcatctaatcctcacggcaacttcacgaggaaggaattatcatcttcagcttacagatgaggagcattgccctgcc

SEQ ID NO: 424642 - DNA, 122 bp, Homo sapiens
ggcgccaggcccctccacaggggacctcactggccctggcccctgccccaggggggcacccgcactccaggaaaccggctcccagcccccagtcaccggaacttcggaggcacctggtgagg

SEQ ID NO: 424643 - DNA, 122 bp, Homo sapiens
atttggtccccgttggcctctgactctctgttgcggcaatctagatgttaccagaattcccgtgtttccttcatattcaaaggcacaggaaatctggggtgcaagcggactgctgtctctca

SEQ ID NO: 424644 - DNA, 122 bp, Homo sapiens
aggatgacagaccttggatcataagaaataggactgagcctttaaatcctggaaggatgccgctgcggctcatatttctttcctatgtaaagcttgcttaagcagctggcataaaattgaca

SEQ ID NO: 424645 - DNA, 122 bp, Homo sapiens
atcgcggggaggggtggctcggtgccatccccctcttaacctcgggggcctgaggctcagcgtgaggcgcagcttgtcttgggccaccctgcctgggactcatgcttcatttcggggtttgc

SEQ ID NO: 424646 - DNA, 122 bp, Homo sapiens
ctccccctcaccattatcctggagggcatcagcagaaaggaaacactgacgtctcaatcccgaacctaaataggctgccctggaactcactaccctgtggttgctctaccagaactttcagg

SEQ ID NO: 424647 - DNA, 122 bp, Homo sapiens
aggcagggcagggctcgaacaccagtgctcgctgccactagggaggcctcgtaggcgccacgctcatcccgaggcagaacctgctccagccgctggtccatggagactgtaagcacccagtc

SEQ ID NO: 424648 - DNA, 122 bp, Homo sapiens
ggaagggccaacggaggcctgttatgtgatgagccccactacagtccctcgcaatgcaatcgggcgcggccactgcctccctcggagctccgcgagaggccctccaaaaagacgctggcacg

SEQ ID NO: 424649 - DNA, 122 bp, Homo sapiens
ctaaaatgggggtgcttatcatggagaaacagtgggcttgttcggccacacagaatgcttcgtacaattttgttcagcataaaaaaggcagaagggcagcaagcaatgcagaaagtgacaaa

SEQ ID NO: 424650 - DNA, 122 bp, Homo sapiens
ccctgaccaaatccgattgttaaagtgcaaagtgatgtcagtaccatttccattgcctttcggaaatccacagatctgacacgcgggagtccaattttccccattaaagaaaaataacaata

SEQ ID NO: 424651 - DNA, 122 bp, Homo sapiens
ccaggtctggaggtaggagaagcgcaggtggagggacctgagcccgaggagtgggggtggcgaagggctacctgacgtcccagccctgatctgacctttccgggctaccctcctgtcctgac

SEQ ID NO: 424652 - DNA, 122 bp, Homo sapiens
atacccatacgtgcacgtgcatgcacacacacacacatacccatgtagatgtgagcttctcgagtgcaagaactggattgtatttagctttacgtcacctgtgcctagaacagcttctggaa

SEQ ID NO: 424653 - DNA, 122 bp, Homo sapiens
gggctccccagtcttcgtggccccaggtccatggtcttttcaccgaggcttcttatcatccggggcccacacctggcgccccgtgtgctgccagcactccttcctgggcaaagtccaggctc

SEQ ID NO: 424654 - DNA, 122 bp, Homo sapiens
ggaagcctcaggaaacctacaatcatggtgcaaggggaagccaatacgtccttcttcacacggtggcaggaaagagaagcactgagcagcaatggggaaagccccttccttatgaaaccatc

SEQ ID NO: 424655 - DNA, 122 bp, Homo sapiens
aggaaaattattgggattaaaggatcctcctggggattgctaggaggcatagtcatcctacgccttcccttctcacctggtctgtgagaagcataaactgaggccctacaatgtgaaaagcc

SEQ ID NO: 424656 - DNA, 122 bp, Homo sapiens
ttaattctttcctgggtgaagccaagaaccttctcaggctaaaccccagtttgggggcttcgcggccctgtgtcaacaccagaaacttaaccctttggaaactttgatcttggactttccag

SEQ ID NO: 424657 - DNA, 122 bp, Homo sapiens
ctctgggcttgtgatcccatagtctagtttcctcgttttaataaactacaacaagccgggcgcggtggctcacgcctgtaatcccagcacttcgggaggccgaggcgggtggatcacaaggt

SEQ ID NO: 424658 - DNA, 122 bp, Homo sapiens
tgccccataccctagaggaaggaatgctgcttagagaagccaagaaaagtccgagcaggccggccttgctgggtttaagtcacacgctttctgtccggtcacacttccgcgtggttgtcaag

SEQ ID NO: 424659 - DNA, 122 bp, Homo sapiens
atcccgatgacaagtttagaaaccttacttccttcaatgtttccccttcccaacagtacccgggaatccctaagccaggagaatggccgcatagtggaaggaactcttcagaccctgctaca

SEQ ID NO: 424660 - DNA, 122 bp, Homo sapiens
acgaaagggcgggacccgggcaatttaatatctgggctagcactcgtagagggacccgggcgctaaaggggtctagggttacgggccggagggagaagaagttggggttcaacaggcttgcg

SEQ ID NO: 424661 - DNA, 122 bp, Homo sapiens
ctgctcatgacattgatgctctgggtatttcagaaatgcccagatagatggacaaatacacgtccatctatccattagggtcagatgtgagatccagagtggacacatcaatcacctacgta

SEQ ID NO: 424662 - DNA, 122 bp, Homo sapiens
ggccggcagcctgagtgaggagccaccccaaggtgatggtgtgggggacagtcctgggcccggggctggccaaggtgacggcgtgggggacagtcctgggcccggtgctggccaaggtgacg

SEQ ID NO: 424663 - DNA, 122 bp, Homo sapiens
ttcttgcccccagctctcctgctgccaagatgccatcaccacagacagacactcctgggccggagctgcagagtcccaaggaggctgaggagccacagactccagctcagggctcccggcga

SEQ ID NO: 424664 - DNA, 122 bp, Homo sapiens
aaggatttataaccattttgtaaatattaatgtggcttctgctaggggtggacaacttcccggcttctatgggaggggccacttagaaaacgccttcagataaggttcaattcttttgtatt

SEQ ID NO: 424665 - DNA, 122 bp, Homo sapiens
gtctggcgcatggggggcgccggcgctgcgggcaaagggcgcacggggctggctggggttcggggtccccccgccgccgcctctcccagaccgccgggccgagagctccttagtccccgggg

SEQ ID NO: 424666 - DNA, 122 bp, Homo sapiens
atgtataccgctccacaccctttcgtgcccgcgcgctgaaggttctggggttcgtatccgcgcgcttgcgctgcaagactcggcaagtttgttccgactgtaactccggggatgaggaacgg

SEQ ID NO: 424667 - DNA, 122 bp, Homo sapiens
acaggctgtgtgccgaaaccagccccgggtgctgctgttagcaggcggacggctgagaggcgaggaggtggggccttccttacacaggccccaaggacggctcacgctccagccacatgagg

SEQ ID NO: 424668 - DNA, 122 bp, Homo sapiens
gcacggcgtccctgcaccaccagcgcgtccacatcaacatctccgggctgcgctttgagacgcagctgggcaccctggcgcagttccccaacacactcctgggggaccccgccaagcgcctg

SEQ ID NO: 424669 - DNA, 122 bp, Homo sapiens
tgggctccagtcaccggctgcgggattgcggagtccgccgcggcctcggctcccgcccggcgcccggcctggccccaccgccgctcactcggtccgcatcgccgccacctccggagctggtg

SEQ ID NO: 424670 - DNA, 122 bp, Homo sapiens
ggagggcgcgggcatgggtagggcagcgcccgggctgtgctcagtccaaccggggctctgcggggcggttttggcccacagttgccagtcatagagtagccaaaagttcatattttcatttt

SEQ ID NO: 424671 - DNA, 122 bp, Homo sapiens
taaaaacagaaatgaaatcagtatttatggccccaaaccctccaagcaagtcatgcagctcgttcccctgtcaaggcctcccacctttggcccacacagggcctgaccctcgtctaagcctg

SEQ ID NO: 424672 - DNA, 122 bp, Homo sapiens
tcaagaaaaccaacccgactgtccccgcagcgccctgctctctgtccacaggagggcgctcgctccgaaccccaagttgtcagccactggaaggcaggcggagagggactggaagaaagggg

SEQ ID NO: 424673 - DNA, 122 bp, Homo sapiens
gagatatgaccttagaggtcagacccatgataaacttgagcccctaacgaaagggtgtctcgaatttacttgtcctggtggcagagggtgagggacacattttgggcgccagggtaagacag

SEQ ID NO: 424674 - DNA, 122 bp, Homo sapiens
gttcaatggagagctagagaatggctctggagaaagatgtgtttaattaaattaaaaattcgctaacacatgcctgtgtaaaaggggaccaggtaatgcagactgcttcttgctgaaacaaa

SEQ ID NO: 424675 - DNA, 122 bp, Homo sapiens
ctggtgagtgtaccctttctgcagaaagtaaaaatggccttgctgaggaaattaaatgtacgtccaagtgctgcttctttatggcaccagagaacaagcatttctaacacaagggaaaaaaa

SEQ ID NO: 424676 - DNA, 122 bp, Homo sapiens
ggctccgaggttggagcaactcctaacactgggctcggagctaggggcttgctggaggggcgcttgccgcgccggccctcggggctcacagccgggcacgccggactgcggcgagcgcgtgg

SEQ ID NO: 424677 - DNA, 122 bp, Homo sapiens
gcagaatggcagcccagtgattatgctacagatgggctttcaatcacctgtgtaggttaccgcttcctccctcacacacacacaaaaagtggaatccttcgttgaactgaatatgaatatga

SEQ ID NO: 424678 - DNA, 122 bp, Homo sapiens
tgagcaggggcgggtgtgcacatcccggcagctggagtgtagatgaaatctcagagagcccggcagaagggctggaccagggaccacgtcactcccaggcctgaccactccctgcttctcca

SEQ ID NO: 424679 - DNA, 122 bp, Homo sapiens
ttggaagcagcgccggagtccgtctgaacccaggcccgggaggccagaggctgccggccacgttcaactgtgtcccccttgggaagacaatccccccagttctggtttcttcctgagccacg

SEQ ID NO: 424680 - DNA, 122 bp, Homo sapiens
ccgccgagatcgggtgcccgggatgagcctcatccggaaaaagggcttctacaagcaggacgtcaacaagacagcctgggagctgcccaagacctacgtgtccccgacgcacgtcggcagcg

SEQ ID NO: 424681 - DNA, 122 bp, Homo sapiens
acagtggagatgattgggtttggagtcgcttcctgggcagagctgctcgtgttcgggcagcgctcagggcactcggttggacgtcgccagggtggctcggcccctccacgtggggcctccac

SEQ ID NO: 424682 - DNA, 122 bp, Homo sapiens
gacacactcgcgactgcctcgcggaacggccttaaatttggctgacacaggccgagcggacgatcaagcaaaagctgtttccctccaggggcaagagatgggcaggagacaccccagaatgc

SEQ ID NO: 424683 - DNA, 122 bp, Homo sapiens
ctttagtcttgaaatttcagtgaaagctgaaaaatgtatgattttagtattgaaaaatgacggtcaattgtgacaaacgtaagatatactgataattccttaaggcaggacaccaaaggcat

SEQ ID NO: 424684 - DNA, 122 bp, Homo sapiens
gcgctcgaggggtggctccgcaccgaggtcccctgtgcgcgggcacctgggctgggccgccgccgcccctgggcgcccgggctacccgcagcctcccgggctcccaccctccgttggtatcc

SEQ ID NO: 424685 - DNA, 122 bp, Homo sapiens
aacagatgatagcggttgtactgccatctttgttcaggtccttatttgcctgtaaagctacggcagtcttctctctgattatactatcatttttgaactttctatccaaagaaatcattact

SEQ ID NO: 424686 - DNA, 122 bp, Homo sapiens
gtcctccccgtggacctggagaccagggttcatccgagcacagtggcaggaggcctgggccgggcctgaggcctcgtagaccccaggcgtgctgtgcgcagtggacaggatgagtctcgatg

SEQ ID NO: 424687 - DNA, 122 bp, Homo sapiens
aaaacttttcagattgcatctcaaaacataggaaattctgatggatggatgggcttgggccgaccttgtactttgggcaatttgaatttctagacaggtctaattcatcaagggataactgg

SEQ ID NO: 424688 - DNA, 122 bp, Homo sapiens
tgtctcacattcatcactttcatgatggtgagcctatagatcttactgtatttcttgtgtcggttggccaggaagccggccagttgagttagaaaacatctctctttgaggtttctgaactg

SEQ ID NO: 424689 - DNA, 122 bp, Homo sapiens
agaaggacgcctccttgatggaaagggtccggttttcgtgcagggtgatgcggccctccacgggggacacagtttgccacaccctcctgtcagggaagatccaggaaatttggggggctggg

SEQ ID NO: 424690 - DNA, 122 bp, Homo sapiens
tagctgggactacaggcgcgcgccacaatgcccggctaatttttgtatttttagtagacacggggtttcaccatattggtctcgaacgcctgaccttatgatccgcccgcctcggcctccca

SEQ ID NO: 424691 - DNA, 122 bp, Homo sapiens
actggtaaagaaacctcagtcctggtcgcatttggtcctgagtttattgtcctgtggagccgggatgctgaattgatattctgatgtatgggggcagggaaattatgcatgcgggaactata

SEQ ID NO: 424692 - DNA, 122 bp, Homo sapiens
agcacggtcccaagaggtgaaaacgacttgtacaccccagctgcttgggattattgaggacgaaagtagagagaaggggagaaatattggggagtgaattttgagccaaggcttaaaattaa

SEQ ID NO: 424693 - DNA, 122 bp, Homo sapiens
gctgggttgcatcagagtccaggcgacaagattgatgaagaaagggcagaggagggatgacgtaatggattgtgcagcatttacctgcgaattatctctagctgtgtactgcttgatgtctg

SEQ ID NO: 424694 - DNA, 122 bp, Homo sapiens
taatccactttctgaaccatctcttatttttttcattattctgagtaacatcaaaaagtgcgactgtttctgcttttgtttgtttcaaaaggaacaaccatgagaggtggttctgcctgcat

SEQ ID NO: 424695 - DNA, 122 bp, Homo sapiens
cacaaaggtgggaccaccctgtacttcagggcacaggggccaggaaaggctgagtgtgagcggggcgggggcggtctgccacccacaggcttggaaaccaaaccaaaagtaaacagagcaaa

SEQ ID NO: 424696 - DNA, 122 bp, Homo sapiens
gcactagttcactttgccttggcttaagaattcacagatcaggccaggtgtggtggctcacgcctgtaaacccaacactttgggaggctgaggcaggtggatcatttgaggacaggagtttg

SEQ ID NO: 424697 - DNA, 122 bp, Homo sapiens
agaatccttctactcacacacgtcccgctgtggatactggagaatccttctcgccgcacacgtcctgccatggacaccggagaatccatctccacacatgtcccgccgtggacactggagaa

SEQ ID NO: 424698 - DNA, 122 bp, Homo sapiens
tggcaggcgtccttgtggccctgggggtagccggcacacagactcccaggcagcacaatgcgctcagcctggggcacgtccgcgcccacgtggtagaggccgtcgcaggtgcgcgagtccag

SEQ ID NO: 424699 - DNA, 122 bp, Homo sapiens
taattttagcaggtctcctttttgcatgcaaatcaatatggcaattaccatctaaaagctcgcccagccccgggtcaatgtaaattgatcattgtccgccttccacaaaataacatcgggag

SEQ ID NO: 424700 - DNA, 122 bp, Homo sapiens
ggttcctggctccgcctcccgcccctccgcgctagaagccccgcccccagaggggctcgacgaaccgccacttccgcaacgtccaatgaaacttagccgggggagggacggggcgccactga

SEQ ID NO: 424701 - DNA, 122 bp, Homo sapiens
tcaggatattccatccagaatgtatggagatttgaagttgtctcaaacatacaaggctgccgtcacttgcaatctcaagcagttgatcctcttctagtatcgacaaagtcaattcttctggc

SEQ ID NO: 424702 - DNA, 122 bp, Homo sapiens
ccctgcaaagtggccggcgtgcttatcattaccgagcttccgcgggcctgcagagcctggcggactcagacttctctccggagcgggatgcggccctaccgcggcctcacacttctcgccgg

SEQ ID NO: 424703 - DNA, 122 bp, Homo sapiens
gcgtgtgtggaaattaccttttgatttcttaattacattgtcctcacctgcagctcaacccgcctaggagaggcgctcgccgagctcgattctccgggtgccataaattaggacgccagtcg

SEQ ID NO: 424704 - DNA, 122 bp, Homo sapiens
ccctgaggccttggggaaggggctgggacctcagccagggagacagtgggcatgagaagacgggatgggggccccaggcccagccaaaggggtcctcacttcagagctggccaaggagctgc

SEQ ID NO: 424705 - DNA, 122 bp, Homo sapiens
cgatggaagaggctagtggtctgctgggaagggaggtggcccgcgtagcgtcccctccctcgctgagcctcagccacccctcccagggatggtgcgcccccaacatggtccggagatacacc

SEQ ID NO: 424706 - DNA, 122 bp, Homo sapiens
ccggaaaggacttcaagatgtcggcgaccatgagcacccaggggtccgagtcgaggctggcgagctggatgatctccattagggcgcccttcatctgcaaaataggatgctgccggcgccac

SEQ ID NO: 424707 - DNA, 122 bp, Homo sapiens
cgggcgcggcacttgccgcagcttcttgggggcctcaccctgcgggcggccctcggacctcggtgagccccgcggtccagccctcccagcagacacccctgcagccgactccctgggacccc

SEQ ID NO: 424708 - DNA, 122 bp, Homo sapiens
agctagagggaacagcaagtgcagggaatgttgaactggaggctaggactctgcttctcccgggtctgggggctgtgtgaggggcatgtggcttgaaggagtcagaggtcacccactgccca

SEQ ID NO: 424709 - DNA, 122 bp, Homo sapiens
acagaaacacattggaaaatgttctttttctggtcatagttgccaacacatctatgaactcggcctctaatcagtctcggaagttcacgatcctgtttttcaaaaaataagtatcaaaaaat

SEQ ID NO: 424710 - DNA, 122 bp, Homo sapiens
ttcaagctatcctcccacctcagcctccaaagtagccaggactacaggtgtgcgccaccacgcccggccaatttttttatgtattgcagggacagggtttcaccatgttgcccaggctggtc

SEQ ID NO: 424711 - DNA, 122 bp, Homo sapiens
tcctattcgcagtccccagcgcccaggaacatagtccttccagcagtggcagtaataggtcgccaggtggtgctgtggagcagagctccggagctcagtgagaaaaaaggcgcggccgctca

SEQ ID NO: 424712 - DNA, 122 bp, Homo sapiens
cctcagcgctcgctcaccctcctctacggccacgactctgggagtggggaaacagagagccggttcctctgctgcagaagtcctcggggttccttctcacaactctgcgaaggggaaagggt

SEQ ID NO: 424713 - DNA, 122 bp, Homo sapiens
aggaactggggctgcacggggcgcttgggggccagcgcgagttctgggtgggcgtgggctcggcgggccccgcactcgtagcggccagccagcccgcaagccccgggcagtgaggggcttag

SEQ ID NO: 424714 - DNA, 122 bp, Homo sapiens
tgaaaatggatgctgcctgttaaacatgaaatcactaagggagcttctgcaaaacccacccggcagcatgaggaacggtgtctacagcgtgctccaaacggccacggccccgctccttacag

SEQ ID NO: 424715 - DNA, 122 bp, Homo sapiens
ggcggcgcctgccctgcgctggcttcccggggacccgagcccccgcggccgctcacagagcgacctctcgtcgtcctcgagcaggggccgcccgctccgggtccacatctccggctcaggta

SEQ ID NO: 424716 - DNA, 122 bp, Homo sapiens
tgcctatgattaggcaggtgaatactatgttctaatttggtttatgctctacgatgtcttcggtaagcaaatgtaacagcttggtttcatctacgattacccacttcgtataaacgttacac

SEQ ID NO: 424717 - DNA, 122 bp, Homo sapiens
tatgcaaatatgtttgtatgtgtatatgtatattctttttctaagtcatatgaaatacaacgtatgtaaagtgtgtgctgtaaatgtaaagtcaataaatgataaaatgaacactctcgtaa

SEQ ID NO: 424718 - DNA, 122 bp, Homo sapiens
tagcgctattagaatacatgtgaccacaccaaaagcccaggcggacacccgcagccagctcggatttggacaattcaacattgctggcagaactgaagggaacaagttaccccaaccccatc

SEQ ID NO: 424719 - DNA, 122 bp, Homo sapiens
gtactacagtactgaacattatgaagaaaaaaatagaatgtacaccgagtacgttgaaggcggccaaacccatcatggtgcccgatgattcaggccaattactggcacactgatcttagatg

SEQ ID NO: 424720 - DNA, 122 bp, Homo sapiens
cacggaccccaggcggcccgcaccccacggcgggccggcgcccccaccagtggaggagcccggtagtccccattcccgcccatcacgtccctctgcggacctcagaggccgactgaccccgg

SEQ ID NO: 424721 - DNA, 122 bp, Homo sapiens
aggaaaggtaagtgtgtctgtgggggcttcattgccttcctctggctctgactttcactccggggcaacagtagcaccaaaccacatacgcagtggagctccggggtgaggagggggtggtg

SEQ ID NO: 424722 - DNA, 122 bp, Homo sapiens
gaagcctgggggccgggggagccacagctctgtgccctggagcagtctaaggacctgggacgaaagacagagcagtggggttaaaaacatggggattttgaggccgggtgaggtggcttaca

SEQ ID NO: 424723 - DNA, 122 bp, Homo sapiens
cgcgggcgggtgccccgggacgcgaaggccgggcgggtggcggcgcccctactcacgtagcgctgtagcttcctctcggggggcgacttaacgagccagccggtgcacactgcgtcgcccgc

SEQ ID NO: 424724 - DNA, 122 bp, Homo sapiens
gcggagacgcttccccgggccaccccgcgaccaggagggagtcgagccgcccgctctccccgcgtcccccgccccatcccagccagttggccccaccctgcgcgggataattgggacgggag

SEQ ID NO: 424725 - DNA, 122 bp, Homo sapiens
gcggccgcacagggcaggagcgtcttttgttccaacccccggggcatggcggggcggggccgccgctttgtccgaggccggtcctccagcccctccccggcggccgcggcccggcccggcgc

SEQ ID NO: 424726 - DNA, 122 bp, Homo sapiens
attttccctggggttgctgctggctgcttgcatgttctctttggtgggcgaggaaagccccgtggtctccttcaaacgagaatgtctgcttttgtgtttaaatctgatcaaactctgtgcta

SEQ ID NO: 424727 - DNA, 122 bp, Homo sapiens
gttttaggaagagccccgctaagtcagtttaactagaacccctgattctgaatatctgatcgccctctgtgctatctgatggggttcctcatcctccatccccaggtgatatctgatcaccc

SEQ ID NO: 424728 - DNA, 122 bp, Homo sapiens
gttctagcaatgcgaaaacggactaataaccaccatctcaggaaaccatggccggcattccggagcggcccctgcagtttccctgtgacactcgctacacactttctgggatgtgccctcac

SEQ ID NO: 424729 - DNA, 122 bp, Homo sapiens
gcctgcactcctcagcccttgggcggtcgatgggaccgggcgccatggagcaggcgacagcgctcgtcggggaggctcgggccgcacaggagcccacggcagaggggaggctcaggcatggc

SEQ ID NO: 424730 - DNA, 122 bp, Homo sapiens
gtcacagggtcttttctcccctgcatatgaatttccccttcgtctacacgggctgccccacgggtatctccacacagcagaaatcctcagagaagcttaaagatatgtagggtaagaggagc

SEQ ID NO: 424731 - DNA, 122 bp, Homo sapiens
agccccggccgaaggggccggagaagcagttcctcaagtcccccaagggctccgggaagccgcctggggtgccagccagcagcaagtccgggaaagccttcagctactacctgccggccgtc

SEQ ID NO: 424732 - DNA, 122 bp, Homo sapiens
cccgcaaaacagcaaaacagggcatcaggaacactcccaggaattaagtcaacaggaaaacgaggaaaggggccacagaggcttccttgctgtggacaacccctgtccgttcccctcgagga

SEQ ID NO: 424733 - DNA, 122 bp, Homo sapiens
tgctggggacacagcagccgcaagactgacagagcccctggtccatggcccttacattcacgaaaagggggacaggatcagaccaaacacccaaaccagggtcctttttataccaaaagagg

SEQ ID NO: 424734 - DNA, 122 bp, Homo sapiens
ttttttctcctgcttctcagaaggcctctgctgagcacgatctctgtgggggtaggagctcggcatgtgtgtattgacagacaggctcatgccctttctcgtggctattttcagctctctgg

SEQ ID NO: 424735 - DNA, 122 bp, Homo sapiens
tcagtacccaaggaagatgggccgtcccggaagtgcggccggggcgacttgcaggcccctcgccgaccgctctaggaatctcggaggtcttttgacctcgacgcctccttacctgggtctcc

SEQ ID NO: 424736 - DNA, 122 bp, Homo sapiens
gccttgggaagcacctgtctcagagctggggactggaggcactgggggcacagctgcacccggagtccgaggggtcggggaaaggaggcaaccccggggcagggggctctggtacccgtgcg

SEQ ID NO: 424737 - DNA, 122 bp, Homo sapiens
ccacatctgctttctttctctgtttgatcccgtgcaaccttctgacaccatctcattcagcgccaaaccgtgattcatatctgaggttcgcttctgtgtgggcttggaactaatccaggtgt

SEQ ID NO: 424738 - DNA, 122 bp, Homo sapiens
ccattttagtgtagaatgctccagtattagtgttcgcattagtacctgatattttcttggcgtataaatgttatcatgaattgcttcttgttgccatggcagtccaaagaaaggacccattg

SEQ ID NO: 424739 - DNA, 122 bp, Homo sapiens
cctaaagaagacaaagaggccggaaaggggtcgggggcttcctcacaaccacatggccaccgtcaaagtaataccatctctttgtgctgccactggcctgtggggggcaaaggctcctttga

SEQ ID NO: 424740 - DNA, 122 bp, Homo sapiens
agcgcttgctcccgccgccgtcaccgccacaggcacagactctgccacagccgccgccgccgctgccgccgcccggtcgccgaagcagcaatacctcctggcttccgctccccgtcggtgtc

SEQ ID NO: 424741 - DNA, 122 bp, Homo sapiens
gatctagaggccctgcccagtgaggagtagcaggggcgggggacggcattgaaaacaggccgcttttccgggtaaggtggctgcgctgtgctgggggtctatgatagtccctaatcactgtg

SEQ ID NO: 424742 - DNA, 122 bp, Homo sapiens
ggcctttggaagcccaagccctccctttttcccaaagggggaggggtgggctgcaccccccgttgccttttcacccaaacccagctgggtgggaccgagcccttgggctctcaggagctccc

SEQ ID NO: 424743 - DNA, 122 bp, Homo sapiens
cggagcgcgccccgcttcctggttccgcccggcgcgcgctcgctagcccgctgtccctcgcgccccctccgcgaccgcccttgaaggacccggaccccctcggcacacccgaggtggcggcg

SEQ ID NO: 424744 - DNA, 122 bp, Homo sapiens
ccatctgtcaaatcaggctattgatccttcctcacaggttgttgagagggttagtcggaccgggaatgatctagtgctttagaaaaggttagtgtcatgaccaaggaaggcaacccggccca

SEQ ID NO: 424745 - DNA, 122 bp, Homo sapiens
ccaaaggcctaaccgtattcaacaccagaaagtttagactggagaaaggccttagactgtcgctgaatcaatatgacctgacttaaagcagaaacagccaggcgtggtggctgacacctgtt

SEQ ID NO: 424746 - DNA, 122 bp, Homo sapiens
gagctgtagctctgatggcccctccttcgggaatgattagggtgacggctggccggggctcgttcgagtggcgcccggccggtggtgacccgaacaggagagcgggacggcgaccattctct

SEQ ID NO: 424747 - DNA, 122 bp, Homo sapiens
ttttaacgaagggaaagaaaatatgccatttctagcgcttcagccacacaaagaaagcggcggaatgatccgctctcggcgaccgcaagtcccggctcgcccggcgcctgcgcggcagcggg

SEQ ID NO: 424748 - DNA, 122 bp, Homo sapiens
cagccgcggaccctgctccgcgagtgcgggagctttggacttgaacgcgacgtgctcgcccggctcccaacaaacttgcaatttccgcgcgcaccccttaaacaggaactgttccccaaacc

SEQ ID NO: 424749 - DNA, 122 bp, Homo sapiens
cagagcaggagcaggagcaggaacaggagagagggaggggaggtgccacacacttttaaacgaccagatctcacaagaactcacccgctgtcgtgaaaaccaaggagatggtgctaaacatt

SEQ ID NO: 424750 - DNA, 122 bp, Homo sapiens
cctcggctgcaccgcagcttgatctccgtgtttgggtccagctttgttctgtgctagggtcgtcttggctctattcgtgctctttccaaattccactcgagtttttagattcagctggtcag

SEQ ID NO: 424751 - DNA, 122 bp, Homo sapiens
cccaggtccgggcaagcagcctcccctctcgacggccccgggcagccccatcaccctcggcggctgcccaggcccaggcctgtttccggccctcctctgagcacctggagaggaggaagtgc

SEQ ID NO: 424752 - DNA, 122 bp, Homo sapiens
cagaggagttccagctcaaggaggtcacaggaaaagtggaggcagggttgaggcgggtgacggggactggggagtaaggccttggagctgtcactcaccttgacacctggctcgccctggat

SEQ ID NO: 424753 - DNA, 122 bp, Homo sapiens
ataaattcttccaaagacaaaaaagaattgatattgctattctggggtcgtttgtgtgtacgttgtatattgagtaattatgttagtcttgttgggaatataattttaagttttggagaaag

SEQ ID NO: 424754 - DNA, 122 bp, Homo sapiens
tgtcttttaaaaaagtgtacttaaccatttccccactctccttatcccctggtgtggtgacggctgtaacccactaactgctggtaactgcccttcagagaaatgcatcccaggtgctgaat

SEQ ID NO: 424755 - DNA, 122 bp, Homo sapiens
gtggagtaacagtgtcagaagctaaaatcttcaagaaatgatagggagtgacgcgggtaacggcaactgactgattggtcttattctaagttccatgctcggctcatcaatttccagccttt

SEQ ID NO: 424756 - DNA, 122 bp, Homo sapiens
aggttgcccgcatgggcttctgcagggaaagctactcacggcggccgtggggagcctctgcgtgcaggccacgggaagccgcagcttccagtccgtctccccatccagctgatccgtccgca

SEQ ID NO: 424757 - DNA, 122 bp, Homo sapiens
ggccgctcggaggccccgccccttccatcctcccgagcgtctcgccccgctcacaggttccgcccttggcctctggtcccgccccactgccagcacctggagcagtttccgcagtcgatgat

SEQ ID NO: 424758 - DNA, 122 bp, Homo sapiens
agctatgacagagcttggggctattagaaaagaagccatcagggcttttctctcctcgcacgagccttgatcagagcctcagttactgacgggtcgtttgctcgagatggtaatcctgcctt

SEQ ID NO: 424759 - DNA, 122 bp, Homo sapiens
gcccgaaaaggaacacagtagtgccgttttcaagtgggcaggtgacgggtctgtctgggccggagaggacgaagagggcggccccgaggttccccgggctgggggatgcgggagggtgggtc

SEQ ID NO: 424760 - DNA, 122 bp, Homo sapiens
ggctgaagacttaaagcaaaccctgttatcgaaaccaaaagatgtaggaaaggctctgcccgggctctgccagtgtgttcctgcaccacggctcttgcctcaaagccacccactctgcggtg

SEQ ID NO: 424761 - DNA, 122 bp, Homo sapiens
ggctactcttttgctgctgagttaaaaagagatcctgagacttagcctgggaccccgactcgcggcgattctgtggcaggcgcagaccttttctcctgtcctccactgcctctttgcctcgg

SEQ ID NO: 424762 - DNA, 122 bp, Homo sapiens
cccaggcccaacccgatgagataaagcatttcaaacttgaggagaagagagactgcaagacgaagtggacagaaaaaccgtcagtaacaccgaggacatctaaaatctagtgatgaacacga

SEQ ID NO: 424763 - DNA, 122 bp, Homo sapiens
cagctccgtgccacaccagtctggcctgtaggcccgccccagcccgcccccgcccgcccccggctccgccctcaggctggcacccactccgcccccagcccaaccctcgggcccacctcagc

SEQ ID NO: 424764 - DNA, 122 bp, Homo sapiens
acagtggttgctgctcaggaaatttgagtgaaggactgcaaaagaggagcaaagcagacccgagagagaaggcagcagtgctcccctgtgacgtgctccatcaccgggcagggaagacaccg

SEQ ID NO: 424765 - DNA, 122 bp, Homo sapiens
gatgcacacgtacatgccaggctacggtgcacacacacacacacacacacacacacacaccgagctaggatgcacacgtacatgccaggctatggtgcacgcacacacacacacacacacac

SEQ ID NO: 424766 - DNA, 122 bp, Homo sapiens
cccttccctggccacaaacccgccgaggcccccctctctacccggcgcgcctaccacaggcgcgacacctgtcaagccttgggacaccgaaaccgtacctgggaacagcaaacacaccacag

SEQ ID NO: 424767 - DNA, 122 bp, Homo sapiens
cggtccagtccctgtgcaactgactgtggccccaggcccagcgccctctctggtcagctccgcgcccgctgccccagtcacgcccgctgcctccgtgtctccccagattgtacgggggccac

SEQ ID NO: 424768 - DNA, 122 bp, Homo sapiens
ttctgaccctgcgcttcttcgggacccagcctttgtccccatcagccgcctcccactttacggcagacgtacccccgttcaccccacgttactagtaggggaccgaccttccgggggcccaa

SEQ ID NO: 424769 - DNA, 122 bp, Homo sapiens
gtgtcggattctcccgctgaggaggagtggggtggcgccggggcgggaaggagaagaaggcgaaggaggcctggcagtgcccgccctgccctacccagcctccgcgggcccctgcgcaggca

SEQ ID NO: 424770 - DNA, 122 bp, Homo sapiens
gggccaggctttgatgtctgcatcgtgccatttccagaaacccaaggttttcagtcctatcggttatgtgctattccctctaccaaatttataatcttaggtatatttattgtattttttaa

SEQ ID NO: 424771 - DNA, 122 bp, Homo sapiens
ggccatgttcaggctagaagtcacagtcagctcatacctgcctaggtcagaggctccatccggtcccacatccataagaggctggtggaaaacatgctgcctaaccccaccactttgacaag

SEQ ID NO: 424772 - DNA, 122 bp, Homo sapiens
aaggaaacaagactgaagacagtcatctccatggctaccctaagtggctctctagtgtttcggatacagtagatactggggaatcggctaaaagtaccctggaaatcggctgaaagtaccct

SEQ ID NO: 424773 - DNA, 122 bp, Homo sapiens
gtaggcctagaaataaacatgctagcttttattccagttctaaccaaaaaaataaaccctcgttccacagaagctgccatcaagtatttcctcacgcaagcaaccgcatccataatccttct

SEQ ID NO: 424774 - DNA, 122 bp, Homo sapiens
cgtattcagacgtactgggggcggggcctcaaggggaaaagcgcctgagccgggatatcgcgagaacatcccgttctttcgtagctctggtgctgcggctccgctctcgtcgcaacgagatc

SEQ ID NO: 424775 - DNA, 122 bp, Homo sapiens
gccgcgcgatggtcgccgaacccacaggaggccgggctgtctgcgccccgctcccggggccgcccctagtcgccccgcctccaatcaccgcggccctgccccgtccgggtccgaaggctgag

SEQ ID NO: 424776 - DNA, 122 bp, Homo sapiens
tgacttcctggggtaagaaatcaaagtgaccaattccatggcactatgggaagtgagactcgtctcaacagagttttgtgttttaaaacaagaaagcccaaagctttgaaataaattaatta

SEQ ID NO: 424777 - DNA, 122 bp, Homo sapiens
agtcggagaagtctggtttcagcagcccctccccttcacagacctcctccctgggaacggcgttcacacagcatcaccgacctgtcattacaggacccagaggtgagctgctccacaggcac

SEQ ID NO: 424778 - DNA, 122 bp, Homo sapiens
ctggcaggagcccaagagcctcctgagcctgggcagctatcacccggcggccggcagcagcgagcccaaggcaccctggcccaaggccaccaaccgggacctcgcccaggaacccgggccgg

SEQ ID NO: 424779 - DNA, 122 bp, Homo sapiens
tgggggcggggctgagctggcgggggcggcaggctacaaagcccgggggcggtgccggggcgcagagtccccgcagcgccggtcgggagcgcagcgcggcgcacgtcggcgcgcacggcggg

SEQ ID NO: 424780 - DNA, 122 bp, Homo sapiens
agcttggaaaggctattcctcctccaggcccgcgtgtttgcaagacttattccttcatcccgtgtgtatgcgctcaaaggtcttctttgagaggcagtatctcaccaggtgtaaagtcaccc

SEQ ID NO: 424781 - DNA, 122 bp, Homo sapiens
ggaagagccccgcctccttaaagagacagcagctcccagagaaacctgcgtgctgcggcgcgcagagcccgctcccgcccgcccttctcccgaggctgagcctcgagttcttaaagagacag

SEQ ID NO: 424782 - DNA, 122 bp, Homo sapiens
agaacaacttgccactctccacgtagtaaaagcctcccgcgctttcactgtattttacggcgccagccacggcatttgcagtccctgcaaaatgaacgtggtcagcctgcacacgcgtcttc

SEQ ID NO: 424783 - DNA, 122 bp, Homo sapiens
acagcttagcattagcacatgtgcattctaggggattcagaggattgcttgaatgctctacgcagactcctccttgcacctgtaatttgcagataaaagttgagaaacatttgaaacttgca

SEQ ID NO: 424784 - DNA, 122 bp, Homo sapiens
gaggtgacctgaagattttactcagcaacgtggttttaggactgctgagagcagagacaacggctacccttactgcggcacgttcagtgatgcaggggccacatttccatttcctactttct

SEQ ID NO: 424785 - DNA, 122 bp, Homo sapiens
tcccccttctggccaggacctcagagggaaggcagtgccccttcactcactcatgcatctcgcatctctcagactcccaaaccagtcagtgtcaaggcatagaaatgacctggacatggccc

SEQ ID NO: 424786 - DNA, 122 bp, Homo sapiens
cgttcactttccagtttcagaactcagctaacccctggaatgaaccacggttcatcttcacggtgtcctcagtgcagagcgccgtgcatcagacgatcgatgcgtattcgcagcaaattggc

SEQ ID NO: 424787 - DNA, 122 bp, Homo sapiens
tctgatgttcttgtctgtcttccaagatgtcagatgaacagtctgctttatttataaacgcgactgaggctgagaacaaaaggatgtgattataaaaagaaaggaaaagcctcagaaggatg

SEQ ID NO: 424788 - DNA, 122 bp, Homo sapiens
cgggagcgattgccgggtccggctgggacgcgcgtgtgagtgcgtatgcgtttgtgtgtgcgtgtggctgctgtccaggggtgtcttttgctctgtgtacacacaccaggtgggtgccagct

SEQ ID NO: 424789 - DNA, 122 bp, Homo sapiens
agtcacagcacgcgcggcgcccagcccctggtttctaaaccccattctgtcgtcccgggacgaatgtcttgggatgtctggctgggtccagggcaaacatcctgcagtgacaaaatgtgtga

SEQ ID NO: 424790 - DNA, 122 bp, Homo sapiens
ccacagaggtcatcagcaagtagaagtgcatcatactagggggcaacatgctgcccctgtcggtacttttctttctgtgactggagtcagccacagcttgtaacttcagtttcctgatttcc

SEQ ID NO: 424791 - DNA, 122 bp, Homo sapiens
gacactgtgcccggctttagtaggtgccgcggacactgcgcccggctttagtaggtgcctcggacactgtgcccggctttagtaggtgcctcaaacactgtgcccacgtactctgaatggcg

SEQ ID NO: 424792 - DNA, 122 bp, Homo sapiens
gtcatcaccctggagcgctggtatgccatcaccttcgccatgcgcctggaccggaagatccgcctcaggcacgcatgtgccatcatggttgggggctgggtttgctgcttccttctcgccct

SEQ ID NO: 424793 - DNA, 122 bp, Homo sapiens
tagcctgtgcatgcagcaaggcttctttccctggaatcgcctgcccttcctccaacacagcgaccagccggtcagaatcccaacccctcgactccggaaatgatctgagagacggaacttcc

SEQ ID NO: 424794 - DNA, 122 bp, Homo sapiens
cgggagctcagagctcgggagagtttccggaggcgcagtgacaggtgctgtgaagcactgcgggggtccacctttcccggtccctggccagctccccccatctgcagatgcctttgcccagg

SEQ ID NO: 424795 - DNA, 122 bp, Homo sapiens
aagccaccacgtggcaaagggtggacggcgattgggaaagcagagtgtcccctccccgggcgtgacagcgttccctgatcaaatggagggttgggctgcttattctcgaggcccaataatgc

SEQ ID NO: 424796 - DNA, 122 bp, Homo sapiens
agggttttccccctcttttccattttaatcggagcctctctctctctccttccaagcagacggtaactgccagaaagcaggggcctcattcacaggctgctcctttgaatcttcataacgga

SEQ ID NO: 424797 - DNA, 122 bp, Homo sapiens
accgcccagcggagggtccgatgtgcaggggataagcatgtcttggctgggcccagtgggcgtgcgagcctgtctcaggccccccatctggaaagcagagtggacgggatgcatgtgattga

SEQ ID NO: 424798 - DNA, 122 bp, Homo sapiens
gttccctcccagagctgagaccggatccggaagcaagggcaccgcctcccgcgccgcccccgcagcacctgttcgcggcgcctctagcaccaacccaccgcagaagcccttaacattctcta

SEQ ID NO: 424799 - DNA, 122 bp, Homo sapiens
ccgtggtgccaggggccggctccgggctgcactgccgaggcactgcacccgcctcacacacgtgcaatgcaacagcaatgcaccgcggggccgcccgcctctctcggcccccacacccgcca

SEQ ID NO: 424800 - DNA, 122 bp, Homo sapiens
tcaggcccaagggagggaaagcatctattggtagcagatgggtatttatcctggcagctccgcttctcaaacttgaaagtggagttgggtcacgtgggctcacgcactttccctcctcttct

SEQ ID NO: 424801 - DNA, 122 bp, Homo sapiens
ctcttcctattgagctggactgtgctgcacgcagagggccagaggaggccacgtctgctccgagggcccacgggggcttagcgggccgcacgcgttgcttcctgatcacccggtgcccgcac

SEQ ID NO: 424802 - DNA, 122 bp, Homo sapiens
cggtgccgacatttccacactcgccgcagatagcagggccaacttccaccaggtctccagcgagaagcactcacggaagattcaggacaagctacggaggatgaaggctacattccagtagc

SEQ ID NO: 424803 - DNA, 122 bp, Homo sapiens
tgtctgcagtgccggaggtctgggaggctccgggcgaagcctccctgctgcaggtagggtcgcctctctctgcagcgcgtctggaccccaaaggaaggatagggggcaagggatcggccctt

SEQ ID NO: 424804 - DNA, 122 bp, Homo sapiens
atgctcggaccctccacagggctgggggtaggagcgaggctgggagcgcggaaccgggcacgggtctgggcagagcttagggttagagagttgccctcctagctctgctcatagctatctct

SEQ ID NO: 424805 - DNA, 122 bp, Homo sapiens
catttgcattctaaaccgtcccggcctgggatgaaaagcagaaaatgaagtcaaagcggccggcagaacaatgagcccctcccggcagccgccgccccggccgcccccacctcacaggctga

SEQ ID NO: 424806 - DNA, 122 bp, Homo sapiens
ttgagtcgctcagctgtgtgtagggatgaaggacattcttgctggctccttgttctatggcgcttcatgtgtgcatctagctgctgcagcagtggccatctgaggagagaagcgagctgctg

SEQ ID NO: 424807 - DNA, 122 bp, Homo sapiens
agcggggagatgggatgggaattgtcttacttggcaaggcagggtaccttcattgccagacgccctcatttgtgtgttcctccttgctccagcgagatagaaccttttgcgcccccaacccc

SEQ ID NO: 424808 - DNA, 122 bp, Homo sapiens
cacatcttatttcgtgtgccattttgctcagggccagcccgaagtgagaatggcttttctcggtcaattcctagttttgccaccatcatccttacacccgaatcctagtaagtctgttctcc

SEQ ID NO: 424809 - DNA, 122 bp, Homo sapiens
ttcgtgccccacaatgccttcgtcacttgggcaactgagccttctgttaagcagggagctcgcaagccagctctttccgtgttgcctgtgttacgtcctgagaaaggcttatatacgtgtgg

SEQ ID NO: 424810 - DNA, 122 bp, Homo sapiens
gtgtccaagtctcttcttggggtcccacggccttgggtctggcacctctgctgggcacctcgcagggcttccgagacgtgccgcgacccacgggaccccacggaagctttctcccaccgcaa

SEQ ID NO: 424811 - DNA, 122 bp, Homo sapiens
cagctgtcccctggtggagcagagatgggcagctcccttccctcacttcaccctctcagccgtggggaaaggacagtggcaggaggaaccccagtctcacatacttcagggcactgaggggg

SEQ ID NO: 424812 - DNA, 122 bp, Homo sapiens
tctgggatttaaaacataaaccgaaaagaagagttctctctggtgtttagagggaggtggcgagctccttaagtgagagtccgcttagtgcccatacattgatccgcgtgtggactccgggc

SEQ ID NO: 424813 - DNA, 122 bp, Homo sapiens
gttactggggcgtggttacccgctggctgggatgagaattctcataactactttcccagtcggcaactgccaggatgcagggagcttgtttagttaacactatgagaccactggatccaact

SEQ ID NO: 424814 - DNA, 122 bp, Homo sapiens
cgtaacacattcaaggcatgctaacttaggggacctgcatgagaccacatctcagagcaccgtctgtgaacctagcctaaggtgcttttgtgaggtgttgggaaaggaagaaaggaaggtgg

SEQ ID NO: 424815 - DNA, 122 bp, Homo sapiens
ctcgggatcccactctggcgagcccctccacacctttgcccgcaggccgggaactgcagacgacacacacggaacatacaaccagtcagcagcagagggtgcagatactacataaaatcaat

SEQ ID NO: 424816 - DNA, 122 bp, Homo sapiens
ccagccgaacgtgttcttctgggtggcgtgggtccgccgggcgaagcgctcggccaccagcgccaccaccagcgccagcacgtccgacagcatgtggaaggagtcggagagcatcgccagcg

SEQ ID NO: 424817 - DNA, 122 bp, Homo sapiens
gatcagagtgttctgtctactgagcccttggaatctctccacagggcacctgccagtcatcgccaatcaaacccgagatgacagttgagatcaaacagacttttcattcctggttggtgcct

SEQ ID NO: 424818 - DNA, 122 bp, Homo sapiens
gtgagtgttacagctcttaaaggtagcgcgtctggagttgttcgttcattccggtgggttcgtggtctcgctggcttcaggagtgaagctgcagacctttacggtgagtgttacagctcata

SEQ ID NO: 424819 - DNA, 122 bp, Homo sapiens
ggactcatgcatgagtggggaatatgctcgtcttgttgattataaaaggctgcagctgtccgggcgcggtggctcatgcctgtaatcccagcactttgggaggttgaggcgggcggatcacc

SEQ ID NO: 424820 - DNA, 122 bp, Homo sapiens
ggacaccagcctggcctgcctgtcgcctccaccagggggcccccctgccccggcccctctcgggccattgcatcctgtccctctggttgcttgcttggggcttgcaggacatggtggactct

SEQ ID NO: 424821 - DNA, 122 bp, Homo sapiens
aatcgccacctccatcctttacaagcagagtgatccataccttgacagttaggacacggccgttgatcactacagacccttagtcactgtactcacaccaaaggcacgcggaccacagacag

SEQ ID NO: 424822 - DNA, 122 bp, Homo sapiens
ggaggaagcggaggccagagtttcctcgccgagagaggccgtggtgggaagccggtggggcgaggcgggggaggggaggcgggggccggggagagggtcggggtgaggggggccggggaggc

SEQ ID NO: 424823 - DNA, 122 bp, Homo sapiens
gagcctagaatatcagcattctgtgctgaagactgaaggaatagacatgtgccagccagacgaacacattgcatgtatttgtatcaggcatctttccaaaagggtggttatctatttgcttt

SEQ ID NO: 424824 - DNA, 122 bp, Homo sapiens
tgaaacattaactggcattgaagattttgagagctacaagtacagtgagacagggaactacgatctgttgtagggaagtgagcccccttcacaccagctgtcatttctgctagtagtaagaa

SEQ ID NO: 424825 - DNA, 122 bp, Homo sapiens
ccattctcacatggagagccccagtgcccgggatggtcctcagtgagcattcacagggcgcggcgtcctccagccgtgagcattggataggctgatgtacacctctgccccgaccaccctgc

SEQ ID NO: 424826 - DNA, 122 bp, Homo sapiens
ttggttatgacatcctcctgttgataagaaggcctccttacacctcaatctccatgtgatcgcatgaacaatatctttcatttatgctccttcttgtggaggagagatggctggaattgttg

SEQ ID NO: 424827 - DNA, 122 bp, Homo sapiens
caatcagcgagactccgtgagcgtaggaccctcccagccaggtgcgggatataatctcctcgtctgccgttttttaagcccatcagaaaagcgcagtactggggtgggagtgacccgatttt

SEQ ID NO: 424828 - DNA, 122 bp, Homo sapiens
cacgtgctagagtaaaattgaggtggggaacctccatccctgggacatggagcacaggggcgaccccgcgccgcttggtcaaaggaggtccgaggccctgcaggaacagcccacagccggag

SEQ ID NO: 424829 - DNA, 122 bp, Homo sapiens
ttgttcccttccttatagcaatataatcatgacaggccatggttaactacatcagatacacgtagcagccgtgaccaagacatggtgccctaataccaagtgttcttgggttaaaggcaggc

SEQ ID NO: 424830 - DNA, 122 bp, Homo sapiens
aagaactctctagaaccagacttccgcgtgtgaagtgctcagagaaggcacagaaatctccggcattcatcagcacatggtgagcgtgaagctgcccgctggtgccaccacacactgctgct

SEQ ID NO: 424831 - DNA, 122 bp, Homo sapiens
tgtcctatttgtaatcattaattttgagactgtggttgctattggatcttcctagtgtgacgcaacccttataaaatgaaatgagagccttccctctctggcttatcagcttcagacttcct

SEQ ID NO: 424832 - DNA, 122 bp, Homo sapiens
caaagtgaggaaggaagcatcaaggtgtgatgccaaccaccagggctatcttgagaccctcggagaagtccatacctgaggagaggagcactgagcattattgcatcaattccaagtaggac

SEQ ID NO: 424833 - DNA, 122 bp, Homo sapiens
gggaatacaaaatggtacagccccttggaagataatatggcagtttcttataaaactaaacgtacttttactatgttatccagaaattgtgctcacttatatttaatcaaatgaggtgaaaa

SEQ ID NO: 424834 - DNA, 122 bp, Homo sapiens
ctcccaggagcagagcgaagctgctcggtggtcccctctccaaccagggacccaagaagccgctcaagggaacacggccccgcggcgtccgggaggtcctgcaggagccctgcggctgcccc

SEQ ID NO: 424835 - DNA, 122 bp, Homo sapiens
gggggatggctgaggggctcccccatcagaggcgacattcagatccggacacctgctctgcgcgctccccgagtgtctcggggaaagggcgcccgggtctctgccccacacgggcggggagc

SEQ ID NO: 424836 - DNA, 122 bp, Homo sapiens
ctgggcgaggccgggccacctgcgcgccggccgccctgcccaggccctgcgcccgcgtgccgcggtgttttcagcggctggcaggagctccttctcaaccgttagcacccaaagagaatccc

SEQ ID NO: 424837 - DNA, 122 bp, Homo sapiens
agcagaggagaaaagccattgcagtaagcaaaaggccataagttttcttccatcaccttccgacccagcctgttttaagaaaaatcttacttaagcacaacagagctttatacatggttatt

SEQ ID NO: 424838 - DNA, 122 bp, Homo sapiens
cgcggacagtccggggctgggcgggcgccgcggcggagcagcgctaacgggctccctccccgggcgccctggggcctttttatccgcctcccgcccgcggccccccagccccgagctggccg

SEQ ID NO: 424839 - DNA, 122 bp, Homo sapiens
agaggaagtgaaaacgagtggcctggtggctctcatgcagatggccatctcacacttcctcgtggcaggctgagctctgggaactgtggccaccacctgggaccaggctcctaggggtttcc

SEQ ID NO: 424840 - DNA, 122 bp, Homo sapiens
ggagcaggctgtgttggcctcggctgcaaaaatggcgtcccctcggggtgtcattaaacgcgacatcctggccccgtgtgcgcctcagtgtccctcctgctcagcacagtcactgaacctcc

SEQ ID NO: 424841 - DNA, 122 bp, Homo sapiens
gtcggcgccgaggtgctcagatggattagtgagacgaccaattagagttgcacactgcgccgaggaggcgggcccataggcggaaaggctttgaacgcaagggggtgtggtcggggtgaagc

SEQ ID NO: 424842 - DNA, 122 bp, Homo sapiens
tgtgctatagggaatcggggaggagctgtggacacatactggtccatgtgggggctgcggcggtgaccagtgagaggtctccttgatgacagcgactctgaggacacagagctggtgctata

SEQ ID NO: 424843 - DNA, 122 bp, Homo sapiens
cccacctccaccccctccccccactcctggttgatgggtgcaatagaaggagcaggactccgtttctcctgaaggtgcacgcagagtcatgtgaagctaggaaaggggcctgggctttgcag

SEQ ID NO: 424844 - DNA, 122 bp, Homo sapiens
gcctgctccacagatggtgcctcctggctgtgtcatccgtggctcagccgccatggcctgcgcggagagattaggttctcacgcatgtggcctcattttgccttaagtagctcccgcagacc

SEQ ID NO: 424845 - DNA, 122 bp, Homo sapiens
tccttgctctgcggggtgggctgaggcttgtccttgtttcctgcagggctggccctggctcgggcagggtggggcatcaccacctcactggccttgctggaggcacagggctctgcggacct

SEQ ID NO: 424846 - DNA, 122 bp, Homo sapiens
atctatgagaagtcacagctccctgccccagccactcacccatctccaacctcaatgacccggtgccaagaattccagtgactttggttctccattctggtattctgatatttggaaataac

SEQ ID NO: 424847 - DNA, 122 bp, Homo sapiens
cttcttcttgaatcccatcccccaacactttaagaccaaagcccttgcaactatacaactcgtggaagtgtcatatgcccacacagcagagtctgtttgcaaagatggtttggtggaacagg

SEQ ID NO: 424848 - DNA, 122 bp, Homo sapiens
tgggcacggctgtgggaacacagctgtgtggggcctgtggacgtctttggcaggtacacgcgtgtgcccgcatgcacatgtgtgtggtcctcaggactctccaggcacgagggggaaggggt

SEQ ID NO: 424849 - DNA, 122 bp, Homo sapiens
tggcgttgagaatggagaattcctgcagccactgcaggctggtcaggctgtcatccagggcgtcgggctcctccaggccgccctccggcccggcctcctccgccggcccggctcccgagagg

SEQ ID NO: 424850 - DNA, 122 bp, Homo sapiens
gcggtaatccccactgattgagcccgcgcggggaggtaaggactccggcgtgggtgccaccgcggttgcgaaaaatcgggttctgaacccggtcagcaggagtggcagcgccccagcagcac

SEQ ID NO: 424851 - DNA, 122 bp, Homo sapiens
catccaggatcctgcgcaggccattgatgtccgactccaccagctgccgcagggacagctcggtctcatatctgtgatcacaggagggtcaggaacaggctgggcaggaataggcctggcct

SEQ ID NO: 424852 - DNA, 122 bp, Homo sapiens
gggctgggtggatgtgactcccttaagcaggtgatgttgtcagtcccatattatagaagccgaggcacagggagccagtgactgctgcgcctagcagagctgggattcaaatccaggcaggg

SEQ ID NO: 424853 - DNA, 122 bp, Homo sapiens
cactcctcccagggtcccgccggcccagctgtgccggcactcacccagctggttggagagcggcagtgtgaaagtggactgcttcagtggggcttccagcaaggccctggggcgggaccccc

SEQ ID NO: 424854 - DNA, 122 bp, Homo sapiens
agagcgtggaaagggagaggcggtgatcgcacaggcacgcggcgtggtgggggctcttgccggtgcagacgtgggcgatttcagctttaaggaaaaggcagagggcctgcggggagtggtgg

SEQ ID NO: 424855 - DNA, 122 bp, Homo sapiens
ttttgaatgcctcttcggaaagctttgttcccaagcaagctttcgttcatgggcattatgcgcctccctgcccttttttttttttttttttttgagacagtctcgccttgtcacccaggctg

SEQ ID NO: 424856 - DNA, 122 bp, Homo sapiens
cgggccgtgtccccagggtggccacacagccggccctgcctgtgctccccgcgcacctcccgccctccctaggcaccggatgctggctcaccaccggcctcacaagcttaggacagcactga

SEQ ID NO: 424857 - DNA, 122 bp, Homo sapiens
tgaccatttaacccgaagcagatccaggtggaataggcccccatgcccagctgtcagggccgctgccagaccaggcaagtacccaagaaagaagggaggggctcaagaaaggtgcaatgcgt

SEQ ID NO: 424858 - DNA, 122 bp, Homo sapiens
atagagttggaggaagaatggctcgggaggagtcactacaagagatgatcctctttccagcgctgcatttggaaggctcaagagtggctgctcttcctgaagaaatatcgaaacgggaagag

SEQ ID NO: 424859 - DNA, 122 bp, Homo sapiens
tattgagtggaaagtacagagggtacctgtatattccttcactttccctcaccaatttcccgttattaacagcttgcattagtatggtatattcattacaattgataaactaatactgatac

SEQ ID NO: 424860 - DNA, 122 bp, Homo sapiens
gctcatccctggcaacaaactaaaggacaagacaactcctttggaagtagttttactaaacgtactatactacaaacttgagaaaaagttttaattccacaactacaaaagcacattactgc

SEQ ID NO: 424861 - DNA, 122 bp, Homo sapiens
gcttctgctcaggctactcatctggccagccctggcccaagatgcacagaactctaagagcgaaccctgagccgcggagtatactactgacagaaacatggcaggcaggaaaaatgaccctc

SEQ ID NO: 424862 - DNA, 122 bp, Homo sapiens
tcggagcctgctgggcttgataggaggctgaatcccgtgaatagacccccgttccctcttcgcgggatcgttggccacgatagtaggtctccgtctctttctcgctccccctcttttcctct

SEQ ID NO: 424863 - DNA, 122 bp, Homo sapiens
actccctgggaaaggggttgtcaagagagagtcaaagccggatgtcccatctgctcttcccgttccccttaaggaggtagctcccagcactcaaccaacctccccgcagagctcccttcctg

SEQ ID NO: 424864 - DNA, 122 bp, Homo sapiens
aacgccggctgtgagccacgtctgtgctgggggttggggacccagcaggcatggtagagccggtcactgagggactcaggcgtgtgattgccaggggaggggcacctggcccagcctggagg

SEQ ID NO: 424865 - DNA, 122 bp, Homo sapiens
tcgccccggttccagtagttggtatggtccgagacagtatggctgctgcatttcggccctcgaatcgagttctcctgcaggcgctgcagattttggtgtatcctggggtgggaggctccggc

SEQ ID NO: 424866 - DNA, 122 bp, Homo sapiens
acgggacgagaagaggcggccgcaaatcactcatgaaagattcatcttctcccaggcagccgccaccgcccgcctccaaggctgcccgccccagccgggaagcctcagggtgggggtggggg

SEQ ID NO: 424867 - DNA, 122 bp, Homo sapiens
ggcgtgcacgcacgggggctgcgtatgctatgctggcgtggggggtgcgggcgaggtggccgcggggaggagcggcgccagcacctctcggcccccacgcggcctgcgtggctttttgaccc

SEQ ID NO: 424868 - DNA, 122 bp, Homo sapiens
ctcatctagtggaggtggctccgggctggggccagagacggagctgaggcgcttggggggcgggggcggggggcctttgcgccgggcccgcagggcaaaggactggctgcgaggagtccccc

SEQ ID NO: 424869 - DNA, 122 bp, Homo sapiens
gaggggaagctggtacaaagctgtggaggctggaaaggaacccagggccctattacaaatcgtgaatagtgacttttagctagaatcacttgccagaagcttgggaaaaaaatgttttcact

SEQ ID NO: 424870 - DNA, 122 bp, Homo sapiens
gtttcaacggcactgttctcgaagctttgccaagaccagggtctcttgctcaggaccccacgggattcacacgttggaatgcagagaaacaaagtgagttctgatccagctatacagctcct

SEQ ID NO: 424871 - DNA, 122 bp, Homo sapiens
gccggaaatacctcagattgtgcctggcacagagcaggttcccagcacagagcaggttcccggcaagcgctgttcctcttctccctctttgctgcgtggttttcgtgaagttggggagagga

SEQ ID NO: 424872 - DNA, 122 bp, Homo sapiens
ccctcggccagttccggccccgcccattaaaggagacgcacagtcctggaaaagaaaaggcgccgagaccccgcagccctacccggagcccgcagcttctgctcatattttatcaagaccga

SEQ ID NO: 424873 - DNA, 122 bp, Homo sapiens
ccagccacccagtgctattctagactgtggatcagcaggctggccagggtgaaggggcaccgtggctgaggctgaggagtacctccagaagacctcagagcgggggaagggcagagggggtt

SEQ ID NO: 424874 - DNA, 122 bp, Homo sapiens
gaggagattaagacccaacccgggaagactggggggtccaaggtcctcggcccgctcgcgcgcggtcggtcaccagccccggctcacccgagtgtgcccccggagcccacctcctgaagcgc

SEQ ID NO: 424875 - DNA, 122 bp, Homo sapiens
ttccgtcctttcctcatgtctgttctctcaaacctagttggaatgctgcttccccggccccgatgcctgagtgaggtcatgctcccagcctccgaattcctcgcttggactgggtcccggct

SEQ ID NO: 424876 - DNA, 122 bp, Homo sapiens
tttatttatttatttttttagaccgagtcttgctctattgcccaacatggagtgtggtggcgtgatctcggctcactgcaacctctgcctccctggttcaagcaactctcctgcctcagcct

SEQ ID NO: 424877 - DNA, 122 bp, Homo sapiens
tggcagcttttcctcggaggcagagcacactgacgtcagtctgcagatgtgcctgggctgcgtcgggtgcgcatgtgtcctgggtcgtcacgtggagggggaggggaggtagaggtacaatc

SEQ ID NO: 424878 - DNA, 122 bp, Homo sapiens
tgaagaatatcaccctggcctgattgaaatgcttcagtcattcaacagacatttattgagcgccaactaattgccaggctctgtgctaagtgctggatttacagagatgaatataatgtagt

SEQ ID NO: 424879 - DNA, 122 bp, Homo sapiens
gcattaactggtccaacacgttgggggttgactttccacattcagcctcttacttgcctccgtgccagtgcttctgcgtcctgctgttaccatggttgtactctactcaccctctttgagac

SEQ ID NO: 424880 - DNA, 122 bp, Homo sapiens
aaacctccgggagatgccagtggttgacaataagaagcttttgtgaggtccttggggagacgggtggagaagagaaaataaggttaatatctgttatcataagccacttcctgaaccttatc

SEQ ID NO: 424881 - DNA, 122 bp, Homo sapiens
acgggagcgtgtggcacggatgttgttcgtgatgaggcatattctagtggtttcccaattcggttgtgtacaacccagtgctctagtgttcagtaaatacttccttcctctttaggcagaac

SEQ ID NO: 424882 - DNA, 122 bp, Homo sapiens
agggaaccgaaagtgcaagagcccaagaagggattgccaggcatcgcgcctgaggatcagcgaggaggcctgtgtggctggggtggggagagcaagcgtggtacaccacgagggtgccggca

SEQ ID NO: 424883 - DNA, 122 bp, Homo sapiens
tttctttcctcatagttcagtgtcttcaaccaaccatggcaatattcaataacaccacttcgtcttcctcaaacttcctcctcactgcattccctgggctggaatgtgctcatgtctggatc

SEQ ID NO: 424884 - DNA, 122 bp, Homo sapiens
gctgaggctcatggatcactcttttgtggtagggccacatctgccagagcctggagtctgcgaaggccgggacccggttccccggcccacagtgggggtgtgcaaacccgagagaactgggt

SEQ ID NO: 424885 - DNA, 122 bp, Homo sapiens
cagccttgtagatgtcatccatgctggcggctcacaggacagcttgctggggttgccagccggcccttgacttaaatagccctgccccgctgcattcctggcccagcccagcccagcccagc

SEQ ID NO: 424886 - DNA, 122 bp, Homo sapiens
tccaaatgcaaatcaaacacccttggcgccccgcttcttcattaattaagaggaacgtttcgacaaaaccggcgtaatctttattaattacgcagcccttagcgcgccgttcgcatcaatca

SEQ ID NO: 424887 - DNA, 122 bp, Homo sapiens
ggggccgggcgcctggagagcggcccggcccgggacagcgggatgaggtcagcggagccacggtgctgcaacttttgtcacacacatgctccagagtcttctgaatcgggcaccacctaccc

SEQ ID NO: 424888 - DNA, 122 bp, Homo sapiens
tttagagttcctttctaaacagtaaaggaaatttcttcatcactcttcccacatgggcagcggcttgtcctatgtgtaccctcttgctggcagggacaggcaatggttctgccctgtggatc

SEQ ID NO: 424889 - DNA, 122 bp, Homo sapiens
gcggcagagacgtaagactggcaaagctggcgaggccagcagtcagcggggcaaatagagcgagaacagaagagcgggaagggctggcgcgagcgaggtgcgagcgaggagtggggcccgcg

SEQ ID NO: 424890 - DNA, 122 bp, Homo sapiens
ggctgccttggacccttgaaaaccaaccagaaagtctgtctccagggaatgctgcagacccggttccctactttccgtgacaaacccattagttcgtgtgcagatttttccattcaggtcgc

SEQ ID NO: 424891 - DNA, 122 bp, Homo sapiens
accctgtagaagaccttgaaggactgagaatttccgctgtggttttgtgtctttctcccccgtaatccttcctattctccttgataaaaattaagaagaaataattgatgggtgctaatctg

SEQ ID NO: 424892 - DNA, 122 bp, Homo sapiens
attacctttgttcagttaacttcagacggcgtgggcataacacctggccccctttaagctcgttttaaaaacgttgctcggtttcactcggcggaggtgctggcttgaacagacaagttcag

SEQ ID NO: 424893 - DNA, 122 bp, Homo sapiens
cggggcctctgcacactcaccctcggtgtgctggagtcctcggcggtgctcctggctgggcgtgggggctttgctaccagtctgccctgggtcacgtctagaaacctcagctggaggcgcgg

SEQ ID NO: 424894 - DNA, 122 bp, Homo sapiens
cgcacctcctcccccgaccaacgattggccacctgggaggactggagtaaggggtgcgagcggagggatttccctcaaagcccagggtccggggacctggaaagtagaagtggagggattca

SEQ ID NO: 424895 - DNA, 122 bp, Homo sapiens
ctaagcacactgccttgctgtgcgctgacttcagaaaactacagctagagggcacgtgaacgctgagcacagcaggtaaagagcaaatgtaagagcgatctgggtttaaatccagcctggtg

SEQ ID NO: 424896 - DNA, 122 bp, Homo sapiens
actttcatccgggcactatggagatgacccccatattcccagcatcactttgccctctgccgtggtgacccgggttgagatttaatctagggccagaggggggcaagacaattgtgctgttg

SEQ ID NO: 424897 - DNA, 122 bp, Homo sapiens
tcgggctttatatcttatatctatggtagcatccccattcttggaggctgttgagcctttcgtccagtttgccatggctgttctgtcacttttacttaatgtggaccatcactgtctcgaag

SEQ ID NO: 424898 - DNA, 122 bp, Homo sapiens
tccgggacaagctgcccccaggaccaccgtgccccagtatcaagcggacagcaaatctctcggtggctccttttgtaagggtttctgccctcagggttgttacgggacagaaatggtttcat

SEQ ID NO: 424899 - DNA, 122 bp, Homo sapiens
ctgtatttggatgtaagatctttgaagtgtgagttaagttaaaatggggcctggagggtacgccctaatccaatatgactggtttcctataagaaaaagaagaggcaccagaaatgtgcaca

SEQ ID NO: 424900 - DNA, 122 bp, Homo sapiens
gcgctcggcctcgcgctccggggctgggaccaccgagggcgagctgcagccttcgccacccggtccgccgccggactccgcctcccacaaacagcccggcaaggcccttttccgccgctccc

SEQ ID NO: 424901 - DNA, 122 bp, Homo sapiens
ccagaaatctgggaaaagcccctttaagaaggagtaaatacctccttctcccctagaggccgaagtcgccatttccctgcacggggcacagcacctcagaatacaagttcgcagaggtcaaa

SEQ ID NO: 424902 - DNA, 122 bp, Homo sapiens
atcataaagatgtcagccttaatgtcattgagccactgatccaataccaagagtttctatcgtcagacctcgttatgcaatttaaaaaacaaaccaacaagtctcagaggctaagttccctt

SEQ ID NO: 424903 - DNA, 122 bp, Homo sapiens
gggccctcccgacagagggtgcctgggtcgagggctgcaggggcgggggattcaggctggcgtctggagctctggggctgccgacccagcgggcctctcccggctcctttttcctccctcaa

SEQ ID NO: 424904 - DNA, 122 bp, Homo sapiens
gctctgtgtttggacaaaactaacaatactttctagaattttaaaacccctgactacttacggttgtgttctaaacatagcattcacaccaacctgctgtggaaagcacacaaagttcttgg

SEQ ID NO: 424905 - DNA, 122 bp, Homo sapiens
aaaaattggccggatgttgtggcacatgcctgtaatctcagctactcaagagtttgaggtcgggagttccagaccagcccggccaacatgatgagacctcatctctactaaaaaaaaaaaaa

SEQ ID NO: 424906 - DNA, 122 bp, Homo sapiens
tgtgctggtcccaatgtcagtgaaacccagctgggggcctggcccctcggagggggtcaccgcagtgcctaccagtgaccttggagagatccacaactggaccgagctgcttgacctcttca

SEQ ID NO: 424907 - DNA, 122 bp, Homo sapiens
aggggccggcctggaaaggcggaagcctccagtctaggggtggctgcagaacccggatctcggagttacacgttctacggagcggggcgccgggagacggcgggcgagaaaacccggcgtcc

SEQ ID NO: 424908 - DNA, 122 bp, Homo sapiens
ctgaataagaagatggttgagtcacctccttcgcttaaacttgtcctcattggaggttgtcgtaacaaagatgatgaacttagggtaaaccaactgagaaggctgtctgaggatttaggagt

SEQ ID NO: 424909 - DNA, 122 bp, Homo sapiens
gccgtgagacttccgggttgtgttatcgcgagaactgtaactgactttgccgctgaggggcggggttgcaagagaaacccagcgaagaggagaggcggagccgggccgggcagggggcggga

SEQ ID NO: 424910 - DNA, 122 bp, Homo sapiens
taggtgcccaacctcaaattcataacaaactccttgtctcttcagtgaattcagaagatacgtgaagcactgaaggaatttttctttgtgtacaagttccttaaattacttccctttcctag

SEQ ID NO: 424911 - DNA, 122 bp, Homo sapiens
acagcgagttaacttcacaatgtttcttcagcatctattatgacagttcttggaactatacgtgccagattacagttcacacctggtggtagtgacaatggaaatgcctttaggaggcttgc

SEQ ID NO: 424912 - DNA, 122 bp, Homo sapiens
ccgcgtggcagaagagagggcagcagagggtcccgcatagcagagggcggcagagggtcccgcgtggcagaggagagggcggcagagggtcccgcgtggcagagagggcagcagagggtccc

SEQ ID NO: 424913 - DNA, 122 bp, Homo sapiens
ccccatccttcagggaggagaagaggaattggacatggagttaataatccatcatgcctacgtggtggggtctccataaagatccctgaagttgagggtttggagattttctgggttgccga

SEQ ID NO: 424914 - DNA, 122 bp, Homo sapiens
ggcggggagcccgggaggattggcgggatgtcctgcaggtgtctgctcccccgagggtctcgggaggggggcaccagcctgggggtcgtgggcagaggttgaggaaatcaagagcaggagcc

SEQ ID NO: 424915 - DNA, 122 bp, Homo sapiens
tactggcgctgccacacacggccatgcagtactcttctgtgtcaaagttgttccggttgccgccacatccgccgtaaaagaatggggcacacttcccttcagtcacatcaaagtaccagcgg

SEQ ID NO: 424916 - DNA, 122 bp, Homo sapiens
aggtacggtgaccctcctccagttttccagctctaatttaaaacgctgccacacagcgagcgacgctgccagctgcttcgcctacactaacccttgcgcctcacgaccagctgcattagaaa

SEQ ID NO: 424917 - DNA, 122 bp, Homo sapiens
ttttctcgttgctgcccagggaggagacggggtgacctttcccacaggggcagcctgtggcgatgtggcagctgggcctcaccccggcagggctgtgcgtgaccccctgagtgggggaaggc

SEQ ID NO: 424918 - DNA, 122 bp, Homo sapiens
ctgctcaaacccttataaggagcgtgcagactggcaggtcgtggggagcgttttgggctgcgaccccacagcagcgtggagagttgagtgtttacggctccggaagccacagtgggagttgt

SEQ ID NO: 424919 - DNA, 122 bp, Homo sapiens
acttcttggaggcctacatatttaggcctttgatccaaaatgaacaaagtaatcagaagacggcaaatgcctgaaaagatgtaacacaagaagtggtaataggctctaaaagaagagaaccc

SEQ ID NO: 424920 - DNA, 122 bp, Homo sapiens
ccgcctcctcggtctcggcttcggccttcgccagcacctaccgccagcagccctcctacccgcagcagttcccctacccgcaggcgcccttcgtcagccagtacgagaactacgaccccgcg

SEQ ID NO: 424921 - DNA, 122 bp, Homo sapiens
gaaaatgtgtcccctgaggacttcgtggggctgcacatgcatgggttccggcgcaccctgcggaatgcagtcctcacccagaagcaggacagcctgcgcatcatcagcatccagcccgtggc

SEQ ID NO: 424922 - DNA, 122 bp, Homo sapiens
attccttcaatccgccatctttttgttctagtcttgataacgggaataacatccacaaaacgcaaggtggcgctgctggctaaaaagagagagagaaaaataatttcacaaagaaaggatgt

SEQ ID NO: 424923 - DNA, 122 bp, Homo sapiens
ttagaactctgcttagaagattcggaaatgcccttgaggtttggtcctcccaggagagcacgaagtttatcctcgcgcgcagcctctcttccccggcccgcgcccaccggcctagcccgggg

SEQ ID NO: 424924 - DNA, 122 bp, Homo sapiens
ccagccccagaagaggacagcagactctgctgtgcaggcccctgacttccaatttgaagccgcaagccaggtatggaaatcagagcaataaagagacgatgcctcccaaatgcacaggacgc

SEQ ID NO: 424925 - DNA, 122 bp, Homo sapiens
ccagtcatggatgaagtccccagcccatggatgaagtccccagctcatggatgaagcccccggccatagatgaagcctccagccgtgaatgtcccctgtgttctccaggaggtttcttgggt

SEQ ID NO: 424926 - DNA, 122 bp, Homo sapiens
ggggcctgggctgtagacccagcagacctgtgttctaaccttgagtgactgtgggtggatcgcacagcttctgcgctcccacgctttccctgtgaggaggaattaataacacttcctccttc

SEQ ID NO: 424927 - DNA, 122 bp, Homo sapiens
gctggtactgacgcccatccggaccccgaggccaggcagttggccaaggggggcggggttcgcagagccccaatgaatgggggagccggaagcaggaagtgagtttgcgaacggagcagctg

SEQ ID NO: 424928 - DNA, 122 bp, Homo sapiens
aaatggaggagcaagcttcagggagaagacacccaaaggactattgttacttcctgtcgccgtaaacatcctcatccacgctaccatttatttcctgtcaccgtaaacatcctcatccacgc

SEQ ID NO: 424929 - DNA, 122 bp, Homo sapiens
aaggaggacttcctgggcccataggtgaagccttctggaggagaaggtgacgtggcccagcgtccaagggacagactcagctccaggctgcttggcagcccagcctggaggagaaggctaat

SEQ ID NO: 424930 - DNA, 122 bp, Homo sapiens
taatgctctgttatgtctctgtatcacaaagggtcacagctaaggtaaaacaggggctagcggaagcagttgtgtaatggagctgactcacaccagtggctcacaagagctggctgctagac

SEQ ID NO: 424931 - DNA, 122 bp, Homo sapiens
caaagagcctctggtcagaatgacagttgggggaagagacattgattttcttgtagatagcggtgctgaacattcgctagtaactgccgcggtcgcccccttatccaaaaagactattgacg

SEQ ID NO: 424932 - DNA, 122 bp, Homo sapiens
aagagtaggcggcggggcagagagcggcctccgagggtaaggtggccggccttgcgaaggcgtgcggggctggcgctggtgggaatggcccggaagggaagggaggccgggcgcccgaaggt

SEQ ID NO: 424933 - DNA, 122 bp, Homo sapiens
caggagagctggccgcccagcgacgcgcgggaggccgcctggcaggcgctgctgccctcccgcgtgatccccacgtccatcgaagagatcatcgcctctctgcagtccgaggcccagctggc

SEQ ID NO: 424934 - DNA, 122 bp, Homo sapiens
aagaacacggtaggagggctagtgcagaaaacaagggcctgcttgcttcttcacctgccccgggggatcaagcctaatggtgacactggaggatttgaccctgacgtggcgtgggtccctcc

SEQ ID NO: 424935 - DNA, 122 bp, Homo sapiens
aaaccccttgactccaggaaaaccttttcataatgcatcccccaagttgggggattaaatcgctgaaatgtttatttagcactagagaagtaaattcaaagttgcctgtgggtagacgtaca

SEQ ID NO: 424936 - DNA, 122 bp, Homo sapiens
tgacgggtgagtagggcagggacgggcagatgcagcgtccgttcatgtccaggctgccaccggctgccagcccaccctgggaccgctcttgcagagacagcttgcgaccggagaggtggggc

SEQ ID NO: 424937 - DNA, 122 bp, Homo sapiens
agaggccaccagacacattttctcaaccgcagatcccccttccccacaccctgctccttgcgtgtcagcctgagagcccttgctttgagaagcttggcagaagctgcaaagggtgggcgggc

SEQ ID NO: 424938 - DNA, 122 bp, Homo sapiens
ctgacatcgctgcgtcctgccaagagctgctggacgcccgctctctaggcccaccaggtccgggcactgtggccctggcccagccggctgccagctgcactccagctgcgccgccctactac

SEQ ID NO: 424939 - DNA, 122 bp, Homo sapiens
ttctttgaattccaggaacccccaagatgcattatcatggctgtaaacacaggttctgcacgtgtctaagttcagccccaaacccacatgaagaacttatttccagacagctcctactctta

SEQ ID NO: 424940 - DNA, 122 bp, Homo sapiens
agaattagtcaagtgtgaatgagaccatcctacaattcaaagtatacgaaagtataaattcgttcatcatggcaccaccacccctgcacagcatcccacacaggctgaacactccataacat

SEQ ID NO: 424941 - DNA, 122 bp, Homo sapiens
atgactcataccctctgagtggcgtgattcagcatctcctgccaggcggagtcgaactgccgcttgtcatcctccagcagccgctgctcggccagggagatggtctccttggcggcacggag

SEQ ID NO: 424942 - DNA, 122 bp, Homo sapiens
agaaaggagaggttgcgaacctttaatgagcgagcccttggagtatccagcccttcccgacgctaactgactcctacgagggggcctggtacacagtaggtgctaaactaatcctctccgag

SEQ ID NO: 424943 - DNA, 122 bp, Homo sapiens
cagcgagacgccctgggcgtaggaccctcggagccaggtgcgggatataagcttgttgtgcgccgttttttaaatccgtcggaaaagcgcagtattcggttgggagtgacctgattttccag

SEQ ID NO: 424944 - DNA, 122 bp, Homo sapiens
cccgtcgcagtcgctgtttctccgtcttctccctcccttccactctcccgccctgctcgccgtctggggctgcctgggtttctgcctctgtcgccccgcgccccgtacctgtgccctcctga

SEQ ID NO: 424945 - DNA, 122 bp, Homo sapiens
ccaactgaaaagcagaggtggctcgcaagcggcggggctctgccctagattgccagtaggcgctcgactcacatccagctccaccccgggagatgccccagaagccccgcccacgtccaggc

SEQ ID NO: 424946 - DNA, 122 bp, Homo sapiens
aattctgctgcgagggccctggaggcaagggccttcctctccgtttttccttgacactgacgggcgcggccccacagggtttcccccacgctccctggccggaagaccttttctgtctggtg

SEQ ID NO: 424947 - DNA, 122 bp, Homo sapiens
gattctctctgattggaggttttttgaaaaaacaggttagggattggcctgggtggtttgcgtgtcctagcacaaaggcaggggctgatgaccttggggtgtcaattagactatggcaaata

SEQ ID NO: 424948 - DNA, 122 bp, Homo sapiens
gcgcgccccagtgccgagacccggggcttcaggagccggccccgggagagaagagtgcggcggcggacggagaaaacaactccaaagttggcgaaaggcaccgcccctactcccgggctgcc

SEQ ID NO: 424949 - DNA, 122 bp, Homo sapiens
taagatgaggatgagtataggaggtcaggacatgaccttcctgtgctcaaaaccctcccacggctcccacctcacttggcagaaagtcaaagatctctgtggcctaccaggccctacaagat

SEQ ID NO: 424950 - DNA, 122 bp, Homo sapiens
cattagccgtcctggcgctgcacgagcgtattctacaattccgaaaactactaacttttccgtctgcaacctttaataattgagagggtatgcgcaactcagaaaagtgcgcccgctgaggt

SEQ ID NO: 424951 - DNA, 122 bp, Homo sapiens
tctgcttccctttccccgtgtttattttcagacgaagccaagtggcccggggggaccctccggactcccagccttcagagaggagggcagctcgggctttcgccgcagtgcttcctgcccgt

SEQ ID NO: 424952 - DNA, 122 bp, Homo sapiens
ctatgtttttaaattattattttttgtagagatggcaggtctggaactctgggcgtcaggcgatcctcccgcctagaataaggagacacgaggtctgaaactggaatagcaagattgcatcc

SEQ ID NO: 424953 - DNA, 122 bp, Homo sapiens
tagggcaggggaggctggggagtcccctttcctacctctctgccctgcaaggccaggagccgcctctgcacagccaaaagctcagggaggccagagtggtggggcacggggccagtgccacg

SEQ ID NO: 424954 - DNA, 122 bp, Homo sapiens
ggcccgtttgaaatgcgccaggcgggagctcacctgggctcttagcgtcgccgccggcttcgcagagcaccgcgccttagccgcgaagttctagttcttgctgccggtcctaacgtcccgca

SEQ ID NO: 424955 - DNA, 122 bp, Homo sapiens
tattttagagaacagccctaagccaagacattgggtcttgtgatccttttcaaagaaaatcgttgggctcgttaatcctttgattcaagtcttttttaaaatgatattttccattttgacta

SEQ ID NO: 424956 - DNA, 122 bp, Homo sapiens
agctaggtgacaaacgctcagtccaggatctctgcaggttcctacacgggagccggagagcgcctgcgcgtcggagcctctttgttgctggggcgctggggtccagctgcgcgtgcgcagta

SEQ ID NO: 424957 - DNA, 122 bp, Homo sapiens
aagatgaaaatgcagtcccactgctgctcatgactgtctggctccattttacagatttaacgtcttcccacctcaagcaatctacctgcactccaaaatatttttaaaatgtttgatgatta

SEQ ID NO: 424958 - DNA, 122 bp, Homo sapiens
cttatatggaaaagaatttactagtgctgtgagaccacatacatttggatgtcaagctcacggagatcaaatggcattcttgggtttaatcagattgcaaacacaatggagtttatagttgc

SEQ ID NO: 424959 - DNA, 122 bp, Homo sapiens
gcagctgcgggcccgacgggggcgtggcgggaccggcgggggcggggcctgggggtggtccgcgcggattggctgctgcctgcggcgcacgagccggtcagcgcgcaccccgcccttcccgg

SEQ ID NO: 424960 - DNA, 122 bp, Homo sapiens
tcgccctccaccccgccccgccgcctaccccccactcctgctccccgccctcctgccccacgcgccccgcgccctgagccccgcaccccgcgccccgccgccctcctcactcaccggcgccg

SEQ ID NO: 424961 - DNA, 122 bp, Homo sapiens
aaggactgaattaaataaactcccaaaggttctttccaatgctaatgtaaaagtttccctcgggcaaattgccacaccttacctcaaataaaggtttgtgctcctcccactcatctgaatag

SEQ ID NO: 424962 - DNA, 122 bp, Homo sapiens
tagagttggaaagtaaatttaccatctagtcctcattttacacatagggagcctggtggacggaactgggaagcaatgtgtcagagtacagtatgtggtgaggtcactaaacaggttcagtt

SEQ ID NO: 424963 - DNA, 122 bp, Homo sapiens
ggccatcccaccccccgattacggcgccgcctcccgggccttccccgcccagacggccagcggcttcaagcagaggccctacagtgtggccgtgcccgccttctcccaggtcagtgggcggg

SEQ ID NO: 424964 - DNA, 122 bp, Homo sapiens
ggggtgcctgaggcatgaaggaccctgctgcaccctgacctggcaaggatccctgtggaccgagtaaggcatgagctgaaggatgcacactgtgtgcgtacatctgagcaatgtctcccagc

SEQ ID NO: 424965 - DNA, 122 bp, Homo sapiens
attatgcataaccctaatcacttcacacattgttactaacgtgacagactgtcatgtccacgagttgatccttaagtctcggaaccactccagctctgcatcaatattcttcagctttcaca

SEQ ID NO: 424966 - DNA, 122 bp, Homo sapiens
ggacacggggcaaggagtttgaactttatttccttggcaaatagcatgccctgcctggggcgagactgggatggggggggcgggggttgtgcagcgggtgggaggaggggggagggggcgtt

SEQ ID NO: 424967 - DNA, 122 bp, Homo sapiens
aaaaagaaaagaaaaaagaaaagaaaactgtgggactttaagaaaaaaacatagaagacccgaataaaacaaaggatgccatgttctgtaatgggaagattcgaaactttaaaaatgttaat

SEQ ID NO: 424968 - DNA, 122 bp, Homo sapiens
tctgggcatccgtcattacctacggctgcctggtcagcaaacaacagcagatccgacaaccgccagtcacctcgacggtccacgcccaccgctagcctccagtttcccgcagaccggaagcc

SEQ ID NO: 424969 - DNA, 122 bp, Homo sapiens
ggcaggtcccccatgtctgggcgagggtctggcgcggcggctccggggggcggaggacagcgccggctgcggccgagtggctggagcgcgaggggcggagaggaagcgcggggagggtgagg

SEQ ID NO: 424970 - DNA, 122 bp, Homo sapiens
cgtgagagacttttcagggtctactggatttttaaaatgcatggcgacattgtggaggtgcgtgcaggaaaataacggtgggtgtggagggaaaatgggacaccggaggaggcgcgggagga

SEQ ID NO: 424971 - DNA, 122 bp, Homo sapiens
gagaccgcgagagccccgagggtgggagatccgggggaatgtctccaccctgccctggcccgctacgtccatctgtccgtctgtccgctcccgcctcttcccaccatctccaatccccccat

SEQ ID NO: 424972 - DNA, 122 bp, Homo sapiens
tgccatgtggtccatgctgacttctctcccatttaattccaggggcatcgaacttccaaccgggcttggtgcccagcaggctgagtctcacctccctttgcacgtgctgtttgctgggcatg

SEQ ID NO: 424973 - DNA, 122 bp, Homo sapiens
aatacttgtgttccacagacgagtggctgcgtggagtatgtgcgggttccacggagcggccgaatggagcatgcgctccactggtagctgcgggcggtcctgaaagcaatctcccgtggtgc

SEQ ID NO: 424974 - DNA, 122 bp, Homo sapiens
gagcatccgatgtcccatctgccatgcgggccaggctgtgaggatgggacttctcagggtcgcactcgctccctgcatcctcccctcctcacctcgcgaaatacgcacaggccccgtgttcc

SEQ ID NO: 424975 - DNA, 122 bp, Homo sapiens
taggcgcgccggtgtgcaccgtggggcccgtggtgggcgaagtcgacccaggttccactgcgtcctttccccgagtgcccggcagcccgtgggctctggccccttcccgcccgcccctccag

SEQ ID NO: 424976 - DNA, 122 bp, Homo sapiens
ttccaggcccaacacctgccgccagccccccgggtgaccgcggagccggaaagggcgacacgcagcagccagctcatgggccccgcatccaggtgtgtcctgccctcttctggccaccaagg

SEQ ID NO: 424977 - DNA, 122 bp, Homo sapiens
acttcagccaagcaagtaaaaaacaatggatgtcctgtgaacagtggcatctttggaaaacgtcgctgtttttattaatctctctcaagatagatgttgctcaaacacagcagcgtcgtgac

SEQ ID NO: 424978 - DNA, 122 bp, Homo sapiens
cccttgtgcttctggggctttgtggagtagctggacatcaatgataacactaacagtagccggcctgccaccaagttctttacataggggatgcctatgtctgtgcttcattggcgtcatct

SEQ ID NO: 424979 - DNA, 122 bp, Homo sapiens
gagatactctttctttctcgagcgtcccgacccctggcgcagcgcctgaacagcggactccggagtctccgggcatctattctggctgtgaatttcaggagcctcaagcggtcatttctctt

SEQ ID NO: 424980 - DNA, 122 bp, Homo sapiens
ggcaccactgagctccggatccaggtaaccgacgccaatgataatcccccggtattcaaccgagacgtgtacagagtcagccttcgggaaaacgtgccaccaggcaccactgtgttgcaagt

SEQ ID NO: 424981 - DNA, 122 bp, Homo sapiens
ttttgctgggaaaggagcaaacttaatttgtctattcagagttttctctactacctgccccgcttcctttcccaggggtgagactacattcccagggatgaaataagagcatgaaggtgtca

SEQ ID NO: 424982 - DNA, 122 bp, Homo sapiens
ccaacccccgggctgaggaccagtactgacctggtccgtggcctgttaggaactgggttgcggggcaggtgagtggccagccggtgagcaagcattactgcctaagctctgcctcctgtcag

SEQ ID NO: 424983 - DNA, 122 bp, Homo sapiens
cttgaacacttaggggcccgtagagttagtaattggcctaatttccatattattgtgtctcggaagagagaggccacaggagagacagacatgggaatggccggtgggctgagcagtcagac

SEQ ID NO: 424984 - DNA, 122 bp, Homo sapiens
atccttgacatgtggccttcaaggtccccatgggaggagataaaaggaaggattatacaacggtgattttttatggaccagtctttgcttgtattacatcagcctaaactgggaatacagcc

SEQ ID NO: 424985 - DNA, 122 bp, Homo sapiens
aaaacctaggtttagatgtgcagttctggaccagttcttttgatgcggatctgtggtcgtcgcggaggcgggctaccctctgggagttgtagttcacctgccgttcccagctctccggcgtc

SEQ ID NO: 424986 - DNA, 122 bp, Homo sapiens
cgggcagagaaggcccgggaggagttccaggagcaccgtgtgggccgctgggtgactgtgcgcacccaggacgtgtgccgcagtggctttggcgtgagccacgtggccgacgccgtcttcct

SEQ ID NO: 424987 - DNA, 122 bp, Homo sapiens
tggggatgggtggtggtgctctcagcgttcttccagtcggcgcttgtgtttggggtgctccgctcctttggggtcttcttcgtggagtttgtggcggcgtttgaggagcaggcagcgcgcgt

SEQ ID NO: 424988 - DNA, 122 bp, Homo sapiens
tgacaacctgtacgtgtgcattccgtgcggcaagggcttccccagctctgagcagctgaacgcgcacgtggaggctcacgtggaggaggaggaagcgctgtacggcagggccgaggcggccg

SEQ ID NO: 424989 - DNA, 122 bp, Homo sapiens
agagatgagagctgtttccgaaactcctggggggcctgaggcgcccggatcggggagaaacgggggcgaccatccacttccccggcagtcgcacgcacctccccttggcggcccacagatgg

SEQ ID NO: 424990 - DNA, 122 bp, Homo sapiens
ggggcggacaatcgcgtgagtgctgcgggcgtagctgtgcccgggtcctagcgccggacccggcgacgccaagaaaccacccaataggaggccggaagcatcggaagtcacatgctgcccag

SEQ ID NO: 424991 - DNA, 122 bp, Homo sapiens
ccttatcactggggcgctgcaacatcacagaaagtgttagtcccagggctctccctggcgcgcgcggctcctgtgcttgcttcttattggcggacctggccctgggggcggagccgcggtga

SEQ ID NO: 424992 - DNA, 122 bp, Homo sapiens
agtcgagctggctgaggctgtgttcccccaggcgcacccagtacctgctgccggtggcgacggctgagcgggtggcaggcacgcagtcccccaccttgcacccctccacggacactcaggcg

SEQ ID NO: 424993 - DNA, 122 bp, Homo sapiens
gggagaagggcggggcctttctccgagttggcctatcactacgggcagcctgcggagaggcgggaggcggcgccaatcggggcgagcagctggagcccggcggagcagttggctgagttgtt

SEQ ID NO: 424994 - DNA, 122 bp, Homo sapiens
tttttttttttgagacagtttcactcttgttgcccaggctggagtgcaatggcatgatctcggctcaccacgacctccgcctcccaggttgaagcaattcagctgcctcagccccccgagta

SEQ ID NO: 424995 - DNA, 122 bp, Homo sapiens
ttggctcattgcagtatcgagctcccgggctcaagtgattctgttgcctcagcctccatccggagtagctggaactactacaggtgtgcaccaccacacccagctcagttttgtactttggt

SEQ ID NO: 424996 - DNA, 122 bp, Homo sapiens
gcttcagcacctgcgcctcctgcgttgggaagggaacggagccgcttcccctgcccaatgcgttggcctccagggtggcactcccaaaagtggaaactgatttcttgttatgcagaacttat

SEQ ID NO: 424997 - DNA, 122 bp, Homo sapiens
gtggccaacaggctataatgactgaaagaattcaaacctctcagaggttagcacctggggcgggccctttgtgatctggttttaacacctcccttgaccctccatattctgaagcctctgtt

SEQ ID NO: 424998 - DNA, 122 bp, Homo sapiens
acggtgttaccaggtgattcttatctgggggtcacctgtgattatacggtgttaacctgccgtatagcatcccccaaggcgtgacaaccaaaaaatgtgtcccgacaatgccatacatccct

SEQ ID NO: 424999 - DNA, 122 bp, Homo sapiens
ctagagaggccggcttggcgacttggggagccggaagcccatcccgaggcacttcctgtccggtcattgttctcgtgccggtagaagctgaagtaccggtcagccagcctcctgctgcagag

SEQ ID NO: 425000 - DNA, 122 bp, Homo sapiens
gcagaggaggctccccagcctcgacccatgtcctcttggcggccaggcggaagcacagcccgggaactcccgctctaagacccgtcggctccagcgctctgctgaccacctgacctcacagc

SEQ ID NO: 425001 - DNA, 122 bp, Homo sapiens
agtgactcagccctctatgggcccgaatattcttcagtcgctccaggtcttcacggagctcgttgtccagaccgttggccaggacctggttatattttccatcctttacatccttctgtctg

SEQ ID NO: 425002 - DNA, 122 bp, Homo sapiens
gctgcaggagggcgggacgcctcccagcctgaccaacctgttggatgatgtgggtgctcccgcccctcccccagcagcatgtaggtctccctcccaacaggtatctgcattgcttagggggc

SEQ ID NO: 425003 - DNA, 122 bp, Homo sapiens
ttaggcaccacaagacaggcctgcctatttggcagtcccacctggtgccttactggatgtcgtacgatctttgcccctgaatggtaccacagtctccctcaccaggaggcgtttcaggacac

SEQ ID NO: 425004 - DNA, 122 bp, Homo sapiens
gggtggagcagctgccatgactggatggcattttggtttcactactcaggtcaaagaggtcgcttctgaatgtgagtctatgcaccatgtcatccatagagaaatgatggctagtcagaaaa

SEQ ID NO: 425005 - DNA, 122 bp, Homo sapiens
ctcaccttcaccgaccctggctgcccacggtcctccgcagcaagtaacggaagtgggtcacgggaagatctttcctcagccaaccccaaagccaagggggtgggccttgcttcgcagatcag

SEQ ID NO: 425006 - DNA, 122 bp, Homo sapiens
gttatacagtctaacataacctctttctgcagcttgggaaaacccctttctcttcttgtccgtggtagtttatatatccttctcttttgacagttaacctttctatatgtttgttatggata

SEQ ID NO: 425007 - DNA, 122 bp, Homo sapiens
gtcccatcagtgtcgatgtgaatggagttgtgaagtgcacaacttgtccagcccctacgccgaggccaggcctttgttcatgcagttgcctagttctggtcctttggctacaaactcaaagc

SEQ ID NO: 425008 - DNA, 122 bp, Homo sapiens
accggcggtgcagttatcttcctgaaggcggcgctgtgccccagctgtgctgaaggaggccggcgtgaaggaaggggaggggcgttcccgggcagaaacccagctgggcgccgcgtttaaaa

SEQ ID NO: 425009 - DNA, 122 bp, Homo sapiens
aggcataagccactatgccttgcccagcccttcttttctgctcctcttcctgccccctaccgtagtttcagaaacaaaactgggtatgagtgaagctttggtgctgaaaattttccccactc

SEQ ID NO: 425010 - DNA, 122 bp, Homo sapiens
gactggctggtgctgggggagctgcagatggccctggagtgggcaggcaggccagggctgcgcatcagtggacacattgctgccaggaagagctgcgacggtgaggcggggggggggcctgg

SEQ ID NO: 425011 - DNA, 122 bp, Homo sapiens
ctttgaaaggctgtttctggggcagcacttctcaaactttttggtttcaggactcctgtacggtctgcagaccctgaaaaccttttgtttatataggttatatctaccagtgtatattgtac

SEQ ID NO: 425012 - DNA, 122 bp, Homo sapiens
gagcagattgggatgcccggacttaggagacttcagtgattcttcctaaggaaatgccagcggcaggggtcctgagagagctaatgcaatgctttaagaataaatgaaggtccaatatgagg

SEQ ID NO: 425013 - DNA, 122 bp, Homo sapiens
gtcacttacgagtatgggagacggccaacaaccggctgcaccaggagtacgtgccttccgcgcacctcagtggtacctgcacctgtctggcctgggcgccagcgcggctgcaggccaaggta

SEQ ID NO: 425014 - DNA, 122 bp, Homo sapiens
catttatacctcagggttaagaagccaggtaagtgagggggtgtgactcgcccagtctttcgttggaaaaaagtgtagacctgtcaggaagacacagcatagaaaggctgcatgtgctgatt

SEQ ID NO: 425015 - DNA, 122 bp, Homo sapiens
gctctgctgggccgatcatgaattcaagctagcatctgttaccatgggcagcaagaattccgtctctgcttgagagatgacgagggagacaacacacctgaattggctgcccagggactctc

SEQ ID NO: 425016 - DNA, 122 bp, Homo sapiens
ttttcatgataaatgaacagaaaaagaggatggatttttttttcccagtaaacaggcactcggagactttccacaatagaaccatgttgttgctgtacactggcttttatttctagtatata

SEQ ID NO: 425017 - DNA, 122 bp, Homo sapiens
gcaaataagtgtgtcaggaggtcaaaagagaagaataagccacaggcggaggaagaaatgcggagctgataattgaaagataatggatgtaggggtgggttacagcaacacagtgggagggg

SEQ ID NO: 425018 - DNA, 122 bp, Homo sapiens
atcccataatatattacttcaaatttaaataaatctccttcaaccagagtcctcaaatagcgttcattttatcctttgagtcatccttttatataaagtccttcaagtatccatattacaat

SEQ ID NO: 425019 - DNA, 122 bp, Homo sapiens
accctcatgtggcttcatggggcacccacagctgtggccaggagtgtatgccagtgtgtgcgtgtggatgtgcaggaacacgcatgggcacccacctgcttgtgcatgctccagggacggca

SEQ ID NO: 425020 - DNA, 122 bp, Homo sapiens
tgatgatcaggatgatttttagcagtaacagcagcaaaggcattttgtagggtcagaaagcgagccatctatttttcagagtgcgatctcagaaggccacatgttaaatgttccttttctac

SEQ ID NO: 425021 - DNA, 122 bp, Homo sapiens
tttaaaaagtgggattccattccagacggcagtgcgtggccgtggaacggtgatgcatagcgtgctgacgtcccatgcctctacggggatgggatgcgatggtgtcaggcctctggcttggg

SEQ ID NO: 425022 - DNA, 122 bp, Homo sapiens
tatagtggcggagaagtacctcacctctcatttacacatggatctcagctgcgggattaacgtgtgactcctggctacaggaatgtgtttgacacctgtctgtacaccaggaactatttttg

SEQ ID NO: 425023 - DNA, 122 bp, Homo sapiens
gctcgagctcggcgcgcaggtcctgggcccagggcgggagcgctagcgagagggctgccccgtcctgcccagagggtcctgaggactcccgctgctcctggagtcttggggaggggtccggc

SEQ ID NO: 425024 - DNA, 122 bp, Homo sapiens
tgtgcatatttaaaatatggatagagacgcataaatacatctttaaaataaaaatataatcgtttgtgttaagtccttgctccattggctctcagctgcactcacagcaccagtgagaccga

SEQ ID NO: 425025 - DNA, 122 bp, Homo sapiens
agggaggaaaacctgcctgaaaaggctggagcttaggctttcactctttcttcattcagccgagcatctgatcacgtctcctgtcactcagggcctaaaggggcgaggccttaaacgttatc

SEQ ID NO: 425026 - DNA, 122 bp, Homo sapiens
aggggtctcgggcgggggcgtgtcccgagcgcggccagtccgccccgccgcattgccggtcgtctggcgccccctgctggccgtctgccgcgccctccatcccggcccaccccagccctgct

SEQ ID NO: 425027 - DNA, 122 bp, Homo sapiens
tgtgtcacagcaccaactggaaaccaacgcgcgtacatcctgtctctactctggccgagccgaccaaagcacatcctgcaaaattctagacccccgcaaacggcgggaggcggccgtgcgca

SEQ ID NO: 425028 - DNA, 122 bp, Homo sapiens
ccttacttccgtgttgcttcatactcctcttgcgcctgcgctgtctccttggagcagaggcggggccaacaagcctgttttagaaaccctccagtccttagctcgtttagaacacaagactc

SEQ ID NO: 425029 - DNA, 122 bp, Homo sapiens
actggcaagaatgcgaagaggaaccgagagtgaacggagtgcgaggcgccgggtcggaggcgagaggggctcttccgccttgcgacccctggccccgcctcccggtcccttgccccgcccct

SEQ ID NO: 425030 - DNA, 122 bp, Homo sapiens
gcatagttattggcagcatcttctttgcctgtgataagttgctcagggtggaagagctggcggtaggtgccagtgcgaacttcatctggagaacatgatgggggaggagcaggggggaggag

SEQ ID NO: 425031 - DNA, 122 bp, Homo sapiens
cccagcgccagcgcggtgtggtggatcgtgattccggcccggagctgtgctgagcgttcacggccccgcggggctcaggtgtcccggggccgccccttagaaagccggaaggccggagtcgc

SEQ ID NO: 425032 - DNA, 122 bp, Homo sapiens
tctacggttttgacaaaaaagtccacctaaatattcgactgtatgccagaaattactacacgtttagatatcaactaaaaatatacaaaggatacacggtgttttcagaaccctttcaagcg

SEQ ID NO: 425033 - DNA, 122 bp, Homo sapiens
ggccctgaagggcccccaggaaccagcccctcggagttctacttcatgttccaacaagtacgagtcaagcctcaggactttgctgccattaccatcccacggtctaggggagaagcccgggt

SEQ ID NO: 425034 - DNA, 122 bp, Homo sapiens
ccctcagcagcaggggctctgtctcccttcccaaagggcgagaaccacattggacggtcccggctcagaccgtctgtactcagagcgacggatgccccctgggaccctcactgcctccgtct

SEQ ID NO: 425035 - DNA, 122 bp, Homo sapiens
ggaggcaggggtagagtctagcagctcaccgtgagccctgtgcctgctgcagcaaccctccgtcgccccattctgtgacctttagtgagtcagacactcctttgtcttcttatgtgttaaat

SEQ ID NO: 425036 - DNA, 122 bp, Homo sapiens
gttcttcgtggggaggaactggaagatgaacgggcggaagaaatgtctgggggagctcatcggcactcagaacgcggccactgtgcctgccgacaccaaggtgatttgtgctctcgccactg

SEQ ID NO: 425037 - DNA, 122 bp, Homo sapiens
aacttccagagccggtcacagaggccagatccacgatcaggtgcatggcaggggcttgtccgcaggaccggaaccttggtgagcatcagcgatgggcactgtgtttccccaagagtgacctg

SEQ ID NO: 425038 - DNA, 122 bp, Homo sapiens
ctcgaactcctgacctcgtgatccacctgtctcggcctcccaaagtgctgggattacaggcgtgaggcaccacgtccggccgaacctcaaatttttcactatagggagcagtgggtagctct

SEQ ID NO: 425039 - DNA, 122 bp, Homo sapiens
gtacgctatttgttgtggggtggccgaaggggatgtcctgttttcaccagaggcacagcgcgaaggggaaacttcgacactggaaggaacgagaataaatacttaattacggacgcactgaa

SEQ ID NO: 425040 - DNA, 122 bp, Homo sapiens
cctcggcctcgccttccaaccatccgcccaccggccccagagcagcgtgcccactgtgagcgccccaccctgcgtctgcaggtgggtgggtcagagaaccgcaggcacagaagagggtaccc

SEQ ID NO: 425041 - DNA, 122 bp, Homo sapiens
aggccctaatcccatcatggggtcaacctcagcctaattacctccaaaaggctgaaccctcgagggaggagccaagatggcggaataggaacagctccggtctacagctcccagcctgagtg

SEQ ID NO: 425042 - DNA, 122 bp, Homo sapiens
tgcagcatctcctagggagccgcgaccctgcgcccgccgccgctgccgctgtcaccagcccggccccaggggtgccctgggctccgcggtgagtcctgctcagcccatcaccaccgctgggc

SEQ ID NO: 425043 - DNA, 122 bp, Homo sapiens
tttttgtaggtgtcccattctcccagcattttcacccacttgctctttcggctgatctcccgccgaatttgctgtcaaatgaggcatgttggagttagcagagctgccaggcttcccagagc

SEQ ID NO: 425044 - DNA, 122 bp, Homo sapiens
ggggatgaactcaatggttaataggattggccatggcgaatccctcagcagggcacgcaccgcacaaagggccgaggagcgagggtagctcgaggtcaggattacagagactcaggagcaag

SEQ ID NO: 425045 - DNA, 122 bp, Homo sapiens
tccctccctcccatccctgcagcgctacccgggtactctggatgcacatagggcggctctcgctcctaccttgtcatcctgctgtctaatccgggggcagcttccctcctccacaccagcag

SEQ ID NO: 425046 - DNA, 122 bp, Homo sapiens
tgatgaatttgagggcctgtttgaccttggagaccttcagtaactccatgccacgccactcgttaggggtgaagccacacacctctgggatcatgtcccacacaaatttagtgagtttggtc

SEQ ID NO: 425047 - DNA, 122 bp, Homo sapiens
tcattccagagcctgccttccaagcttcccttgtgcctggcatgtgggcctggagcctcccgcctgagtgcagaccccacctctcccgcggtgcggctccagcagcttcctccagctcttag

SEQ ID NO: 425048 - DNA, 122 bp, Homo sapiens
tctcccgaggacccgggctcctcggagccacccagtggggatgtgtgggtgcctcggggccggccccctgcagcggccgcagaggtgttggtgtgctggaccgggggcagctgggtgtggcg

SEQ ID NO: 425049 - DNA, 122 bp, Homo sapiens
ttctgcgttccccgcggcctcttaccacagagacgcgggcctccaccgtcctagccctcccgccctgttctctagtgcggactagagcgtctcctcgccatttcctgtcgccctggggcccc

SEQ ID NO: 425050 - DNA, 122 bp, Homo sapiens
cgcatgaggtgtatggtgttcctagagctattgttagttcctctgctgtgaactccaccccgggcatacaaaaattatatactcactggtaagcaggatcctttttaggaaagcaaatgact

SEQ ID NO: 425051 - DNA, 122 bp, Homo sapiens
tataatccaggcctcctcatctctgccaatctcagccttctgctgaagaatttggaatcacgacccctgtttgtagcaagaagaccaaattgtgtaaactagtaacaaagaccctgcatcat

SEQ ID NO: 425052 - DNA, 122 bp, Homo sapiens
cgtcgccaacaagcggtgctaccaggagaaacgcctgcttttgaagaaaacagccaggaacgcgactgaaagacacttgctcccaggaagaattggcatttgttccaaaacacagctggata

SEQ ID NO: 425053 - DNA, 122 bp, Homo sapiens
taaatgaccagagttactcctagagttaaagtctgaccttgggtttgtggactcctcatccggtgggctctccaccacagcacggttgttctgaaaagacatctggcctgacagagctattc

SEQ ID NO: 425054 - DNA, 122 bp, Homo sapiens
tttacaaataaggaaacttaaggtttagataaggcggtaaaagcccagattccaaaaaggcggtaaaagcccagattccaaagcctgtcatttccttgaatctttgatagaccaaggcttag

SEQ ID NO: 425055 - DNA, 122 bp, Homo sapiens
gatggcagcaacaatattttggaagccagaaagcagatgagccagtagtaactgactcagcgtgtgtgtgtgtgtgtgtgtgtgtgtgtgtgtgtgtgtgtgtgtgtgtgtgaagaatacag

SEQ ID NO: 425056 - DNA, 122 bp, Homo sapiens
ctgaagcctccgagccacacatgcacacttgtgggttcctgccgagttgaagatgactaacgcttgccagatttgggaaagggaagaaggagtttagaaaaacaaaagttatctagaaacta

SEQ ID NO: 425057 - DNA, 122 bp, Homo sapiens
cggctcgctccggcggagacggaccgggggcccagggcggctgggttactggctccgccacgtctagggaaggaggtagtagggagggaaagactcaagataccaaagacgggaggctcttt

SEQ ID NO: 425058 - DNA, 122 bp, Homo sapiens
tcaaccagtgttgaactgaaaaccacttggcttgaccgcgtttgctcaggaatcgcatctcgtggggaagttttcacgtccacttcacgtgcgtggccaggccctgtccccactcgaggcga

SEQ ID NO: 425059 - DNA, 122 bp, Homo sapiens
ctgcactccctgaccctcaggccgtctggggccagccctgccagcctctgtctaaagctacgctgcaactgctacctgctcatggcgcgcagcggtggcaaacccggactccgcccgccgac

SEQ ID NO: 425060 - DNA, 122 bp, Homo sapiens
gccaggcggtgtagctccagctctcagataacccaggctttgggagggcggggctcctgccggcctcccctgtagtgcggctcgagtcctgtgaagctaccagttgccaaatgaaatctgaa

SEQ ID NO: 425061 - DNA, 122 bp, Homo sapiens
cacggtgcacctgggccctgaggtcctggccgaaacgcgccaagttgggggtaggtgcagcgaccccatacccctcggctgcgcgccctggcggcaggaggcggggccgggggcggggcgtg

SEQ ID NO: 425062 - DNA, 122 bp, Homo sapiens
cacacctgccgctgtgaaaatgcagacccacggggcaggaattccgagtcccggctggagcgcgatctggaatctgactcgcttgaaacagcaccgcggtggattcggagccgggtgagcag

SEQ ID NO: 425063 - DNA, 122 bp, Homo sapiens
ttgcagtaccttcacaaatagggttattttgcctaaatattagagggcacttcactttttcgaagggcatctcttaatctatgctattcaaaccattcttttgagacacataacctatcatt

SEQ ID NO: 425064 - DNA, 122 bp, Homo sapiens
ccgcctcccagggcggggtcagaggtgtccccacctgtagcttttagatccccaagtgctcgcaggtggggggtgggcccaggagggatcccgggggaggggcgtccgagcgcgcccacgat

SEQ ID NO: 425065 - DNA, 122 bp, Homo sapiens
gctgccgccgccctgccaccagcacggcgctgcactgggggcggggagtctgatgggagacgcgcgcggcgctgaggaggcggcggcccgggagagggagcgggagagggactgggcgcggg

SEQ ID NO: 425066 - DNA, 122 bp, Homo sapiens
caaactgaacaatgaatgatggtggagttcattcgtaagtgctcgtgggctattgatgagcgctccagagcttttacccaagaacacgggtcatccacatgattctgaatcctggtcatcca

SEQ ID NO: 425067 - DNA, 122 bp, Homo sapiens
acgccgggtggccccccaaaacctgcctccgccccggctcctcacctccaaggccagtcccggcaatatgcttccatgcccgaggaggaattctagaaccaagcacttgggttctgaatatc

SEQ ID NO: 425068 - DNA, 122 bp, Homo sapiens
aatcgtcctccctgtgtgcaaggccgggttctgtccggaaccaggctccaggtgaacattcgcagggggcttgtgacgcagcgtttgggggaggtgaagaggggtccaggctgggtttctgc

SEQ ID NO: 425069 - DNA, 122 bp, Homo sapiens
gaagataacagcatccggaagccctgtgcccaggcccagtggtgcctgagcactgccttccgggaggtgcaggtggctgctgtcccacagtgacagcccccatgttgaaaacccaaggcctc

SEQ ID NO: 425070 - DNA, 122 bp, Homo sapiens
tatccccacccgggttcccgtctccaggctgcgttatctgcatcttcacttttaaatttccgcttccctccctctcgcctgtcgctgcgcgcccggccctgcagccgttgctccctttatct

SEQ ID NO: 425071 - DNA, 122 bp, Homo sapiens
cctctgttgctgttctcatgcacaatgtgaaggcactttggcactgttggggtgaggacacgctgggtggcccactgacatgcaaggaataaagacatggtcccctaagggagcaagggagg

SEQ ID NO: 425072 - DNA, 122 bp, Homo sapiens
gagcactgatcaggggttgggacattgccccgggaggaggatgaggatgtttccaggcctcggctgactcatggtagtgagtattagtcactccctcacaagaatcagcccacatcctctag

SEQ ID NO: 425073 - DNA, 122 bp, Homo sapiens
attcttaaaaggctgtctctgtttggttgttaagccatggtgctcagtgtcaatggatgccggggccatagagattcagaggagaacaaactcttcagggatgaggtagtcagggaagctgc

SEQ ID NO: 425074 - DNA, 122 bp, Homo sapiens
gatgcgccggaggggtctcaggccgggtcagggggcgggcgggtgggggtctgcgtcgcccgccaagggccgggccctggagtggccccaaggcgcgagccggcctggcggggaacaagggg

SEQ ID NO: 425075 - DNA, 122 bp, Homo sapiens
gtgatcctacttggcgttagtattgctgaatcccatttacacacggggacactggagctccgaggccaagcggattgtctaggtctcacagaaacggggggtggtggggatcctggcaaaaa

SEQ ID NO: 425076 - DNA, 122 bp, Homo sapiens
acacaaaatggaaaaagataacactcgcatcacaggtatgtgtctctggcagctagccaccgttcttaagatatccaggatccactcagccaagagtcttctcatcagtactctaaagacac

SEQ ID NO: 425077 - DNA, 122 bp, Homo sapiens
ccctttcccatttgctcaagctcctgagactccaacttttccattttccctccgggcaggcgctctgcctgcattgcaggcctgaggtttgtgaaccaggttctcagtcccagcaagtctcc

SEQ ID NO: 425078 - DNA, 122 bp, Homo sapiens
ctggaaagcacgcgtgcgcacaggcgacagcagcggaggggtggggccagtgtacgagtgcgcgtgctcggtgggagcccgcggagtacctggaaggaggtgggggcgaggtagaaaggagt

SEQ ID NO: 425079 - DNA, 122 bp, Homo sapiens
cctggagggacgaggaagagccagtcatctaaaaagctccagctgtgggacctcgaagagcgcttcgtaaagggcttcttctctgcccggcaccccaaggaagctggggagaggtctttgct

SEQ ID NO: 425080 - DNA, 122 bp, Homo sapiens
ccccccaacccccagcatcccccatgccaaagtcggcatatgtgcattgtacagaggccacggagaaaaggcaagagagacaaagagagaaagagactagcagtgggacaaagagaagagag

SEQ ID NO: 425081 - DNA, 122 bp, Homo sapiens
gctgtgaacaccaggagagtctctaaaagtgcacccttgcctggctgtgtccggcacgctcggactggccgatctgggggcggctccacctccaccttcttcccaggatcaaagtcgtcagc

SEQ ID NO: 425082 - DNA, 122 bp, Homo sapiens
ggggggtggagaccggatcttcctcgcttgggtactttcctctcggtgtgtgtttctggccggagccgtttcgcgacggcccgggcgccccgccccaaccttccttccctagaccctcttct

SEQ ID NO: 425083 - DNA, 122 bp, Homo sapiens
accttctgcctcccccacactgcatgccccacatgctgcaatcagtaactcaggtggggacgcagggagaagcaggcggtgatgtcagggttttacttggcaggcaagagagcgtggggggc

SEQ ID NO: 425084 - DNA, 122 bp, Homo sapiens
cagcggcgactcagaccctggggtcagggggacgggcgcccaggccggaagtgaccttcccggccgcttccgcccgcgccgctcccccccttctccctactccctgccccccgggccgccac

SEQ ID NO: 425085 - DNA, 122 bp, Homo sapiens
tgtcagaaaaatctgctgcctcagtcaatgtgaaatcaataaccgttttaccatgtgcaacgttagccttggctggtttggatttcacgttgatgtatttctacaaaatccaatttttcact

SEQ ID NO: 425086 - DNA, 122 bp, Homo sapiens
ctccattcctcccggcccatttctctttgctttacggtctggatgctcaggcttgacagccgttggagcttccttcgggggacaggcaaattctgggtgtggtgaggaaaagatgctgatgg

SEQ ID NO: 425087 - DNA, 122 bp, Homo sapiens
tacaaataatgtgatataatatatagtctgtgggcccagtgtgggagtttgagaccagcccggccaacatgatgaaaccccatctctactaaaaatacaaaaaactagcagggcgtggtggt

SEQ ID NO: 425088 - DNA, 122 bp, Homo sapiens
aggccccgggggagggggatgagcgcagtttgctcgctttcctcccctgccggccccctccgcccccacacacactcgggacgtcttcattgaagattcacttacaaaggaatgtttcacta

SEQ ID NO: 425089 - DNA, 122 bp, Homo sapiens
tggccggcggggggagtgggggcggcttttcccggcacatgcgcaccgcagcgggtcgcgcgccctaaggagtggcactttttaaaagtgcagccggagaccagcctacagccgcctgcatc

SEQ ID NO: 425090 - DNA, 122 bp, Homo sapiens
atcttcgtcaggtgctcacggagggcccacagcacatctgatctggtcaccacggggatccgtggagccgcagaggtttcatcctcccctggaactgaggagctcaggccctccgccagctt

SEQ ID NO: 425091 - DNA, 122 bp, Homo sapiens
catgtgctgacacgcgggtgttaggagaatttcgtggtggagacccttttgggaaatccacgtgcacacctgccaaagggcgggtgctgcctccaacatcacgtatgtgaccctctccatcg

SEQ ID NO: 425092 - DNA, 122 bp, Homo sapiens
gtcccctggtgattacctgtaggaaggtgatcccttttggatcattttcacacccaacttcgcctcttctatactgcacatttactaactccttcagtgggtgtgtgctcagagaatggata

SEQ ID NO: 425093 - DNA, 122 bp, Homo sapiens
gaccagcctgggcaacatggcaaaatctcatgtctaccaaaattacaaaaattagctgggcgtggttgcctgcctgtattcccagctactctggagcctgaggagggaggatcacttgagca

SEQ ID NO: 425094 - DNA, 122 bp, Homo sapiens
ttaatgaatatgagagagtgccaataaatcacagcaatcaagaaatatacaggctgggcgcggtggctcacacctgtaatcccagcactttgggaggcagaggcaggcggatcacctgaggt

SEQ ID NO: 425095 - DNA, 122 bp, Homo sapiens
tctgatagtgtcctaggctctcacaacttggaatgtcctgcaatatctaacatgtaagcacgtcgaatcattttctagacagaatctgaacctctgtgtctctcagtctttctctctttctc

SEQ ID NO: 425096 - DNA, 122 bp, Homo sapiens
ttttatttaattgagaaattggctgaagaatttgctttctttttaaaccctgggccaccacgagaagaatgtgaactgaaaaagttgtgcagcccctaaggaaagcatatttccaaataccc

SEQ ID NO: 425097 - DNA, 122 bp, Homo sapiens
gtgggagcctgacctcctcggcccctgggtatgagccaacaggcggtggaaggaggggggcgcctttcttaaatgagctgttgagtcacacttgtttgatgcctttggctaacgggacccag

SEQ ID NO: 425098 - DNA, 122 bp, Homo sapiens
tcggcccggagctgagctccccacctgccggtagcccaggagatggagcagcccagcccacgtgcccggccttccgcccctgacttcacttgataacaaactagaaactgaaacagggtcgg

SEQ ID NO: 425099 - DNA, 122 bp, Homo sapiens
acttctcttcctcctgcttcggaagacagggctttcctattttctaagtgaacgcttctccggtgttaggactcctaccctcacatacattctctgaaaaactgctccatcagctgattccc

SEQ ID NO: 425100 - DNA, 122 bp, Homo sapiens
agaagactgttgagtagttttctcattactgtccatctccttcccagctgtggctgctgccgccactgtccccacctcctcctctgccccagatgcctcttctgaatcacctctcactgata

SEQ ID NO: 425101 - DNA, 122 bp, Homo sapiens
gaatgacaatgacaaaagggggaccaagatgaaacagggagactcaggggcggcacagttcggccagcagagggcgcaccccctcgccccgtagccccgccccaggcctgtcagcaccaccc

SEQ ID NO: 425102 - DNA, 122 bp, Homo sapiens
cgaggctggactgggtggagcccgagagcccctccggggagctggctgccggggaggcaccggggctgcggggccgcggggcgggccgggcctggagctccgcgctagaggcggccgcagcg

SEQ ID NO: 425103 - DNA, 122 bp, Homo sapiens
tagaaatatcacagatgatcgtccaaggtttcacaccctcagattccccacccaccccagcgcaaaaggggcgtttaggaagacactggtttcctgatctcctttgctggtgagatggaagg

SEQ ID NO: 425104 - DNA, 122 bp, Homo sapiens
ggtgggctccttcccctgcaccctgaacccccacgaggcagagtccctggcgctggtgggcgccatgattgaccaggtcctggagctacacccaggcgcccagcggctgcacatcgggtgtg

SEQ ID NO: 425105 - DNA, 122 bp, Homo sapiens
cgcgcgccccggttggcgcgcggggtgacggttggggttggcccggtgacgttggagcgacgcagggcgggggacggcgagccgcgaggcagccacgcgggagaggccgccaggcggccacg

SEQ ID NO: 425106 - DNA, 122 bp, Homo sapiens
gaactgggattgcctccatcccggttgccttatccaggctacaagcctggctgtcttattcgtctctacgtaattctagcacccaggatacaatgccaggcaaatagtaagggcttagtaaa

SEQ ID NO: 425107 - DNA, 122 bp, Homo sapiens
ggggcaggaaagtctttccctggcaggttgggctccaggtgcacagcactgctgggctggcgcaagctgagaatccacttcaggacaagaatgtcccagggctttgctcatgagttggcctt

SEQ ID NO: 425108 - DNA, 122 bp, Homo sapiens
tcctgggcttgagcaatcctcccaactcagctcctgactacaggcacttgagactacaggcgcatgccacccggcttatttttacatttattttgttattttactttatggctaccaagtct

SEQ ID NO: 425109 - DNA, 122 bp, Homo sapiens
gactctgagagtgcctcactgcactgcactctccatcgcaggaaacaggctgagcattttcgagggcgtgtggttgagtattcgtggagcagtagcccctggtattggaggtttgaggaaag

SEQ ID NO: 425110 - DNA, 122 bp, Homo sapiens
ccgccagaggcctctgtgagaactgaactgtagacgcagaggggcagggaggaggtcaaacgcagtttccagcgcccggggccgcctaactctgcctttctgcattaacacttgacgagcat

SEQ ID NO: 425111 - DNA, 122 bp, Homo sapiens
aatctaacgccgctgctgacctaacaggaggcagagctcaggcagtaatgctcactcgcccgatgttcacctcctgttgcacggccctgttcccaacagttggggacccctgctgcagggca

SEQ ID NO: 425112 - DNA, 122 bp, Homo sapiens
cataagctgctgctattcccatttgcagactgaagttcggtgttttaagtaatcggttcacggtcataggattagttctaaaaagcacagcaagattttttttttaagagacagagtcttgc

SEQ ID NO: 425113 - DNA, 122 bp, Homo sapiens
cggagcgcttaagggactggcaacggggattcccagagaagggtaaagggatcactctcccgtgtgtgcaggttcctaatgcccagggtatgtcattaaatcttttgctttctttgggtggg

SEQ ID NO: 425114 - DNA, 122 bp, Homo sapiens
aatacagatgatattataaaatatagaaatgtttaatgaagaagagttaatgaatatcatcggtgatactgagtgctgcacagaaacttcattactcagaattagggtaaactatagctaca

SEQ ID NO: 425115 - DNA, 122 bp, Homo sapiens
cggccggctgatgtcaaactgcagctcggctggtgtagctcttaaagggcccgcgggcgccgggggccgaggccgcccgcggggcgaggagggagaggctgcttccttgcccgccacctcaa

SEQ ID NO: 425116 - DNA, 122 bp, Homo sapiens
ctggggagggcggcgggcgaggtagcagccaccgacccctcccgggataggctgcggtgccggccctggacctgttgccttaagatcctcagcttatatcgcttcctggcagttcagcttcc

SEQ ID NO: 425117 - DNA, 122 bp, Homo sapiens
accttgtgatccgcctgcctcggcctcccaaagtgctgggattacaggcatgagccaccgcgcccggtccaacaggaataactctaagaagtttggggacaggagactaagaacccctaaga

SEQ ID NO: 425118 - DNA, 122 bp, Homo sapiens
gtataagcaccttgaggacaagcactgtggcttgatcactgtagtgcactcagaggacagcgtggtcctggcttgatcactgtgatgcgctcataggacagtgtgatcctggcttgatcact

SEQ ID NO: 425119 - DNA, 122 bp, Homo sapiens
actgaagccaacggccaaagtgtcctgcgggacggggctccagcccacctcgatcacgtgcgcccagcacaggcacaacacagctgcccaaggggtcaccctacaagactcacccaccccca

SEQ ID NO: 425120 - DNA, 122 bp, Homo sapiens
ctgtccttccaaccaggtaaccttctggcttccaaaggacttcatgttgccagatgttgccgggcccgttttcgaggttgcagtctggtcatggactcacccggtgtcttctaagtagagcc

SEQ ID NO: 425121 - DNA, 122 bp, Homo sapiens
cactcgcctcctgggccgcgacagcttccttctgtcaatcaggtgtggacgggaaggtctcgaagtttcctcgcctgagttgaaagctggaggtgggggcacctctgcccgttcctaactgc

SEQ ID NO: 425122 - DNA, 122 bp, Homo sapiens
cgaggagatgtcggggccgggagggcctgggggagcgcctcccaaccaggtgggcagcagcgtcatgcaggccatgagcacagaggccagcacgttaagaaggagcaggaagcgcagcaggg

SEQ ID NO: 425123 - DNA, 122 bp, Homo sapiens
ggccgctgtctggacaagtgggagacccaagcccagggagagggaaggaaatgcaggagccggcccactcagccccaacaatcccactttgctgggaccttggttcaaattacaattatcca

SEQ ID NO: 425124 - DNA, 122 bp, Homo sapiens
gctgagactcctagcctgtagtcccgttttagcaggatgcatcacggggattaggactctcgctagggagtttggtcatgcagtaggagagtggaagggtgggatgagaacacaggcccctt

SEQ ID NO: 425125 - DNA, 122 bp, Homo sapiens
gtgccgccgggcgtgaaagtcgacctgacccccatctacgggctgaccatgaagcacgcccgctgtgaacatgtccaggcgcggctgcgcttctccatcaactgaagaagacaccaccattc

SEQ ID NO: 425126 - DNA, 122 bp, Homo sapiens
caggagagccctccgaccctggcagccgcggactagcgggattggtaggcggggccagtccgggctccgccctcatggcccgcccctccagccgaatctccgactcgcgcgcggcctgaggc

SEQ ID NO: 425127 - DNA, 122 bp, Homo sapiens
ggggactgtctcttgtcagctgcgttcattgcctacgcgggttactttgaccagcagatgcgtcagaacttgttcactacctggtcccatcacctacagcaagccaacatccaggtgagaat

SEQ ID NO: 425128 - DNA, 122 bp, Homo sapiens
tggggcggggcctgaattagcgggagcgcccgggaggggcggggccggggcctgcgtgagcgggtcggggagggggcggagcctgcggggggcggggcctgcgtgaatggggcggggagggg

SEQ ID NO: 425129 - DNA, 122 bp, Homo sapiens
ggttatccctgcagggagcaactatctcctctgctcatcttaaacaagataattgcaaagcggttccctgccagcccatcctcttaacaaagaaggtgagataaaagagatggcattcctcc

SEQ ID NO: 425130 - DNA, 122 bp, Homo sapiens
aggcatggagaggcaagcacacaggaacggggtccccagctcaggctcgaaggcgggctccgctcgttgagctgcagggcaccaacccttgcacccagcaagtaggcgctggggcgctcccc

SEQ ID NO: 425131 - DNA, 122 bp, Homo sapiens
tcaccccctctccccctcccgcggtcctggctgcactgctcctgcctcgccctcgcccagcgcccccagcccacaagccccggccgcgcccctcccggctcccgggggcacccgcgctgggc

SEQ ID NO: 425132 - DNA, 122 bp, Homo sapiens
taaccctaaaacgaggaagcgtccgctgaggttgcccactgcaggatgctggtgtgtcgccgggcacatgaaagtccctgagtcaggggagagcgctcgccggggactgcgggcgggagccg

SEQ ID NO: 425133 - DNA, 122 bp, Homo sapiens
aggatgcatttggtagtgttgatttttgtaatttaaagaagctgaaagggagagaggacccgtgaggactgaactctctgtcccatggggtagggcttacatttacattaaagaaacagaaa

SEQ ID NO: 425134 - DNA, 122 bp, Homo sapiens
tggcgcgggatggttgcctcgagaaggtcgcagccaggagcaaagctttggggctcacaacggactgggcattccaaacggtgtaatcttcggcacatttcacccgctcccattccaccttc

SEQ ID NO: 425135 - DNA, 122 bp, Homo sapiens
gtgatgggaaaggcagctggtgtggatgccctgggacaccgcacgtgctcagaaacgcggcgggaaggtcaaagtctcagagcaagcggctgggctgctgacctaggagtgtgctcccctgg

SEQ ID NO: 425136 - DNA, 122 bp, Homo sapiens
tccaggagaagactaggaggaagaatgaggtgctcctgccgtgtccgccttgttccgggtcgcactggaacaggcagcaattcctaagtccggagcgtttgagcgtttgctatctgactgct

SEQ ID NO: 425137 - DNA, 122 bp, Homo sapiens
tctacctcgccccaaactcggagccatcagctcccaccgttctgtttggtaacagctttgcgcccagcgctccttccccaccaaacagcagcggcagatagcatctgagaaccctagacaaa

SEQ ID NO: 425138 - DNA, 122 bp, Homo sapiens
gcatctccatggcgactctgcaaacctggcgttcaaggccgcgcgcgctggtccttgccccgccccagggccctgtcttggctcattccttccgagccggcaccacctgcaagcccgcctcg

SEQ ID NO: 425139 - DNA, 122 bp, Homo sapiens
tcatttttaaattcacagacgcagagcctctccagtgctgccctgcagagcagtcagccacgctggtgctcgcttctggagctgcttctagaatgacagcggttcggcaggggagatcaatt

SEQ ID NO: 425140 - DNA, 122 bp, Homo sapiens
aacaggtggagaggtagtgaaaatagctcagctggcatccatcacaggaccacagagccgcgtggctcagccagagacgccggtgacactgcagttccagggcagcaagttcaccctgtcac

SEQ ID NO: 425141 - DNA, 122 bp, Homo sapiens
gggggtgcgggtgaaggcaagtgggcgagacaactagggcggaccccgagatgtaggccccgcccccggagctcgaggccccgccctcctgcgagcccgcgggagcccggccccttacgaac

SEQ ID NO: 425142 - DNA, 122 bp, Homo sapiens
caccatgaactcgttttaagcaccttgtgtttctggggtgagcctgctggaaacaggcaccgagagcaggggtggttcaatggctggcaatggcatacaaattcaccgtcctccaggtacgt

SEQ ID NO: 425143 - DNA, 122 bp, Homo sapiens
atttaacaccactgtaaagagcccctcacagacaattcaggaacgcttacagatagaaaccggtcctggttttaaggtgtaattttgcacaagtgttaacaacaagagatggaattggtaac

SEQ ID NO: 425144 - DNA, 122 bp, Homo sapiens
aagtctgttcccagtggttgtaggtgtcctgaggaggcctgagatttcccacttctctgccggccagggcctcagtgctgctgaccttgaacaaattgctgagagccccaggcagcagagtg

SEQ ID NO: 425145 - DNA, 122 bp, Homo sapiens
agaaaatgaaaatcaacataaaatgctggtttctgttagattaataacagaaaaaattcacgtctgtcagagaagtagaggaatggccatagtaatcactggggaagagtgtgaatgggtcc

SEQ ID NO: 425146 - DNA, 122 bp, Homo sapiens
caaatcagcaaagggaagcggcacaggggccgggctcaggagagaccaggggtgggcttccggcgtctctcccagcagagacgtgggcggtgtgtaggtctagcagtggtctgtgatgacag

SEQ ID NO: 425147 - DNA, 122 bp, Homo sapiens
tcccagctatttgggaggctgaggcaggagaatcgcttgaacccgggaggcagaggttgccggaagccaagatcgcaccactacactccagcatgggcaacacagagagactgtgtctcaaa

SEQ ID NO: 425148 - DNA, 122 bp, Homo sapiens
cagaaaaaaaataaatcaaaggcgagggccgagctgagctgagcatgcgcaccagggggacggcggaggcagggaaggaaatcgagcgccgcgcccctacccggcgccaggcccggggttgc

SEQ ID NO: 425149 - DNA, 122 bp, Homo sapiens
cgcacacaataaaaagtaaaggataccctaatttccataacgcacatgctccaaggcagtcgtcaggcaggcgtttggagaggcaatcagcaaaggcgaagagttgcatcagaaatttcctt

SEQ ID NO: 425150 - DNA, 122 bp, Homo sapiens
ctccggggttcctctccgccttgctgcctgctttggctttagaagggagctcaagctcagcggcttttggggcagccacgttaggtgctggggaatggaagaggatgacactgcctattttg

SEQ ID NO: 425151 - DNA, 122 bp, Homo sapiens
cctccagcgtcccgaccccttttcctcccgctgtcccccacggaggggactgctctcccccgctgcatcctttctgtgaggtaccttacccacctcagcacctgagagggtgaaatagaatt

SEQ ID NO: 425152 - DNA, 122 bp, Homo sapiens
gccctccctctccccctcggggaagcggctccctcgcatcctcgaggcgtcctcccggcacgtggaatcctcctcgcagcgcacggaaacgacctcccgccacgtcagagcctcgtccctga

SEQ ID NO: 425153 - DNA, 122 bp, Homo sapiens
gatgagctgccccagcggtagggggcctggggcggagaagccgctacagccgcggccgggcgacgctgacatctggcatccctggggtctcagagacacgggtggacagcgacgagggcctt

SEQ ID NO: 425154 - DNA, 122 bp, Homo sapiens
aacttgaattgcagcaggagaaaattttggcagcttttcctcggaggcagagcacactgacgtcagtctgcagatgtgcctgggctgcgtcgggtgcgcatgtgtcctgggtcgtcacgtgg

SEQ ID NO: 425155 - DNA, 122 bp, Homo sapiens
tcagccccgccccttaaattcactttctagccgcagctccttgaatttacgtccgagccacgcctccaattaaactgtctccccaccctcatctcaagtaatccccaaagctccacctcctt

SEQ ID NO: 425156 - DNA, 122 bp, Homo sapiens
tcctctctcccgcctgtgtctctccccctagtgcgtctctgtctctgtctctctttgtggcgggacgggggcgatttttgagtctcccccgccgtgggtttctgtctctctggctgtctccc

SEQ ID NO: 425157 - DNA, 122 bp, Homo sapiens
cagcggcaacagctgcagaaatactgagtcgtggaggaacgttttagagacacttgatgtcggttgtatccaggccagtcggggcactgcagtaagtttacccaaaatagactggaggagcc

SEQ ID NO: 425158 - DNA, 122 bp, Homo sapiens
ctcaggtgatccacccgccttggcctcccaaagtgctgggattacaagcgtgagcccctgcgcccggactaaactgggaactctttaaggcaggtcttattcatccttttaagacctaacct

SEQ ID NO: 425159 - DNA, 122 bp, Homo sapiens
gtttggcaccagccactttgaagccaatcacgcagggagcttgtctatttgctgcagcagcgtctaattagatccaatcacaactgctttctggctctgacatcagcagcagcaccagccgc

SEQ ID NO: 425160 - DNA, 122 bp, Homo sapiens
aatggctccccagcagccaccaagtcaacaataacatcccgttgtttcactggacaaaagcgagggagggcagaaccagccgggcaggttgagactggggatatgggttctgtttccccatg

SEQ ID NO: 425161 - DNA, 122 bp, Homo sapiens
ccagggggcatttgttgctaagcaaccaagacttctgttaaatcccttcttaaagagtgtcggcaatatgcactatcaaataaacccagctttgcaagatgataccttcctaattgactaag

SEQ ID NO: 425162 - DNA, 122 bp, Homo sapiens
tgaatcggagtttgagttggaacgactgttaaagcttcttcatcattttatgttgtgtatcgggaagctgagccttctgagagtttccatggagtaaaaccatgacttgaacacagaactgg

SEQ ID NO: 425163 - DNA, 122 bp, Homo sapiens
gttctgcattggccacagtttcttggcgaccaagccctgtccagggtgctgagaggccagcgcagggctgcagcccacagcccaggcaatggaccagccggctgtgctcagactggctccac

SEQ ID NO: 425164 - DNA, 122 bp, Homo sapiens
cgaggtctgccgctggtccagctggtacaatgggcaccgcccagagcccggcctgggaggcggagactttgagacgtttgaaaacctgaggcagagagggtaccaggtatgccctgtgctgg

SEQ ID NO: 425165 - DNA, 122 bp, Homo sapiens
actccgggctttgttcccccacttttccccttcctgtgcatgtttggtgagctcctggagcggtatgcatctccctgcctcgttcagcaggcgatggggaggggtggactggccggcgtctt

SEQ ID NO: 425166 - DNA, 122 bp, Homo sapiens
cgcaccacacttgctaacagtcgtcttcacaggcgaccgcgcaccacacttgctaacagtcgtcttcacagacgaccgcgcaccacacttgctaacagtcgtcttcacaggcgaccgcgcac

SEQ ID NO: 425167 - DNA, 122 bp, Homo sapiens
tctcacaggtcctgcccaagggcactgggcacactccttcaacacagaacagcccaggtccgctgcttccaggccctgcctgggccttcctaagggtgctgggaaggatgtggggaaacctt

SEQ ID NO: 425168 - DNA, 122 bp, Homo sapiens
gaagcactgcaggagattgcaaaaggcgcagagcacagttgttggggaccgtgcgggacacgtttttgttcgggaccattcgggacacgtgaactgcggggatatgatggttaattcgaccc

SEQ ID NO: 425169 - DNA, 122 bp, Homo sapiens
caggggatgttttgcaatgtgggcaactgaacctgagatgtgacaagaccagtgatttggcgacctgcccaggcaggcccagcccccagggtattgagatgacacattctaaactcaggtga

SEQ ID NO: 425170 - DNA, 122 bp, Homo sapiens
tcctcaggtcctgtgcctgtccggttctgcctgggtctgatccggctcgtgtggaggcctcgctctcattgttctggcctgcatggtggggggtctgctgcttggctgcatcccgcgtggaa

SEQ ID NO: 425171 - DNA, 122 bp, Homo sapiens
cacagtgatgtggatcagcttgctggccaggtgctccaggctgtccttggccacttgcatcgcccgcaaggcgcgctccagctggtccttggcctcggcgtgccgccgctcctccttcttga

SEQ ID NO: 425172 - DNA, 122 bp, Homo sapiens
gaaggtctgttcaattgacagaaggtcaccttgctagactaatatattcacttcccatagcgttttcagagcacatgcatatctgttctctcattgcatcctcattatatctgaagtgtcgg

SEQ ID NO: 425173 - DNA, 122 bp, Homo sapiens
gggaagacacctcctaaaaaagaatttgctttcgctcaggggttgaaaatcagccctccccgagcgccgaattgcccgggaggcgcccgctcgtgcggatgtcaggggcaccggggcagccc

SEQ ID NO: 425174 - DNA, 122 bp, Homo sapiens
gcaatcaggaaacggtgtgctcccggatccaggccaggtagtaggccacatcggtgtagacgcctggcttgttgcggtcaccacagcccgatccccagctgatgatgccttgcagggtgagc

SEQ ID NO: 425175 - DNA, 122 bp, Homo sapiens
agctccattcatggcaagagccctatacaggtgtaccatttcttctgttttatgctgtagcgtaccatgccttttttatgtttaaatatatttacatgcacagacacttagcattgtcttac

SEQ ID NO: 425176 - DNA, 122 bp, Homo sapiens
acctggcagccactttaccggaagcttctgggcagcctccacatggtcaccacactctggcgggtcgttcaccgttaatagccggcgctgcctcgccctcctttgctgagctcttttcccac

SEQ ID NO: 425177 - DNA, 122 bp, Homo sapiens
gcgctgtatagttgtgatgcccacaggcttccttgcatttctctccagctctgctagccacgaacacttcaagtctgcacttcacatgcttgcttgcctgtgcatggttacgcacgctcagc

SEQ ID NO: 425178 - DNA, 122 bp, Homo sapiens
gagggtgccgcggaggtggggttagtccaggtggccccgaggcccctctgtctctaatgccgctctcgtgtacagcagcccgtgtgccgaccttgtgcgtacgaatgtgttcgtgaccctgt

SEQ ID NO: 425179 - DNA, 122 bp, Homo sapiens
tatccatagacatgcattcaaaatcctcatttcaatggaaacacgtcccttctattatgccgcaaagctcttacagtaggcccccttctccagggttttgcttcccgagatttcagttaccc

SEQ ID NO: 425180 - DNA, 122 bp, Homo sapiens
gcattttgacagcgcagtgggggagttcctagcagtgatggagctggggcggcccataggcgagtacttcaatagccagaaggactttatggaacggaagcgagccgaggtggacaaggtgt

SEQ ID NO: 425181 - DNA, 122 bp, Homo sapiens
gttctgcgctattctctctctcacctctggagcaacaattggacgtgttgctcttcctgccggatcctccacatccatagatgcactgggtggtgtcagtgggcggcggctggctggggcag

SEQ ID NO: 425182 - DNA, 122 bp, Homo sapiens
acttctgaacttctggatcatttaccctctctctgcacaactcattttggtctttcatcacgttgccttgctgctgcctgtttcctgtgtgtctgccttgtctcccaaaggaccttgaagag

SEQ ID NO: 425183 - DNA, 122 bp, Homo sapiens
ccctacactctccccaccccacccccaactgtcagcgggctttaccaggtaaagggtggacgtagatttaaaaggtcactcgtgtataatgcggctggatccccgggtcaaaaaaagggggc

SEQ ID NO: 425184 - DNA, 122 bp, Homo sapiens
tttctgggatcagatgaatttacctggattggtggagttttcattggattgagagtcttacgtattatatcagtaaggatacatttggatccttgagtgatctgaagtatagggcactgata

SEQ ID NO: 425185 - DNA, 122 bp, Homo sapiens
catttgcctttttctgggggtaaaattcttaatttcaatcggtttctctaacagatcttacgactaaaaaaaaaaaaaaatttacaaatcgctatgtttgaaccatacaccctaacttttgt

SEQ ID NO: 425186 - DNA, 122 bp, Homo sapiens
taccccaatcccctccccattgctgctgcccaggatctgagctttaagttggacatcctccggagggcccccgtcttggcaggagtgcttatgcttgcatgaggtgggacaggcaagagcct

SEQ ID NO: 425187 - DNA, 122 bp, Homo sapiens
aacttcaaatttcttggaattgctgattctcctcccccatgtgccgctctcagaggatcacgacgcaagcctgtgactgacgaccattcctccctcactgacgccagagctctaaaccactg

SEQ ID NO: 425188 - DNA, 122 bp, Homo sapiens
agctagcagggtcaacaaccctggcctctctctgagctcggtctagcatgccccagcctgcggttggagtgtcaggccagatctgaccctgggaggtggaccattctggctctgatataaat

SEQ ID NO: 425189 - DNA, 122 bp, Homo sapiens
tacggggggggggggtacacacaggcatggcgttgttgagggtgttgttgtagacgcaggcgcgcagtgaataatcaagcatgcaattttcaaacagctgcagtgcttctgtcactttctca

SEQ ID NO: 425190 - DNA, 122 bp, Homo sapiens
gcgcctctcgcacctccacgcccaccctcccgccgcccccccctcggcctgaaagatctgcgtccacaccaccctgcacccagggcccgtcaggttttgcagaagtttgctgagggtcctca

SEQ ID NO: 425191 - DNA, 122 bp, Homo sapiens
ccacacccggcctcttttttttctttttcttttttttatctggagactcagttttgcactcgttgcccaggctggagtgcaatggtgcgatctcagctcactgcagtctccacctcagcagg

SEQ ID NO: 425192 - DNA, 122 bp, Homo sapiens
gccaggagctcttccctgctcgctcacgcctgctctcagaagctccgatccagacacacgcgaggcgctgtcctttcagcaccacaagctcgggctgaggagggaggactcctggccgtcct

SEQ ID NO: 425193 - DNA, 122 bp, Homo sapiens
aggcttgccccatcaccctctgagccctcccaacacagcacactagtcagcccactgccacgacctccctgccagccagaagcatccgtactgcacgctgtctgagaatgctgggcctggat

SEQ ID NO: 425194 - DNA, 122 bp, Homo sapiens
gagcacacaccgagagaagatgctccctacggtttccagccggctgcctgccatgatctgcgcctggtaccgagcgtgactagctgctaccggaaccggaagcggctgctccaggtaaaggg

SEQ ID NO: 425195 - DNA, 122 bp, Homo sapiens
gcttggcggccccgtggttgggcgtcccggcagccgcttgagggatggggcggggtcggccgggacctcctccttcattccctcggcgggccgagcctcccctctctcccgcccctcctcct

SEQ ID NO: 425196 - DNA, 122 bp, Homo sapiens
gttcggggccactgccccctgagcgttcccgagaggtccctgagagctcctgcattgtctcgggggttcagtgagcagtttgaaggcagcatcctacttttacactgcttttgacttttttc

SEQ ID NO: 425197 - DNA, 122 bp, Homo sapiens
cctttcctcaggctctccccatgctgctgtgggcttctgctgcgtcccggccccgaggatcgctcgtccctcaccccattaggcctgacgggcctcaggccgagcccgtgccccggctgtgg

SEQ ID NO: 425198 - DNA, 122 bp, Homo sapiens
cggttgggttgaggaggggatcctagagcaggacatcaggcggttgtacatttggtctagcgatgaaaactgagggaaaggatgtagggcctcctggcctaaccagccaggggaaaggggag

SEQ ID NO: 425199 - DNA, 122 bp, Homo sapiens
gccgagtacttccgctccctggcccactaccacgtagccatggccctctgcgacggctcccgtgagtgcccaccacacttgcccatggtactgccaaggcccccccgcgcagggctcacagc

SEQ ID NO: 425200 - DNA, 122 bp, Homo sapiens
ggtcccagtgggcggggggtggcctgacccagacagggcagggggacggcagctggagcgcgtggagagagcgcccgttccctgggagccactggagggcgcatggcacacggcgcccggcc

SEQ ID NO: 425201 - DNA, 122 bp, Homo sapiens
ttggcagcattcagaaagggcctcagttactctaccatgacaaatttctcagtctgtcaccgttcacttcctaaaagaaattcattgtagaaggtagaatgggatcttcatggcatttctga

SEQ ID NO: 425202 - DNA, 122 bp, Homo sapiens
atagaccgaggatgtgtcagagaccaaggatgtgtcagagaccgaggatgtgtcagagaccgggtgagagaaaatccagatatatggaaacaaaaacacaaaaacacaatgagtatgaagat

SEQ ID NO: 425203 - DNA, 122 bp, Homo sapiens
tccgccggctccagcgcgggaggcggggcggcccggaaggcctggtttggccggataaagcgaggaccgtctcagggatcctactctactctttaaccctgccgacttccctggccaccccg

SEQ ID NO: 425204 - DNA, 122 bp, Homo sapiens
cgccccgccccgtctagagccccttcctccacagcagggccggggcgcagggggtctccccgcacccagcgcgtcccgccccgtcccgaacacaaagggctctgcccgtccgcgctcccacg

SEQ ID NO: 425205 - DNA, 122 bp, Homo sapiens
gcctggagctttcccggggagggtcctgatctgcaagtagtggggaggtggttccacctgcgccacccacctctccactgccaccagcaatctgtgaagccggggcctgaaaatattcctta

SEQ ID NO: 425206 - DNA, 122 bp, Homo sapiens
cgtcagctccgccgtccgtatcgaccacgccccggaccttccgcggccagaggtgagaggcgattctcacggttcacctgcgcgccggcgtcacagcgctaaccgcttccctggccgtccgg

SEQ ID NO: 425207 - DNA, 122 bp, Homo sapiens
aaggaaaataaaccggttgcagcaaaacccactattccgcctccaacgcggagggaggagcggtcaaatgcacgtcttcaggctcaggcccttccgattggctgctgggacacaacgtggcc

SEQ ID NO: 425208 - DNA, 122 bp, Homo sapiens
tgggccaggctcagaggtgctgaactactggccctgacattccactggccagggctcagtcgtgtgagcataccttccaaggggaggaaatgtggtccagccacatgcccaggagggaaagg

SEQ ID NO: 425209 - DNA, 122 bp, Homo sapiens
cccaatcaccccccacagggagccgccatgcacgggaggagagctctgcagagagaagaccgtagccagctgtgtacgtgaccacagggtgaaagagcaagctacaggtaacacgtgacgtg

SEQ ID NO: 425210 - DNA, 122 bp, Homo sapiens
cagcgcctgctggaactcaacagctccctggagttcaagctgcaccgactgcacttcatccgcctcttggcaggaggccccgcgaagcagctggaggccctcagctatgctcggcacttcca

SEQ ID NO: 425211 - DNA, 122 bp, Homo sapiens
atatgctggtgatgcatacagatgcgatttcagatcaacgctgtccagtatggtagccaccggacacacatggttatttagtgcttgaaacatggggactgcaaattgagatgtgctgtgag

SEQ ID NO: 425212 - DNA, 122 bp, Homo sapiens
ggggaggacctgggacagtgtagactctcagccacagtgatgttttgcatctgggggacccgggacagtgtaaactctcagccacggccatgccctgagcccggggggacccggggaggacc

SEQ ID NO: 425213 - DNA, 122 bp, Homo sapiens
ctgactgctcacgcgccactcccttccccaccgcaccccaccccgacacccacgatgccacgcttcaggcggggctctaagacaaggcctttctctggcacatgcactttgcttccacttca

SEQ ID NO: 425214 - DNA, 122 bp, Homo sapiens
ccagggggtggcccagtcatcgccgcggggcccgggtgggaggggtttggcagcggcaggcgcggcggcggcggcggaggcggaggcggccccgggctcgggcggctgggatggagcagaag

SEQ ID NO: 425215 - DNA, 122 bp, Homo sapiens
ggaaagaaaagcaggaaaaaaaaaaaaagtcaggggaacatttttgtcggctgcgcgactcgactacttttgtctcctgcgggccactgttgagccttcacgagacgtcactgtcttcggtc

SEQ ID NO: 425216 - DNA, 122 bp, Homo sapiens
ttttttttgtctttggtttgtttctttatgtaaacagtttacttgttacgtcagtaagcacgtaaagtaaagtagtgctaaataaatagatacagtttaatgggcttcctggaagagggtag

SEQ ID NO: 425217 - DNA, 122 bp, Homo sapiens
ccgggagccccggagcccagttcgcgagaggcagcagcggctgtagccaagcacacccgccggccagatttctgtcccgatcgggcttcaacgactcgccccgcctctatacttttccggag

SEQ ID NO: 425218 - DNA, 122 bp, Homo sapiens
tctgaacagcagaaggaagtgcaatgcctcctatactgagcacaagctacaacattatttcgcaggattccctgaatactaaatcatgcattttattacctattttgctctgcagtttgttg

SEQ ID NO: 425219 - DNA, 122 bp, Homo sapiens
gagggacgggggataagtgacttaacaactctgcctcagattctgcatctgtaaaatggccgtgataggcgtttctcttcacagggatgccaggaagatgaaattgagatgaggcacgtttg

SEQ ID NO: 425220 - DNA, 122 bp, Homo sapiens
ctgctgatcagccaatcagcgccagactccagggaccgcccctgaagtcttcttagggggcggctctggagggggaacttcgtcgggggggagcggcggctggctgtgggtgtggaaaagcg

SEQ ID NO: 425221 - DNA, 122 bp, Homo sapiens
tctcggtcaagactatcgtataatatgcaaacattcgatatcgagtccgcccttccttgacgttaaaccagcagaaaatgtacacgatccctaccaccatgttgaagaggatctcctcccac

SEQ ID NO: 425222 - DNA, 122 bp, Homo sapiens
cctgcgcactgtcctgaggggacgcacgttgcctagctgtgtctctgctgctggatttgtcggtatttttaaatgatgccacgcctgcgtgctgtcctgcagggacgcaccttgcttagctg

SEQ ID NO: 425223 - DNA, 122 bp, Homo sapiens
agcctgcgagcgcgtgtggcggcgggggtgggggtgcggggacggagggcgggagtgttccggggctaggatggctgggatttagctacaaaagatgttccagaaaatgggtagtttttgaa

SEQ ID NO: 425224 - DNA, 122 bp, Homo sapiens
agtatgcccgtttcccctgcatagcctcctggtcactgtaattgatcgtgtgtgtgcgtgcgtgcgtgtgtgcatgcgtgtgtgtgtctttgtgtgtgtgtcttggccagcttggcgggctg

SEQ ID NO: 425225 - DNA, 122 bp, Homo sapiens
gctctgggggagaatctatgcgtctccttttctggtggccactgggattccttggcttgccggagcctggtctcaatctccatgctctaggtcacattgccacctcatcttctgtctgtgta

SEQ ID NO: 425226 - DNA, 122 bp, Homo sapiens
aaggagacacccaacacagtatcacctacattgctccattaaaacagctgaacatctacacgctttccacactggacacacaaacacggcaacacgacagacacactgcatgtgtgcaggga

SEQ ID NO: 425227 - DNA, 122 bp, Homo sapiens
ttccacactctgctatatagtgatgtcttcttgaggcctgggattgtagcacataatagacgtgcaataaatatttgtagtgtgaacatcactcctgatggagaacagcttataacttccct

SEQ ID NO: 425228 - DNA, 122 bp, Homo sapiens
agctgagcagcccgcgcctggcggtgcgcaagcgggcggtcggagcgcttggccacctggcggccgcctgcagcaccgacctcttcgtcgagctcgctgaccacctactggaccggctgccc

SEQ ID NO: 425229 - DNA, 122 bp, Homo sapiens
ggaattcaccttttttccagcaaaggtgaacaagggcagtggggcacagcagggaggccacgtaatctgaaggaggccaggggaacctggggaaggagtggagtcggttcattatctgaaat

SEQ ID NO: 425230 - DNA, 122 bp, Homo sapiens
agcgcgcagccccaatcggactacaatttccgacgggccccgaggccccgccccgcactacgggttgcaatgagggccaactccactttgggctccctatccggacaggtggctcttgccct

SEQ ID NO: 425231 - DNA, 122 bp, Homo sapiens
tcagcagccgccttcctcagcggggcggggcgcggcgggggcgcggggaggctgtgggcacgcggcttccccgcgccggggtgcaggtcctcgccgccgcccccgcgaggaagtgcgaggct

SEQ ID NO: 425232 - DNA, 122 bp, Homo sapiens
ctttactcaggggacaggatgcaaaccatgcatcatgaaaccttccccaagcaggtaactcggaaggctgccaagtgggacctgtaggctctcagcacctagccgtggaatgacagatccaa

SEQ ID NO: 425233 - DNA, 122 bp, Homo sapiens
tgcctgtggtcccagctacccagaaggctgtggtgggaagttcacccgagccctggaggtcgaggctgcaatgagccactgcactccagcccgggcaacagaatgagaccttgtcaaaaaaa

SEQ ID NO: 425234 - DNA, 122 bp, Homo sapiens
cagctgagaaagggttgctgtcccagcaggccaggtccaggtgcgccccactagtgaggccggcggaatcgggagggaaggggtcaagggcacagtgcgcagccccggctgctccagacctt

SEQ ID NO: 425235 - DNA, 122 bp, Homo sapiens
acacccccaactcctcaccccacgcacggtcacaggagcgagggcgcgtcgtggggtccacgtcaagggtctgctgacactgcgggcacacccttgctcctcatctggagaatggggagggg

SEQ ID NO: 425236 - DNA, 122 bp, Homo sapiens
gacactcagtatagatcaagaagttcttacgttctcatgaagcatagtcagattgcacctcggtcctgatagacaaatagggcttacagaggtggagaggaccaggaagggtattccagaca

SEQ ID NO: 425237 - DNA, 122 bp, Homo sapiens
tgcgctgctccccaggagccagtggacacaagcagagggatacaaatttcgcgcgggcagcgctgaggtgggccgtaaagaggaacggaccggaagtggtggtggttatagcaaccagtgtg

SEQ ID NO: 425238 - DNA, 122 bp, Homo sapiens
cttgaacctgagaggatctttgtaactgctttgactaataaaatgtggcagatgtaatgccgtgtgactttgaaggttaggccacaaagggcaacatggcttccacttggctctcactctct

SEQ ID NO: 425239 - DNA, 122 bp, Homo sapiens
tgggaggaagttgctcatgtggatgccatctgccaggaggaagatggagaacctttcattcggtagatggatctctggatggatgagaagtgagaaacattgtcctggtcactttgtccctc

SEQ ID NO: 425240 - DNA, 122 bp, Homo sapiens
aagcagagccgcttcgctcgggtctttcaggactgaccagcagggggcgcgcgcactctgcggaaaaagcaggatggcgttcactgcaacgcacgcttaaggaagttagcctcagagttcac

SEQ ID NO: 425241 - DNA, 122 bp, Homo sapiens
cacacgggccctcctgaagttaccttggcccggctgctggctacgggaacgctgggtcctcgatgccatggtcggggttgcagctgaaggcgatggtgatggcgtaacgggtgccccagtgg

SEQ ID NO: 425242 - DNA, 122 bp, Homo sapiens
cgcgtgtgcgggtgtgtgcgcgcctggggaggcggtggaggccgctgcgctctggctcggcgccggccagggagggattgcaaggtttagccccgccggagctggggatttgcaggcgatcc

SEQ ID NO: 425243 - DNA, 122 bp, Homo sapiens
gggcgcctcacccttcctggctttggagaggagccgggctgacagcgaagcccagtcccccgcccgccctggagcgctccgcggagctgtcactcggccgctgcccttctccgcaccctggg

SEQ ID NO: 425244 - DNA, 122 bp, Homo sapiens
acacgtgacaaacatcactgaaacatggacagctttgtgacacgtgacatgtgactgacacgattggcatctaatcaacacgtgggtgacacgtgaccaacacttaaccaatgcctgacatg

SEQ ID NO: 425245 - DNA, 122 bp, Homo sapiens
gcacgccgtgtccgagggcacaaaggccgtcaccaagtacaccagctccaagtgagctctcgcagctgccagcaatccaaaggctcttttcagagccactcacgcttccagagaaagagcct

SEQ ID NO: 425246 - DNA, 122 bp, Homo sapiens
gggcagggaggggccaagagggccgctgtgggctggggtcaggcccagctctctgctgagcgtcccctggggttgggaccctggttatggggagcgtggagaccacatctgaaggcaggctt

SEQ ID NO: 425247 - DNA, 122 bp, Homo sapiens
aggtgagcgggcgtctcagtgccactgtcgttggggaccaggggcctcatgctgtggggacgggctcacagggtgcggaaggtggcgctgagcatggcactggctgtctgccaggcagcgcc

SEQ ID NO: 425248 - DNA, 122 bp, Homo sapiens
ccgcgcccgggaaggcggaggggggcggcaggcccttctctgacaccctcgacgagcgaccgccgcaggggcctaggccacccctgcccacctcggcctggcccgctcgaaggttccgcgtt

SEQ ID NO: 425249 - DNA, 122 bp, Homo sapiens
gcatgctaagagctggggatgcagccggcccaaggctcctggcctagtatgaaagcaatgcgaaaaatggatgtgctgtctttgctgctgtcctgcaggaaggaatgccttgagcaggctct

SEQ ID NO: 425250 - DNA, 122 bp, Homo sapiens
tggtccccctatcctggaagtcagtggggagaggtttttgattagacccctggagctatccgggtactctaaaggcaaagcgcacccccacttggggaccaaacaaagacccctccgcattg

SEQ ID NO: 425251 - DNA, 122 bp, Homo sapiens
gccattaactctaatgcagttgcatcaacgtcagtgaaaagtgctcatacctgagatacacggtgcaaacgcccccggctccctcctttcccaattcacccacttcttaatttgagtttctt

SEQ ID NO: 425252 - DNA, 122 bp, Homo sapiens
ttttcccaaaccctcagtggctttgactattttggtgggatgttgcggctttaggaaatccgggcagatactccactaccctgcgtcccttatgactctgacctgtcagccataagccctag

SEQ ID NO: 425253 - DNA, 122 bp, Homo sapiens
ctggcacaaacgtgggggccgccgggctgcctggctagtgtgtgtagccgtgtggctggccgtgacaacccagtgcctgcccacagccatcttcgctgccacaggcatccagcgtaaccgca

SEQ ID NO: 425254 - DNA, 122 bp, Homo sapiens
gctggtgcagaaagggaagctccatggggccaggagatgactcactcactgtcaaacagacgcaaaggatctcccagcccaggcgcgacctggattacagagaatgacagcgacactcagag

SEQ ID NO: 425255 - DNA, 122 bp, Homo sapiens
atacttttcagatataatggttccgctgggattcagaaagctgcagtggatcagaccggccgtagaccaccaaacagtgaccaggaccttttttggtgcaggtttggctttggaagtgcttc

SEQ ID NO: 425256 - DNA, 122 bp, Homo sapiens
tggtgggtggagggagatcagaaatgccactaaacatcctacaatgcgcagacagccccacgaagcacataattatttggccaaaatgccaatagtgccaggtgcaggggctcatgcctgta

SEQ ID NO: 425257 - DNA, 122 bp, Homo sapiens
agcagctcccttctgagactgcagccggtccgcgcctgggtttcagggactgagccggggcggggctccgggccggccccgcccaccgcagacgaggttcccgagccgagttcccggagcgc

SEQ ID NO: 425258 - DNA, 122 bp, Homo sapiens
cactctcaacatccttgcattcctgggataaatcttgctctcatgggccttacctttgcacgatctctcttctttgtgtgcttctgtcccttctaataactgggcaactcctattcattctc

SEQ ID NO: 425259 - DNA, 122 bp, Homo sapiens
aggctggggagacccaggccggcctcacgcgtgcaggtagcagagggtggggcagcgccgcgctgcattggccccactgagtttcaccagcacactgagggccacagcgcgtaggacagaag

SEQ ID NO: 425260 - DNA, 122 bp, Homo sapiens
caggcctgcagctgcaccccaattccactccgccaacccctactcccacctctcccatcacgggttgcagctggcctcgtcattcttaagaaaagggactcaggtgatagtcagaccgagtg

SEQ ID NO: 425261 - DNA, 122 bp, Homo sapiens
gcgtccttggacccctggcacgttagaagctcgagttcctcggcacccaccttgcgacggcgtagggtgtccaggcgcagccctgtgcccaggcaccgttcctatcagcgcacttgctgtcc

SEQ ID NO: 425262 - DNA, 122 bp, Homo sapiens
gctgatggtgagcggtgatgcctggggcctgatgtgaggatgcccttgaggtctgatctccgtgtaattgtcctcccacctcccagatggcgggctggggaggggtttgttaaatgcgtgga

SEQ ID NO: 425263 - DNA, 122 bp, Homo sapiens
cgaagacctcccgcagccaccgatttcttcctaggacgtgaagaccttacccagctaggtcgtcaaccccaggagacaggaagtggaaccgctaattccggtgcggtggcctctgggaaata

SEQ ID NO: 425264 - DNA, 122 bp, Homo sapiens
gaggcgcgtggggggcaagcggggcgccgggatcgggggactcaccctccctgggcgccccgccggagcaccgtgcccagacacacgccgaatccggttcctaactccgctgctttggacgc

SEQ ID NO: 425265 - DNA, 122 bp, Homo sapiens
ggtgagtatctctgcctgtcatgcgtgagagagggggtcgattccccgacggggaggtcacgggaaattgtgtgaggattttgtcaaccttcagaagtctcagaaatgtctccttgttttgg

SEQ ID NO: 425266 - DNA, 122 bp, Homo sapiens
gctccctgaaagctgctgacggagctttggcgagggctcatcctcccgttggctgataagcgaagccctgttttatatttaactcgctgcagtgcaggaggggtaggggtggagatgcgtcg

SEQ ID NO: 425267 - DNA, 122 bp, Homo sapiens
gtttatttttgcaaatatatgcatgtatcatagaaaacttcctgcttctgtgtgaggcatcgataaatttgagttaacgaaaaagggaattttttttgttgaaaattgaattgaaatttcaa

SEQ ID NO: 425268 - DNA, 122 bp, Homo sapiens
gctgggcatcgtgctgctcttctgggcctgcttcctgcccttctggctgtggcagctgctcgcccagtaccaccaggccccgctggcgccgcggacggcgcgcatcgtcaactacctgacca

SEQ ID NO: 425269 - DNA, 122 bp, Homo sapiens
gggaagagcacgccaggcagacaagcacatggcaaggcggacagcgcctcctgtgaaaatcgttctacctcgcaaccggagtccgtgcacaagccgcaggactcgggcaaggccgagaaggg

SEQ ID NO: 425270 - DNA, 122 bp, Homo sapiens
acccttctcctgttatttaggatttctgacaaagctggcttgagattggtcacttagagccgactgtctcctctgccttttgtttttcagcttcagagacagatccaatatagtcccaggga

SEQ ID NO: 425271 - DNA, 122 bp, Homo sapiens
atccccctcagggagaaagggaaagcctgaaaggaatgagtggcatctccactcgcctcccggaaggcaggtcaaagattagaagataagaaatacacctgcctgaaaatgagaagatggca

SEQ ID NO: 425272 - DNA, 122 bp, Homo sapiens
tgttcgcccacagcttcagtggctccagacagctagcagatagaatgacttcagcttgaacgactaatctcattggcttctcaattcccaaggactttttttcctgaaagggaattaacagg

SEQ ID NO: 425273 - DNA, 122 bp, Homo sapiens
aatctgttgccgtatgctgttcagccttcagtccgggagtgccatcccacagtgtttcagcggagagctgccaagagagaataataacactagcggtgttatttgctgacacgaaggctagg

SEQ ID NO: 425274 - DNA, 122 bp, Homo sapiens
gtgagcaggctgcgtgcggccacggtcgggacatggtctgcccacccgcgcctgcccacccgatggtgctacccacacccacgcacctgcatgcagttggtgaacatgacgcacacagacat

SEQ ID NO: 425275 - DNA, 122 bp, Homo sapiens
ctcaacgaggaaaccgagaagcctctagtcccgggtcttcagaaaacgcagaggtggagccgcgccgcactcgggcactccccggcgtgggcgctcccggcgggcgggccttggccgagggc

SEQ ID NO: 425276 - DNA, 122 bp, Homo sapiens
gcggcgaccccggggaatgccgggagggcggggtgcctacgtatagggcgctgtcaggaccggaaaaggccccaccgacggcccggaaggtgtcctggggcccgaacccggtgaggcggcgc

SEQ ID NO: 425277 - DNA, 122 bp, Homo sapiens
ctcaagcgatcctcccgcctcagtcttcggggtagccgggactacaggtgcccgaccgcacggtcggcttaagattaactttaatagcaggaattttcctggatctaatcattagccgactt

SEQ ID NO: 425278 - DNA, 122 bp, Homo sapiens
ttgctgcaaagaaacaaggagacaatcagagctctgctatcgtggagttccacacaaagccgtctccaatcaggaaaaatgtggtcccggatcctacatatagcttctttgatagggatgaa

SEQ ID NO: 425279 - DNA, 122 bp, Homo sapiens
ggaatcttcagtctgaaaacggggtcttttgatctctccccactttggtgcagtctgctccgattagtgccgagattgagactggaacaaaccatggtagctgtcaatggcacaaggacccc

SEQ ID NO: 425280 - DNA, 122 bp, Homo sapiens
agtgaatccggaaaggaatgaggaggtggaggaaaaggagtctgggagaaccactgtcagcgagagccagtcactgcccaaagcgaaggcagcagaaataacgcagacgtgcctcttagagg

SEQ ID NO: 425281 - DNA, 122 bp, Homo sapiens
ccttctgcctctttggccgctgctcccaactcaaaccatctctcatgtgcccggccttcccggtgcccacccttcctggtgcccaaaacatcttaggctgagctgtgggttgctccactggt

SEQ ID NO: 425282 - DNA, 122 bp, Homo sapiens
ccacccatttattctgtgccacttcaatctaccagtctcttccctgatagcaaaaagaatcgagtcaccacctttaaaagatgaaaatcctcaacatgatttacaatattttttccaaactg

SEQ ID NO: 425283 - DNA, 122 bp, Homo sapiens
gttgctgtggttgttgagaagggcagggtcggccttggccgaggtcttcttggcaggtgccgtggtgggggctgctggcggctgctgcttctcggccggggcctccttcttcgagggcttgg

SEQ ID NO: 425284 - DNA, 122 bp, Homo sapiens
ctcccttccgggaggcgcgaatcctcaggggctccttgagagggcgccagggagcagctgcgcgcggatgccttttggccctctgcggccgccgtagctccccggcagaaacccggaagtgg

SEQ ID NO: 425285 - DNA, 122 bp, Homo sapiens
ttcaagtgattctcctgcctcagccctctgtgaagctgggactataggtgcgcgccaccacgccctgctaactttttttttttttttttttttttttgagatggagtctagctctgctgccc

SEQ ID NO: 425286 - DNA, 122 bp, Homo sapiens
cctcacttcccaggccccagggtctcccggcctcctttcttctcgccctctcctgcatctcggtttcctcacacacccgaggcctggcatcttaatgctgaagacatttggatgccgcggtt

SEQ ID NO: 425287 - DNA, 122 bp, Homo sapiens
ggctacaagatcccgtgaaagcctcacggctctactcaacaaatttctctagaaagaggccggagtgtacaagggcttcactagaccacactttttactgatgttgggccggatgtggtggc

SEQ ID NO: 425288 - DNA, 122 bp, Homo sapiens
ggggtgcagactcctatcacgccgacccctgtggaaggaagaaggagggggctgtagtcccgactcccaggttctaggatggccagggaacgctgggagcttcgactcctgggtttcagtga

SEQ ID NO: 425289 - DNA, 122 bp, Homo sapiens
ggtgggtggatcacctgaggtcaggagttcgagaccagcctggccaacatggataaaccccgtctgtactaaaaatacaaaattagccggatatggtggctggtgcctgtaatcccagctac

SEQ ID NO: 425290 - DNA, 122 bp, Homo sapiens
aaaggagtcggcactgaggtcacagagtgagtgctgctggcttctctgagttgaacgcaccgaattcacacacggagtggtgcctggctttactgaggagaatacactgaagtcacagactg

SEQ ID NO: 425291 - DNA, 122 bp, Homo sapiens
cggtggggcgggggccaccagctgaggcccctcctgccgcccagacagctcggccccctgcggccccagccctgcaggctgagatcccgcaacgactcccacccctgggctgaagccggtgc

SEQ ID NO: 425292 - DNA, 122 bp, Homo sapiens
caatgctctcagaccaaaaaaaaaagaaaaaggaaagatcattgctagtgttatctcacccgtataagctgaattacttacgcattaggctgtaaatgtgcttttctgcaacatgttccgta

SEQ ID NO: 425293 - DNA, 122 bp, Homo sapiens
aaagaaaatgctgcatcaatgtttgttgacctgcttctgaaagacctctattgttcctttcgcctctccttgttcttccatttgtctcatggaatctcttttcacacagaaccctctctgga

SEQ ID NO: 425294 - DNA, 122 bp, Homo sapiens
tgcctttcactcccaatctacttttaagtacacagatgttataggtccataatatcttaccggaagaagagactttcttatctggttcaactctagatttgaaactcctcacccataattta

SEQ ID NO: 425295 - DNA, 122 bp, Homo sapiens
ttcgttttcccctggccctggtcattctctggagagatgcttctggctgtcttgggtcatcgtccttctgtgctcatccctcccgtattttaggaaagaagttatctttcttttccatgtga

SEQ ID NO: 425296 - DNA, 122 bp, Homo sapiens
gaatcgcggctggcctgcggctccggcccggcctcgggtaccacgcgcctagtgggaagccgcactgacgcctgcagcatctcgcgagatttcgggctcagcccaagtactgcgagttcacc

SEQ ID NO: 425297 - DNA, 122 bp, Homo sapiens
aggtccccacgtttctctggcgttttggggaggggaaggccttctccacgaacttttcgtcgcatgccaggcctgatggcatctttgaacacgacgggaatggtcctgccgtccagagtggg

SEQ ID NO: 425298 - DNA, 122 bp, Homo sapiens
tgtgtatttgcagctcagcagtcgagcgtccaccccaagctgcataaacttgggtgccctcgcctccggcaaccccggtgcttcagtgctcccgacctttctctgccgcccctcgcctcggc

SEQ ID NO: 425299 - DNA, 122 bp, Homo sapiens
gcgcgtctgatttgccaggtgagcctccggccgagggcgcagcgcacacggccagctccgcgcaggcagactgcacagcccgccccaagggtcacgcccaccctgctaaggtgctaactttg

SEQ ID NO: 425300 - DNA, 122 bp, Homo sapiens
atctggttgtgatggagaagtgactttgctttaagaaaaaaggaggcaaggtagggagagcgcccacactgtccatgctccaggccccctgggccagctccgagaaggcgccagtgaaggac

SEQ ID NO: 425301 - DNA, 122 bp, Homo sapiens
tgtggaatgatttacaatttacagacatgtgatctcattgagtccattctcccactctctcggagacactatgaggtaagagaaccaccattttgagataataccggagcagccgggaaaac

SEQ ID NO: 425302 - DNA, 122 bp, Homo sapiens
ggaattgcttattgagatgaggaagactatagagcaaaatgtttgtggtgtgaagagaatcgggaattttgtttttttgtgtcgtcttatgcctgagattctggtttagacaccaaacagat

SEQ ID NO: 425303 - DNA, 122 bp, Homo sapiens
cccaggcccgggaggtggggagcacacacagtgccttgggtacccagttgggtgttctcccgctgcagaggagacggcagcctgggtcctgcccttcacctctggcggctttctctacatcg

SEQ ID NO: 425304 - DNA, 122 bp, Homo sapiens
ggccggcgaggccttggtgcggagcccccaagtgctcaccggggtgggtttgggacctggcggtcccgagcgcccgggtggggggtgggggaaggcagccggcgccggagggtggggccggg

SEQ ID NO: 425305 - DNA, 122 bp, Homo sapiens
cccagctgccagagccagcggcgtcattcccttcttgttggtgagctcctccagcttcagcgtcgggtgcagtttggcccccagcatcagaatctcattgtacatgctcgtcacaaacttcg

SEQ ID NO: 425306 - DNA, 122 bp, Homo sapiens
gtttttcctgtcgctccagcttctctttcgcggcccttccacgcttgtcacttacctgagcgcagccaatcagcacctagaggttgggctactttcggccaaaggagaacggggacttgtgg

SEQ ID NO: 425307 - DNA, 122 bp, Homo sapiens
tcagccacattggccccatcatcattctctttctactgaagggtctttaaacatgctcagcgtgctactctttcctttgtctccttaattcctcctacacatttttcaatgcagctcaactg

SEQ ID NO: 425308 - DNA, 122 bp, Homo sapiens
ccccgctcttgcctcccaggggcctctccaggcccagctctcgcccccacagcggcctcccggggccaagtccctgcctgcctcccggcatcccgcatgcagcccagctcctccctcacggt

SEQ ID NO: 425309 - DNA, 122 bp, Homo sapiens
tgactcaaataataacttagtcgtttcctctctgaaggtaggggaggtaatgaggagcaccgattaggctccaagatccgttctgagattcagataaggtgtcctaacaaaaggtttatggt

SEQ ID NO: 425310 - DNA, 122 bp, Homo sapiens
aggcgcctccgaggtcccggcagcggctcggggcgggcggaggaggggccgagggcggggcggccgcagcctccgccattcccggccccccccggccacggcgcaccgcctccccgcccccg

SEQ ID NO: 425311 - DNA, 122 bp, Homo sapiens
gatttagagttccttgaaagcagagactgggtctcatacatttgttattgttttgttctccggttggcacagggcctgcacacggtgggtatgtatttatttaattaaagagttggcctgtt

SEQ ID NO: 425312 - DNA, 122 bp, Homo sapiens
ttgccggcttcctgtctgactttttctgcctccctagggattccagccatttggtgataccgggggcttccacttctcatttggtgttggtgcttttccctttggctttttcaccaccgtct

SEQ ID NO: 425313 - DNA, 122 bp, Homo sapiens
tcctccctgagcacatattcgatggagaaggtctggcctcttcatttggctatgatgtggcggtggtggacctcaacaaggatgggtgagaaagcctcaggttatattatgctgcaaatcat

SEQ ID NO: 425314 - DNA, 122 bp, Homo sapiens
tccattggcagtaagaaaatgaatgctgttccaccttacaacttagagacgaatttctcccgacttcctccaatctctacagccggagaattcactgtaacgctgtcaaaaccttagcgttt

SEQ ID NO: 425315 - DNA, 122 bp, Homo sapiens
acagactgactggctgtttttcccagtgtgtcttgtcgtgatacttttaagccacagatccgctttgaaaagatatgatctcccccaggggagtaactattataagaacaaatactctatcc

SEQ ID NO: 425316 - DNA, 122 bp, Homo sapiens
cagcccctgtagcccctccttgggcctgcacccctggaggtaagtgacagcgcgtgtgggcggggcgcagacatcgccctggcaccccagagccttggaaaccctccagactcatcggtctc

SEQ ID NO: 425317 - DNA, 122 bp, Homo sapiens
cacctggaaaggagggcaagaactgggcagggggaggagagtcatgctaggctggggaggcgaggaaaacttgggggcaggacagggccaggcatgtcccaaagacaactggcctggcctag

SEQ ID NO: 425318 - DNA, 122 bp, Homo sapiens
ccatcgagcagggtccggctgcagcaacgagcccagcgccgcaacgcccagggtgtggggcggagtaagatgtgaaacctcttcagctcacggcaccgggctgcaaccgaggtctgaatgtt

SEQ ID NO: 425319 - DNA, 122 bp, Homo sapiens
cctggctgggcctccccaggcagcccacttcctttattcctgagtttcccatggctctggcggaaccccagcactcaccaagccatgctctggggctactgtgtccacctcaaaggcatatg

SEQ ID NO: 425320 - DNA, 122 bp, Homo sapiens
ggcccgttgggagaattggaagccaaccagtatagctgtagcacaggcggggcccatttacgccgtgcgttttcaccctggaaaggagtttgggttttcaagtgtgacgaggcgctattaaa

SEQ ID NO: 425321 - DNA, 122 bp, Homo sapiens
agttaatctttgtatgtggtatgaggcaccttttctttttttttgcaacagttttccctccgctgcccaggttggagtgcagtggcataatctcagctcagtgcagcctccacctcccaggc

SEQ ID NO: 425322 - DNA, 122 bp, Homo sapiens
gacgctaagtggcagacagacgcccaggcaagtcacacagtaacccaaggctacaataaacgcccacatcagcctgacactgacacacgcacacactccagaaacacaaatcttcacagtca

SEQ ID NO: 425323 - DNA, 122 bp, Homo sapiens
tgaccctgagggatgggggcgctgcacatggtggggtcagagggtaaggaagtggggttccgctgctggtgggagcacagagatcactgctggacactcaagcgtccatggggatgagcccc

SEQ ID NO: 425324 - DNA, 122 bp, Homo sapiens
ggtcagggccccgccctgcggcatcccaggaagaggacagcgtggggccggagtcaggcccggtcctgggtccgtgtctccattccgccgcctactgccaggccagcccagccccggaactt

SEQ ID NO: 425325 - DNA, 122 bp, Homo sapiens
tctagagctagtattggtagtctgtggtgccacctgggtctctgtgccatctggacctaacgcaggtaactctgtggtgccgcctgggtctctgtgccatctcgacctaacgcaggtcgctc

SEQ ID NO: 425326 - DNA, 122 bp, Homo sapiens
tcctcagaaaaaggagccagatttggtggaatttttcaggaaccagtgtcaaaatatttccgtgttcaagacagcccaggcagattgagcccatttatagaggtaagttattttgtttattg

SEQ ID NO: 425327 - DNA, 122 bp, Homo sapiens
aggtccaggcagttgggcttctccttgtcctcataggagcagctgggcaggatggtttgccggcggcgctcagcgcacgcctggtcttggcaggagcagaagagcatgcggtaggtgtactc

SEQ ID NO: 425328 - DNA, 122 bp, Homo sapiens
atagtgccctgactcgcggcttgaccttggctgggctggggcactgcccctctccgagcgcgggtgcaatctgcccattgatgaaggaggggttggattgctacctgggttctaagcgccca

SEQ ID NO: 425329 - DNA, 122 bp, Homo sapiens
ggatggccagggaagtatgccgggccttggcatttctatgttagttggaaggatcaggctcgaggcatctaaacacagacttgggcaggtgctgtgaagagaaggaccatctaacattagaa

SEQ ID NO: 425330 - DNA, 122 bp, Homo sapiens
gcatgacaatttcccacataaccaaagaagagaagggaaggatgttaattcatcttcacccgtgatgttggcctttaaatgtaagttctctgcaatgtaagttgaagaaggggagagaacaa

SEQ ID NO: 425331 - DNA, 122 bp, Homo sapiens
ggagccggtcggtttgggggccagaggggcacgaggcgagacccgggaccttccaggccccgagcagccgccttccccagtaatcctgcgcgaaaagcacacggccggcttggtgtggacgc

SEQ ID NO: 425332 - DNA, 122 bp, Homo sapiens
ggtaggagacaggacccaggcctcaggcaatgcctgccaggctagacatgagggatgctgcggcctctccccaccccactctccccaccccacccgcaactgccttcctcacaatggggttc

SEQ ID NO: 425333 - DNA, 122 bp, Homo sapiens
tgggccacgtgcgtctagggagtgcagctggcagccggggtccttgccagagactgagtccggctagagaacagggtggagcccctttggaccttagagctgggcctttgggccttgggtct

SEQ ID NO: 425334 - DNA, 122 bp, Homo sapiens
ccccggcgctcacctcggagctatttccccgcaccccactccgtccccatcaggtggggccgccacagactctgcgccctttcaagacatttctccactagggcgttctctggcacccccgc

SEQ ID NO: 425335 - DNA, 122 bp, Homo sapiens
tcaccactctgccccttccatgccaacaccctaccaggcacatagtaggtgttttataaacgtgttgatctgaccacatgcatgagcctgggatttgggggaccaggtttccagcctctctc

SEQ ID NO: 425336 - DNA, 122 bp, Homo sapiens
atcctggagccgatcctgtcacccagccgaggccggagcggcggctccgcacgcccagagcgggctccgactctttgcagacccagatccttctcagatcccggtctctattaagttctgat

SEQ ID NO: 425337 - DNA, 122 bp, Homo sapiens
cagtgtgtgtcctcccaagcagggctgggacgccactgataccatcgacgtacaacacgccgcaagcagccctcgaggaatggaaaactctcagactgctgtgtccacacgggttaataaaa

SEQ ID NO: 425338 - DNA, 122 bp, Homo sapiens
gcagaagcccccgccccatcaaggtcccacgcgagcccgggacccccgtcccatccgcaccgcccccacccctagccaccgacctgtctcgtgcgcttttcggaggagccaggcgtccgcac

SEQ ID NO: 425339 - DNA, 122 bp, Homo sapiens
tgtgcagaagcttcttcatcgaatgacccttcacacaacagactctttcttggttttgtacgttgtgctcttttcatcgttgtaatttctacctaattaaaaggatacataggcatgcttta

SEQ ID NO: 425340 - DNA, 122 bp, Homo sapiens
acgggttccgggggcctcagaggtgatccgggagtcgagcagcacaacagggatggtcgtcggcattgtggctgctgccgccctctgcatcttgatcctcctgtacgccatgtacaagtaca

SEQ ID NO: 425341 - DNA, 122 bp, Homo sapiens
gcgcaatcatggcccactgcagccttgacctcctggactcaagtgaccttcctgcctctgcgatagtttttcatggatgcttctagtagttttttggaggtatggtgtgttaggaacaaact

SEQ ID NO: 425342 - DNA, 122 bp, Homo sapiens
gggcacacagagttcagaatgattcagagcccagatatgtgccctaagtcacatctccagcgtccagggaggactgtaaagtgctcgttatcaggaaaatgaaaccaagggctcagctactc

SEQ ID NO: 425343 - DNA, 122 bp, Homo sapiens
ggcagggcagggcaaaaaaagactcagtgcaggaaaggacttgcccaaggtaatctagtacgtggaaaagcggagggcaggagcctgtgccgtgcaagagctccggggagccaacaccgagc

SEQ ID NO: 425344 - DNA, 122 bp, Homo sapiens
gtggtcctcacggtgagtattacagctgttaaaggtgacacgtacttagtttggtccttccggtgtgccatagttcttaaaagtagcacgtccggacttcgttccttgcggcggattcctgg

SEQ ID NO: 425345 - DNA, 122 bp, Homo sapiens
gccacctccttgacgggcagttcaggcaatcagacgtcctgtgcgtgatcagacgcctagcgcttcagaagcacgactggtgagaactgggcagcccttccacgctccgcactgcaagaact

SEQ ID NO: 425346 - DNA, 122 bp, Homo sapiens
caccctcccggtcgccgcggtggctctgcgctccccgcgaccctcacttgctcgcagaggcgctttttgtcttcctgagagccgcagcctgctgggctacctgttgccgactgagcactgcg

SEQ ID NO: 425347 - DNA, 122 bp, Homo sapiens
ggccctgcaagctatcttctcgacaaatggtttcactctgcctaacatccccctcttcctcgtcgcatcctaacacccaaacctgcaacaagtcctgcggaatctgtcccagcccggcctct

SEQ ID NO: 425348 - DNA, 122 bp, Homo sapiens
cttcattcataaattcagtgatgattgtacattattgtatttctttaatgatctacttagcgattgcccagtcttaaagtccaggagtcatggtgttcatcaatgctatcaatccaaacaag

SEQ ID NO: 425349 - DNA, 122 bp, Homo sapiens
cgtagggcacgctcccccgggagtgcttccgggacagggggcggggtcgccggaagtggccgtccgccgtccgctgctcgttgtttaagcggctgacgggaaggagaagccagagctccagc

SEQ ID NO: 425350 - DNA, 122 bp, Homo sapiens
tctcccctcggatgcggcgcgcaagctggatgtctttaggcataatagtgacgcgtttggcgtgaatggcgcacaggttggtatcctcaaatagccccaccaggtaggcctcgcaagcctcc

SEQ ID NO: 425351 - DNA, 122 bp, Homo sapiens
aagtgctcgaggcttggaccaggggtctcagaggggcccctgcgttcaagttgaagccaacggcatttgctgccagattgaatgtgatgggagagggagaaatcacagtggacttcaggcgt

SEQ ID NO: 425352 - DNA, 122 bp, Homo sapiens
atacctttgctttattagaaaacattctcctctactccgttcagctattcgctgagggcccgccaaccgccagcggttgtcagtggcctagaggcagcggacgcaaacacggggagaggtgc

SEQ ID NO: 425353 - DNA, 122 bp, Homo sapiens
aggaggagtgactaaatcgacgcatcaattctgtacgtcgtgggcactcaccccgcgccacgtgcaagccacccatatgatcggctgtttcccttaacaatccccagatatgcaagaattcc

SEQ ID NO: 425354 - DNA, 122 bp, Homo sapiens
gccaaagcacctggtcaggacttgggccttgcaccgcaggcctaggcaggttgctgccctcggagtagacagccataatcctccggtggctccagcacttctctcttccagctgctctgtgc

SEQ ID NO: 425355 - DNA, 122 bp, Homo sapiens
cgtgatccgcccgcctcagcctcccaaagtgctgggattacaggcatgagccaccgcgcccggccccaaaaatattttcttaataaagttagtgagaaaagtggcactgttatatttttgca

SEQ ID NO: 425356 - DNA, 122 bp, Homo sapiens
tctgagggtatgctgtgtgcaaaacataggtacactcgaggcaggggacgagagggtgtgcggagagaattcgggaagatgcctgccgactccttggggagccaacatgcgtacacgcagat

SEQ ID NO: 425357 - DNA, 122 bp, Homo sapiens
cgctgccgagggcaatttggtgattggctggtctcaccacgtgaccggcgctgagccttccgtgcgaccggattggctgtcgcggacgctgacggacaaggccggggcgggccagagcctgg

SEQ ID NO: 425358 - DNA, 122 bp, Homo sapiens
gccccgccgcggggaggtttgggccccctaccctgcggaactggaggcaagtgcggactccggctgcaggccgcggtctgcggggacgcgcgcggggggcctgcgtcccgccacctccgcgc

SEQ ID NO: 425359 - DNA, 122 bp, Homo sapiens
cttggaaccgcgaccactggagccttagcgggcgcagcagctggaacgggagtactgcgacgcagcccggagtcggccttgtaggggcgaaggtgcagggagatcgcggcgggcgcagtctt

SEQ ID NO: 425360 - DNA, 122 bp, Homo sapiens
tcccccaaccgcccggagcctccaggaggcgcaaggtcctactgactccctgacttcagacgtccagtctccggaattttgagaggatccatttctgttattttaagcaaccaaacttgtgg

SEQ ID NO: 425361 - DNA, 122 bp, Homo sapiens
gcgggcaagcaagaaggatgagcacgcagagctgattgtcctgcgcagaggagactacgacgcacccacccaccaggttcaggtgaggcaggaggtgtctgcactggctccccagggctctg

SEQ ID NO: 425362 - DNA, 122 bp, Homo sapiens
ctcccggggatcttccagcaaataggagcaaatcttttccccgtggatcaggaaggtgcacgctctttgtggaatacgactgctcaccccgcacagcaagcagcttataagtggccctcctg

SEQ ID NO: 425363 - DNA, 122 bp, Homo sapiens
aaaagaggagaatcaaaaacaagtcatcacaccaaattgcctaagactgatagtgattaccgtacttgtcttgctctgtggccccaatctatacacatcaatatcacttgcattgccagtgc

SEQ ID NO: 425364 - DNA, 122 bp, Homo sapiens
ccatagctcagtatatgtttctgtactatacacctgttcctgagggagtgatagggttctcgtgtcatggggtccacatttttgtatgcaaacctcctaacacctgggttttacaggtaaag

SEQ ID NO: 425365 - DNA, 122 bp, Homo sapiens
cctttttttttttttgaccagatacacacaattgagcccttctgaatctggcatcacagacgttgagacatacttttgcagagcagtttatgatgacatttatgagctatgcctcacagtca

SEQ ID NO: 425366 - DNA, 122 bp, Homo sapiens
ccgggggcttgacaggggcgtggcctcgcgcggccgagaggctgcagcggcagcagctgtcgcgccagtcgcaacagaagcaggtccgaggcacagcccgatcccgccatggagcagccgag

SEQ ID NO: 425367 - DNA, 122 bp, Homo sapiens
cacacggagcaaagtcccctgggaagtgtagtcttcaggccctgggagggacttcagccacgggccgaggagccaggaagttgagggaaggaagctaaggggagggttactgggtaactcaa

SEQ ID NO: 425368 - DNA, 122 bp, Homo sapiens
cgatacacctgggtgagtgtgagggcttcagatggccgtccccccacacacaactgatgtcgacacacctgggtgagtgtgagggcttcacatggccgtccccacacacacaactgatgctg

SEQ ID NO: 425369 - DNA, 122 bp, Homo sapiens
caaagcgaatgcaggaaaccagtgccctaagatgccaggaggacaagcacaggggctgcacgggagaggtgctggggcgtcacagaccgctccttatgccgtgctccgcggacggacgcctg

SEQ ID NO: 425370 - DNA, 122 bp, Homo sapiens
acactctctacggattgcacaaaacaaccctactatgacatcattttctagtcacagggacggagcaataaggtgtgatgcgggtgctccaccgaggctgtgctggcacccagtaggtgtcc

SEQ ID NO: 425371 - DNA, 122 bp, Homo sapiens
tggcagttttaactttctccctacacacaaggagctgctatacatggttccggcttgacgcggatacctagtgacacttggcggccaggccgggcagacttccgggtgggtgatccctggcg

SEQ ID NO: 425372 - DNA, 122 bp, Homo sapiens
aggctggggactagcgccgcgagtgccacctggagggaccccggcccccacccttggctccgcccggcccacggacctgttcgtcccgccccttggcggctcctacacttctgcttttcagc

SEQ ID NO: 425373 - DNA, 122 bp, Homo sapiens
tagtgagtggcgagggccgtcctgtggccttccagtgagggtgaccagccgggggtggggcgggagagggtgacccgggtgctctccgacctgccacgtgctggggaaggagcctgcaggaa

SEQ ID NO: 425374 - DNA, 122 bp, Homo sapiens
aactggcgggagaggcgtgaccagagtggaaccaaaagtgggtggcctgggaacctaacgcgtgaccagaagtgaaggtaggtaagtgcgcatgcgcaggatgcgagtggccaatgaggacc

SEQ ID NO: 425375 - DNA, 122 bp, Homo sapiens
agccaccaagtttgtggtaatttgttacagcaacaataggcaactaatactctggcctctcgactccttgaccttctcttctttagtgatgatgttcttggccctaactcagcctctcactc

SEQ ID NO: 425376 - DNA, 122 bp, Homo sapiens
gagacaacgccacccctcttccagggaggcggaaccagggcgggccgtggggcgcatgcgcggccggcgtccagctctccgggaacccggtacctatccgccctttggtcgggccttctccg

SEQ ID NO: 425377 - DNA, 122 bp, Homo sapiens
gcttgcgtggccggtacttgtcggcccacaggtaggccttgccggtgagtggcatctccacgctgaactgcgcctcgtcctggcccatgccctccttggcccgccggaagaagatgtcctcg

SEQ ID NO: 425378 - DNA, 122 bp, Homo sapiens
ggcttacagttaccccggcccagacttttttctctctgtccctccgtccctttgtacctgcgtgttatgtggatggcgtgcatgtgtctgcacagctgcgtgatgttcccctgtggactcaa

SEQ ID NO: 425379 - DNA, 122 bp, Homo sapiens
ccccccgggtgggaaagaaagggctgctgatgagggccggtgctgccagactttcggaggcgagctgccacccacccacggagtcggacccccgggcagtaactgggggagggcggcagtgt

SEQ ID NO: 425380 - DNA, 122 bp, Homo sapiens
actcttatgattgctagatagatttcaaaacattactactatctacgatgaaaaatgctgcggcaggcaacaggaaacagtgataagtcccagactgaatattcagaactggcagaagtaaa

SEQ ID NO: 425381 - DNA, 122 bp, Homo sapiens
cagctagcggcaagcggagtcaggcatccgttcagactgacagcagaggcggcgaaggagcgcgtagccgagatcaggcgtacagagtccggaggcggcggcgggtgagctcaacttcgcac

SEQ ID NO: 425382 - DNA, 122 bp, Homo sapiens
atgtttcaacccccagtgccaggaagcgtggggagttcacagcacagcacatcagacattcgccacttccacatccagggagccaactagaaacatccccaaacctaaaagcaaaataacct

SEQ ID NO: 425383 - DNA, 122 bp, Homo sapiens
ggcacgctcctggctcaggcggactttccaggctgctgggtgggttattccacgggacagcgacagccaaacggcaggttcccggagcagcagcagcagctcatcaggctgggagcaaagcc

SEQ ID NO: 425384 - DNA, 122 bp, Homo sapiens
ggcggcggcggcagcggcaggaatgaacgccgacccctcgcgcgggctgaccggtggcgacggcgcaggcgcagtgccccgagctcccggtcctggcccccgccctcctccctgaccgcgcc

SEQ ID NO: 425385 - DNA, 122 bp, Homo sapiens
catttcccagggacttgcttctcgttggctcagccccagggccctggattcctctgtcctcgcgccggcccgcggccaggccgctccctttgctcgcagtgggtcttgtagcttgctgctcg

SEQ ID NO: 425386 - DNA, 122 bp, Homo sapiens
aaacttccttcagaaagcaacagctgctgctatttaaagatttccctgaaatcaactgcccggaaagttgagctggtttaattgtgaggtcctccgggctcgggctcagcagagagggtggg

SEQ ID NO: 425387 - DNA, 122 bp, Homo sapiens
cacccaaatgttaaagatgtatttacacaaagcaccgatcaacagtgcagtttaattcttcgtttactaaactcttggctagacattaactttaaagatactatttccccttatttaaaagg

SEQ ID NO: 425388 - DNA, 122 bp, Homo sapiens
cctccgactcccccagcatggttgaaggccgctcaccagctgaaggcaaacagcttctcccgcaaactgatgagcaactctttcccaaaccaggaaagaaaatggctcccttccctcgaggg

SEQ ID NO: 425389 - DNA, 122 bp, Homo sapiens
caaactcttgggatcaagtgatcctccggctttggcctcctgaggtgctgggattacaggcgtgagccaccgctcccagcctgaggacttttaaaagccagggttcactggttcttaggtag

SEQ ID NO: 425390 - DNA, 122 bp, Homo sapiens
ggccgcctggctcacctgcatctcgggcgcgccttcggtccgctcggctcggtcaccaatcgcatgtctctccagccggcccgaccaggccccagcccctgcccagccccctcctccgtttc

SEQ ID NO: 425391 - DNA, 122 bp, Homo sapiens
caggacgtgaatgcatacaagtgcacaatccctgtacactggccagaaccggtccatggtcggtcttcttatcatgaaaaagttcctgaaatcagcccagtgaaagctgtagttctggctgg

SEQ ID NO: 425392 - DNA, 122 bp, Homo sapiens
gagggtgagatagggcagggcaggcacagggcaggacgcaggaggtacctggagaaggtgcgttctgggccttgaagaggccgacgacacctttgccatgcaggcctccagagcgcagcagc

SEQ ID NO: 425393 - DNA, 122 bp, Homo sapiens
taaataagctctagatatctgctgtgctggtgggaaacttaatcagaggtatgtggaccacgccctccacccagtgttatgcaaaggttcccaggtcttaggtaatatctggaaatgaggaa

SEQ ID NO: 425394 - DNA, 122 bp, Homo sapiens
caagttccccaattaatgaccagattaagcacttaaaatccttttttagaagcagatgagcgccaaactagaattaaatcaacaataaacaagtagtttcaagtcccccaactggctcacca

SEQ ID NO: 425395 - DNA, 122 bp, Homo sapiens
catcgggtgggtggggccggggcccatcctgggcatggtggacatgcacccgcgtgcatgcgtgtgtgggaagccggggcacttccacaccatcgtggacacactctcagcctgcacaccca

SEQ ID NO: 425396 - DNA, 122 bp, Homo sapiens
gttggctggtccttccatcagaacacaagtcctgggcaactccctaggtaactgtcaaagcggcagtcctcagcagagaccaaagaggagcccgggggcagtcccagcacttctcagacaca

SEQ ID NO: 425397 - DNA, 122 bp, Homo sapiens
gcaggcactcgggaagcgtcaggccggccccgggcatggctcacgcggggaagcgttcgccgccaaagggactccttcgtcactgcggtcgctcctgggacttgctggtgttgggtcagggc

SEQ ID NO: 425398 - DNA, 122 bp, Homo sapiens
tgccctctgtgcaggacaccgtgcgcaaggtgggcctgggagcgcgcagacgggctggggcggccggggcgggccgggggcgtgacctgccctcttctcccctttagtacctggagtcggtc

SEQ ID NO: 425399 - DNA, 122 bp, Homo sapiens
agcacgacaggcagctcctgcaagtggcggcgggaatgcacgccggagtcggcgtgccagcgcggtggaaaccggttctcaggttctggccgagtggacttccccttacatcagcgggccag

SEQ ID NO: 425400 - DNA, 122 bp, Homo sapiens
ggaggacaggggcagctggcgggcagcgggtgagggggtggcggggacgcgagtggcggccgcggggccccggacaagggtccgcagagctgcagccttcgagggccagccctctccgagtc

SEQ ID NO: 425401 - DNA, 122 bp, Homo sapiens
ccagtaaggccccaccctcaggccagggaggccctgaaggctacgggctggattgccagtcgcccagaccagtcaggacttgtggcacctcttcccggcctgcccatggccgcccatgggcc

SEQ ID NO: 425402 - DNA, 122 bp, Homo sapiens
cctaatctcttagcctgtccccttttgtggaaggaggtcagaagcacttggtccccaggccggctccctaaagactcttaacaagcagatgttactgtaacatgctcagggaatcaagcata

SEQ ID NO: 425403 - DNA, 122 bp, Homo sapiens
ctgcccctgcagaaggccctggggattactgcacggccctggagagctggcagccacgtacggcagtgcagtgagggctaacagggctaattgtgctcccagttgttttcagaaacagtggg

SEQ ID NO: 425404 - DNA, 122 bp, Homo sapiens
tgaatgtgttcaatcacaggtacattcctggtggtctttgactggggaaggaggggtgaccggcccctttaaagggagatctgtgagccctagaataatatcaagaggtgcagtgattcagg

SEQ ID NO: 425405 - DNA, 122 bp, Homo sapiens
ctcagcggcggaagtggcgctgccggaagatcttcttccgctctgaggcgctactgaggccgcggagccggactgcggttggggcgggaagagccggggccgtggctgacatggagcaggtg

SEQ ID NO: 425406 - DNA, 122 bp, Homo sapiens
gaagtgattcttgtgccatcgggaaggagccaggcattatcacagtggccggcaagagtgcgtcgggcaccgcaccttccttggggaccacggcgactttcagccctgaagctccagctgca

SEQ ID NO: 425407 - DNA, 122 bp, Homo sapiens
ggctccgtggtggcggcggcacttcaagcaaagacagtttcttgcaagctccagtagctccgcgtgtctcatttgccaggaagatgggttcccacgtagcaaatcgtacattgtgccctgta

SEQ ID NO: 425408 - DNA, 122 bp, Homo sapiens
agctgcgtgcctgattggacgggtcccagccccgcgtccctgattggataatgtttagggcgccaccccctaatgccctgagtgacagaatatgtgctcagcggctgggctgaacgtagaaa

SEQ ID NO: 425409 - DNA, 122 bp, Homo sapiens
aaccagccaagagtgggaggaaaagaccgcggtgagaaacacagccgacgcctcactcagcggccgtttccccaaacccctgcggagctgacacatcaacaaagatggcggcgacactgaag

SEQ ID NO: 425410 - DNA, 122 bp, Homo sapiens
agaaagtttctaagcatcccttcaccccttgagcgcaggcacccccagactgttgaagtccgccaggtttacataccctggcgggtcacgtgtatatataatccccccaacttcgtaaaagt

SEQ ID NO: 425411 - DNA, 122 bp, Homo sapiens
ccgcacttttttgtggggtagctgaaaccgattttaagacagacttagttgggggggtggcgagctaaaacgggcattctacgggagctggaagacttctggggcgtcccaaggactttgag

SEQ ID NO: 425412 - DNA, 122 bp, Homo sapiens
gtccagctgcctcgcaattggctgcaccctctgggtccgagcccccgggagggtaattaacgagggattaatgagatttccaaagtcaacagaaaaatcgatgggccgcggagcccgagcgg

SEQ ID NO: 425413 - DNA, 122 bp, Homo sapiens
ctcagggactttgcacttgctgttctctgcccaggatgctgttcctccagacatccacaccgctggctccctccttcatctcctttaaacctttgctcccctgttccttctcagtgagggct

SEQ ID NO: 425414 - DNA, 122 bp, Homo sapiens
ctagggaggtgggaggcggatgacagcggaatggggcttcggtagactgacaggatcagtcgtggaaggggcgggcccatctttctcttgaacccgcgagccaaagccacgttggtgctggt

SEQ ID NO: 425415 - DNA, 122 bp, Homo sapiens
gcagtaacactgtgccctgtccttccaatcactgccactaggtggaagcagagcgtgcatcgcccagatgggctagattctcacaggctcactgctagaacgaatattcttgagactttaga

SEQ ID NO: 425416 - DNA, 122 bp, Homo sapiens
cattgatttaccttaaatgctaaccttttgccaccagttgcttcgaactgaaactatggacgctgtctcctgcatctaggaaaactggtccctcccaagccaccttagcctcctccctctta

SEQ ID NO: 425417 - DNA, 122 bp, Homo sapiens
ccaggacccggagctgagcagcctggcgcgcggcgggcagggcgcgcaggacagaagcctcgctgttcctccgggagcccaacaccgttcccgcgcggccacgatgatccctccgagcagcc

SEQ ID NO: 425418 - DNA, 122 bp, Homo sapiens
cacagtcgcgggacaggtgcggagagagctgtggcaggcaggagctggatcgcagcgactcggcctcctcccgcctgcagggcaggctgcaccctgaggagcagagaccctgggctgacccc

SEQ ID NO: 425419 - DNA, 122 bp, Homo sapiens
cccactgggtgggaagttggatgggtggcttccaaggttgcttctaactccaagatgttacgacactaaggttaatggacactgaaatgcaggccaagaaaaaccatctaacgtgaggggtt

SEQ ID NO: 425420 - DNA, 122 bp, Homo sapiens
gcgtcgcgcagtaacgcgccataaatcagcccgcggaccatttaccccgcagcttgagcgcgcaaatcccttaaacatttctctgccatgtctgaagaggacctaggactttccaatctggc

SEQ ID NO: 425421 - DNA, 122 bp, Homo sapiens
gtctgtcatctggaagtcataaaagccactttcggaaacacagatgtcacttttggggaacggtcgtcatgtttcaaggcccttccttgggtttgaactgggagggccagagtcggcccagg

SEQ ID NO: 425422 - DNA, 122 bp, Homo sapiens
aagactgaagcctccgggggcttacaggtgccagcaaaggccaagggaggggggagaggccgcagctccgctccggctgggaggagaccagtcatgccatcctccaaagtttacagcttcgg

SEQ ID NO: 425423 - DNA, 122 bp, Homo sapiens
cccgcgcgcgtcctgccctggagccagcagtggggggacggggccgcgggtctccaggagcgcgcgggacccccacgcctgcccctgcgcggtctccaggcgatggggacacagcgaaggcg

SEQ ID NO: 425424 - DNA, 122 bp, Homo sapiens
cgccaagggctgggcagcctggctggaggcagtgagcacccatcgcaggaggtatcagagcggccccagcaggtcccgggtgtgggatggggccactgacgttcccctcgtttagcttccat

SEQ ID NO: 425425 - DNA, 122 bp, Homo sapiens
gcgccggaaaacctaggcgcggctaaatgacgcaagaggcctcgcgcgcacgcgcagtgccgcaccacgtacaccccgcccccggggctctctcccgccgggttccggttcctttacaaggc

SEQ ID NO: 425426 - DNA, 122 bp, Homo sapiens
cacctgtaatcccaacacttcgggaggccaaggtgggtgtatcacctgaggtcaggagttcgaaaccagcctggccaacatgatgaaaccctctctctactaaaaatacaaaaattagtcgg

SEQ ID NO: 425427 - DNA, 122 bp, Homo sapiens
gaaacccctggttctcccggaagccacagggagttccgaaagaaagttccagactggtgtcgctatgcaaggcaaatgattggatagggagagcacaagagaggagcacgtgggaatgcact

SEQ ID NO: 425428 - DNA, 122 bp, Homo sapiens
atttactattctaaattcattaatgtgaatggatagaaaaaatgattccttttgaacatacgtatacaatagctactgagtcttctgagtggacagaactaagatgcctttacaagacagag

SEQ ID NO: 425429 - DNA, 122 bp, Homo sapiens
ccgtctcccgcgccctcaggcgcccagaacgccccggccatgggcatccgaggcatgctgcgagccgcagtgatcctgctgctcatcaggacctggctcgcggagggcaactaccccagtcc

SEQ ID NO: 425430 - DNA, 122 bp, Homo sapiens
ccgaggctgtgtgttgaggtcgaagagggatgtgggctcctaccaggaaaaggtggacgtcgtcctgggtcccatccagctgcagacccccccacgccgagaagaggagcctcggtaggtgg

SEQ ID NO: 425431 - DNA, 122 bp, Homo sapiens
tcactaccagccaccacctccccagcacggggtcctccgcaggtgatttcatctctgaggcggctttcttatctctggaagagcagtactatctccctggtggagtcgttctaaaaatgaaa

SEQ ID NO: 425432 - DNA, 122 bp, Homo sapiens
agtaatgggtagagggagagttatttagctggaatgaggtacaaagagaggctgacacaacgagaacaagagttagaggccacagactcctcacagctgacctggggagcatcctgacaacc

SEQ ID NO: 425433 - DNA, 122 bp, Homo sapiens
ggcatcacttctgtgatattcctgctaaagatgcataccctgtaaggctgcattgagccgcgatcacgcccctgtactccagcctgggcaacacagtgagactctgtctcaaaaaaagaaaa

SEQ ID NO: 425434 - DNA, 122 bp, Homo sapiens
gccttcagaggtcaagctcgggggtgcagctccctaatgagaggcagcctgagaggggaccgaccccgcccaggatgagtggcgccaggtagcggggggacgctcccgggggtccccgggcc

SEQ ID NO: 425435 - DNA, 122 bp, Homo sapiens
cgacgagtcttgggaggcgctaggcggagacgggacactccagtctcggaaggctccgagcggagactggacccccgacgagtcttggaatgctctaggcggagatgggactctccagtctc

SEQ ID NO: 425436 - DNA, 122 bp, Homo sapiens
ctggcatttatggaaacaaccgctggtatgtgaaaaacaggtccgtcaccgccgtcacgacggccagagattatacccgccgagatgcccgcggcccagggcctacaatttcctccggccag

SEQ ID NO: 425437 - DNA, 122 bp, Homo sapiens
tgggtgccctcgtggcgttcttggaaatgcgcccattctgccggcttggatatggggtgtcgccgcgccccagtcaccccttctcgtggtctccccaggctgcgtgtggcctgccggccttc

SEQ ID NO: 425438 - DNA, 122 bp, Homo sapiens
tgacccaagtgaccttcgaggagacaaagtctgcatctttgcgcccaaatttgccaaaggcgttgccagagacatctttctagaagaagctagaacaaaataaaagtttctgcaaaggaact

SEQ ID NO: 425439 - DNA, 122 bp, Homo sapiens
acctcttcgggcgttccaacgcggcgccccctattggacctcccacccatatccggtttccggtctgacgccccctgctcattcgccaggcagccttgattggcatgacccctgcccaatgg

SEQ ID NO: 425440 - DNA, 122 bp, Homo sapiens
agccatggctgtcttgttaactgttgaacctgactgcccagtctacacacctcctggcatcgactaggcattcagtgaactctaggtgattgactaactcaatgaatgaatggaggcttggt

SEQ ID NO: 425441 - DNA, 122 bp, Homo sapiens
gggctgtcattttggggagaagggggaggtggcactcaggatgagtctggaagaggcaggcgtaagtcaccagacagacggggccagtgggagggacccctccaacctctggttggcctgtt

SEQ ID NO: 425442 - DNA, 122 bp, Homo sapiens
gagtcacacttgaaccgcctgggcccactgcaggcagtcaggggtgacgctgagaggtgccgtggtctcgggtggggtgcggcttcctgcgtctgagagacgcttcctctcctgctgtcctc

SEQ ID NO: 425443 - DNA, 122 bp, Homo sapiens
cccaggtcttcgaaaggccgttttttcccggacgctgtggacccggaggcccgggggtatcggccggcagcggcgcacccactccggggtctccacagggcaggacctgggtccggagctcg

SEQ ID NO: 425444 - DNA, 122 bp, Homo sapiens
cgcctccgcgccccagcgcccggggaggtacctgctctgcgctctcctccggcggcgggacgtgcaagtcctggatgacctcgtagacgttctctgagtcgctgcgcgccagaggccgcggg

SEQ ID NO: 425445 - DNA, 122 bp, Homo sapiens
ctaggcctcgggccccgcctggcctctggctgccaatgtggcccaggagcctgagctaaacgcctggactgcttcaggcaagtaaaaccgtcagagtcggcgtgggggggagccagaatgga

SEQ ID NO: 425446 - DNA, 122 bp, Homo sapiens
tccacttctccaacagccgcctctcgcgcgcgcgcgcgcgccgcccgccgcccgccgctccgcggtccgccttcagcaagggactcctcggcggccacagcagccacctcctccacctcttc

SEQ ID NO: 425447 - DNA, 122 bp, Homo sapiens
gcgcaggtgggaaccagggctgcgcggcgtgcttgtgggccagcgcaagttccaggtgggcgtgggctcggcaggccccacactcagagtggccagcctgccccgctggccctgggcagtga

SEQ ID NO: 425448 - DNA, 122 bp, Homo sapiens
atcagcgcgctctggggagaacagcttggttggctaaggttgatcctacttgctaaaatacggctatggactgcctagagggtgtcacctccttgaaaggggctgccccctgctatgttatg

SEQ ID NO: 425449 - DNA, 122 bp, Homo sapiens
cctctgctcccgacctcatttccccatttgaaatgaagggttggctcctgctgccccctccgcacactgttccgggctctgctgcggggtggggcagctcaacatgggtcctcaccgcctag

SEQ ID NO: 425450 - DNA, 122 bp, Homo sapiens
gaaaagttccccaagtccccatcggtaggagaagtccagccggcttctctcactggcactcgccatgggactttgcagcacctagcttgggcactccagccacccagagggagctcatcccc

SEQ ID NO: 425451 - DNA, 122 bp, Homo sapiens
tctggctattcatccaggttgttgcttggatcagtagtttgctcctttttattgctgactcgcattccatggtaagaggggacacctaggctgtttccagttttggtctgctacgaacaaag

SEQ ID NO: 425452 - DNA, 122 bp, Homo sapiens
ctccctggagatctgcaggcggctggagccctacatggccccctccatggttacgtcagtcgtgtgcagctctgagggcagaggggaggaggtcgtctggtgcctggatgacaaggccaact

SEQ ID NO: 425453 - DNA, 122 bp, Homo sapiens
cgcgcgccgaggagggtgccggggcggggacaagaagtgtgcatgcggattggttcctcgcggctgggggcggggccgcgcgggccggcggaagcggcgggcttcgggaggggcactgcgac

SEQ ID NO: 425454 - DNA, 122 bp, Homo sapiens
ctgaaggtaagttacggctttgcctggtcgcgatgacagaaaacttgcagatcctttatccggggatggggtcgatgcctctagaaagagctccctagccctcttaagccacactcgtgtta

SEQ ID NO: 425455 - DNA, 122 bp, Homo sapiens
gagccccgggtgggattggaagccgggccccagcctttcccagaattcaggcttgcagagcgtctgcaggtgtctgcctgccacctgcagcgggacagttccaaacacctgttgaaagtgca

SEQ ID NO: 425456 - DNA, 122 bp, Homo sapiens
ctcctcacacagtgcgccctgggggagggggagagccaccgtcaagggccggacacacctcggctgcttgccctccacctgccaagtcctgcaggtctccaccagggggacctggggccttg

SEQ ID NO: 425457 - DNA, 122 bp, Homo sapiens
acatttcctcccaactccaccttcagtgacactgcgtcagtaactgggaggcagcagtggcggcggggcgggggccttacactagagaacccggctgcaaatcaggtcccaaatgctgcaaa

SEQ ID NO: 425458 - DNA, 122 bp, Homo sapiens
ggagagggaaaggcagggggagtccgctccgcttacctgggttcggggtccggtgggtctcggggagggggggatgggagggagggagggaagggaggggaggggggccgcagccgtgtcgc

SEQ ID NO: 425459 - DNA, 122 bp, Homo sapiens
attagtttggccacatgtgacctggcatggatttttgcttaacaagttttgcctgggcctcggaaaaccctttgtatgtgcttcttttccagcctggtctcgtgtgactttggcctcagcat

SEQ ID NO: 425460 - DNA, 122 bp, Homo sapiens
gaagccattctgctcccaccccgactggacgccgcaggtgaagatactgaggcccccagacgatgtgaggcttgtccagctgaggatctggaggtgatcacccctcaaatgatgtttcagtc

SEQ ID NO: 425461 - DNA, 122 bp, Homo sapiens
gagctcgagagggaagcagggacgtggtggggtgtgcacctgctgtagcggcggcaaaggcggaggagaaacgaagtgggtgagcgcccgaggctgccagaggatctgggtgggcagggagg

SEQ ID NO: 425462 - DNA, 122 bp, Homo sapiens
caccgccgcaccctccgggccgggctccgctagccggcgtcgtacccgctcccgctctcccgctccctgagtcccctgcctgtgtccccccgcaccctggcacacagccagacttcccttcc

SEQ ID NO: 425463 - DNA, 122 bp, Homo sapiens
gggtgaagccagcaggcctggctggcgggtgggatccgcggctggggcgcagacttccagcgcagcgcgaaagctcagaggcaaggcctccacgtcccgcgggcaaggctcaggcagaggcg

SEQ ID NO: 425464 - DNA, 122 bp, Homo sapiens
gagaaaaaaaaattgggatgaaatgcaaaaccaatcaggcagcgagacccgtccgccacccgcccccctgaagtgtcaactacaacttctttcctttccctctacgcgtggacccacgttaa

SEQ ID NO: 425465 - DNA, 122 bp, Homo sapiens
gcccaagtctccccacgtcccaagcagtcatcccaagcttgttccaaaagcctcctcttccgcaccagctgcttgggcaccacggttactccggcccgcatctcagccccctctgcatgtcc

SEQ ID NO: 425466 - DNA, 122 bp, Homo sapiens
tgcaaaatacctaaggctgaaaggcaccttggaaagaagctgatcctgtgatctgcaagccgtgctctacagagctgcttcaagtccgctcagaagcgaaaagaggcagaaggcagggctcc

SEQ ID NO: 425467 - DNA, 122 bp, Homo sapiens
gggttctgatttctatgacctgccctggggaaaatggattccagtttctaaggccagcttcggggaaaatggcactgagagacaggagagcaagagaaggtcagagaaacactttttcttcc

SEQ ID NO: 425468 - DNA, 122 bp, Homo sapiens
gcggagcttgggtttccgggaggacctgattgtgcaagggaccaaaccggatagaggtcgcgcgccctctttcgtctgccttccggttcactaatacgcaagttcgcagaagtgcgggaacg

SEQ ID NO: 425469 - DNA, 122 bp, Homo sapiens
ttagaatcgcgggaaaatagagaagagtttgtttgaaggtctcgcgagatcgagtgagtacggctcgccaagttggagcgctctcgcgatagacacagcaactattcagctgcgaggggacg

SEQ ID NO: 425470 - DNA, 122 bp, Homo sapiens
gtttttcttgcaattacttttggcatctttgtcatgaagatcatttccaggtcctacgtccgcaatggtatttcctaggttatcgtccaaggttttaatatgttttcattttagatttaagt

SEQ ID NO: 425471 - DNA, 122 bp, Homo sapiens
gggaccccggtctttggacctggcccctgtggccccagtgcctgcggcctcgccattctccgctcagggcccgaggggccgcccttcctggaggcctccccaggacccacccacctctggga

SEQ ID NO: 425472 - DNA, 122 bp, Homo sapiens
cggggaggaagccgctgatgaagctattgctgagaagtgtgaagcccccacccgaggatccgcttttgaagagggacccggggaacgcgtagggggaaactgccttcctcttccctcagtgg

SEQ ID NO: 425473 - DNA, 122 bp, Homo sapiens
cccgccgggtgagtcagggcggagccggagacccggaagcctgacgcaaggagtcggtgtcgctgccctcgtcacgggggccacggtcctgccagctcccacctgcagggtccatgccgcag

SEQ ID NO: 425474 - DNA, 122 bp, Homo sapiens
acccaggcttgactggcaattaaacatgaaacttctcattgggtattttcgagactactacggggaatcagctaccagcttactgccatgtggagaactgcacgagattccgggattggaat

SEQ ID NO: 425475 - DNA, 122 bp, Homo sapiens
catcgcagtcatcgagtgagcagcgaggcttggacacgggtctggcggcgcagccaatggcgggggagggccgaggaggccgagggggggccaatagggacaggcggtgggggcgggacgac

SEQ ID NO: 425476 - DNA, 122 bp, Homo sapiens
gtcgggaggggagagtccaggtggaaaggtccttcttggccacagcccaggggtgagcaccggcacccaccccgacgtgcagacttcccgggcttgcctcacggggaaagtcctgcctcccc

SEQ ID NO: 425477 - DNA, 122 bp, Homo sapiens
ttgtgttttagtcccttgctcctgcttctttctacacacacatctaaagacggtgcggctcgctctgtcatgggttccgtctctctgtggagaagcagctccacctctgggggggctcgggg

SEQ ID NO: 425478 - DNA, 122 bp, Homo sapiens
ccttgtcacgggacagaaactgtggggtcaggacaataaacaccttcacgacctgcagaacgagggcagaggcttatggtgagtgtcaatgtattacatatcttaaaaagtcaatattggtg

SEQ ID NO: 425479 - DNA, 122 bp, Homo sapiens
gagcaggcaagagggcaagtccgagtggcccagcaagggaaaatgctgagctagggcagtcgctgtgctgacagagaggtgggagggaacttgagagctgcaggagcttggaagcctgatga

SEQ ID NO: 425480 - DNA, 122 bp, Homo sapiens
agattaaatggtggatgcaaacagccttgtacgaagttgttatctgtgcagaggaaaaagcggtatcactagcgtggaaggacccagaggatacagccaagcctttctgtcttctccatccc

SEQ ID NO: 425481 - DNA, 122 bp, Homo sapiens
accatgatccctgatgccaacaaggattaggcagttaccatctgccagcggaactgccagcggactctaacaacaacatgaggcggctctatgattgagtggttaagatctcagagccagac

SEQ ID NO: 425482 - DNA, 122 bp, Homo sapiens
cccctttgctgagacggagctgtagaaacttctgcttcactgaagcatacttgcaacctgcggtcagtcgcttcttttttcatgcagtgctgttttaaactgtcttctatcccacagagcaa

SEQ ID NO: 425483 - DNA, 122 bp, Homo sapiens
aaggaattccatagaccctgttacaaggatactcccttaactgctctgcagataacagctcgaacattatgaagcattgcgttttctctttaaatattatttcagatcctacataccactca

SEQ ID NO: 425484 - DNA, 122 bp, Homo sapiens
tgctcaaggtcatatagctagtaagggtgcagtataggttcgaacccacctgcctgattacgtctcccatgccaactcctatccattggtagcacctgcctgaaacagtgacttgagaaaga

SEQ ID NO: 425485 - DNA, 122 bp, Homo sapiens
tcgcggtcggtttagctccggcagttgggtcccagggaattctgggaagtgtagtccagacgctcagtggagtcgcggtcagtttggctccggctggcgggtcccggggaattctgggaagt

SEQ ID NO: 425486 - DNA, 122 bp, Homo sapiens
ccagtttccttctttatttaatagactcttaaccttgaggaagcaatctcattttactgccgttttgaagaaaaacacaaggcaacaaacttattcttttggacactatttgtgtttccaat

SEQ ID NO: 425487 - DNA, 122 bp, Homo sapiens
aaaagaactacgccttgccttctccagcaaccacaggtatggcgtcttctcctgtgaacccgcagagcacctcgcctggcggttctagtgcaggccgcggcccagtcttgctcaccctcgca

SEQ ID NO: 425488 - DNA, 122 bp, Homo sapiens
gaaaagtgaggccctaagaggttcagcggcgtgctccaaggtctaagctggcatgtctcccgccacgactcagccagcattccatttgggctcaggacgccagccctggggacggtgcctcc

SEQ ID NO: 425489 - DNA, 122 bp, Homo sapiens
tgtgagataaaaggaaatactaaaaattaagttattttacatggcatttggagaacaaaccgggtactttctcataaatggcaaagtcccctaggtatgttcagtttcttgttcccattgat

SEQ ID NO: 425490 - DNA, 122 bp, Homo sapiens
aatttactcactcagcttaatagagctcggtcttaaccaaaggctcaggatctcaggatgcgtgcgctcggaggcagcgctttaacaattaaggatgtaaatgttgggatgagtcacccgga

SEQ ID NO: 425491 - DNA, 122 bp, Homo sapiens
gagctacggtggccgcggggcggcggtggcgattggacttggtgggtcccgggccaggggcgggcgccgccatgggtaacctgttcggccgcaagaagcagagccgcgtcacggagcaggac

SEQ ID NO: 425492 - DNA, 122 bp, Homo sapiens
ctgcccatctgtgcctcagtttcctcacttaaaagaggaccagctgggtgcagaggctcacgcctgtaaacctagcacttcggggctgaggcgggtggatcacctgaggtcaggagttggag

SEQ ID NO: 425493 - DNA, 122 bp, Homo sapiens
ccccagacttgtctcctagggcaccgtcccgcgggtgcccccgtggccgcccagttccggcgtccccccagcccagctctcagtggccatgcagaaagcccggggcacgcgaggcgaggatg

SEQ ID NO: 425494 - DNA, 122 bp, Homo sapiens
ggaaaagaaaaaacaaaaaactggcataataataggtaacttaccatattgcctactgtgcgtcaagtgctgcctctacaagagcccagctaagagcttatgttttcctctgggaatgtgtg

SEQ ID NO: 425495 - DNA, 122 bp, Homo sapiens
tctttgttcatgaaagcatttcctcagtgcagcaatgcaacctgctgcaaagggagaacccgctcctgccagaggtatggctcaggctgccagacacaaggagattccccatgtgtcctggc

SEQ ID NO: 425496 - DNA, 122 bp, Homo sapiens
ttataaacattgactttttccccatgccaataggttatgtaaggacagtcttgagaaaaacggtagctaccatcctaggctttaaggtgaagcaatatttctcaccggtttctctttaaagg

SEQ ID NO: 425497 - DNA, 122 bp, Homo sapiens
aaacaaaatttcataactgtggctatttgtctttggtccttcacagggcctactctgtcccggcttcctttctgctgccctgatgtctcactggcttctgaatgagtgactgtgtaaaaata

SEQ ID NO: 425498 - DNA, 122 bp, Homo sapiens
cgcgcccgacctgggggcgcacacagcttgggagtcatagggctgtgggtgggagaccctcgggcaggcactgcgatttcagccaggagcggaaagctgggcgggctgcatagaagaagcgg

SEQ ID NO: 425499 - DNA, 122 bp, Homo sapiens
tccttctccagagggggtcgggacccgggatcccagtggcggtgaggttcccaggatgaccgcggccgctgcccgggagaaatgggccactcaacccggcttacagtttagcttcatcctct

SEQ ID NO: 425500 - DNA, 122 bp, Homo sapiens
aaaataaaatcccgccatcctcccccctccccgccccacccccgccaggtttcaacagcacggactccagtccagtgcagtgccgccacaccagagacaacaggtgtttcgggaaaagaccc

SEQ ID NO: 425501 - DNA, 122 bp, Homo sapiens
tgtccttgacgcggctgccataggctaggcgggcgtcctggtcgtaggccttcagggtctcgctggagctgtacgatttctgcggggctttgccctcctcgctgtccgcggacgagctggtg

SEQ ID NO: 425502 - DNA, 122 bp, Homo sapiens
ttgcacccaaactaggcctccccaccagcccaacgcaccccacacccagctcctccagctcggtcctctcccgggctggatcagagagccgctgactcaccgaccggccccgccctgaacct

SEQ ID NO: 425503 - DNA, 122 bp, Homo sapiens
actatccacctgaaataatcaaaaggatcagaatccagtttaaaagagcatatgcaggcacgaagctgaaaatagccactcaggacacacagactccagaggattagagccagtaccccaaa

SEQ ID NO: 425504 - DNA, 122 bp, Homo sapiens
agggtaggagcggtgagagggccgtggagtcccgcccctcgccgccgcggttggcgggagcgtgtcgtgacgtcacacagggcctctcgaagtgggcttgtgaatggctagattgggaagca

SEQ ID NO: 425505 - DNA, 122 bp, Homo sapiens
gaggtctcgcagggggactggttgtcttttaggaaatcaaggggccagcgcccccagtgccggctgggagatgccttcagagttcgaagagaaaagatgcgaccttcaatccgctccattct

SEQ ID NO: 425506 - DNA, 122 bp, Homo sapiens
gagagtcatccgtccacggccgccctcccgcctcctcacagccccggagatggacgaccccgcacccacgctgcccctgagaggtgaggtcatctgaggtcactggccacggccgtgcagtg

SEQ ID NO: 425507 - DNA, 122 bp, Homo sapiens
ggaaaaggacgggtcggaccgtaccaaattcggaagcgggggatgacctgtgtgattgatcgctagttcttctagggccattgcgtggttcaattagaaatattctggatttatacatcttt

SEQ ID NO: 425508 - DNA, 122 bp, Homo sapiens
cgctctagcagctgagaatcaacaaagggaggcggcgggggaggggcgccaccgagcgttcgctggctgctctggaataataaaaaataattaataatgataataagagaaaaatcccccgg

SEQ ID NO: 425509 - DNA, 122 bp, Homo sapiens
ggggagaaggaaaatgaaagcaaatggagtacggccttctccgcgcagggcgggtgctgacgagccgggagcgggctccctgcctgcggcagccgggatggcccgctggggacaccggagaa

SEQ ID NO: 425510 - DNA, 122 bp, Homo sapiens
tggacatgggatccctggcgtcagcctgggaggtggaggccatgcccctgcgcctcctcccggcctggaaggtgcccaccctgctggccctggggctcttcgtctgcttctatgcctacaac

SEQ ID NO: 425511 - DNA, 122 bp, Homo sapiens
ggatgatgcggggtgggctactggcacgtgagagccagtggcaccgagagggcgccccggcggcgaggaaggaggcgcgcgtgggaggaccaggctaactccgtcacggacgctaccaactc

SEQ ID NO: 425512 - DNA, 122 bp, Homo sapiens
ctgacctccatcttcaacagcagcagcaccctcttcactatggacatctggaggcggctgcgtccccgctccggcgagcgggagctcctgctggtgggacggtacgggggtgggggccagta

SEQ ID NO: 425513 - DNA, 122 bp, Homo sapiens
gagggccctgcagcagcattaggcaagggcagtgggggggatgggggttgggggtgcccacgacccctgaagccccagaaggagtgttacgtatagtaacactttagttttgccatttgtgg

SEQ ID NO: 425514 - DNA, 122 bp, Homo sapiens
aggtcgccgaggggcccgcgccgccgccagagcctgggcccagtccccagtcttcagagacgccctcgaccttcctgctccgaggagctggcctgatgtcctcgggtcgcggtattcatggg

SEQ ID NO: 425515 - DNA, 122 bp, Homo sapiens
ctcatgtttgtgaacatttctccactggaagagaacgtctccgagtccctcaactctctacgctttgcctccaaggtgcgattaccacccgtcagccttgtcaggacccgtgggtggttgta

SEQ ID NO: 425516 - DNA, 122 bp, Homo sapiens
tacatgctgaatgagggtctcctcacactccttagccccttccctgcctggcccattccccgatagtctttgccacagaacagaatacttgggaggtgtctggatgaggatttaatagccag

SEQ ID NO: 425517 - DNA, 122 bp, Homo sapiens
gactatatgggagcctgcattgtcttgcttgcattggtggaacaaatgttcgaaatgaaacgcaaaaactgcaggccgaagcatcacatactgctgttggtacaccagggagagtgtttgct

SEQ ID NO: 425518 - DNA, 122 bp, Homo sapiens
catcgttaatgtttgctacacagaagcggtgacagaggctgctctgggagcctcggggcccgccaacgtctgcaaacaggaggctcctgccctctgtgcgttcttcctatttgaagagaaag

SEQ ID NO: 425519 - DNA, 122 bp, Homo sapiens
cgccaacctgtcaccgggcatcacacctgggcagcagcacagacgtgggcgtcccagtcccgggctaggtgataatgacttcaagtcagacaccctccgctgcccaggcacccacaccctgg

SEQ ID NO: 425520 - DNA, 122 bp, Homo sapiens
ttttttttttttttttttgagacggagtctcgctctgtctcacaggccggagtgccgtggcgcgatctcggctcactgcaaccttcgtctcctgtgttcaagcaattctcctacctcagtct

SEQ ID NO: 425521 - DNA, 122 bp, Homo sapiens
gtccacgacacggacacactgtggcagacgtccctccgtccgccacagcgctgacccctgcgtccacgacacggacacactgtggcacacagcacacgttaggggatggaatcgctcgtcac

SEQ ID NO: 425522 - DNA, 122 bp, Homo sapiens
cgaactcctgacggcaagtgatctgcccacctcggcctcccaaagtgctgggattataggcgtgagccaccatgcctggcctatactgtgttttttatttgtattactttttattgtggtat

SEQ ID NO: 425523 - DNA, 122 bp, Homo sapiens
cccgggcgcccagttggacttggggagggctgcgcaaaggctgccgggagctgggaagcccggcgcgcgtcgtttgctggggctgtttgtgcgttgctgctgtgctaccgcgttgcgttttc

SEQ ID NO: 425524 - DNA, 122 bp, Homo sapiens
cagaaccctctttgtggggttgtgggggaaggctggggcgcccgggagggtcccgggtcgcgtccgacctcaggaaggcggggcttcagcagcggcctcggaccctccctccagggggcgct

SEQ ID NO: 425525 - DNA, 122 bp, Homo sapiens
tggaaagcctggggagggggctgttcagaggtcctgatgcccaggtcaccactgggcctacgtgtgtgctccaagtcttgagagaataaaggctacctcttatatcagactgggacctctct

SEQ ID NO: 425526 - DNA, 122 bp, Homo sapiens
atgctcctagccggcagaggagctagggagtgtggcactgagccggctcaggcagagacgcggcaccatggctagcaagaaagtctgcattgtaggctccgggaactggtaagcagctctgt

SEQ ID NO: 425527 - DNA, 122 bp, Homo sapiens
gaagtgcaaggggtcagggagttccctttcctagtcaaaaaaaggggtgacagacggcaccggaaaatcaagtcactcccacccgaacactgcgattttccaacgggctttaaaaacggcgc

SEQ ID NO: 425528 - DNA, 122 bp, Homo sapiens
ctgttactgaattgtgcaccaggcatctgtagcacttttcagaaattatcatatactcaacgacaagcttgccagatccatgttattattaacccctcttacagttgacggaactgaggccc

SEQ ID NO: 425529 - DNA, 122 bp, Homo sapiens
gcgctgccagctgtagccaggctcatacttttcaatttgttgtccttcttccacttcatgcgccggttctggaaccagatcttgatctggcgctcggacaggcagagtgcgtgggcgatctc

SEQ ID NO: 425530 - DNA, 122 bp, Homo sapiens
aaactttgaacaacgcaagtgtaaaagtaaaaaggtggttgcatcaaaaagcacaggagtcgccttgaagggttgtcaaaggtaggaagtttgagtataaaaaaagaataattactattttc

SEQ ID NO: 425531 - DNA, 122 bp, Homo sapiens
ttgccgcgctgccctcgttggcccccactcagccgagggaataactccagagaggcccggcggcgtgtcctcccgtacgcctggaaaccagagcggcattcctggcatcctcattcagcccg

SEQ ID NO: 425532 - DNA, 122 bp, Homo sapiens
cctccaacggtccgagatggaaggaggcagggattggaatctatgtcatcagccttctcccgactccagccctgggttcctctgcaaaggatgagggggagggactgtcaccccgaaaactt

SEQ ID NO: 425533 - DNA, 122 bp, Homo sapiens
taaatagaatttgcacaagccccttgagtggagttgaaataaacagaggaagtttacatacgagttcagaaaggccatggttccatggtttaagaaacagtcatcggaactgggcttgtggc

SEQ ID NO: 425534 - DNA, 122 bp, Homo sapiens
taggtagatggaattagggcagaacaaaaacattaagaataaaagcccgaacgagatgcgcgtacaggtgaacacaagtgaacactggggtaaggaaatgagttatgcggaaaaggcttcag

SEQ ID NO: 425535 - DNA, 122 bp, Homo sapiens
catgctgagaaacagctggtgccacacttctagatcaatggctttgcttgtgtggtgcttcgagagcagaaatgggggaagggggggaaagagcagcacagaatggagacctcaggttcagt

SEQ ID NO: 425536 - DNA, 122 bp, Homo sapiens
ctggtgtcttcctgcccttcctgcacacctccagtggcttatcaaaatatttgtttcatgcgcacactgggctctcatttaagaggaatttgggagaatgttattttctaatctgcatttca

SEQ ID NO: 425537 - DNA, 122 bp, Homo sapiens
ggctgcgaaccaccacccccaagatcccactaacagcctgtgcacccgggctagccaccacggaagagctaccactcataacacagccggacgctgcacaaacagccccttcccctgcgatc

SEQ ID NO: 425538 - DNA, 122 bp, Homo sapiens
ggtatctcagctgttacttcacagctctgacctcagttttctcatctctaactaggtcaccggcacttccctcagggtttgtgagagttaaatgaagtcaagtgcggaacacccagcacagg

SEQ ID NO: 425539 - DNA, 122 bp, Homo sapiens
taaaagaagtggattatgctattaaagatgtgccccccacccccatgtgtttgttcctatcgtagtaatgctgattgttaatggatggcatagtaactttaattgtgttcacaggcctttgt

SEQ ID NO: 425540 - DNA, 122 bp, Homo sapiens
aagtccagtcaccctcggcgcccggagatgacgtcacgagaccccacgtggtccgaactccgccctccgtgttctgcctaacccagcaaggaggcccgagtcgctcttgagcatgcgccaac

SEQ ID NO: 425541 - DNA, 122 bp, Homo sapiens
cttgggcgctctggggcctacggaggccttaaaccccaaagattggcggggacgaagggccggggcactcgagcgagcctggagcgggcaaagactgcgttgcgactggggacaggtctcgc

SEQ ID NO: 425542 - DNA, 122 bp, Homo sapiens
tatcagtgatgtatttaccccgggtgggcctctcgcatttagcatatgttctgaaactcccgcaagcatttccgggcttcttcaagaaactgcttgtgcaacctgttttgctgtaagatctg

SEQ ID NO: 425543 - DNA, 122 bp, Homo sapiens
ctgtcaaacttctcgctttcttcacctgtctcgccggaaatctctttaccgaaaaccacacgtgctaagcaaaaacaccaacggtcaggagcttgcagaacggcctctgacttactcctgag

SEQ ID NO: 425544 - DNA, 122 bp, Homo sapiens
acaacctggaatcctagggagaccctgattcacctcaaaactgccactaaggaggtaaaacgctgcccctctgaggcaggcttcagtttccctgtgtgtgaaattgacctggcgctgggaga

SEQ ID NO: 425545 - DNA, 122 bp, Homo sapiens
agtttaagcgactattcctcctccgttccatcgactcccagcaccagccagaaggaacttcggatcgatgttcctcccactgccaacacgcccacgcccgttcgcaagcagtctaagcgccg

SEQ ID NO: 425546 - DNA, 122 bp, Homo sapiens
attttttgctcaattttttttgtcagttgctaagtgctaaattactggccaggtaggacgcgagtccactttgccataaggaaagcgggtcaatagggctgcctctggatagcattacttca

SEQ ID NO: 425547 - DNA, 122 bp, Homo sapiens
agaaacagcaatagaatcagtgaaactgaaggagtgtagaaaaatagatggatatttcggcgacagcagcctatgtgaaaggcaaaccaagcactagatgcctcccgccactgaactctcac

SEQ ID NO: 425548 - DNA, 122 bp, Homo sapiens
cccactcctcagtgtttgtggagtcgaggagccaaccccagcctcctgccaggatcacctcggcggtcacactccagccaaatagtgttctcggggtggtggctgggcagcgcctatgtttc

SEQ ID NO: 425549 - DNA, 122 bp, Homo sapiens
cagcttgcgcgggctgcggctgcgggtgctgatctgcgtctttctttgccgtccggcctgcgcgacccgtgcgccctccacaccgcctagctttggggccctgaagagcaaagaggtctgag

SEQ ID NO: 425550 - DNA, 122 bp, Homo sapiens
ccatccccatttctccacaccatgccagtgctggactcaacttgatgaggactccctgaccgctgatgtattatctaacagcatcaaacttgggagattttcctgcaggaacccttgaatct

SEQ ID NO: 425551 - DNA, 122 bp, Homo sapiens
gtgggtatgttaccgttctaacccaattttcctgcctagaatcatgcagacaaccggcagcgtggtattaaatataatgtcagattctgtaaatagcaaggaaagggagaaaggtatctgag

SEQ ID NO: 425552 - DNA, 122 bp, Homo sapiens
agaaaaacacaattttcccaccaaagcaccactcggcatgaagggaagaacccagagactcgaagaggaccaggttcacactcctgaagatggcagattatgtctcatgcaataagccgaga

SEQ ID NO: 425553 - DNA, 122 bp, Homo sapiens
gtagctgggattacaggcacacgccaccatgcccagctaattttgtatttttagtagagacggggtttttctccatgttggtcatgtgtccggaattgatgggttcttggtctcactgactt

SEQ ID NO: 425554 - DNA, 122 bp, Homo sapiens
ggacctcgccgcttggcggaggcggggaaggcccgcaggcggcgcctcagccggggttggcgctgaggggagagggcggggaaaaggtggcgaattgaggggaaagtgggaggggcgggaaa

SEQ ID NO: 425555 - DNA, 122 bp, Homo sapiens
aatttatgaatctgggtagtagcgttggtaatctgagttctttaagggttaacaggacaacgaagtgcatgtggcagtgtgctggcagtggccttgaggctttggaccattggttacaaaac

SEQ ID NO: 425556 - DNA, 122 bp, Homo sapiens
tacagttctgaagaagtcttggcctttttctgaaaccttcaagaagtacaccaaagctcccgatctcccatctccaggaaaccacagcccaagtgcactgggaaagttggtcagggtgcctg

SEQ ID NO: 425557 - DNA, 122 bp, Homo sapiens
aaaaaaaatacaaaaaattagccgggcgtggtggtcggcgcctgtagtcctagctactcccgaggctgaggcaagagaatggcgtgaacctgggaggcggagcttgcagtgagccgagatca

SEQ ID NO: 425558 - DNA, 122 bp, Homo sapiens
aaccaccaagtgccccttggtttcccatctgacaaatccatcttttaagaaagctcagggcgctgggttcagtggctcacacttgtaatcccagcactttgggaggctgaagcaggcagatc

SEQ ID NO: 425559 - DNA, 122 bp, Homo sapiens
tttgatcatagaattgtgctggtcatacatttgtggtctgactccttggggtcctttccccggagtacctattgtagataacactatgggtggggcactcctttcttgcactattccacagg

SEQ ID NO: 425560 - DNA, 122 bp, Homo sapiens
gccgagggggggccaatagggacaggcggtgggggcgggacgacggcggagctaaagcggcggctgaagcagcttcattgttgtgaagagtcttaaaggggccgcatcaccctgccggcccg

SEQ ID NO: 425561 - DNA, 122 bp, Homo sapiens
acgattacagatgtaagctgtaagtcgccaaatccaggatcgttcctgtaattatcatttcgcgtctgacagccctttaattatgtgaagacagtgatcaaacctttcctccctgctctaca

SEQ ID NO: 425562 - DNA, 122 bp, Homo sapiens
tgatggttctacctgctgtgagctgcccagtgggaagtatggctgctgcccaatgcccaacgtgagtgaggggctggagccagcttggctgtgtgcccccagccacctggccctgacacgca

SEQ ID NO: 425563 - DNA, 122 bp, Homo sapiens
cccatcctcccccatggccagcacacggtctcccggcctcacggctgacaaggccacacgcgccccactctccaggcgtacctgggctccggcagggaagcagccgcccgtcttggctgcgg

SEQ ID NO: 425564 - DNA, 122 bp, Homo sapiens
atgctgtggaagctttgttctttcactgttcacaataaatcttgctgctgctcactctttcggtccgcaccacctttgtgagcagtaacaccggctgcaacggtctgcagcttcactcctga

SEQ ID NO: 425565 - DNA, 122 bp, Homo sapiens
gttgaaaacgcacatctcctagacgactaaagagctcccggagaaagcaatgtcttttcgcgccgaattccatctaccacatcccccggaatgtcccacgcgtaacgccctctgcgtgcgcc

SEQ ID NO: 425566 - DNA, 122 bp, Homo sapiens
caaaattgagattccgtttaagcctaatacatatatacacacatacgcagtatctgggggcgcatatacaatcacgcacatacacatacgatcacgagtacatcagagaaaactctttcaag

SEQ ID NO: 425567 - DNA, 122 bp, Homo sapiens
ggggctcccccggtcggtatggcctcatcttcctgcatcagacggcttccatccaccgagcgccgagtcttcttgggcatctgaatgggcagtggctggatcacctcgcctgggggaccctg

SEQ ID NO: 425568 - DNA, 122 bp, Homo sapiens
agcccaagccagaactcgagccctagccggagccgttcacagggaggcggctgccgggaccgtcagccctgcatgatgcatctccggctcttctgcatcctgctcgccgcggtctcaggagc

SEQ ID NO: 425569 - DNA, 122 bp, Homo sapiens
taatgtgatactgccggtctctgacctggaagcttctttgatgggagggtatcagtgaagcgtggtggggaggaaatacatgtgttgacagcctccgctgttgtgaccttcatgcctaacac

SEQ ID NO: 425570 - DNA, 122 bp, Homo sapiens
gaatttgttatttcctatagaggcagaaaagtgagatactttttctcaacatcccttaaacgtagaggaggccaacattctggccaatgagatatgtgggaagtctgttggagggcctctgg

SEQ ID NO: 425571 - DNA, 122 bp, Homo sapiens
ccagggcccagtctaatagaacctgtctctagctctttctgccgactgcgctcagagactcgcgcccccatccctaagaggaaccagtcgcttcactgggtcaagggccgcgagtccccagg

SEQ ID NO: 425572 - DNA, 122 bp, Homo sapiens
cccttacctcagcacgcagcccctccctgcgtgatgatgcaaaccagtggggagggctggcgctgggaagggtggggagagaaggagagccagcgagggagggagggagtgggaggaggagg

SEQ ID NO: 425573 - DNA, 122 bp, Homo sapiens
gggcttcgtgggtcgctggtgggtgctgggggcctggatgcgcgactgcgacatcaacgacgacgaattcctgcacctgccggcgcatttgcgggtggtcgggccccagcagctgcattccg

SEQ ID NO: 425574 - DNA, 122 bp, Homo sapiens
aaaaaatttgctctgggcgaaggaagaatggtagaaatttccaggtatgtggggaccccacgtcccctgggacagaagtcccagggacctgcggagcgcagacataacacaacacagagcaa

SEQ ID NO: 425575 - DNA, 122 bp, Homo sapiens
tactggggtccctggatgaggcggtatgctgcctctggctcctcccgatctgaaaccacccggagctgctgctggctcagtgaggagcgccccaaagcttggggcacctccaggggtgcccg

SEQ ID NO: 425576 - DNA, 122 bp, Homo sapiens
acaatgattggctggagcccacctttcttcttttttgctattagatgggcttgctgctcccgcccatctaattggctttggtctaggtacttctgattggcttcccccgggcggtgggaggc

SEQ ID NO: 425577 - DNA, 122 bp, Homo sapiens
gcggggacagtgttgaaggcctggctcctgttggtgggctctccagctgccccttgctcccgcccacccccgcccactgcaggtgcagctcgtctcccgacgccgctgggtgggggaggggc

SEQ ID NO: 425578 - DNA, 122 bp, Homo sapiens
accgggtgggctctgcttccccgggaccccactctgaccccatcccctaagccgctcccgcgagcacctcagctccgctcccgcgcgggtcagcaattcgaagtccgccccagacccctggg

SEQ ID NO: 425579 - DNA, 122 bp, Homo sapiens
ctctcaggtggggcacttggtgactagagaccccatgagcccccaccctccagcctggggcgggatagcccaatcggatgctggggggtccgtttggaaaccactctctgctttgaggacac

SEQ ID NO: 425580 - DNA, 122 bp, Homo sapiens
ccagccttggtgagcccttggcccagctctctcaggaaggtggctgtggtctgttctccccgcagagaggctggacatgcaatgtaacccctctcccatctctttgcaagatgcctgacaaa

SEQ ID NO: 425581 - DNA, 122 bp, Homo sapiens
gagggcgcgaggactccaggagccgtcctggttcgagcatttctgaagaaactgagttcccggcgttcgcagcctgggagtcacaggcgcccacccaccggtaggtccttgagtttcgagag

SEQ ID NO: 425582 - DNA, 122 bp, Homo sapiens
gccctgaggggttgccttggccgcagcctctgtgcacgctcttcctggtgtcctcttacccggtagctgtgcgcttgttcccgtgagaacagcctgcttccagagtgcccaggagtgctggt

SEQ ID NO: 425583 - DNA, 122 bp, Homo sapiens
cattagaactgggaggctgcccgaggaggccagctgagtttcaagatataaaagcaacttcgggtgctccttttccagccgggacgtattaaagggaccggagcggggcagttcccgacgcc

SEQ ID NO: 425584 - DNA, 122 bp, Homo sapiens
tccatattcaccacgagtccttgcataggagagattggtgtatacatgatgacaacctgacgaaaattatctccacctcacctgaaaagaattcccatctcaggattacaactggccttttc

SEQ ID NO: 425585 - DNA, 122 bp, Homo sapiens
gcctctatggatgccatagagaccaatacggactgagggtttaaagaagatggtgtccgccgcaggaccgctctatcttctcgggtgaactctatggcagagcataggcattcgatttagag

SEQ ID NO: 425586 - DNA, 122 bp, Homo sapiens
tgcacggggcacagcacctcagaatacaagttcgcagaggtcaaagcagtggacacactccgaagagctccgtggagttttggaaactacattatccagagtgcagagcgcaaaacggcggc

SEQ ID NO: 425587 - DNA, 122 bp, Homo sapiens
catccgacatgagttatatgggaaagacactttgcttttattcagagatttgagattgatcgctccctgaattggaaacaattgtttgcttttgcatttatcggtgtctgtacctctgatca

SEQ ID NO: 425588 - DNA, 122 bp, Homo sapiens
gagaccgtagcacaatgaatgcagtggggcttttgcaatgacatcatccctctgtccaaacgtccccaatagccatgctcgggagcggtgctttctgggaactgtagtcttcttacgtcctg

SEQ ID NO: 425589 - DNA, 122 bp, Homo sapiens
cctcaggtgatgcacctgcctcagtctcccaaagtgctggattacaggcgttagcccctgcgcccggcccctgaaggaaaatctaaaggaagaggaaggtgtgcaaatgtgtgcgccttagg

SEQ ID NO: 425590 - DNA, 122 bp, Homo sapiens
gcctaaaccatcattgctcccagaagactttgcccccacaaggccaaggacagagcagatcggttgggaaggaattgggaatagctctgtgggactccagcaacaggtgagagacccttgag

SEQ ID NO: 425591 - DNA, 122 bp, Homo sapiens
attcttatttactgttgctggcttgtccctgccacagggcctctgcattcgacgtcccctcggcccgagatgccctttccactgatttgcacacccctggctcattcttacttggatttctg

SEQ ID NO: 425592 - DNA, 122 bp, Homo sapiens
tccacactgtgactgtaaaattgtgtgaatgttatatgcattttacacagctaaaatcagcgtgtatacgttcatcttccaccttcccttatttgtcacgactttacaacgccaccgagttg

SEQ ID NO: 425593 - DNA, 122 bp, Homo sapiens
cgttaggcgcctgggtggtgactcggtttccctcggtcacccagagtccgcatcatcactcgccccctcctcatcccacccgttcccagtcgggggaggcaccaggcaccagttctctggcc

SEQ ID NO: 425594 - DNA, 122 bp, Homo sapiens
tctcaggctgagcatttacactggatttctgggggcctgtgagtcctccttgaccttcatcgcccactatcatgtgcttgagagcatcacaagtcagtagcaatgagccaggtgggtggtgg

SEQ ID NO: 425595 - DNA, 122 bp, Homo sapiens
acgcgttctgtgagccatcagcgcagatgcgggcgcctctgccccttcctcggtgtttaacgctttgtgtgccaaggcacctgccacccacacccaccccagacagatggtcgagatggctg

SEQ ID NO: 425596 - DNA, 122 bp, Homo sapiens
agctgcagacccactccagggcagacctgtctctactcttctgcgctgccctgggagccacgaggtgctgctgggcctagcaacagaggagtcagagcctagagaccagcagaggcggaccg

SEQ ID NO: 425597 - DNA, 122 bp, Homo sapiens
agggcgggggcggggctgatgggcggggtgaggcggggctcgggctggggcgggccctatcgggggcggggcctgccgggggcggagccggggtgggggcggggcccagcgggggcgggacc

SEQ ID NO: 425598 - DNA, 122 bp, Homo sapiens
tgcccatgtgatccacggggacgtgtaggcacgtcatgttgtccatgtgatccgtggggacgtgtgggcacgttatgttgtccacgtgattcatggggacgtgtgggcacgttatgttgtcc

SEQ ID NO: 425599 - DNA, 122 bp, Homo sapiens
aggggcacccacgcccacagcagagaactccagggctccccggggtggcactgaagaggtcggaaagccactccggcagcagccgtgacctttgtgatgcccccgtaggacatgcaggggct

SEQ ID NO: 425600 - DNA, 122 bp, Homo sapiens
gtccaccggctccctcagcgatgtggaggaccttcaagaggtggagatgttggaatgtgacgggttgaaaatggattcgaacaaggaatttgtgacttccaacgagagcaccgaggagagct

SEQ ID NO: 425601 - DNA, 122 bp, Homo sapiens
agaaggaacatttctaaagttttacccaaggctatgtaatttaaaaatttaaatagatatcgaagaattgtatttgcatgtctgaaatgaaagcccagagaatagggtggggaatgtttctt

SEQ ID NO: 425602 - DNA, 122 bp, Homo sapiens
agggcgaacattttgtatgaagttgctgagattagcagcggcgtccgccccagcagctagcgtttcccccacgtgccggcgatgtcgtcctccgactcaatacttggcagcttgctcagggc

SEQ ID NO: 425603 - DNA, 122 bp, Homo sapiens
aaccgcccattcccctggagctggggtgctctcccctcttctgctggggaacaccctaaacgctgtaggggaactgtgacctagaaccgtgtgcctccccgctgccctccctcacgggggcc

SEQ ID NO: 425604 - DNA, 122 bp, Homo sapiens
gccggggagtaacagccatgggatgatgggatttggggataatgtacccagctgctcttgcgctttgcattcctggctgcctgtagcctcaaaaggaaaaagcgtgcttacattatttagat

SEQ ID NO: 425605 - DNA, 122 bp, Homo sapiens
actggcttggaaaaagctctttgatctgtgtcattctcctcacatctccctacacctctgcggagttccgattgtttggtttcgtcctgataatcactgtgctgtgttttccctacacgctc

SEQ ID NO: 425606 - DNA, 122 bp, Homo sapiens
actttaaaaagtggctggcacgtaaatggcaactgctaatacttatttccactctcaggacgcatgagaatgacacaggaaacaggggaaagggcctggcccagtgccccacacacagcaag

SEQ ID NO: 425607 - DNA, 122 bp, Homo sapiens
gacagtggggagaataacactcaataggactgtccagaaagaaagatgaaatgtgttacacgagtcttgagcacagggcagttgtttgcttgagattttccctgctctggggtagcagctaa

SEQ ID NO: 425608 - DNA, 122 bp, Homo sapiens
acccgcagccccgcaccgcgcctcaccttgatgtgctcgtggagctgcgcctcgtgctgccgggagagctgctcgtgctgcctctggaactcagcgatgaggatctgcctctggatctgctg

SEQ ID NO: 425609 - DNA, 122 bp, Homo sapiens
acgtccatgcagagcacatgggctgtgttcttcccagtacaaagtagacgcacgcacacacgctcacacacacacagaggcaggcaggcaggcaggctgaacacgctggctgggaactgctg

SEQ ID NO: 425610 - DNA, 122 bp, Homo sapiens
gtgcccgcctccggggcccttcccgccggaagaaagcttctccgctcactaatcactcggcggcttccggagagcccgcctcctcgctcggcattctgggattggtagttttagtccagatt

SEQ ID NO: 425611 - DNA, 122 bp, Homo sapiens
ctttttctagtccccagccgcctcgcccctcctccctcattcccagcctgggtttggaggcgatttccctctattgactgagccgactgcatctctgggcaagcggcgctttgcctctctcc

SEQ ID NO: 425612 - DNA, 122 bp, Homo sapiens
cagctccccatgcacctcctccaggagctttcttggggttgtcgtgtcctctgcaccattcgaggccctactctttccaggttcccacggcctggcctccctgagtttcttgcagatgacat

SEQ ID NO: 425613 - DNA, 122 bp, Homo sapiens
gtttaattcggacctagttaggcatcggatttcgcatgctggggagaaaccttacacgtgcgatcagtgtgggaaaggctttggccagagctcacaccttatggagcatcagagaattcaca

SEQ ID NO: 425614 - DNA, 122 bp, Homo sapiens
attcccggggccacgtaaattaggcgtggagcctgtgttagagagtgagggtttccttagcgtcgttggcatcattcatgtatagccaaggttccacttcttagcttctccttcaagaaagc

SEQ ID NO: 425615 - DNA, 122 bp, Homo sapiens
aagcaatgttgatttggcatttccttctttagagaacctggggttcagaagttctcctagcgcagggcgtggatggaaggggaggaatgagcatgggaccaggggcctggtgctctgggtct

SEQ ID NO: 425616 - DNA, 122 bp, Homo sapiens
agacccgtgcctggagccagcccctggccgccgggtagccatgcggagcctgccatccaacggagagctggaccccgacgtcctagagagcatggcatcactgggctgcttcagggaccgcg

SEQ ID NO: 425617 - DNA, 122 bp, Homo sapiens
gtacatgagaggcggcgggaaggtcagccccagggagctggaaggtctcattgctcccaacggcagagcctcctgtgcctggccgcacacaaaccatccaaaactgatatttaagaggatgt

SEQ ID NO: 425618 - DNA, 122 bp, Homo sapiens
gactctctacgtttaggccccaagtttctgggagtgaaacgatgagggacgccaaataggcggaagaagcccatttgacccaggcttatggcagcgaaggggaggatgggaaactccaaaaa

SEQ ID NO: 425619 - DNA, 122 bp, Homo sapiens
ctccccgccaaaagattaaggacctgcgatcctacagaccggagccctgtttgaagtctgcgttgcccctcacctcaagctggtcactgtgtgaagttggcctagaatcccccggcccctgg

SEQ ID NO: 425620 - DNA, 122 bp, Homo sapiens
tcatgtggaaggagcagcggtctgtggggtccccagttcctcctttgtctccaaggggctcgagtttttactgagatatccagatatatgcgaagcagggtctcaaatccgcaactgtgatc

SEQ ID NO: 425621 - DNA, 122 bp, Homo sapiens
cctcctccccactacctggttattcgagaatgcacctgcccttccaatagagcagggagacggctgtttcttaattcaggccccaatcctgcttgttctttgttagtccgtttgtaaagata

SEQ ID NO: 425622 - DNA, 122 bp, Homo sapiens
cgccaccgccgccaccggccgcgaactccccctttcccgtcacgtcacacaatatcggatcgtccattcgctgccgccgcccgccactcaagaaatcccgtggatgataggtagctgcggca

SEQ ID NO: 425623 - DNA, 122 bp, Homo sapiens
tccgtgcagtgggggtggacgcccctctgtagcggggaagtgaaggcctgtggagggaagcgaccccgggacctggctgcctgcctgtcccggaagccacgtgggcatcaccgcagcaagat

SEQ ID NO: 425624 - DNA, 122 bp, Homo sapiens
ctaaggctgtatcgttttcatcagatgtcaaggcgacatatcatactgggccttaatttccggccttataccgcaacttggcaggcagcatccagagtgtggatataaacaggatccaaaat

SEQ ID NO: 425625 - DNA, 122 bp, Homo sapiens
gggcgctctgcgcatgcgcgggtctgggggctttggggagatacgtgcgacctgttaggccgctctgcgcacgcgcggggctcaggcctgagctgctatgggggcagtgggggaaaatggga

SEQ ID NO: 425626 - DNA, 122 bp, Homo sapiens
caggggctccgcacagcaggtgaggctctcctgccccatctccttgggctgcccgtgcttcgtgctttggactaccgcccagcagtgtcctgccctctgcctgggcctcggtccctcctgca

SEQ ID NO: 425627 - DNA, 122 bp, Homo sapiens
cacaagtcatcaacaccccaatttccagtctgccttcggccccaaagtgcatcttgtcagcgttgactcagggccaggaagaaaacaaataattccgggcccagcccaagctggtgtggcag

SEQ ID NO: 425628 - DNA, 122 bp, Homo sapiens
tggggcaagggcagaaaagccagtaagaactaaaggtgacagtttgaactgaactgcgaacgccagcaccaggtttcagctgaaagaaccgccagacaaggacacattcacagttcctccac

SEQ ID NO: 425629 - DNA, 122 bp, Homo sapiens
ttctgttctcgcggtgtgggtcccctgggggtagggccaaggcaccaagatggatgaggacgagggtcctggctgccaagggtgaggggctgagggttggagaggcccttccagtggcccct

SEQ ID NO: 425630 - DNA, 122 bp, Homo sapiens
acttcccagcccggctgcagtgtgtggtggactacggcggctcctccagcaccgagaatgcggtgactgccatccggtttctttttggcttcctggggcccctggtggccgtggccagctgc

SEQ ID NO: 425631 - DNA, 122 bp, Homo sapiens
taggaagagggtttaaattttttccttctccccaaacttttccttccactgggcaaagggcgaaaataggcaagagggcctggggacacttgaagggatagggactggactaactggactag

SEQ ID NO: 425632 - DNA, 122 bp, Homo sapiens
gcagggtgggggcgccgtccgggccaagcctggctgtcgcgcggcttctctctgagtggtcggcgaggctgctgctccgcgcaagttgtggctcccggcccatctacattggaggaatcctg

SEQ ID NO: 425633 - DNA, 122 bp, Homo sapiens
tgctcctgctgctgcacagtgaactggactgatcccactctgcttaatggcagcaagatccgtaactggaatcagtatctttagagctctgagaaagaatttcaaaatgcatttcaacattg

SEQ ID NO: 425634 - DNA, 122 bp, Homo sapiens
cagtggactagaagagctgtcgggggccatggcctgagggtgctggggtgcccaagacaccgtgaagggtctcacgggcctccctgcccccgcaggtggccgtggtggtcatgtgcctcgtg

SEQ ID NO: 425635 - DNA, 122 bp, Homo sapiens
ctacctctgtttctgtagcacctgccccagctgatccgctaagacgacaaatctcttagacgtttcagctttacaatctccttctcctcccttttactcaaagctaggtcccctttcttatg

SEQ ID NO: 425636 - DNA, 122 bp, Homo sapiens
tgcggcagccgccccggggcgcccagccgcccgcttccctccgcagagcgtcttccctgacggtgaaaccgcgcgggacacaacccaccgcggctcatcacccacttacaaatagctgtcgc

SEQ ID NO: 425637 - DNA, 122 bp, Homo sapiens
caaacctgaatgcaggtaacaagggcagcagcctgagcatctcagagcccagaggcagagcgttagccgattgcttccagcatcatctggggcacagtggggtcttggttcctcaatgggcc

SEQ ID NO: 425638 - DNA, 122 bp, Homo sapiens
gtactagagggcggaaacggccgcgtgaccgcgcgtccccagggcgcccacacccggcgccgcctcccccacatggccaagcctacttccggggtccctctgggaatttcgggctttcccgc

SEQ ID NO: 425639 - DNA, 122 bp, Homo sapiens
ttattcttatttggccggcggtgatctcgccttgaagcctcagcccctcgggcggtcagtcgagccgctcccaaagctccgcccgatcaacctgctggcagcgccgcaccctgggccgccgg

SEQ ID NO: 425640 - DNA, 122 bp, Homo sapiens
cccccacctcctgccaactatccacacctttccccttaaagtttagttggagtccactggcgttgattgtttttctcttacatctttttccttctttttcttttcattccttcactcttcat

SEQ ID NO: 425641 - DNA, 122 bp, Homo sapiens
ggttcatctcactagggagttccagagagtgggcgcaggacagtgggtgcgcgcaccatgcgagagccgaagcagggcgaggcattgcctcacctgggaagcgcaaggggtcagggagttcc

SEQ ID NO: 425642 - DNA, 122 bp, Homo sapiens
gcgcatgcacacagtggcttgaacacggccacgtcgggagcagtaaatccccagaggctccgggagcccagggaaggacccttgctgtgaaacagcaaagagccacccaatcgccatgtgtg

SEQ ID NO: 425643 - DNA, 122 bp, Homo sapiens
tgtcttgctttacggcgcgggtgcgcgagtttgcggcagcgtgacgccctcaagttttggcgggaaaagcgctgcatttggattcctgcagtggtgggcaaaggacagtccggtgaggaagg

SEQ ID NO: 425644 - DNA, 122 bp, Homo sapiens
ccctctccttccccttcagcctgcggccgggcggcgctgggcttttatctgcggacccgccgggagggagccagatcccagcgatcttccccgacggcagcgctttacccagaggctgccgg

SEQ ID NO: 425645 - DNA, 122 bp, Homo sapiens
ctaaaatatctaggttgactcctgtacctgagcgacctgcgatctccaccgccgccgcgacgaattggcctctgggcggggacttttagccaaaaggaaaatggctcagccgggaactggtg

SEQ ID NO: 425646 - DNA, 122 bp, Homo sapiens
catcctctgagctcagaatctccccagcaggttccaccagggtgtgaacagtccctgctccgtccggtgtgtgtcgctggaaggcagtgggcttctgtaagagaagaccaggtacaatccct

SEQ ID NO: 425647 - DNA, 122 bp, Homo sapiens
tggctcccagggaatcctctggcggtgcctccgggaggctggtagccggggaagcaggcacgtgaatccaccgggctgccccaccccaacctgaggtcagagctgaggcgtaggggccgggg

SEQ ID NO: 425648 - DNA, 122 bp, Homo sapiens
aatctgtaacttctcactggtctcctctctcccgctcttgcccccccactccaggcaccacgcagccacaaaggagttccttccaaaggctattctgacagtccggagcctactgagggctg

SEQ ID NO: 425649 - DNA, 122 bp, Homo sapiens
tgagtactgaggagtactgccttaggaagaatgcactgctttctgcctacgtcatctccgcgcatcctccccacagcctttcgagggttgagaggtgatactttcattttacagttaagaga

SEQ ID NO: 425650 - DNA, 122 bp, Homo sapiens
gtggttttgtaggattgcgctgtgtcagcgtggacgcctggcctgagttacaggtggtttcgtaggactatgctgtcagcgtggacgcctggcctgagttacgggtggtttcctaggactgt

SEQ ID NO: 425651 - DNA, 122 bp, Homo sapiens
acccctggctcccggccccccaggggccgagctgtggggatgtggatcccagactgaccccggcatggaaaaccaccagcgtggcccggcgccagacctgcttgtctgtcgcttgtctgcga

SEQ ID NO: 425652 - DNA, 122 bp, Homo sapiens
tcagtggcggccattggtgcctctggccggggttcctcacaggggcccgcaaggggacagcgaatggagcgtggagggtggagggctccttctccagaccggagcgatgggttcgggagcca

SEQ ID NO: 425653 - DNA, 122 bp, Homo sapiens
tccagcctctctagaatcactactgcgcacttcctggacagcagtctccgtcgcaagaagcggagggaaaaaaaaaagcaacaagcagggatagaaccagcgttggccgccgcgcacgtcgg

SEQ ID NO: 425654 - DNA, 122 bp, Homo sapiens
gcttgaacccaggaggtggaggttgcagtgagccgtcatcgcgccactaagccaagatcgcgccactgcactccagcctgggcgacagagccagactgtctcaaataaataaatatgagata

SEQ ID NO: 425655 - DNA, 122 bp, Homo sapiens
tcggctgctactgccgccgccgctgcagcagcagcgtcagggacaagcctgatccgtgagcgagcgagcacccagcagcaaccaccactttgggcaacttgcgggtttcctgctcgcgggta

SEQ ID NO: 425656 - DNA, 122 bp, Homo sapiens
gatgtgtgttgagtttgctatgtccggtgagcttcccagtggagatgtccaatgggcagacggatactcacatagagagttcatggtagattcgggctagaggaaagcacctgaggcctggc

SEQ ID NO: 425657 - DNA, 122 bp, Homo sapiens
tccaaaataacctttcccgggcacggattggtacctctactggggaagggcggggaaccgcgcaagacgtgccggtgtggagccagagccagagagaacttccagcgcaaaaggaaaataaa

SEQ ID NO: 425658 - DNA, 122 bp, Homo sapiens
aggtggggttttgtgaaccaaggtgtaagtagcatgtgtgtaactcgaacccacattgagcgtgcctgtgggctggagtcatatgcgagttcaggggttacacgtgcatatcttttatgtgt

SEQ ID NO: 425659 - DNA, 122 bp, Homo sapiens
cgggcgcctgggcttcaggatgaaggaccgtctggagcagctgaaggccgtgagtttcgccgcaggcggggtgctgccaggaggggtgctgcatgggagaggggcttccctttgctccccaa

SEQ ID NO: 425660 - DNA, 122 bp, Homo sapiens
gggatccaaaaaaccaagcagcaaagtgcagtgagcatgtctaatgttccttaaatcccacggagaggagcagctttgggaactgtgttcagagagattccgaggaatagaggagagtgtaa

SEQ ID NO: 425661 - DNA, 122 bp, Homo sapiens
ctggagccgcgggaggaggcgggagctgaggaggcggcggagggggcgggtcgcgtcgggcgccacgtccgcagccagaggcctccgcctccaccaccgccgccacagtcttccagctccac

SEQ ID NO: 425662 - DNA, 122 bp, Homo sapiens
ttggccacagttaatataggcatttcggaaaggcggagcgagagcctccagggcgggcggcgccaagacgcggattccggaacaccgcgaacaccctggaccgggtcccggagccgcgtccc

SEQ ID NO: 425663 - DNA, 122 bp, Homo sapiens
cccccagattccaagcgaggagtctcagcccctcccccacgacccagtccctggcccccgcgcctgcaccccaccccgcgcgcgtctatccctgcctggccgggctctcaccgcgccgcagc

SEQ ID NO: 425664 - DNA, 122 bp, Homo sapiens
ccgccgccgcccgagccacagcagcagctgccgcagctgcccgcccgccgagagccatcccgagccataagaggctccatgtgaccggctgacatcacggccgccgctctgtttacaccgcg

SEQ ID NO: 425665 - DNA, 122 bp, Homo sapiens
tggcgcagtcatgtgagttgggtctcaggccctgaacaacgaggtgttgtttctctgggccgccctttctcgcccgggtcttcccctcctctcctcccgcccttcggccgggggcgtgacag

SEQ ID NO: 425666 - DNA, 122 bp, Homo sapiens
agtgtttgtcacgcattctgctcaccagcttccatcagcctttctcaaagcatgtgccttcgaatactagtgagcagatattttgtacaaaagactttatattttgtacaagactatatttt

SEQ ID NO: 425667 - DNA, 122 bp, Homo sapiens
gtttctctgctcacagacatgtaataggtaccttcagggttgtcctttcatctgaaaatgcgttgtggtctcccgctgagggctcagtcagctcaaaacctgagcccccagaaaggccagca

SEQ ID NO: 425668 - DNA, 122 bp, Homo sapiens
caagaagactttccggcagtgcagcaatgggcgctgtgtgtccaacatgctgtggtgcaacggggccgacgactgtggggatggctctgacgagatcccttgcaacagtgagtgaggcgcac

SEQ ID NO: 425669 - DNA, 122 bp, Homo sapiens
ccgcataagtacggggtcttgagggtgatttgtgtttgggtggttggggatctcctaacccgggctccacagtgagctctcaggggtgtcaagcccagtcgcgctcaagggccctctgcact

SEQ ID NO: 425670 - DNA, 122 bp, Homo sapiens
gcgagggggacgggggcacgggtgacatggccggggcggggctgggcgaggagccgccgccgccgccgcctcccgtgggctccggctgggtggggggctccgcctcggtgctgctgccctgg

SEQ ID NO: 425671 - DNA, 122 bp, Homo sapiens
aggaactaccgtactaaggttctcttctttcaacttttcattgaccatctttcagtcctccgtccgccgtcagcggagaccagaccatgctcagtgtccaggaacaggggctgctcccactc

SEQ ID NO: 425672 - DNA, 122 bp, Homo sapiens
cggctccaccgtcagtgcacgggagctgcttagagagggcagctggctccgccccacagccgtgccgcgtatgtgggtgagggcccgtgacggccctgtcccacacaggctgagtctgtcta

SEQ ID NO: 425673 - DNA, 122 bp, Homo sapiens
ttgagtaaccacaggatctgtgtagaaaaaaaaaccaaacgcagcttttcccactgtactcgtacaacatgcttcagacaccagatgtgaggaggagtttcccctaccaacaagcaaacaat

SEQ ID NO: 425674 - DNA, 122 bp, Homo sapiens
agagggtgaaaaagattccagagagcagccatagggcgcgaccgctggggagcgcctgcacgcctctctttcctctcgcagtgcgttgctaggctcctcaaattcaatcgacacaattgatt

SEQ ID NO: 425675 - DNA, 122 bp, Homo sapiens
gggggcgcgggggcagaggtgacctggggctctggacttagacccaagggctagacaccccgggtctgactggtgggagagaagacgtaatgtgaagggggttggcaaccaagacgcgggac

SEQ ID NO: 425676 - DNA, 122 bp, Homo sapiens
gagatagaaccgggtgccggcaaccggaggacctggggtcctggtgtaggcgggacgccccgggtatctgaactgaaacctgcctcatgagaaggggccagcagtgtgcaagtgtgaggcgg

SEQ ID NO: 425677 - DNA, 122 bp, Homo sapiens
accctgggctaccgatcttccaaaaaggtgggagcaggaacagcagcagggccagcagagcggggtctgagtgagaatgtgcctagctgtgaatctgactgcaagccagtgccctccaaaga

SEQ ID NO: 425678 - DNA, 122 bp, Homo sapiens
cgcagccgcaagcgatcagggagccaggccctggaagttacccgggagcgggcaataaaccggctaaattattgacctggggaactagccacacaggaggccgggagacagggactggtgag

SEQ ID NO: 425679 - DNA, 122 bp, Homo sapiens
gccaaggccgcagagaatggggaggctccgctattctctaaattcagggggcggcgggcgcggtggctcacgcctgtaatctcagcacttggggaggccgaggagggcggatcacgtgaggt

SEQ ID NO: 425680 - DNA, 122 bp, Homo sapiens
gccccgccccgaggtgggagggcctgacgcatccacagctggccaatcggcggatggcctcgcgcgcccgccccctccccctgcccccggcgccgggctccacgtgccagtgtttgtgtacg

SEQ ID NO: 425681 - DNA, 122 bp, Homo sapiens
tcgaggcagccccatctcacgtctagtgctccggcctgggactgggtgtgggtgcccgcacgccgcggcagcctccggcgcgctcctcctgctgcagccgcttcaggggccgggcccagcgc

SEQ ID NO: 425682 - DNA, 122 bp, Homo sapiens
aggtctggcctcggaagctacgagctacaatcttccttcatcctacccacccacgaagagcgccaccccagctgcagaccaagtgaccagcccagttagaaggggctcggccggatcaaacc

SEQ ID NO: 425683 - DNA, 122 bp, Homo sapiens
ggatcagcttgagtcaccacgcgtgtagctgacagtggaggaccccaggccacccccgcccgtggaaatccatgagaccgttcatcgtttcaagaaggacattgcaatgtttaccctattaa

SEQ ID NO: 425684 - DNA, 122 bp, Homo sapiens
cccactgccagtccctccagggaccccaccaacgctacccggcacacccaggctccccaccgacgtgccccccacggtcactgccccgtgttctgcttggttccctggtggttggccaggag

SEQ ID NO: 425685 - DNA, 122 bp, Homo sapiens
cctcacctccctgacggggtggctggcctggtgggggctgacccccacctccctccaggacggggtggctgccgggcggagacgctcctcacttcccagacggggcggttggcaggcagagg

SEQ ID NO: 425686 - DNA, 122 bp, Homo sapiens
aagatcctagaacattaatcagcacctagtaggtgtggaacaaacgtcttaccttaacagcgagtcaatgaaccagggaggggaggaagaagctttcccggagatgccggcccctcagtttc

SEQ ID NO: 425687 - DNA, 122 bp, Homo sapiens
tcagcctccgaccgcccagccaggccaaggagacgcagtggaatgcagccgtttcccagtcgctggctccggctaccccggcgccgctgctagaggcagaaagggccaagaaggcgccgtcc

SEQ ID NO: 425688 - DNA, 122 bp, Homo sapiens
gtgtgatgtagggcacggtgcgggtggccgctctgcgagtttcgcagtgaaagtgtccgccgcgaggccccgtgattcactacctagtaggggtgtcaccaagcttcccactgacaggcagc

SEQ ID NO: 425689 - DNA, 122 bp, Homo sapiens
ccgtgactcaccttgctgtgggcatagaccacagagcccagcagcttccaggtgcctccccgccggtccatgcggatcatccgcagaatctgcaggaagcgcaggctccggagcgcagatgt

SEQ ID NO: 425690 - DNA, 122 bp, Homo sapiens
tgttttttctattctgtgtttaatctgctgtcttaatggattcagcttcagaaaagagagcgctcttgcagagcctatgtccaggtactttctgcgtttttataaatgtgttaagttgttga

SEQ ID NO: 425691 - DNA, 122 bp, Homo sapiens
ggtttgggaagtgttgcgagagaccttggggtttgggagagactgcaacctttgccattccgacctcgattagggcagggcaagacgcgaggaaggccacgggggaaactcattctcccagt

SEQ ID NO: 425692 - DNA, 122 bp, Homo sapiens
cttcccggctccccgcggtgcgcacccgctggccactctgcgcacgcgcgccgggtgccccggcctaaggccgttgacctcgggttctccccggcacagtcgaatccacgccagggccctca

SEQ ID NO: 425693 - DNA, 122 bp, Homo sapiens
ctcagagacatctcccaacactcaaaacagcaaagaagttctggtgctttaagtgttcctcgctcggctcagagactcggcttcgagccgcgactcaagacagcacctgggggtatttgttt

SEQ ID NO: 425694 - DNA, 122 bp, Homo sapiens
aaatgggggtggttgtgaaaaaagaaaggtttgggttgacatttagcatgctagatgagtcgaaccccttaagcaaagaattatgatagacaaaactaacccagaggaggatgtgagagggg

SEQ ID NO: 425695 - DNA, 122 bp, Homo sapiens
tgacagcacacacacctatatgacaccccttgcacaggtatgaggacaccctggccagtccgtggtgcaggctgatgaccctgggcgtgcctgcctaggggagatgtgtgttggggggagcc

SEQ ID NO: 425696 - DNA, 122 bp, Homo sapiens
ctgaaatctgtcatactgacatgaggaggcaaaagtgaggtcctggtggcgagcgggcctcgggtatttcaagctttaaggctccactgggctccctgggggccgtttcttccttgcttctt

SEQ ID NO: 425697 - DNA, 122 bp, Homo sapiens
gtccttttccaaggttgtgtgatataaccagttaacaggagcagttcattctctgagtcacgatgtgcagtattaaaatatgcttgcatcataaagacgtagggatacaggtgctcggtgcc

SEQ ID NO: 425698 - DNA, 122 bp, Homo sapiens
ccgctccgaggtaaggggccgcgcctaggggcgcgggggacccagggtgggtagtacgtgcgcgcggggtcgcaggactcggtcacctgctcgccagcgtggaggacgcgcgggggcggagg

SEQ ID NO: 425699 - DNA, 122 bp, Homo sapiens
tgttttcctcactcagtttaatcatatctagctttttatttaagagacagacttggctcacgcctgtaatcccagcactttgggaggccgaggcaggtggatcacaaggtcaggagagtgag

SEQ ID NO: 425700 - DNA, 122 bp, Homo sapiens
aacaacctaataaggagcgttggaaatcttcaagatgagcgaatatcttataacttcttccgcaggtgcgaggatagctacaagccatggactttctgtcctgcttcttgtttgtggctttg

SEQ ID NO: 425701 - DNA, 122 bp, Homo sapiens
ccccttctaaattcctggtttaatcttgccagctggttgctagatgtgacagaaatatgtcgtgagagtggatctatcattattgttatttgtggagtggctttggctgaattgtatctgga

SEQ ID NO: 425702 - DNA, 122 bp, Homo sapiens
ataacgttgaaacacttcaaccatgaatatatttaaaataaaaatgataaatcgctttggcgacacccagtagaataagcttgactggctaaataaagtgaccatcttttcatcttcatttt

SEQ ID NO: 425703 - DNA, 122 bp, Homo sapiens
aaataatcggcttctggccaccagggccacagactttctgtcatgagcatgggtcttcaccgggagcgttaatcccccagcactcagggccgcgtcttcactgggagctgtaatcccccagc

SEQ ID NO: 425704 - DNA, 122 bp, Homo sapiens
gtgagccaccacgcccggcctatattgttttatagttcttcaattttgttttgtggtcgccggaggtgtttccttcttcgattccctgcacagtgcttccacagctgctccatggaatctgc

SEQ ID NO: 425705 - DNA, 122 bp, Homo sapiens
gagctgagaaaggaaagacaagtgggagagtcctccaggtgtagaagttggagagatgagcgctccagttaggtagtatttgaagctgatgtagaaaaggagtcttgagccagcttgtgaag

SEQ ID NO: 425706 - DNA, 122 bp, Homo sapiens
ccgctccctgcgtgaaaatgggcccgggggctgagctagaagcccgctccccaccaccatcgcaggtcactgcaaaacctgctggactcctagttgcgtgccctgtttgcatctgccaaact

SEQ ID NO: 425707 - DNA, 122 bp, Homo sapiens
tctcaaaaattaaaagaaatgtggcattttccaagtctttttggcaaggtgcttcctggccgtgggcgtcgccctccgcacccccgcgcttgtcccctgagaggagaggagaaaggagcagc

SEQ ID NO: 425708 - DNA, 122 bp, Homo sapiens
ctaaggcccgggcgccaacgtgcgcggcacaggacgcggcgccttccggcgaccgggacgcgaggcccaacagcgcctaacacagcaaccaggatccactctcaggccggcgccagctcctt

SEQ ID NO: 425709 - DNA, 122 bp, Homo sapiens
gacagggatgaaggaaaatactttaatagttcaaaaaataataatgctgaaagctctctacgaaagactgaatgtaaaagtaaaaagtgtacatagttgtaaaaaaaaggagtttttaaaca

SEQ ID NO: 425710 - DNA, 122 bp, Homo sapiens
cccacttgcccttaacaaaagcagatacatacctcgattactgcctgtttgctgcttttgcgagcttctttcccactcggctgcgggctgagcaatggtagggacctggcttgattcctatt

SEQ ID NO: 425711 - DNA, 122 bp, Homo sapiens
gggcaggagcgcgtgtggtggaggtgaccttcccgtccatgaggccacatctgaaagtcgcgtgagaagacccatctggcgctctcaggcgacatgagccttaacacgggctggcgcgcaag

SEQ ID NO: 425712 - DNA, 122 bp, Homo sapiens
cccatccatcactcccagggggccactgcctgatgaattgccagaggggaaccaccagctcggctcttaataaccggatctgcatcctgctgctgcccagctgggctgagggccctgaccac

SEQ ID NO: 425713 - DNA, 122 bp, Homo sapiens
ctcgggcgggcacggtgtgtcgcctggacctgcatgtaaacatcagggcggagcaggaatcggcctccaggagggtaattgcctggcgtactctgtcccaggtagtgggtgaaatgaaagta

SEQ ID NO: 425714 - DNA, 122 bp, Homo sapiens
ctggctctgactttcactccggggcaacagtagcaccaaaccacatacgcagtggagctccggggtgaggagggggtggtgctggggggggtgaaggaggggttggagtagggaggggtgtg

SEQ ID NO: 425715 - DNA, 122 bp, Homo sapiens
gaaggctctcctggcccggcttgcctcctgctcacggcgccgatggcttaactgtccccgcgggaggacccagggtttttgagggacctacgggtgtattattttcttttttatttattttt

SEQ ID NO: 425716 - DNA, 122 bp, Homo sapiens
ctggcctggtgggggctgatccccatctccctcccagatggggtggctgccgggcggagacgctcctcacttcccagacggggtggctgccgggcggagacgctcctcacttctcagtcggg

SEQ ID NO: 425717 - DNA, 122 bp, Homo sapiens
gccgagtcgctgctctcaggcaggtagacgaagcggtggaacttgggctgctggccaaagcggtcaaagagcaggcggaagcgcgcgccgcccagcggccggggactgcggtgctcgcgcac

SEQ ID NO: 425718 - DNA, 122 bp, Homo sapiens
tatgtgaagttgtacacaggaaaatgcataacattgctttgggcctgaggcacaaaggtacgttggctttgaaggtaggccctgaggtagagagaaaagaaatgacaccagtcttgaattaa

SEQ ID NO: 425719 - DNA, 122 bp, Homo sapiens
cctgacagaatcaaagcctttccatttttgaccttcccatctctagactttcctctggagcgaatttagcctagtcctaatgtttgccaacaaagttgattgtcaacagctacaaaagttct

SEQ ID NO: 425720 - DNA, 122 bp, Homo sapiens
tccagcaaggtaaaggccatccgggatgggcattcattgtcacctgcaagactgtcattccggacatagacgtgccacatatagtcttgttcttcgacagaagctctagtgcctttggatga

SEQ ID NO: 425721 - DNA, 122 bp, Homo sapiens
caggacagcaattctggcacaagtccaagaagggtgttggcaagtgttatctgtaaggaccgtagtgaataagctgggcttgggcttgccagaccggaaggtatctgtcacaataggtgtga

SEQ ID NO: 425722 - DNA, 122 bp, Homo sapiens
aggacgccccgagccgcggtggagggactgtcctgcctgcacctatcagcagtgcggggccgggctactgcctcgccgtgcgcactgggtctacacaggcaagctcccgggaattcagctcc

SEQ ID NO: 425723 - DNA, 122 bp, Homo sapiens
gccccaaagccctggcttccgcccaaactcgtttgcggccctgggagtccgtggtggggacggagaacgacgtggcactccctctagcggcaaacgtctcgcacagagcccggcatctctgc

SEQ ID NO: 425724 - DNA, 122 bp, Homo sapiens
gccggcgcggcagcctggccgctgtgggtagctcagggacgcacagaggcccggctgtttcgcaagctgcccgcctggccaaggtgcctcccaggcctgcccggggaggtcgcccaccccct

SEQ ID NO: 425725 - DNA, 122 bp, Homo sapiens
gccagagactttgggagcataatttttttcagtgtcatacaaataacacaaacattacctcggcaggagtcgcatcgtcctgttggtgatagttgtgttagacagattgagacacaggaccc

SEQ ID NO: 425726 - DNA, 122 bp, Homo sapiens
cctgcctctttgcatgcaggtgtttgcggggcttgggaaggggctccccgatgacccgggcgggaaattggggcggccgcctacgtgagagttctccagtcacctctaaaatgcgggacaca

SEQ ID NO: 425727 - DNA, 122 bp, Homo sapiens
caggcctgtgggctgcgaggaggagctttgcctagcttgcaggcagcgcagggcagacggcggcaggagaagcaagatgaatgcaggctcagatcctgtggtcatcgtctcggcggcgcgga

SEQ ID NO: 425728 - DNA, 122 bp, Homo sapiens
tcgaaagcggagtgcgaagcttcctcaaacctaatcggcggcggagcggcggtgagggggcgtgtctgcccgggccctgcccaccgccctctccgcccccgcgcggcgcccgaggcgccccc

SEQ ID NO: 425729 - DNA, 122 bp, Homo sapiens
ctctgcgcaggcgccaagctccggagcgcggccttggtgccttttctggtttggcaggcgcgcgcgcgcgggagggcggcaacctcggcgctgtgcgcaggcgcggcgggcagtgcgcaggc

SEQ ID NO: 425730 - DNA, 122 bp, Homo sapiens
gcaccaggctaacaaaacagatattaatgattgtctccgtgaatgaaattgggaaacttacgtaattattgcctaggtgtggagagaattcctcaagctgtcagttcttggtttttccttgt

SEQ ID NO: 425731 - DNA, 122 bp, Homo sapiens
ggagctccgaggtgggtgtcgggggtcttggggtgagcgtcgtggcccagcgggtgctcacgtggcggcccttgcacaacacggagcgcttcctggctccggccccgcccctgcggtcgggc

SEQ ID NO: 425732 - DNA, 122 bp, Homo sapiens
gtgtgcaggaggcccctagtgaagccaagagttcgtagagcctgggcgccgctctatgctcggctctcgattgctcacgcctggcagcggcgagcggcgcacgcgacggctggggctctgcg

SEQ ID NO: 425733 - DNA, 122 bp, Homo sapiens
ggactacatctcccagaattccgctcgccggatcccaccgcactgaagggactgcgcgtgcgcgagtcaggtgacgacccgcccctacaggccccagaacccccgagattccccgcgcttgc

SEQ ID NO: 425734 - DNA, 122 bp, Homo sapiens
gagcagctcgggtctcagccaccgacgacagagttctcggagccggctcagcgcctcttccggtccagccacctcctggtaacgcagctgcctaaagtgcagtcgagaagtttcggggtccg

SEQ ID NO: 425735 - DNA, 122 bp, Homo sapiens
agaatgcagaatctgcaaagtgccttttgtaaagtttcttaaggtaaatcagtccctaaccggactttaggctgcaacagtgatttcctgttttcagttacccggcttgaagttcagcctct

SEQ ID NO: 425736 - DNA, 122 bp, Homo sapiens
ccctctcccagcgccgcggaagtgagggggctttccctggggtctgggagagctggcggccgcagcggttccttctggaacatgtctgtagttgtacagcagacacgttctctcctaccgcg

SEQ ID NO: 425737 - DNA, 122 bp, Homo sapiens
cttgagcaaggagagatgtccctgcttcttttctctgacttccctctgattctgtctccacgcttgcaattttctcatcatttccgaggtcaggtgaaacccgagaccctgcttcctgtgga

SEQ ID NO: 425738 - DNA, 122 bp, Homo sapiens
ggcaacagctagcgccgggaggcaggaagccgatcgggggcggggatcgaaggcctcagacgtcgacgccggcgtgggcgcgagcacggtgcactctgggagctgtcactaggcccttcggc

SEQ ID NO: 425739 - DNA, 122 bp, Homo sapiens
gcaccgtcctcaccatcacgcacgcacagagccacactcccatattcacactttctaactcgtaagctccgacagcgcctgcattttctttgggagccgcttggaggttcattaatatcatt

SEQ ID NO: 425740 - DNA, 122 bp, Homo sapiens
ccctccatgctccaggacatcgtccacggtggtgggcatgatcctgcaggcaggagggcccgaggctgcccgacgtgcccggagcgaggctgagagcggctgcagccagctcagcacaaacc

SEQ ID NO: 425741 - DNA, 122 bp, Homo sapiens
ctcatctggaaaatgggcatgtaacagtgtctacctcaaaaggctgctgggaggatttaacgcgaggaggcagagaaagtgcctggtatacagtaagcgcttaattagcctttgccattaat

SEQ ID NO: 425742 - DNA, 122 bp, Homo sapiens
gcgggccctatcgggggcggggcctgccgggggcggagccggggtgggggcggggcccagcgggggcgggaccggaacggagccgtgcggccccgcgcgctcgcagtctgtctcccgccgtc

SEQ ID NO: 425743 - DNA, 122 bp, Homo sapiens
cgcggcgctgggtccttccgggctgcaccggcggcgggtggcgctggaggaaggagagttcgcggtaattaaacatttccagacaccggagggttattatctgcagagcgatttccggcgat

SEQ ID NO: 425744 - DNA, 122 bp, Homo sapiens
cccgccacacgctcaggaaggagcttctcggaatctctctcctgcctcgcaccatgcagccgggctagcaggtttgtgggccgagtgcaggagcctgctcccactgtcactgcaggtgactg

SEQ ID NO: 425745 - DNA, 122 bp, Homo sapiens
tacaggcgtgagccactgtgcctggctgcgagcagatgaggttcttcatttctaatgacacgccatgaatcatccaaccacagttacagcaacctgccccatgtcggtcacagagctgaagt

SEQ ID NO: 425746 - DNA, 122 bp, Homo sapiens
ctgcgctaggaggggcgttggtgtagccgaagcgctccaactacgcgcaccttcccgaatcgcccgccaggtaggggtgaacaaacacgccagggaaatacagcagtgtggacccgagcccc

SEQ ID NO: 425747 - DNA, 122 bp, Homo sapiens
ctgtcctctgtgctggtgcatttgacctgaaacagaggccagcccactgccttccctccccgggaggacccctcccaatgggccaagccctctctggcttactctaagttctgggctctgca

SEQ ID NO: 425748 - DNA, 122 bp, Homo sapiens
caagaagagatatggattacaagtttgaaactcagaggaagatgatgctgcatatgaacgcgtgtactgtctgtatatagatgataagtgatgtcataatgtagatgagaatgtctagggag

SEQ ID NO: 425749 - DNA, 122 bp, Homo sapiens
gggaggacggagggaggggcgtacccaccgcgagcgccggcgtcgggctgggggtgcgagcgccccccgtgcccgccccctgttgcaaacctgggtccggaggaggctgggcggggagcaac

SEQ ID NO: 425750 - DNA, 122 bp, Homo sapiens
gccgtttctccccgtctcaggagccatcagaacacaagaggagccccagacatctgagcccgttgtccctgccccttatgtgctaagaaggaccctcagtcacactctaactgtacgtcttt

SEQ ID NO: 425751 - DNA, 122 bp, Homo sapiens
cagagaagctgggggaccttgggcaccgggtggaacgggcggggcggctgtccttgtgctcgggcagcgagggcgccggcgagaagcgcggctgcagctgagcgctccgcatccctcctgcc

SEQ ID NO: 425752 - DNA, 122 bp, Homo sapiens
cgttcccgatctcgttctcgttcccgatctcgttctcgctcctgatctcgttctcgctctcgctctcggtcacggtctctgtctcctgatcacgctcccgttcccgatatctctcccgctcc

SEQ ID NO: 425753 - DNA, 122 bp, Homo sapiens
ttggtgggtgtcagatcagacaaggccccaaggccaccacatggagtttggacttttccccgaggctcagagtaaggatttggggagtttagttctaagagctacaggaagccattgaaggg

SEQ ID NO: 425754 - DNA, 122 bp, Homo sapiens
actggtggtttcttactgtttttctcagttctctgacgctttgaggaattgtttttaaagcgagttatccatcattttagttgttttctctggggtcgttggactgagggtcttaccccgct

SEQ ID NO: 425755 - DNA, 122 bp, Homo sapiens
caaagcgtccccttcctaagggggaaaaagaggcggtcagggcttgattcgcgtgtcccccggagggtgagaaaaatgcattccgaaaaagatatcaattcgttttaaggaaaggggggagg

SEQ ID NO: 425756 - DNA, 122 bp, Homo sapiens
tctacagaagatagggatttttgatcgccagagaagaagggatatgtgagatccaaacgccgaaggaggaaagcaggctccgtggtctcttccagccctgatggaagaaactaccgagcctt

SEQ ID NO: 425757 - DNA, 122 bp, Homo sapiens
cactgtttgccccgctgttccctgcagcgcgggttcggggcagtagcaacctgctaggagcgggaggcggttgttcccaggaggaagcagcttctccgcccaggaggcaaagggcagcgggc

SEQ ID NO: 425758 - DNA, 122 bp, Homo sapiens
attttattttattcttcatatattatgtttgatattttcctaattcctagaaatacaaaacggatttgggattccaaacatgagaatgattccacaaagcagcatttcatcagcattaaccc

SEQ ID NO: 425759 - DNA, 122 bp, Homo sapiens
tcgatggatggggtcgagctgaggcccgggctggggagcggcagcagtcgctctgtccgacggttccgatggtccctccgcccgcctgcagccccacgtgttccctgggaattgctgggctt

SEQ ID NO: 425760 - DNA, 122 bp, Homo sapiens
aggcctctgaccactcccctgtgatgcattgggctttaagacccgatgagcagagccagccggagcctgggccccgagcaggaccctgcacagggttcttcttgcaggtctctgggctgcct

SEQ ID NO: 425761 - DNA, 122 bp, Homo sapiens
cagaaagcttcccccgccagcctcctgcctcacccagaggaagtggcgtttcctcccggacgccggcctgggcgctgcccacctggtgagtcatgggccactctcttctgaggctggcggcc

SEQ ID NO: 425762 - DNA, 122 bp, Homo sapiens
cctaggataattcacctcctcatttgacaaatcagagctgtaattcgctttaacaaattacgcatttctatcacgttcactaacagcttatgataagtctgtgtagtcttccttttctccag

SEQ ID NO: 425763 - DNA, 122 bp, Homo sapiens
agcggagtcgcgcggcaggggcgggggtggagccggggtggggctataactggccagccccgcccccgggatacgcccgggctgccgagtgggaatccgagggctcgggcgaggccgggccc

SEQ ID NO: 425764 - DNA, 122 bp, Homo sapiens
caacgtgcctggtccccacgactcgcggctgcctcctctcgggccggggcagggaggagccgctactgccggttatcttcggacacgttgtgggccagccagttcactcggtttccagctct

SEQ ID NO: 425765 - DNA, 122 bp, Homo sapiens
acgttgttcatggtcccttccggcaagcaacagttggtctgtgaccttgttgggggcgcccgggcccctgagttggcgctggagctggaactggcagctgtgctggactggcgtgaggacga

SEQ ID NO: 425766 - DNA, 122 bp, Homo sapiens
ccgcccgtgagcccctctttgcgggaggggtccccaggaaaggtcctgggagtccatagacgctgagcttggccccaccccctggttgcttcagagggccggatctggctttgctcaggtgg

SEQ ID NO: 425767 - DNA, 122 bp, Homo sapiens
gcccgcgcggcctgttttctctttcggttcctcggctcctcccagcctgggctcgaggggcggaaggagctgggttgagtgcacgatgctgagattgacccttttttaggtccccggtgttc

SEQ ID NO: 425768 - DNA, 122 bp, Homo sapiens
gggccccgacgggcagcagtcatcagcgcttgggctgggcccgggttggggtccgggtcccgggctgctgtcggagcaggcgcggctgcggggtcggcggcgcgggacggtgcgcgccatgg

SEQ ID NO: 425769 - DNA, 122 bp, Homo sapiens
catcccactgcccccagttactttctctaatgccccgtggagtctgttaaaaaccaaagtcggctgcaggctttctgcgcaagcaggacttcagtttcactatttccgtatttatattctct

SEQ ID NO: 425770 - DNA, 122 bp, Homo sapiens
gtgatggacaggtgtttcaagacgcccctttagcgcggggctccccgggaagctttgaggcggtgctgggtgtaaaggggagggcattcctggtggattttgcccaatcaccagtcgcgctt

SEQ ID NO: 425771 - DNA, 122 bp, Homo sapiens
ctaattgtgtcactgtttattcagtaaacactgtgctagctgctagagatgcagagatgacgcttggttaatatttatggaacacttgccatgtgctagttgtacatcacctcatttaatct

SEQ ID NO: 425772 - DNA, 122 bp, Homo sapiens
aggaatacatcatatagagaaaccttagtaatctttcacctatgaacggtcttattcctacgctcatttgtaagacagttgttaagagctcagaaccacattttctataggaacattttaaa

SEQ ID NO: 425773 - DNA, 122 bp, Homo sapiens
ccttctccagctctgcctttgtggctctctggtcccctctttcctctgactttctggcctcgcctccgctggcgactcgccctcccagccccgcgtgccagggctcaggtgccaccccatgc

SEQ ID NO: 425774 - DNA, 122 bp, Homo sapiens
catcacatatatactatctggcacctactttgaacatcatcattcaaactcaggggtacgcgtctcctcttccctcctcatgtaccaaaagtacccattcctcagaaaaaacacatgttcac

SEQ ID NO: 425775 - DNA, 122 bp, Homo sapiens
gccaagaagctggtgcagtagatgggcaccacgaccttctgcagggcggccagcagctcccgggcctgcttgcgctggctgtgagggagagactttccgcgcgtcagggccctggggcggga

SEQ ID NO: 425776 - DNA, 122 bp, Homo sapiens
cgagtttatattatgaataaaaggacctaagttgctttttctaaaactgctaatagcgtgcgtttaaaacattccctttttcagcagttatatttactatttttatactacacaatagtcta

SEQ ID NO: 425777 - DNA, 122 bp, Homo sapiens
catcccgcggcatccagacgagctggagctggatgtggatgaccctgtgttggtggaggccgaggaggacgacttctggttccgtggcttcaacatgcgcacgggggagcgcggtgtgtttc

SEQ ID NO: 425778 - DNA, 122 bp, Homo sapiens
ttagaaaccagtccctgaggcttggcaaagcaggagtcctccttggcagagcttgggtgtcgggactccgaggttccggcctgacctctccacagggtagacagtaatgtctccagatgcca

SEQ ID NO: 425779 - DNA, 122 bp, Homo sapiens
tgttaaatatatggctaattatgcgtatgaaaattaaacatcagtgttatgctaatggggcgccttcagctgcggatctgagcacttgagactaccatttaatcaaatgaatcagtaactaa

SEQ ID NO: 425780 - DNA, 122 bp, Homo sapiens
gccaggagggggtgtccgaatctcttagggggagtccgatccctcaggagggattcccggcgcgcgttcctaagccctcaggagtagccgggcgcggcggcggttgggctcgggcacgcggg

SEQ ID NO: 425781 - DNA, 122 bp, Homo sapiens
tccagtctaaaccacgaacaggtcacagactagccaagtggctgagacgagtgtggggtgcgtgactctgcctgcgcgcgcgccagccccgcagctctcgccagagccttggggtcggttct

SEQ ID NO: 425782 - DNA, 122 bp, Homo sapiens
agatgtcagaaatataaactccataatcctgactcatgtctgaaaactcagctgctttatcgccccctccaggaagtctttctgtgctcccaagttcccctaatgagctcttcctttatact

SEQ ID NO: 425783 - DNA, 122 bp, Homo sapiens
ggaaaggagtgtgtggtgcacagtggggccaaggatcccctggggccgcggcctctgcctcgccccctccacccctcccgagtcccggttgcggcgcttcctgggcggatggcttgaaattg

SEQ ID NO: 425784 - DNA, 122 bp, Homo sapiens
ttctccaccttcgatgttcccatcttcactgaagagttcttggaccaaaacaaaggtgagcggtaactgcgctcctgatgcgaactccgtgaaactgggtggtagaggggggcgtgggccag

SEQ ID NO: 425785 - DNA, 122 bp, Homo sapiens
gcgggagagaagctggctgccccttctgcagccccgcccctcctctcatcaccatggagacggagcaggctgcccagtggggttcctgcccacccgaggcctgaggctgctgcagagggagg

SEQ ID NO: 425786 - DNA, 122 bp, Homo sapiens
tccgtccttccctctctgactctcctaccccgggcctgtctctgcagaggtcaggggaggcgggggcccagcacacgtccccagtggcagcgggagcggcagctacgggttcgcggagcccc

SEQ ID NO: 425787 - DNA, 122 bp, Homo sapiens
gctccagtagacacctgtgtgggatgctcatcaaagacgtggaaagtggccccattcgtgcgggcctggtggaggccgtgagggtgcagtgcctgaaaagtctgacagggaagttccggact

SEQ ID NO: 425788 - DNA, 122 bp, Homo sapiens
gcctcgtggggcgcgtggggcccgtggggtccctgctcggggagctgtgggccaggccgtcgcttgcgccgccgccactgcccaagccccgctggggatgcgtgtcccgggcgtcctctgga

SEQ ID NO: 425789 - DNA, 122 bp, Homo sapiens
cattggcctgccctcttgcccgcttccccaggaggggcttccagttgcctttacagctggcgaagtgaatgagagcactccacgggagccgggaagagagaggccccgtgaccaaacttttg

SEQ ID NO: 425790 - DNA, 122 bp, Homo sapiens
aagtgttggccccagctcatgtattgcctttcttccattagcctattttccctcctctcacgatctggtcccagctcccctttgttccttgggttctttcttaccgaaaagttccgtctcct

SEQ ID NO: 425791 - DNA, 122 bp, Homo sapiens
gcagggggctggcactgggggaactgcaggagtcaagccagggaaggccgggggtctgggcgaagcagaagaggaacagggcggggcctgggtggggctggccggggcctgtggggaggggg

SEQ ID NO: 425792 - DNA, 122 bp, Homo sapiens
cagcaagtcagagagaaccaccttgatgaagttgaactggtgtgtgtgccaggtctcctccgagagtgggtacgtgtcgtacaggatccctgcacggagaacagaagcccacgcggtcaggg

SEQ ID NO: 425793 - DNA, 122 bp, Homo sapiens
cctcagtgctgacgtcacagcctcacacagagaagattcttgagacttctctaaggagctcgggatccctgggaactcttgctctcccatcttttaccacttctacttcctccacctcaagt

SEQ ID NO: 425794 - DNA, 122 bp, Homo sapiens
cgtagatccgcggggtgacctcgttgcagggctggctcgggaggctgtagcagccgctgccgtccgagagcaggtcgttgagatcctgcaccgagagctcgaacgagcccgacatggcggcg

SEQ ID NO: 425795 - DNA, 122 bp, Homo sapiens
agagtggcggacccagaggcggagtctacaggtgggggcggggcctggaaaccagctgtgcgatttgtcctaggtgcattcgccgtgaccaggaaaggccactgttctgtgagtgttcttct

SEQ ID NO: 425796 - DNA, 122 bp, Homo sapiens
gttcaccagggacacttgcctggtgaacatgggcaaggctgtagcaatggaccacttttacggctctagggttctgactccaactaagttttccagaatctcctgggctcctgactcatctg

SEQ ID NO: 425797 - DNA, 122 bp, Homo sapiens
ctggaggcaaggctgcccaaacagcctctgtacagagtggggcgcacctcagacactcctcgggatgtagaaccagcattcttgctgctgagccactgccttgcattaggcagcagtggagg

SEQ ID NO: 425798 - DNA, 122 bp, Homo sapiens
tcctggaggggcttttcccacgggaatccttatgccggaagacaaagtctctgcaggcaccgaaggagacagaggcaatggggctcccaggggccagttctctttcatcatctcggtgctcc

SEQ ID NO: 425799 - DNA, 122 bp, Homo sapiens
ttacccattctcccttaggagcctctccccacgctgcctctgggacgctcagctgatgtccggcaaggggagtttgttgttgccatgggaagtccctttgcactgcagaacacgatcacatc

SEQ ID NO: 425800 - DNA, 122 bp, Homo sapiens
gcaggtgaggctggcaggcgcctgctcagagcacgcgggggatgatggtgaagggcacggcggggctgctggcctccagctccaaggctgtcaggaagcactccgtagccgccgcatcgttg

SEQ ID NO: 425801 - DNA, 122 bp, Homo sapiens
atgacccccactggcccttccaggagcctctgtctgaagggtggacttggtttatcaccccgagaaatgggagcgcctggctgcttggatttagcctgcagctggggtccccggtggtgtgt

SEQ ID NO: 425802 - DNA, 122 bp, Homo sapiens
gcgcggttaacgctgtttctaggccctcgggctggctgtcctcagtctttaagatcgcaacgcacactcgctccgcttcttctcgctaaacccgcgtattttacagcaggtttcctcagggt

SEQ ID NO: 425803 - DNA, 122 bp, Homo sapiens
aagagctcaggtctacttactgctctaagtaattcatatttgcaaccccttccccgcccccgccaaagttgtgtacctaacttagaagaaagaaatctctgtattaacacaatcacctttct

SEQ ID NO: 425804 - DNA, 122 bp, Homo sapiens
tttcgccctccagaggcctagttagggggttactttctccttttactcagaggctttgcgcgcaggctcagtgcagcgttctcggccacagccgcagggttcgggtcttggtcctgcagcgg

SEQ ID NO: 425805 - DNA, 122 bp, Homo sapiens
cgccagccgtgagaggagaagctcgggtttgtggaaactggcaatgttgtcccctgaagccggctcgggcaccaagctgggtgcggtgggggccgcgctaggtccgggtgcgcaccgagcgc

SEQ ID NO: 425806 - DNA, 122 bp, Homo sapiens
tgcctcattgtgttcccagattctgatactgcatcactggcttccagagcgcctgtgtgacgtcactggattccagtctctatatttgttcaccatcagtgcctcttactgtaaataattga

SEQ ID NO: 425807 - DNA, 122 bp, Homo sapiens
tccccgccgcaggctccagtgcggtcactgtccggggacctgggactcggcccatgtgcacgtcctcttccacctgtggtgggacagggccagccaccgggggctggtgaagatgcgcatct

SEQ ID NO: 425808 - DNA, 122 bp, Homo sapiens
tccttcccctcctcatttcctttctcttttttcaccaaaggaagcactgtcctttggtgacggtgggaccctgtgcttccaggagcggggctaagaggtgagagcaccctccacaccccagg

SEQ ID NO: 425809 - DNA, 122 bp, Homo sapiens
ggcaggcggaggaggctgcgggaggtcgcggtggagctgcgtaggaggcatggcctgttgcgtagggggcggctactggggcttggacagctgttgtggcggctgaggcttcaacatgatag

SEQ ID NO: 425810 - DNA, 122 bp, Homo sapiens
gatataagctataagctatacgatatagatatatatagatcacctaaatgaaagaaaattcggtttgtggttaaaaagggggcttcttgcattataatgtcctttagagagacggggaggtg

SEQ ID NO: 425811 - DNA, 122 bp, Homo sapiens
aaacaaaaccacccacaaatagcttgaggcagaaaaaagattgtaccatatcatggcaatcgtggacagtttggcagctgagggaaagatgactcattcccaggctccgcttgcataatcct

SEQ ID NO: 425812 - DNA, 122 bp, Homo sapiens
ggctgacagctgagagatcgggaagtgctccctgcggccgcccaggcctgcttgatattccggagagggcggcagcagcgttcagaatccttagatgaacctgcctggcggcgccggaggcc

SEQ ID NO: 425813 - DNA, 122 bp, Homo sapiens
gggccccacacatgcctggtggagaggcatttttgcccgtagggggatcctctgccgggccgtttgtgttttccttccacaccacaggtgcctcgatctcccctttcaagccttcctgccgc

SEQ ID NO: 425814 - DNA, 122 bp, Homo sapiens
cactgctcctgctctgtctgcggtgggtgggaatcccgccatgtgcctgctggcctggcgcgctgcacacggggaaccaagcagaacctgctgcccagcttgcgtgaaggtggctttagtga

SEQ ID NO: 425815 - DNA, 122 bp, Homo sapiens
cgacgcccgcatcactgagatctacgagggcaccagcgaaatccagcggctggtgatcgccgggcatctgctcaggagctaccggagctgagcccgcggcggactgccccaggactgcggga

SEQ ID NO: 425816 - DNA, 122 bp, Homo sapiens
atgtcattcagcaggaaggtgacatttggaggagaggctttgagcaccccaggatgtggtcgccagtcacagagcagaagaggcggaagctgctgagagctctgttggctcttggaaccaaa

SEQ ID NO: 425817 - DNA, 122 bp, Homo sapiens
aacccaggaaacgggagcagcctggcaggcgtgcagccgtgcacggcttagaggagctcccgagcgggacaggcaccttctgtgaagggccagagcgcagtctctccagcttcgggggccac

SEQ ID NO: 425818 - DNA, 122 bp, Homo sapiens
gcgatccgctatctgcctcgcggctgacccctccagcggcggctccgggggtggggtccacgatgccccgccgcccactccctgccccgcctggcactgtcctcgccctgcattggctgtct

SEQ ID NO: 425819 - DNA, 122 bp, Homo sapiens
ataagttagttcacgttaagtccttacgatagtgtctagcacatagtaagtgcttataaacgttagttcccatctctaatcttccaaacttttgaggaatagagaatactctcccccttttt

SEQ ID NO: 425820 - DNA, 122 bp, Homo sapiens
ggaccgccccacccacagcccgggaggcagtcccgggacgtctgaagcagcgggataccacgtcttcctgggcttgcactttgcagcggtcctggggccttgggacaagcctgcgagtctga

SEQ ID NO: 425821 - DNA, 122 bp, Homo sapiens
ctttaggctagaatcaaaaacaagttagtgttctatggtttaaattagcatagcaatcatcgaacttggatttcaaatgcaatagacattgtgaaagctggcatttcagaagtatagctctt

SEQ ID NO: 425822 - DNA, 122 bp, Homo sapiens
gggtttagagaaagtcaagcagccctacttggcttgagtgcagtgtaaccagagcgaaatcggggtaagactgtaaaacctggatgcaaagaagatgagtgtacaaataaacacagacacat

SEQ ID NO: 425823 - DNA, 122 bp, Homo sapiens
tgagaaaaaaaatctctttatccctctattttcaacacatcaccactgtctctgtcccttcgcatccacctgcacccttctgatattgaaccttgtgattctatcactttgaccatataatt

SEQ ID NO: 425824 - DNA, 122 bp, Homo sapiens
ggactcggggttgagtccacatgtgccatttgtggggacgccgtgcattccccagtttgccgctctctgtttcaaattctttcactcgatgctgttgtgggcatgaagtcaaagcaggcatg

SEQ ID NO: 425825 - DNA, 122 bp, Homo sapiens
gggaggaacagggaaggcttctctgaagaacgaacagaagtaaccagagaagagacagcccgccctgcaaagggacagcctgaggcagggcctgtcgggaagacaatacatctgaagaactg

SEQ ID NO: 425826 - DNA, 122 bp, Homo sapiens
aggctttttttttttcccttccctggggtctgcgccggtaggtcccggaggctgagattccgccctctgaggggccccctcgctaaaactcacagcctgtggacaaagcctttttggttttc

SEQ ID NO: 425827 - DNA, 122 bp, Homo sapiens
tggggaaatgagagtggcttctggtgctctggggtgagctctgcctggctgcagggatggcggggagaaggaagctcatcgcagtgatcagagacaaggacacggtgactggtttcctgctg

SEQ ID NO: 425828 - DNA, 122 bp, Homo sapiens
aaagcaatgtccacactcagtttgcttggtgaaaatgttaataacgcacacttagaaaaacggtgataaccgttgcttgcataaagtggccatttgaatagactttggatctgatttagaga

SEQ ID NO: 425829 - DNA, 122 bp, Homo sapiens
tgaccattcatgctgttctggccttactcttgtctgaaaacacccagaacttttctgcttcgggaatgactgcttacaaaattcttctctcacccatacatatttctatctatcattgtaat

SEQ ID NO: 425830 - DNA, 122 bp, Homo sapiens
gcggtgcttgcaggccagcgcaagttctggatgggcgtcggcttggctaggccccgcagtcggagcggccggccagccccgctggccccaggcagtgaggagcttagcacctgggccagcag

SEQ ID NO: 425831 - DNA, 122 bp, Homo sapiens
tgtaatcacttgtccatcatcaagggctggaacagtgactgctgctccttgtagtcccagcgctaacatttggtccagatgtataggaatttcctagaagtattttgcatggaaattagcga

SEQ ID NO: 425832 - DNA, 122 bp, Homo sapiens
tttgaactttcaggaaagagtgaaattctcactagtaacattggtaaatagtgtgtgcctcggcagcagggacttttatgtgtgatacaagcatggccaacaccatatttaggcaaatacag

SEQ ID NO: 425833 - DNA, 122 bp, Homo sapiens
gccgcaacaccaaaccggggacgccgcgggcggcggcgacacagatactggctcctccggcgactccgagcctcacagccccacttccggccaactgcccgctacttccgcctgctgcgcga

SEQ ID NO: 425834 - DNA, 122 bp, Homo sapiens
aaataaattacacattaaaactgtaataactgcatgaagatctgccttaggagtttttgccgttcagaaggatgaatcagcccgttagccttgtccctgagtaataatttaatacacttatt

SEQ ID NO: 425835 - DNA, 122 bp, Homo sapiens
caggaggcgttccgaagccccgctgcgccccctgccagtccctttgaatcctctcagacccgctggacccgccctctgctaagtcccacactggggaaggggagcctctaggaccatcgcct

SEQ ID NO: 425836 - DNA, 122 bp, Homo sapiens
ttgttgggccctctactgcctcctggcccacccccatgtgattgggtactcattctctaacgtggtgacatcccagcttcaaaaagatgctggtgatgatcgacattatttataatcatgaa

SEQ ID NO: 425837 - DNA, 122 bp, Homo sapiens
actgcagggagaggcggcagctggaaaagtgttaaggccacagtggtttttccagaggctcgtctggaatgccgtggctggatctgagcctcctgacatccgaggcccctcttggtggggag

SEQ ID NO: 425838 - DNA, 122 bp, Homo sapiens
gctctccgcttcgtccccatctctccgcaggcggatcaagcccctgcggccggtggcgggcgaagtgaccccacaggctggcaggggctcctgggggtctctgccgtcccagggggagcagc

SEQ ID NO: 425839 - DNA, 122 bp, Homo sapiens
ggaggggtgagaggggagatctgatttacatacggacttgagactcccaaggcagtaccccgggtcgtcctctgcaaggttgccccggtggggtctgacgcccagctggcgtccgggagccg

SEQ ID NO: 425840 - DNA, 122 bp, Homo sapiens
gcagggcccagcgtgcggctcaggcaccgagcaaccgctttgctttcttctgtcagacggcgatgatgacaaaatagcaacaaggttgtgcgtgtcagaaacgcaaaggcagcagaggaagc

SEQ ID NO: 425841 - DNA, 122 bp, Homo sapiens
ctcaggaaacggggacgaggggcagagcctccctcagcaaagcgtcccactcaggaaacacggaagagacgggcggacagaaaaccgccctggggccatggtgacaagccccgcagctgaga

SEQ ID NO: 425842 - DNA, 122 bp, Homo sapiens
ctcgcgggccgtctctatgaactgccggtagttctggtagacgttgcgcttcaggttctgcgccgtctcctccgccagcgcctggatgcgctgccggtgctcctggaggtcccggtccccat

SEQ ID NO: 425843 - DNA, 122 bp, Homo sapiens
aagggagagcgtggtgcgggggcgtggggaaatcgggttgccccagccgttactggtccgcgcagtcagggcatcctccgcatcctccacatccttccatggctctgaagaataaattcagt

SEQ ID NO: 425844 - DNA, 122 bp, Homo sapiens
cccagaaggagccagacctgatcttccttactagtttatatttccctcaaacaataaattcggccttggatccgctgctgctcgccatcctaagagatgaagacagaggctgaggccaagtc

SEQ ID NO: 425845 - DNA, 122 bp, Homo sapiens
gtcccgagccctgcccggcgggaaggcagctaaggcccggtgagaaattgagcacagtgccggtgggctggcactgctgcaggacccagtacaccctctgcagccgctggcccgggtgctaa

SEQ ID NO: 425846 - DNA, 122 bp, Homo sapiens
agcagctgggactacacgcgtgagccaccgcccccggcataaagtttgaattagtccttacgcaaaaagggaagagggcagtctgtaaactcgcgcaggatcaagctctcgagctcccgtct

SEQ ID NO: 425847 - DNA, 122 bp, Homo sapiens
gagcggcctgtcagcggccatattaacaactggcaaactacggcttgaatccctgagaaacggaggcgcgtggtttctgcaccctggttggaaaggcccgaggatgagaaaggtgtccacgt

SEQ ID NO: 425848 - DNA, 122 bp, Homo sapiens
cgagggaccgggagaggtagggagggatccgagccgcagtcctgagggagagcgaccgcgcgccccgcagccgagctgggtcccttcgccccgcccggaatcccggcccccgcccgccccac

SEQ ID NO: 425849 - DNA, 122 bp, Homo sapiens
cctcctctcgccagccggccctaaaacatcaaggttagtcaggactctatatttaacgtccggaagattctgtgaactatatgccaaccttgccctagtaacggggctcccccctcctttcc

SEQ ID NO: 425850 - DNA, 122 bp, Homo sapiens
cttccagaaggagcagcatgattatgacttaggttctcatatgaacctaactggtcaaagcgcaatacaagatacggaaatgaaaagacaactaagaaaattttttgtttttacctgtttga

SEQ ID NO: 425851 - DNA, 122 bp, Homo sapiens
gctttgggagggtcctggactcctttgacttgtggagcactggagacacctgaggggccacgccgtggtctccaccttccttgccccagagtaacccggagattcttctattcagctccttc

SEQ ID NO: 425852 - DNA, 122 bp, Homo sapiens
tcactgcgccctcctccaccagcgacatgcgccgcagccggtctacgtcccctgggaatgcggccgccacccgctgtgcccagagagcccagagctagaaccagacccaggaacccccatcc

SEQ ID NO: 425853 - DNA, 122 bp, Homo sapiens
gcagctcctccttggtcacagctggggctttgcacaaactccccggaaacccagggcttgcgtttgcaggtctctgggcttttcctgcatggagcagagaacttttccggatggtgtggctt

SEQ ID NO: 425854 - DNA, 122 bp, Homo sapiens
caaggaagagctgcgggaatgcacgcccggggaagaggctttgtgaaccgaggctcggcgcgccccccacccgcgcccctcatgggcagccgggcccagcccgccgcccgggcccctctggg

SEQ ID NO: 425855 - DNA, 122 bp, Homo sapiens
ttatatgctttataccaaggagagtagtgggaagctgagttggattcttggctgggttaacgcagagtaacaggggcttggatgaattcgacatccttttccatgtcccagccccctgccca

SEQ ID NO: 425856 - DNA, 122 bp, Homo sapiens
aacccctgatctcctagcaacgaggctgcggaacctctgcagactccaagggttttatagcgtccggtagcgacacggagccggctcccccttttccagccttcctccccatctcccattct

SEQ ID NO: 425857 - DNA, 122 bp, Homo sapiens
tgcaaatatgattacgcacatcctccttcgaattttaatgtgtcttcctagcttactgagcgacatccaagctccttcacaaggacttttttttcagtctcatgtcttttcaccaggccagt

SEQ ID NO: 425858 - DNA, 122 bp, Homo sapiens
tgcgggcagccaaaatggcggccgtgaaaacgaagcccacagacctggctggaatgctcacgggcagatggaccacaagacgataaaccagcgaggtgactccagacgcgagggggctgaga

SEQ ID NO: 425859 - DNA, 122 bp, Homo sapiens
gcccaacaaagtgcttagcttttcttctccttaacagaggaaacattacaactacagcgtcgcctttttaaatgacaaaattctctagcttttctttgacatgaggaatgtagaaggaggga

SEQ ID NO: 425860 - DNA, 122 bp, Homo sapiens
aaccagctcccttctagcgtgagggagccgggaggcctccttctggcccggcagtgagagcgtcgccgcccgaccctcccgttgcagcaccggtacagacacgctgaccccgcggccttgtc

SEQ ID NO: 425861 - DNA, 122 bp, Homo sapiens
ccagaggtctggggtggtgcgtggagaactgacagtctagcttctcggattcgtcggctccgtccatctccccttcatcactggacagtcggctggcgaggtcacctccaaccggtgggagt

SEQ ID NO: 425862 - DNA, 122 bp, Homo sapiens
cgggggcgatgcttatgagcctcattcacaatagcctcctaccccatcccaggagaggggcgtgtgtgcgtagacagaggcagggttaagaattggagggcggtggaggggggttgtgtgtg

SEQ ID NO: 425863 - DNA, 122 bp, Homo sapiens
cctgagaagctccccagccagcatagtctcgtgctccattgtctagaactggcttacttgcgtaccagcaaaccagtcactggaaaatgggaatgggattgccatgatgggtttagaccaat

SEQ ID NO: 425864 - DNA, 122 bp, Homo sapiens
tacaaggcattgccaggtgcgacggcgggccctggggccaatgatggtccaggacaggggcgtttcctgtgggttgcgaagcttggggcgggacttccggcatttggatgggacgtaatttg

SEQ ID NO: 425865 - DNA, 122 bp, Homo sapiens
ctcctcccggcggatgaaagccgctactccctggctggctgagctacagctcccgcagcgcgcccaggagtgcgccggagattcggaaacccgcagagacttctcaagtcagcaggaacttg

SEQ ID NO: 425866 - DNA, 122 bp, Homo sapiens
ggacagggccgcccgaccgcgccccagcaacctccccagaacctgcctcccggcaggttgcggacaagtctgtctcttgctatcgcaggtgatagggacaaaattattgaattcctaatatg

SEQ ID NO: 425867 - DNA, 122 bp, Homo sapiens
cgtggccagttgggcatcgcggtatcttccccaggcctggagggcagtgctgaaggcccgcggccgaggttttgctttaagtatacttgggcctcgcaactcagctgtttgcgaacagagac

SEQ ID NO: 425868 - DNA, 122 bp, Homo sapiens
gggcattccgtgtagtatcatcctctcccacgttgaaattagggacaatattactgggggcgtgtccaccccgtgcgatattgaaagtaacatcatcctcttctctcctggatcatgggaac

SEQ ID NO: 425869 - DNA, 122 bp, Homo sapiens
tcctcccacccaggagatgggtgcgctgggccccagcacgctctgcacagtgcccagctccgcacagctcctgtcctgcctcacggcccctgtcccatgtggtgctgtcaccctccctgcgc

SEQ ID NO: 425870 - DNA, 122 bp, Homo sapiens
ggcggccgactgcggcgcacacgtggggagggcggagcggggcgggagccgggcgaggggcggtgacggtacctgatgaaggtggtcttgccggtgctgtactggcccaccagcaggatcat

SEQ ID NO: 425871 - DNA, 122 bp, Homo sapiens
gctccttcccaaaggtggggcacccgggagcgagcagggtggtggggcgcccctgcgtcccgtttgctgctccctcgctggattggggcacccgggcctgagcgctagtgctgcggcatccc

SEQ ID NO: 425872 - DNA, 122 bp, Homo sapiens
gttactgctgaggcagacctgccgggccagctgagcaactttcctcggagtgctgcctggcgctggctaggaggcaaacgcacgcgggaagagctgctacccattccagggaccctgccgct

SEQ ID NO: 425873 - DNA, 122 bp, Homo sapiens
ctggctaatggctcagagacacatttcaagacaaggacccagccaagctcggtgggctcacgcctataattccagcactttgggaggctgaggcgggcggatcacctgaggtcaggagttcg

SEQ ID NO: 425874 - DNA, 122 bp, Homo sapiens
ctcctctctctcctaggactccttgaccagtctcttaaaggggtagtgcacttccagcagcggagtctggctgctcccccctccgcggagccacacgctccggctgcaaggctctagacaac

SEQ ID NO: 425875 - DNA, 122 bp, Homo sapiens
gttagctggacctcaccagttaaagggcacatttcccaacaagactgtcccaacttcagacgccagctgcaagtggggttcccaggccacttgctcttctgagcaactggcttcaaatccag

SEQ ID NO: 425876 - DNA, 122 bp, Homo sapiens
cacgccggcaggttgtacccagaatccgggcccttgccagacgggggcggaaccggaagtcgctgtacatctcatggttgctaagaaacggagcttccacaaaccagatagaggttctccag

SEQ ID NO: 425877 - DNA, 122 bp, Homo sapiens
ttttgacccggctctgtacccatcatgaggtgcagcctagatcaggtgaaattcaggcaacgtacagacctgtgagcttgagaataaatgtataggttactttaagccattgagtttttagt

SEQ ID NO: 425878 - DNA, 122 bp, Homo sapiens
ttctggatctctgctacaccaccagctctatccctcagttgctggtgaatctccggggcccggaaaagaccatctcgtatgctggttgcatggttcaactttactttgttcttgcactggga

SEQ ID NO: 425879 - DNA, 122 bp, Homo sapiens
actctggaaggaggaggagcaaagtgggctaggatgattagcataaagaggcaggcaagacgggcattggagctgctttgaataatagtgaacaaagcacagattctaaagatgccctgccc

SEQ ID NO: 425880 - DNA, 122 bp, Homo sapiens
agggcattccagctgatttgcctggagttcatttctggtgctccagggagtcctgatacccgcagcacctgggccggaacctccagctgtacgtgccatccaggctccatggaggatggtct

SEQ ID NO: 425881 - DNA, 122 bp, Homo sapiens
tgctttacaataaaacatgagaacctgcagcttgtgatgttgtggcagtggcagcctccgcggctggtgccaccacctttgcccaggcccccgcagcagcacctgcctcccaggccactcct

SEQ ID NO: 425882 - DNA, 122 bp, Homo sapiens
tgactttgctttttagtagaggaaagttgggatttttttttttctggcaattttaagaaccgagtatttccagtgtaatgttaaaggtagcctactgctgtgctaacataatgagacggtat

SEQ ID NO: 425883 - DNA, 122 bp, Homo sapiens
agataagcctaaaactatatataaccctggacttagcagttttatatgctaatgcatttccgttttctttaactcaaggtagtttgagttgtcactagcaacagtttagattaatacagaca

SEQ ID NO: 425884 - DNA, 122 bp, Homo sapiens
acacaagtacactggatatcctgactattggtacttgtattcatacttgcatttataatacgcatttctcagataccccaacagttcatatccagacacccccaatggatacacctgagact

SEQ ID NO: 425885 - DNA, 122 bp, Homo sapiens
tcttgctctgttcactcacaggagagctggttgttaaaaagagcctgggcaggccaggcacggtgactcacgtctgtaatcccagcactttggaaggccgaggcgggtaaatcacctgaggt

SEQ ID NO: 425886 - DNA, 122 bp, Homo sapiens
caggagttctcttactggaaccatcaacctcaatacggccccagacctttctggagaaggcgggggtggagagaataaagagctcttttgcgcagccgcagaacagtaggggaaaggggtag

SEQ ID NO: 425887 - DNA, 122 bp, Homo sapiens
ttctcttccgttcaccgagagtccactcccattcctttccatggtccagaaactggttggcgtctctcactgcttggcacctgtatccctcccaagctccttcctggcatgaaccagttctc

SEQ ID NO: 425888 - DNA, 122 bp, Homo sapiens
gccacgctcaccccatcagtcagtcattctcactcactcttgcaccaacgtgcatattcacgcccaggccctacacacacacctgccactgctcactgcctgcaacatctaacattcacaat

SEQ ID NO: 425889 - DNA, 122 bp, Homo sapiens
tggatttcctcagcccattttcatcccctcagactcctcccctgcttgctccaaattccccgggttgcatgactagaattaatgtcaccaactctgaatgtgctgccatctctctccttagc

SEQ ID NO: 425890 - DNA, 122 bp, Homo sapiens
ataaacacagcgtcaagtactgcacgctgtagctacctgaggtttaggccggaagaggcacggctgatttaaaagtgaaagaaagtaaccaattggttcgcagacaaccttttcccaaaagg

SEQ ID NO: 425891 - DNA, 122 bp, Homo sapiens
ggctcagtcttcacatctgagaagtgcctgacagtgttattacaagagctgaatgaaggacgggaatgaatatggaagctctttgtaagcaaggaggtgttatacaaatgtctttttttacc

SEQ ID NO: 425892 - DNA, 122 bp, Homo sapiens
ctcactttgttgcccaggctggtctcaaactcctgggctcaagtgatcatcctgcttcagcgtccgacttgttggtattataggcgtgagccactgggcctgacctagctaccattttttaa

SEQ ID NO: 425893 - DNA, 122 bp, Homo sapiens
attaatatttcagtatctactatgtgccaaggattggtctaggcacgaatgagcaatgcccgggatatccaagagtccctaacttcatgaaggtttaatggggaatagagagaaataaacag

SEQ ID NO: 425894 - DNA, 122 bp, Homo sapiens
atctaatttcatctgaagttcaacagactctttcttccaggcacacaggcgttatgtggccgcacgggtccctgcccgttagaaggattcagccacaccccagctttccagttcctggggtc

SEQ ID NO: 425895 - DNA, 122 bp, Homo sapiens
gcaccactcaagggttgttaacctctttaagagtaaagtcagggtggtttgggtgtggaccgcttgcaggcggcaccctgagctcaggattgcataacctgaaatgtgtagctactcaaaat

SEQ ID NO: 425896 - DNA, 122 bp, Homo sapiens
ggccaggtgtgtcctggagggcagggaagcgtcttggcacgcgggtgcgcgccgccccctcggcctcctgggctccctgaacctcgcaggaccccggcaacttcgagccccgccccagctcc

SEQ ID NO: 425897 - DNA, 122 bp, Homo sapiens
ccagtgccaggactcgggtctcggacctcagaccacgcccctgcggctacgcaccccgaccgctgtgccccattgggcggcacggacgcctgggacactctttagtccaattgcgggcggcg

SEQ ID NO: 425898 - DNA, 122 bp, Homo sapiens
aaggacagaggtggcttcactctccatgtcggcaccattttggaaaaggattttcaggcccgagataagtccacagccagtttcccagccccacctgacctctgccctggcctatccctcag

SEQ ID NO: 425899 - DNA, 122 bp, Homo sapiens
tacctgagtgaacactcagggagggcggcggctggggcggtttcagcagtggggtcctcgcggggtccaaggcctgtccctgtgcccagtgccagcccggtgcggggcaggaccggaactca

SEQ ID NO: 425900 - DNA, 122 bp, Homo sapiens
gcggcggcgggcagccgcgaggggagcccagcacccggttctcgctgccccgggtggcagcggggcagcctccgacaagacgtcccttggttcactgtcctgcaggccggggatgaaaggcc

SEQ ID NO: 425901 - DNA, 122 bp, Homo sapiens
ttgatataatgtggatgtttctctcctccagatcttatgttgaaatgtgatccccagtgtcggaggtgaggcctaggcagaggtgtttgattatgggggcagattcatcatgaagaatttag

SEQ ID NO: 425902 - DNA, 122 bp, Homo sapiens
tccgcactgccccacacccctcccggctcacctgcgctccgcactgccccgcacccctcccggctcacctgcagtccgcactgccccgcacccctcccggctcacctgccctccgcactgcc

SEQ ID NO: 425903 - DNA, 122 bp, Homo sapiens
cgaatcggaggtacaccgcccctttcccttcccggtaccggtgccggtaccagagacctccgagcgctcattcccagtccgcggagtctgcggccaagccaaatccggtctccgaagaggcg

SEQ ID NO: 425904 - DNA, 122 bp, Homo sapiens
tcacccccttcactccctttctcccttcctcccttcctctgtttggttgttgatactggacgcgctgagactattttacttacttattttgtttattgctttccctcactagaatggagctt

SEQ ID NO: 425905 - DNA, 122 bp, Homo sapiens
gttcaccaaatcttatattcaggctctgagacacacaaaggggccccggcaattgctgagcgctgactaatggaatgtgggagtaagtgatgaaggtcacttccaggttgagccttaaaaaa

SEQ ID NO: 425906 - DNA, 122 bp, Homo sapiens
acgggcccagccgttggaggacggcagcagggaccaccccacgccccagtgcagggcacacgaacaccttcctgggcttctgcagatccggctcatgttctgcgtccaggaccctcccagcc

SEQ ID NO: 425907 - DNA, 122 bp, Homo sapiens
ctgaggatggaggaagggcagaaggcttgctcttgccatctccacccagtaggcccagcccggctcttgtccgcttccctggttctggaatggcctggggccacccccaaccctgaggctga

SEQ ID NO: 425908 - DNA, 122 bp, Homo sapiens
tcacacgccctcccgtctccctcctcctcctcctcctccgcgtgcgcgccccgtcgcccccgcccttcttggcagggcgcacccaccacggctgcgccccaggtcctcctccctcccagcgc

SEQ ID NO: 425909 - DNA, 122 bp, Homo sapiens
ggtccacctgtttagttaaacaatcgctgtggctgtagagcagggtcgcattgggagcagcgctggcaacctataaatatgtggtgcagaaagagagatgcttgagcagataaataggagcc

SEQ ID NO: 425910 - DNA, 122 bp, Homo sapiens
acgttcacaaagatgattcatgctaaacaaataaaaccagagccacatccatcagcataacgtagtgcaataaaatgttatatatcaaagtacgcatctactaagtcctattcatcggagac

SEQ ID NO: 425911 - DNA, 122 bp, Homo sapiens
atccggacttagctggcaggggggatgtgaatcatctctgcaggcctgcacgggcgggcccggtgggggcagggtgctcccctttgaaaaacgctgcgccctgctcttcagcctcagtttcc

SEQ ID NO: 425912 - DNA, 122 bp, Homo sapiens
catcagtggtttgtatcccattgggctgtgtggatttgctgttggagttcttggctcgggcgtggccacagttaaacaccccagtgtatgtcaaaggcacagacccctgctgcacacagctc

SEQ ID NO: 425913 - DNA, 122 bp, Homo sapiens
agcctcagctggactgagagtatgtgatatcacagaagtggattcttgacctttcaagcccgcactactgagagaagagcaaggtggattggcagaggatgcacttaaagtggattgacaaa

SEQ ID NO: 425914 - DNA, 122 bp, Homo sapiens
agccaggcgcgaggaggctggcggagatttattccttcctgggcccccacccccattagccggtcccggagccgcggcccgtgtgtgtgcgcgcgcgcccgcacacacacacacacacacac

SEQ ID NO: 425915 - DNA, 122 bp, Homo sapiens
actggagggacaggggtttggccggggcgctttaggagccagcacccagactttcccaggcggggagggtcccagctagatcccaccggccgcacttgtgagggtggcgacgtgtgtctgac

SEQ ID NO: 425916 - DNA, 122 bp, Homo sapiens
aaagagggccacctgccaaacagctgtagtatgtgatgttaaagagagctaaacaccccccgcacctccctcccagggtcaccatcttgttaaatttgacctaaaaacggtaacagcctagg

SEQ ID NO: 425917 - DNA, 122 bp, Homo sapiens
tggctacagtgctgttgcttgatttatggaccttagaaatggcccaccgatttcccgctgcgatcgatgaggactcagctcgtcggcactgccactcccagccccagttcagtttccgagtc

SEQ ID NO: 425918 - DNA, 122 bp, Homo sapiens
tgtcaattccacggctacaccttaagagaccttggtctcttggaaccctgccaatagccacggactcagtccaggcagccctgctggaggatgggagaccacaggaagtagagataaactgt

SEQ ID NO: 425919 - DNA, 122 bp, Homo sapiens
acttagccatgcaggaacaatggcaagcctttatttagcccaatcgggagcggcaatgggcgctcaggagcacagcagacaccctgccggatccggagggatggaagtcagcagcgggtctg

SEQ ID NO: 425920 - DNA, 122 bp, Homo sapiens
gagtaacgggtccgttctccactcgtaggagaaaattcaataacaccagctcccattttccgatgccttgtgatagccacgtttgcattagctgctttaccaatgacttagcttctgagtgt

SEQ ID NO: 425921 - DNA, 122 bp, Homo sapiens
gcgcgtgagagcgcgcagcgtgtgcatgtgcgtgtgcgcgggagggtcccggctcccctgcgcgtcccgctcctgcctcctgctcgccacgatgcgatgccggcagaatctctaccgcgcgc

SEQ ID NO: 425922 - DNA, 122 bp, Homo sapiens
gggccgacgggctgcgtgcgcgaggagcgggcgtggttccgggaggagggcgagggggagcggaccaagagctgaaacacgccccgggcgcacaccacggtgcccggaaccgcggggctcgg

SEQ ID NO: 425923 - DNA, 122 bp, Homo sapiens
tcacatccatcatcttctacagttctgaatgagttgtgaatctgtgtactctcccatccccgagccctcccaggacacccttgctgagtctcagagttcctgtgctccctgaggaagggacc

SEQ ID NO: 425924 - DNA, 122 bp, Homo sapiens
gccgacctgtccacccttccctggaatctgctcaataaagcctggggttggtcccccacccgccacgttcctcggcatcacttcctgagggagccaggcctggggcgggacctgtgggagag

SEQ ID NO: 425925 - DNA, 122 bp, Homo sapiens
aggttgagggctcaggccgagagcatgtagaagcagttagctcactctttctagatgtggcggctgacaaggacaaagagggctgggactagaactgctgtagacaaggaaagcagccagtg

SEQ ID NO: 425926 - DNA, 122 bp, Homo sapiens
cgcccacagggagagaatggcgggagcaggcacggaaccggcttttcctccttcctgcagcgtgattggcccgcggctcagggaggcgaccaatgagtgctctcgcggagagcgacggggca

SEQ ID NO: 425927 - DNA, 122 bp, Homo sapiens
ggggtgcagcggagccgcccgcccccgcgccggtctggggcccacctccctccccgcccccgacccctgccctcgggcctccccccggggaggggctgctccctggcacccggcagcgctcc

SEQ ID NO: 425928 - DNA, 122 bp, Homo sapiens
cggcggcgaactttgcccggtagattttactgactggggtgctggcgcgcgcctttttctcggccagaatccagttattgggatagtcttgacttctacctcagcccaacttctgtggtcgt

SEQ ID NO: 425929 - DNA, 122 bp, Homo sapiens
ccacgagggcagggcagctgactctgcatacacgggaagagagagacgcagaggcctgagcgccacgccagtccaggtggaaacgcttgagccgcctcacctgcatttgcagggctcagcag

SEQ ID NO: 425930 - DNA, 122 bp, Homo sapiens
atacagtgatggataaaggagagagggggtgatgtaaagactgtgcgtagatttccaccacgtacaatttgatgacaataagtaccattaaaacaattactggaaaaggatgttgttgggga

SEQ ID NO: 425931 - DNA, 122 bp, Homo sapiens
aattcagttctggcagagccaagactgccgggaagccagaggggctcctgcaggaggtgacgggcctgcggggacgcgaagggccaggaccggacacgccccgttccgctctgcttccagtg

SEQ ID NO: 425932 - DNA, 122 bp, Homo sapiens
agctctccccacacctgccattccctgcgttactgcagcagggatccagagaacactgtccggacatgcaggggaccggagtcctcaccactcccccttttgtcttctccaagccagggtca

SEQ ID NO: 425933 - DNA, 122 bp, Homo sapiens
actctactatagcttctgttatcctgtgacctgcaggtactgggagatccatagggaggacggcggaacatctggaggctgggaaatggtgagtgcgtggagtgggtgtcccgagaatgggg

SEQ ID NO: 425934 - DNA, 122 bp, Homo sapiens
tactgccagttccgcagtgaattctaaaaatggttactcttgggatacaaggaacccccacgaggataaacaacctctgaggttacctgaatgccccagcaaagggcacgactacttccgga

SEQ ID NO: 425935 - DNA, 122 bp, Homo sapiens
tttgaacggaggagcacaggaggagctccaaggcccctcaggagtcgccactgttgcctccggtcacccccaccttctgttggagtggccttcagggaaaatgccccaaaggggcctcctag

SEQ ID NO: 425936 - DNA, 122 bp, Homo sapiens
gccgccatcagaggggcctgtctcgctcccccagacacagagcctctgttttcctcactccgggtctggagtcccctgcttaacagcttggattgaagaggcttgtctggggggactgagac

SEQ ID NO: 425937 - DNA, 122 bp, Homo sapiens
acatctcagacgatgggcagccgcgcagagacgctcctcacttcctagatgggatggaggcggggaagaggcgctcctcactttccagactgggcagccaggcagaggggctcctcatatcc

SEQ ID NO: 425938 - DNA, 122 bp, Homo sapiens
ggttagagaaggtcattgtaaaactgagagaagaggagaacctgatcgcttttgggactgcgcagctttgcctctaggaataacacgagagtccagaaggcacccaggcagcctcgggccgg

SEQ ID NO: 425939 - DNA, 122 bp, Homo sapiens
catccgtcgacggccccggcctcggctcgttgattggagaaactgttcctagggtgtttgcggcgggcgggtttccgagtgcggtagcaggagggggcggggaggtaagcggaggctccgag

SEQ ID NO: 425940 - DNA, 122 bp, Homo sapiens
ccttcttaaatgaatggcatgactcaatactcgaaggcatcacgggctctaacacacagccgcccttgcagctgtgcgctctggaaagctggagtatgggcccccagggcactgtttgtaaa

SEQ ID NO: 425941 - DNA, 122 bp, Homo sapiens
atgttggtggcgggctggagtgggtggtaccgggatccgaggggctctgccttgcagtcccgcagcgcggggctccggggagctgcggggcaggtgccagagaccccgcccccgccgcccac

SEQ ID NO: 425942 - DNA, 122 bp, Homo sapiens
ttaatattcaacaatagcagataggttaagtacattaggacattatgaagtggcttaaaacggacattcaaaaaaaggaaatggaaaacctgagtaatgtacagcttgtatggaatgaacta

SEQ ID NO: 425943 - DNA, 122 bp, Homo sapiens
aagcgtgacagacggtgctgggaagtgggcagccgtagcagcctcccctgctgagcccggcgggcccagatgcgtatcaggcttgggtgggtcctgccaccttgctcacttggtaccggatt

SEQ ID NO: 425944 - DNA, 122 bp, Homo sapiens
gggtggaagcccccccgcccaggtgggcccggctgaatggggggcttgtgcaggcgggggcgggaaggggaaggggaaggggccgcccacctcccgccccgcccgcccgcgcgccgcccgcc

SEQ ID NO: 425945 - DNA, 122 bp, Homo sapiens
accggaagtccggtcactctcgcgaggccccagagagcaggcgctgggcagtgtggaggtcgttggagtcacttccccgtcaccagctcctgtgcctgccagtcggtgcccctcccgctcca

SEQ ID NO: 425946 - DNA, 122 bp, Homo sapiens
tgttctccacacacccagtgctgttctttcttggaccatggcagctgtgagtcagcgcaccgtgtagtttgtgcatccttgtgatgaatgcacaggatgacatttgtttccctgagctctgc

SEQ ID NO: 425947 - DNA, 122 bp, Homo sapiens
agcagtaccatgattttaggtctgtaagtagcttaaagttaaacttagaactttggttggcgatgctcaccctggtctctgttatggataacagtttgaatgaggttgatgactgggtcttt

SEQ ID NO: 425948 - DNA, 122 bp, Homo sapiens
tgcactgtgaagctctccacaaccccgtagttgtgtctgcagtaggtgtccaccgcggcccgcgcctgctccaggatgtccttctggctgttccagtactcagcgtcaggccgccccagctc

SEQ ID NO: 425949 - DNA, 122 bp, Homo sapiens
cccacctgacgtcaagcctgaagctcagccgctaagccggaagctggcgccagaagatgccggttccgccagctgctcgccgcgcaggcgcaggggagacccggggccttgcagtcaccggg

SEQ ID NO: 425950 - DNA, 122 bp, Homo sapiens
agagggtgacggcaaggtgtgctgggtcctaggcacagcagctttctggctggctaagaacgtctgtggcaggtggcaacagaagggtccaggtgtgcaggggctggggagggggccatccc

SEQ ID NO: 425951 - DNA, 122 bp, Homo sapiens
gattacaggtgtgagccacagcacctagccacctccctggactttcacacacgcccctgacgctgtcttggccccaccctgccatgtgcctaggaatcgccatctgcagcttgggggctggg

SEQ ID NO: 425952 - DNA, 122 bp, Homo sapiens
gtgcctggggcgggagggttggggtgtgggtggctccctaagtcgacactcgtgcggctgcggttccagccccctccccccgccactcaggggcgggaagtggcgggtgggagtcacccaag

SEQ ID NO: 425953 - DNA, 122 bp, Homo sapiens
tatttaggagctttccaaatactgatggcatgttgagccatcagactggataaaatcacacgaaagaggtgctagtattgggcccttgggtggttcagcgcctggaagtcaaggagaagaga

SEQ ID NO: 425954 - DNA, 122 bp, Homo sapiens
tctccgggagctggatctgcagaggaactacatcttcgagatcgagggcggcgctttcgacggcctggctgagctgaggcacctcaacctggccttcaacaacctcccctgcatcgtggact

SEQ ID NO: 425955 - DNA, 122 bp, Homo sapiens
tggagcccttacgtcacttacataatgagccaatcggaaggggctgagggcgagcccacacgcgagtgaggtggcagcgtgagagcgcgcgcagccctcgagctgtggaaagcggagcactg

SEQ ID NO: 425956 - DNA, 122 bp, Homo sapiens
gaaaagctctctaaaagacagtgatatttattcaagaatgagcattgcaatgggaatatgcgtgccatcacaaactatgtgtgtattcagacaggtaagggaagaaaaaagttttaaaaaga

SEQ ID NO: 425957 - DNA, 122 bp, Homo sapiens
catagccagacgccagcagcaggaaacgatcccgaacccctgtagctaaagcggattgagcgcacccccgatgccctcgaccttatctggatacatttcttgcttcagaaacttcctctcat

SEQ ID NO: 425958 - DNA, 122 bp, Homo sapiens
tccccagacagccgcgggcggtggggcaccaggggcagcgaaatggaaactgaaatcaggcgggaccgaggctgcgccaagagccgcagcctgagtttggcgcgtaattggggtggcctgtt

SEQ ID NO: 425959 - DNA, 122 bp, Homo sapiens
gcgcggcagggcctgtgggggcgcagggctcaggcgagcaggtggggctctcaccgagagcgctcaggtggccgtaggtctcccgcatcacgtcccggtacagggccctctgcgctggccgc

SEQ ID NO: 425960 - DNA, 122 bp, Homo sapiens
cgactgctacctcgacagcccgtggttccgggagaggatccgcgctcacgaagcggaactcgagaggaccaacaagttcatcaaagagctcattaaggacgggaagaacctcatcgctgcga

SEQ ID NO: 425961 - DNA, 122 bp, Homo sapiens
agctactaaagggtgttggggatgcttctgactattatgaaggccaaaaggtaacaatatcgttctaggaaatgaacataaatgcattccagtgatgctgttagccatacatgctgtctttt

SEQ ID NO: 425962 - DNA, 122 bp, Homo sapiens
ttgaaagagcagcagtgctgacatgattgggcagagcagcaaaggctgatttcctcacaccgaagctctcctgccccaggcgtcttcctctgactgtcaccctattaatgcacagcaattgc

SEQ ID NO: 425963 - DNA, 122 bp, Homo sapiens
gagttatatcatctcccgctctggggattatgaactgttttacagacaggtgtacaccctcggtgtaaagagggtgtgcacccgtctgtattggatgtgatatcatcatcttcctccctgaa

SEQ ID NO: 425964 - DNA, 122 bp, Homo sapiens
ctattagaaacagcataggcgtacacagaaaccatgctgggccttttcctgtctgtagctcgacaggcgttacagaagagcaacctaactttacttacaagttcaatttttcttcctcagta

SEQ ID NO: 425965 - DNA, 122 bp, Homo sapiens
gagtaagaaaataaatcagcttacaactctagactgtacagacatgcaggctgccttttacgtttctgactcctgatttatttttctttcccaccttcccacggcgaagggcagtcaatgaa

SEQ ID NO: 425966 - DNA, 122 bp, Homo sapiens
aacttggaatgcagtcttactccaatgtagttctttgaaaatacattttttggccaggcgcggtggcttatgcttgtaatcctagcactttgggaggctgaggcaggtggatcacctgaggt

SEQ ID NO: 425967 - DNA, 122 bp, Homo sapiens
tacaactcccctgggagacgacagctggaggcccctggcttgttgactgctggaccctgccgtatgtacttgtgccctgggctgactgtagtctgcattttttgctgtatagactctaacca

SEQ ID NO: 425968 - DNA, 122 bp, Homo sapiens
cagggagtccggtgtcttttttacgggggacccctgggctgcgagttgcacagtccaattcgctgttgttagggcctcagtttcccaaaaggcacagggacggggggagggtggcggctcga

SEQ ID NO: 425969 - DNA, 122 bp, Homo sapiens
gattagcgagccagccgcttcaaaagtctaggcgagaggaagccgagacgcgtcggccttcgccgggctggagcccctgccagatttagcctcccgcctggccttttctccggcctgcccct

SEQ ID NO: 425970 - DNA, 122 bp, Homo sapiens
ttttcaatcagtttatcagcctcctccgcaggggaagtgtggacacacaaaagaacttatcggggcttctcatcagtgatagggaaaagactgggcatgtgcctaaacgagctctgatgtta

SEQ ID NO: 425971 - DNA, 122 bp, Homo sapiens
acctaggctgtgagaggtacagagtgaacaaaatacagccttctcttcaggtgttcatgacgtggtgggggagacagacatggacaagagtattttacaatcaagcagacaatgataagggt

SEQ ID NO: 425972 - DNA, 122 bp, Homo sapiens
caaacttagcgatctgcctggtaaacaaaagcggaattcagacgctcagtaggacccatgcgcctgcaatcccgccttgctgaaaacatttgagattaaaattttagtttcatgccttagtc

SEQ ID NO: 425973 - DNA, 122 bp, Homo sapiens
agggtgggctcccaggactctggacagccctgcccccatggctttgctgagcccagcccacgtggctactctcacaggttggagtccaatgcctggggcttttccaggctgcgattgcacac

SEQ ID NO: 425974 - DNA, 122 bp, Homo sapiens
ttcttcatgttcttcccacaggacttgaactgccatgtcctctgaagaaggaaagctcttcgtgggagggctcaactttaacaccgacgagcaggcactggaagaccacttcagcagtttcg

SEQ ID NO: 425975 - DNA, 122 bp, Homo sapiens
gtattctccttctctttaaagaataacttgaagattgcacacattaaatttcgcttcccacgggtcacatctaatcatatggccatgaccacacctaaccacagaagaggctgagaaagcta

SEQ ID NO: 425976 - DNA, 122 bp, Homo sapiens
tggggtggggggagatgaggcatgcacgcgaggcaaagacaaacaggaaagtgtctctatcgggaccaacgtgtgcgaccctacctgaaacggcaagcagaattcggtgttttcttcctttt

SEQ ID NO: 425977 - DNA, 122 bp, Homo sapiens
ggagagaggaggtgtaagtctgtttctacacatgtcctattaatccctctcaggatggagcgcttcctggcaatgtgatgtctaattctgattcggtctgcctgtctgacttgtgacagact

SEQ ID NO: 425978 - DNA, 122 bp, Homo sapiens
gcttcagcctaccaaactgctaggattacaggcatgagccactgcacctggcttcatctgcgttgttgagcgtagctacagtttgttcatttgcattgctatatagtgttctcttgcatggc

SEQ ID NO: 425979 - DNA, 122 bp, Homo sapiens
agcatcattttctagggagaacaatgagaatctcaatgccagtagtactggataatagtgcgtattgcttctggtggcattaccctgatgatgggctgaagttcatttattagggtggttcc

SEQ ID NO: 425980 - DNA, 122 bp, Homo sapiens
tcacagcgcgtgtctcccagcacatctttcgttttcgtgtgatgacggtgactgagttgccggcgtgccctgaccctgctcactgtctctttgctcccacagaatctgtaccagaacaggtt

SEQ ID NO: 425981 - DNA, 122 bp, Homo sapiens
atgcaagaaattgctgtcccataaaaatcataattgcagtagctaaagctggggtcacttcgtgaattcaccagagactcaaagatcttttattggctctgggctgtgctcagtgtctttgg

SEQ ID NO: 425982 - DNA, 122 bp, Homo sapiens
ggggaattatcctgaaggaagccagccgacttcggactccccaggggatattgccgaaggcggaggggatgtgactatcacttcctatccggggtgggggtggggaacttgggaacaatagt

SEQ ID NO: 425983 - DNA, 122 bp, Homo sapiens
cgtgtgcctgggtgcgctggccgaggcgtacccctccaagccggacaacccgggcgaggacgcaccagcggaggacatggccagatactactcggcgctgcgacactacatcaacctcatca

SEQ ID NO: 425984 - DNA, 122 bp, Homo sapiens
accatttggtgatggcagctcttaaagtgggtttaatatgtggtccaacaagcaaaccatcgaaaacattacaacaagcagatgcatatttccctgggggaagcacagcttcatttaagaag

SEQ ID NO: 425985 - DNA, 122 bp, Homo sapiens
cgcaggagcctcccctccatggccagagccagcgttgatccttggttgttggtcctgggtcgttgatccttggtcgttggtcctgggtcgtcggtcctgggtcgctggtcctgggtcgtcgg

SEQ ID NO: 425986 - DNA, 122 bp, Homo sapiens
ctatggacaagcttcccttaatcttagcagtaacaatcccaggcaatggggcctgttgaccgatccatttgccactgaagacagtaaggctgagagagggtaagtggcttgtgccatgtcag

SEQ ID NO: 425987 - DNA, 122 bp, Homo sapiens
agattcactcaatggggtatttcgcatattttatctcccaacactgggctgtgcaggatacgaggttctggtttccaaaggagtgtacccctaaaaggagacaaaagacagcccactgaact

SEQ ID NO: 425988 - DNA, 122 bp, Homo sapiens
tccttgatttctcactccaaataaggtgagccatagagaagaggttggctgatccctcaccggactcaaatggcagttgccattggcctgagaaaggaaaaggcagtgccaagcctaggaaa

SEQ ID NO: 425989 - DNA, 122 bp, Homo sapiens
tggcgagcctctatcccgattgggagcggcaatgggcgcctcactggatcaggagcgcagcggacactctgccggatccggagggatggaagtcagcggcgggtctggactgcggcaaacag

SEQ ID NO: 425990 - DNA, 122 bp, Homo sapiens
gatggggtttcacccatcaggctggtctcgaacttttgacgacctcagatgatccactcacgtcagcctcccaaagtgctgggattataggcctgagccaccacgcccggcctcccagcccc

SEQ ID NO: 425991 - DNA, 122 bp, Homo sapiens
agtcgcagaaacatttaagcatgggctctctctcttaaccacttcttcctagggcattatcgcttcccctgtccttcaaactgggcttctctgaaataatcctcagtcctctacttcatatt

SEQ ID NO: 425992 - DNA, 122 bp, Homo sapiens
catgtagggagacggccatggcacagggctcgcctggctgcagaagtcccctctgtaacccgggaggctgagcatgttgaagaaaacacattgcctattaaaaatcacacaccttcctcaat

SEQ ID NO: 425993 - DNA, 122 bp, Homo sapiens
ctgtgagagcggggacaccacggtggaagggggcgatgtggtgtggcagcacgtcccggacgtcggcttcgcagtgttcccagtgtgagctgcgtgcgtgcttccgaggccgtttccccctc

SEQ ID NO: 425994 - DNA, 122 bp, Homo sapiens
aggaggaaatggagaattaggaaaatctgtgtacgggtggcagtgtattggttaaaagcacgagggctcgaaaacagaacgtacggctctgccactctttcggataatcttccggaagtcac

SEQ ID NO: 425995 - DNA, 122 bp, Homo sapiens
ttccagaccccgtccttgtgggtgaactcctcatagctggtgcggcacttaggcaggatgcggcactcgaagccacacatgttgaacagcaggttggggttgtccttactgtacacagacac

SEQ ID NO: 425996 - DNA, 122 bp, Homo sapiens
tttccttttgtctctgtagctgacagtgaagctgatttttcttttactttaggcttggctcgagctatgagcgttttgcaataagaagccaggcaaggctgcagccatgcaggttgagtttg

SEQ ID NO: 425997 - DNA, 122 bp, Homo sapiens
atcttgtagatgaccaatatgaacaaacagctgtctcccttcctccctccttccttggaacgtgtaatctctgaataactgattagctcaatgtcagaaatgtttgtgctgatctctgaacc

SEQ ID NO: 425998 - DNA, 122 bp, Homo sapiens
taaataaagtccagccctatcacttattatctttagttaataagaggaccctatattcaccggaaaacattacatcctgtgggtcactcttcccatgtactaccctagttccaaactgcatt

SEQ ID NO: 425999 - DNA, 122 bp, Homo sapiens
cggtagtggcccagtccctggcccctgactccagaaggtggccctcctggaaacccaggtcgtgcagtcaacgatgtactcgccgggacagcgatgtctgctgcactccatccctcccctgt

SEQ ID NO: 426000 - DNA, 122 bp, Homo sapiens
cgcgggcccaggctgtggtggttccgtaatccctcgcctggatgtcatcgccgttggcttcgaggcggaggtggagccttgttgcgtcaccctgagcaagttactttctttttgggcctcag

SEQ ID NO: 426001 - DNA, 122 bp, Homo sapiens
ccaaaggccagcaacaaggggactaactgacctcaacctggttgtccatgctaacacctccgtcaatctcagcatgctagcacctccgtcaatctcagcacagctcaggctgtttggctcaa

SEQ ID NO: 426002 - DNA, 122 bp, Homo sapiens
gtgggtgcgttcagtgcagcacccacgtgcaggtgacacgcccatgcaccgccacaaccacgctcacaccagaacattccatcatccggaaggcccgtgtctccgctccagtctgcttttcg

SEQ ID NO: 426003 - DNA, 122 bp, Homo sapiens
ggagacggacatggaggtgccggctcccctcccggaggaagcctgatcgatccccgctgccgcagagccctgcagagctcctacttaggcctggttgtccatcacgatgcgggcttggagcg

SEQ ID NO: 426004 - DNA, 122 bp, Homo sapiens
cggctccctgaggctttccacagtgtattgtgcccctggtttattgagactagagaatggcgatgacttttaccaagtatactgcttggaaacatcttgtaaacaaggcacgtcctgcacag

SEQ ID NO: 426005 - DNA, 122 bp, Homo sapiens
tgagtccaggaagtgttgttaccatctataacccttcttcatctgacacaaagtagagatcgctgaaacctagcagaatgaaaaccatccctaaagacaatgaattagaaagttctggccag

SEQ ID NO: 426006 - DNA, 122 bp, Homo sapiens
agaggtgggcttgtccaagactccgagggacagagggagaatcgctggtgcccagccagtcggtgacagagcagggattagagatggacccctgaggcttagccccacgctctcttccccaa

SEQ ID NO: 426007 - DNA, 122 bp, Homo sapiens
tttattcatcagaagggaatacatcagcctggcgtggtggctcgcccccgaccctgtcagcgtcaccagcagcgcggatccatgggccagaagcctctagggcgcctaagtcagggggtggg

SEQ ID NO: 426008 - DNA, 122 bp, Homo sapiens
ttccctgcgtccctcggctgatcctcccgaagatggggctatcggtagcaggaattgccacgtgcacaaggaagaacgcagagaccacatttcagaggccatatttcaccctaacatggccc

SEQ ID NO: 426009 - DNA, 122 bp, Homo sapiens
cacctcctgcgccgccctcccgtgccgccctggcagggccgagcgcagagcgtgcgcgctcgggttgcaaagtttcagctccggttgctgcaaaccgaataaaagagagggcggggccgagg

SEQ ID NO: 426010 - DNA, 122 bp, Homo sapiens
aattctcttctgacttcctcagtgctaactggctttgggtatctcctgcagcaaagtggccgccccgccctctcatcccctgcgacccagcacccttcttccttgccttgaggctgcgcctt

SEQ ID NO: 426011 - DNA, 122 bp, Homo sapiens
ccctggcaaagctgactaaggcgcctgaagtgacgtcattgcctgcatcacaacaggcgtcgtccggctgatagcttatcgcaggctctgaggggcgggacccaactgattgtcaaaggcgg

SEQ ID NO: 426012 - DNA, 122 bp, Homo sapiens
gctgaatttactgtcctcagctataaaatggtgtcctcggcaactggagctagatgccttcgccactttgctgaaagatatgaactgtgcccaaggtgggcggtatcagataggagccccga

SEQ ID NO: 426013 - DNA, 122 bp, Homo sapiens
gaagaaaaaaattatttaaaaggtaggggagccaagaatccacagtaaaacatcccttttcggtcatttagctggaaagcagaaacagaacaaaaaaagaagaattaagaaagcctatgggt

SEQ ID NO: 426014 - DNA, 122 bp, Homo sapiens
acgcgcaggaactctcggtgtgagggacggagcttccggctcgaggcggaagtgctcgcgcgtaaggcaggaagtctctccccacgccaatctccatggagacgggacgccgttcgagaaga

SEQ ID NO: 426015 - DNA, 122 bp, Homo sapiens
tttttttttctccttcttaaaaagccagccagcttgaggcaggcactctgctaccatggacgagaagaaagcatttcccttacaaagaacagctgggggtcatgtcgaggttccacaccctg

SEQ ID NO: 426016 - DNA, 122 bp, Homo sapiens
agaaggctatcagaaggacaaacagtgggaagaatctttccctttcacaggtgtgatatgcggctggaaataacaagcaggcctgcagtggagctgatggcgtcactccccagcacctgggc

SEQ ID NO: 426017 - DNA, 122 bp, Homo sapiens
ttaaaatcccattccttggtttattaaaaatcccaatattgaattggggtggtccctagacgcctcgcccccgggctgcgtccggggctgggcaggtggagcgcagcgccgcctccccgcgc

SEQ ID NO: 426018 - DNA, 122 bp, Homo sapiens
gcctccaagtgcccccacggggtcgaggaggactcagggttcccctggaatgcctgaagccggcttgcctcaggcagcctgaagggaagaccacacctcgtccagcataaggcggctagcag

SEQ ID NO: 426019 - DNA, 122 bp, Homo sapiens
gtaaccgccgttttgtaggacacttggggacaaccccgcttgtcctgaaatttattgacacggtaaatagtatttcctgtgtgccgaggatgcagttaaaccaacactgaccccctgccctt

SEQ ID NO: 426020 - DNA, 122 bp, Homo sapiens
ggccttttctatcccaaggtcaggaaagatgaggacagttgctggagggatgtcctagagcggctggggttttgtgcacaagcagagggcttgacctcagccaagagcacagagctgattct

SEQ ID NO: 426021 - DNA, 122 bp, Homo sapiens
cactcgcgtagggtaacctcgcttacgcccgtagggccccgctctcagccccgtccgctccgcctgccagaaccaagcccaagtgcctcagccatggcccctgcgtgaccctagacctcttc

SEQ ID NO: 426022 - DNA, 122 bp, Homo sapiens
ggctggttttcagggtcttgttcccaatcagtttccagccaacaccagggtgtcctagtccgcagaggtgtgggggacacactccataatctctacttttctttttgtgcagctgagtcatg

SEQ ID NO: 426023 - DNA, 122 bp, Homo sapiens
ctcagtgggcgtccccattggaggtcctgggttgtgtggctggcaaatggccaaggcgggcgtcccgggcattgaccgaacactgaaggaaggctgtctccccaagaagagtccgtgaccgg

SEQ ID NO: 426024 - DNA, 122 bp, Homo sapiens
tgtcaatggaagaggtgtgaccattcagccacttaaagaggattatggtgttcagctggtcgaaaaggccgcagacacctttcaggtgaaagttaatattgggccgggcgcggtggctcaca

SEQ ID NO: 426025 - DNA, 122 bp, Homo sapiens
tttccaaatttatggttccttggtaagcacggtattctaaaccagcagagcacttgttaacgtttggaggcacagtttcacccagggcgaccctgggttcttttggaaaatgccctaagaaa

SEQ ID NO: 426026 - DNA, 122 bp, Homo sapiens
gggaagtccccagacgcatttcaggtttcgtcgttttggcactgacaccatgattttactcgctctgagttcccaccaaggggagcccaccaacggcgtcacaggccctggccgtggcgcta

SEQ ID NO: 426027 - DNA, 122 bp, Homo sapiens
gagaagaataaagacaatgtagtattttacatcataaaacacctttggtgaccttagacccgtgtatcagtctaaggtcaccaaaggtctcatgtgggaaagactgtcaatttagtttagga

SEQ ID NO: 426028 - DNA, 122 bp, Homo sapiens
gtgcggaccttctcccccgtctccccacccccagatcaagggtcgcgccagctccactcacgtttctggaaaggaagggaagtgtcagattgcaccccacccactggtgtcagatgggcagc

SEQ ID NO: 426029 - DNA, 122 bp, Homo sapiens
ctccttatacctatagggatgtctagtgtctgctatcacaatttgctaattgaataggctcgatatcagtcatttccaccttagtgaaaattaaaactgctgtgtattctctccctccctaa

SEQ ID NO: 426030 - DNA, 122 bp, Homo sapiens
acgccagcagctcgccccggacacgccgtcctgagcccgggaaacttggccgtggggacgcggctagaaggaaactttgggatctttgagaaacaatagttggggaagaaggtgtgggctgt

SEQ ID NO: 426031 - DNA, 122 bp, Homo sapiens
gagaatgtttctttgccttttccagcctctagagactgccctcattccgtggcttgtggtcgccttccagtcagcatttgtgtgattctgacctttgcttctaatgacacatctccttctat

SEQ ID NO: 426032 - DNA, 122 bp, Homo sapiens
ctcaaatcttgggaatggagttgctgaggaatgaagttttaaataggtcagcttgcctaacgtagagcactccaggaggtctttggaaggaagagctgttaagaatgagtccgcttgggaga

SEQ ID NO: 426033 - DNA, 122 bp, Homo sapiens
tcacttctcagaaggatccctccatctcgggctcctagaggcttcaggcaggaggagccacgtgagagagaaaccctgcctacggtgacctccagttcctagaccacccactcggagcacgg

SEQ ID NO: 426034 - DNA, 122 bp, Homo sapiens
catgcattaacatcctcttcacacactatacacacacgcacgcgcgcacacacacgcgcgcgcacacacacagcaaaaggaaaaaagaggcagcagaaatctcagctgtacttctagccctt

SEQ ID NO: 426035 - DNA, 122 bp, Homo sapiens
tgcttttcataccactccttgattttgccttccagctcatagtttgattcttccagagcccgaactttgtccaagtaggaagccaggcggtcattcagattctgcatggttactttttcatt

SEQ ID NO: 426036 - DNA, 122 bp, Homo sapiens
tcccccttccaccaccccccatcccatctggtctgcttctccccgccccccagttgttgtcgaagtctgggggttgggactggaccccctgattgcgtaagagcaaaaagcgaaggcgcaat

SEQ ID NO: 426037 - DNA, 122 bp, Homo sapiens
cctccctccacagagccgggcagaaagggctccaccacacttagacattgagggaagggacgttttgaatggcactgttttatgtgatcccgcaggacagaaggagatttcttgaatgggag

SEQ ID NO: 426038 - DNA, 122 bp, Homo sapiens
catccagtgtccctgaaaaataaaggaggttgggcaggccctgcgggggctcgaggaattcgctaagtgagttttctggcttctggatacactttcaaagggccagagggcacgaggcttcc

SEQ ID NO: 426039 - DNA, 122 bp, Homo sapiens
caggcctcatgtgggccatgtgtgtgttttcctggaagctgcatataggacactcattgacggggagcccgtggtctggagctagtagtgagatggtaaacattatggaacaagcagccctt

SEQ ID NO: 426040 - DNA, 122 bp, Homo sapiens
tgagaggggtgatgcggactgtcaaaggtcatcccctaacggctttaaaatcaagcagtgcggggctatgatctgctaaacctactagattgcagatgcataggtcaggcctaggggtcttg

SEQ ID NO: 426041 - DNA, 122 bp, Homo sapiens
aatgaatgaatgtaagcctgaatggatggttctgacttcctgtctgcttatctgcctatccgtccaggtctgtacatctatttctgttggactatatgtgaatcctctcaaaatagaattat

SEQ ID NO: 426042 - DNA, 122 bp, Homo sapiens
aaagcccaacaagcaccggggtttcgggcctgctacccagtagggctgcctgaggcagagcgcgacggaaccgagcctacaggccacagcggtacgagaccggcccaatccaaccccgaccc

SEQ ID NO: 426043 - DNA, 122 bp, Homo sapiens
aggcttcagtgagccgtgagtggggcactgcactccagtttgggcaacagagtgagacctcgtctccaaaagaacaaaaaatttaacgtatttaaagcactcagaacagcacctgacacatg

SEQ ID NO: 426044 - DNA, 122 bp, Homo sapiens
tgctctactcgcctgaggttgaccctggtaagcggttgccgcctgcagacacggcgcatgcgagggagggtgcaggccgagactccgccccgaagggcgcggcgtgcccgagagatgcgagc

SEQ ID NO: 426045 - DNA, 122 bp, Homo sapiens
ccacgatctgacaaaagatcccaggctggcctgtgtcctgggtactccctgcttctcctccggccaacattactgggaggttgaagtgggagaggtgaagtcatggtccctgggcgtctgca

SEQ ID NO: 426046 - DNA, 122 bp, Homo sapiens
cttcagacacatttggtacatccagaaatagatccaagaaatggggtggttgagtgggtccgcacgaaatgcttgattatgtcagcaacacccaacactgtctgttttccatttgttggttt

SEQ ID NO: 426047 - DNA, 122 bp, Homo sapiens
aaagatcgctcctcccctacctctgcagaacgtgtgtgtgtatgtgtgtgtaagtgtgtgcggccacaagcctttccgaatgagtgacagcgggagcccatccctccaggagacgcgtgcag

SEQ ID NO: 426048 - DNA, 122 bp, Homo sapiens
cggcgggcttgggggggggcggtgggcggcgatccacctgggcgacgtggcagccattgccggcgcctcgagacccctccccacccggccgcccacccgccctctcgcggcgggcttctgcg

SEQ ID NO: 426049 - DNA, 122 bp, Homo sapiens
cccaggtgcagatggcttttggcagcccagtactgggcggtgattgagaagagtctgtctcgaagtcattacagttaattgtcacagagttacagactcatctgcaggcaaagagccagctc

SEQ ID NO: 426050 - DNA, 122 bp, Homo sapiens
gatgcctgaagctgacacttctccctacccctaaaatcgggacaccgcgcggaatggacgcggccactaagcggagcggcaacaaggaacaatcgcgcccctcctcgccgtagctgcgaaca

SEQ ID NO: 426051 - DNA, 122 bp, Homo sapiens
gccgccttcctggtgtcactccctccccaccattctgcacatcacagccagaaggactgccgctgcctccacccaaatgaggaacaaaatcttcctgtggttgcaaggccctccacgatctg

SEQ ID NO: 426052 - DNA, 122 bp, Homo sapiens
tgactccaaggggagtcgaagccggcccctcactcaccccctcaccggagcacagccctgcgtgttgctatctgtgtgagtatgttgatgtggggctcacgtggacacgtgaacacacacga

SEQ ID NO: 426053 - DNA, 122 bp, Homo sapiens
gttttgatacctctcctctaattaaatccaaggatctaatatgcatggcctttaggaatgcgttgttcaaacagatttgattcctgcccagaggctttttaagccactgaccactttgaacc

SEQ ID NO: 426054 - DNA, 122 bp, Homo sapiens
agaatcgcttgaacccaggaggcagagactgcagtgagacaagattgcgccactgcactccgacactgtttcaaaagaaaccagtcacaaaagaccacatgtgtatggttctatttatatga

SEQ ID NO: 426055 - DNA, 122 bp, Homo sapiens
ttccttttctcgagcaagttgatcaccacctgttcagggtcctctctgtgtgagaatactcggtgttccaaagggtatcagaactcgagtggcactgaagcaaaggagctgtgttcgagcat

SEQ ID NO: 426056 - DNA, 122 bp, Homo sapiens
gcaactgagtgacacccagcgacaaccgactggggagtggtagaagcaactgaacggatgcgtgcgagctgaggacagggcgggaggagggggcacacatgccccaggggagcgaggagaac

SEQ ID NO: 426057 - DNA, 122 bp, Homo sapiens
gcaccgttcagggcgaagcctggccttgaggggcttgtatagtgggagtcacaaaggactcgccaacaagacaactggtagtgctagggaggcctgcggagaaggagaaataggtaaaaggt

SEQ ID NO: 426058 - DNA, 122 bp, Homo sapiens
agtgatttgcagccggtcaggggcgggagttcgcggcagcaaacctgcttccccctcccacgcgccaccgcccccgccccgcccccgtccagaggccccgcccctagccgggcctggccccg

SEQ ID NO: 426059 - DNA, 122 bp, Homo sapiens
ccgaatataactcagtgaatgcccgcatctgaaaaacaagaccagccacacacacggtcacggcgtccccaccggagcacggtcacctgtgcctcatcagccacgtggccgccacagggaag

SEQ ID NO: 426060 - DNA, 122 bp, Homo sapiens
cctcactgcccgaggccggcggggccggccggccgctctgagtgcgggccgccaagcccacgcccacctggaactctagctggcccgcaagcgacgcacgcagccgcagttgccacccgtgc

SEQ ID NO: 426061 - DNA, 122 bp, Homo sapiens
ccattttctcttagcattttaaaaataatactgtattacctttgggcatctgttgttgctcgtgggaagtcagctgtcaatctgactgtcattcctttgtgagtagtcagcttgtctggaaa

SEQ ID NO: 426062 - DNA, 122 bp, Homo sapiens
aggtcaggcggggagcctcggggacaggcctgggacccgaggccggaaaccgcagaggagcgaagcctggcgggatgcagtgattggagccaaaggaaccgtcccggcctgtccaacgcggg

SEQ ID NO: 426063 - DNA, 122 bp, Homo sapiens
ataatgtccggagagaaagaaatgcctgagatgaactggtcagcattacatttctcagaacgggctgcaagagcttcagaagcaaaaggagtgttctctgtaggctcagatgctcacatgac

SEQ ID NO: 426064 - DNA, 122 bp, Homo sapiens
tcattgggcaaaactgaagatcgctgcttctgattggtcattgcatgatgtcaggcaattcgggaagcgactgcttttccttctcaagaggcgggtcttccgagagtcagccaataggagct

SEQ ID NO: 426065 - DNA, 122 bp, Homo sapiens
ggcgcggagacctggttggaccggtgggtgcggcctgggggcagagctgctctcagggcccggccaggcgggggcggggccgagaccatgttgggggcggggccaggcagcgctgggggcgg

SEQ ID NO: 426066 - DNA, 122 bp, Homo sapiens
attttaaaaaatatagttgagttgacaaaaaaaaaaattaaaaagctcagaagcttaaaacgaagagaaagcaggaatcctgtgagacaggcaggaaggctctgaagccagattcacccaca

SEQ ID NO: 426067 - DNA, 122 bp, Homo sapiens
cgtgcatttccagctcacacacgccccagccaggaggtactttaggcccgagtacatctgcggcaacagcactcggcatccagcctacagtgctgtgccctggcacggatcggatgcctgtc

SEQ ID NO: 426068 - DNA, 122 bp, Homo sapiens
gtgggaaggccccagaagcaggcgccaggacagaaatgagcctttgcccttcccaatccacgcagcgtcccgcccaggcccgggttcccggcagccaggccccctccccgacctccagctca

SEQ ID NO: 426069 - DNA, 122 bp, Homo sapiens
gagaaagccggccacgccttccagttccagcctctcgttgatagccttgtaatgacaacacgcgccaccagggggcgaccaacgtctcgcaccaggaagacggggctgtagggaggggcgtg

SEQ ID NO: 426070 - DNA, 122 bp, Homo sapiens
cacaccgtggggtccggggctcctctgtgatgccaccaaggtttgcaggctcagcggcagcgctgaggtatttgttctgcgaataaagcgctctacctatcgtggaatcagtccagctagat

SEQ ID NO: 426071 - DNA, 122 bp, Homo sapiens
gctccctcttccggtcccggggcactgtgggatatggggcggggcggctccgcccatccccgaccagccctgggatggctccacccgcgctggctccaaaatagcgagggggcggggcccgg

SEQ ID NO: 426072 - DNA, 122 bp, Homo sapiens
tttctgcttccctcatctacacagtgggaagatgccatatctcacctgtcccaccaagttcgtcaagttgttgggaagttcagatgaaatactgtatataaatttagctggaaaaacctaag

SEQ ID NO: 426073 - DNA, 122 bp, Homo sapiens
accaacgaggtggttaaaacatcagagactgcatccgattccccaagacaccaaggctctcgggatgggaacaggcaaatcgtcgtcgttctttgctgagcctgcgggctgcggtcaccaga

SEQ ID NO: 426074 - DNA, 122 bp, Homo sapiens
ctcatggggctcttgggaagataaaatgctgtagcagatgcgctgagtaagcttccaacacgcgagagctgccctgctacagtcattgccatcatcgccctggcctcaggggatgccactgc

SEQ ID NO: 426075 - DNA, 122 bp, Homo sapiens
gccggtcctgcctggcctggcctgggcctgtgcctgcagctgctcagcgcggcccttccccgggcctttgaatttgtagttccctgggcagcactgttcccagctgcctcgggccgggttaa

SEQ ID NO: 426076 - DNA, 122 bp, Homo sapiens
gagagtcacaaatgacagccttggccgtgagagggggcctcttcttactaacccccactgcgccatatgggtaaatggaatgctgaggcttaggcgcccccttcccctgctgggatccgggt

SEQ ID NO: 426077 - DNA, 122 bp, Homo sapiens
gatgacagccacgggacctgcacacaccaagagagacgcaggacctggtgacgtcacatccggccagtttccagccctgtccacagacaacccccaactactgttcccatcacaaacatttt

SEQ ID NO: 426078 - DNA, 122 bp, Homo sapiens
acacggtcgctgatcactgccatgctttattaccgccgagatgtgtggatgatacgcacacggtcgctgatcactgccatgctttattaccgccgagatgtgtgctctcagtgggcattgaa

SEQ ID NO: 426079 - DNA, 122 bp, Homo sapiens
gtggcacggccgcaagtgcctgtgcacgccgcggctcctgttctgtttgtggcagtttagcggggaggacctcgggcccctttgtctgggcctccttaaggcaaacagctgtctccctgaat

SEQ ID NO: 426080 - DNA, 122 bp, Homo sapiens
ggtcccccaattttgaggcgagaggaccggacaggtggaagaggctgcctcgttctcccgcgctgccctcgaggtcctcggcgtggactagcccgcgtcgccgtcttacctgcggggcagag

SEQ ID NO: 426081 - DNA, 122 bp, Homo sapiens
tggctgactccaccttcttgttcttcttgtgcaccaggaagttcttgacggccagggcgccggccttgcgcaccgtgccctgtgcggcggtcagcaggatgtccgactggcccggagagctc

SEQ ID NO: 426082 - DNA, 122 bp, Homo sapiens
ccacagccatgcccatggccatggccacactcacgagagcatctggcatggacatacccacgatcacgaccatggacattcacatgaggatttacaccatggccatagccatggctactccc

SEQ ID NO: 426083 - DNA, 122 bp, Homo sapiens
ctcctgcccggtttccctgctcacctccgccatattggtacctttagggcgaacgagcagcgccgagcccagtccccggatggggcgcctgagccaatcgcagccgccgccgccaccgccgc

SEQ ID NO: 426084 - DNA, 122 bp, Homo sapiens
ctgagcagggcaagagcttcatgagccgctctttaatgctgcgcttggtgctgttctgagcgtacaggaaacctagaagatacaggatcagttctgttaatgctgtctgcagagagaaaagg

SEQ ID NO: 426085 - DNA, 122 bp, Homo sapiens
cctcttcctggcggtcaggccgggacagtcgggaggaggtggctgaagggctcttgccatcggcaaccatttgttcctggtgagccccaccaaggccgggcgcctggctcagcatccatgtg

SEQ ID NO: 426086 - DNA, 122 bp, Homo sapiens
acaaggaaacagaggtgcagaaagtttaaaacttgctcagggccatgaaagctggtggtacgccagtccccagtgacatgctctttctaggtcttcccctggcaggcagcctcaaggttcca

SEQ ID NO: 426087 - DNA, 122 bp, Homo sapiens
gctggctgaggtggagtcagtgtcagtcagggaggcgaactgctgagcactggccgcggacgctccgttgcagtctcgcccaggggccggtacctgcgctcgcgccgccgggttgaaaggat

SEQ ID NO: 426088 - DNA, 122 bp, Homo sapiens
gctctgcggcctcctctctcacatctccacaggcttggcgacgccatgtttcaagggcagcgcggttggttttgcggcagcgttagccaggatctgaggcaattctggggtaggaagctgag

SEQ ID NO: 426089 - DNA, 122 bp, Homo sapiens
tcacagtgtacatcagcacagaaagtttggttggactgtactgctctagattctcaataacgctaaagtaacttgatatgatttacattttacaagtattactctgactcttctgagagtgg

SEQ ID NO: 426090 - DNA, 122 bp, Homo sapiens
cctgcctgccggtcaacgctggccatagagcctggcagtggcctcaggcagagtctgacgcgcacaaactttcaggcccaggaagcgaggacaccactggggccccagggtgtggcaagtga

SEQ ID NO: 426091 - DNA, 122 bp, Homo sapiens
ttctgtagagcaacttcgcggacttccggttcaagccggaagttgtggttaccaaggcgacgcaacgccgcccggccaggtgagcaaaactgatcttacctttggatgccggggctcccctc

SEQ ID NO: 426092 - DNA, 122 bp, Homo sapiens
cgccccctccagccccggggcgccccgggagagctcgggcccgcgcggagccctgaccaacggggagctaggcatttctcgagcgttccagatgtccgcagcgacttctgatccgctgctca

SEQ ID NO: 426093 - DNA, 122 bp, Homo sapiens
gctcccggaggccctgggactgcacccagcgcaggtgccggccctggagctggagatggacgagcagacccaggccccaggccgagcctctgagccctgacaccccttacgattcatccaaa

SEQ ID NO: 426094 - DNA, 122 bp, Homo sapiens
gttggttgccctgacccatccccatggtcccagtgtggccctggggtttttcaggggagccggctcaagcagtggaggtgcgcttagggcctgcagtagggaacagcccaggcatcttgcct

SEQ ID NO: 426095 - DNA, 122 bp, Homo sapiens
ggggctggagcccgaatggcggcggctgtgcggcgccgcggccgcgcggggaaggattcccgggaggcactctgcgccgctcctgctgcaccgctccctgacgtcctggtggggaggctctg

SEQ ID NO: 426096 - DNA, 122 bp, Homo sapiens
gcagcgaacagaccaggtgctgaagagtgatgcctatgggctctgacacccacaaatcctcgtggataacgggaagcccctcccaccccacaagtccctggagcctgagccagagtcagatc

SEQ ID NO: 426097 - DNA, 122 bp, Homo sapiens
acacatttgacgtcttccactccaaacgctctaatctagtcagaaaagagcacagctcttcgctgaaagtcccccagggttccctgcatcaagccactacagggttattgaaaaatataata

SEQ ID NO: 426098 - DNA, 122 bp, Homo sapiens
cccaggacccttgcccgctccccggcagagaattaacgtccagttcaacaatggggagcacggctttgacaacaaggacatggacatgaagaccatcttccgcgctgtgggccctagcttca

SEQ ID NO: 426099 - DNA, 122 bp, Homo sapiens
gcccccctgaggccccgccccggccacacccatgcacggaagctcctccctgccgtgccccgaggcagtcgcccaagcttaagcccagaccccagtggtgagaacatcccagctccaccccg

SEQ ID NO: 426100 - DNA, 122 bp, Homo sapiens
tcagtcgccgagggactgcggcagggaggtccccgggggcccctggcagcccctcaggatcgccgcgtcccccgggcctcacgggcatcacctgaaaggaatgcgggcgccggataagtggc

SEQ ID NO: 426101 - DNA, 122 bp, Homo sapiens
tgtgaggccgccacttggcatgaagcctccacagctccccgcctgcaggggcaaagaggtcgacagcaatgtgtgatcccagctctctgccagactgagagggcaagccgtcttgtttgctg

SEQ ID NO: 426102 - DNA, 122 bp, Homo sapiens
gagcatcagtatctctttccagttctatccaagggcctctggagatgagaccgcttttcacgggcttgttcaggagcagaggaaagggacaggggccctaaaaagcaccagtgattgtctca

SEQ ID NO: 426103 - DNA, 122 bp, Homo sapiens
cacttctctaaactcatgttctccctccactccaccctaaaccctggcctcctgaggcaacgaagtttgcctatctggaaccattttctgaagctggatggcagacggggagcctcaagagg

SEQ ID NO: 426104 - DNA, 122 bp, Homo sapiens
gttggagtgcagacccagtcagtctcagaataagacgagaagccgttggagcattttgagcggagatgacaccatgtgatttactttctagctggcttaagatttctcgatgtcattgtcat

SEQ ID NO: 426105 - DNA, 122 bp, Homo sapiens
agcagccggaaagcgaggacgaaacagaagacatacgtacgacagttcggtatccagtggcgctgaattggaaaaagaactgggtgggtggggcctgctggccagcgcggaaaaagctcggg

SEQ ID NO: 426106 - DNA, 122 bp, Homo sapiens
ttgagatcacagtgcaccacaggagcatgcctgaaagataaagccacccccgtcccactacgcctgtgaaagggacccacagagtcatgcgtccctggctgaagacctgaatagcagatcct

SEQ ID NO: 426107 - DNA, 122 bp, Homo sapiens
atcctgttcaagatcccaaagaagctaagaggaggaactggggctctgactggagttaatcggactctagactccatgctggtaacaaaccaccaggctgtactgccccccttaatgccccc

SEQ ID NO: 426108 - DNA, 122 bp, Homo sapiens
ttaataataatagctaatactgccagtcctggaatgcccgcaatggccccattcaacagacgggaacacggagactcggagaggttaggcagcccgactccaaaacccgtccttgcgactac

SEQ ID NO: 426109 - DNA, 122 bp, Homo sapiens
ctgcccacgaaagagcctgtgaggggcctccatctcgtgatgcaatgcaccaagatgccacgggcactgaaacaccagcttttgggtgcatacttcatacccacagaaaccagagaatggat

SEQ ID NO: 426110 - DNA, 122 bp, Homo sapiens
ccaggttcttgacacagcctgtgatgcctgaggagaatctgcccccggtcagcgtggccacgtcaggggctccgcctgccgggaggtgagaggacagggcctgtgggctccagcagcccagg

SEQ ID NO: 426111 - DNA, 122 bp, Homo sapiens
tcttgaggctgcgggggtggtggctcaggaatccagagtctgggcccacaggaaggaacacgtcatggctctgttgtctccccatcggcctcgacaaggacaaacatttccgctcccggcgc

SEQ ID NO: 426112 - DNA, 122 bp, Homo sapiens
ggtttgcctccaccctgacgtctgctgggtactgggcacccgagactgaaccaggggacacgtcctcctctcctcatctagatgggggtgtgactcgggggagctcagaattccctgagaag

SEQ ID NO: 426113 - DNA, 122 bp, Homo sapiens
gctacttgtttagccggtataaggccagtcacacaatcctgcaaatttcccgcaacctcccgaaggggtcaaagcccacgccccagcaaaagcacaggcgctccccgcccagcgaagacatg

SEQ ID NO: 426114 - DNA, 122 bp, Homo sapiens
ttcgtcacagcaccacgtcccggggactgccgagagctgctgcaccaggcacgttaccaacgtcatcccgctgaatcctcaagcagccccacagacactctctctgctgtaagacaggaatt

SEQ ID NO: 426115 - DNA, 122 bp, Homo sapiens
ttttataccttaggccatcaggtacagaattctaaacactagcctcacagttaaaatgtgcgcattcattaacatgatgtctgggatcggctttaaaatactttggcaaagaaaaaagaaga

SEQ ID NO: 426116 - DNA, 122 bp, Homo sapiens
aggagaaagggtgtctgctgcctggtgaggcccacggacttctgagagccaggaatcctgcggtctgggcccaacactgcatagcactgtgcataggccgacccttccttaggcctcagctt

SEQ ID NO: 426117 - DNA, 122 bp, Homo sapiens
gaccggtgtttcctctcttctcagaggcctcggggtggaggactagctgaccaactgctccgtcactttgggccagaggcagcccgggtgactttggcaagcatggcctcatcccgccagcc

SEQ ID NO: 426118 - DNA, 122 bp, Homo sapiens
tacaggcatgtcggaacacagcaggaagctgagatggcacgaagctgtccacccatcttgcgcccaggctcccttgtgaccagcggcatccaattttgaggctgctgggcggatttagagaa

SEQ ID NO: 426119 - DNA, 122 bp, Homo sapiens
ttgagcagtgttcagtgcccaaaaggcatgcttaagtatccattggcttgagattatccacgatccactcgctggttgacacttaagtcagtagccagtggtaggggatgcgggagccctgc

SEQ ID NO: 426120 - DNA, 122 bp, Homo sapiens
gggtgagggacggaggcaaactagtctacttctttgtagggaaaactaacatctattcagcgcctacaggatgccaggcaccatgctagatccttacaagcgttgttttagttaatttattc

SEQ ID NO: 426121 - DNA, 122 bp, Homo sapiens
tgtcagtagtcaaaatgttatcaaatgtaagaatagcagcttggaaaaaaaagaactgggcgagagatggccaattgaagcaacacccaccggggctgagtactttaaggtttcttgtggct

SEQ ID NO: 426122 - DNA, 122 bp, Homo sapiens
gggaatggtttgcaaatctcaatgcaccacagactagttttcaccgtggagcaggaaaggcgcctattagccaggggcaaccggctttgcagacctgggcgggggcgtagggggaggggcgg

SEQ ID NO: 426123 - DNA, 122 bp, Homo sapiens
cgtctgccccgagtgccgccgcttccagggcctgcgggcacggccgtcgcccgcccgcagcgaggagagcctggagtgggagaaaaccaccaacagcagcgagcccgagtagtcccggaggc

SEQ ID NO: 426124 - DNA, 122 bp, Homo sapiens
ggcacggagctttctcctgcgttgagaggtgttgggggtttattgtcagatgcccacatgcgttagccaaggtccttttctggttctttggaaagtgtagaaatgagagctgcactgtctta

SEQ ID NO: 426125 - DNA, 122 bp, Homo sapiens
ttgtttccctttcctttctccagtccacgtgtagactttgcgcttgatgaagaagcagatcggaagtaactgctccctcctcaaggttgtcttcagacgtcttggggacgttcctaaacact

SEQ ID NO: 426126 - DNA, 122 bp, Homo sapiens
catgagcagtgcaggttggtgtaggagaagccaaggaacttgagctgctcggggcagcctcgctggagggcctacaggacctggataggaaccatgggatgctagaaagggtgggatggaac

SEQ ID NO: 426127 - DNA, 122 bp, Homo sapiens
ccaaaggatctgatcgcccgtcactaaggctactaatcaaatttccatccaatatgctcacgcaggatttcctgatcaaacacttaagcctgcccctctgcacccccattagctaacatgtt

SEQ ID NO: 426128 - DNA, 122 bp, Homo sapiens
gcacctgggccagcggctgcggagggtgtgctgggtcccccagcagtgccggcccaccggcgctgtgcttgatttctcgccggtccttagctgccttctctcagggcaggcctcgggacctg

SEQ ID NO: 426129 - DNA, 122 bp, Homo sapiens
gcgttttgatcattgaatgagggatgtgaacgcagacctccttcctgggaggtggaaaagcgtggatttggtgttaggcccggtccccagcctggcccacacttcctgcctggtggcactgc

SEQ ID NO: 426130 - DNA, 122 bp, Homo sapiens
aagcataacagccccctagggaggacaactgaatgaaggagttgtcccaagtaggcgaggcggtatgaattcctcataaactcttttcactagttttgctctacctgcacccgcatgtccta

SEQ ID NO: 426131 - DNA, 122 bp, Homo sapiens
acaagaaggaaaaaactctgaacacatccaaacatcagaaagaacaaactccggacacgccgcctttactgtaacactcactgcgagggtccgcggcttcattctttaagtcagtgagacca

SEQ ID NO: 426132 - DNA, 122 bp, Homo sapiens
ggaacctggcgggcgtctaggaggcaccggccgcttcccaccggccgcatccctgcgtctcgcgccccctccagacctgcctctgcctgcactggcccggtccgtgtccaggtggcggggtc

SEQ ID NO: 426133 - DNA, 122 bp, Homo sapiens
cgttggttcgtggacagcaagcctcccagaactggcctaggtcgggaaggtgcagccacgcgggaatcaatggttcaggaaccggatctgtgcagcctcgcccgcagcgtctcggacttcag

SEQ ID NO: 426134 - DNA, 122 bp, Homo sapiens
ctctgccattgtctgtcaaatcatttataaactcagtctagggccaggctccgtggctcacgcctgtaatctcagcactttaggaggccgaggcgggtggatcacctgaggtcaagagttca

SEQ ID NO: 426135 - DNA, 122 bp, Homo sapiens
tttaagtctggctctggcgttgccctttgccaagcccctcctcctcccccgccggggccgcgggcaggtcgccgggctagcagctcattcgccaccaccctgtcctgccaggccggctcggc

SEQ ID NO: 426136 - DNA, 122 bp, Homo sapiens
cagcacagggtcctccctggcccaggcgcccggtggccgagagcctgcccgcgagctcaacgctgctcaacggtctctgtccttggctgtggctcctgcgctctggctgagccatgttcctt

SEQ ID NO: 426137 - DNA, 122 bp, Homo sapiens
ccatgccgtgaagacttttaaacgccaaactgaggcgtcggaactttgctccgcgggcatcgaggagccatcgaaggttctcagcaggtgagtggcctaactggattggtcactgcagtgat

SEQ ID NO: 426138 - DNA, 122 bp, Homo sapiens
tcatttttaagatggttctgattctacacaatgttaaatatgcagaaagctacaattgttcgggtatcttggtggcacttctcagatacatctctttgcatgtcagaaatcttatttgacta

SEQ ID NO: 426139 - DNA, 122 bp, Homo sapiens
ctggattttctgggtgtgtgtgttttttccttcctcctccttcttttgggcaacgtggctcgctggatttcagcaacacatgatagatgcccgggactgcccttcagaagccaagcttggat

SEQ ID NO: 426140 - DNA, 122 bp, Homo sapiens
gctccgtccccacagtgcccagaccccgggaagtttgtcagtcagcaccctgatgccagccgattctcaaaaagccaggaggatccaagcagatgatttgccagacggtactgcagcaatgg

SEQ ID NO: 426141 - DNA, 122 bp, Homo sapiens
tgtctctaatgaggaggagcaagtacctggcgagtgcctggtgagagcccggtgagtgcccggtgagtgcctggtgagtgcccgcaagtgcccagcgagtgcccggcgaatgcccagtgagt

SEQ ID NO: 426142 - DNA, 122 bp, Homo sapiens
gacaacaggcagagatatacacggtcatcagctcctcaaacttgattttattgtaatcatcgccattggtagtgaggatttgtccaatttggtttctccatgtttgactagtcctccccacc

SEQ ID NO: 426143 - DNA, 122 bp, Homo sapiens
agccgctccgggcgagggaccaagtggccacactggccgcagagctgccctgcccggcggcgtcagtctgggacgccctgcacgcctgcccctgccaccaggctggcttccttctgagctgc

SEQ ID NO: 426144 - DNA, 122 bp, Homo sapiens
cacctaacatcctccatctagtctccaaactgaggctgtggccctgcagagagcgccacccggaagccacttttatagaagcttttacacacaatgcttgatttttttttttttttttccga

SEQ ID NO: 426145 - DNA, 122 bp, Homo sapiens
gcaggctgccctccgaaagcaccagcgacaaaccctgtggcagacactcatgagctgggccggctttcggcagtgcaggcagggtctcaccctggccccgggagcacacgcatggtgccctc

SEQ ID NO: 426146 - DNA, 122 bp, Homo sapiens
tcttgaagtagaccctggagaggtcttccaggcttgggctcagcacgcgagcacagggagcgggggtgccggcggcggaggcgcgtacggcccgagcagcccccagcccccagcgcgcacac

SEQ ID NO: 426147 - DNA, 122 bp, Homo sapiens
gtatatttctagtaataaggaaagtagtcatcagagaggctttgccctaaagcccagaggcgggctcttcttgaaaagagcctctgaaacagtaagctttcgctgggatcagttccactggg

SEQ ID NO: 426148 - DNA, 122 bp, Homo sapiens
ctcccctggaaaacgaaggtttcatgaagcaaggaaggtctttactgtcctcatccgaaacgctgaggcatctgtgatgtctgctgtaagtgccaccaggctctccgctgaaatctcgcaac

SEQ ID NO: 426149 - DNA, 122 bp, Homo sapiens
ctcaggagcatctggtgagccaggtcactctctgggtcttacccttggcttttctcattgcggaaactgccagacagcggtggtcagtgcccagcctgaggggatggcttcaaatggaggta

SEQ ID NO: 426150 - DNA, 122 bp, Homo sapiens
tgaatcggactttttggccatgtgcccacaaccaacatggagccctgagggtttcctgcccgactccaagatggcgatgcgactccctttgccctcacggcccaggcgggcgggtcctgccc

SEQ ID NO: 426151 - DNA, 122 bp, Homo sapiens
ccgcgggcaccgggcgctcgcaggcgccacacctctaggctccacgccggtgcgggtgggcgggggtgtgaccagattggtggaattcgtctgcttcgcacagattttgtgggctgaaaacc

SEQ ID NO: 426152 - DNA, 122 bp, Homo sapiens
aagcaaggggagctttctggaagccgggaggtgggggccggtgcagcaccgggctgggggcgccggggggcgcatcatcaccacgaatagctgtgctggctccaggagagaccctgaggtgc

SEQ ID NO: 426153 - DNA, 122 bp, Homo sapiens
gtggctggagcaagaaagatgtttctgtgtattctgttatgggaacagagtcatttatggcgtgcacattgaggcacgacccatgatgttgaacgagcttggttttctcaaccacttcacat

SEQ ID NO: 426154 - DNA, 122 bp, Homo sapiens
ggctctgtgctgctgcctctgctggctgcctatttatgtccgcaggtgttcccgtggaggcgagacgcggccgccaccccctccccagtggctccccaggagcccacggccgccaggtcccc

SEQ ID NO: 426155 - DNA, 122 bp, Homo sapiens
gaaaccaaatgatggtgagctgtattatgatgacacaactaggctcacgaccagttgagacgtgctaaaataaccctcttccaagaggtgagtgtgggagacagaataacggccctcaaagg

SEQ ID NO: 426156 - DNA, 122 bp, Homo sapiens
cgacgattaggatgaagaaggagtgcccagttgctgccaggcctggagatactgtggcatcgcgttggttcttagtgctggccctgtgggtggggtagggagccgacaatcctcaccacgca

SEQ ID NO: 426157 - DNA, 122 bp, Homo sapiens
ttttagtccgcccgaaggaggtggttcctttctttcttttttttctctcttttatcttgccgttttctctttcttctgaacatttttaaagactttgttctttcttcattccctgctgtagg

SEQ ID NO: 426158 - DNA, 122 bp, Homo sapiens
cgcgtttgcattccttcgccgggcaggggcgacaacacccgaggccgcgcccctccagctcggccctgccacctcattgtcttgcctacttcttgggccgccctgtggcgccgctgtggtct

SEQ ID NO: 426159 - DNA, 122 bp, Homo sapiens
cgccggaaaaacgcagcccggagggcggggctggccaaggattgacgggctctgggcctgcgcatcggagcccggggaggtcggctcctgtttcctctgggtccgccgcaggctcccttccc

SEQ ID NO: 426160 - DNA, 122 bp, Homo sapiens
ggaaacgaaaccgaaagcggccccgggccggcgaaaaacagaacctgtgcgccctcgccacgcccccggtccgcagctgagcggctgcgccttccgcctcagggcccccagctgtgaggccg

SEQ ID NO: 426161 - DNA, 122 bp, Homo sapiens
cttgaaggtgggagacctgtgagctggtacactcagtgaggacggctccatgcacagggacgaagacccccgaggagaccatcgaaggatggtgggcagtgctgcccacacggatgcccaga

SEQ ID NO: 426162 - DNA, 122 bp, Homo sapiens
aggtgggctgatggacatattaattggttataagtgttatttaacaagagtaggcttcttcgtatatgaatacctgtccaaggaaccaggatacttatgacagctgggcaggaaccctgatc

SEQ ID NO: 426163 - DNA, 122 bp, Homo sapiens
cgccggagaaggacaggttccatctgccctcctcctctaagaagcccatggcgggtggaccgggcggggtgatcgggacgaggaagggtcactccgtgacccgggatagggccgggatgcag

SEQ ID NO: 426164 - DNA, 122 bp, Homo sapiens
acatttttgttttcttcagccaccaagtttgtggtcattgttacagaagccacaggaaaccgagataggtaatgagggaggtccacaggcaggtgaggggcctggaccacgaccaaggtggg

SEQ ID NO: 426165 - DNA, 122 bp, Homo sapiens
aggcaagagctgatttggcctctgtgctcccctccgcaaggggatcgttttctccaggtacgtgaatagcccggagaggtttggccgttagctgccatctgccaggttggaaagaatgtagg

SEQ ID NO: 426166 - DNA, 122 bp, Homo sapiens
tgtggttgaaacttgtaaacaaactcagactggtttgtcttccttatcctaagttggtggcgcatctgtttcctttatgggtgatagcagctctttgtcaatcacgtgtcatctgccgtaca

SEQ ID NO: 426167 - DNA, 122 bp, Homo sapiens
gccgcatctaaccctgctgtaactggtcgcaagtcacagtttgctcatctataaagtgagcgaaagtaatgtaatctttattgggagtagggaacatgaaggcgagtcgatacagtaagtaa

SEQ ID NO: 426168 - DNA, 122 bp, Homo sapiens
tctagaggttacccagtgggtcaggggaaggctcctcaaaggaatttcctacatgcgtatcggtattttagtcaggccatccaaaacatgccttccaaattcgaggaaaatctcgtgtggag

SEQ ID NO: 426169 - DNA, 122 bp, Homo sapiens
gttgtttgaggggaaatggacgaaagagaagggagcggccacgcacttcccagggcgccccgcgagcccttcaattttccagctgcctgacaacgcccacggcgcacccagctctgaggggc

SEQ ID NO: 426170 - DNA, 122 bp, Homo sapiens
tccacccttctctttttgaaaagtccgtaaattgactgaaaatgacatcccccacccagacgaagggcgatagggaagcaaatagtttccacagggagtagagatgtagggaggcactgggc

SEQ ID NO: 426171 - DNA, 122 bp, Homo sapiens
agatttgggctctgaagcccgacggcccttcaacatgtctgcgcaggataagtgagctttcggggagtgaaggggcacatcttgttcctaccgacggtgcttctacccccaggtaatcttag

SEQ ID NO: 426172 - DNA, 122 bp, Homo sapiens
cccagtttgctcgtttcttctttaggcattaggcttagtgattctcgccagagccatctacgctttcttttccgtggtctaaatccctaagatttccttggtctgctgtgtttattcatagg

SEQ ID NO: 426173 - DNA, 122 bp, Homo sapiens
agtagcagtatgtgtttaaaaagaataacgtggggcccttgccttaacgagtgtaaaacacgccgcccggctgccatcgttgaaacagcatcacatgtagatgacccgtgacgaaccgacca

SEQ ID NO: 426174 - DNA, 122 bp, Homo sapiens
acgccctgcggtctgcacacccctctcctttagagatttcttaaagctgcggaagactagcgctggctggtctgacctctccgcggtagtggggttcagaagggcctctgcttcccctccgc

SEQ ID NO: 426175 - DNA, 122 bp, Homo sapiens
ggctcggtggcccagcctctcccggaggtctctggcctcggccagagcaataaggtggatcggtgcttcccacccttccagctccgccctcccgaccacattcctgagaagccctactcccg

SEQ ID NO: 426176 - DNA, 122 bp, Homo sapiens
aataagatttattgaaatgtgcaatcatacaattgcccctgctttctgatgtatctgagacggaactcctgattcctagaccttcccccaaattgtccaaatcctataataggttcattcta

SEQ ID NO: 426177 - DNA, 122 bp, Homo sapiens
cagcagggatacaggccagtgtggctgcgtgaacggagcgagaacatgagggacgagaggcgagttgtacttctcacctaggagctccaggacagcccctgctatccgcaatttgttctctt

SEQ ID NO: 426178 - DNA, 122 bp, Homo sapiens
agcaaaacaggtgctgcttcacatgccctttgctaagagtcctggagtttgaagtctccacggccgatctaaaagcaagttcctgaggaaggagccggaaagttctctgaaaccagtagtgg

SEQ ID NO: 426179 - DNA, 122 bp, Homo sapiens
caaatcactcattgtttgtgaaagctgagctcacagcaaaacaagccaccatgaagctgtcggtgtgtctcctgctggtcacgctggccctctgctgctaccagggtgagtacatcagtcat

SEQ ID NO: 426180 - DNA, 122 bp, Homo sapiens
acgtccccgcctccccggggatgcccaagttgcacttgcagaaagtttgagcctggcctgcgcgcgcagcgccccgctcttccttgacgcacctcgcggagcgcgcgccggcacgcgggcag

SEQ ID NO: 426181 - DNA, 122 bp, Homo sapiens
agcctcatggccagaagcattttagccaactcctggtctgctccactctcttccttcttccgccgctggggcctcaccacctcttcctcctcaatcacccggtctgcttgaatcaggtcagc

SEQ ID NO: 426182 - DNA, 122 bp, Homo sapiens
ggagacatgtatgagctcagcaggagggaatgcagagtgtcactggtttagagaggaaaacgatctgctgaaccaagaccacagctgggccatcctacaaaagggcttggcaatgtgtccag

SEQ ID NO: 426183 - DNA, 122 bp, Homo sapiens
atgtaatacagcaaggtcacaggataaaagtctacagaaataaattatatctccaaataacggcaatgaacatgtggatagtgaaatttaaaatgtaataccatgtatttcctaatagctag

SEQ ID NO: 426184 - DNA, 122 bp, Homo sapiens
gaagtcccacctttttgtgccagttcacttttgggagctgactgcagttgcagaaggtagcgggagggttgggctgcctggagttgcgtgtggccaccaacgcgcttcgcgcctcgtggcgt

SEQ ID NO: 426185 - DNA, 122 bp, Homo sapiens
cgagccgccgcggcggtcgcctggaaaagtttccccgccagggctccccagggtaagtagcgagggcgcggggcccggggcccggggaaggcaagcgcgtctgggagccgggcccgagggga

SEQ ID NO: 426186 - DNA, 122 bp, Homo sapiens
tcttgccaactctgagtatcttaggaaggaagagtgatgatgaataaaccacaggtgcctcgctgtgccaactgctgcaggatggattcaggctgggcagaaaaaacggcttcctctcccag

SEQ ID NO: 426187 - DNA, 122 bp, Homo sapiens
ctagagggagaaatcctagaagagataatgtgggaacaccaaattataaaactaaaagatcgttgatggtggctaagttttctgttacaggatgcactccattgcactttaggaaaaagtgt

SEQ ID NO: 426188 - DNA, 122 bp, Homo sapiens
ttacgagagaggaccgcggactcttttcggcgacggcctcccgtgtatttttgccggtcgcgcggctcctgtcgccactggcgccagcgctgccctgcctacgctcctccggcgctcagcgc

SEQ ID NO: 426189 - DNA, 122 bp, Homo sapiens
tgtccttctatatatttctttctttgagaaagtgaacccttgaaggtgtacttcgtatagcgagggtctaacatattgtcattacatagttgtgcatggtgacaaatttggaattaatcaat

SEQ ID NO: 426190 - DNA, 122 bp, Homo sapiens
aacccaggaccaagtgcttgggccatggggagccagggcaccagggcacagggctggcagcgtggagtcgaggctgctccagcccaggctgcccgcgagcggccagggcatgtgggccacag

SEQ ID NO: 426191 - DNA, 122 bp, Homo sapiens
ctttgtccaaaaatgaatgagcattaacaataattttgtaacatatgcaaaatgctccatcgtcatgtttcacaaccagcttagagtttgcggggaggaaggtgcattagttaaagttgtgt

SEQ ID NO: 426192 - DNA, 122 bp, Homo sapiens
aggtaaggaaactgaggcacacgttggaatgactatcttgggtggcttcttagcagcagacgtgatggtgaagcctgtgtctctgacttccagcattgaatgaaggtgctaaagggtggggc

SEQ ID NO: 426193 - DNA, 122 bp, Homo sapiens
aggggaacgttgactgagaacgaggaggaagcgagttgtagatctagccttgtgttcacacgacaccaggctggatatgagtcactcgcagggagctcagcttggtgaggtcctctcgctgt

SEQ ID NO: 426194 - DNA, 122 bp, Homo sapiens
agcatgtggggcggggggcacagtggctctgagtctcattcccttgagctcagggagaggcgggagctgacctctgccccaggaagcagagcacttgccagacattcagtagcaggggcagg

SEQ ID NO: 426195 - DNA, 122 bp, Homo sapiens
gttttctttcaaccaaatagtcccctcttaacttcccctttttaaatgtttttgctccagcgtccactccctcccccccgggaagaaacctctgagtctttcctgcctcctcggtgcccatt

SEQ ID NO: 426196 - DNA, 122 bp, Homo sapiens
tcccgactctctgctgctggagcctgtgtgcaatacaacctcatcccagtggccaggcttcggggcctcccctgggagggccggggaggagtggttcacagggagatggcaggaaactctgg

SEQ ID NO: 426197 - DNA, 122 bp, Homo sapiens
tttgagcagaacgctctaaaacacaaaaagtaagtgttgacggcaaaaagctgacattcccgtagtcggcaggattcgaacctgcgcggggagaccccaatggatttctagtccatcgcctt

SEQ ID NO: 426198 - DNA, 122 bp, Homo sapiens
cggattccccactagtgggcgccatttgtcttcttattccttccgtgcagctcaccttaccgcaaattcatttataaatacaaaaatcagtgaaaggtgggggaagaagtgtgcaataaaaa

SEQ ID NO: 426199 - DNA, 122 bp, Homo sapiens
gcccggaaccaatgatccgaagccttctttcctgatgggattctttagcgaggacactaccgaggcgcgacttcctgacgcgcatccgatccgggaaggcgcacttccgctccccagttgcc

SEQ ID NO: 426200 - DNA, 122 bp, Homo sapiens
ttcctttcttccttccactgtggaggtggaaaatttagctaggagaagctgggactgggacgttccaggaaccagacagagagtgagttaaaggcacagagatgaaaacgcggtatgggaga

SEQ ID NO: 426201 - DNA, 122 bp, Homo sapiens
ttggtggaggggtgcaggcagatttagttaggctctcccccatccctgacacactggagccggggcgggagcggggcttgtgaccactccggagagctttgggggcccctgctctgggactc

SEQ ID NO: 426202 - DNA, 122 bp, Homo sapiens
gtagcaactccaggaccagccccaggtatggctgagggttagccctaggctcctccgtagcgccaaggctgctctggcggttgctgcagtaacctcggccacaacaaacgctggagaagacg

SEQ ID NO: 426203 - DNA, 122 bp, Homo sapiens
atcggaagcaagagggcggggccccgtgagaggcgatggattgctccagtccgttcccgacgcactgtgcgcatgcgctggtcctccgcggaccgttcgtgctgcccgcctagaaagggtga

SEQ ID NO: 426204 - DNA, 122 bp, Homo sapiens
gaatttcggtccagattgtttcttgagtcacttggaatactcggggtgtaggaaataggccggacaggcacctggggtggtatgtctgagtaaatgttcttatttagcttggaatcaaaata

SEQ ID NO: 426205 - DNA, 122 bp, Homo sapiens
gaccaacgaaggggccccgggaaaccccagatatgcaacgcctcccccgcccgccaggcccggacggcctcgccctcttagcaacctacctaaaacggcctcgcagtggccccaaccgcgca

SEQ ID NO: 426206 - DNA, 122 bp, Homo sapiens
ttccccgagcgggtggccctgtttttctctccctttctcgctcctactcctgttctggcacgggccccccggctcacctggaaggagtggaagaggtaccagaaggcccaggcgttgatgac

SEQ ID NO: 426207 - DNA, 122 bp, Homo sapiens
cgggccgcagctccagatccagctgctggtcaaaggcgtgcaggcggaggcgcgtggtcccgtgtcccggggcgcgctccagctccggcaccactagctcctcgtcctcctcggaggggcgc

SEQ ID NO: 426208 - DNA, 122 bp, Homo sapiens
gcgctgctgcccagctgctaactgagagaacgaggcagtgtattgtgtttcgaatgcaaacggtcatggacccaagttaacctgagtttgctctgcaggattccgcgggggccttgccctgt

SEQ ID NO: 426209 - DNA, 122 bp, Homo sapiens
gaccttagccaaactggttaaccaatccaagtctcagtttcttcatctgccaaaagggaacgataaatgtatacttgatacagatgtgagggtgaaatgagctaacgtatgtgaagccctca

SEQ ID NO: 426210 - DNA, 122 bp, Homo sapiens
ctctgcaagctccatgaggacaggcgtgaagttcaggctacatgcctggtacgtaatagacgctctgacagacatttgctgaatgaataagttagtcactacggcgtttgtgggctttaaaa

SEQ ID NO: 426211 - DNA, 122 bp, Homo sapiens
cccatgttattatcccgctccctgatgaattcaacggactgtttctgggtgcgtgtaactcggtagctctcaaaacctggtcccccatgtggcagcatcggcactgtgtccgtccacttgct

SEQ ID NO: 426212 - DNA, 122 bp, Homo sapiens
tcaacgcccccagtgcaacgtcttatgtgactaatcactgcaggactgcatcacggggaccgggcatttgacagtggcagagaacagctagctcggctgcaaagctcacgtgctcacatttt

SEQ ID NO: 426213 - DNA, 122 bp, Homo sapiens
caggtgccagcccaccagggtgcctttccacagtgtgcagggggcatccacctgaatgcccgtcttcagtgcatcccctggccctgcacttgctattctgtgcagcaggagtttcaaactgt

SEQ ID NO: 426214 - DNA, 122 bp, Homo sapiens
aagaaaggcggggctgggccgggggcgagagcgcggggaactgttgggcctacgcagcgccggggcccttcattcctgtgggcccctgctgcggcgggcacatttctcattcccgggagctg

SEQ ID NO: 426215 - DNA, 122 bp, Homo sapiens
gaaggacccaaggattttgataagctgaggaagaaatctgtaatacagcattaacctgtacgtccctgccagccagagattataaacttgtacaggctcaggcacagcccccagggactttc

SEQ ID NO: 426216 - DNA, 122 bp, Homo sapiens
ggccgcagggcgcgccgcctggacccctccgaaggtcaggacccccggcccagccccggccgccgcgggcccagccagccccccaggccccacctcagcgcggtcccctgacctgggtcctc

SEQ ID NO: 426217 - DNA, 122 bp, Homo sapiens
tggtcacgtgttagcagaagtcttataaacttccgggctgtcctatcaggctaagatatacgggggtgcgcctggagcctcccagaacctactttgtcttggccaagttagctgggactcct

SEQ ID NO: 426218 - DNA, 122 bp, Homo sapiens
agagtaaaggcatggacgagggtaacaacatcgcttgtgtttgcactgagcttttcaccacgtgaaaaccccctaaaaagaccaactggactagaaaggcggatttgtgttgaggaaacggt

SEQ ID NO: 426219 - DNA, 122 bp, Homo sapiens
ttagtattgatgctctaggcacaaccttgatcccaacttatacttactaattttagccagcgccctgctctgcccttattttacacagtttacttaaatgaagagcatattctgatgactac

SEQ ID NO: 426220 - DNA, 122 bp, Homo sapiens
ttccctaatcaggaagcaaacccaagctgtggtggaaattttaaccaccagaactattttcggtcagattttgctcttaatttagtcaagataatttttaaggctagccatgaaactattag

SEQ ID NO: 426221 - DNA, 122 bp, Homo sapiens
agtggtacactgttattaactgaagtccagagttgacactagggtttactctgtgttttccgttcactgttttccattctctgcattttgacaaattacagtaccctacagagtactttcac

SEQ ID NO: 426222 - DNA, 122 bp, Homo sapiens
agggtcgctgcagagtcatggcctatgaggaagctctcgaactttccatgacccttgaagcgctttcaaaggcaaaagttccgggcctgtgaggaggctccgcgatggcgggcctggctgag

SEQ ID NO: 426223 - DNA, 122 bp, Homo sapiens
cttcaagggtgaggatgaagacagagttcttcccgagcatgcttgaccacaggtctgtttcgttgctacagaccttgaggaatgaatgacccatggaatgtgctttgagaagtggaagatgg

SEQ ID NO: 426224 - DNA, 122 bp, Homo sapiens
cgagctggcctgagggccctgcgctcaggtggtgccgctgaccgctctctcccttcagcccgggggtccaggttgcagcaggcccccagctcacactgaaactccctcctacagcctggctt

SEQ ID NO: 426225 - DNA, 122 bp, Homo sapiens
ttgtcttctgtcttccacatttagctgaatgcttcagatgaccgaggaatagacatcattcgaggaccgatcctgagctttgctagcacaaggacaatatttaagtaagaattatttgtgta

SEQ ID NO: 426226 - DNA, 122 bp, Homo sapiens
ttcctgatgcaaatccacctcatccaacagctttttcttgacttttcttccagcagcttgcgctaaatgaattcatcaagtgactgaagacaaccagtgatggacggggtgaatgatagctc

SEQ ID NO: 426227 - DNA, 122 bp, Homo sapiens
ataaatgcacacatttcctgaggcctccaccctcccgggttaatggggagtggagacgcacggctgtccggctccgcagcgccacctggaggcttctaggtcctagctcggtgagcgtcttt

SEQ ID NO: 426228 - DNA, 122 bp, Homo sapiens
cctcctcccgcgcgccccgctttgtgtccgtggtctcccgcgcgggacggagggactggccggagctggcgctttctcagcactagatctggactccgacccggcgccaggtgaggtggggc

SEQ ID NO: 426229 - DNA, 122 bp, Homo sapiens
aggacactggagaataagacaagacaaagtcggtgtcacagccggggttcagcatcccaccggtgcccacactaggccccacacaagaaattacacgacagttacagcgttcatgtgaggtg

SEQ ID NO: 426230 - DNA, 122 bp, Homo sapiens
cagttacatagccgcagtgccattgatcaagttatggtggaataacggaatcccagcatccgaagcagcgacatggtgggggcagaaaccagccccagcaccgcacgctgttcacagagcaa

SEQ ID NO: 426231 - DNA, 122 bp, Homo sapiens
cgggccccgctttccttttcaaggggcgggttgtagatcgcgcgcgcaccctggagagcccgctggtttgtgtgaggccctggccctgtgggtagcagaacactctgtctcgctgtgagcaa

SEQ ID NO: 426232 - DNA, 122 bp, Homo sapiens
cgagagaccagaggatggctgacacgaaggggcacccgagacagcgcctgggctttttcccgcccgcggttccaccgctctgaaaccgatttctaacagagaggtaattggggccctgcggt

SEQ ID NO: 426233 - DNA, 122 bp, Homo sapiens
tagcgggccgggggtaggaggagccggctggaattagcctgcctaatgcgcctgtcagtccgggcgctgcgctgcgttcggcccgagctgtttgtaaattacattagctgctcctttattgc

SEQ ID NO: 426234 - DNA, 122 bp, Homo sapiens
cctggtcttccttcccggcttaaggagtaccatgtacttagccacaggcagaatagctttcgatgaccccatagcactttgtttcttcgccttgatttgcactttacaatgtccccagcccc

SEQ ID NO: 426235 - DNA, 122 bp, Homo sapiens
aagaaggccagtggtagtgacagacctaagagtgttctgtccctcttaggccccacgacgcgcaccgctgcgtgctgcctgggagctcattcttaggtttttaggtctttaaagaggctgtg

SEQ ID NO: 426236 - DNA, 122 bp, Homo sapiens
cgggggcatcgcccgccaccacgggggcagctccgctccgcccgcctgcgctgccggctccgcagcagccaccgttttcagtcgccgccgggtgcaaagcccaagcttgggccggcgggagg

SEQ ID NO: 426237 - DNA, 122 bp, Homo sapiens
gtgagccatcttccccctcctctcactgactgacaacccagccgggagagccaccactgccgccagcctctctgacaggcacgaccagggacccgtcctcaagcagccaaccaccaccgccc

SEQ ID NO: 426238 - DNA, 122 bp, Homo sapiens
ggtcccggggcttccggcccttctgcggctgggagatctcagggctggaagccgcatggccgcccgcctgccctgcggtgtccataacaaccgcgggcagccgggctggcacgccctcctgt

SEQ ID NO: 426239 - DNA, 122 bp, Homo sapiens
tcataacacctttcaatggaaatgttattattctcatttttactgctaagcaggttggttcggcaaagctgtgtggccacagagcttacagtgccagagctgagcctggaatgcaagtctgg

SEQ ID NO: 426240 - DNA, 122 bp, Homo sapiens
gctttgaatttcgcttcctcaattaccacagaaaatgaggtgtctcatcagaccctggagcgagccctaaagcagcacggacttgcttttcacaatgactctgcacattccggagaaggatc

SEQ ID NO: 426241 - DNA, 122 bp, Homo sapiens
cactcttccgtggctctggaacagagcattgagttcattagggactctctgatttccattcgagatgagaaggatgggatcaaccggtgtctgcctgacggccagtccctccccccaggcag

SEQ ID NO: 426242 - DNA, 122 bp, Homo sapiens
agatttcacttgataaatagatcacatatagtcaatgatcaggaagaggtggaaattgaacgggctttaggagtgaactccacatactattttaagtgtttctgagcatggatttatacaag

SEQ ID NO: 426243 - DNA, 122 bp, Homo sapiens
ccttaatgttgctaatcacgtgtggttaaattgctcgtaaattccgaacaaaacaaatagcgacctgtgttacactgtttcttggtaactgggaaagttactggtggcttgaagtatacgca

SEQ ID NO: 426244 - DNA, 122 bp, Homo sapiens
cctccgcaccttcggggcaggtggccagaggcagcgttgaaagcgacttgcccaaggtcacgcaggtggcaccggggaggcgaccagacccaggtctttcgacgccgaggccagctgccaac

SEQ ID NO: 426245 - DNA, 122 bp, Homo sapiens
tgactgcagttatgcaccagagaggacactctgaagggcaaaatctcatatcagcatcggcgtgacgtcattaggatgctctcaacacaagctggagattgccgaatggagctcttgtatct

SEQ ID NO: 426246 - DNA, 122 bp, Homo sapiens
attttggggggcggggctgccgaagaggccgggaccagggtccccagcttgggcccgtgacggctttttcatgccctagttggggtctccagggcccgcgcgggcattctggaaggttctgc

SEQ ID NO: 426247 - DNA, 122 bp, Homo sapiens
gactcagcgcgttgtggacgggctcatctacaaccgggaggaatacgtgcattttgacagcgcagtgggggagttcctagcagtgatggagctggggcggcccataggcgagtacttcaata

SEQ ID NO: 426248 - DNA, 122 bp, Homo sapiens
gcgggggccgagaagccccgctgctggctctagggttggagctcttccagcataggtgtgcgtggggaggactgaccctcgcacttactgtgggggacgtattgcatgtttgcagtcttaca

SEQ ID NO: 426249 - DNA, 122 bp, Homo sapiens
gaagggataaaagaaggttcaaaaaatattgcacacctgtagaataggtgtgacacaacacgcatgcatgtagacaactttatgtaaaagacttggaggtttcagctgacagtttaatgatt

SEQ ID NO: 426250 - DNA, 122 bp, Homo sapiens
cgacgatgatctcgtcactgggcgtaagtggtaatgtctgtggtacacacacaaagcacacgctattcggagtcctagacttctggtgcccctagcgacggggtacacccaccacgccacag

SEQ ID NO: 426251 - DNA, 122 bp, Homo sapiens
aaactaaactgagagtccaactttaaaaagttgggggtggtttgtgttggggaaggcctgcgattggactgcagaatccactagggaggaggaaagcaaaagtaaaaaggaaatagctgggg

SEQ ID NO: 426252 - DNA, 122 bp, Homo sapiens
ggtctgggaggccagatgaagggagctgctcggctgagctgcggaccagcgcgagagcagcgggcagtggcggaccagcgccagggcagggcaggggtggacagagggctctccccaccctt

SEQ ID NO: 426253 - DNA, 122 bp, Homo sapiens
tcagggcttaggtctgtgagacagtgacttgaagaagtgatttctccctgagcactggaccggcaatgtgagtgccttgggcaatggtggtggtggtgggttgagcaatggatgcctggaca

SEQ ID NO: 426254 - DNA, 122 bp, Homo sapiens
ctgtcccctgggagtccaaccagctctgaagcccctgagcccattcctttgacctccttccggccaaactggccactcacccgtgccggaaaacaggcaggtgagtccttgtcactgccaac

SEQ ID NO: 426255 - DNA, 122 bp, Homo sapiens
atgctgatatagagctagaaaaattattcaaagtggatatgttattgcttatgagccagtcgtgtcatgttcatgagtataacagaaggaatacagggctgggaatcagaaaatggagaagt

SEQ ID NO: 426256 - DNA, 122 bp, Homo sapiens
agcccgcaccgggaggccgagggctcgggactcgagccttctgagtccgatttctttccacgtgcagagggtagaaagtggccagtcagggcgtgattgattgcttaaggaaagagaagcta

SEQ ID NO: 426257 - DNA, 122 bp, Homo sapiens
ctttttcttctcatggacaatgtctccagcgctctctgcagccggcgtctgagggtgctgcgtctgcattctcgtgtagacgttttcatttgctgggtttctcaccgcttatactcacattg

SEQ ID NO: 426258 - DNA, 122 bp, Homo sapiens
aggcagtggcgcggaccgcctgcgagggcgaggggggcgggccagacgagcggggcggggcgagctgctgcctaatcctttgtctgccgcgttccagcccttcccggaagcagcgtcttcct

SEQ ID NO: 426259 - DNA, 122 bp, Homo sapiens
tccgctcgaggaagctcaggagagggcggcggcggctgcagggactgggagagcgcgccccgctgcgaagaggagttacctcccgaagggtcccagaggcttcttcctgcttttcctgatat

SEQ ID NO: 426260 - DNA, 122 bp, Homo sapiens
ctcccgggctccagcaatcctcccacctcagtctcccgagtagctgggactacaggcaaacgccactacacacagctgatttttgtattttttatagaggtggggtctcgccgtgttgccca

SEQ ID NO: 426261 - DNA, 122 bp, Homo sapiens
cctacactaacccttgcgcctcacgaccagctgcattagaaaccaccaccccttttctcacgggagaaacaccggggccagataggtcaaatgacctcaccaaggtcacaatggctgtgaaa

SEQ ID NO: 426262 - DNA, 122 bp, Homo sapiens
gatgcagaaagaggggaggaaggcagggcccactgaggagggaactccaaggtggacgaccgtcatgccttgcctcagtccatccttagcaactgcaggcctgatgattttcaccaaccttc

SEQ ID NO: 426263 - DNA, 122 bp, Homo sapiens
ccctgagtttctgagccctatctctcatgtgtcagtggtcaccgccgaatccagacactccggccctgttccggaagagccctgatatccgtggctccatggcgctgtctgtcgataccatg

SEQ ID NO: 426264 - DNA, 122 bp, Homo sapiens
tgccaaaatatttgctgccgcgcagaacagtaagtcgtttttgacatatggatctcagcgcgcagccacagcaaacaggcagcgtggcgctgaggggcacaggtttgctggggggcgtgagc

SEQ ID NO: 426265 - DNA, 122 bp, Homo sapiens
cacacccagctaaatttttaaaaaagttttttcatagaggacaggtctcattatgttacccggactgtcgtgaaattctgacttcaaccctcctgcctgggcctcccaagatgctaggatta

SEQ ID NO: 426266 - DNA, 122 bp, Homo sapiens
gctgtttgagggcaggaaagcccagttcctttaacccttgtgtcggtgcctgcacagagccgggcaccccagcacatctgtgtttgtggctctgaattcatttatctgtgccagtctcctgc

SEQ ID NO: 426267 - DNA, 122 bp, Homo sapiens
aaatcaaagcgggaaagccttgttccttgctagaaatgagcctcgcaggccaccaccatccgcaccgtacgacaggccgtccctcagctgcggcttcctgcctcaggcaggatgtaccaaac

SEQ ID NO: 426268 - DNA, 122 bp, Homo sapiens
caaccagagagaacaggattcacaaggccaaagctcccaggtaaccccctgaagccatagcgggtacctagagaagcttctgaaaagaaggaggaggggacagtggtttaaggtgcaaagtt

SEQ ID NO: 426269 - DNA, 122 bp, Homo sapiens
gcctatggtttggacaccatgcttcacttggcagctgtttcttaactggaattgacagatcggtgatcctgcttacacagtagtctcttggcaaaagcacaggatctggaactgtgtttgct

SEQ ID NO: 426270 - DNA, 122 bp, Homo sapiens
tggtccagaagcagacggcaatgtagcaaaagtagacaccgtagcacatgctcaaacatccgtggtgcatgagcagccaccacaggagtctgagcatttgaccacgatgcacactcaggttc

SEQ ID NO: 426271 - DNA, 122 bp, Homo sapiens
caggggagtcacagatggttgcatacacatctgtgttctgcatgacactgctagacatggcggacaataccaagacggatcagacccagcacctgtcttccgagaccttacgggctcatgat

SEQ ID NO: 426272 - DNA, 122 bp, Homo sapiens
tgctcggcccctgcgctctgctcccgcactcggtggtgcagtggaacgtgagtcctggcccgcagtgtggaaactgaggcccagagtcacaggccctcaccctgcttggtccctgcaaactt

SEQ ID NO: 426273 - DNA, 122 bp, Homo sapiens
agcaacctggaggaatcagaactaggccctgctgaacaatctggagatgaaaatcaaagccgggaagtacagcttctcctggattggatctcgatttgacttttttcttttttctttttttc

SEQ ID NO: 426274 - DNA, 122 bp, Homo sapiens
tccatgaaatgaataaaactcgaaagccagggaaaggggacagtactttgatccggagatcgcttataacctctgcttggagttccgagttcgtgcggctcaagggaggctacagtccagca

SEQ ID NO: 426275 - DNA, 122 bp, Homo sapiens
cctgtgggccttgacctcagaattgggaacatcctctggaagggttgttcccagcatgtgcgaggacgaggacacgggcctggtgtcccctcgggcggggcctcggcagcctctcccatgag

SEQ ID NO: 426276 - DNA, 122 bp, Homo sapiens
ccacgttgatcccgggtcacgggtggggacggctggggtaactgggttgtacgtcctctgcggagctattagggactctaattaccgggattggaagtgaataattatctactgggcctcag

SEQ ID NO: 426277 - DNA, 122 bp, Homo sapiens
cgtatttgtagaacacgtcctcaatgtccttggttcggatgtctggaggtaagttacccacgtagatgcggcaatcgttgttccctgcggggccacgaatcacaccacctcccgacatggcg

SEQ ID NO: 426278 - DNA, 122 bp, Homo sapiens
ggctttccttcaggccatcctgggcggaagctgggggttgaaaatgaagagatggtgacacgtgtctaaagctctaggggcctggaaccaagtgacgcagcgctcagagaagcagaaggagc

SEQ ID NO: 426279 - DNA, 122 bp, Homo sapiens
gggcgtggcgttgaggcccagaccggaacttcctttcggcctcagtttcccggccggccccgcccccggcgcccgtacatgcggcccctttaaggactttctgcgccctcccgcctcttttt

SEQ ID NO: 426280 - DNA, 122 bp, Homo sapiens
cgccgcgaaggctcgcaggaggctcggccccgggcgcgcgccccattggcccgcgctgcgcgtcacacgtcccgccccgccctggccccgccctggccccgccccggcccgcccgcgcggct

SEQ ID NO: 426281 - DNA, 122 bp, Homo sapiens
agaacctgaagcccctcacagagcctttggagtgcatggctatgaggcctgggcacacagcgagacatgtagttgtcactatcacccagtgcaaaaacactcagaggggctcatgagaatcc

SEQ ID NO: 426282 - DNA, 122 bp, Homo sapiens
accattaatagcattaaaatgtacagcaaacaggaagtaaacgatttcacttattctactcgttctttcacatattcatttatgtactcttccacttccactcattaattcaaaataaatgt

SEQ ID NO: 426283 - DNA, 122 bp, Homo sapiens
tctggaggctctcttcaaatatttacatccacacccaagatacagtcttgagatttgactcgcatgattgctatgggacaagttttcatctgcagtttaaatctgtttcccaacttacatta

SEQ ID NO: 426284 - DNA, 122 bp, Homo sapiens
ggccatcttaagcgaggtcagccaaagtggtctgcagtcacgttccccgtggtggggacacgtcagccttttctccagatggcggcgctctccggaggagccggagctggagggaggccggt

SEQ ID NO: 426285 - DNA, 122 bp, Homo sapiens
ctccggtaataaagtttaagcagctcgggcagctcggtggggtcaaacgtctccattgagcgcggaactcgccacggtaaggattaccacaggaattggcgggaacagcacggccggcggcc

SEQ ID NO: 426286 - DNA, 122 bp, Homo sapiens
tcatagaccaatgagtagccacacgtacttgtttggcattaccaagtgtccgggcaaggccgcagcctgcagctcaccagccgtgctgctcggcctgtgcacgtcaccggctcttccctagg

SEQ ID NO: 426287 - DNA, 122 bp, Homo sapiens
ctatctcaaccaaatgggcaggaaaacttctttaacaacagttggccattagtctcacagcgatattcagaaaataactccatataactctattttactattaaattcctcatccttcttct

SEQ ID NO: 426288 - DNA, 122 bp, Homo sapiens
ccaatcagaaggcactttcccttgggccatgttgggttcacgagtgggtttggaaggaggcgtgtacttggaaggagggctcctgaatgaggagtggccctgcttagagatgggatgggcga

SEQ ID NO: 426289 - DNA, 122 bp, Homo sapiens
gactgaggagaaggttctggagatgtggaaggaaggccgcgcagccttgcccatcaccagcgctctccgctccatttctgcccggcagttccagcccctgggtctgcgcccaggatgacacc

SEQ ID NO: 426290 - DNA, 122 bp, Homo sapiens
cagattcttgggcatgtgtgttaagagataaaatggcaaagtatgactttccggggtacacgccacaggaaaaaggaaaaagtctcaggtgggcatgcgtgtaactccctaaacgcactgcg

SEQ ID NO: 426291 - DNA, 122 bp, Homo sapiens
cgcgctcgagacgctcctgaggtgggcgcggggctgggagtgggtaggttgtctgccagccgtcgctcgccgctcctcttcccgtctccccccttccttcaatcctgtaacctgggcggagc

SEQ ID NO: 426292 - DNA, 122 bp, Homo sapiens
catattcaaacactgcccgcagtacttgcgttacgtccctttgtgaaggcaggcccttcgcggctccccagatcagtccagcctgtgtcggacccgatgactaagcacacaggaacccataa

SEQ ID NO: 426293 - DNA, 122 bp, Homo sapiens
cactaacccttggtcacacggagtgtggagccagctgtcagtttctgggcaggctctggccgggaacgcatacaacgtcaaagcagtgaataagcgatttctgcagttcccgtagctgccag

SEQ ID NO: 426294 - DNA, 122 bp, Homo sapiens
cttggcagccccctccccctcaagggcctggctctctttcaatccggctcttcctcttctcggaatcgaatcttcccaatgtctctttatagaacccacgttctgtgggccccctccccgcc

SEQ ID NO: 426295 - DNA, 122 bp, Homo sapiens
attggagtggtgggcttatcaacctctttttttcctgtttcctcacttactactcttgtacgtctacagtggagaaaacagaaagcagtgttttaatggatcccaggaaaaggctaacacca

SEQ ID NO: 426296 - DNA, 122 bp, Homo sapiens
taagcctccctcccgtgtccggggcagctgcacgcatggcacctcgccgttgcactgagacgtgattggtccattagcacgggggtaggaacggcttcccctgtgtctgcctcaaatgtctc

SEQ ID NO: 426297 - DNA, 122 bp, Homo sapiens
atgagaaaagaaacggaacttcacgttcagaaacggcctcccaaagccgcaatggcttctcgcagctcgctggccttccccaatcacgctttgagtctgcgcagtagctgcagcccaagcca

SEQ ID NO: 426298 - DNA, 122 bp, Homo sapiens
ccatggcaaaaccatttactcagcttttctccagaaaacactcaaaagttctactggccacggctgagtgaaagggctgaatggaaatgctgaggttaccctccaggtgggcagatgcctga

SEQ ID NO: 426299 - DNA, 122 bp, Homo sapiens
tcttggtggtccataagatagcggcatgccttccgatgggggacccgggagttgctgagtcgcagcgcttgcacagcgatgggcttatttggtctctccggcacatggctcagccctgctcc

SEQ ID NO: 426300 - DNA, 122 bp, Homo sapiens
acccccaacacctgtgtccaaaggagggtccatgtgtgcagcccacccctgtcttgagcccgtctaccaaaataaagttgtagtgattccatgaaagatttctgagatatgggggtagagta

SEQ ID NO: 426301 - DNA, 122 bp, Homo sapiens
tgctaaggggcaaggagaaggctgacgggtggctctctgcagtacctgaagctgcgggagcgaatgcagatacagaaggagatggagcggctgcgcttcctactgtcggatcagtcattgct

SEQ ID NO: 426302 - DNA, 122 bp, Homo sapiens
caagtgtaaccactacaaagcctatgatttagtggacagaccacgtccccaaaatgttagcgcttaaaagtcctgcccctgctagcctcagcaacgggaataaaacagccatgaacgaaatg

SEQ ID NO: 426303 - DNA, 122 bp, Homo sapiens
cgtgagggagacttaattctctccctttcagctgtgctcagactgtgaaatccacacaatcgcgcccttctctttaaagggagggagaagaggggccgcggccgcgcgccccgccatcagct

SEQ ID NO: 426304 - DNA, 122 bp, Homo sapiens
gttccgggttgacacaggcccaatgcagcaggcgttacaaccaacccaaacatcagtggccgaagcaaaaacaggatactcaggcccagggactctccctctctgctaactgacctcagcct

SEQ ID NO: 426305 - DNA, 122 bp, Homo sapiens
accgcttcctcgtctcgcgagaacagcgcagcacctccgactcgcgagaagtaaacaccgcgcccgcaggctcggcttactcgccgataggctcagcgactacaactcccagcaggccacgc

SEQ ID NO: 426306 - DNA, 122 bp, Homo sapiens
ccatggggccctggttccagagacctttgccctcccaaggctgacgcacagcagagatcccggtgcaatcgaggccgggtcggacgctggctctggccaggcacgcaaggggcagccgaggt

SEQ ID NO: 426307 - DNA, 122 bp, Homo sapiens
tgcctgttattcccagacggtttactaagtggtgatctatatacgtaatgtaactacatacgtttcagacaaaggttatttattcactgaacagatattgagtgcccactgtttgtgaggca

SEQ ID NO: 426308 - DNA, 122 bp, Homo sapiens
atgatcaggaagcggccgcaccaacagggcggcggtggcggcggcggccagggccgtcaccgccactccagccgcgctccaggcacccgcacacccgctacccccgcgcggtccccgaggcc

SEQ ID NO: 426309 - DNA, 122 bp, Homo sapiens
ggagattgtgactatgacaggagctcacttccaagggcaattcaacaaatatttatttagcgcccagaataggtaccatgtcacaacttgtattaagagaacagttaggcagggcacagtga

SEQ ID NO: 426310 - DNA, 122 bp, Homo sapiens
cggagcacagcccagcgctccgcacacccctcccgcagggcggcgggttcaggtcgctgccggggccgacccaagcaacttggattccctctcatgtgttgcatctaccccagggccggcgt

SEQ ID NO: 426311 - DNA, 122 bp, Homo sapiens
cccccttcaaagctcttggaacagtcgagcaaatgaaaactcttaaagccataaattgtccgggtgcggtggctcatgcctgtaatcccagcactttgggaggccgaggtgggtggatcatg

SEQ ID NO: 426312 - DNA, 122 bp, Homo sapiens
gctcttaagtggctcggaaaggtagggtagggcccgggattgggctatgtaaacaccagacgttcagccggcgtgtttttgacctcggctcgaggggtttattttaggatgctaaaggaata

SEQ ID NO: 426313 - DNA, 122 bp, Homo sapiens
ccactcaaaaataagataaagcattctaaggactaaatggctagaccacaatgtggtgagcggaacttctggaaccttctagattcagagtccaaaaataggcagggagaattaagagtcca

SEQ ID NO: 426314 - DNA, 122 bp, Homo sapiens
ccagacccaggtgctgagaaggctgagtccatgtgaacagacaggggctctcccattgcccgtacccaccttgtccccaggaaaccccaatttgctcacttcatgatgcgtttggccccaca

SEQ ID NO: 426315 - DNA, 122 bp, Homo sapiens
ggcctcggggcgtgcagcgagccgggctaagggcgaggagggtggagagcgggtgttttacgagcattaatttgtgaagtgtaagcatgtaaaatatagtatagtacaattttcgaccactg

SEQ ID NO: 426316 - DNA, 122 bp, Homo sapiens
ttggagcacaggttgtctgcaatcaaatctgctgtggaaactggtcaagcagatgatgagcgtgttcgtgaatattatcttcttcaccttcagaggtgaactgatatcagcttagaagagat

SEQ ID NO: 426317 - DNA, 122 bp, Homo sapiens
ccttctgctcaccggatgcatggggggcggcggcggcccccagctctcaggcctggagggcgtccccgggaatatgcaccctgacactgagcgcctactgtgtgggctgggggacagccaca

SEQ ID NO: 426318 - DNA, 122 bp, Homo sapiens
agtattcacagtcacactaggcaggagcgatgggctggctgctgaaccaaggcaactgcacgcctgctctctcacccccgctccacacacaccgtaaacaaaatgaagaggtaaatcaccat

SEQ ID NO: 426319 - DNA, 122 bp, Homo sapiens
atgtgaaacctcttcagctcacggcaccgggctgcaaccgaggtctgaatgttgcgaaagcgccccagacgccgccgctgctttccggccgccccctcggctacagccgccatttccacgct

SEQ ID NO: 426320 - DNA, 122 bp, Homo sapiens
tatcagagtccatgttcttcagggcttgaggccatgcttttggaaatcatttcccagagccggggcatttgaggagagtacagaaaagcaaatgaatggtgaataggagaaaggccatcagc

SEQ ID NO: 426321 - DNA, 122 bp, Homo sapiens
tcctccccgcctcggcctgccctgcctcccagcctgtggcctaagggattatccctgtctcggcaagccccgcctgccttggggcaccgcctacctctgccagccacgcctcccctgcctcg

SEQ ID NO: 426322 - DNA, 122 bp, Homo sapiens
gatgtaatttgatctcttcgggccaccgtcgctgagcatgcgcaaataaacgtggcgggacgtatgtgtcatggcgctctccatctaaagtctgtgcagcttccggagagtggcgggttgat

SEQ ID NO: 426323 - DNA, 122 bp, Homo sapiens
ttaggagagaggaggcggtcttgtctattgctcagataagttcacaaaatctttcccatccgttaagtgatggaaaaaagtatccaaccgaaaaggttgcaaactattgtgatgtttgagct

SEQ ID NO: 426324 - DNA, 122 bp, Homo sapiens
cgtggcccctcagtcggggacgcgggcccccagaagtctggggctctccaggaagcgaagcggatggaagattactcggctcggggtcccgggtccccacccccgccccgcccccgggccgc

SEQ ID NO: 426325 - DNA, 122 bp, Homo sapiens
ggacccggcacaccctccacagctgctggccggggtgctaagcccctcactgcctggggccggcggcaccagccggccactcctaggtcggggcccgccaagccctcactggcccgcgagct

SEQ ID NO: 426326 - DNA, 122 bp, Homo sapiens
cggccgggccgcacgccggtgccccctaccgtccggagtcatccctcccgccccggcgctcgggctgcgatcctggtccctgccagtggaatctggaacaccagccagttgtgcgcactatg

SEQ ID NO: 426327 - DNA, 122 bp, Homo sapiens
aagcggaggatcatgtggcacattgactaccgtggccacggcgccctgcctgacctggagcgggcagtcactgagctgacggtcattcagcgggatgtgcaagccatcctgcccctggccat

SEQ ID NO: 426328 - DNA, 122 bp, Homo sapiens
atacacagtagccacaatttggcaggatttgattgaggtcctcctacccttgtgtgtctgcgaaagaatatgcgtaaactcaggacccagatcaaaacctaagcgggccgtgagaatgatta

SEQ ID NO: 426329 - DNA, 122 bp, Homo sapiens
attgtgtacgtgtacgtcaagaagcgcagcgagttcgggaagcagtgcaatttctcggaccgccaggccgagctgaacatcgacatcatgcccaaccctgagctggccgagcagttcgtgga

SEQ ID NO: 426330 - DNA, 122 bp, Homo sapiens
caggagtgggccgaacccaacagcttccacgtctgcatcacgtcctacactcagttcttccggggcctcaccgccttcacacgagtgcgctggaagtgcctggtcattgatgagatgcagcg

SEQ ID NO: 426331 - DNA, 122 bp, Homo sapiens
ttcccagacacaagccatccttccacctcagcctgcacagcagctgggactacaggtgtgcgccatcacttccatctattttttgtatttttttggagagacagggtctcactatgtagccc

SEQ ID NO: 426332 - DNA, 122 bp, Homo sapiens
tctatgatggatgcttcacctctagtagtgcaaacacacccgggttgagactaagtggtccgggagaagcagaggaagccgtgccctgtgcgctgaccgaccgccgggcaggcgggcaccgt

SEQ ID NO: 426333 - DNA, 122 bp, Homo sapiens
tcaagacagtgaccatcagacaccaccagtcagctctaactgggcacaggagatgaaacccgcctaccatcgcagaaaggaaaaatatttgaggggaaaaggctgggagaaagaataaagaa

SEQ ID NO: 426334 - DNA, 122 bp, Homo sapiens
tgccccgggagcctgtggcgatggcccgccacagaaatgttcatgagtgagcaggagtgtcgtctaacctgcgctggccactatgtgtgtcctctgagggttcctccgtaggtgcagcttta

SEQ ID NO: 426335 - DNA, 122 bp, Homo sapiens
cttgcgagttgaacaaacttgctgcaggcggattggcggctgggagctctcgggctggggcgttgtatttattaatttatattccgcggcgccccgcgcgggcggctcctttgtgtccagcc

SEQ ID NO: 426336 - DNA, 122 bp, Homo sapiens
tttcttcattcatgctctaaacttcttccttctctgtcctctgatctgcccctcccctcccgcctccccttgaagagacagactggaggctctcacagagggccatctctgtctgcgctcct

SEQ ID NO: 426337 - DNA, 122 bp, Homo sapiens
agaaaatgaaccaacctgagtgttaggagacttgcatctagtcctgactccggtaccaaccgaatgcatgtccctggacaggaaacctctctgagtctcgatttcctccgtggtaaaaagga

SEQ ID NO: 426338 - DNA, 122 bp, Homo sapiens
ccaatggcgggaaggctctacgccccaccttacgccaaatgcgtactcctcccacccttgcggccagagacagtacccgacgttacttccgtaaatgcgctcaatgaattgcggaaggctag

SEQ ID NO: 426339 - DNA, 122 bp, Homo sapiens
cctgtcccttggcctgacccagactcaggtgggacaggctctcagtgctacagagggccccgcgtacagccagtcggccatctgcaggtaacgcgcgcctgcatgctgtcacctcttctagc

SEQ ID NO: 426340 - DNA, 122 bp, Homo sapiens
aggtggtgggactctgttgagtcagcacagctcctactctgagggcacttgtaggatccccgctgctcctcgggccctggagcccacggcgaagggtcaggcccaccttccgtacagatgat

SEQ ID NO: 426341 - DNA, 122 bp, Homo sapiens
gcagttgtcggcacctacagtttatccctgtggtaccacccaggagagtgccctcagaggcgccgcccacagaagtgcctgacagggaccctgagaagagcagtgaggatgatgtctacctg

SEQ ID NO: 426342 - DNA, 122 bp, Homo sapiens
gagtgtttctgtattgtagaaggaaaattccatatttgtattgccgtgggcacaaaaaaccgagcgctctcatgccgaaacccgggatcgaaccagggacctttagatcttcagtctaacgc

SEQ ID NO: 426343 - DNA, 122 bp, Homo sapiens
cctgggttgattgccatcggttgctcatgttcctctttaacagagatgaaaggcaaaaggcggagagggctccacgcagcaactaagtggctagaggaacatgcaccagaccagctgattat

SEQ ID NO: 426344 - DNA, 122 bp, Homo sapiens
gtgagactctcctaggcagaagctaagtcttttcagctcaatatcctcctatgggccaggcgcagtggctcatgcctataatcctagcactttgggaggctgaggcaggcagattgcctgag

SEQ ID NO: 426345 - DNA, 122 bp, Homo sapiens
tgtggagcagggggcggcgcccatcagggaggctcgggcagcatgggaacccaccaggggcggggtgggggccttgggcatggcgggctgcaggtcccgagccctgccctgcggggaggtgg

SEQ ID NO: 426346 - DNA, 122 bp, Homo sapiens
agctagggagcctattgctaaagtttgccagagcctaatcgcaaggccccattaaattaacgactgccagaaaaaggccactctcgcctcctaatccagtcggtgctcgttcggccccggag

SEQ ID NO: 426347 - DNA, 122 bp, Homo sapiens
ctgcacacgggcctcccgcatcagggcagcctcggggccctgatcacctccgcgctccagcgttttgcttaaagctgagataaaatggcctggagaagctcgtggccccctgaggtctgtcc

SEQ ID NO: 426348 - DNA, 122 bp, Homo sapiens
ggaaacatcagttcgcatggccattccggcagcctgtggatgctgtcaaactgggtctaccggtgagtagagacattggagccggggaggtgtgggatgagcaagaatgcgtgtgaatgggg

SEQ ID NO: 426349 - DNA, 122 bp, Homo sapiens
cttgagaggactgtgtattctgccgttgttgggtggcgtgtgtgatagatgtccactcggcgtacctggtttctggtgttcatctccggaatgttgctgacactagaaaatcagcagctttc

SEQ ID NO: 426350 - DNA, 122 bp, Homo sapiens
atctcccctccaggtctgagcaggagggcgtgctgtgtgcgagtggtggccctgctggcacggctgacctgggctcccttcccgggtccacgtgtctcgacaccattctgtgggctggcggc

SEQ ID NO: 426351 - DNA, 122 bp, Homo sapiens
aagtaccagtatagtcccggcctggcaaagtaacccgaagtaagaaagaggaggggagctcggggcagcaacagctcacccagggtgcatgcttgcggctcctccggagctgggtcccggga

SEQ ID NO: 426352 - DNA, 122 bp, Homo sapiens
actggttactatatgtcactgcagcgtggagggaatatcagaggactccactgcattaggcgggctgggcacttgcttgccgttgatattcttaaatgaatcacgttgttaaatgcggaggg

SEQ ID NO: 426353 - DNA, 122 bp, Homo sapiens
ttgctgaattaatgcttaaaggctgctccagctttttgctaatgcaaactgtagtgaacacgctaatacctctatgtttatgtttgtgtacttttgtgattgttagattcaaatccaagagt

SEQ ID NO: 426354 - DNA, 122 bp, Homo sapiens
aacgaactgccccacctcttttaaagcgtctttctctgaactgtgcaaggaagagagcatcgcctgacagtggtgaggtgaaaattaaaactacacaggggtcaatgctctgctgaaaagta

SEQ ID NO: 426355 - DNA, 122 bp, Homo sapiens
aagccccccgccccggcgcattcctaggagacagagccgtgagggcctctggctgcaactcgcgagggtcggctttccctgggtctccgccctacgggagacagtgaaggcgggagcaaggc

SEQ ID NO: 426356 - DNA, 122 bp, Homo sapiens
tagggaatgcttcatgaatttgcaagtcatccttgcacggggccatgctaatttctgtatcgttcaaaaaaaaatgattgcttaatgtacaaatgttcagatgttctctgcagggattagtg

SEQ ID NO: 426357 - DNA, 122 bp, Homo sapiens
cttagattttgataatagtattgcaagttggactttgagaaacactaatagcctgagttacgtgatgaagtgtcagagactggcccataaaaaaaaaaaaattctgcctacatattaaagac

SEQ ID NO: 426358 - DNA, 122 bp, Homo sapiens
atcgcttagagctattggatggagcacgacgcgactgtgatttagggagtgatttagtgccgggcttccccagctcggcctgcctgggcctttttatttattatttatgccctcccggtccc

SEQ ID NO: 426359 - DNA, 122 bp, Homo sapiens
cgcttgaagcattccccaggtgggaaacactgagggcatccgttgcccttggtcacacagcgaatacggaatccgagcgggaaccctggtccacgaagctcgcattccggactctgctccca

SEQ ID NO: 426360 - DNA, 122 bp, Homo sapiens
ggactgcatctcccagcaggcttgggtgcaccacacccctcccagcaagcactgactcatcgcagacttttaactagtccagtgctggtttccaaggggtttctgaagtgtctggtggttct

SEQ ID NO: 426361 - DNA, 122 bp, Homo sapiens
aaggtgccactccaggacgacccccgggtcttaccttcctcaggcagcctggccttttaacgcccagcatcccagctagggttactctgggctgttaccgcgaaagccagcactgggtccct

SEQ ID NO: 426362 - DNA, 122 bp, Homo sapiens
ggattacaggcttgagccaccacacctggctgaatgaaactttaaacagcacatttgagccgggcgtggtggctcacgcctgtaatcccagcactttgggaggccaaggtgggcggatcatg

SEQ ID NO: 426363 - DNA, 122 bp, Homo sapiens
ctctcctaagaatgctttctctgaatatgtgacttgcatatcttactttctattctcttgcgcatgaaaagcaccggaactaattcctgtatatctaaatcattcaacacttgctgtactcc

SEQ ID NO: 426364 - DNA, 122 bp, Homo sapiens
cctgctcctcctcctccctcaggctgggcaaggtgctgacggagaggttgacggcggtgacggtcacgaagagcaccgacaggcaggcgaacaccttgccaggcagccccgagtgcggcctc

SEQ ID NO: 426365 - DNA, 122 bp, Homo sapiens
aatgctcttcatccttcaagaatcaaattccgactcatccatgaagtgaactccagccttcgaaagctttttttccccctaactactacagaacagatgatatggaaacaatctgcatcagg

SEQ ID NO: 426366 - DNA, 122 bp, Homo sapiens
ttgatgtcttcgtactgaatgtcatttgagcccacgtacaggaggtcagtggtgatggtgcggaaggtggtatctgcaaggccatctaggatcgacttcataacctcagtctttgattaggc

SEQ ID NO: 426367 - DNA, 122 bp, Homo sapiens
aataataatgatgggcaccctcataagtgacagtctctgaggtgaacatgctacatgcagcgtctcatcacctacgaagcaggaatctagacgctgagggacacacagcccgaaatccaata

SEQ ID NO: 426368 - DNA, 122 bp, Homo sapiens
gtggggacagacacgcacagaaatcagcatagcctcgagataaatgcagttgtttctcttcgtggacaaaggcgttcgattttccagaggaggccaagaatgggagccgtgggtccgtagct

SEQ ID NO: 426369 - DNA, 122 bp, Homo sapiens
cacgccaggagcttcctccgttggaagtcccttccgctggcgacgtgggcgctgtggccgcggccctcgtggagcctgagccctcctcacggcctccgcgcagccctggggccccccggcag

SEQ ID NO: 426370 - DNA, 122 bp, Homo sapiens
accctgataaacaaacctacacaaacaaacacacgtacattcatcttggaacaaccctcccggctcagtgctcataaaacacacagatacccaagcataagactacagttgtgactgaaatc

SEQ ID NO: 426371 - DNA, 122 bp, Homo sapiens
cgccgccgcccccgccgccccgcggaccccggagctgcagtcggcggccgcggggcccagcgtgagcctctacctgagtgaggatgaggtgcaccggctgatcggtcttgatgcagaacttt

SEQ ID NO: 426372 - DNA, 122 bp, Homo sapiens
ttattttcaaagctaacttaaaatgatacaagtttgctcaaggcctctggtggtatcagccgccccatacccctggggactgttaaatgtgtttccatttataggtagacttttcttttttc

SEQ ID NO: 426373 - DNA, 122 bp, Homo sapiens
gtcaatgttcattgacaattattttaagccaagattttcggcacagcattcagcgggctccgaggtttggatcctgcctacctctggccttctttcctgccacccacccctgcagcttctat

SEQ ID NO: 426374 - DNA, 122 bp, Homo sapiens
gcacgcagcgcgaggcgggaccccggactgactacatttcccagtctccgtcgctccgcgcggcccaccccttcggctctgggccccgcctcgtggtgccggctggttcttcgcgctcgccc

SEQ ID NO: 426375 - DNA, 122 bp, Homo sapiens
cgcgggtcatcctgggattggtagttcgctttctctcatttagccagtttctttctctaccggggactccgtgtcccggcatccaccgcggcacctgacccttggcgcttgcgtgttgccct

SEQ ID NO: 426376 - DNA, 122 bp, Homo sapiens
actcccgggagcgggcgcctcgcgctccctccctcggccccgccccgcccgccgctcgcccgttgcttcccacctgggcccgaagcgcccagcgccctctcccgggaccccgcgcccgcccc

SEQ ID NO: 426377 - DNA, 122 bp, Homo sapiens
tcatagcccagcaccattccacgtggttcagctggccagctgcctgccgggacctggatgcggactgttcccaggtaggcaacagcaggaaatagtctaaggactccccttcctgccctggc

SEQ ID NO: 426378 - DNA, 122 bp, Homo sapiens
atcaaggtgttcagtgacatgaaagtgtgcaagtcttcaacactagaaaaggtgaagaagcgcaagaagttgctgctcttctgcctgagtgagtacaagaagtacatcatccttgcggaggc

SEQ ID NO: 426379 - DNA, 122 bp, Homo sapiens
gatctgacccccgaagcctcgccagcggcgtctgtccggcttgctcttctgtctgagctgcgctccggggaggcgcctggctgtttagccgccgtatcccctggcaatctgttcaggaaaat

SEQ ID NO: 426380 - DNA, 122 bp, Homo sapiens
ctgccgggacatttagataagttgagcctccaacccgtggccccaagacatcaaaaggcgcggggtccagtaatgctggaggcagccatcactaagccctaatggagtgcttcattaagatc

SEQ ID NO: 426381 - DNA, 122 bp, Homo sapiens
agccatctaattgggtagctgctcggccagtccaggcattaaacccacaatctaatgatccggggcttttcctggctgtcaagtgtcatttttctaaaaacactttaggatttcattttcat

SEQ ID NO: 426382 - DNA, 122 bp, Homo sapiens
aattgccgcgctgcccctcgtgcctctgcaaagatgcagaggtcgaagcacgtttctgtgcggtgatgaaatgctcgctgaatcagcctctcgagcccggcctctcacacccaccaggatcc

SEQ ID NO: 426383 - DNA, 122 bp, Homo sapiens
ctgaggctgagatgggagcaagtggctggcgaagctggtggtggcttcaaaccacactttcgtagaacaatcgcaagagaaaattgttggggggagggaggaggaggagaaggcggttttcc

SEQ ID NO: 426384 - DNA, 122 bp, Homo sapiens
gagaaagaaagaaagagaaagaaagaaagagaaagaaagaaagggaaaacttctttaacgcgataaagattatccatcagaaaccaagagtgttggtatccaagaaaatgttaaaatttttt

SEQ ID NO: 426385 - DNA, 122 bp, Homo sapiens
ttagtgtctttaaatctaatcagagaccaattacagaattcccagaaccaatttaggaaacgcatccttaagattttgttcttttagaacaattcccagtaccagaatctgtcttagagttc

SEQ ID NO: 426386 - DNA, 122 bp, Homo sapiens
tgggagtagaaatactcatttaggacctcagtggcctgtttgctgaagttacggcgctttcgtctacagaggagggagaagagcagtgaggaggatgttgatgtcctggcagggctgtcaca

SEQ ID NO: 426387 - DNA, 122 bp, Homo sapiens
ccgcgagggcagtgagggagggcgcagctcgacccggccggcctcgtatccgagccctgccggctggcccaatgaggcctgggccccactgttgacgggcagccatgttcgccaagtcccct

SEQ ID NO: 426388 - DNA, 122 bp, Homo sapiens
acaggtccagtgttccaggtgtagaacctcactgttgcagtccgggttgtctctggaccacgtggacagaatatttccttacattcgtgcagaatttgtctcctggtatttcttctgccagt

SEQ ID NO: 426389 - DNA, 122 bp, Homo sapiens
tgaatgactcagttttttcactcccacagaagtggtcttcagctattggaggacagtgcccggcctccgtaggctctccagcctcagcattgcccacttttctcttggcttgttgggctttt

SEQ ID NO: 426390 - DNA, 122 bp, Homo sapiens
accgggtcttaaacccaggtagctcactccagaaccaactcaacctctgttacaggtggccggccagaaaatgccccaccccacccattgacagtcggggaaactgaggcctcagtaggtga

SEQ ID NO: 426391 - DNA, 122 bp, Homo sapiens
ctgaagccagggggctctgggcttctccggcctcaggcaagaagcggggctggctgcgttcgggacccagcgccccccaggccctccaaagactggttgagctcagaaccagaaggagcgag

SEQ ID NO: 426392 - DNA, 122 bp, Homo sapiens
cccacgggggacaggtccttccagcggttcctctgcacccagcgctgcacgggcatggggcgtgggtaatcagcctcccgaaagccacgcgagtcacggtcctgcctgcgaagaactcccag

SEQ ID NO: 426393 - DNA, 122 bp, Homo sapiens
tcccagctcggactccagccccggcgccgcgacgctgccccggccccgacccggccgtcgcgagctgtcctccaccccacgctccccggtcactcaccccgaggccgggcagcagcagcgtc

SEQ ID NO: 426394 - DNA, 122 bp, Homo sapiens
caatggggatgtgatttcggggaccttttacgggtccttgtagtcgcatagtggccctagcgttctgattcccctttcttccgccacggtcatgcagggctctggctcttcgtcctctcctg

SEQ ID NO: 426395 - DNA, 122 bp, Homo sapiens
cttcctgtgggacagggctcgggacctgcagcctgccatgcctaagcctcccacctcctccgtggtctcctgtggggccccagcctcctcgacgagcgccaccccctgctccagggcaccca

SEQ ID NO: 426396 - DNA, 122 bp, Homo sapiens
ccatgcccaatgtggaaccccctccctaactgcccctcaggcccccaactcaccctcagccggcctctcagggtgtgccagagagcctgtgtggccacagcctggtccaactcctgcttcat

SEQ ID NO: 426397 - DNA, 122 bp, Homo sapiens
gggagacccagcgtgaagccatgcggcccctcacctgggagatgcagcggaggtaacgcacggccacctctcgggccaacagccagtcgccatcgtagatctcagggcagggcacccgggcc

SEQ ID NO: 426398 - DNA, 122 bp, Homo sapiens
caatttgcaaggggcagcaaatcccaccctgccagtgtctgaacccccagatggtccttccggtagtactggccttgaccatctacttgaactggagtctcagtttcctcacctgtaaaatg

SEQ ID NO: 426399 - DNA, 122 bp, Homo sapiens
agacagatcccctgaccctgcctgccagtgtgcctgcccactgtccgctgagctgggtgtcgcctgcttctcctcgttctgggtgggaccgtctgtccaaatggctgtcaaggccttcttca

SEQ ID NO: 426400 - DNA, 122 bp, Homo sapiens
aaaggcgattcatcttcctttgttagttgctctctgataggctttgtcctcccaagcgcgcgctgctttcagttggaattgatcacagatgcgacagtgatgaggccatcccggacgctgac

SEQ ID NO: 426401 - DNA, 122 bp, Homo sapiens
agatatttgtagtagatatgtctctagataagaggcttgtctggctgtgaggtccttgcacgagacccttgcaggtttcccaaatctatttggactgggtgtcctgtattaacatgaaatcg

SEQ ID NO: 426402 - DNA, 122 bp, Homo sapiens
aatcatgctctagcctccaggcaagctgctttcagaggaggtttagtaaccccctaacctcgtcttccatgaaggactgtgtgtgtgtttctaagccctgcagctcacctgcagccccgctc

SEQ ID NO: 426403 - DNA, 122 bp, Homo sapiens
aacatcccagaagcccaactcgcttgagctctggtccctcaaacctcacgagcctcctgccgtgcccatggccacggcccctttaaatgtgcgcagggacgccccgaccctcggcttcctgg

SEQ ID NO: 426404 - DNA, 122 bp, Homo sapiens
gcctacctagcccaggctgggttaaagcagataaacgaagcggacagcggaggaaaagcacgtaaccaagtgcagtgggtctgaagcgaaaggcaagaaaagctctgcccttaggaacgggg

SEQ ID NO: 426405 - DNA, 122 bp, Homo sapiens
ttccaggtgccgtctgtcacccctttctttgactaggaaagggaactccctgaacccttgcgcttcccgagtgaggcaatgcctcaccctcttcggctcacgcagtgtgctgcacccactgt

SEQ ID NO: 426406 - DNA, 122 bp, Homo sapiens
gaacagacatgggcagaacagggggatgttttcccaaggaagcgtggtgcctccagaggtcgaggaaagagctatttccatctgaaagctcagctgtggctcggaggagcagcaggacagcc

SEQ ID NO: 426407 - DNA, 122 bp, Homo sapiens
tcagggtcagagtgagcagaagccactcatcctgaccgaagatgacgacgaagatgacgacgtcccagagggggtggagcgtgtgataggtgcgtggggtctaagcggcggcctctgctctt

SEQ ID NO: 426408 - DNA, 122 bp, Homo sapiens
aaaattatagtttttaacatattaatactggagtatgtgatttactacagagtgttagatcggctgtatgcagtttattatagatattagagactaatccagtgaactggaaagtttatata

SEQ ID NO: 426409 - DNA, 122 bp, Homo sapiens
cgtcatccgcgggagcagctttagagagcgactgagcgtctcgctccggtgtacacagcccggcaaagatgccagcccccgtggagctgcacccaataagcccaccttctttcccgtcgcca

SEQ ID NO: 426410 - DNA, 122 bp, Homo sapiens
attagcccacccgttctgctggtcttgccagtggtcatagcaacaagtgggggctggttccgctgaaagaactgggtctctctccctgtagtccaagttctctccctgtccacgtggccttt

SEQ ID NO: 426411 - DNA, 122 bp, Homo sapiens
gaggcgcacagccgcgcgttctccctgcactctcttcgcggtcccatctgttccccatggcgtctcatccgcaaacccggatccaggcttacctggagaagaacaagatcggtcccctgttt

SEQ ID NO: 426412 - DNA, 122 bp, Homo sapiens
cgcggaggcgcgggccggcggagccagagggctgtcggggccgcgggagccggagacggccgggcctggagccttcctaccagagcgcccagctcgccccgtgccctgggcaccactacagc

SEQ ID NO: 426413 - DNA, 122 bp, Homo sapiens
gccccagaactcggggaggtaggcggggcaagggccggggtctgcgcgtgcgtgtgcacgcgtggaaagcacaaacccacgagggcccgctgccggtagggttaaggtgagtgagtgaaggc

SEQ ID NO: 426414 - DNA, 122 bp, Homo sapiens
accccgcgagaaggagcagctgctctcctcaccttctcccaacataatacctgggccaggcgctttggcctcgccttttgagagtttagctctcctccaccccccaccccccgtcttccacc

SEQ ID NO: 426415 - DNA, 122 bp, Homo sapiens
ggggctggcagcctggaggagctggcgggagggcggacggggacccctgtctccttctagcggcgaggaatgagcctgggggagccccaccgggcaacttcccttctgccaggaggctctgg

SEQ ID NO: 426416 - DNA, 122 bp, Homo sapiens
taataaaagtattttatgtgacagccagcacaagacatacctccagaagctttggcaatgcgtttaaggtccctttttaaaactcttctaactgccatagcaccagcctccacaaaatactt

SEQ ID NO: 426417 - DNA, 122 bp, Homo sapiens
ctcttcagaagaagacggtatgaagttggccaccatggcagttgcaaatggctttgggaacgggaagagtaaagtccacacccgacaacagtgcaggagccgctttgtgaagaaagatggcc

SEQ ID NO: 426418 - DNA, 122 bp, Homo sapiens
tacaccaaattgcagttggcagcaacgcagcaatgcctaagtggaataatcacttggacccgaatctgagttgttttctgtccccgacaacaaataatgttacttcagcgcctgcaggccaa

SEQ ID NO: 426419 - DNA, 122 bp, Homo sapiens
tgttcccctagcgaggcagaccagggggcccccggaagttccaggcctgtaagagaggggcgctgacccaccagcctcgggggtagggtgggggtgggggttgggcttgtagggccaactta

SEQ ID NO: 426420 - DNA, 122 bp, Homo sapiens
catcacaggcgtgagaacctcagagcatgagccgattctgtgcagtgctcgacatacagacgagaacactgaggcaggagagacagcctgtgacctggtcactgcgctcaggaggacgtggt

SEQ ID NO: 426421 - DNA, 122 bp, Homo sapiens
accgcgcccggccaacttgtttttctttctcactggagctggttccagattagatctggtcggacccggcaggcacctggcgggcactgtgcgggcagggaaccagggagagcaggagggcg

SEQ ID NO: 426422 - DNA, 122 bp, Homo sapiens
gccgagatgcggggttcagacagggtcccatccgcgggtccgcgaggcagcgcctctacccgctacccccaagcctgggcgcaccccctcgggctcctcaccctagggatctcccctgggct

SEQ ID NO: 426423 - DNA, 122 bp, Homo sapiens
cctatcacagggtgtctgtctgtagccgcatggtggggtgtctgatttggtgagtatcctcggtgctgccaacagcctcttccttctcctgatttattggcgtctctggaggtgctgctgtc

SEQ ID NO: 426424 - DNA, 122 bp, Homo sapiens
ttaatagcccctgggcacagcaggagaacgagttgaccaagtccccggccagcgtactggcgaaccgagagcagcgggcagctatgcggcctccaggacagcagggggcgatgtcttgccgc

SEQ ID NO: 426425 - DNA, 122 bp, Homo sapiens
cgtcacctgcccctccccctcccgccgccgtcacccaggaaaccggccgcaatcgccggccgacctgaagctggtttcatggcagcctcaaagaaggcagttttggggccattggtgggggc

SEQ ID NO: 426426 - DNA, 122 bp, Homo sapiens
ttcaaaggtctgcagtcagatctgctgagtctttttttttttttttttggttcttctcagcggaaacgggaatgtgcataaataggagctgtaacaggctagctcggagtgttttacttatt

SEQ ID NO: 426427 - DNA, 122 bp, Homo sapiens
aagccattctgcacataccacctcccagaagttgttcctgaatttcccaaacaaaagatgcgttcatttgtctgggtgctcagagctctccgtcctttccatattgtcctttgtgctgcatc

SEQ ID NO: 426428 - DNA, 122 bp, Homo sapiens
ccaaagcatcgtgaatattcatgacagcagccacaaaggccggcgccgggtggcatcttgcggcagctccttcaccccgcagtagacacccgtgcgtctgtaccctcgacccttatttaccc

SEQ ID NO: 426429 - DNA, 122 bp, Homo sapiens
agtaccaggggcctggaggaggctcgggacagaagcgtgaggggccgtggctgctagggccggcctgcctctccctggtcggccccggtgcccaccgttccaggaaccacctcgtggcagtg

SEQ ID NO: 426430 - DNA, 122 bp, Homo sapiens
aacaagcccagtgggtgcaagtgaaattcagccagaggtgctgctggccacagagtttgccgctggtgaagcaacagccaaagcatccagtgacacttgcatacattttggataaagtattc

SEQ ID NO: 426431 - DNA, 122 bp, Homo sapiens
attaaaaaaaaaaaaagaccgggcggcagagagggaaggacttaaggacaagggaatgaccgtcctgctgtgcggcatgtcccccacatcccgtggggcctgttcctggtgggccctgccag

SEQ ID NO: 426432 - DNA, 122 bp, Homo sapiens
tcttggactccacaaagtatttcctgattttgttacaaatcttgcaactcttcctcccaccgccactcccctgacatggagtcgtagaatcttggagatggaagagggatgcaagcccactg

SEQ ID NO: 426433 - DNA, 122 bp, Homo sapiens
acctcgtgatccacccgccttggcctcccaaagtgctgggtttacaggtgtgagctactgcgcccggctgcttttattgtgttctatgaggtgcaacgttccgttatatccctggagtagaa

SEQ ID NO: 426434 - DNA, 122 bp, Homo sapiens
aacctagtctagataaatcctggtgctccaggggcccaggcatgggggtggagtaaaactcgcccattcacctgtgccggcaggttctctgcaccagaaccaataagtggccacttggtaat

SEQ ID NO: 426435 - DNA, 122 bp, Homo sapiens
cctgctccatggctgcagttcggcgcggcgaacccagtgcgcctgcgccgccgccgcgcccgcggccaaccagtctctcagctagcgacgcccgcccctccgctagccatcgcctcgcccct

SEQ ID NO: 426436 - DNA, 122 bp, Homo sapiens
gctcttctctccactggacgctcactcgaatcttcacgtgcaggctcctatttctaacagcgccgccactctgagagatgccacttatgctctaagcccacgcagcactgaccactctctga

SEQ ID NO: 426437 - DNA, 122 bp, Homo sapiens
actccagagtgagagcccctaggtgtcctgcatgactcatatactgttctgagacaaaggcggttgtctttgtttgggatctgccaggaattcatgtaatcatgttgatgtctccagtcatg

SEQ ID NO: 426438 - DNA, 122 bp, Homo sapiens
ttacctgtaggaccacgtcgttcggcagctgcgcggcccggaacagctccagcacccgcccgttgaccaccaccttcttggtgctctcaatgtcgcagtaggagaagagatctgaatagtat

SEQ ID NO: 426439 - DNA, 122 bp, Homo sapiens
ttgccagacaggacaagcggccacacagaagcccggcctccctgctgcggcacctcccatcgtgcagttttgggcaaatccagcaggtgttgagggaaatgtcagccacaatggggctcaat

SEQ ID NO: 426440 - DNA, 122 bp, Homo sapiens
acaaaaccaaaacaaaacaaaaagcccccaggagccttgcagctccaggagcggacaccacgtctctcttacctgggccatgactacccattgttaaataaagaattattcagtgatgctta

SEQ ID NO: 426441 - DNA, 122 bp, Homo sapiens
tctatcccagtataccgctgctctctcaggggcacttggatccccgttttgggtcttaaacgagctgccgagggaggggtggagtggcgcgtttttacttaccacaattaatcatctccatt

SEQ ID NO: 426442 - DNA, 122 bp, Homo sapiens
ttctgtcggttcccttctcagctacccaatgctgctgcatgtggcagcccagatcgcctccggcatgcgctatctggccacactcaactttgtacatcgggacctggccacgcggaactgcc

SEQ ID NO: 426443 - DNA, 122 bp, Homo sapiens
gatctgcctggccaccagagggcagcagagacgggctcactgtcggcttcaaggatgttccgcaagtcgattcacttacagactcttcttcaaatgcggcggtcacctgtgacccacattca

SEQ ID NO: 426444 - DNA, 122 bp, Homo sapiens
ccccagtccccaccccgcccggaagctaggactcctctgatgggagcaggtgtctgaaaccggagggagagtggggcgtacccggctttcccagtggcccctctgggcggctggcgggtttc

SEQ ID NO: 426445 - DNA, 122 bp, Homo sapiens
ggacagagagcgtcctgagggggctggtgtgtgtgttgtgtgtgtgtgtgtgcacgcgcgcgtgcatatgtgtgtatgggggagttcagtttcaggtaccacacatctggaagtcagagaaa

SEQ ID NO: 426446 - DNA, 122 bp, Homo sapiens
tggggaggatgaaggctttatataccccaaggccaggggtggactggatagtagtgatagcggtagtaagaggagatagtctcaagtcataatgtagttgctgtgcatggagtgtgtgccac

SEQ ID NO: 426447 - DNA, 122 bp, Homo sapiens
ggcccgcccctcccgctccaggccacgcccctcacccacagccctcggaggctctctccgcggctccgcctccaagcgacctccgcaagtcctctcgtaacccctggagtagcgccgtcccc

SEQ ID NO: 426448 - DNA, 122 bp, Homo sapiens
acaagcccagattccaaacctgactctgccacttctaattgtgacatctgggagaggcatcgctcatctcttagccttggtttcctcatctgtgaagtggggataattctctttctccaaca

SEQ ID NO: 426449 - DNA, 122 bp, Homo sapiens
gtcccctgggaaccgggctgcccgagacccggccctgccggggttccctgcgccccagaccggaacccccagggctttggtcgttcccacagccgtcccgcgggccccctccacggtgcgtc

SEQ ID NO: 426450 - DNA, 122 bp, Homo sapiens
gcacgcaccccccggtgctcggaattggctggcagtaccctgccccgccccgccggtcgccgcccccgccaccagcgatcgcttgggagagggttacctcgagctccacctcagctgcggag

SEQ ID NO: 426451 - DNA, 122 bp, Homo sapiens
agaaccaaacacccattaatggtgtggtctaaggacaaggtcctgaagagatgagactggcgcatattaaagatgcctgctatgatgatgtggctgtcatggctacattatcatgagggatt

SEQ ID NO: 426452 - DNA, 122 bp, Homo sapiens
tgggagaaaagtggtgttactcacccagggagagtctctctttctaccttccttctttctcgatctccttgtgtgcttttgtgtttctttatttcttttccttttttttctttttttttttt

SEQ ID NO: 426453 - DNA, 122 bp, Homo sapiens
atttcactggccagcctcttcagctcccagctggactgaacagcgatgagtgtgggcccccggcgctcctcctgggtcaaggcaaaatggaagaaaagacctgggtggacccagcctcaaag

SEQ ID NO: 426454 - DNA, 122 bp, Homo sapiens
gacccaccccgggtctctagtttccctctcccagtaatgctccttgttcctaatgaaccgcgtgcatctttggtgtctgcgctgctgccgctacacctttgtgaacaccaaatgcgcaggaa

SEQ ID NO: 426455 - DNA, 122 bp, Homo sapiens
gtcctgggcccccgggaccacgtgcgggcccagcgggcatggagtgcgcttgaggctgggcgctccggctccaagagccttcgtgtagaaaagctcttccgcagtgcttgggcaccctgacc

SEQ ID NO: 426456 - DNA, 122 bp, Homo sapiens
gcttccgccacctgctggaatacatcaatgaggtctggcaggggacacctgggtgcagggcgttagaggcgtctactgtggcaggggagggagagcggggaactgaaagccacccctctggg

SEQ ID NO: 426457 - DNA, 122 bp, Homo sapiens
ggctgtacctgagaccaatccccttgataaaatgcagccaggcctgaagcacgttcagaacggaagcagcaaaggtgatgatatcgctcgttgctactcagctttcaggaggaggctgggcg

SEQ ID NO: 426458 - DNA, 122 bp, Homo sapiens
gcttggcttagggatggtccgcaggccgcctggtgggagcaggaccgccgtggcccggtccgttctgcggttgcgtaggtcatagaaggaaaagtggtttgtgatctgatagggaatctgag

SEQ ID NO: 426459 - DNA, 122 bp, Homo sapiens
agggtaaaggccctctggctgaaattgaattctggagggaaagaaatgcaaccttaagtgcgctgcatgaacaaacaaagcttccaatagtcagaaaagtcttggatgtgatcaaggaatcc

SEQ ID NO: 426460 - DNA, 122 bp, Homo sapiens
cttgcctgaaaccggctcctcgacggccgccgcccgcctggccttttagggcctgactcccgcccttcctggcctacactcctgggcggcggcaggcctagcttctggcccagtgcgggttc

SEQ ID NO: 426461 - DNA, 122 bp, Homo sapiens
gccttggcgggaggggaggaaggaggctggacgttgggggtgacgttgcttggaggaggtcgcttcggagcacacaggtgcctaaagatcagcccttgcgcaggggcacgccttccccgctt

SEQ ID NO: 426462 - DNA, 122 bp, Homo sapiens
cccagctccttgctgggaccctgagccctgcacggatctcagtttccctagaaggtctcccgagggcactaagcgttgcccctggccccctcccgctgcaggagactcggggctcggagccc

SEQ ID NO: 426463 - DNA, 122 bp, Homo sapiens
tgatgtttctatttccggaggagtatcttggaggacctttaagttttcctttcctcccttcgtttcattttttttcttctcaccctcttctctcctccatctctccttacccactttctgtc

SEQ ID NO: 426464 - DNA, 122 bp, Homo sapiens
acccattagattctttttgcttgtttcctcatctgtaaactttgaaaggagagtatttcccggggtgattctgaaaatcatgccagaactgaaaaggcctgtgtaaatgcgaggtgtaatga

SEQ ID NO: 426465 - DNA, 122 bp, Homo sapiens
ggaggtgagagcggatgggaggtgaatggatcaggggagtggatttttcacaaatggcttcgcaccattcccttggtgccgtcctcacgatagtgagagttctctcgagatctgattgtttc

SEQ ID NO: 426466 - DNA, 122 bp, Homo sapiens
agcctcacaccctttatctgtgatgacttttcgagagtctggggccaacgtcctgcagaacgtcccccagatgcatctgtctctcagggcatcattaaattccctcttatgcacctcagttc

SEQ ID NO: 426467 - DNA, 122 bp, Homo sapiens
gcaggccctgttgcacggtttccttatagagtccagagtcagctcactcctccattacgtcgcacatccacaaaggaggggaaggagaggcagcggcatcgctgcccgccgcacggacggat

SEQ ID NO: 426468 - DNA, 122 bp, Homo sapiens
taattgtccatgaaatcaaacttttgtattggcatgacgtcggccctaatacctgcagcacgcagctccgttctgggcgttggagggataaattgagtgcagacccttcgacgtgctgcgct

SEQ ID NO: 426469 - DNA, 122 bp, Homo sapiens
ctgttgtctctggaagtgaccagaaggcattatttggaatataccagaaagatcacgagacgtgtcctagatttcttccaaaggtcaggaagaactttttttcccttgaatataaacttgaa

SEQ ID NO: 426470 - DNA, 122 bp, Homo sapiens
gagccgtccccgtgcatagggcagcggggtggccgccgagtcctccgtggctcacgtccccgcagaacctgatctgctcgtgagcttggcaagcatctcctggatttttaatttgtgggaga

SEQ ID NO: 426471 - DNA, 122 bp, Homo sapiens
caggagcaggaacagtaccacaacaaaagcatattctctttagtcgaaagactaggaaagcggcagctaacagggcaatatatttagacaacaggtctactccagccagacactgcagaaaa

SEQ ID NO: 426472 - DNA, 122 bp, Homo sapiens
tttcgaagggaatgtttttgaggactttggggaaagtttgtctcccctctgaaggatgcccgtgagtgtgtgctgctgagaggatggcagaatggcaaggtgggagcattctgcaagcatca

SEQ ID NO: 426473 - DNA, 122 bp, Homo sapiens
aaggatgttgggacgggtaccactttgctttctgatttctgtccaacaaatctttatgatcgtctgttttattcaacaatactgcgggaaaagcttcagctgcaagctgagggggtgggagg

SEQ ID NO: 426474 - DNA, 122 bp, Homo sapiens
ggcctgggctgggctggtgcacagcctgggcccggcgcggcgggggttaaggtgggcgcccgcgccccgcgccccgcgccctcccgccgggatgagagcgcagtccgcgccgccagcccgcc

SEQ ID NO: 426475 - DNA, 122 bp, Homo sapiens
cctgagccccgacggctctcgaggttctgagcctgtggcctgcacagggaacttcctctccgactgcatttatgcctctgtggatgtgaaggctatttctagaaatctcttcctttgcagaa

SEQ ID NO: 426476 - DNA, 122 bp, Homo sapiens
ctgtatgggaagaaccgctctcgcatacccttgctccgtaagcgtcggttccagttataccgttccatgaacccgagggccaggaagaaccgctctcacatacccttggtccgtaagcgtcg

SEQ ID NO: 426477 - DNA, 122 bp, Homo sapiens
gtccaggcgaccgtcccgcggagccggccgcccacctggtccaccctgggaagagccggccgcccacccagtccaccctgggaaggtccaggcaaccatcccgcacagccggccgcccaccc

SEQ ID NO: 426478 - DNA, 122 bp, Homo sapiens
ccgagtgaagatcacagtgaaggagctgctgcagcaaagacgggcacaccaggcggcctccgggggaaccgtaagcataagcccttccctcattccccagcccatgccaggcctctttcaaa

SEQ ID NO: 426479 - DNA, 122 bp, Homo sapiens
gctgatcagtgcatgtgtgtgggagaatgcccaaggtcaggggaagaaccactaaattaacgtgaggaaacaatcatcagagctcacatagtgctagaaagggtgaaaacttgtgaatctgt

SEQ ID NO: 426480 - DNA, 122 bp, Homo sapiens
ggcggcctcgggaagcgggctcggctcggggaaaggccgccaggcagcgaagcgcgccggcggctcacggaggagcccaagctctcaacgcggcgtctcctgccgccagccccgccccggcg

SEQ ID NO: 426481 - DNA, 122 bp, Homo sapiens
ccgtgtactgcctgttccgcttcctgttggcctttgccgtggcaggcgtcatgatgaacacgggcactctccgtaggtctctgacctggcgccatgcaggggggctccatgcaggctccagg

SEQ ID NO: 426482 - DNA, 122 bp, Homo sapiens
ctatccctaaacctttcgcggggctcgcgcgtttggttttttgagtggagaaaggactctcgagacaaaattcactgccagttgccctaagaaccccccagatccctgtatctcccttcctt

SEQ ID NO: 426483 - DNA, 122 bp, Homo sapiens
actgccagtccctacccactcttcagtggggcaacaacaataccgagatggcagcgttggcgcctgcaaaagtggcttttcagttattgggcacctggagggaaaataatgatttcttggca

SEQ ID NO: 426484 - DNA, 122 bp, Homo sapiens
ggaagaggaaaaagagctccccatggacaagagggcagagaagttggaggacagccaggacgggggattcctcaacatcccagcaaggtcaacagtgctgcatgctattgagaggcccacgt

SEQ ID NO: 426485 - DNA, 122 bp, Homo sapiens
tgtttgggatactctgaatcaggagactgaactggccaatgtgccaatagctttgtgtggcgctatcctagatgtcaagccagcacattaggaaggttaggaaggttagaatagattacccc

SEQ ID NO: 426486 - DNA, 122 bp, Homo sapiens
aaactctcagattttgcctctgtgttcttccttgttccattctgtctaataaccaccaatcgccctttctccaggacagttctaaatgccaaaacattcatcagctgtgattccagcccaga

SEQ ID NO: 426487 - DNA, 122 bp, Homo sapiens
aactgtgggcggacagcccaacaatcggtgttttaataagcccccgggtaatcttatacacgctaaagtctgagaaccactgctctagagaaatgcacaaacgttccttagtggagattaaa

SEQ ID NO: 426488 - DNA, 122 bp, Homo sapiens
tcacaagggtttcataggaaagatgtctgcacctgtgttttcaggctaccggggagcccgcgttcatttccagtctagtcgtacttccctgagtcctgtccatgaatactggatgagccgac

SEQ ID NO: 426489 - DNA, 122 bp, Homo sapiens
cttcctcacaggacgtgcacaaggacccggacctgcaaagtgtaactgaagagtgggctacgcaccccggttctgaagtaggcggtgggatcacagagtcattgtgcaccaaagataccaaa

SEQ ID NO: 426490 - DNA, 122 bp, Homo sapiens
tccgctgtctgaggggttttgtccgctgctcatccatgctccatttctttgttccctgaccgggaatcgaacgcaggcagcagcggtgagagcaccgaatcctaagcactagaccaccaggg

SEQ ID NO: 426491 - DNA, 122 bp, Homo sapiens
ggggagggggaggggggttcaaatcaaagttaaactctctaccgtatcgctcctcgctggcgattagcggaggagagaaaggaacagcaaatccaacacagaagctgtgaaactggggttat

SEQ ID NO: 426492 - DNA, 122 bp, Homo sapiens
ctgtcgaagccctctgagcttcagggcagactgaagagccttacacaccagacacttggacgcgatcgcgccagaaatccccgggaattcagtcttggctccgactccaaaacaaatgattc

SEQ ID NO: 426493 - DNA, 122 bp, Homo sapiens
gctttgcggtggggtgggaaccgagagagagccgtcctcggtgcggtggcctggctttcccggccggcctgtctccagcggcgccgcttggtgggcccggctgtcgctccgctcagggcctg

SEQ ID NO: 426494 - DNA, 122 bp, Homo sapiens
cagggtcgcctctggagccagccgagctgcatttatgccagcgtcattaccacgctaagtcgcttcattgcatgtcaatgctccggcggggccagaaccccgggacagcagcgccaggcctg

SEQ ID NO: 426495 - DNA, 122 bp, Homo sapiens
cccggcgcctggcgagacggctccttctgcccccgggggacccccagggacgagggatggcgctgccacccaagcggcccaccctttgccccaggccgggtgcaggaggagctagaccgcgt

SEQ ID NO: 426496 - DNA, 122 bp, Homo sapiens
aacctctcctggctttcccaatgttgggccaagggccacaatgagtgatgatcactaagccggtttttttgttgtagttaccagtgttgatgtttctcatgaaaccagaggaagagaaccgg

SEQ ID NO: 426497 - DNA, 122 bp, Homo sapiens
gtgggtctgggtggaaacctgcagctttggcatgggtgaggttcaccttcctgaaccctccgggcccgcagcggcgccgcgctccgggcgggctgtcgccgtaatctgggtgagcggcgccc

SEQ ID NO: 426498 - DNA, 122 bp, Homo sapiens
ctccggcgagggtgggagacggctttgtcctggggacactttccctctggaatctcaagacgacgtggcacacattccacgtgggtgctgccgccaccccagtcggtcgtggcgtgcagctg

SEQ ID NO: 426499 - DNA, 122 bp, Homo sapiens
agcgaagcttcatctgtgtttacagccgctcctgatcaactggcattactgccttagctccgcctcctgtcacatcagccgggcagcatttgattctcataggagcatgaaccctgttgtga

SEQ ID NO: 426500 - DNA, 122 bp, Homo sapiens
tcactcaccccgacgctcctgcgtcctcctgagcactcacccttgatggccccagctcctcggagactcagcaggaaagccaaggagagggctctcaagatcacagctctgatatggaacat

SEQ ID NO: 426501 - DNA, 122 bp, Homo sapiens
tggggctgattggctcccgaggccagggctctccaagcggtttataagagttggggctgccgggcgccctgcccgctcgcccgcgcgccccaggacccaaagccgggctccaagtcggcgcc

SEQ ID NO: 426502 - DNA, 122 bp, Homo sapiens
tccagtccatggagttttcattattcattattcgccgggcccgggcagcacagcagcgcccgtgtctgtctaatccctacctgataatgtgtttctgataagcatgacggagcccagtgctc

SEQ ID NO: 426503 - DNA, 122 bp, Homo sapiens
cttctctccgtgtcacgctccctcctggttctgcgcgtctacaaacttttgagcagaacacgagcctcggcaaacgagtcccgcagctcctcctgctgctcccgctggttcctgcggcttct

SEQ ID NO: 426504 - DNA, 122 bp, Homo sapiens
ggcctccccttttccaagatgtggttttgcttcatattgggttctatcgggttgttacgacgagatggatgagggacagatgctagtataaagtggccagtttaataagtggcccatttatt

SEQ ID NO: 426505 - DNA, 122 bp, Homo sapiens
ctgtgttcccagaaccctgcacggagcctggcacacaatgaatcctctggaagtatttgtcgtcttaaattctgtggaaccgaatttgtttttttttttaagatggagtctcgctctgtcgc

SEQ ID NO: 426506 - DNA, 122 bp, Homo sapiens
ccccttcccccacctcccctcctaattcatcaactgctgaaacatctgcctggctgaaaccgccttctcgccgcgcgctgggggctgtccccaggtgttggtctttgtgtcgagaaaacttt

SEQ ID NO: 426507 - DNA, 122 bp, Homo sapiens
atggcatattctactttgcctctcggtaacatctagcaaggtcgtctttatacagaaactcgtgttttgagtactgcttgtggccagcgtacgagcgtagcttcccagcgcccagtgcagtg

SEQ ID NO: 426508 - DNA, 122 bp, Homo sapiens
caagagatcaaactgcagatcccacgctggttcttctgggaggtcggagaagacatggatcgcagtgagagagaggcccttggagtcagcaaacacaacgcgcttcttggcttggttgtgtg

SEQ ID NO: 426509 - DNA, 122 bp, Homo sapiens
gggagctcatgaattccttgctctcgatggtcacgcccgagcctgagatgatcacctgtccgtccttcctccaggtgatacggatgggcatgtcccccgaggacaccacacagggaatgtag

SEQ ID NO: 426510 - DNA, 122 bp, Homo sapiens
cattctagaaccagagctttaaatggcctttttgtctccttcctcatacatctggggcagcgaacatgacattaaaatgcagccagaaaaatgtcccataaagaactttattgacaacaagg

SEQ ID NO: 426511 - DNA, 122 bp, Homo sapiens
tccccttatggcagcggtctgagggacagcagaagcatccctctggggtcactcagaccacgcggctcctggagcctcggatcggctacttcagacatggacgtctctgagtcgtcagtgcc

SEQ ID NO: 426512 - DNA, 122 bp, Homo sapiens
tcaccatgatgaccgctgccgggacgcctccttggcactcgggaggccagattagagaaacgatgcccccagcacctcctggggctgcttctggactcgccgctaacacatctgcggcatcc

SEQ ID NO: 426513 - DNA, 122 bp, Homo sapiens
gcacttcgcacactacattctccagaggggaggaaggttggatcctcacacagcagaaggcgggagtgccaagagacaaaaaggggtcaaactcaccattttataagggatttaatcccacc

SEQ ID NO: 426514 - DNA, 122 bp, Homo sapiens
aaactgaacattagtcatttcttaaggtaaagccacttcattccaaagtcactgtctgttcgcccttaatttatcaccgtaatttatctaagaggtaaaactgaacaccgaaaaggtaagat

SEQ ID NO: 426515 - DNA, 122 bp, Homo sapiens
ccctcaggtgttcatcctccagcagcgcagccctgcccaccctcgggaggaggaggggcccggcgctgacacctgcggccttctcagtgccacagccgggctctgcatccctgcaatgctcc

SEQ ID NO: 426516 - DNA, 122 bp, Homo sapiens
cccggaagtgacgtaactctacggcctagcaaccgttgccaaggagctcgactctgggagcggtctagagcccgggcgcctcctggggggtggggaaacggtttcgtgaggagaatttgagg

SEQ ID NO: 426517 - DNA, 122 bp, Homo sapiens
cggaagtggaaatgcattcaggaccccgctttctgcaggagagagctcttctttttctttcgcctattagacctccgctcttaacctcactccttgtgtttctgtgtccttgatttcctcag

SEQ ID NO: 426518 - DNA, 122 bp, Homo sapiens
ctttgtgtttcctgcagaccgattagtcttatggaagcagacaagggagcaaaaaaatggcggtgggggggaccccagaactgccacggacaagaagccatcgaagagacacactcccatct

SEQ ID NO: 426519 - DNA, 122 bp, Homo sapiens
agttttctcttatactttcttccagacattttagagttttaggttttacatctaggtctacgatctatgtagagtgaatttttgtatatattgtgaaatacaaatctagagtcagagtcggg

SEQ ID NO: 426520 - DNA, 122 bp, Homo sapiens
agcaggtcagtctgcagtgcggctcgagctctgctgttgggtgatgcaggtggcgggcggcggggatccagtgccacattagcaagaagtcctattcagtaggtgagctttctgaacagttc

SEQ ID NO: 426521 - DNA, 122 bp, Homo sapiens
gccgctgctggcctggctgctactgccgctgctgctcctcctcctcgtgctccttctcgccgcctacttcttcaggtaggagtgtcccggggcactgacttgccccaaccagctcagaggag

SEQ ID NO: 426522 - DNA, 122 bp, Homo sapiens
ctgtcgcctgcggggtgtgcaggaggcccctagtgaagccaagagttcgtagagcctgggcgccgctctatgctcggctctcgattgctcacgcctggcagcggcgagcggcgcacgcgacg

SEQ ID NO: 426523 - DNA, 122 bp, Homo sapiens
ctcttatggggtgggttccctgcagtcgggggtctctgagggtagggacccctgcagctccgacacacatttctcccagtagggaagcagcttccagagtcccaggatgagccccttgcatg

SEQ ID NO: 426524 - DNA, 122 bp, Homo sapiens
ccgccagcctaagccaatagtgtggctgcatgtaaatgagaaaccgcgagcatctccccccgcccccggctccgcccaatttcccacctcttcccggagcgcacagacgccagctgagtggg

SEQ ID NO: 426525 - DNA, 122 bp, Homo sapiens
tgtgagaagcggagtccccgatgcaacaggtttacattgaaggcctgccctgtgcagggtcgacacctgtgagagcggaaacggtgcttccttggatgtcgcgcgtttggtgcctcggtatt

SEQ ID NO: 426526 - DNA, 122 bp, Homo sapiens
gggtggtttagttttttcgctgtttggggccatattgcttttatgagctgtgacactcaccgcgaaagtctgcgaagcttcattcatgtaagcccccgagaccacgaacctgccgagaggaa

SEQ ID NO: 426527 - DNA, 122 bp, Homo sapiens
gacacttacacccttatagtcttgcccgagtatgagtgggacaatgtcacttttgctcttcgtacataagccttgttacatgggattgcagtatctttaatttttctggaagttactaattt

SEQ ID NO: 426528 - DNA, 122 bp, Homo sapiens
taagtgtatggtttttctttatactaaaccagtgggcttgtgatttgaggctactgttttcgatggtattgtattgagtccacagagaatatgtatacctgaatcattggtataatgtcttt

SEQ ID NO: 426529 - DNA, 122 bp, Homo sapiens
accatgaggctcatcctgcctgtgggtttgattgctaccactcttgcaattgctcctgtccgctttgacaggtaaatcttacttcctgtgttccagtctctgtgtagaagagaattaaaggt

SEQ ID NO: 426530 - DNA, 122 bp, Homo sapiens
gatatttgaagaagctttcctctaggtggactttatagtaccttgtaagtctggtccagccgctatattttatttccccaatgctccacataggtggagttatagacacacaccagttgaat

SEQ ID NO: 426531 - DNA, 122 bp, Homo sapiens
gccgaattctcaacaccatttctcatggtcgggacctagacagttagagactgtgagagccgagatgcaaccttcggtcttcgttctcggctctgcggcctgcgccatgaaaatcctttgct

SEQ ID NO: 426532 - DNA, 122 bp, Homo sapiens
ttcccaaatgcctaacaccaggccttagtcttaatcgctgctggggaagcgctggtccatcggagccgtgtggggttgtggaagcacctcggacagaggccctgcaccctgggtctcggaca

SEQ ID NO: 426533 - DNA, 122 bp, Homo sapiens
acatgatagccacaagctggaaaaataccaagtgttcagcaagggatgagtgtgggccaccgctcctgatgtgcactagaaagagagggctgtggatgattccttggtgcgatgtgtgaaaa

SEQ ID NO: 426534 - DNA, 122 bp, Homo sapiens
agaaggatgttgtgataagctacaaattctggcaagggccagatcacgtgggccctgctacgccacaaggaggagcttgcttttacttagcagatgatagagatattaaaactggggaatga

SEQ ID NO: 426535 - DNA, 122 bp, Homo sapiens
tggatgctgggctggtcaggggaaggagaggacaggctgcacctgtgacagcaaggagggcgggactaccgtgacgttgtccctgggccccactcgctcactgggatggcattccttcctgc

SEQ ID NO: 426536 - DNA, 122 bp, Homo sapiens
tagaaagagcagggagaaggaggtaacaattggtcagctgcttgattgatcacaggttcacgttattgctaacaggcttcacatgtgcctaaccacaagaaacacctgtgcctgggttgtga

SEQ ID NO: 426537 - DNA, 122 bp, Homo sapiens
cctcaccctactggaactcgggtgggtaatgagtctcttaacttgagatgggaacccagacggagcacagctgggaaggctgtcctatagaccctatgccagaatgtgtgggtagctgtgtc

SEQ ID NO: 426538 - DNA, 122 bp, Homo sapiens
gcggcgcgcagtgtcccgtgaactgtgagtactgcgactgaacggcggcaggcgagcgggcgattagcacccattgcatgaattatgaaacaataactttcggaagaagcaggaggaaaaaa

SEQ ID NO: 426539 - DNA, 122 bp, Homo sapiens
acatccaccctccttccagcaaataaaccttggaactaagttgaaatctgtcacttatttcgctcctcctaccagcggcctattgcttctgccctccccagtgaacccaaccaagttcctct

SEQ ID NO: 426540 - DNA, 122 bp, Homo sapiens
gtggatgggaaagacctgcctttcacctgacagacattctcgactgcccctgccggtgttcggcatacactaaagatgcctcgctgtttgttaacggaggcagcaggtctgagagagggctg

SEQ ID NO: 426541 - DNA, 122 bp, Homo sapiens
gaaaaaaataggtccctcactataccagttgtccacaaggacaaatattagatagggggccggaggtgggggatggtgatgcgagagtgatggtagagaaaagttcttcctaaaacccaaaa

SEQ ID NO: 426542 - DNA, 122 bp, Homo sapiens
agcttcgagatcagcaatgtgagactagcccgggtcatgctgacacagtttgccgaggggcggctggaagatcaactggacaaatatgatcactgggctgaccgctttgaggacctgcccct

SEQ ID NO: 426543 - DNA, 122 bp, Homo sapiens
gagttccagaccagcctgggcaatatggtaaaaccccatctcgccaggcgcggtggctcacgcctgtaatcccagcactttgggatgccaaggtgggtggatcacttgaggtcgtgagttcg

SEQ ID NO: 426544 - DNA, 122 bp, Homo sapiens
aggagtgcatgatgatccaatcagccggcgcggggaggtgcatgtccgtggccaggaagacgatctcggctccctggaggatgtcaaccctatggatctgccgcaggtggggcaccaccacc

SEQ ID NO: 426545 - DNA, 122 bp, Homo sapiens
agcctccccgtcctcaccaccttttcttctgtcatctgagggtaattcctcccctgcagtcgtgctttccgggctcagcaatgacctgctacctgccacgtctagggatctgtcccctcagt

SEQ ID NO: 426546 - DNA, 122 bp, Homo sapiens
aggccccatcgctcctgcttcctggctgtgggctgcagggaggatcccagtccaaggccccgctggaattagacggagtggctatttccttaacatgagttggcattaaacggaataaccgc

SEQ ID NO: 426547 - DNA, 122 bp, Homo sapiens
gggttgactgcatggtccaataaagccccttggaaaaaagctggcctggtacctcacatacgtggttcccttacagatgagtaaagaatgtcaattcctggcaggtcccagaatcttaagat

SEQ ID NO: 426548 - DNA, 122 bp, Homo sapiens
gatcatttcccctcccccagcagaatccggggtccaccagagatcggatcccccagagaccggggtccacctaagaccgtggtccacccaaagactgagggcccccagagatgggggtacac

SEQ ID NO: 426549 - DNA, 122 bp, Homo sapiens
gacagctgggagggtggctctggccgggagcggcggccggtgagctaccgcgaggaggagcggcggaggcgacctcggcccggccctgcactggccgcccggcaggcgcgacatgagcctgg

SEQ ID NO: 426550 - DNA, 122 bp, Homo sapiens
gaatgcgacctggacatggcgtgggagcgccgagctgtccccttgtggatggggagctttcgttcactcagcagacgtttatggggcgcatgcgtgactctggggcgtttagctgagccgga

SEQ ID NO: 426551 - DNA, 122 bp, Homo sapiens
agaaacggacactgggcaataactttagcaccagctgggagaattggtgatgattatagtcggaaagaatcccaaatatgtgatgctggtaatctctggtcataaatacatattgagtgtaa

SEQ ID NO: 426552 - DNA, 122 bp, Homo sapiens
acagggggcggtgggggggtggcaagccacagctcccagggacacgggccagggcactcacgctggggctgcaggtgctcgagcagcggctgggcgtggtccagggcacgggtggtcaggcc

SEQ ID NO: 426553 - DNA, 122 bp, Homo sapiens
ctcactcttttcctatttggattccttttatttcttcctcttgcctgattgctttggctacgacttccagtattatattgaataggagtcatgagagtggggatccttctcttgtttcagtt

SEQ ID NO: 426554 - DNA, 122 bp, Homo sapiens
agtgtgaaaaatggagcatgatggaggcgtcaccagacctcccaggctctcgactggagccgcagctctcaatgcagctggaattgccaggggcagtgagtgcttgtccagctcactgctct

SEQ ID NO: 426555 - DNA, 122 bp, Homo sapiens
agcctaggattcgactttgaatggtccgttaatgtggtcgcaaaacgtgactcggttcatcgggcgctccctgtaagcaagacaagcacccacctgcggtcagagcaggggtccggctcgcg

SEQ ID NO: 426556 - DNA, 122 bp, Homo sapiens
aggcccgggccggggggaaaggtcggatttgctcggcggaagaaacacagatggcggcggcgcagcgccattccgggccgggagcaggcagccagcagccctgtcctcaccgcggtccgccc

SEQ ID NO: 426557 - DNA, 122 bp, Homo sapiens
agcaccagcgcccaggcgggcagacgggggtccatggtggtgggtggcgccggggccaagcggggaccccctttataggcgcctgggccgtcccagctgggggccttggagaagggacagaa

SEQ ID NO: 426558 - DNA, 122 bp, Homo sapiens
tgacttgatgtcctctctctctgcaggtcttctcagtacagcatggtggctggggcaggccgagagaatggcatggagacgccgatgcacgagaacccggagtgggagaaggcccgtcaggc

SEQ ID NO: 426559 - DNA, 122 bp, Homo sapiens
ctgtgcattaacgcaccatattattacagctttacagtatcttggtatttgaaagggcgacggccctaccttgtttttcaaaagtgtctggccctaccttgtctttcaaaattatctgactc

SEQ ID NO: 426560 - DNA, 122 bp, Homo sapiens
aactggggagacgctggctcctttggaggctgagctgacagaggcttccagaggctggagcgtcactgtatttataagactggtggattgcacaacctcgtcgacggaactgaagggaggtg

SEQ ID NO: 426561 - DNA, 122 bp, Homo sapiens
ccacactcagcctccaggagtccatccaaattaccttttcctatcgactgttagctccagcggcttttggggaaggagatctgagttgctgcatctctctggatgtgcccctctctccaggt

SEQ ID NO: 426562 - DNA, 122 bp, Homo sapiens
ccatgttaacggcccccagtgtggactgtcagctccatgaaggcagggccctacttatctcgttcacagcacaaggccgggcacacagtaggtgctcactcaacattcctgggatcaatggg

SEQ ID NO: 426563 - DNA, 122 bp, Homo sapiens
cggagggccagactcccccaaatccagtggccgaagacctggatttcctgggaggatccccgggggcccgaggcaggcccagctgggccccgtctgctcgggacgcgggaggcctcagccgt

SEQ ID NO: 426564 - DNA, 122 bp, Homo sapiens
ccaccgatgttcacgcccagagatgtccaaaacggaacctccgtgtccaaggagggactgcgggacttgcgcgaaagtgggggaccggaccctccggggccacacccgcccgccccgtggag

SEQ ID NO: 426565 - DNA, 122 bp, Homo sapiens
ggggtttcaccatgttagccaggatggtctcgatctcctgaccttgtgatctgcccacctcgacctcctaaacctggctaatttttaaatgttttgtagagatagggtctcgctatgttgcc

SEQ ID NO: 426566 - DNA, 122 bp, Homo sapiens
ctgggactgccagggcgctgatttcaggaggggatgggcaggaccggagtttgcggagcgcgtctgaattttaggttgtgccactctgcttctctgaccatttaaaccggtgacattcgaaa

SEQ ID NO: 426567 - DNA, 122 bp, Homo sapiens
acatcggttgtcactcctgggggagggagctactgcgtctagaaggtagagccagggacgcggctaaacatcttataacacacaagacagcccctacaacgaagcgttagccagtgccaaat

SEQ ID NO: 426568 - DNA, 122 bp, Homo sapiens
ctcgggggctgggtcggttctgggatctccacgggggctgggtcggttgtgggttctcctcgggggctgggtcggttctgggatctcctcgggggctgggtcggttctgggttctcctcggg

SEQ ID NO: 426569 - DNA, 122 bp, Homo sapiens
ctggctaggcgtggacctgtgaattcctgaggggtgccccttagcagtccatttctctttcgtgtggttttactaagaagttacctaacatttcctgggaagagaggtaatacaagcccctc

SEQ ID NO: 426570 - DNA, 122 bp, Homo sapiens
ttctcctgtgtcacctgtgcgccatgactgaacccctcttaggaaacttgaacatccttccgatttcacacatctgcggacgtgtccccacgtggactgggaggccgctgcctgtggttcct

SEQ ID NO: 426571 - DNA, 122 bp, Homo sapiens
tccttcccaagtcatttgaaaagtgtttgttatttaaattccaataatgcccaatactgacgtgtcttgagtaatttggaacccaaagtgaagatctttgataaagatttttttgtggttcg

SEQ ID NO: 426572 - DNA, 122 bp, Homo sapiens
gtgggggagggtgtttgaagggggaggggcgtccatgagatgggccggaggttcgaggatcgggtggaaatcctcagcccaactcctagagtcgagccccggtagacccctcccagctcccc

SEQ ID NO: 426573 - DNA, 122 bp, Homo sapiens
gaatctcctcccgcagaagtgctgatcaaacactgcccctgaaatgactgaagcagttcccgccggccgataggtttttatactttgagggtcccaggccacccactcacggctgtcctgtt

SEQ ID NO: 426574 - DNA, 122 bp, Homo sapiens
attcagactgggagctggggtcagagtgtctccgtctccggagggggaccttccagaccccgggcgggaggggcccacagcagggtgccccggcggccccaggagggggtccgggcctcggg

SEQ ID NO: 426575 - DNA, 122 bp, Homo sapiens
ataaaaacacaaatatgccataactcagccgcccggccgcccagcctccaacatgccccgcgcccgggcctctcaggaaggtcattacaaacgactttccgattcactgctcctgaaataat

SEQ ID NO: 426576 - DNA, 122 bp, Homo sapiens
gtttgtggtgagccgagatcgtgccattgtactctagcctgggcaacaacagtgaaataccgtctcaaaaaaaaagaaaagacaaacaaggcctctgctcctctggaacttaccttgtaatg

SEQ ID NO: 426577 - DNA, 122 bp, Homo sapiens
cacctaccggagctactctgtcccaggagcggccgtggagaaagcaaccagccgagagttcgcgccccagggagggaagcgggcacagggccgcccagcgccactcacctgtgagctctccg

SEQ ID NO: 426578 - DNA, 122 bp, Homo sapiens
ctgggtgactttaaacaaataaaggacttctgattgcaaagtccatctcctcaaccatcccgggtgagctttcctaaaatagcaaattgttccttaccactagagggcaccagtatcccagg

SEQ ID NO: 426579 - DNA, 122 bp, Homo sapiens
ccaaatccacttctaagtgcaagcacttcttgtccctcctaattcttttattcagttccacgttgtcgagcccccttttacccagcactgttcctgatgctgagttggggccaccgggactg

SEQ ID NO: 426580 - DNA, 122 bp, Homo sapiens
cggacccgcgccaggagagccctccgaccctggcagccgcggactagcgggattggtaggcggggccagtccgggctccgccctcatggcccgcccctccagccgaatctccgactcgcgcg

SEQ ID NO: 426581 - DNA, 122 bp, Homo sapiens
ccgctccccctgttatccaaacttgccttgaactccacagatttttctcggcatccaggacgagacctacggcagctaggccagccgaatgttgtagaaacagagatgccctggcttcccca

SEQ ID NO: 426582 - DNA, 122 bp, Homo sapiens
taccctggaggccctgcccgcctccctgatcaccaagaaccgcccacaaagacgatgctccgccccccatccaggccccgcctctagggtcccggttaccctctccgacaaataactcctcc

SEQ ID NO: 426583 - DNA, 122 bp, Homo sapiens
ggtgcgggctccttccgccacttcggtctcttttcggggtgggaggtctcccactgggaccgacacagacgcactggatgccgcggggtcccgggctccgagcggcggtgtccctgtcccct

SEQ ID NO: 426584 - DNA, 122 bp, Homo sapiens
gatgcctaactcagcagccatcagtcaagggtgatagatgagggtcatcactgcgcaaagcgctcacctttcgaaaagaaaacatcatatggccgccgtccacctcccatagctctcagcct

SEQ ID NO: 426585 - DNA, 122 bp, Homo sapiens
tgagacagaactctgggcaaggccaggcgtggggacccctggggagagtgtgtggacgcccgcgggtctgggtgcctcccagggaaaggacgagtgatggacagaccgacggaaggacaggg

SEQ ID NO: 426586 - DNA, 122 bp, Homo sapiens
aagaaaaaaaaaaaaaaaaaaaaaaaaaaaagaagccaaaagagggtcttcggcccagcccgcccctccccaacagccctgggtgtggcagggagcctgaccagttccctccagcctgcgtc

SEQ ID NO: 426587 - DNA, 122 bp, Homo sapiens
aaggtgattctcttgcgagggtctttgagagttgcggtgttagccaatagcgtaagatagcgcacgcgcagtgctttccagtgcggtgaatatttgcgtttagctttattcttgtgcttgtt

SEQ ID NO: 426588 - DNA, 122 bp, Homo sapiens
ggggacccgcgggcctcggggagagatccctgcgagcggagcgacgtcacggggccgcgccggccggcccgggctgccgctagcttcctgcccccgcccccagcccccgccgtcccgctcac

SEQ ID NO: 426589 - DNA, 122 bp, Homo sapiens
aaatgccaaaaatggccatgaaaacttcataactaccttggcaaacaccttgacagcccacggacttcaatgtgtcattaaagaataaaaattacatttctaatcaaaggtcaacatcatag

SEQ ID NO: 426590 - DNA, 122 bp, Homo sapiens
gccacccgcctccgagtgcgccgcaccgtgcggcggggaccacaggccttcggtgggcggcgagccctggctccctcgttcggtggcctctgctgcatgtgggatgcgccctttgtcccctc

SEQ ID NO: 426591 - DNA, 122 bp, Homo sapiens
agtttgttctcattacaatggggacggtgagtgctagtaatgtggaccatttttcaatagcgccaccttgtggcagtgacaaaatggccgtagtggacttgggctcaggtgctttcttgagt

SEQ ID NO: 426592 - DNA, 122 bp, Homo sapiens
tgggtctacgtggcagcaggcgcaccccagacgcgcgcgcccacccggcgatagcatcagcggcgccagggcaggcacatggccccaaagcacccacactagggcccgggccggccagggct

SEQ ID NO: 426593 - DNA, 122 bp, Homo sapiens
taaatgccgatacctcagtttccccatctttagaacggggctcttgtttggaactgtgcccgccacagcctgcagtaagtgctagcttcatcaatactcagtggcagtcaattgcttttcca

SEQ ID NO: 426594 - DNA, 122 bp, Homo sapiens
ctccccagcctcccccgaacaaaacacagagaacatcaaatgaggcgactgaggcggcagcggtcgtaacaggctgcgtttagtggttctttttttttttttatgtacaagaaaaatgaatt

SEQ ID NO: 426595 - DNA, 122 bp, Homo sapiens
tgtgatcgacaggacagagctgggcacgcaggctgggattcacggtgcaacctgcagccacggggtggagaaaggaagccacgtcgccaggaaggcaatggcattcagagccttggactcct

SEQ ID NO: 426596 - DNA, 122 bp, Homo sapiens
gtcctttgcttcactggcgaggtgcggactgatgtagtcaaagtttgggttcttatcctccgcaagttcagatctgccgcctcagccactccaccctaggtcgctcgcatccttccagctgc

SEQ ID NO: 426597 - DNA, 122 bp, Homo sapiens
ccaccttccaagccaatcccttgaggtccttccgctattcggaaggggctgggactcctacggctctgggttcgaatcccgccctgcctggttctcttgagaccccagcatgtgctttcacc

SEQ ID NO: 426598 - DNA, 122 bp, Homo sapiens
gcgtcagggtcgactgtgtctggcccagcaggcggtgttttggcccaaggccctgcctcccgctgtctctcccatggcctctctgcttggccaaaagtcacctggtcactccctggctctta

SEQ ID NO: 426599 - DNA, 122 bp, Homo sapiens
agatttagctgaaattaatagcacaatgggaaaatgaactagggctgaacaataacacagcgggacttcagatttgcggctggtaaagaagcctctctcgttctcagggcgccccctcgtgg

SEQ ID NO: 426600 - DNA, 122 bp, Homo sapiens
ccttgagctggctggatggttgcgcccgccctaccccggaatgtgggcctttggagcgagcgaagtgggagggaccgacgcaggaggtgtcttgggcccgggcggctgtagaggcggcggcg

SEQ ID NO: 426601 - DNA, 122 bp, Homo sapiens
gctgcccttacccaagatggcggcccacaccgcttccgtcgctgctgtagtcgcttcctgcggccagcccgggttcaatcagcggccgacaactgtctagggctcagacaccaccagccaat

SEQ ID NO: 426602 - DNA, 122 bp, Homo sapiens
agccttgatgtgcagaggcccctgggtaagccagggcgccagtgacaggtggccggaccccgcaggagtggaacctgcccatctgcgcttgacgaaaatgcctccaaaacaaaccagacgcc

SEQ ID NO: 426603 - DNA, 122 bp, Homo sapiens
ttctagcacctagaaaagtgcccagcacatagtaaatacaccgtattttcaataattgaacgaaatctagagtgacctttctcccctagtctccctttctctggtgcagatcaacccgtttc

SEQ ID NO: 426604 - DNA, 122 bp, Homo sapiens
gaagtcaagatgggaggatcacttgaggccaggagttcgagaccagcctgggcaacatagcgagcccttatccctgctgaaaagttaaaaattaggccgggcacagtggctcgcgcctgtaa

SEQ ID NO: 426605 - DNA, 122 bp, Homo sapiens
ccaaacctctgaagcgctccgtgcacgcgacgcggcggcggggtaagctggagccctcgccgcgagccctctccgctgcctgcccgcagcacagccgcgccgacctcctcatcatggcggcg

SEQ ID NO: 426606 - DNA, 122 bp, Homo sapiens
acctcaggtgatccacccactttggcctcccaaagtgctggggttaattgcgtgagccaccgtgcccgggcctggctgttattggcttcttaaggaagcccacttaacagtaattactggcc

SEQ ID NO: 426607 - DNA, 122 bp, Homo sapiens
gggcctggctcctgagccaccagtgcccacctctgatctcagggctggctttgggcatctcgggcaggacaggtcctgagtgctccgggccttgccccgccctgtgtcacccatgcctgtct

SEQ ID NO: 426608 - DNA, 122 bp, Homo sapiens
cttccggaggtgggggtgctggctgcccagtaactcagcagcactgggaccctggcgagtcggagagcaagaagacgaagaaagtgtccacactcaccccacctccctaccatctccccagg

SEQ ID NO: 426609 - DNA, 122 bp, Homo sapiens
gtaagacatgtctgtatttttcaaactcaaatgagttgatacccagcccaactcatactgcggttggtgacaagaactgaatcacacctctcctgacttccaccatgctgtctccttttctc

SEQ ID NO: 426610 - DNA, 122 bp, Homo sapiens
ttgaattattctgcctccatttatttgatcgcaggcattcattcatttactggataaatacgtatcccgcatccactctgagaatgccaggctctgctctaggtgctaaggtacaactgtta

SEQ ID NO: 426611 - DNA, 122 bp, Homo sapiens
taggacccgggttctttgtttctcggctctgggcgtgggaggatagcccctatgctctggcgcaccgggccgcgatggctctgggaattgtagttgtcgcaggccctcgttctttgtctcct

SEQ ID NO: 426612 - DNA, 122 bp, Homo sapiens
aagccaggcccagtgccagagccaggtgccgagccccaccgggccacccctgcagagctgcggtcacatgctctgccaggtgccaggaagccacacacagtggtggtgcagatgggagaggg

SEQ ID NO: 426613 - DNA, 122 bp, Homo sapiens
agaacccggcccgccccgcctcccaggcgagggcgcggtcaggaggcccagggagcatcacggtgttacaggcacgtgttcgctgagcacctgctatgtgccaggcatggttctagaaccta

SEQ ID NO: 426614 - DNA, 122 bp, Homo sapiens
tacaagatgtcctgccatcacacctgaaggatggttgtccacagccattttttaaaatctcgtattagtcctcttccttcaacactcaggacagtattatgtacccagaaactcaatacttc

SEQ ID NO: 426615 - DNA, 122 bp, Homo sapiens
cagccttggccaggggagacccgcccagagagttgttgggcgagaggagtaaccgggacccgagggtttggtgcctggagaagggagtttgggctggtaggctttgtctcagtaaggtggag

SEQ ID NO: 426616 - DNA, 122 bp, Homo sapiens
ggtagcatatgcctgtagtcccggctactcaagaagctgaggtgtcgagaaacttcctgccgccgcgttcgcacctcgctgctccagcatctagggcatattccaaccttccagcctgcgac

SEQ ID NO: 426617 - DNA, 122 bp, Homo sapiens
ttctggaggatttaaccacagaggggtgggctgcacaggaggtgcctgccacggcagggccgggtgcccgtgccccatcctgaggccgtgcatacgcgggtgcccttcgcctccctcccctc

SEQ ID NO: 426618 - DNA, 122 bp, Homo sapiens
atggcgtttttgtggcaggagcaggcaacacagccgcgagctgattgcagaaattcgagtcgtaattatggaattcaaattccctcaactctcacccaccttcggattccttctctagactc

SEQ ID NO: 426619 - DNA, 122 bp, Homo sapiens
tgctgctgctccagcgccaggacgagcggctgctgctcaagtcccatagccggacactgacgcccacgcccgatggcaagaccatgctgcggcccgtgctgcggctcacctccgccatgacc

SEQ ID NO: 426620 - DNA, 122 bp, Homo sapiens
atccggactccgtttatgtcatggcagccaacatttttcagggtattcgaatcgaaaagtcggcacagaaagtcttaatcaagtatgggaatgaacccctgcggtccttgtccgagtctgag

SEQ ID NO: 426621 - DNA, 122 bp, Homo sapiens
tagtggaattgcccaattagcgctaggaatgccacgtggtatgagggtgggcacaatgggcgtccagaaaagccaatcaacagccgtaggtgccaactccggaggacgaagggaaccaatag

SEQ ID NO: 426622 - DNA, 122 bp, Homo sapiens
ttcatgagctaagataacatgatagagttgcagagaaacaaaaacaacagaaataaaaggcgcttctgagaaaccttggcagagatggtcagagaggcacatttagtatgacgcagtacaag

SEQ ID NO: 426623 - DNA, 122 bp, Homo sapiens
aggactgaggggtggaccctccctgagaccacccaacaattcagggtggagttatcagggcgccctgactcctgggggcatttttgtgtgacgggaaaagacaatgctcctggctgagtgag

SEQ ID NO: 426624 - DNA, 122 bp, Homo sapiens
ctactatcttcccattaaagcaatgtccacactcagtttgcttggtgaaaatgttaataacgcacacttagaaaaacggtgataaccgttgcttgcataaagtggccatttgaatagacttt

SEQ ID NO: 426625 - DNA, 122 bp, Homo sapiens
gctcgccgccgaccctcgctcggcgcccacagcagcccgcatggagtaatcgccaaatggcgacagaccctctcccagtgcggccaccgcccaggctttcggggaatgtctcccaagtgctc

SEQ ID NO: 426626 - DNA, 122 bp, Homo sapiens
tatgttttaacaggatcatggttgctgccactgaaatgggaaaagtactcttgtcccgctcgaagggcatgtgacaaggaatggctcgcttcttcagggccccactgctcaaacctctaggg

SEQ ID NO: 426627 - DNA, 122 bp, Homo sapiens
agggtggccccagccctacgacacccatggccccaggggagctcatgactttgagggtgtcggtgaccctgggggtgccctggctctggactgggccaccatgtgtcactgcagccaccagg

SEQ ID NO: 426628 - DNA, 122 bp, Homo sapiens
tctaatgagtcaaaatttaaaattcagtttctcagtttcattagccacatttcaagagcacgataatcccatgtggccagtgattaccatatttgaaaacacggaaatagaacatttccatc

SEQ ID NO: 426629 - DNA, 122 bp, Homo sapiens
tgagcagcaggcaagccagccttaccacctgagcttcgcctcctgtcctatcagtggcagcggcattaggttctcacaggagcacgaaccctagtgtggactgcacgtgcgaagcatctagg

SEQ ID NO: 426630 - DNA, 122 bp, Homo sapiens
tggattttgccataacacacatcacattttccaacatacatcatagtgtgatctggttgtcgaaagtattgataagactgggtgcggtggctcatgcctgtaatcccagcactttgggaggc

SEQ ID NO: 426631 - DNA, 122 bp, Homo sapiens
ggcgggaggaagtgcggctgctacgttgtagcagaagggcggggccctgcggggcggggccggggcgccgtgggcgcgcggggacaatgcggcgttgcccgccggcaggggcgcgctacctt

SEQ ID NO: 426632 - DNA, 122 bp, Homo sapiens
tgggggtggaatctgttagaactctccaagctccatggggctcgaacttcagtgccaaagcgggatgggtttgtggcttcagctctctgggacacagctgccagcctctccttgtccagctg

SEQ ID NO: 426633 - DNA, 122 bp, Homo sapiens
ttaagtacccgtgggccggcctccggggcaccatacaagggcagagcaggaaggcgctggcgcccgcgcccgcccccgcccctcacgtggggcgcagtctgggctgacctggagacttcggg

SEQ ID NO: 426634 - DNA, 122 bp, Homo sapiens
gacctctcccttagccattggtctgcactgtcttttctgcccatgacccagtcagtctcgcgccccatgaccctctcctaaaacacgcgcagtctcctctctcttccccttcctctcgtgtc

SEQ ID NO: 426635 - DNA, 122 bp, Homo sapiens
agagctggtaaaccaataaattgggtggaggccgagagctcggggccgcgagcaagcctccgacgccctggtcccctggacccgccggttaaactgtgattctctttctaaatcctttgtct

SEQ ID NO: 426636 - DNA, 122 bp, Homo sapiens
ggatttttcctttttctattccaggatcccatccaggtcaccacatatgtttagtcattgcgtctgctaggctcctctgggctctgagagtttgtcactttccctggttttgatgaccttga

SEQ ID NO: 426637 - DNA, 122 bp, Homo sapiens
gatgtcaggaagccccgcggcggaacatccgtggtggagccttggtggcgggtgaccaggcgctcgctgcaaacttccctcaacttcacaacgtatctttaaatgttcatcatcaaatgctg

SEQ ID NO: 426638 - DNA, 122 bp, Homo sapiens
aagagtttaaatcacgtggatcagcaacaagtggaggaggaaacatagggtagcacgtggcgacttatcctcaagccacccaaaaggacctagccaggggcaggaatgggagagtgctgcga

SEQ ID NO: 426639 - DNA, 122 bp, Homo sapiens
gattggggcctgggtgccaatatttttaagctcccaagttgatcgcaaagtgcagcctaacgtgattttcaatcttgccccaaccctccctgccacgagtccccagtaactacattcaatat

SEQ ID NO: 426640 - DNA, 122 bp, Homo sapiens
cctgggggcggggcccaggcctccgaggggcgtgcccgcgcgcccgagcaccgcccccgacgtaccctcccgccccgcagttcccgggcggtggagccacctcacaaagcggcgaccgttct

SEQ ID NO: 426641 - DNA, 122 bp, Homo sapiens
agggcccgggaagtggctctcgggcgggagttgagaacgcagggagttgcctagcaacagcgtcctaggctgaggatgggccccacggtggtcgcctcagcccccgccccagagtacttttt

SEQ ID NO: 426642 - DNA, 122 bp, Homo sapiens
cgaaatggtaacgtggctgagccaatgaagcttcagagaagccgtgccattgccggggcacgtaaagtcaagccaggacttccggcgtcctagccgtggcagccattttggcctgtcaggtc

SEQ ID NO: 426643 - DNA, 122 bp, Homo sapiens
gaagattcactgtctggtgagggcctgttcctcatgcatggcaccttctatgcatcctcacgtgacagaaggggcaacacaagctctctgaagcctcttttgtaaggatatttatcctgttt

SEQ ID NO: 426644 - DNA, 122 bp, Homo sapiens
ggacaaggtcggtctcaggaaatcaaggtatcttcaaagggacacaagggagcgcagtgccgatgagaccggggcagagccacagtctggcggtgcaggctgggggtccgaggcgggggaca

SEQ ID NO: 426645 - DNA, 122 bp, Homo sapiens
ggtcaggcggttcgccggcgttccaagttggaggccagcccaggacaaggaggggaagtgcgcatgtgctccaaatcatttcccggccgaggaaattggctaagaccgttagctggtgggaa

SEQ ID NO: 426646 - DNA, 122 bp, Homo sapiens
acatccatgcctcctgcatcccctccaccctccctgccatttccacaggccttaccttcgcgcctgcagccgcaggtcctgctctgaggggctgaacacatgctggagctggtgcttggcaa

SEQ ID NO: 426647 - DNA, 122 bp, Homo sapiens
ccttcccacccaccgcccgggctgagctcagcgtgtgcgcgcggcgagtcgcacggcctgcggaggagcatctgagcgctcggcccccttttgcaggtccagaggcttctacaccccccccc

SEQ ID NO: 426648 - DNA, 122 bp, Homo sapiens
cagcatctgttgctactttgtctatcaattcggcaatcacagatcttccgcagttcacaacgctttgccaatgaaaagacctaaagtgaggaataacaaccgtaacgtaacactggtgttct

SEQ ID NO: 426649 - DNA, 122 bp, Homo sapiens
agccccagcccccagccggaccgcacccttcagccgctgccctgacccggccagcagctgcgaaacccgtccacgcgaaattgagttcttggctgggcccgtgcctcgtgctccggacctgg

SEQ ID NO: 426650 - DNA, 122 bp, Homo sapiens
tgctggagttctttaaagcctgccttgcgtctgcctttctctccagaaagcctttcatgccgcctcgccagactgacactttgacaagttgccacgagtgacatctgatttgtacaaatttc

SEQ ID NO: 426651 - DNA, 122 bp, Homo sapiens
ttgatgtatttcagcattggtttttcctttgttttgctgctaatttgcttcatgatagtacgatggccttgggagctccatacacattttaagtttaagaaaaactttgttttaaaaagcca

SEQ ID NO: 426652 - DNA, 122 bp, Homo sapiens
tgaggatgatcacttttagccttcacagtgacactatgaaaacctggatgacagcaacggcggtggcagcaaagtaaagcagcaaagtaaaaaaaaatcctgttttgtaatctccctttgtc

SEQ ID NO: 426653 - DNA, 122 bp, Homo sapiens
agattttgtctttcctgtgagcagcagcagcttcctacggaccctgctggagccccagctcggatcagcccttctgacagcaatgaatgcttcgtgctgcctgccctctgttcagccaacac

SEQ ID NO: 426654 - DNA, 122 bp, Homo sapiens
ctttgtcggcttctccatctcctggtgaacgttgccccttggagaggcgatggcgtggcccggccccggcaggtgtctgagggcctgaaggcacccccgtaatcccagcacactcgtgggtg

SEQ ID NO: 426655 - DNA, 122 bp, Homo sapiens
aggtgctcagcggcttccagggctgcctggactcggtgatactgaataacaatgagctgccgctgcagaacaagcgcagcagcttcgcggaggtggtgggcctgacggagctgaagctgggc

SEQ ID NO: 426656 - DNA, 122 bp, Homo sapiens
cgtaagatggcggccgcgcaggcgcaaaatgtcgcagccgtagggaggctccgcctctgacgcttgccttgcatcacgtggtaatggccgctcaaaaaacgccttagcgaaaaccagagcgt

SEQ ID NO: 426657 - DNA, 122 bp, Homo sapiens
gaatgtggagtcaggctggaggggacctttgcctgatacagctctggaccagtcctgaggcgcctactttggtttaggtgaaataagctatttgtgggtacacctctgagcatgtgcatgtg

SEQ ID NO: 426658 - DNA, 122 bp, Homo sapiens
cccgattagagcagaggttagatgggcaacacagcttcaacatcacagggccaagagcctcgcatggcaaaaaggcaatcttacatcccaggcacacccagaaacacccttgtcttctccat

SEQ ID NO: 426659 - DNA, 122 bp, Homo sapiens
acgggctgttaacttggagatggatgcgtggcctggaggcctagcgttgcgcctcggacacggtggccggcccgtcaaagggaccacgcagaaggagggaaacaggagcaccttccgccctg

SEQ ID NO: 426660 - DNA, 122 bp, Homo sapiens
ggctggcggatcacttgccgttaggcgctggagaccagcccggccaacacagcgaaaccccgtctccaccaaaaaaatacgaaagccagtcaggcgtggcggcgcgcacctgcaatcgcagg

SEQ ID NO: 426661 - DNA, 122 bp, Homo sapiens
agctgtcattatgtccatgatgaggaaattgaggcttagatatgctaagtgacatagccacgatgacacagatagcagtaagagagttgggactgaaatcagattttttcctctctgctgtg

SEQ ID NO: 426662 - DNA, 122 bp, Homo sapiens
caccaacggtgcctctgccccggcagcgatgactctacagcccatgatttccgcagcccacgattggctggggcacagcgataagaattcaacctaatgggcacctcacctcccacctgctt

SEQ ID NO: 426663 - DNA, 122 bp, Homo sapiens
gaggtcacttggctttgcagtctccctccactctgtgcagaggcggatgacctctgaccacgtgtgggtttgaggttcctcttctgtgaactgccaagatctcatgctcctccccacagccc

SEQ ID NO: 426664 - DNA, 122 bp, Homo sapiens
ctttaaaggccttatcttcaaataccatcacattctgaggtatggggattgggacttcagcgtaggaatttcaggtctgtaacaaaggccagctgagatgttaaaggaattacatggctctt

SEQ ID NO: 426665 - DNA, 122 bp, Homo sapiens
cggcaaatccagccatgtctattgcaaatggccggtgggggtcaaacaccgtcttccagccgaccaccttccctgccccgttcacccgtggggcctcgtaccgcaggccacccacgaaggcg

SEQ ID NO: 426666 - DNA, 122 bp, Homo sapiens
aggcgtggcagagcagggggcagcacccatctgggaggctcaggccacgcaggagcccaccggtaggggggctcaggcatggtgggctgcaggtcccgagccctgccccgcagggaggtggc

SEQ ID NO: 426667 - DNA, 122 bp, Homo sapiens
gcagtgggtgagtgccagagcagctgcctagtgcagggtgttggggcagtgagccaagggcggggagggggtcgcgcgggggcacgccgtgtgagcactgctcgccccgtagaggtgcatgt

SEQ ID NO: 426668 - DNA, 122 bp, Homo sapiens
gggccagagcggtctcgcgctgcagcccccggcgcgccccctgcaggtgggcggtcctcacggtggctcgggctgctctgagtcagagactccgggaaagcctgctctgaattagggaaagc

SEQ ID NO: 426669 - DNA, 122 bp, Homo sapiens
gtccggaattggtgggttcttggtctcaccaacttcaagaatgaagctgcggacccgcgccgtgagtgttacaattctcaattcttaaaggcggcgtgtccggagtttgctactgctgatgt

SEQ ID NO: 426670 - DNA, 122 bp, Homo sapiens
atttgaaccctagccctcggtgggaggcacactcacttccacgttcacagttcttggaagcggtcccactgggggcggggctgagcgcgaccgcgccctcaactccccctattgcccgcccc

SEQ ID NO: 426671 - DNA, 122 bp, Homo sapiens
tctgcgaaagtcatctgtctgaagcgcggacagttttgggactagccgctcatctgctctcgatgtgctgaaatctgcgcctccggtggctccgcagagcagcttcccaggtcgccacagcc

SEQ ID NO: 426672 - DNA, 122 bp, Homo sapiens
accatagacagagtccgatattcgctgagaaggcgctgatttttattctcatgttgctgccgcaaatgcagaccagtgtgcctgcggggtgctgacctctgagaagcgtgcaccggatctac

SEQ ID NO: 426673 - DNA, 122 bp, Homo sapiens
agtcagtggcgcgttgccctgacgcctgccgggccgggcgtgggggcctgtgggaggtggcgcggccgggcccagctgcggggcggaggcggaggcggaggagaggcctgcggcggcaggga

SEQ ID NO: 426674 - DNA, 122 bp, Homo sapiens
tctcgataccaatatacagatgttgcagaaattgttattccagacaccacacattccaggcgggctgtttttgacagcgttttagtactggaaatttgaggttgctctaggtgacctgcacc

SEQ ID NO: 426675 - DNA, 122 bp, Homo sapiens
acctcgtgatccacccccctcagcctcccaaagtgttgggattacaggcgtgagccaccacgcccagccagatctttatttttaaaggtatcttggttgaaaacgctgaggaattttttcag

SEQ ID NO: 426676 - DNA, 122 bp, Homo sapiens
ctaacaggccacagactggtactggttcatggcttgggggttggggacccctgtatggagcgattaatgtgtgccacacccagtgctgtagtctcaagataactgggggtggatagcattaa

SEQ ID NO: 426677 - DNA, 122 bp, Homo sapiens
gcgcgacgcgcgaggcctttcgggagctgtagtccgggtcctgtcatggcggcggggattcgcgagccgcctactacagttcccaggaggccccggggcggggtgtgtgtgagccgagcttg

SEQ ID NO: 426678 - DNA, 122 bp, Homo sapiens
cggccgcggcgtgacatcggcaccatcctgcagatcctgaacgacctcctgagcgccacccggcactaccagggcatgcccccttcgctggcccagctccgctgccacgcccagtgctcccc

SEQ ID NO: 426679 - DNA, 122 bp, Homo sapiens
ctgggccagagagaagtctgcaatcctcagatatcagagccgcctctgggtagctaaacccggcagggcacacgggccgcggccaccttcagcaccagggacagcgtccgcccctgcagcag

SEQ ID NO: 426680 - DNA, 122 bp, Homo sapiens
tggccttcctttaccactgggctgtttccactagcactgtaccaagccagagggaagtaccggagcttcctccaagaccgatataccccaaggtggggagaactggataaaggcaaagtcca

SEQ ID NO: 426681 - DNA, 122 bp, Homo sapiens
cagcttttcatttcttttcctctgtctccagttcctttgtgcttcttaattatccccagccgagcaaagcttggaggtctgcccagggttcccatctgccagaaaggtctgaggccacacct

SEQ ID NO: 426682 - DNA, 122 bp, Homo sapiens
agcaagcgcgcatcgcgcaccccagggtagcagcgcaggtctggggctgcgccacagccgcgcccgcagagctatttttagccgctgcagccagcctagccaccagacggggtgggcggcat

SEQ ID NO: 426683 - DNA, 122 bp, Homo sapiens
ggggccagggagttccctttccgagtcaaagaaaggggtgacagagggcacatggaaaatcgggtcactcccacccgaatattgcacttttcggaccggcttaaaaaatggtgcaccacaag

SEQ ID NO: 426684 - DNA, 122 bp, Homo sapiens
ttgctgggatgcaggattcgggctgtgttgctgatgagatcacataggggctggagaattcgtacccgcgggcacccatggaagcctgagctctgtcttttcagtcgcctgtcatttaaaat

SEQ ID NO: 426685 - DNA, 122 bp, Homo sapiens
tggagtggcctgggccaggccttacaggctccgtgggacctctttcaacagtgcttgcatcggaaataacatgttacaccatacacagacacactcgcacacactacacactcactgtaacc

SEQ ID NO: 426686 - DNA, 122 bp, Homo sapiens
aggatggagggagaagcggagggacttggtccgccacacgaagtggaacttacagccattcgggaagggatagtgcaggcgcagggagtgcccaccacacacctccgtccccacccctcgct

SEQ ID NO: 426687 - DNA, 122 bp, Homo sapiens
tcctaagccaggcttgcacctcccactgcctttgcttaggaaagcataataataacaaaacgacaatgacagcaacagtccttgaaaaggcatctccattgtcatattcatttgtagttgtc

SEQ ID NO: 426688 - DNA, 122 bp, Homo sapiens
agaggattggaacgggaccggggacctttcttggaagtgcgatagattttaagtatttggcgtggcttacaactacattcccatagcaagcacactttttacttgcattgtgtgtttatttg

SEQ ID NO: 426689 - DNA, 122 bp, Homo sapiens
cttccttgctctgggcctgcttcattatttagaaaatgaacaggccccactagacagctccgcactctctcccagctccaaaacactctaatggggaacgggctccaaggatctcaggggta

SEQ ID NO: 426690 - DNA, 122 bp, Homo sapiens
ttcgaattaacaatgatgataatcattcaaaataagattcccatgatgtcttccagcagacgactccacccccaacactgccgtgagaattgtatgtgctgagatgttgttcttctcaccct

SEQ ID NO: 426691 - DNA, 122 bp, Homo sapiens
ctacttcctgacagggatacaaggcaggtgcacgttgagggaccctcactccacccagaccgaggcctgaggggccaagtgcgtggacgccatccttccagtcattccgtggactatccctc

SEQ ID NO: 426692 - DNA, 122 bp, Homo sapiens
ccaggtgtgggggatgctgggacgcctgttgctcctgggccactggttgcctctggcacacgtgcactgcagtgtcattgcctggacagcccccattgtggcctggcctcccctcagccctg

SEQ ID NO: 426693 - DNA, 122 bp, Homo sapiens
gtgggggttcaggctcctgcggtcgccgccgttgctgctcctgctgccgcagctcggaatcggaaacgcctcgtcctgctctcaggccagaaccatgaacccgggcggcagcggcggcgcgc

SEQ ID NO: 426694 - DNA, 122 bp, Homo sapiens
cggggcttcggaatgggaggccgtggccttcagggagctctgggtgctggtgtccccctccgttcctctgacttgctgctgctccttcccttctccctcctcgctcactccctatcccgcct

SEQ ID NO: 426695 - DNA, 122 bp, Homo sapiens
tttgtgtctacactcactccttcatgatttcaatccatatggctttatatattacctagacgtgcactgtccagtgtggtagccactagccacacatggctactgaacacttgaaataggct

SEQ ID NO: 426696 - DNA, 122 bp, Homo sapiens
attctcttcccatccactctgtttactggaactaattccagaagtagtttttgtaagggacggtgtcattatagccaagtgtggccatgtttttcttgtgtagactcatgtaaggagattct

SEQ ID NO: 426697 - DNA, 122 bp, Homo sapiens
taccaaggctgggtttcctactgatttccctcctcctctgctttcacaggctcgcgcggccggacattgtgggtgtgcgtgctggatttctcccggatgctctccgactaacatggatgtcc

SEQ ID NO: 426698 - DNA, 122 bp, Homo sapiens
ataaatgataccaggatttgaacctaggccaataactcaaaactcaatgttcttgaccaccgtccctgtctaattatgacctccaccctttccattctcagatattttcttaaaagctgagc

SEQ ID NO: 426699 - DNA, 122 bp, Homo sapiens
gtcggggagggcaagccctgtccccaagacagaacatgaatgtgcactgggtgctgggctcggggcatcagctcaggcccatggaggcggaacgccgggcaaacgccgaagagggaacacgc

SEQ ID NO: 426700 - DNA, 122 bp, Homo sapiens
gaaaacatgcaaatgactgtcaccaggaggatgagtaaatacgtcacatactcatatcatcgaacacaattcttcagtgaaaatgagtgaaactatcactgcacatggtagtagttgggtgt

SEQ ID NO: 426701 - DNA, 122 bp, Homo sapiens
aagcagaagggggactcactgacgcagctgactgtgaagtccggagctcagaagccctggcgttgcaggaattctttggcagttgcagcaccgggcccagctcgccttcgcatccttagtgt

SEQ ID NO: 426702 - DNA, 122 bp, Homo sapiens
aaaggggagagctgtcagcctgggcccccgcctccagccccgcccgccccggtccctgcccggggtcccttgagatccagggtccactccgttttttaattttatttttgagacagggtctc

SEQ ID NO: 426703 - DNA, 122 bp, Homo sapiens
ctatcacgggagccccacccagccagccgaaggaggccacaagctctaaattactaaattcgggccagtgctgggggcctgggagccaaggcagctcagagcccactctccgattctggctc

SEQ ID NO: 426704 - DNA, 122 bp, Homo sapiens
tggcccctgcgtccacagatgacctctttgcccgcaagctgcgccagccagcaaggcccccgctgacaccgcacaccttcgagccgaggccagtccggggcccactcctgcgcagcggcagc

SEQ ID NO: 426705 - DNA, 122 bp, Homo sapiens
ccaaaatgcactacatagcagagtagtcagctctatcgtggtgatcaaaataatgaacatcggggtaatgactggttctccccaggtatacatgttgaataaatgtgtatgccttttcttga

SEQ ID NO: 426706 - DNA, 122 bp, Homo sapiens
gccaggacccccggggaggcgtggcttcaggaccggaagaagctcctgttgccaagggaacggtgcctgccaaggcgcctgctcagcgactgatgcacagactgctgcagaggctgccggtt

SEQ ID NO: 426707 - DNA, 122 bp, Homo sapiens
attccattgctgtcatgcttctcctagaagatattgtaactgtgggtgtacaggtacatacgacttggcaaagggccaaaataaggttttcttcccaaatgttctttctacaggaaacacga

SEQ ID NO: 426708 - DNA, 122 bp, Homo sapiens
gcgggtccccgcggggcgaggccggcgctcaagactgtcccgggcgccccgcgccgccggcgctgccgccacccaggggctgcgcggaaactttgggctccaccgggtctccgagcgccgag

SEQ ID NO: 426709 - DNA, 122 bp, Homo sapiens
gccgactggctcctctcagggtgttgttgatgaaatttggtctcttgtcacatcatcttccgagctttgcagcagctactccctcatggtttctcatgcatgatcatgaatttatggataga

SEQ ID NO: 426710 - DNA, 122 bp, Homo sapiens
ggtggctgggaatgtgatatacagcaccctgatcctaacaggtgtgattgttacgtaagacgctgatactgggccttgtattgcttttaaagtttcctctgctcagcatcatttcatgccaa

SEQ ID NO: 426711 - DNA, 122 bp, Homo sapiens
ggtccacagtcaggagcggttccatggcatttgccagtgacatgacattctgcaggaaagcgtctctgtgccgcgtcgtaaatgataccggtgtggtttaccaacctttgtcttttgaacct

SEQ ID NO: 426712 - DNA, 122 bp, Homo sapiens
actcttcagtggaattgaatgttggagcgtcttctgcccacagagaagacttcatcgtggcgtgattgggggtataaaagcgttaagcgtagcctgcgggctgtagtggtgcagaagagttt

SEQ ID NO: 426713 - DNA, 122 bp, Homo sapiens
accatcaatcccccttcttcaaccatgtcaccattaatctttctcctccttcagctggttcgctacgatctccctattttttttgaaatggagtgtcgctctgtcaagtgcagtggcgggat

SEQ ID NO: 426714 - DNA, 122 bp, Homo sapiens
agtcacacaagggaggggtctgcctcgcaatcccagagacgactcagacagatgggggcgcgtgcagctggctggccccctgccccgcaagcccccacctcccacccacccccatgtccagg

SEQ ID NO: 426715 - DNA, 122 bp, Homo sapiens
cggtggagctgcaggggggcgctctgggatgtctccaggcagagtagatactgacccctccgcagccgggaccctcaccctttccttcatcactcaggaaacagaaaaggcttcagaaggag

SEQ ID NO: 426716 - DNA, 122 bp, Homo sapiens
ttagcctcggactgggagaaaacaattgtaaatcatgtatccgataatacccccataatacgtaaagaatccttacaatacaataagaaaacaaacaacccaattaaaacatgggcaaaaca

SEQ ID NO: 426717 - DNA, 122 bp, Homo sapiens
actgagcagactgctggtttaaaaaagagaggtccatccagcagggatgatgcttttcctcgttgaaagaggacattcacctaatgggagacctggagtcagaatctttctgatgtgtgact

SEQ ID NO: 426718 - DNA, 122 bp, Homo sapiens
tgggattacaggtgtgcgtcaccatgctcaactaaattttgtatttttttagtagacacgcggtttcaccatgttggccaggctggtctcgaactcctgacctcgtgatccgcccgcctccg

SEQ ID NO: 426719 - DNA, 122 bp, Homo sapiens
tattctgtaatactggctcttggaaactctagtatctttagtaataaggaatttcttctccgtttctgggcatgctgttcatttaacccatcttttctgttttctggtctttgccagcttgg

SEQ ID NO: 426720 - DNA, 122 bp, Homo sapiens
acacctgtaatctcagctacttgagtggctgcagcatgagactcacttgaaccctgtaggcggaggtttcagtgagccgagatcacatccccgcactctagcctgggcaacaaagcgagact

SEQ ID NO: 426721 - DNA, 122 bp, Homo sapiens
caatccatgaggacaatggggaggcctttaggccagcccacatgtgacaatggagggctgcggcttccttgcggagagcacaagtgagctcactgccctggactccagggaatcagagttct

SEQ ID NO: 426722 - DNA, 122 bp, Homo sapiens
taaaccttgacttctggatggcgaggttggcactcccctgtgtgagctactgcctgcctccggtgctctgtttctgtccctagagttcttttcctttccacggagttttggtatgcatttca

SEQ ID NO: 426723 - DNA, 122 bp, Homo sapiens
catcagaacataatgctgacaccggtgtcagtgtggcccgagcctgtgtcctccccacctcgcccaccctggcaaggacagctgcggccaaggacgaaagccctcccttggctggcctcacg

SEQ ID NO: 426724 - DNA, 122 bp, Homo sapiens
agacggagtttcacttttgttgcccaggcttcagtgcaatggtgtgatctctaggctcaccgcaacctctgcctcccaggttcaagcagttcccctgcctcagcctccctagtagctgggat

SEQ ID NO: 426725 - DNA, 122 bp, Homo sapiens
agggctgggtccaggaggttgctgggctccagtcccaggtcccaccttcatcactgtgaccgcggcacctctcggaccctcattggaaattgaaagagggcgcagccattggcaagaccgct

SEQ ID NO: 426726 - DNA, 122 bp, Homo sapiens
catattgaaatcgggatgcggtgctgaaggctttctctcctccctctgcctccgcgctctcgctctgatgtgctgcattgatgcaatagcagctcgcctcaggcttccaccttggctcccag

SEQ ID NO: 426727 - DNA, 122 bp, Homo sapiens
gtcctctcctgccgagatgatgaagccccctgaggtagaaaggctccagagttctgacctcggggcccttggtatctgcagcgtcgctgcgggcagctccctcactcctgaatcacccccag

SEQ ID NO: 426728 - DNA, 122 bp, Homo sapiens
ttctcaggatcctttccaattcacacgctcccggcacagtaagaaggctcccacacagctcggcttccccagaggagtggagcttcaagaactctgctcacagcatcctcctccccactgcc

SEQ ID NO: 426729 - DNA, 122 bp, Homo sapiens
tcagtggtcagaatggagctacagcacagaggaatgttaaagacagtgcccatcagaagacggggacggtggccaccaatggaagcccagaaaggggaaacctcatgggcagaggctggcag

SEQ ID NO: 426730 - DNA, 122 bp, Homo sapiens
tgtttcatgatgacaacagctctgctagaaaagcatttcttttttgcctacgaggactctcgattcagggaccctgagtctttgggaccctcgtgcagctggggctcaccctgtctggaccc

SEQ ID NO: 426731 - DNA, 122 bp, Homo sapiens
ggcaactggtggtccaatgtaccagcccattcacaattccccaacaggaccaaagctgtccgcccccttccattccccgcccgcttccatcacttggtgtcgcccaagcctgtggtcgcccc

SEQ ID NO: 426732 - DNA, 122 bp, Homo sapiens
tggctcctctccccggaacaggcccccgacagctgctctcgggagccgcctcccgacacccgagccccgccggcgcctcccgctcccggctcccggctcctggctccctccgcctcccccgc

SEQ ID NO: 426733 - DNA, 122 bp, Homo sapiens
tggctcagctcctgtacagaggggacactcctcaaacacccccggaatgaatgagtttatcgtgagaactcggaaggctgctaaaatccccggccagcgttggagttttcagtccgcgtgtc

SEQ ID NO: 426734 - DNA, 122 bp, Homo sapiens
taaaccctgtcagaaggacctggtgccaccaattcccgattcccttgcaggcttagaagtcgcttttggctgggctcggtggcttatacctgtaatcccagcactttgggaggccaaggtgg

SEQ ID NO: 426735 - DNA, 122 bp, Homo sapiens
tcggcctggccaggcggggggtcttcttcccagtccgcggaagccaggtccgggagacggcggggctcactgtgccttcggacctacactctgctcgggggccggatttctgcaaagcgtcc

SEQ ID NO: 426736 - DNA, 122 bp, Homo sapiens
gaggccagtggaagcgaaaatgcctagcctagctgcatctggtctctggactctgcaacccgccagaaattgaatttaagtaaatggaacagggaggaaaggaaggaagagatcaaatgact

SEQ ID NO: 426737 - DNA, 122 bp, Homo sapiens
cgggtacttctggccgggcccagccttggagctgagaaaccaggcacgtttcctacaccacgtggtcaccttttttcacgttttctcttccgctgcaaagacaccgcctttccaccaggcgt

SEQ ID NO: 426738 - DNA, 122 bp, Homo sapiens
gatggaaaacgctttggttgcctgtgtgggaagcggtttgcagtgaagccaaagcgtgaccggcacatcatgctgaccttcagccttcggccttttggctgtggcatctgcaacaagcgctt

SEQ ID NO: 426739 - DNA, 122 bp, Homo sapiens
tcccagcacccttctcgctacacagaccggctctcaggaaaagtctaactaaagtgaattcgctgcacctactcgggcaagaggcgtcacatgtcttttaatttcgcaaattgaagaaatct

SEQ ID NO: 426740 - DNA, 122 bp, Homo sapiens
tggggtttcctctccttgagcttctcctactcagcacctgttaaaccatttactttccctcgtatcagagctactggattttttttttttttatggcacacacacattgcagtgtctgaaag

SEQ ID NO: 426741 - DNA, 122 bp, Homo sapiens
cactcatctgtgataacaaaaaagcagtggtcctggacacacataggttctgatagttaacgacgaacttgagggaatgaggcctggtggaactgaccataaatgaacagaaataaagagtg

SEQ ID NO: 426742 - DNA, 122 bp, Homo sapiens
agcgcagtcatcctctgctcctgccaacacccctgggctccctgaaacccctgagaaccccgtgagaaagtatgtctccatcttccagaggaggaaacagagggacctgtccagggtcacac

SEQ ID NO: 426743 - DNA, 122 bp, Homo sapiens
ccagcctgggcattgggcaactcaacggcctctggcattgggctataagaggagcttgaccgtgggtgcaccctggaccccaccatggctcaccggccccccagccctgccctggcgtccgt

SEQ ID NO: 426744 - DNA, 122 bp, Homo sapiens
ggtggctcatgcctgtaatcccagcatttagggaggcaaggcgagaggatcactagaggccggaagttcaagaccagcctgtgcaacagactcccggctcgaattttttataaaaagtgata

SEQ ID NO: 426745 - DNA, 122 bp, Homo sapiens
tgagatctggacctttttagcagtaacctaaggctcctttgtgcagtcgtgcttctgactcgataaccttacagttcacttgttccctgttttgcattcacattgagtcgtttggctggcac

SEQ ID NO: 426746 - DNA, 122 bp, Homo sapiens
ccgcccagtatgcgggtgttaattggctgccggaggtgcccttcacaatctcccggctgccgcagcgcgcggagagcgtgacaggactccacggagtctgcgcggaagggcgggactaactg

SEQ ID NO: 426747 - DNA, 122 bp, Homo sapiens
cgtgtccatggccaacatggtgctcatcggcttcttctcgtgcatcagcacgctgtgcatcggcgccgccgccttctcccactacgagcactggaccttcttccaggcctactactactgct

SEQ ID NO: 426748 - DNA, 122 bp, Homo sapiens
aggcgccatgtcagcccgggaagtggccgtgctgctgctgtggctgagctgctatggctccgccctttggaggtagagagacgccagtcgcaggcgagcgactaggcggggattacccccgg

SEQ ID NO: 426749 - DNA, 122 bp, Homo sapiens
gccacttagaaatagaaatggagtgggaaaatccctaccatcatttcctgtgttgttctccgtggagaatacctaatctgtttagtcttggagcttgagttctctgttttgttaactcccaa

SEQ ID NO: 426750 - DNA, 122 bp, Homo sapiens
tgcctgtaatcccactactttgggaggtcaagtcggccagatcacctgaggtcaggagttcgagaccagcctggccaacatggtgaaaccccatctctactaaaaatacaaaaatcagccgg

SEQ ID NO: 426751 - DNA, 122 bp, Homo sapiens
ccactcccgtgcccccagcaagggcgagatggcgaggggtgtcctccaacatctctgaaccgccttcccttcctcctcactggcgccctcttgcctcagtcgtcggagatggagaggcggct

SEQ ID NO: 426752 - DNA, 122 bp, Homo sapiens
gagaagatggtcaggctgaccaggcccaggcacagaggcagagtgacctggggcaggcggcgttggggaccgtcaggaggacagaggcggagtggcctggagcaggcggcgttggggaccgt

SEQ ID NO: 426753 - DNA, 122 bp, Homo sapiens
tcctgttggttaggggaagctgtcaacaaaagcagcacttccccctaaaaatgcagtagccggtgatgcatctgggcacatacgaatgcactcagatgggttctgtcaggccctgaacttgg

SEQ ID NO: 426754 - DNA, 122 bp, Homo sapiens
agtgttcacagcatggtggctggttccgtgccgtaatcacgggccctgggttggccagagcgctgaggctgattgaggtgtggtcgtgctgtcgcagggctccctctggatgtggccatcgc

SEQ ID NO: 426755 - DNA, 122 bp, Homo sapiens
gatgaaccctttccgcgtgcagccaaagttctcgaggcagttaagagtgctcagcgcattcgggcaccttaagtaagtggttctggaagtcggtggggaaaccatctgtaattcatcccctc

SEQ ID NO: 426756 - DNA, 122 bp, Homo sapiens
actcagcacactcaaccctgggcaatctctctggctcttggcagtagctcttttgaattccggctcacgaggattaacgatgacgaggggggtgttagctctgaagaaaaccccaatccttc

SEQ ID NO: 426757 - DNA, 122 bp, Homo sapiens
agaggaagttcccggcctgggggctttatccaggggtcccagtcgagagtggcccgaggccgtccctcaccgggcatgttccctctggctgcccactccctcagggcccacatgtcctgcca

SEQ ID NO: 426758 - DNA, 122 bp, Homo sapiens
cagacccatccagcatgcactgaactcggtgggtcggacccatccagcgtgcactgaactcggtgggttggacccatccagcatgcactgaactcggtgggtcagaccctttcactgtgcac

SEQ ID NO: 426759 - DNA, 122 bp, Homo sapiens
taaagctcttattgcagcaaagcttaagaagcactggactagagaacctcagtcctgagacgggcaacctaggaagtatgttgcagtgcattggcaggaagtctaattaatgttggcattca

SEQ ID NO: 426760 - DNA, 122 bp, Homo sapiens
cgcgccaggcctcgggcgccgccatcttggggaggtgcgcgagcccgagagtgtcgcccgcggaccgccatcttgaaaaggtcagcagttaggacggctccataagcgatatggggaagaat

SEQ ID NO: 426761 - DNA, 122 bp, Homo sapiens
cctgagccgagcctggggcacccgcggcctgtgctgcaagggtcaccttgtgacgagggccgtgcacagcctccgggctgagcagggacaaagactcctgtcccatccatggccccagctcc

SEQ ID NO: 426762 - DNA, 122 bp, Homo sapiens
taaacttgttgtggctcatggtggcattccaaatcagagactcatgtgaggccaatcaatcgtattctaaattttccatccatccaatgggtctacaagtaggaggaacctattcaatgggc

SEQ ID NO: 426763 - DNA, 122 bp, Homo sapiens
atcccctttgtccagagtgcgttttttagggatgtgcacttgagaccctaacccgcagcacgttatctcaattggaaggtcagtgtccacgtcaaccagtaataaaggatggatgatacaca

SEQ ID NO: 426764 - DNA, 122 bp, Homo sapiens
cagcgcagacccaacccagacagggcaagtgagcacgtgtctccctcccaacccaagctgcgcgccgacgcacccaagttagggtcccaggctcccggcgcgggatgggcgctagggcagcg

SEQ ID NO: 426765 - DNA, 122 bp, Homo sapiens
cactgcagcccagcctggacagaggtgagacgctcgcggaccttagcttggggttggcggcgttaggaagaaaccgacctcgagaccctgaagacctgacaacagccgttactctggctgac

SEQ ID NO: 426766 - DNA, 122 bp, Homo sapiens
gaggccccagcatgatctccagtaccccagcttctgcctcgcaccccagggccaaggactcgctccatggcatcccttaacccagaggttcccaaacttggaatcacccggaaggcctgtag

SEQ ID NO: 426767 - DNA, 122 bp, Homo sapiens
gcggaccccgggggcgacgcagtggcgaagtggggctgtgggcccagcggtggcaccaggcggagaagcaccactcaaccccatccctgggctgcagagggcccagcgcgggggactccgag

SEQ ID NO: 426768 - DNA, 122 bp, Homo sapiens
tgtgggccaggcagcgggtccgagtgccctggggaatgtgtcctcagaggctcgcgccgccgtccgccttttgcagaggagaaaactaaagcacaaagggattaaatcacttgcccgaggtc

SEQ ID NO: 426769 - DNA, 122 bp, Homo sapiens
ccagagggtgggtcgggggcaggagttcctgcagggctttggctcatgtattcagagacgcgctggaccgggctcaggtgctgtggccagaatccagcttgctgtctccctgtctgtcctca

SEQ ID NO: 426770 - DNA, 122 bp, Homo sapiens
cgggccccttgaagggccaggctgcactccccttcagccccctggtcatcccggccttcccggcccacttcctggccaccgcaggcccctcgcccatggccgctggcctgatgcacttcccc

SEQ ID NO: 426771 - DNA, 122 bp, Homo sapiens
cctcaaccgggcagggtagcttgggcccagtgggcggtgcttctcctgtcagcatgtgggcggggtagggcggggaccagcagccgcagagccgtcctcggcggtggcgacgacgacgacgt

SEQ ID NO: 426772 - DNA, 122 bp, Homo sapiens
gacgtcagccccaccccttaaccccgaggtcgctctccgccggtgtcccgtcgaacatcgcggcgcccagcctacatccactgaggacccactagccgcgtacgagcaaccaagtgggaggc

SEQ ID NO: 426773 - DNA, 122 bp, Homo sapiens
aggggggacacctcaccccatctatctcatggttttatttgaagctgaaatgaaatagcacgtgaaaaaagcactgtaacttagagctatctcaatcgtagggatatattgttatctttact

SEQ ID NO: 426774 - DNA, 122 bp, Homo sapiens
tggtgggccgggcgcctcagctggccaatggagcatccatgtggggctggcccagctctgcggccgtggcaatctaggccctgttgtttgctgtggccagtccagggcccagggttggagat

SEQ ID NO: 426775 - DNA, 122 bp, Homo sapiens
cactgctgagacatccttcttcaccagctccctagttgctgcttttcctccacagtgtgacgtttccaaaggggaaggggtggggaacgcagttctctgactggtcaagacaacttccaggg

SEQ ID NO: 426776 - DNA, 122 bp, Homo sapiens
tactgtaaggctgagggctatgcattctatggctatgttgttgtctcttatttttccaaacgtggaaacctctgttttgtaacttgtagtaataaggtagaaattaaaaagaaaaagtattt

SEQ ID NO: 426777 - DNA, 122 bp, Homo sapiens
gctcagcctcagctatcggtgcgcacgtgaccgtgtgtgtgccctgagatgcaggagcaccgagaggcaggctttgtcaagccccaccgcagtttagcaaatcagtaaaacccaaacattct

SEQ ID NO: 426778 - DNA, 122 bp, Homo sapiens
ggtgcgaggtgtgggggcgctcgccctattgctgctgccgctgggtctagggtgggcggccggcctcgcggtccggcggtgagtgcggtgcccgggcctcgggcccagccgcagccccctgc

SEQ ID NO: 426779 - DNA, 122 bp, Homo sapiens
ctcaggcatccgagaattaatggggccccgggttgggatgcatgcagtgccaggcggaatcggttccagcaggcgtctgggagggccggtttggccccagtatctgaaaacggtgaatcagc

SEQ ID NO: 426780 - DNA, 122 bp, Homo sapiens
tcgaagaaaaagggagcaaagtgaataaggttcccatttctccagattgtttatcatgtccgtcctcctcgggagaggaaggagggctgacagaaaaactgcccgcagctagtaaggaatcc

SEQ ID NO: 426781 - DNA, 122 bp, Homo sapiens
cattgcccatgatcccgggggcggcggtccgggtgcacccccagctcgccgcccgggaagcgatccggtcacagctgccctgacggcccaggcccgacgcctgcagcctggcggggaacggg

SEQ ID NO: 426782 - DNA, 122 bp, Homo sapiens
tctcattcaaaaccttaacttgtctctctagtagcacctcacatgactagtaagccctttcgaaggggtatgcacaccattggataccccttctcaataatggcttggcaaacactgcagag

SEQ ID NO: 426783 - DNA, 122 bp, Homo sapiens
taatttctatttttattgcaccttaatccactagtgtctttagtatgatttctgttttttcgaattaattgagacttgctttatggcagagcatgtggttagtcatacagcacaatctgtgt

SEQ ID NO: 426784 - DNA, 122 bp, Homo sapiens
ctcgattaggacgaacccccggcacttagcccgcacaggaacaatggcgagcctctagaccgattgggagcggcaatgggcacctcctcactagatcagaagtgcagcggacaccctgctgg

SEQ ID NO: 426785 - DNA, 122 bp, Homo sapiens
tccagtggggaggtgtgcagggattggttgggaagcgctcaagccccgcccacagagtgacgtcaggtggcggtattgctacttaaggcgtcgtggcctcccctgccccgccttagctcccg

SEQ ID NO: 426786 - DNA, 122 bp, Homo sapiens
tgtgtgtgtgtgtgaatggccagacctaaggcctgagcatggatgggatcagggacagatcggagacttcaagaagggtgaagattagatccccagatggacacactctgggagattcagca

SEQ ID NO: 426787 - DNA, 122 bp, Homo sapiens
ctgggtccgccggtggcgcgcgggcgggtcttgcggaaaggaacttgttgctctggaaagcgtgggtggagcaggggaaagaaggcgccggcggagggagcaccccgctgtggttttggccc

SEQ ID NO: 426788 - DNA, 122 bp, Homo sapiens
gcaaaaagacagtgcggtgtcgtccaggactcaggagtggcacctcccactagctctgcgcggtccagttagacgcgctggcagtgggccaccctgcgccggccccctttcttccagatggc

SEQ ID NO: 426789 - DNA, 122 bp, Homo sapiens
tttggccttggaccctctctacctctgtacaacgatcgtgttggactagaagaatctcagcgaatccttctccagtactgacttcaaaggttctcagaatcgcggcgaaagcaccctacgca

SEQ ID NO: 426790 - DNA, 122 bp, Homo sapiens
cccggacggccgggctggacgggcagcctcctcggcgaccgggaggaggcggcgcggccgcgactgctgccgctgctcctggtgcttctgggctgcctgggccttggcgtagcggccgaaga

SEQ ID NO: 426791 - DNA, 122 bp, Homo sapiens
gcgacaggcacgttgcatgcatgccttgggcgcagcctttgcgaaagccggttgggtgtgcgttggtgcttcagcggcgccgtggagggtccgggtcgccgggggatgggcaccagcgccga

SEQ ID NO: 426792 - DNA, 122 bp, Homo sapiens
gaagcgaagcctcttggaaagggcggggctcgcagttgcgtaagtggcagagctgggattcgaacctagatgtgttggacccaaagcccttcagaggccgaggtggtttgaacatgtgccta

SEQ ID NO: 426793 - DNA, 122 bp, Homo sapiens
agccctggccgcgagctttttcaccaggcttgagctcagcagccgggcccgcagtgttgccgccagtggggaggcagggaggctgtcggcgcgccggagccaggcgggaaagggactacagc

SEQ ID NO: 426794 - DNA, 122 bp, Homo sapiens
ggccatagaagtccagtgtcagggacagattgaagcaagtcgctctgctttctgccagcacgagcatgaatagaagagaccgtgttaataaaagttcctgagatgaagccatagaataacgt

SEQ ID NO: 426795 - DNA, 122 bp, Homo sapiens
gcggcgagcattggcctggtctgaacccttgccctccctgcctggcttcttccccgtccccgtcacctctccttaaggagcaggacctagggtggcttttataagctacgcaggagggagca

SEQ ID NO: 426796 - DNA, 122 bp, Homo sapiens
tatcagcttcggtttccaggagccccatgagaacaggcagtatttgactttctgtttctgcgttgtttcgcatatgataatgtcctccaattccatccatgttgctgcaaagacataatttc

SEQ ID NO: 426797 - DNA, 122 bp, Homo sapiens
ctgtctgcggagaagaatccaacatcagtgagggcgggtatctgttctgtgcgggaaacgcgcaggggagaagaaaagacacacacacacaatacctttaagggtaaacagcctttatccca

SEQ ID NO: 426798 - DNA, 122 bp, Homo sapiens
tccattcccaagccactgcgtgtgtctctgaggaaactgccccttccactgtgggaggtccggccctgattagtcgccagagacacacctggcaggaggcccatgtggaccctgagagcaga

SEQ ID NO: 426799 - DNA, 122 bp, Homo sapiens
cgggggcagggatcagcgggcccggcggggggcggcgacggctttacccccagctcgggacgtgagcctcgtagtcccagtactcgcggctcctcagactgttcacctcggcgtagacccgg

SEQ ID NO: 426800 - DNA, 122 bp, Homo sapiens
gcgggagctctgccctttgtcttgtggggcccacagtaaaaggaaaccagtttccccttacgccactccacggtgatggggctctggaggctggggtgctccacttggcaggtgtagatgtc

SEQ ID NO: 426801 - DNA, 122 bp, Homo sapiens
agctatctccaagagcaacattgccgcagcacttccgggacgtcgtgctgcaaaggacgccgctgttatacgtcacttccacggctcagcgtcaggcaagttggcctctctgttgtaaatta

SEQ ID NO: 426802 - DNA, 122 bp, Homo sapiens
ccaaaggactcacctctcttctgccattttactaggacacaggaggcggctctctgctctcgctctccctctctttttctccctgcccccaactcagcctgggctttttcctgtctcttaac

SEQ ID NO: 426803 - DNA, 122 bp, Homo sapiens
tcaaagcctcttatttttctagcgaacgtatttctccagacccagaggccctgaagcctccgtggaacattctggatctgaccctcccagtctcatctcctgaccctcccactcccatctcc

SEQ ID NO: 426804 - DNA, 122 bp, Homo sapiens
agctggcaatcactgtgatgtcactgatgaaacatctcaaaggaacaccctccgaaggttcgaggctatttgtgttcgggggacatggaaatatgttgactaagactttgttcctttggctg

SEQ ID NO: 426805 - DNA, 122 bp, Homo sapiens
cggcctgtgcctttagccccgccccgaatccccccaccctcataaccccgcccctaaccccgcctccacacacagaccccgcccccaaccagactccgccccgcgcaagctccctaagcccg

SEQ ID NO: 426806 - DNA, 122 bp, Homo sapiens
ctcctggggagtttgctgaacagggtgatgttacccaaggccgccctgctggtcaccacgcggcccagggccctgagggacctccggatcctggcggaggagccgatctacataagggtgga

SEQ ID NO: 426807 - DNA, 122 bp, Homo sapiens
aagacatacttccatcctcacacccccgaaggtccttgcctggactggaagctaaagaagcgcatgctacattgttttcctagtgacaaaaatcccagctggcctctggttaacttttcaaa

SEQ ID NO: 426808 - DNA, 122 bp, Homo sapiens
agtggtggtcaatatctagacatcttgttcacagcaccaactgctagtcacctagaagggcgaggctgcaatgatgacactgatgacagtgggtctcacacacactgagagggtatgaaaag

SEQ ID NO: 426809 - DNA, 122 bp, Homo sapiens
agatctagtataactcttgttattttatatatcttattacaccggaacagctcgtgccctcggtctcttgcctcagcaccggggtggcttgctgcccacaggcactgactagtggagctacg

SEQ ID NO: 426810 - DNA, 122 bp, Homo sapiens
cagggtccctcgtccgcagtgggggtggtccgggcccctcagcctgcacccgggaggagacgcccccttttcacgccccgcccccggtggccgaggccggattcggacagctcggggtcagt

SEQ ID NO: 426811 - DNA, 122 bp, Homo sapiens
gagcaggtcttcaaataacatggattagttatgacgtcgaagagaaaaaaaatccatttccggtcagggccatggtctgtgtggagttttcaggttctccctgtgtctttgtggattttctc

SEQ ID NO: 426812 - DNA, 122 bp, Homo sapiens
attgaggaagccctggacggggcggggccgccctcagtcccgcccgcatccacttgtaaacgaggcgtaccgctgctaaccccgcccctggcttttccgggatccctttcgcctcatcaccg

SEQ ID NO: 426813 - DNA, 122 bp, Homo sapiens
ttagcaaattctccttgtcgtatgggaatggatgcagggccttggcccagctccctgtaccgtcttgactgtccttcagtcagactcaagatgtgcctccaggatcagcctgaggaggcccc

SEQ ID NO: 426814 - DNA, 122 bp, Homo sapiens
tccacaaagttgaggagttgcaaggaataattgggtgtcacaccacaagcaaccttgactcgatcggaccccacccaggatacacacagacgcgcgcgcgcgcacgcttccgagtttccatt

SEQ ID NO: 426815 - DNA, 122 bp, Homo sapiens
gggggcggggccgcgaggaaggcttggcctagcccaggccctccgcccatccgactcttccggcccttggaggcctggctcctgtaccttcacctggcgtcttggcgcctttttctcagcgg

SEQ ID NO: 426816 - DNA, 122 bp, Homo sapiens
caggccgtgtgcaggatcttcttggtgaagtccaagctgtccacactgatgtcatcacgccggcgcttgccccccacgcacacgcgccgtggcttgagcacagcccggggcttgctgctttc

SEQ ID NO: 426817 - DNA, 122 bp, Homo sapiens
aatcctgtagggaggattctgactcctgagtttctcctcccccttgtggttcttttacttcgatgactattgcatatattccacccatggtgagatctctgcttctctttaatgctgatcta

SEQ ID NO: 426818 - DNA, 122 bp, Homo sapiens
agagtggggggcggccaccgctgcaccgcgcggccttcgaaggactgccctgcggcgccgcgttcccccgaggccaccccctcccgccgtcaacactccccggggcgggggctcacctgtgt

SEQ ID NO: 426819 - DNA, 122 bp, Homo sapiens
gtccctccctaggcgcccctggctagctcggcttgcctggcagcgtctgtgtctgagggacgtgttggtggccgccgctggccgcatctgtccccctgcaggtgggcatcaggttgcccccg

SEQ ID NO: 426820 - DNA, 122 bp, Homo sapiens
tgtaagctttccgcctgcagaggaatgggctggcgtctgggccgggctgggaagagtgatcgctccagccgcgtggcagtaacattcccgcacatttaacaacaattagtctgtgccgacgc

SEQ ID NO: 426821 - DNA, 122 bp, Homo sapiens
ccttttgtgcgccgcgcggtggggcggtgcccagcttgggggaaggagagcggcgcttatcgaagtgtggtcgacctccatccgcccaccgagcacttgggacccgctgcacatatccagag

SEQ ID NO: 426822 - DNA, 122 bp, Homo sapiens
cagtctcactcggttgcccaggctggactgcagtggcacaatcacagctcactgcagcctcgatctcctggggtcaagtgatccggctgcctcaacctcccaagtagctgggactagaggtg

SEQ ID NO: 426823 - DNA, 122 bp, Homo sapiens
atgtacagcatttgactctgttcacttacaaatttcttaaagttttctgttctttgacctcggtaacactacacgtcacaccttttgatacctctcctcagtcctgctcggtcatttattct

SEQ ID NO: 426824 - DNA, 122 bp, Homo sapiens
atagatgcagttggggctcagaccaaagcctcgtatccagttaggagcaggatcagaattcgaacccaaagccagctgactccttgttctggtcaacacggttggtgctctcccgtgcagga

SEQ ID NO: 426825 - DNA, 122 bp, Homo sapiens
cccccttcaggggcgccctctggtgcgtctttttcactcagtgtccttttggggggtccccgggccgtgtggtgcgtgctggctcggctcagtagcgctgttacaggcttacgagctgacgt

SEQ ID NO: 426826 - DNA, 122 bp, Homo sapiens
agagagaacgcaaggagagcctagcccgccatcctaccaggcagaggtgtttaaccccttcgttggcgagccagctcctccaggacacagccatgccgccggccccgccgcgctgcgctctg

SEQ ID NO: 426827 - DNA, 122 bp, Homo sapiens
agcggcagcaaccgagaagggcactcagccccgcaggtcccggtgggaatgcgcggccggcgcccgcaccccatttataggaagcccaggctgcaagagcgccaggattgcaaaaggtccaa

SEQ ID NO: 426828 - DNA, 122 bp, Homo sapiens
gtcctagtctatccaagcacagagcagctctggttagtgtctgctcaattcctctcccctcgcccaaacgtccctgagttgcggcctcgctcctgaccgaaatccccgcgggttctcctcgc

SEQ ID NO: 426829 - DNA, 122 bp, Homo sapiens
tggcgagaaagcgagactccgtctcaaaaaaaaataatcaggactagggaggccctaaatcgaccgttttcactgcgtcatgtgaaccattcaaggcctgaatgtcggattttcctattgct

SEQ ID NO: 426830 - DNA, 122 bp, Homo sapiens
acatcgacccggccgatgcaagccctgaccaagagatcagcttctcctactatgtgagaccgggaaacggggacgggtgagagtatgctgggaaggaaagagaatgagaagagtcagccaga

SEQ ID NO: 426831 - DNA, 122 bp, Homo sapiens
tgatggctcttataatttctctcaaatacaacacaccatttccctcgactcttaaagaaccgtctcagagtggccttatacttctccacctcttctaccacctctgctgaaagctccaccac

SEQ ID NO: 426832 - DNA, 122 bp, Homo sapiens
tgaatgaggggagcggctgagtctgcaaacaggctgcgtgcctggcgctacaactgcaggcgcgccgccacggtcaatggcgagggggttggggctgagtgggagcggctgccagcaagaaa

SEQ ID NO: 426833 - DNA, 122 bp, Homo sapiens
agaatctctcggaaaaccttcccttcccttctgagcataatctacttatgattatcataacgactcacatttccactacatttttcctcacatatattttctaacttggtctcaaaacaacc

SEQ ID NO: 426834 - DNA, 122 bp, Homo sapiens
gggagaactggtgcatcctttttttttttttttttttttttttttcaaaaaagcggtattcggtctttgtttttataaaaagtaacgtgctgctaagtgtgctactgaccggcctaaatttt

SEQ ID NO: 426835 - DNA, 122 bp, Homo sapiens
cctctcaccccattagctgtccccgcgcgacagaggcggtgcgcggactacgcctcccggcgtgcatcgcgcggaccccgccccatgtgtcccattggcttctgggaaaccgagtgcggttg

SEQ ID NO: 426836 - DNA, 122 bp, Homo sapiens
agcacttactgtgtaccaggtactgctcacagcagtagtgaccaaaacagacagaagtcacggggctgactttctagcagggcagacagacaaccaaccactgtgttaaaatgcagagcgtg

SEQ ID NO: 426837 - DNA, 122 bp, Homo sapiens
gacagagaataccaaagtttaaaatatctactatctgtccctttacagagaaactttggtcgcccccagatcttacatacttgatgaaagtgtagagtccttggttttaccaaggactctac

SEQ ID NO: 426838 - DNA, 122 bp, Homo sapiens
attatttctagctggcggctgaataagaggcaagagtcaccctctttttgagttaaatcacgtgcttaattaaaagtgaaggtggcggcggcctcagcgccctccccctccgtgctgctggc

SEQ ID NO: 426839 - DNA, 122 bp, Homo sapiens
ggtaggtagttccctgcggctggaggcgggtctggcgcgggctgggcggtgctgcggggccgcgggacagcggagcgccgggaagggggctgccttaggggtccaggtgcgcggctgggccg

SEQ ID NO: 426840 - DNA, 122 bp, Homo sapiens
cattcactccagagccggctgggaggcagccctttcacacggctcctctgggcgtctcctcgtgataccacagatgggtccctcagaaaccctcaaaacaggcctcctggttgtcactgcct

SEQ ID NO: 426841 - DNA, 122 bp, Homo sapiens
ccccacatcccccaaacttaaccaagagtatatcctcctacctgttggtgttggatatcccgacagactatagcttctttctataaattgctgatttttttctttttttctttttctttttt

SEQ ID NO: 426842 - DNA, 122 bp, Homo sapiens
acccggcttggagggggatgggggcgcctgttgcttctccagggggttgcgcacgccgtccgccccttggagggattgggaggcccacgccctgctgcgagaagggcgcgttctagctcctg

SEQ ID NO: 426843 - DNA, 122 bp, Homo sapiens
ccgtagtctgcacagtttggccggcaggtgggatgaagggcggggctggcggagcgcgcccgccgcctggtaggccagttcggagcggagccaacgctatcccgggccccacggccaggggg

SEQ ID NO: 426844 - DNA, 122 bp, Homo sapiens
ccttgccctcccgggcatgaggttgcagcgcagaggcgtctccctgagtaaggctgcacacgtagacttgactctagcccatcctcagcctcagcctaagctttgccgagctggaacctcca

SEQ ID NO: 426845 - DNA, 122 bp, Homo sapiens
gaggcacgtcatcagctgcacagctaattacagacagtgcattctcatcatgaaggccatcggacatattaacggagaaggaggccctaaactgctatgcataaaagagaaagaacagagaa

SEQ ID NO: 426846 - DNA, 122 bp, Homo sapiens
ggcgctcgggacagaagccaggtctcggcgggacatggcagggggtgggcggggcctgggcgaggtgggggcggggcgcgaggcggagagaccttcccctatagaaccggcagggggcgggg

SEQ ID NO: 426847 - DNA, 122 bp, Homo sapiens
acagtcagctcctgcggcatctgatttgcctcctgccctcgctgctgttaatctgcaacacgccacagcctctagatcgctgccgttcagagtcggatgtcatgggggcgactggcaggggt

SEQ ID NO: 426848 - DNA, 122 bp, Homo sapiens
ccagccaaggtagaggaggaggaaagcaaggatcagggagggtgtttaattttcccaagtcgcacagcatccaaactgcagataaacttccagctcaagcctctgtgacttcacagctcttt

SEQ ID NO: 426849 - DNA, 122 bp, Homo sapiens
aaactgaactctctctccctctattcctgataggtaaattggagctcggactacacctctcggactacacctctcctaaaagaaagaagcccagattcaagaagtaatttgccaaaagggag

SEQ ID NO: 426850 - DNA, 122 bp, Homo sapiens
gtgaaagtagtctgagcgctttataaaattcatattattgtgtgtgttttgtaatatttgcgatcacttaaaatatcagataaatacagtcatgcatcgcttaacaacggggatacagtcta

SEQ ID NO: 426851 - DNA, 122 bp, Homo sapiens
ctccccaaaactcatgactctgactggttaaaatgagtgtcagtgttctccatctgtcctcgtaacagcatcactggctctatattgtcagatctttaatactaactttctgcccagtgagc

SEQ ID NO: 426852 - DNA, 122 bp, Homo sapiens
caccatgcaccgtggcccggttcaaactgtgtttaaatgaggcccacgccaagcggtgcccgtctggctgtttctgtgcctccgtccagttttcttggcatcactgtcctttctctgtccac

SEQ ID NO: 426853 - DNA, 122 bp, Homo sapiens
ctcagagagcattggcctgcagaacttcgagattgccaaggacttcgtcgtcaaggtcatcgaccggctgagccgggacgagctggtcaaggtgaggcctcgccccgcccggctttctcaag

SEQ ID NO: 426854 - DNA, 122 bp, Homo sapiens
tttagaataccacctgccaactcagtagtagccctctgaatgaccccatgcttccacacacggggagaccccttcagaaagtgggtctgtacaggttaaatataggggggggaaaaaggctt

SEQ ID NO: 426855 - DNA, 122 bp, Homo sapiens
tgcacaggcgtcccgtttcttgcacacgccgatttcatgcctgctgtgtgtgggtcctgccggggagtgcagagatgaccctgggctgggagggccgcactcaataggcgcttttggctgct

SEQ ID NO: 426856 - DNA, 122 bp, Homo sapiens
aaactatgccaatccacactaggatgactcagagcccaaggggagctctgtaagccccaccgtgattcacacagtggagtcgcagagttcgaggaaaagagggtgtcacatgtccctgtggg

SEQ ID NO: 426857 - DNA, 122 bp, Homo sapiens
actgaaggcatcagaacagtccgagcactgagaagcagcaggttgcagcaaaccctgcggcgcaggcgcacgagggacgatgggaagtccacggcattattattgccggatgaggaagggag

SEQ ID NO: 426858 - DNA, 122 bp, Homo sapiens
gggctgtgattcctgtagtcactgtgctaaaaccttgccataggctccatcctaggtgcccgggagggaggtgggcactgaggtcataggacgcactccagaatcgggtggaatttggagca

SEQ ID NO: 426859 - DNA, 122 bp, Homo sapiens
gggctgctggtgccttgagtcccacagatgattcattaggaaaagccagatataccaaagcggtttactcagagtcaggggtgtagctctggctgcctgtcagctcccttggatactatatt

SEQ ID NO: 426860 - DNA, 122 bp, Homo sapiens
tttctatttcttttactgaaatgcttgaagctctaatagattctgtcttatcaattcagacggaatagtaactgtggtacagagtcagaaaagaagcaattggatttaccaggggctctttt

SEQ ID NO: 426861 - DNA, 122 bp, Homo sapiens
acccaccattcccgccgccccctcacggtgcccgccgttcccgccgcccggctttctaaccgggcccctagttccccgccccgtgccctctggagacctgcagctcctgccgccctgcgccc

SEQ ID NO: 426862 - DNA, 122 bp, Homo sapiens
ggccacctggccaggaagcggctgctgcagcagtcattctgcggcatcttgcggccttggcgggcggtgctgtgccgcgttctgctgcccccaaggcaatgctggctttccctgtgtggggc

SEQ ID NO: 426863 - DNA, 122 bp, Homo sapiens
gcttccctgggtggcaatacttgctgtatgttgtcactcatctttgcttcaagcattaagcgctttctgtatgacttcactgggaaaggacaactggaatcccacatatggtctcttctgga

SEQ ID NO: 426864 - DNA, 122 bp, Homo sapiens
gttatttttggtcttaaatagcagtttgaaactgtagataggcatccacgtgtatcagtacgtcactagtggcttttgaatagccatctgatgaacatgtaattcagtgtgtaatttaaagg

SEQ ID NO: 426865 - DNA, 122 bp, Homo sapiens
cgggagtggcggcggtgtgagctgtggtctctgttgattgcagggattctggtggtgggtcggcggggtctgtgtgagggccacttgacatgcctctttaaaccagaagtgttttcctaaac

SEQ ID NO: 426866 - DNA, 122 bp, Homo sapiens
cggcgagcggggagcggcggggcctggagcgctggcggtggtcggaggtggggaccgggacgcgccgggctgtcgtctcggggctgtcggccggggcggctgccgtcgagctggagggtgga

SEQ ID NO: 426867 - DNA, 122 bp, Homo sapiens
agaactcagattcaggaacagcccccttggaggtcagaatgatatttatgacacggtcaccgggctgaattcaaacctcaagggaatgaaagtgagtaaatagggttcgtcttgttagcaaa

SEQ ID NO: 426868 - DNA, 122 bp, Homo sapiens
ggttacaagcgtgagccactgctcccagccacaattccctttctatgcaaatctcttgcacgcattgtctacggctcctggtttcaactctcgcctcccactcccttttccatctagtgttt

SEQ ID NO: 426869 - DNA, 122 bp, Homo sapiens
gatgctcacggagagtgggagggcgtcccgcaccgggcagagctgaagggtggcgggggtcggcttcctcctctctgcctcttcccttccgccacgcttcctacccacaccagccagtctcc

SEQ ID NO: 426870 - DNA, 122 bp, Homo sapiens
caaatacacattgccacatggtccgacagactcacattcactcctagaaatgtaccttcacggtcttgccaatgcattcttcttattaatttcccattcatttgtttacttaacattttgag

SEQ ID NO: 426871 - DNA, 122 bp, Homo sapiens
acacacaccacataaggtcagctcagagcccatggcttccctgcaggagccccatcttgtcgctattagttgggagttgcaatacattgttggccataaacaaagtgctaaaggaaagggtt

SEQ ID NO: 426872 - DNA, 122 bp, Homo sapiens
tgggcctgagcctcctgggccgccaccacagggcccttgtcacccccaccactgccaaaccggaactgaggtcaaggagagaaggtccaggttctcttccaagaaagccatgggaccctccc

SEQ ID NO: 426873 - DNA, 122 bp, Homo sapiens
atccagctgcccacgcctgagtccaagattcttcccaggaacacaaacgtaggagacccacgctcctggaagcaccagcctttatctcttcaccttcaagtcccctttctcaagaatcctct

SEQ ID NO: 426874 - DNA, 122 bp, Homo sapiens
agggtaagctcctcaaggcagggaccacttttcactcactgccaaagctctggcactgttcggagtaggcacagaggtaggcagcaccaagtgtttgttggtggaaggagcctctttgcagg

SEQ ID NO: 426875 - DNA, 122 bp, Homo sapiens
tgcaagtgccaccatgctagtgtgatttggacttcagtaaaagttagtttgcttccttcccgttgtcccatctcactcctgggccacccgtggggctgctggtagctggtgtgtggctgctg

SEQ ID NO: 426876 - DNA, 122 bp, Homo sapiens
ggcgggagcagagcatcgagcggcttttagctggggttcgggcggaggacctgggacaaccgcgggcctcgctcctccccggacggggcgggacggggaagtcccgcccaccaggcccaggc

SEQ ID NO: 426877 - DNA, 122 bp, Homo sapiens
cctcggtaactccctggttgtgcttccttgcagccgtcccgtcccatccttatgggattacgctcctcaactgtgacggccactccatgaccctcggctggaaggtcccgaaattcagtggt

SEQ ID NO: 426878 - DNA, 122 bp, Homo sapiens
gccgtacaagaagtggtccattcctagaagacaatccacaggcacgatggagccgctgcccgggagctcgcgttgtgggctgtgcactcatgtcccggaggggacacaggcatctcactgtc

SEQ ID NO: 426879 - DNA, 122 bp, Homo sapiens
tcctgcgatctggggttgggatttcggctcaggccgtgcgcggtggccttgggtcgcgcccgccctgcctgggcccccagcccaagggaccgagcgggtgcgggcggggcgggcggggcggg

SEQ ID NO: 426880 - DNA, 122 bp, Homo sapiens
tacccgtcttctagacgacatcctagcaccacctccacccgcatgagtggggcctgctggcgtggacagggtgaaaggacattctcttggcccagttgcttctgttggttggcaggcatgtg

SEQ ID NO: 426881 - DNA, 122 bp, Homo sapiens
aggagatgcaataaggtagaggtagctgaaaatgcctggcaagcccccagttgcatttttcgtgggatacctacaagtatcccatgcaaaattctgcccctcggggcctcataaaacctgct

SEQ ID NO: 426882 - DNA, 122 bp, Homo sapiens
gcgagactccttctcaaatatagaattttaaaaaggccatctcgactgccgcgggggtcgcgtcctctccatccccgaccttggacgcaaccccgggcttgggtcccccacgatctagacag

SEQ ID NO: 426883 - DNA, 122 bp, Homo sapiens
cccctctcctttccccgccgatgaccctttaaatgtatcttagaggacttcaggggctttcgaagcatagtgagctagatctgttggctaattaattgacactgttttgaatattcatatct

SEQ ID NO: 426884 - DNA, 122 bp, Homo sapiens
acttgaggttttttttttcctagtcattgggaatgtagagcagtgtatcttgcatgtcatcggaagaatagatttttgttttggttttgttttgaaaatgactctgaacatttatttccatt

SEQ ID NO: 426885 - DNA, 122 bp, Homo sapiens
cccgccgatcccctgcgcctctcacacccagaacccggggtcgttccctttcaaaacctgcgctcacaaagggatctaagaaacccgtcacaccagagaaagcccggagttcatgtgaccag

SEQ ID NO: 426886 - DNA, 122 bp, Homo sapiens
gatcagcaccagcagaagcaatccagagaccaagagaaccattacactgaccgtgattaccggaaagaaagggattctcataggcacagagaggccagtcatagagattcccattggaagag

SEQ ID NO: 426887 - DNA, 122 bp, Homo sapiens
cacgcagctgggctggtcgagcccaggaactcagcctgtgcaggtgtagacccttcacaccgtgtgcaatgcctgcaccctgtgcagcagggctggcagggcctgggaactcagcccttgca

SEQ ID NO: 426888 - DNA, 122 bp, Homo sapiens
cgactccgtccgcgtagcgcgcacgcccgcccgcacgcgtacgagtgtctacgggctcgtcgctggctgctcccaccaaccaccaccttcggccgccccgcgcgccagccagcccgtacgcg

SEQ ID NO: 426889 - DNA, 122 bp, Homo sapiens
gtcagccagctcctcgtccgtgagagttttctgcacgtactccatcgctgacaaaagccccgccagctcactcacgatgctctggttggaaaccaaaacaaagtcagaaaacatttcctcag

SEQ ID NO: 426890 - DNA, 122 bp, Homo sapiens
atgtttcagctgtgaaatgcactcgctgtaagctctaggctgagtgcatggaaactgttacgcttctcattttatgtgatctcctaattggtatgtagcaaaaattttctaaaactgttttg

SEQ ID NO: 426891 - DNA, 122 bp, Homo sapiens
cagaaggagctggaagtgaagcaacccactcctgtgttcacatcacagacatacatccttcgcatttgcagcatgtctatttcaatgctttcgagtgggagaggtttgttggtgagtgtggc

SEQ ID NO: 426892 - DNA, 122 bp, Homo sapiens
ccgtaaacacgggcagagcggggcggggctgggcggggcttggcgggggcccagcatttccggggacgccgcgccggactgaggctgtgcgcccgagactccgggtccccaggggctgcgcc

SEQ ID NO: 426893 - DNA, 122 bp, Homo sapiens
gagcctcgggatgggagtcactggccttgtgcattggtaactacgtcagttgctggaatgcggcggggttgggtcggaccaaaagcgtgtttctgcagagtgaattgccggagtcgggggca

SEQ ID NO: 426894 - DNA, 122 bp, Homo sapiens
tcttacacgtgtcttcgcattgggtttatgcagactactgcagggggcagaacatgggcacgaatacgtaagattcagccgggcagccctccagcgtcaacgaagacattcttagaaggaaa

SEQ ID NO: 426895 - DNA, 122 bp, Homo sapiens
gacctcatcgccaatgtatctgtcccccttcccctgtggtgacagactgtggtctgactccggctatcgggccttctgtccagttaggtgtgaaccaagacccccccaagcagagtgtgagt

SEQ ID NO: 426896 - DNA, 122 bp, Homo sapiens
cgggctcctgcggatgggggctgcccccggggcctgagcccgcctgcccgcccaccgccccgccccgcccctgccacccctgccgcccggttcccattagcctgtccgcctctgcgggacca

SEQ ID NO: 426897 - DNA, 122 bp, Homo sapiens
actgtcccggggattaaagcctcgactggtttcctaatcacccaggtgacagcgagcagccgaggaatgcctcggcgaactccactgggccgcgtgtgagtcagccaaggagaatctgcccc

SEQ ID NO: 426898 - DNA, 122 bp, Homo sapiens
atccctccagaggggactggttgaataactatatacaactccacaatgatgaccattagccgtagagaaacagttatctccaaatactactatggaattaattcaggttacactggtagata

SEQ ID NO: 426899 - DNA, 122 bp, Homo sapiens
cccgcacttcacctgcgccgtggacacagagaacatccgcagggtgttcaacgactgccgcgacatcatccagcggatgcacctcaagcagtatgagctcttgtgaggatgctgccgccacc

SEQ ID NO: 426900 - DNA, 122 bp, Homo sapiens
tacgcctgtgtctctgtctgtgctgttcccttcctgggccagcaccaggctgctgggcagcgcccttgtttgcagtgtggaaacacccactctggggctggcactatctgtcgagaatttaa

SEQ ID NO: 426901 - DNA, 122 bp, Homo sapiens
agtgggccccaggggtcacaggccagtggggaaacagccatgggggcagctctggctgagcgtcactggccctcctgggggattaaggtccttgtcacaggggcctccaggccagccccagc

SEQ ID NO: 426902 - DNA, 122 bp, Homo sapiens
tctaacccaaaacaaagtagaactggctcagtaggctgtgagcatccctaaaaacatgctcgaggttgtgtctggtttctacttttctggggaaaagacccagttttctgcagctttcaaag

SEQ ID NO: 426903 - DNA, 122 bp, Homo sapiens
tgggtagcgccctctttacagccttgaaacctggtcaactacattactcagaaagctctgcgttgaatgaatgccgtcagagccaatgagggctcggaaagaagcatttccgtgtgtgcgcc

SEQ ID NO: 426904 - DNA, 122 bp, Homo sapiens
ctaaaaacactgaggggttggccgttggtttccagttgtccaagcctgtgagtggctatgcgtcctggttgggtgctcaaagcaaggaggtgaaaggcgaccagcattggcgaatggggtaa

SEQ ID NO: 426905 - DNA, 122 bp, Homo sapiens
gtcatgcccatcaccaagtccagcagaggcgccggctggaggcgaccagagctgtcatcccgggggccctcccagaatccccccagcagcacagatactgtgtggtcacgccagaactccgt

SEQ ID NO: 426906 - DNA, 122 bp, Homo sapiens
atgtcaggggcctgacgtggtggctcacacctggaatcccagcactttgggaggccaaggcgcgtgaatcaggagttcagggccaacctggccaagatggtgaaaccctgtctctactaaaa

SEQ ID NO: 426907 - DNA, 122 bp, Homo sapiens
atgagcaccaccctcaggacaggtgacctcagggaaccccactcgggaggacgcaggaaacgcacctccgatgtggcaattgcggcgccaagagcctccctccacccacctctgctcacggg

SEQ ID NO: 426908 - DNA, 122 bp, Homo sapiens
tctagagattcaagtcacagccttaggccccagtcacaagtgtgtccccaggctttgccacgttactcacaggcctctggagctgagaacaagtgcgtggcactgaaaaacctgggggaagg

SEQ ID NO: 426909 - DNA, 122 bp, Homo sapiens
attcttttgcattctggcaaccggctgacctcatccatacctatgactaatggctcagcccgtcatgtggtccctacctagaggtggattcaagcacaaacagatcatttccctccgcccgc

SEQ ID NO: 426910 - DNA, 122 bp, Homo sapiens
cgtcatccgcctgcctcagcctcccaaagtgctggggttacaggtgtaagccactgcgcccggctttctgtccaacctccctgtacagctttgatcttgttctggatctaggataggttttg

SEQ ID NO: 426911 - DNA, 122 bp, Homo sapiens
tcaacaactcctgacacgtttgtttacttcttgccttgaccctccatgtggtatgaatgacggcccctgaaagtggcagagtgggggcaaccctcaatacatattggttgactaaaggatgg

SEQ ID NO: 426912 - DNA, 122 bp, Homo sapiens
gaattcgagaggaacttctgctctcactggttactcatctactcatcgctagtgggactacgggccgcctcctatgcaaatacaagaggcagaagcccatggcaggcccttggggatgtggg

SEQ ID NO: 426913 - DNA, 122 bp, Homo sapiens
cctcttgaataacccacatcttaaaatgctatttttctccaacaggtcaaaagaattctgcgagttagagcgcagattaagttgctagcgacgggcattgaaggttttagaaccgagaaaat

SEQ ID NO: 426914 - DNA, 122 bp, Homo sapiens
tttgactacaactcccagaaggccgagcggcttagcgagtgcacccgctctcggctgctccggcaaactacacatcccaaagggcagcgcgcgaccgcgtgtcctttcacagcgcaagtgcg

SEQ ID NO: 426915 - DNA, 122 bp, Homo sapiens
attaacattggagcacacttatgtcggcctgcttcctgattacagtcaggcgccaggtaacgacggggtgacgctctgagaaacgtgcccttaggcggctttgttgtgttgtcttcatttgt

SEQ ID NO: 426916 - DNA, 122 bp, Homo sapiens
caaagagcagcataacatcatgcttcccagtcatctgtccctggcttctctgtcccctcccgcttccgcccactaacagatcagactaggtctaggcaaaatcccaaatcattttccctccc

SEQ ID NO: 426917 - DNA, 122 bp, Homo sapiens
tacgatcgtattctaattatcggcccccagtggatctgtcccgcgtcctagctgctgcggcgttcagtgggcacgtaagagacacctgaggaggacactaaaccaacattaaggcagcagac

SEQ ID NO: 426918 - DNA, 122 bp, Homo sapiens
gtcactggtttcctctgatcgtacagggacatcttttcttcggtttaatgccggcccgcccgccgactctgcccatgggccgcggtggcggcagcgcggagccggggaggcaggagccaacg

SEQ ID NO: 426919 - DNA, 122 bp, Homo sapiens
aggtgcggccaatggcgcgggcctgtttgattcaaaggttgcctataaagcgggactgcacgccggtttttgtccgagggctgtcgagtccgagcgccgccatggctctgctgtccgagggc

SEQ ID NO: 426920 - DNA, 122 bp, Homo sapiens
gcagacgtcagcagcgccccggcttcgagacccttcggcagcagccgtgactgccgccggcgggcgctgacccatccccgtgccagtctgcagccgaccaatccgcgtcctcttgaggcggg

SEQ ID NO: 426921 - DNA, 122 bp, Homo sapiens
gacagcacaggctggagagggaagcggcagccgcccactccccaggggagactcggaggccgcgctggaactttgagccccgcccacgcactacatctcccaacagcgcctgcggcggcgcg

SEQ ID NO: 426922 - DNA, 122 bp, Homo sapiens
ctctttgcaatgcccaatctttggtctcctgctggaataccagtccttccaatgtccatccgctgtcccttctaaagcgtcagagcagactcaggctgccctcgcagttgctctcagaatga

SEQ ID NO: 426923 - DNA, 122 bp, Homo sapiens
ctttctgctgcttccacgtctccatcgagcacttaccactctggccgtcagtacccgactcgcgcttctagtccacactggactgtgagctccaggagggcagaaatttggtctgacttggc

SEQ ID NO: 426924 - DNA, 122 bp, Homo sapiens
gggctactcgttccggagccgccatgtcgtccgacttcgaaggttacgagcaggacttcgcggtgctcactgcagagatcaccagcaagattgcgagggtcccacgactcccgcctggtgag

SEQ ID NO: 426925 - DNA, 122 bp, Homo sapiens
ctggtccatccataaagtgaaaacgctggtctaaagctttgattctcaaagtgggtcccacgggggccccatgggtttctcgggagatggtaaagggagagaagtgagcagaattttaacca

SEQ ID NO: 426926 - DNA, 122 bp, Homo sapiens
agactctcatctgagcccggtggtctgtggcaacaaatggagacagagagcaagagagagcgagaggtaacgagagagagagagagcaccataggttctgacaactgctcgagtctccttta

SEQ ID NO: 426927 - DNA, 122 bp, Homo sapiens
ccccagacaacgcttggagctgtcagcctgctggggggcggctccagctggtagcctacccggttcctcaccctgtggaacccttcccactcccaaggtttcaactgccatctgaaaaatct

SEQ ID NO: 426928 - DNA, 122 bp, Homo sapiens
gaatcatatgccctttctcagcactgggtctcacttccttcatctcccctataaaatgggcgtatttgccattcctaccacacaggagggggctgaggctttcagagtccttgctaattaca

SEQ ID NO: 426929 - DNA, 122 bp, Homo sapiens
tcctgattctcttggaactcctacagataagcatcctggcagaggcccaggctcccaaaccgacaaagtgaaaagagaccagagaggccaagcatattgactggtgctgttcagggcctgct

SEQ ID NO: 426930 - DNA, 122 bp, Homo sapiens
tgctgctttctagccaagcaggggtctacctgctgcactccaagcagagcctatgcccatcggcctgtgtttcttatctcctgccaatcctggccacccaatctctgactctttaattcctc

SEQ ID NO: 426931 - DNA, 122 bp, Homo sapiens
gggtggggacaccgagtgtgccgcgcccgggggatgcctcggggtgggagctgggcctggcgaccctcggcacagggcaccggggacaccaccctgatccgactcctctccgcctctctccc

SEQ ID NO: 426932 - DNA, 122 bp, Homo sapiens
taatgagctggaaggagtgaaagcacagctccaagtatttgtggctaaaccggtttactccgaacaaaaaaaaaaaaaaaaaaaagaaagagaaagaaagcatgacactttggtcagggagc

SEQ ID NO: 426933 - DNA, 122 bp, Homo sapiens
gacccactgtcactggtgcttctacatcccgtgagagctacggcgtctctggaacatcagcgctgggagacgcatcgcgccgccctcctgctctcgcacagaacccacgagcacgtggcccc

SEQ ID NO: 426934 - DNA, 122 bp, Homo sapiens
agggtcgctgccctgccccctctgagcaggcggcagtcgagttttctgatcccaacacggcggagtgggtgcttaaggcatgggccttaagggatagttcccgtctggaaacaataccgtgc

SEQ ID NO: 426935 - DNA, 122 bp, Homo sapiens
gatcctgtctgaaaaaataaaataaaataaaaataaaacatgtattgattcttccacttacgtattcctctaataagtacgtattgagtgcttgccatgagccactatctgtgctgggtgct

SEQ ID NO: 426936 - DNA, 122 bp, Homo sapiens
cacggcattctatgtctctccctctcagtcagacattggctttgggaaactggaaacatacgtgaaactggacaaactgggagaggtaagacgctgggtttggtcttctccgaatagccagg

SEQ ID NO: 426937 - DNA, 122 bp, Homo sapiens
acaatggtaggtatttgtgtatctaaacattctatctatagaaaagttacagtaaaaatacggtcttataatcttatgggaccaccatcatatatgtggtccatcattgtctgaaacattgt

SEQ ID NO: 426938 - DNA, 122 bp, Homo sapiens
agtggaatccagactccggtgaaagttctcattccttcaggacctgggagctaacagctccggactttcttgtgctccactgtgctgcctatgttgtgtgcttcccaaatggcattattccc

SEQ ID NO: 426939 - DNA, 122 bp, Homo sapiens
gggtcacaggcgatttagagaaggaagagccgggaggaggagccaaatttttccactgaacgaaaggcatgattttcatcactgcttctgttgccccggtaaccagggacagcccagtggag

SEQ ID NO: 426940 - DNA, 122 bp, Homo sapiens
ccctgggaccatactgggggaaactacaacatagcctttacagcctacctaacaccatcacggtcattatatggctcctttattagccaaggaagttatcatcatgcccatatggaagtgaa

SEQ ID NO: 426941 - DNA, 122 bp, Homo sapiens
ccaccacacccaacccaggaacattttagaatcgctgtttcaactcttggctcttgagatcgtgtcactgcactccagcctgggtgacagagcgaaactctgtcttaaacaaaaacaaattc

SEQ ID NO: 426942 - DNA, 122 bp, Homo sapiens
ggaatttcctaggaatatcttctactaattcttaaaactggaaagccatgcccatgtcatcggttctggggtgaccctaacatttcatctagcagtgattgtcttctaaaacccacctgtca

SEQ ID NO: 426943 - DNA, 122 bp, Homo sapiens
gcaggcgccaggtccaagcccggactcccctcttcacccacctgccaaagccgcaaattccgcagctggtgtccttcaacgaatgtaaccacctctcggcccggccggaagaagccacctcc

SEQ ID NO: 426944 - DNA, 122 bp, Homo sapiens
ctgggattacaggcgtgagccactgcacccggcctcaagagcctttttgatttgcatttgcgcccacccccaggtccttggcttggtgatttagccttggcaatgccgtgctggctggaaac

SEQ ID NO: 426945 - DNA, 122 bp, Homo sapiens
ccaatggccccaaaactgccttctttgaggctgccatgaaaccagcttcaggtccgcccgcgtttgcggccggtttcctgggtgacggcggcgggagggggaggggagggtgacgagtccaa

SEQ ID NO: 426946 - DNA, 122 bp, Homo sapiens
tcatcttatagaccacaaacaaatgtttttagacattgaaaagtggttaaagaccaactgcgcccagtcccccaagtgccattttctgagtgcagaatggagggtgacgtcttgagctgatg

SEQ ID NO: 426947 - DNA, 122 bp, Homo sapiens
cccccgccccgcccccacccgccggccccgggggtcgggaccccagcgccgcgcgcccagcgccccgcgcccccgccccacccacctgtgcagaagtggccgccgcccatggccgcgctggc

SEQ ID NO: 426948 - DNA, 122 bp, Homo sapiens
ctcccgcggaaagtcaattaaatcctagttagtatttgccaagtgtggacctctcctagacgctgaacgtgcacaccccaacccacatgtgcgtgcacacacacagacacatgcacgcactc

SEQ ID NO: 426949 - DNA, 122 bp, Homo sapiens
cggtaactgcctgaccttgtaggccttgtacctctttgcagagagagccaggtagagctccgggaacaaattgacaacctagccacaggtgagtgagcatccctgtgtacccggaattcttc

SEQ ID NO: 426950 - DNA, 122 bp, Homo sapiens
tatttcatacttggtaacatgttagccatttgcgctgtcgatcactgttaattatgaggtcgggtttagctgaaggcattatgactccatggcaacagatgattccctgattctccagagag

SEQ ID NO: 426951 - DNA, 122 bp, Homo sapiens
cggtgtttgatgagcgggagggtgtggacgagtacaatgagatgcccatgcctgtgtagccgccaccgagggacagccgagggaccgatggacgaggggacaggctggtgggatggggttcc

SEQ ID NO: 426952 - DNA, 122 bp, Homo sapiens
tggaggcactgatgttgagatgctgcagccaaggcctccttaagtgaggttgccactactcgtctccaaaaaggctactgactcgggtgcgagtaacagagatcgagactcagttcccaggg

SEQ ID NO: 426953 - DNA, 122 bp, Homo sapiens
gcctcatttccattctacagaacgtggacgcgtcagagaagagaaacagcaggcctggagcggggacctgcaggctttaccctgcagcgtggggtccgtcccctccacaagcgaacacgcgg

SEQ ID NO: 426954 - DNA, 122 bp, Homo sapiens
ttgcccgcgcagcgcccgcgggccccctcgcatccgggcaggttccggagctgggccttgcgctccccggcgcccgcccaccctgggtgtctcgcgtcccggcccttcctccccggaaccca

SEQ ID NO: 426955 - DNA, 122 bp, Homo sapiens
tcctcttgggcactggacaagaactcggacacactacgtgcaggtatccaaaaaggcggtcgcactggccctttgcccttgctggcggaaggcagttgccctacgtgatgaggcaaagggct

SEQ ID NO: 426956 - DNA, 122 bp, Homo sapiens
gttattttcttacccatccggccaagcaaaggaaacacttaactgaccttttcaacaattcgtttctccttccattcaacacaaagtgatacctccagcattcctactggtcaggatttcac

SEQ ID NO: 426957 - DNA, 122 bp, Homo sapiens
aaccaccacgaatactcctcagcaccccaactcccaatgggcagatggggacagcaccgccgtgtgctggggcaccattcacatcatcttctacctgtgccccagagaagcctcacagaaca

SEQ ID NO: 426958 - DNA, 122 bp, Homo sapiens
caacaggaggtgcaatggccagaggaacaatttatacgtatgtaaggctatgtaaaggcacgtaaagccaaaccgctgtgaaaaccgccttcagaagtcagtcggctactaggcaaatatac

SEQ ID NO: 426959 - DNA, 122 bp, Homo sapiens
ctccccttgccctttaggactcagccagacaccgccttccccgagcagtgctgttctcagcgtggaagtgcccgacatcgggagcttctccctccatcccagccagcactgctgtgggaagc

SEQ ID NO: 426960 - DNA, 122 bp, Homo sapiens
tagctgtcatttgtgatagcagacaaagtttcaataaagggccttctctaaagaggacatcgtgtgggatgtaaacttgggaaaagaaagctattttatgtaagtcgcccaaggtatctctt

SEQ ID NO: 426961 - DNA, 122 bp, Homo sapiens
ggcggtggagatggggagggtctgggggcccctgggtgggtggtgggggtaccgtcagcccggctgcagggttccagcggaggacagggagccttctccatccctgaaaaccatcgcgggga

SEQ ID NO: 426962 - DNA, 122 bp, Homo sapiens
ccaggggacggcgacgaggctgaagtgccgcttgtttccgagcctggatgagtaatgacgcgtttcttttccagaagcaacgtaaatctggcttgaggctggcacaacacagcaggagcagt

SEQ ID NO: 426963 - DNA, 122 bp, Homo sapiens
aacgtctggcagagctcacagacgtcgttttccactcggcaccaaatgttttacagtcttcgtgagcccatatagattctggcttctgcccagtcgtttgtttgaaactgtaggctctgaga

SEQ ID NO: 426964 - DNA, 122 bp, Homo sapiens
ccttgaaaaaaatccatccattggtgcaaagcagacattttgatgtcatttacttagcaccgcttgttttggaggcagcgtcttacccggtcgcctggaggtgtgggcagcgcgccgatggg

SEQ ID NO: 426965 - DNA, 122 bp, Homo sapiens
acaagtttccccagcagctgttagctgacagatctcattttaaagtgtttccttagcgcccggtcaaggacagctcgacttcgttcgtttcctctctgaggtctcagaactcccacccttct

SEQ ID NO: 426966 - DNA, 122 bp, Homo sapiens
gaatcgccaccaccaagaaggggcctctcacctctgtataggctgtgtgctggctgatgacgtggttgccctgtcctgtctgctgctgccactgagctggacatctccaggctccatctctt

SEQ ID NO: 426967 - DNA, 122 bp, Homo sapiens
actttgacaattctatgtatcggtgtaatatttccattacctgggcaaattccccttcgccgggccttaagcataatctacagaaaaaactacgtacataaatatacgtttacaactcaatg

SEQ ID NO: 426968 - DNA, 122 bp, Homo sapiens
tccgtgggggccgtttgcaatggagacatgggagtgtgaggaaagggagtggtctctcaccgggccactctatgccaagaactgggctcacgagtgaattggacgcgtcccctaccctggca

SEQ ID NO: 426969 - DNA, 122 bp, Homo sapiens
cggccagatccgcaagccccgcagcctggtcgatcgcggtccccgcagagccgccgcttccgtccctgcccagcctggctgagcgcggtgcgtgtggctctctcacttccgaccgaccctcc

SEQ ID NO: 426970 - DNA, 122 bp, Homo sapiens
aggactagagctgcttggagccccagaagcggcaaggtcagcgccgggagtcgtcaaggccgtacttctctgcagggcggggaggagaggtcgcgctttaaacttccatgaactctgttggt

SEQ ID NO: 426971 - DNA, 122 bp, Homo sapiens
tctggtgccagagtccatacacttaatcatgaaactgacctgtcggcgtgcacagttcatcgccccactcattcagtcattcggcatgtttatggtacacctaccatgtgccaagcattgtg

SEQ ID NO: 426972 - DNA, 122 bp, Homo sapiens
cattgtcaactgttcagcgaggtggcaggtgacactgcaggccgattgattgtcccgcatcgcagctccccagactgtcagctccccaatcgatggcgtttacacaagacaccgtaactgca

SEQ ID NO: 426973 - DNA, 122 bp, Homo sapiens
gcctgctgctgcccggctcctgggccagaccccgctcccaacagcaactcatgccgctgccgcttgactggaaccagcggcaactctgggcccttacgcttctgctgttctatcatggcggc

SEQ ID NO: 426974 - DNA, 122 bp, Homo sapiens
aatctccaatgcaacttgcaggggacactaagacagaccatacacaccagcagtggcgcccggagacaagccctctccaaccacggcgtggagacagctgaccacagtgcaaacggatcgcg

SEQ ID NO: 426975 - DNA, 122 bp, Homo sapiens
cccgccgctcccggccgggtttccgggtggttcgcgctccttctgaattggcagcgaggtcgcggcaggttcgaggtaaatcggacgaagaggggaaaaagtctcaggggtctgggggcctc

SEQ ID NO: 426976 - DNA, 122 bp, Homo sapiens
gaggaggcggaggatggggcaggaagtgcgaccgggacaaaggaaccggctgcgcgggagcgcgcctgagggaggccgcggggggcagggccgggactgcgttgagacagtcgccgtgcctc

SEQ ID NO: 426977 - DNA, 122 bp, Homo sapiens
gaggcctggctatttaacaaggaaatgtgtgggtggtagaaactgctccgatgctggcagcggcataaatccagcagaaaggaacaggaacctcagaggcttcctaacagacatcatcttcc

SEQ ID NO: 426978 - DNA, 122 bp, Homo sapiens
cactgctacgtggtctgtggtgtggtggccacatgcccagagacccaggcctaggccagccgtctggaaatgactgtatcacccaggcacggggcatgcactggtgagctcagcctgtgact

SEQ ID NO: 426979 - DNA, 122 bp, Homo sapiens
agcaaatattcacggagcatctcctcttcctggggcgaggagctggacccggcctctgtccggaaggggcatttcctgcctcagcacaggcgctacagctttgctctcagtcccctaagtaa

SEQ ID NO: 426980 - DNA, 122 bp, Homo sapiens
tcacattacaacgcacagacgtcctggagggtcgcctgtcacgtcacctgttcgcggtctcggaatgcagccctgcacctttaaatccagactgcgtcagggagtcccgccccagagggagt

SEQ ID NO: 426981 - DNA, 122 bp, Homo sapiens
ttctcctggaaacgtcacacacacccaacccagacacatcgcgcatagttctcccggaaacgtcacacacacccagacacatcgcgcatagttctcccggaaaccccacactcacccaaccc

SEQ ID NO: 426982 - DNA, 122 bp, Homo sapiens
tgcccgcgcgcctggccttaaagcggtcgtggaattatgcttcctcaggcaggcggtggacgcaccgcgggctttttctgtttgaagactacagcgtcacacagcaacgcgcgcgagagaag

SEQ ID NO: 426983 - DNA, 122 bp, Homo sapiens
gcagctttctcactgagaaggtcctagcttacccctgtgtgctggccttggattcagccccgagagaggggagagaccattcctcctgtggagtgggttccttatcaccagaccggccactc

SEQ ID NO: 426984 - DNA, 122 bp, Homo sapiens
tgggcaggccagccgggcatcctgaccgatgggcaccctctcccagggcaggcggcttcccgctcccaccagggcccggtgggtcctgggttttctgcaaacatggaggaccactttctgat

SEQ ID NO: 426985 - DNA, 122 bp, Homo sapiens
tacttactcaatctttactaattgatggccatagaatccccacttaccactctgaataagcggagaagaggtattgcatgctactgccaaaatccaccttcagagtgaatgacttggagcaa

SEQ ID NO: 426986 - DNA, 122 bp, Homo sapiens
gggcaggaggaagaaggggaatgccgccataggaacagaaagcatcctggcctttccccacgcccatcttggaaggctgccaagttcaacatcaactcctgagtttctggccccttctttgg

SEQ ID NO: 426987 - DNA, 122 bp, Homo sapiens
ccgcgacccggaggcggtcagagtcaccttggccgctgtcccggaggggagcgctgggagcgcggcgccgggacgcggcggagtcattcatttcagggcggccagacgccggttcgtggggt

SEQ ID NO: 426988 - DNA, 122 bp, Homo sapiens
gcctcccagagaggcccccatgcccgggggatccgagtgtcccggctcccggctgcctaacgagccacctggaacttagtaacagcccaccccatcctcgcgagtgagaaggattcttggtt

SEQ ID NO: 426989 - DNA, 122 bp, Homo sapiens
gggcagggtcgcctccaggccccacgcgctaagccgtgactccctgtaacacacccgtgtcgacacaggtcacgtgggcccgaggtgctcatacatcacactccttgtccaggatggtcctt

SEQ ID NO: 426990 - DNA, 122 bp, Homo sapiens
agagagcaccgtggggcgtgtgtgggtgtcctcatttgtattccgtgggagtacctacgacgttaatgaaggcaaccaggttctctccaatgcgaacgtactcctgtgatctctggcggcat

SEQ ID NO: 426991 - DNA, 122 bp, Homo sapiens
tcccttgatgattcagggaaggattttgaagatttaattctacttggaatatttcctgttcggttcctgaaatggagcttttattgcctttaggtttcctttgctgccgctttgggtcctgg

SEQ ID NO: 426992 - DNA, 122 bp, Homo sapiens
gccgccagcccggggagcatcggggccgcggccttcgggccgggtgctgggtgctgggtgcgcgcccctcctcggcctccacgggccgcagccggggctagtgtgatggtgcgagtagattg

SEQ ID NO: 426993 - DNA, 122 bp, Homo sapiens
gcccgagtcccacacagcctgagtcccacataacccgagtctcacgtagaccgaatcccacgcagcccgagtccacacagcctgacgcccacacagcccgagtcccacacagcctgaggccc

SEQ ID NO: 426994 - DNA, 122 bp, Homo sapiens
ctagcaggccgagccgaggagggctccgccgcccacccggaacccggcggggactgccgccgctgctagccacagctgccccctggggggccagagacctaagcctgagcgcgccatcacct

SEQ ID NO: 426995 - DNA, 122 bp, Homo sapiens
tgaacaagagcaatgactttgaggaactggttgagcggagccagctggacatctcagacccgtacaaagtgtacaggattgttcctgagggagccaaaaaaggtaggggctctcctgaattt

SEQ ID NO: 426996 - DNA, 122 bp, Homo sapiens
tggacaggggtacccttcgtgaacatggctgtcaggggcggtctggacacacaagaggcccggctgtgctcacctgagatcctcacccaagtcccagagcacaggatgtgagctgagtgtcg

SEQ ID NO: 426997 - DNA, 122 bp, Homo sapiens
cagagaagcgatcacattaagatccagcacttgtttctacatttccaagccggattctgccgtcctcctccttctaagacgggcggtgcagcgtcacaagcgtcgggacagatctatccggc

SEQ ID NO: 426998 - DNA, 122 bp, Homo sapiens
agtctgtaaagtggctggtgaaagattagtgtcccagggccctacatccgggaggtggttcgggataaagagaactagtcttgggaacaatgtaggtgggaacttaagggaatgggagagcg

SEQ ID NO: 426999 - DNA, 122 bp, Homo sapiens
caggccccgcccgggacagcgtccaggccgggccagggtccccatcccgctagcgagccgcgttcttacccttccgggccccgctgccccggcagcagacacaggagcctgcgggcgtgttg

SEQ ID NO: 427000 - DNA, 122 bp, Homo sapiens
agggcgaggccattacttagggcttgcaggtagtcctccatgttcttctgcgagacaaagcggtagtagccagtgaggttgggaggcattgtgtggatgaaggtttcaggagaatgcaggag

SEQ ID NO: 427001 - DNA, 122 bp, Homo sapiens
gcagcgagtgtttggggttttattcagaccgggctgacggtgtgtgtcgccgccacgcaccgctgcctgttcgaacgcatggctgagctgccgaccggctcgctaccccaaacaccgtacgc

SEQ ID NO: 427002 - DNA, 122 bp, Homo sapiens
cgcgtctatttagggcccagcccgggcgcccaggggattctgggacttgtagtccctccccgcagcctcaggcgccgccacgacccgctacttggactacattgcccagggagcttcccggc

SEQ ID NO: 427003 - DNA, 122 bp, Homo sapiens
ctgggagtggagctgggatgctgggcccaggagcccaaactataaatatttagcatttcccgaatgagaaatgagacagaattgccagacccccctgcccaggccaccagagcctgataaca

SEQ ID NO: 427004 - DNA, 122 bp, Homo sapiens
cacggccgcgaggagccgagaagcccctaggccagggcctcttggcattgcgaggggagccgaacaaggcaggagggttgtggggtgggcagtgtcaggccggcttgctcggagctggaggg

SEQ ID NO: 427005 - DNA, 122 bp, Homo sapiens
caggaaggcgcggggcggcgggcgcgcggcactgactccggaggctgcagggctggagtgcgcggggctcctacggccgagccctcggagccgccccgcgcagccaatcagctcccggcggg

SEQ ID NO: 427006 - DNA, 122 bp, Homo sapiens
agctctcccttccctcctgccttacatgccatgagctgccttctaccagcagcttcgattcgctctgaagttgcctgcttatatccaacttgaggttaatctaattattccaagttctactg

SEQ ID NO: 427007 - DNA, 122 bp, Homo sapiens
ggaagcgcaaggggtcagagagttccctttccgagtcaaagaaaggggtgacggacgcaccgggaaaatcgggtcactcccacccgaatattgcacttttcagaccggcttaaaaaacggcg

SEQ ID NO: 427008 - DNA, 122 bp, Homo sapiens
cgcggagccccttgccgcccgccagacatcaaggttgcaggtgtcacccgtacgagaacccgggacagcgaccgcctgtcctgaggtaatgacccagtctttacctcagccccctcggcgat

SEQ ID NO: 427009 - DNA, 122 bp, Homo sapiens
acaaggaaaagctgcattctgtcagggaagatccctagcccttgagcggggctgaggctgcgggaggtagaagacagttcagaacagggatgggggcgtgttggggaatggaggagtcatgt

SEQ ID NO: 427010 - DNA, 122 bp, Homo sapiens
cctcccttctataggtactttctgtgggaccgcatggctgccagttaccaccttctcctccgaggtctcacttggaaaatcagacctgttttgtgaaaaaggtcaagtggctcctttgaaca

SEQ ID NO: 427011 - DNA, 122 bp, Homo sapiens
ccggtagattgcaaataacctgctttctttctgttcccgagctggagctgcgttcggacccgtcggatcgtaaatcccatgtaaggtatctgccgtcggaagatttgaactttctaattgga

SEQ ID NO: 427012 - DNA, 122 bp, Homo sapiens
tactaagctccgtcactgcgggacctcttagagcctaagtgccatcgctgtgggacctctcggggcctttaccaagctccgtcgctgcaggacctctcagagcctttactaagctccatcgc

SEQ ID NO: 427013 - DNA, 122 bp, Homo sapiens
catgatggaatcaccacctcttcagacagctgctgttatccgcgactcttccttcattctcgctgccagatcccacttcgtctccggtgctacctctgtatgcgtgtttctcacatgtcctc

SEQ ID NO: 427014 - DNA, 122 bp, Homo sapiens
ggtggtcacgcacgggctgctgggcatctaccaggagctcctggggctggccttccaccacgaggagggcgccagtgcctggcatgaggacgtgcggctctacaccgcgagggacgcggcct

SEQ ID NO: 427015 - DNA, 122 bp, Homo sapiens
gcccggaccagtgcagctagacgggcgggccgagggcttcgtgggccccggggagtcgggcgcagagacttctccaagtttgtgcgagtcccgagccctctgcctccctgccccggcccccg

SEQ ID NO: 427016 - DNA, 122 bp, Homo sapiens
ccaataccccgcccccaaacacctgatagacccagctcccctgctcttccctcaaacgagcgctccaggcgccggcctaagccaactcccctgggtctttaccgagtctctggtgggggccg

SEQ ID NO: 427017 - DNA, 122 bp, Homo sapiens
ctgctctgtgcccagccccgagttggctccaatggggctatatagaaaggaaggcatggccggaggacctctgtgtcaagttgaggacacatttccaagactaggaaccattcagggactct

SEQ ID NO: 427018 - DNA, 122 bp, Homo sapiens
gccacgcgggaacgccatccagcgtccatccctcaccttaaagcctctgtcctcagacgccgagatgagggtgcctgctcgccagggacagaactccaccgcagtcaccgggcccaggtggc

SEQ ID NO: 427019 - DNA, 122 bp, Homo sapiens
tgccccgtcaccacctgggcttcacacacacaggacagaaggcactgccgaggtgctgcccgcaattgctgggaggcccctgggccgccctctgcgctcgcccgatgactcctgacatgtgg

SEQ ID NO: 427020 - DNA, 122 bp, Homo sapiens
agaagaagctttactgccctcctgagatccctcatggggaaatggaaaatcagctccctccgaagcctgctgaatgtgttctctgtaaccgagccaaaatattcatggccctcctgagaaat

SEQ ID NO: 427021 - DNA, 122 bp, Homo sapiens
ctcgaccaaattacgcttgtcggggagtctcaagcgtattgtaaagcaaacctcggcaagcgcacttccgcgtcccgagtgacacctgcagggttctccggcagccctcggcttccccgcgg

SEQ ID NO: 427022 - DNA, 122 bp, Homo sapiens
ggtgacaccaccatcaacctggtagaagaaaacagccctggccttagagtcaggaggcctcgctgcaagttggaaatacaatggtgacaataacagcagcagccacctccattttgggagcc

SEQ ID NO: 427023 - DNA, 122 bp, Homo sapiens
ggccggggccgggcggctgcacctggcgggagcgcgggtggagaaggttggggcccggggcgcgctgccaggcaggaacagatgcatccggaggctgcccggcccgagtgttagctcctcaa

SEQ ID NO: 427024 - DNA, 122 bp, Homo sapiens
ctcaatctagttcacttttattagttgcttcctcccatctccagacatttctattgctaacggtagaaatgagaaaaataattaccgaagaacaattccctagattcattatagtttgttca

SEQ ID NO: 427025 - DNA, 122 bp, Homo sapiens
cataatcccgtagttcctgctcatgagcacaatatgaccccctctgggaaggaactaggacggtggtgctcagcctaggttgcctatgagaacccccagggaggcttgaaaaaccccattgc

SEQ ID NO: 427026 - DNA, 122 bp, Homo sapiens
ggaggggaggggagggtccgccctggggacccctcagatcatcttcatgttgaacttgcgcgcgcctccctggcccgccgcggcggccggcccatccaccttgcggaaggagtactccaccg

SEQ ID NO: 427027 - DNA, 122 bp, Homo sapiens
ccaatcgcgccgaggtctagtggggcggggccctcccgggggcggggcctgtgccagttccgggccgcctgggggcgtggccgggcctgtacagcagcctgggccatgtcggcgccgccggc

SEQ ID NO: 427028 - DNA, 122 bp, Homo sapiens
tcctgtccccgcctgccctgactcaccctcgcggcccgcccgggaactctgcgggagtcgcggcagctccgctcccagagacccaggagttgggcccagcgtccctcccggaacggtgagta

SEQ ID NO: 427029 - DNA, 122 bp, Homo sapiens
tggcaagtgaaagtgtatgaaattcatatttcaagctccataaataaagttcttttggaacgcaagcaagctcactcatttacatattgtcagtggctgcttttgcactgacacagcagagt

SEQ ID NO: 427030 - DNA, 122 bp, Homo sapiens
taaataagatttccaggtgatcaatatgtacattaaaacttgagaaaaacctctagacttcgacctaaagaaaaacattttacaacttgacagtgtatgcacatacatacatgcatatagac

SEQ ID NO: 427031 - DNA, 122 bp, Homo sapiens
cccgcactcccgcatcccgaccgcgccttccccgcgccggtcaaccccctccatccctgtcgccgggttccctccggccttggcggcccggcctccccagccactccccctccccttccctc

SEQ ID NO: 427032 - DNA, 122 bp, Homo sapiens
cgggcagcgcacggtccctgcctgtgatgcagcccatcggcccgtggagacacaagcctgcggggagccctgccccacctgggagctcagcgcctggtcaccctgctccaagagctgcggcc

SEQ ID NO: 427033 - DNA, 122 bp, Homo sapiens
gagagccagggtcagcgcctgtagggtgggcagattgctgagggggtgcacaggcacctccgtcaagctgttgtcatccagccacagatgccgtaactgaacaagtccttcaaaactgtcct

SEQ ID NO: 427034 - DNA, 122 bp, Homo sapiens
ctccccaggtccccagctccatgtatgcaaatcactgctttgcatgggcctggggccaggcgcggggctcctgccagggggcgtggccggcggcccccgccccgcgccgcgtgctcacctgg

SEQ ID NO: 427035 - DNA, 122 bp, Homo sapiens
catatcagagaatattcatgcaattccccatcagaaggtttccaaaaagtgactcggaaccgtggctgatgctctggcaagtcactgcaaaggggtgggaaatcattatctttggaaactgc

SEQ ID NO: 427036 - DNA, 122 bp, Homo sapiens
cttttatatgcccagggcctgtgttttcccagcaggagactcagcaacgccctccacttccgtgttggtgtttggagccgggaggaccctcattatttctgcttcctttgccatgacttgtc

SEQ ID NO: 427037 - DNA, 122 bp, Homo sapiens
gtactagtttacctctggctttggtaagtgtggctttgagtaataactgagctgtttccccgcatataaaatagaaataaataagtagtcatcatgacagcatcttgctcagtgctttagtg

SEQ ID NO: 427038 - DNA, 122 bp, Homo sapiens
agtccatcttggtaccgccccgaaatgcgacggaagtgacgtcagacacagcgcttccggcgtccgctccgggtctggacctcctggcgtttggattggagactgtgttctcttcgctgttt

SEQ ID NO: 427039 - DNA, 122 bp, Homo sapiens
tttagatccaatgcgccggctccagcatcgaactcatgcccagcaccctttaaaccctcccgggactctgcagaacccgctgaccactcacagagcccagctcgggggagggctttaaggtg

SEQ ID NO: 427040 - DNA, 122 bp, Homo sapiens
gctaaggaaggcgggagcgcggcggggtgaagcacaaggatgtgactgagaagacgacgtcgctgttggagaatatggtgactttgactgagaaggcgacgtcactcttggagattatggag

SEQ ID NO: 427041 - DNA, 122 bp, Homo sapiens
tcctcgtccccgtagtaatcccctccggttttcctcagtctccacgtacgtccctcaaagcgcgtcctaaaacccggataaccggagcgctccccatggaccacacggagggctcgcccgcg

SEQ ID NO: 427042 - DNA, 122 bp, Homo sapiens
tggaggactggggcgtgtgtctgcggtgcaggcgaggcggggcgggccggggcggagtcacgcgccgcctggggacacccgcccccggggtcaaggtgcgagacaccctggctcctctgctg

SEQ ID NO: 427043 - DNA, 122 bp, Homo sapiens
ttggcgcgaagctttagcagcaatctccgattcctgtacaaccatagctgggtttctaagcgtctagggaagaaggactgggcccacgacctgctgagcaactcccaggtcggggactggcg

SEQ ID NO: 427044 - DNA, 122 bp, Homo sapiens
tgtgtgaagttattgagttattctatttagatgcagagaaagggtagtttagttgccactcgctgctgcctgaattcctgtatgctgccaatattgaaatctccgggtaagattgtacagac

SEQ ID NO: 427045 - DNA, 122 bp, Homo sapiens
tgcctggcagagacggagggaggcagttggctccggaatgcggccgccgcagatgttctccgcaaccttccggaagtggaatggcgggagcctcagcattgctgcccaccgaccccccggaa

SEQ ID NO: 427046 - DNA, 122 bp, Homo sapiens
cgatgaacaccatgaccgtgacacgtgatgaacaccatgaccgtgacacgcgatgaacaccgtgaccgtgacactcgatgaacaccgtgactgtgacacacaatgaacaccgtgactgtgac

SEQ ID NO: 427047 - DNA, 122 bp, Homo sapiens
ccatttctcatgacctccacagctattccattgattccagccaccagcagctcacgcttgcgttactgaaataagctaaagactggcctctctgcttaagtacttgtggccctgtcttgtgt

SEQ ID NO: 427048 - DNA, 122 bp, Homo sapiens
ttggacactccatcctaagcaccgaacagttgacctcacggtggcagatttgaaagaccacggggtgcctgaagtagggtgcagggaggcagaatccaaggaagagatccccgtcaagcata

SEQ ID NO: 427049 - DNA, 122 bp, Homo sapiens
gtcgcagcgttgggaacctgaggccaggggccggagtttagggccccgatgttgagtctccgaatccaagcccggaaggggggacgacgggttaggatgctggggagccctggagctctgaa

SEQ ID NO: 427050 - DNA, 122 bp, Homo sapiens
tgaacagtgaaggacaaaaatcatgattgtggaagatatttttaaaatctgattttgcagcgatcacttttaaaccctgtagtgatgtaagactaaaatataattgctaagattttgttggt

SEQ ID NO: 427051 - DNA, 122 bp, Homo sapiens
ggccacgagaagtagggggtggggcgccgcttaggtttgggaagacacgaagcggctcctcgggcttccagcgtccacttcctacggcaagcaggaggagacaagcgccaccctgcgctcgc

SEQ ID NO: 427052 - DNA, 122 bp, Homo sapiens
gctgggatgccaggtggagtgatgggcacctgtgggacagccaggcagagacatctgaggcggcagctggggaactgtctggaactccggttgatgtgctacctgggcttaagatgtactcc

SEQ ID NO: 427053 - DNA, 122 bp, Homo sapiens
atcgttttttcatcccgggcagctgggaccccgggatgacctaaggaacaaggattcagacgcagactccacggtgaattggccttattcacgtgtgaacgaacgtccaggagaaaaccaaa

SEQ ID NO: 427054 - DNA, 122 bp, Homo sapiens
aaggccagcgcccctgtgataggcccagagcccccactccacaagccagcccatcccccacggagacccaaaccgtccacacacaccttgccagctgtttgggccccacgccgccccaaaac

SEQ ID NO: 427055 - DNA, 122 bp, Homo sapiens
caaggtgggccaggaaggccttctccgtcttcttcagtaacacggacacccagatggggtcgcagtccagagccgcgctgcaggccaccgaagagctcctctctgcagccccctgggtgggt

SEQ ID NO: 427056 - DNA, 122 bp, Homo sapiens
gtccccaccccctcggtgacccatcgcagctgcacgggtgggcgcccacgcctcggccgacgcagccttcacgcccgtctctggtgagtttgggctatttgaacaaaggatagaaaagcctg

SEQ ID NO: 427057 - DNA, 122 bp, Homo sapiens
caggcaggctcggtctgcacacggcgttgttctgcacttgttcctttgttgctgtgaaaccggctcccggcacagtcagcctctgtgtgggaggactggtggctgtctttgcaggcaggcat

SEQ ID NO: 427058 - DNA, 122 bp, Homo sapiens
cagccacaagtgggtacttacaagcaggcaaggctctggacttctctctgatctttcctgcgcagagtgaaagcactcctgcacaccttggatgtctattagctgactcctacccccagaag

SEQ ID NO: 427059 - DNA, 122 bp, Homo sapiens
tcccaagagtacaccccagtaagtctactgcatatgaatctctgagtttgagtctatttccgagggaatctgattcagtcaatcagatattatcccattatccaacacatggtgttcttaca

SEQ ID NO: 427060 - DNA, 122 bp, Homo sapiens
gccctcatagtaacctaatcactttccctctttggataagagaatgccagtgtcagggaacgcttcaacagggttggagaagttccacatatctccaccctactaaaggggcagaagttcag

SEQ ID NO: 427061 - DNA, 122 bp, Homo sapiens
cgcccctagccgatggagggctgggattggttctccgggaccgattgacggctcagggcacgagcggggaccgcagcggcggaggtgagggcgccagcaggaagtgggagaagaggcgaccc

SEQ ID NO: 427062 - DNA, 122 bp, Homo sapiens
ctgcggggcagtcgcaggaatacatgaattctattacgagggccatagccccgttctgggcgagccttttataacaatgtgggttttgacaggtaggagaaggggaagggggaggtcagggc

SEQ ID NO: 427063 - DNA, 122 bp, Homo sapiens
ttggggcgccacagccgctcacaagctcagactcacaaccacagcctggcaatcccaaaccggactcccagtgcctccgcttctgaagtagactctgcagaaacccgggaccacagggtagg

SEQ ID NO: 427064 - DNA, 122 bp, Homo sapiens
ctgctgctgtgctcaaaatccttgcatggctcttcttgaaacaggtttagtgtttctactcgagttccttctctgtcgttcaacacaaacacatacacacccagttctgtttcacgcttttg

SEQ ID NO: 427065 - DNA, 122 bp, Homo sapiens
tcgctgacgtaggtattctgcctgacagcgcgactaagggaccacacggctctgcctcgccgacgagagagaccagcagccaccgagagtgcaggccccataagtcagccccgctcgaattt

SEQ ID NO: 427066 - DNA, 122 bp, Homo sapiens
aatcccgtcgctggcatccggggtctcttaggcaacaatgtgtgggctcctgattggccgcgagatccaggagggctggctacaaaattgggcacggggataaaattaacaagtgtggcggc

SEQ ID NO: 427067 - DNA, 122 bp, Homo sapiens
ctggagagccttcttctcttctggccagagaaagagcaaagggtggcttcctgacaggtccggagctggcacagcacaacagagcctagaaaatcactagcagggctgagctcggggttcca

SEQ ID NO: 427068 - DNA, 122 bp, Homo sapiens
caagaagaactaagcattgataactgcattgtaacttggccagatgctccagcatatgcacgttcactgcaaagcaccctactggttttgaaaatctgaccttgtcatttcaatagttatta

SEQ ID NO: 427069 - DNA, 122 bp, Homo sapiens
gccgtgcgccctgagctgcccgtcacgagccggtgttgtctgactgcacaggccgtcaggcgcagcgcagggctggtgggtggccctgaaggctcagacaagcggcgcatgggagtgaccca

SEQ ID NO: 427070 - DNA, 122 bp, Homo sapiens
cctgcagtgctaggcacagctgtctcccagcccacctcctcagcgctcactgccagagagcggggcggccagccagcgcctgttactccaggaagccactgcccaatccccagcctgctggg

SEQ ID NO: 427071 - DNA, 122 bp, Homo sapiens
accaccgaggttcctaacagggaaatgcaggcttgaatgctcagggttgatgtgggagtgcgtgtgaaacggggatggggtgaaagggcagtgacgtttgtaggtgggcagatgggggtgtg

SEQ ID NO: 427072 - DNA, 122 bp, Homo sapiens
gctggtgtatggcttgcagccacccttgaattggttgactctgtacggctgcgcagatgccgactttagaggaggcggagtttcggccttcgcctgctggaaaagcagtaggatcggccagt

SEQ ID NO: 427073 - DNA, 122 bp, Homo sapiens
ccccagaatctccaagaaagcaatcgtgagcgcggatcagtttctgtctttcccagaaagcgggctttttattgaggggaaacttagctgggaaaagtcagctcgtacgtttgttttggttt

SEQ ID NO: 427074 - DNA, 122 bp, Homo sapiens
ctcccccaactcaactgccgttcgtcgttcgtggatgtccgttgtgtcccgagactaggacgtggctccaggtgcgccctgccccgcggcgaggttcccagaatggcccttcccagccccta

SEQ ID NO: 427075 - DNA, 122 bp, Homo sapiens
gggaaagagggaggacggggcaggcggcaggggcagcagctcctgccttctttgcagctccgcggccaggggtggaaggaagccgcagccgcagccccaagtcaacccccgctgccccgtcc

SEQ ID NO: 427076 - DNA, 122 bp, Homo sapiens
gctgggcaagaactccggcacgcgcagattgtggagctgactgcgggaaggcctgagtcacgccacagccccttccccctctcgggatgtcggaccggcactctcaccatttctaggcttcc

SEQ ID NO: 427077 - DNA, 122 bp, Homo sapiens
gtgggtgtgtgtgtgtggtgcatttctggggatctcaccacagcagatagcgcacatgcgcgcgcacacacacacacacacacacacctccctcccgtcctctaaaacagccctgttaagga

SEQ ID NO: 427078 - DNA, 122 bp, Homo sapiens
agatctttttttcttttcgagatggagtttcactcagtctcccaggctggagtgtagtggcgcgatctaggctcactgcaacctccgcctcccaggtttaagcgattcttccgccttagcct

SEQ ID NO: 427079 - DNA, 122 bp, Homo sapiens
aacttggcacagaacaatctcacttagaatgccccctcttgggctaggcatgctggctcacgcctgtaatcctaatattttgggaggctgaggctagagaatcacttgaagccagaagtttg

SEQ ID NO: 427080 - DNA, 122 bp, Homo sapiens
ccgagtgagcgccagggcgggattctcccacaaattcaaggtctgtatctccgcggaagccgtgcctatcggtcccccgagtgctgaaggctcccacgaggggcaggccagcccggtgcgcc

SEQ ID NO: 427081 - DNA, 122 bp, Homo sapiens
ggggctcctggggctcctgagcctgctgcactcggccttcttcggggaccaggtagggcgcgtgggtcgagccgttggggagggctccgggccgcgcaggaacggggcggggtccacaccgc

SEQ ID NO: 427082 - DNA, 122 bp, Homo sapiens
ccaacacagaaaagtggagtatgggaaggtttaaatgagaccctcccagatgtgacaagtcgttagtcatgtttgctagagttattagagttctgagtgcagaatccataatgcagcacagg

SEQ ID NO: 427083 - DNA, 122 bp, Homo sapiens
gacaaggaagtaagccagcaaacaggttcacatatattggataacttaatctatagcagacgtaaagttacatattcaataaatgttgctggaacagttagttttctgtgtgagaaaagatg

SEQ ID NO: 427084 - DNA, 122 bp, Homo sapiens
tgcagctctgggggtggtggctgctgcctgagccaccacaggcgccacaggtcccaccgtcgcagaccccagagctctgactgctgcagccagccctcggggggctccagctgctgcggtgg

SEQ ID NO: 427085 - DNA, 122 bp, Homo sapiens
gtcggaactcgctccgggcgtggattggcggcttgctggcgggggcggaaccggaagttccgtgttgtggggctcagctggttcatttatgttgtttttcctgtacctaagttcccgctgta

SEQ ID NO: 427086 - DNA, 122 bp, Homo sapiens
cgccgccttaccagactacaaactaaaccagtgtttaagtcaaggtgtctgggttttcaccggggcctgtccaaggatgctaggaagccagtggccaggcctcagagttgtagggagttagg

SEQ ID NO: 427087 - DNA, 122 bp, Homo sapiens
gtaccctgtgctgtggctgcaaacacaaagaagggaaaaaggctcagtgtggctcacagtcgccatttggaaatgcttatctgcaatcaggagggaatgatggtttttaaagctcacagaac

SEQ ID NO: 427088 - DNA, 122 bp, Homo sapiens
tcttttcccaggacaagacatttcaaagaaagtattaaattcattcacgagtgccggctccgcggtgagagctgccttgtacactggtacgtgtgtctcttgcttaatagcgccttagcgta

SEQ ID NO: 427089 - DNA, 122 bp, Homo sapiens
agaacacttcaacttgtagagctgtgatctctgctggtaaacacagctcatacgacatcccgtaatgtacagcccatgatgtgtactcacacagcatgattgtctagcataagctgagctac

SEQ ID NO: 427090 - DNA, 122 bp, Homo sapiens
cacgcctcctagtaggtcaatttagcttctccagctccagagcccagactcctcattgggcgcagcactattcccgcctcttccttgggtcgcgagcgccgaactcatcgaacgcagccaat

SEQ ID NO: 427091 - DNA, 122 bp, Homo sapiens
taaatctctgtgagctggaactttcccagctcacatccttcgaggtggagctcaagatcacgttgccttgtaagtgttgctgtccaagaagcaacagttcttcccaagcattacctgggagc

SEQ ID NO: 427092 - DNA, 122 bp, Homo sapiens
atgggggttgcggtttcctgccactcactccccatgggtcctgtggggggcgtggggatgcggggagagggtttcagaataggatcccggactgggagggaagggacaccatctgggcacac

SEQ ID NO: 427093 - DNA, 122 bp, Homo sapiens
catctgtcttcaggtgcctggctttctggcctgaggtggaagcagaggccagcctctctccgtcatccctatctcccctgggcttacatcatggcggggctttgaaaatctccctctgtggc

SEQ ID NO: 427094 - DNA, 122 bp, Homo sapiens
tttagtctcataccaaaattattcaagaatttcacctctcctaaaactggaaattaccagcgttttttttgtgtgtgtatgcaagttccttaaatatagcaagttcagatttatctttacaa

SEQ ID NO: 427095 - DNA, 122 bp, Homo sapiens
acagaaaacaaaacaaaacaagccttccaactgatgtttgaataccacagcttttggagacggagatctagggcttaattttgagttagcttacattttaatctacctgattgctgacttct

SEQ ID NO: 427096 - DNA, 122 bp, Homo sapiens
tctctgctctcccgttatgggggtcgggggaatgatgggtcaagggtcttccgaagaaagcgagaaaggaacaggcgccttcaaaagcccacttggcgatgggttacagtaagaggtacctc

SEQ ID NO: 427097 - DNA, 122 bp, Homo sapiens
cctggagggaaagtcccttgggacgatcatagagcgctagcactgaatcagcctggagagcgcggaaggaaagggtcggtccgcagagggcgcggggaaggcagggtggggacgcggtggag

SEQ ID NO: 427098 - DNA, 122 bp, Homo sapiens
gggcaggaaaaagaagagacagtttcttctcattttgaaatgcgatgccaataccaggagcgcttaataaagctagaacatgctgaggcaaagcaacatgaagatcaaagtatgataggtca

SEQ ID NO: 427099 - DNA, 122 bp, Homo sapiens
gaaggtgggccgagcaaaggagagtgacgcaagagtgggctgtgtcctggatgctgcgagcgcctctgcctccttgagaatgagcccattagccgcacaaattcgcagcaggcggctggggc

SEQ ID NO: 427100 - DNA, 122 bp, Homo sapiens
tggcagcgacgacggtgaccgagaaacatttgatggggtctgcggggcccctgaggacatcgagtgcaggtcggtcaaggatccccacctcagcttggagcagctaggccagaaggtgcagt

SEQ ID NO: 427101 - DNA, 122 bp, Homo sapiens
gatctcctagggcgggcatccttgcgagacggggtggggcgaatcctcccgggtgggcatcgtggggtgggggtgggcgttccgcgaggggcatcctcccgggcggacgttgggggattctc

SEQ ID NO: 427102 - DNA, 122 bp, Homo sapiens
ttaggtaaggctgcacctggtacacagaagacagaagacatactcagctaaggcagcacccgatacacagaagaaagaagacatactcagctaaggctgcacctgggacacagaagacagaa

SEQ ID NO: 427103 - DNA, 122 bp, Homo sapiens
aacactgtagtgacgcccaatcaaaacgccacgtctcggcctcgaggaaatattccgtgtcgggcccgtcctgattggacagttctttcgggttctggccactaggaagctttgtttaggtc

SEQ ID NO: 427104 - DNA, 122 bp, Homo sapiens
cgagaattctatttggagaagcccttctccattgtctcagtcacttcagggtgcaggaagcggctggccaaccgttcgatgtcgtccagcgtcaggcgactcagggacctctcgtaatcctg

SEQ ID NO: 427105 - DNA, 122 bp, Homo sapiens
gacgcggccactaagcggagcggcaacaaggaacaatcgcgcccctcctcgccgtagctgcgaacagggctgaccgcccgcgaccgtgccctcagctcatgtccaaacagatatggggagaa

SEQ ID NO: 427106 - DNA, 122 bp, Homo sapiens
cgactacaggtgcccgccatcacacctggctaatttttgttgtgttgttcttagtaaagacggggtttcaccgtgttgcccaggctggtcttgaacttctgagctcaggcaatctgcctgcc

SEQ ID NO: 427107 - DNA, 122 bp, Homo sapiens
gctttggttctcgtctgccaaatgaggacacttatcggggctacccacccctccggctgccgtgaggccttggagatggcagccagaccggactttcccatcggatccgccagaacccaggc

SEQ ID NO: 427108 - DNA, 122 bp, Homo sapiens
agggccggcgcggcttgaggccgctagggtctggagggggcgtctattctgaggcgtttgcggcccggaaggagcgggaaggtgtgatttgaagggaggaggcgggaattctgtgctctggg

SEQ ID NO: 427109 - DNA, 122 bp, Homo sapiens
agaactgtagaggctaataaactgcgatgagacatttaagctctgctccaaagaagtgaacgactctttcaccaccccttgcatcccaaaccttcggttctggcagagttcttgccgcagag

SEQ ID NO: 427110 - DNA, 122 bp, Homo sapiens
ggctgtgcccgctacaaaagggccaggaatgaagctgcacagacggcattagctgggcaccgggctctgccagtctacacttaagctcttaaggcagtacagagaaccaggtgacccggacc

SEQ ID NO: 427111 - DNA, 122 bp, Homo sapiens
cccccagcaagagaggctgtccccagaatcaggccgtgggtgacagccgaaggaggatggcggcccttctcccgagtagggatctccctgacacgttcctcctgggtctgcgtgagttttct

SEQ ID NO: 427112 - DNA, 122 bp, Homo sapiens
gggccacatgcagaaccgcatgtgcagacgacttccttgactgaaactcaacacaggctgcgtggcccagggcccaaaacaccagggggtgggaggtgtgtgctgagggtggagccatgtgc

SEQ ID NO: 427113 - DNA, 122 bp, Homo sapiens
tcggttggaactgagtgtaatgttcacgacgtggctaaaggagttttgagacctaccctccgacatcttgtagaccctggttgtgggactgggttcacattccagggggggttactttgaca

SEQ ID NO: 427114 - DNA, 122 bp, Homo sapiens
ctgcgccgccatccgcctgaagagtgactgcagccactactgcgtggagggctgtcactgcgacgctggctacgtcctcaacggcaagagctgcatcctgccccacagctgcggctgctact

SEQ ID NO: 427115 - DNA, 122 bp, Homo sapiens
cagtggggtccagggggtcgggccccgtggggagtcccaccgactccccttccgagaggccgttgtaaagctttagcatcctgtgcgccttccgccgacactccgtgagcctcctcctcagg

SEQ ID NO: 427116 - DNA, 122 bp, Homo sapiens
gctgctggggcactgacgcggtttcgattctagcgaaaaatgatttggctcggactgtcccgtgacaggcggtgcgaggaggccaggcccgcgcccgccgagccctagggccgctgctgccg

SEQ ID NO: 427117 - DNA, 122 bp, Homo sapiens
cccgtcggccggaggcgggacagaggcaggtcggcctgtccgcctggacgcggacctgggcgccgtaggtgccctgggaagcgcaggggtggggggtacccggcaggaaggtggccaggggt

SEQ ID NO: 427118 - DNA, 122 bp, Homo sapiens
agtgtgtcccaaatcagccctacctacggagcacgcccagtcacattgtcctggtcactccggagctgcgaaatgcaggctccactgtgccaggttttaagagtggccaacaggtaaacaga

SEQ ID NO: 427119 - DNA, 122 bp, Homo sapiens
ctactaaaaatacaaaaattagctggacgtggtattgggcgcctataattccagctactccggaggctaaggcaggagaatcacttgaacccgggggcagaggttgcagtgagttgagattg

SEQ ID NO: 427120 - DNA, 122 bp, Homo sapiens
tctttcccagagggagggagtttgaccccagtgcgagacagcccgtgcacccccagacttcgttctgtgagctcctatggaaacatccgtgctgtcgccacagccaggagcctcaacaaatc

SEQ ID NO: 427121 - DNA, 122 bp, Homo sapiens
ccggaccaggggagtgagagttcgttagggcgcgccttggggaatctgcggggtcggaaacgcgaacaacggtgtgcagggggaggagcccggggagcacgtgggcggcggatcccagggcc

SEQ ID NO: 427122 - DNA, 122 bp, Homo sapiens
aggccaagaatttctttttcagggagctcggctcttaagacgcaagtcggctgacgctcccggctgaataaacctcttctttcttttttttttgttttgagacagagtctcactctatcacc

SEQ ID NO: 427123 - DNA, 122 bp, Homo sapiens
gcagaaagtcctagcacggaagtttggcgtccacagaccaatttgtcagcttaggaccaacgttagggctgcgtttcccgaacgacaccattgtatcaagcggccattggatcaggtctagc

SEQ ID NO: 427124 - DNA, 122 bp, Homo sapiens
aaataattattgaatagctacttactgtatgctccaggcatgtgctagagtccaagaatacgccataatcaaccaggcaaggttcctgccttggatgtcacaatccggtcaaggggagagac

SEQ ID NO: 427125 - DNA, 122 bp, Homo sapiens
ccgtgccggacgggtcgcctgtcgccgctccctcctttccgcgtcccctcctcgcccgtccgcactcctcagcagtctcagcctgctcagctgggatgtggtcctgacgcccccgagatttt

SEQ ID NO: 427126 - DNA, 122 bp, Homo sapiens
gggagatgtggccatggtcttgtgctagagatggcggtacaagagtctgttatgcaagcccgtgtgccagggatgtgctgggggcggccacccgctctccaggaaaggcacagctgaggcac

SEQ ID NO: 427127 - DNA, 122 bp, Homo sapiens
agttcagcctgcagggtgtaggatcccaggagagcatgagtcacaaaagagcagggcaggcggccagaggcaatgtcctgccggagctgaaggcacaagaagtatctgtgaggagcagaggg

SEQ ID NO: 427128 - DNA, 122 bp, Homo sapiens
cataagcgttttttaaaaatcaccacttcaatccccttagaacgtgcttccttaggttaacggcccttattcttctgtgtcccacgtctcaacagagccccttcctcctccacccaggggag

SEQ ID NO: 427129 - DNA, 122 bp, Homo sapiens
agctcaagcgatctacccaccttggcctcccaaagtgctgggattataggtgtgagccaccgcatccagcccacattgttctatttgtatttcatgaaagcagttctgaatgagagtaaatc

SEQ ID NO: 427130 - DNA, 122 bp, Homo sapiens
ctctctctggagactcctccctgctgttagagcccacgttgtatttcctcatatggaaaacgagggcctaagagccagctgcgggttcctgccacagctcaccatggaaggagacactgctc

SEQ ID NO: 427131 - DNA, 122 bp, Homo sapiens
cgccccctgccggtccctcttggaggctgggccagcgttgcgagtcttgccagggacgcgcgctctagcgccggaggctgggaacgcaccgcggtgccaccgcgtcctgcaggggcggggcg

SEQ ID NO: 427132 - DNA, 122 bp, Homo sapiens
tccagggtgcatccgggagcactgtcttctgctctgactgacctctggctactgagtcagcggggtctgggggggcctggccggaggtccacccagggctgagatctgggaagaaaatcacc

SEQ ID NO: 427133 - DNA, 122 bp, Homo sapiens
gagaatttactatttctctttcatttgtggggagaagacaccgttaacgcccccaccccccgctcacacgcccaccctcgccggtgccccgggcctgaacgcggcacatctcaaccccctcc

SEQ ID NO: 427134 - DNA, 122 bp, Homo sapiens
ccggacccagacccgagcgtcgcaagaaggcccgttggagtctcgcgcaactgggcaggacgcgacttctgacgaagtgacaatggtctatgcatatattaagtgaatatttgagaatttaa

SEQ ID NO: 427135 - DNA, 122 bp, Homo sapiens
ttttaatacggcaggcagcttcacctgcggctgcccccatgacctagtgctaggcgtggacgggcgcacctgcatggaggggtccccagagcccccaaccagtgccagcatactcagcgtgg

SEQ ID NO: 427136 - DNA, 122 bp, Homo sapiens
gttacctgcaccgaggcccgtgccgggccagactggggctagtgcagctcatcggggtcccgcggcggccggggtcggcctgggtccatgtcatcgctgccactgtccaactcgaagccacg

SEQ ID NO: 427137 - DNA, 122 bp, Homo sapiens
tcccaaggagctggagtcagggctggctccacatcccgtttgtcagccccagcatgcagacgagaggccatcagttgccaaggactttgttttattgtcattgcagttggcttccctcgggg

SEQ ID NO: 427138 - DNA, 122 bp, Homo sapiens
cttcgacatcctgcggcacaacacaggctactgcgtgtacatactgggtgtgatgtggtccgtcctgggcttcccactgccacaagtcttcctggtgccatatgccatgtggcacagcgtgg

SEQ ID NO: 427139 - DNA, 122 bp, Homo sapiens
aaccgtctgcctgctggctgtaggaccatggattagttccataacttctctgtgccttatcggtaaaatggagatagtaatgatacctgtctcacagtgtcgtaaggattagaagagttaat

SEQ ID NO: 427140 - DNA, 122 bp, Homo sapiens
caacatggagaaaccccatctctactgaaaatacaaaaattagccgggcatggtggtgcgcgcctataatcccagctactcggatgtctgaggggcgagaatcgcttgaacctaggagcgga

SEQ ID NO: 427141 - DNA, 122 bp, Homo sapiens
ggggggctaggggagaggagcaggtgacgtcacccggggacctggggcccccaggggcggcggcgagagcccgacctcgtgacccgtccgcgccaatggccctgcggtctcccggacgacgc

SEQ ID NO: 427142 - DNA, 122 bp, Homo sapiens
cagagagtgaacaggcgaataaacattacgcaatccatgactaacctgccctgcccctgccgccctggggaagctggcctgacggggtgggggacgttggcgggccctggccaagtctcttc

SEQ ID NO: 427143 - DNA, 122 bp, Homo sapiens
aacccaggcgtcccaaagcagctgggggccgccattttgccgtacggcactggctacgcccggactccggtgcgcagccagtggagctcttttcacccggtgcttctacgactccgccaatc

SEQ ID NO: 427144 - DNA, 122 bp, Homo sapiens
tccagaagaggccctggagcctcacgccgtcgaggctgctctcaggcgttctgttccgggcgaggcttgtgctgcaaggaagggcaccagcatgcaggctgccactggagggtccgggtgct

SEQ ID NO: 427145 - DNA, 122 bp, Homo sapiens
accattactactgttcgacttgactcaattttatttatctctttctaacctgacagggctcgtatacagttaagctaactgatcagaaggataccatgataagaggtggaatagttctgttt

SEQ ID NO: 427146 - DNA, 122 bp, Homo sapiens
taagtggttctaacgagctattcgggaagaaagcccagtgacttactttaggcacaggcacgtacacgggttgaatctggggctccagagaactgaagagggacgccagccgaccggtgcca

SEQ ID NO: 427147 - DNA, 122 bp, Homo sapiens
ttttttccaaattgatgctccagtgtccattctccaactgtttggatgtttacaggcaaccgcactggaaacaacagctggactccaagttcaatgcccagtcaccaggtttgtgggtgtca

SEQ ID NO: 427148 - DNA, 122 bp, Homo sapiens
ggaaaccttcagaggagtctcagaaaggacacggctggctgcttttctcagcgccgaagccgcgccatgctcgtcctcagaagcgccctgactcgggcgctggcctcacggacgctggcgcc

SEQ ID NO: 427149 - DNA, 122 bp, Homo sapiens
tgtgtgagagaggagttggaccgtccttcggcccggtcccgggccggggagaaaccctcccgcggcccctcccagggctgggctgccgttacccaacccccgccccatcgcacacacccctc

SEQ ID NO: 427150 - DNA, 122 bp, Homo sapiens
ggcagcatcgacctctggcagctgccccctcctttataaagatatacctccggggggctccgccctgtctcgcctacctcgctagcgcccacgctccaggggccggtcgccccctccaccac

SEQ ID NO: 427151 - DNA, 122 bp, Homo sapiens
ccccaagccagcctcacagcccacaccccctcctctggccgcagccgaagctcccccttccgctgcacatcctcgctcaccacgcccacggtgcagctgcccccatgggccaggtctatact

SEQ ID NO: 427152 - DNA, 122 bp, Homo sapiens
agatgctagtggggactctgtctctttgtcaggtgtccagggcctctaagactgcatctccgccctcagcatccaggggaaccagcagcagaacagcaacctggaaaggaggatgacagggt

SEQ ID NO: 427153 - DNA, 122 bp, Homo sapiens
catatccgacttcttcacctatgagaccaccaagtcggtggttgtgaagagctggaccatcgggatcatcaaccgagtagttcagcttctgatcatctcctactttgtagggtgagtctgtg

SEQ ID NO: 427154 - DNA, 122 bp, Homo sapiens
tccccactgagtcttagcatgaggcagcaacagaagctctctctttctcccagctaagtccgaggccccggtgcccagaaagggcagccgggatagtgaggttatttcctgcccgcccaggg

SEQ ID NO: 427155 - DNA, 122 bp, Homo sapiens
aacttcacaaccagccggcggaaagcaagaagatgcgaggtgggggcgtcagcagcctcacgaaacctaccatgggccaggcggggaacaaggcctcaacattcaccccagccacacttaca

SEQ ID NO: 427156 - DNA, 122 bp, Homo sapiens
caaacccgaggctggacctacctttaatcagatccacgatgcgcagctcgaagggaatgtcgttcttcttggcaaagatgtaaacagcgcggcagggctgggacagcaggtccaggtacagc

SEQ ID NO: 427157 - DNA, 122 bp, Homo sapiens
aacgcagtgtacaccctgccggatccagaggggtggaagtcagtggtgggtctgcgacaacggcaatcagcagtagtggacggcgagcgaaagctcagctccagccagaacaaacgtggacc

SEQ ID NO: 427158 - DNA, 122 bp, Homo sapiens
gataatgaatgactacgatttttaagcccacagccaggttattcccagaagttggccctccgcaccagaccccagcagcccgcagcccgcctcgggcgaaaggcctcccgggctcctgcggc

SEQ ID NO: 427159 - DNA, 122 bp, Homo sapiens
caaccttttatgatatttgcttgaggtaataccaaacttccttcccagagttcatgccaccgggcaatgtagaaggctggaggagaaatgaggctgacgtggaatataaaagtcaaaaaaac

SEQ ID NO: 427160 - DNA, 122 bp, Homo sapiens
atgtttctcaccagccgcgctgcgtactgaggtctggcgggcggggagttgcagccacagcgtgtccgcaggttcgagcccagggctaaagtaccagcgtggaaacttacctgggaccacaa

SEQ ID NO: 427161 - DNA, 122 bp, Homo sapiens
ctgctgccccctgagccagatgatgccttctggggtgcaccttgtgaacagcccctggagcgcaggtaccaggcactgccggccctcgtctgcatcatgtgctgtttgtttggagtcgtcta

SEQ ID NO: 427162 - DNA, 122 bp, Homo sapiens
tccgctggtacaatgcggagcggagcacgagggtcgcaggtgcagaacagcgggaagatgcgctcccccagggggccaggcgcctggaaggcgtaaagcaggtcgagtgagcggccgtcgta

SEQ ID NO: 427163 - DNA, 122 bp, Homo sapiens
gcttccgaggcggcggggcgggaggcggcgcccagtcaaggacaacagaagactacgtcgcgtgggccaaaggaaacagtcccgtcaataaataagcctctggccgacgcacctcacccttc

SEQ ID NO: 427164 - DNA, 122 bp, Homo sapiens
ggactacaggcgtgtgccacgtgcctggctaattttggatgtttactggagacagggtttcgtcatgttggtcaggctagtctcaaactcttgacctcaagtgatccgcccttcttggcctc

SEQ ID NO: 427165 - DNA, 122 bp, Homo sapiens
caccctcagaagccgggtcggcgcttccccagctcggggcgccgggggagagtggactcgcgtcctggaaggggcccttcctgctattcgctccccacagttccccgacaatgagagctccc

SEQ ID NO: 427166 - DNA, 122 bp, Homo sapiens
tgtagtcctctatctgacctccttcaaagtgtattcagttttgacgtatcttttttcttccggtggtagtgagggttctaatatttctgaataaagaggtaatatgtttgtgcagcctgaag

SEQ ID NO: 427167 - DNA, 122 bp, Homo sapiens
aaggaactgtgttaccttttgtcctaagaaaaaggcttgaatttatgtaaatactttgatcgattgctaattttcaaaggcttcttaggtaggttactacagtaaactgtaactcagtccac

SEQ ID NO: 427168 - DNA, 122 bp, Homo sapiens
cgcctgaggagctgggctgggtggccacggggaggctgcgctgggaccgagtccagcccccgcttcccgctcccgtggccaggagctgatccgcaagggcatcccccaccacttccgggcca

SEQ ID NO: 427169 - DNA, 122 bp, Homo sapiens
cgctcctcgcgcgtttccgtttccgctaggactctggcagttggtgagcatcatggcaaccgttgtaagtgtgggtgcatggagggtgaggagcgagctagcagtctcgagtttgagagagg

SEQ ID NO: 427170 - DNA, 122 bp, Homo sapiens
tggttgttggagtctaaagacagtgttcccatgcagataggtgacatgaaaaatatgtagcgttcatttcctagaatgtcatagccacggagtcttagaataactcttggcatccaagttaa

SEQ ID NO: 427171 - DNA, 122 bp, Homo sapiens
gggcgctgggagcccagcccctcctttccacccgccggaaccgtgctgcgtgggagggggcgtccctacctggaaagctggggacgctgggagactcacagcccggaaaacaagggtgacgc

SEQ ID NO: 427172 - DNA, 122 bp, Homo sapiens
ttaaatacatttgtatgccttttctccaattaatctgccttttgtgaattgatttttgagcgaatcttcagggggcaaaggggaggtttcccattggctcctactttgtcatttctccattt

SEQ ID NO: 427173 - DNA, 122 bp, Homo sapiens
gaccagacctgcaccgaggcccagccccagaacaggctgcagagacccccgcccccaaggcgggctccctccaaacgggactccatactccttgctggctcaagttttgtttcgctcttttt

SEQ ID NO: 427174 - DNA, 122 bp, Homo sapiens
atttttggtttcacaacgggaaacgttgatttcttgttgcaaggctggtttttgaaaattcgacacttactatccaatttttttgcgacgtcagcacctcgggctcaggggggagggggtaa

SEQ ID NO: 427175 - DNA, 122 bp, Homo sapiens
ggctactgcggttgccagttctgtttcgggccctacttatactgctctgtggggcggggacgaagagtcaggggctgaggagcgagttgcggtagttgctgtgtaccatggtctcggaggtt

SEQ ID NO: 427176 - DNA, 122 bp, Homo sapiens
gtagccaggatcaaaacaccaaactcatagaccttactgggctccaattccagcggggtccgctcactccgacgagggtgacctgacccagagggttgggccaagtcctgggtaggccacca

SEQ ID NO: 427177 - DNA, 122 bp, Homo sapiens
ccgctcccagctgcaccctgcccctacctgccaccacctcaccttcatcctcaggcgctgcggccctgagcccctgccaggaatgcacctttagcccaggcctgctcagtgagctccgccga

SEQ ID NO: 427178 - DNA, 122 bp, Homo sapiens
ttgtaggtggatgggtagatgtgggtgggtaggtagatggatggatggatgatgggtgagcgactgaatgaactgataaaatgatagatggatcctattacctgatcaacttggaatgacaa

SEQ ID NO: 427179 - DNA, 122 bp, Homo sapiens
tgctctgtctcgcacctggggcctcttccgcgggcttcctccctgcccctttgggggattcgtagagttgccacagcagccggtgccatgacatcggcagagggcagcttcgccagcactga

SEQ ID NO: 427180 - DNA, 122 bp, Homo sapiens
ggggacagagaaccgagcgcgggggaccgagtcagaccccggggagacagaaactgctttcgctccgtttctctcctgctctgaagcagaaagctcgagcccgagaggcagtggccgaggac

SEQ ID NO: 427181 - DNA, 122 bp, Homo sapiens
agggagtgccagacagtgggcgcacgtcagtgggtgcagcacaccttgcacgagccaaagcggggcgaggcattgcctcactcgggaagcacaaggggtcagggagttccctttcctagtca

SEQ ID NO: 427182 - DNA, 122 bp, Homo sapiens
tccgcacttggggcggggctggaagccccggccccgccccggccccgcccccggcccggccgagctggtatttttccacccagcaggatgggtgatgctgagagctgcctgctcagacaaca

SEQ ID NO: 427183 - DNA, 122 bp, Homo sapiens
aattttttagagacaggagtccctctgtgttgcccaggctggtatctggtgattctcacgcgcagccaggtttgaggaccactgacttacattctcttccccctggtttccaccttcacctt

SEQ ID NO: 427184 - DNA, 122 bp, Homo sapiens
aaaaaaaaagttgcatgggacacactttcctaaaagagtatttgcggtttatctgaaattcgaatgtaattgagtattctgtgtctatattgctaaatctgagaactctacctcagttggat

SEQ ID NO: 427185 - DNA, 122 bp, Homo sapiens
ttctcactattctcatgacaacaaaagagtgaggtgtatcttatcatgacagttttgtaacgagggacatgagacttagtttttactgtggaccaggacacaaacactatagttctaaatca

SEQ ID NO: 427186 - DNA, 122 bp, Homo sapiens
cataaatcaccagcgccagagtctcgggaaaaggcgcatttttcattgctggctgcagggcgactccagaccgcgaacgagaaacagaagttgtctttagataaaccgttcaccggagcgcg

SEQ ID NO: 427187 - DNA, 122 bp, Homo sapiens
ccctctagcctaagtatttgagaatacacattcctcaatagctatttatttagcagctagcgaggtcggaagcatgctagaagcctgggcctgggagtgctggtggagttggaatgaggttc

SEQ ID NO: 427188 - DNA, 122 bp, Homo sapiens
gccgtgcggtgcgtgtcccggaagtgacgcatggccaaggccgggcggccgccttgcccccgcttcctttcacgctgtcgctgcccgtaggtggttgtggccactgtgcccggagggaggcg

SEQ ID NO: 427189 - DNA, 122 bp, Homo sapiens
ctaaccaatgttaaacagataggctgccaactctctgcaattatgatagcttcacaaaatcgatgtgacttcaaatcagaacagcataagacagagaagatcatctatgaatgacataaaac

SEQ ID NO: 427190 - DNA, 122 bp, Homo sapiens
ctctaaagcgctcccagggatgctgatgctgccatctgggggaccacgcttggagtactgcggccctggcaaaccatctcttccaggaagctgcatcttgctctgccttcctcccctgccag

SEQ ID NO: 427191 - DNA, 122 bp, Homo sapiens
tgggcacatgttaccatgtctgggttccaggccagctcgaatcttcaccccacctctccccgctccagtgaacctatatactcagcacctggcttccaggtacccagccctactgccagatc

SEQ ID NO: 427192 - DNA, 122 bp, Homo sapiens
aaactcctgggctcaagcaatccacacaccttggcctctcaaaagtgtgagtcaccgacccggctgatttaagcatttatctcgagtaaggtggaagcccgggaggggtgtgggcggggggg

SEQ ID NO: 427193 - DNA, 122 bp, Homo sapiens
cctggagctgtcacccccggagtcgccacacagacgtcctgccatggaaccttcccctcccggtgcaccctggggaccgagcccttgacaccacgccctttgctttatcttgctcttgaaat

SEQ ID NO: 427194 - DNA, 122 bp, Homo sapiens
tggagctgctgctgaaggagccggtgcctggtggggagcaggggctctgggaagcactgccgcagggatggtagggtaaaccggagctgctggaaatgctagaactgctggggactcgagaa

SEQ ID NO: 427195 - DNA, 122 bp, Homo sapiens
cagacacaggatcaaggtgccctgccccacccccaggccacccagtgccctgtccacaggcgacagacagcacacaggaaggaatctgtcggggcagcactttgttgtacaaactgccaggg

SEQ ID NO: 427196 - DNA, 122 bp, Homo sapiens
agcacctgaagaccaagaagcagcagtggaaggagcggctgtgcctgctgcggaagtacgcggtcaaggcctgaggagcacgttgtcaataaagcacagctggctgagaaaaaaaaaattag

SEQ ID NO: 427197 - DNA, 122 bp, Homo sapiens
tactaattgactttccaagtctggcagcacgatcctgaaacaggagctccaggtctaagtcggaaacacgactgttccacgggataatcttcttctgaacgtcggtccactccgcttggtta

SEQ ID NO: 427198 - DNA, 122 bp, Homo sapiens
cagaggtgagtggctgttctgggttcaccaggaatcacgccagaggagccagactgcacacgactccagtgcgtgagcacgtgtgtgcagatgtctgtccgtgcgtctatctgtatgagggt

SEQ ID NO: 427199 - DNA, 122 bp, Homo sapiens
ccccacccagtccccagcccccgccacctccctcgtgccaaccggtccccccaagggcaccgccgccctgacttccaacacatcgattcgtctgcccggtcctgtagtttatgtaaatggca

SEQ ID NO: 427200 - DNA, 122 bp, Homo sapiens
atcccacaccccttcccccttggatgcctcgttctctggggccctttggcgctgcccctgcgtccccatcatggaaactaccacctgctgcctaactgccagacgcaaaagtgcccaagcct

SEQ ID NO: 427201 - DNA, 122 bp, Homo sapiens
ggtgctggagccaccatggccaggcttgctgcggggggaggggggaaggtggttttccctcgcactgtcttaaaccgatggcctttccttggcacagggtccactgcagcatgccaaacgag

SEQ ID NO: 427202 - DNA, 122 bp, Homo sapiens
cccgcacacgtggccctcccgcctccgggccccgcccccttggccgcaactggcaactcccgcctgaagaatagattctctggttcacagccgtctgcaggctcaggaacagatctgggcgg

SEQ ID NO: 427203 - DNA, 122 bp, Homo sapiens
aacagaagatacctcaaaacaaatgtctgtgcaggagcatagaagtccctgagaagtgaacgagctggagcattcatcctttagctcccatcagtcactggttgacagcagcttatggaggg

SEQ ID NO: 427204 - DNA, 122 bp, Homo sapiens
tagtccgggcctacttgtgacaaaggcgtgttcatcaggggagcgcagctaattagcatccgggctcagattggctggggcggggacgaaatcagagggggacccatccttgctccagctat

SEQ ID NO: 427205 - DNA, 122 bp, Homo sapiens
ctgctgaaagaaggctggttgggtgtttctgcaggtggcccgtgatgtagccgtggtggccggagggctaggtcgccagctgctacaaaaacagccagtatcacctgtgatccatcctcctg

SEQ ID NO: 427206 - DNA, 122 bp, Homo sapiens
caatgagcactacatgcccaagagaaaatttaccttctgacggatgctcaaagccacagtcgacaatggcccggagcaactctggcttgagcaggaagtcacgaaagccagagctgtggatg

SEQ ID NO: 427207 - DNA, 122 bp, Homo sapiens
tggcacataacgtgctgggcggggtctatggtccagacagggggaccaggcactttccagcgcctggatctgcagacgcgaggtcttctgtattctggccaatcttggtgttgcagctgctc

SEQ ID NO: 427208 - DNA, 122 bp, Homo sapiens
caccagcgccttcttggcacagggccctgtgcaactgtgcaggtggcatgtccatgaagccgaccctgatttcatgccctacgaaacctggatctgcccctttccccaactttccaaagaaa

SEQ ID NO: 427209 - DNA, 122 bp, Homo sapiens
ccaaccttcgccgggaccgcagcccctcccccttctcctcccacccccgcctccgttgagcgggaaagcaacaaagctgggtgcattgatgtgtgtgtgtgtctgcgtatgtgtagtttggt

SEQ ID NO: 427210 - DNA, 122 bp, Homo sapiens
gaacatttccacaaggtcagggaaagctgtggctcagaactgatgtttcctcagaggacacgaatacaaaagatgcagggaacaggatcttgtccaggcatgggtcccttgggtaacctaag

SEQ ID NO: 427211 - DNA, 122 bp, Homo sapiens
atggccactcatgcccatgccttcctaggggccccatctcggtcccttttctggcacattcgatctcgccaattaaacaaagttgcccgaatctgcctccgaagaaccccgccgatagcatg

SEQ ID NO: 427212 - DNA, 122 bp, Homo sapiens
ggcggtgccagctgtctgctctgagtgcagggtccaccgagcccacgcccacccggaactcgtgttggcctgtcagtgccttgcacggccccggttcccacccgcgcctctccctccacacc

SEQ ID NO: 427213 - DNA, 122 bp, Homo sapiens
ggtattgctgttctctatgtattattaatttgtatttatatttaactctggctattagtccgcctcttccagtcactgagccatttgcaaaggagagaagagggagacaagggttgctatta

SEQ ID NO: 427214 - DNA, 122 bp, Homo sapiens
cccttgagaactcacgtccatgccctctcctccaggaagctccgtcagtgccccctacaacgctgtgctgactcctgttaaacaccagcagcactggatcccagctagcacttcatgccgct

SEQ ID NO: 427215 - DNA, 122 bp, Homo sapiens
gtcgagtcccaggtggtaggaaacgatgggcttctctgtgcgactgccagcggcctctggcggctcattccgcgcagatctgcgtggcgcccgagccctcccagtgggcccccaaggctcca

SEQ ID NO: 427216 - DNA, 122 bp, Homo sapiens
ccaccaggcaggccagccggtcctctgagagataaggctcacactttggactccacacagcgacggggccccctgcccctccagctggcaggcgggctccctgcctgcttaggggtctaggc

SEQ ID NO: 427217 - DNA, 122 bp, Homo sapiens
ggagctttgctcacttcctaaaaggaacatgagtttcctgctcctgtgacaatggagagccgactacagcttggtccctgctcaactaaggagctggtttggggtttttagaatttggtagc

SEQ ID NO: 427218 - DNA, 122 bp, Homo sapiens
ctaacttgaggtatcagagggccttttttctatcctctgcagaccagacgcggttcacctcgactaccttaaaaatggaattcacaggaagattttagggcctaagacacagaacactaatt

SEQ ID NO: 427219 - DNA, 122 bp, Homo sapiens
cttgccggttcacctccctgtggaggacctcctctctctgtcattggaacaagccttgctcggtcgtcagtgtggatgttcctgggtcccctagaacactcgaaatctccccaaaaatacca

SEQ ID NO: 427220 - DNA, 122 bp, Homo sapiens
aatgggagcctctgtttatgtcgggagccatcaaatagtcatcttccccctaccatcccccgcccactctccgtcgcgctgcgctgcgtcgctttcagcctctggtgaagggcggcgcgctt

SEQ ID NO: 427221 - DNA, 122 bp, Homo sapiens
ctggaagactcaacatagtaaagatgtcaattctccccaaattgatattcagcttgaacacgattcctacaaaaatcctggccaggcgcggtggctcacgcctgtaatctcagcattttggg

SEQ ID NO: 427222 - DNA, 122 bp, Homo sapiens
cacaaagaagttactgagaattattcggtctggcagtatatgaagaaatccggtttccaacgaaggcctcaaagaggtcaaaatatccgcttgcagacttaacaaacagagtatttccaaat

SEQ ID NO: 427223 - DNA, 122 bp, Homo sapiens
ggaatggaggcaaggagacctgctgcataggatcattgcaaatatttgagacataatcgccgagtcctcgcacagagcctgataggatcattgcaaatatttgagacataatcgccgagtcc

SEQ ID NO: 427224 - DNA, 122 bp, Homo sapiens
accagcagcgggctagtgtgccaggagggatcacagagccggcagcactcaggctgggcacggggccgaggggctaatgggcgaggggctgggcagggtcagctgcaggtgccccctctact

SEQ ID NO: 427225 - DNA, 122 bp, Homo sapiens
gggctgtcgccccccacacacacccctccgtgccctccacccgcactgtggagcgggactcgggccatcggactctgccagagagaaagctatgactgtttcctccaaaatcataaaacgga

SEQ ID NO: 427226 - DNA, 122 bp, Homo sapiens
gccgctgcctccgctctgagcactgagcccgcccagttcgccggcgccgagcgcagggcccgcccccatcccaggccccccgcgcggccccacccgctgccacacacccagatatttcaccc

SEQ ID NO: 427227 - DNA, 122 bp, Homo sapiens
ggttaataacaggcctcgcgctccctgacaggagctgcagaaagcgacgcccgaccgagacgcgacgaagaacgccacggccactgcaaaactcccacgctctcatgctcctttacgcagga

SEQ ID NO: 427228 - DNA, 122 bp, Homo sapiens
gaacgcactgccgctaagcaacctccattcagcactgatggaaccgcctcacgtgccctgcgtggctccagatgctgggcacagggtggctctgaagacagagcctgctcagggcagccccg

SEQ ID NO: 427229 - DNA, 122 bp, Homo sapiens
tatacttagcattgatctcacagagaagaatgtcaagctttcttatttaactcttccttgcgtgtatcaggccatgagtgagaattactgtgacgacacacttgttcccagaactacgatac

SEQ ID NO: 427230 - DNA, 122 bp, Homo sapiens
cctgttttagaccttggaatctgtctctccacaaggtgtgaaacctctccaagctgtgtccgcggaaagtccggctcctggctccacctagggcagagcagacctccgtccctgggccttag

SEQ ID NO: 427231 - DNA, 122 bp, Homo sapiens
cctccctgagcccaaccccagtaggtggggagtgctcatgaccccggggggagtacagggcgtttgcccttgacttgcctgaccctctaaaacctcacatgttccctggaggtgggtgcagc

SEQ ID NO: 427232 - DNA, 122 bp, Homo sapiens
gccacaccccgggttggggatcctttgtgtttcttggcggaaccacgcccctttcttccacgaaacacccactccgctgtcttcagctggagaagcagctcctttttcctattcctgacctc

SEQ ID NO: 427233 - DNA, 122 bp, Homo sapiens
tgaaactaacatggtttagtccactaactgcatgttgggtaaattcaaaacccacatgctcgtcctcttgcagtggaataagtcacatctgatggacattttctgtgcttatagcatagtaa

SEQ ID NO: 427234 - DNA, 122 bp, Homo sapiens
agtagctgggattatgggcatgcactaccacacccgttaattttgtatttttagtagaggcgaggtttctccgtgttagtcatgctggtctcgaactcccgtccttatgtgatccgcctgcc

SEQ ID NO: 427235 - DNA, 122 bp, Homo sapiens
ttcttacagccactatttgtggcaggtactagtattatccccattgcacatgacaggaaacggaagctcagagaggttatgtaacttgcccaagtttgaacagttaataagagcttgcattc

SEQ ID NO: 427236 - DNA, 122 bp, Homo sapiens
cctgagcacctgggacctggcacccttgccctttaagctgcagtcatctctggtcacaagcgttgtttgcccttcccacaccagtccaacccaggccaatcacggagcgggtcttcgtcaga

SEQ ID NO: 427237 - DNA, 122 bp, Homo sapiens
atagaaacgttccaacagctgaatgctagtgcttttgccacatccactgctcccaacaaacgccagtgtctgccctggactaatcgacactgagagaccattcagaacttgcgagtcaggtc

SEQ ID NO: 427238 - DNA, 122 bp, Homo sapiens
cagtgaccgccaggcttggagaggagccgctcctggcaaagccagcgccctatttctgaacgccgcctccgttccggactacacttcccaggggctattgcagcggaggacacgcccacttc

SEQ ID NO: 427239 - DNA, 122 bp, Homo sapiens
ctgcctcagcctcccgagtagctaggactacagaaaatgatcacttttaaatcactccaccgcctgatttctttggggcacactctggcctgtgttctgtacagcaacttttcccctgaggt

SEQ ID NO: 427240 - DNA, 122 bp, Homo sapiens
tggacttcgtgggcgaagtcacctctttccgtctgggtgagctggggctgaaggccgggacgggaccctctgcagaggccatgcgggactggggccacagtgggggccccggtgagggccgc

SEQ ID NO: 427241 - DNA, 122 bp, Homo sapiens
tagtcttttttccactgattttgaataccacctctatcatataccaaatccccatataaacgcagatctatttcctgaccctttactcttttccatttatccatttatctccttttctattt

SEQ ID NO: 427242 - DNA, 122 bp, Homo sapiens
gggcgagggtggagctccagcggggaggctctgggcgcaggaggcttaccaagaggagtccgcggcagcccgggcctgccccgcgggctgctctgggctactgggatctcaccccgcgctcg

SEQ ID NO: 427243 - DNA, 122 bp, Homo sapiens
attactgtcataacacacttaaaataagattgttgggggtaggagtcggggggtaggagtcggagggtaggagttgatttgtacatggcatagtaagccaagcatagaaaagcaaaaacata

SEQ ID NO: 427244 - DNA, 122 bp, Homo sapiens
ggcgccgagcgcgcagcctgctccaccgccgcctcttggtcccgccgccgccgctgccgccgccgccgggcaggtaacttcatgcgctcattgtcccccccgcccgcccccccatccccgcc

SEQ ID NO: 427245 - DNA, 122 bp, Homo sapiens
taaaaatggtggttctcattcaggagccattttgatccccatggggcatttgacaatgtccggagacatggtggacagagtcagtatactacaggaatctaggaggtaagaggtcaaggacg

SEQ ID NO: 427246 - DNA, 122 bp, Homo sapiens
cctggcctctggtgcgggaaaacctcccagctgtttctgattctttcatactctcagccccgcccgagagggtggaggaccgaggcacagagggggagcggggagagactgagctccgctga

SEQ ID NO: 427247 - DNA, 122 bp, Homo sapiens
atcagttctcatatagtttttgttttgttttttaaaaaacaaagtgttgctctgtcaccccggctagagtgcaatgacgccatcaaagctcattgctgcttagaactcctgggctcaacaat

SEQ ID NO: 427248 - DNA, 122 bp, Homo sapiens
ttctattactgtttgatgctgggactcttatgctccaaccacgttttcacccagctgagtcgccttcgtatcacgcctttccagtgagtaagatcatctagatagattctccaaaagaaata

SEQ ID NO: 427249 - DNA, 122 bp, Homo sapiens
tctccaggagacaaagccaggcggccaccggaacccacgggtggctgcacatctggaaagcggagccccgggatgaattatgcatggattaccttgcacttgcgcaggaatgtctgtttatt

SEQ ID NO: 427250 - DNA, 122 bp, Homo sapiens
gggtttccaggagccccccgtataaggaccccagggactcctctccccacgcggccgggccgcccgcccggcccccagcccggagagctgccaccgaccccctcaacgtcccaagccccagc

SEQ ID NO: 427251 - DNA, 122 bp, Homo sapiens
aatcctactctttaactctatgtttaagaattgaggactgtggccaggtgcggtggttcacgcttgtaatcccagcactttgggaagccaaggcgggcggatcacctgaggtcgcgagttca

SEQ ID NO: 427252 - DNA, 122 bp, Homo sapiens
taaaaaaataaaaagcctggaaacgacgactctgaatgagcaccagccgcgaccccaccacggcctgaaaccagtttccgctaaaagaaatcagggcttcttggagaaaaagcgaatacagg

SEQ ID NO: 427253 - DNA, 122 bp, Homo sapiens
tgggactgaggctgtgaagaccgcaagttggggcagatggcttccgactgcttgctgttgcgtccccgagtatttatatttccctcgaattttctccactgcgccataatgtaaacatataa

SEQ ID NO: 427254 - DNA, 122 bp, Homo sapiens
agggcaagggtggctcggggcagcagtcctcagctgtggctagtcttctcccatctgcctcgggcgactggtgtctgcggcggtcgggagcgccgcccgggctgcgagtgacgcggggatac

SEQ ID NO: 427255 - DNA, 122 bp, Homo sapiens
cggctgttatgcgtgcggttaccacggcaacagggcaaccgggcaaccggaaacggaagacgacgggttactttgccacggaaggaatctgttaggaataaaaagggaccgttctcgttagt

SEQ ID NO: 427256 - DNA, 122 bp, Homo sapiens
cccagggtggggtctgaaggaatccctagaaaatctgattttcccccagggcccacatcacgtgcccagagctgggaaagtggaggcagcatgggatctagctgagaggctccatttttggt

SEQ ID NO: 427257 - DNA, 122 bp, Homo sapiens
gggggcgtgtccagaaataagcaccgcccggagttccgggcgatgagggcggagcgcttccgcctccgtttggattggctcagactgggaaaaggcgggtccagagagaaatgattggcatg

SEQ ID NO: 427258 - DNA, 122 bp, Homo sapiens
cgttagcggcgttggggtttggctgcagtggcagtgctttctcttctgctcacggggacccgctcaggctggaggccagccaggtgaagagctcgcccgcatgcgtgcgcgctgcgtgggag

SEQ ID NO: 427259 - DNA, 122 bp, Homo sapiens
atagcaacactcggtggtggtggaggggggaaggtcacgcacagtatgtgaggaagggagcggtcagtgactatcgtggagaaacctgacaaaccacccagccgtcaaggtgacctcgacag

SEQ ID NO: 427260 - DNA, 122 bp, Homo sapiens
ttaattagatttggaagatgagttttccatccaggcacttttccctgaattatcctcgtccgcacgagcgactctttccagggctggagctcacggctgggctgtggcctgtgccgtcccgt

SEQ ID NO: 427261 - DNA, 122 bp, Homo sapiens
gaaagaacaggaggttaaaaatagacaaccccattgagtttatcgtgagagagaaaggagcgaacgagagagaattgccacgcccctagtatggtgacactaagtgcctgttatttttgctg

SEQ ID NO: 427262 - DNA, 122 bp, Homo sapiens
caacccacctgtcaattatgtcagtgtaaaggcatccagaacatctgtcctgaattttcccggactgcacctggacttcaaaatgatggaaggtggtgatctaactgtgcagaaaacattgt

SEQ ID NO: 427263 - DNA, 122 bp, Homo sapiens
gaaatgaagtcatggctgcctgccctgaagctgacaaagcaagttgtggcttcttagattcggcatgaaaacggaattggcattaaaaaaaccgaagtgtgtgccccacccaccccagagta

SEQ ID NO: 427264 - DNA, 122 bp, Homo sapiens
cccgccaactcatacctcccgcaagccaccagtttcaagggatgcggaagccaagcaccccgtggtccccagcaccaggtgacccgcacgtgcactcaccgtagcagggaacctgcaaggcc

SEQ ID NO: 427265 - DNA, 122 bp, Homo sapiens
gagggagagactggagaagggggtgtgtggagagcccaagaggaggcccagggggaggtgcgcaggcacagcctctgttgaaggagtctctctaaggctgctagggtccttcacctgtcatt

SEQ ID NO: 427266 - DNA, 122 bp, Homo sapiens
agaagcttcctttcaactggtcaccagctccttatccactgaaatcctacccatcctccacgtgcattattatgggctttgtgtggcatgaaagggacctctgctaaactactttattaaga

SEQ ID NO: 427267 - DNA, 122 bp, Homo sapiens
aagcctgttccaagggtagatttaagaggctcaactgaaaacaccttgcctattagccagcgatcttagagatgaccaaaagtttctaaatagctttggaggtcattaagaacattatagta

SEQ ID NO: 427268 - DNA, 122 bp, Homo sapiens
ccactgtagctgcatccccgaccggtgagtgggcagcgctcggccccagcttcccgttagcgtgtccagccacgtgtgtgtccgtctgtccttaaaggccgtgtcacctgcacgacagggtg

SEQ ID NO: 427269 - DNA, 122 bp, Homo sapiens
acgcggggggcgggacctgacaaggccgtgggcggggcggccgaagggcttagagtgcggcgggaggaaaaggccaaggctcggagcgagcggcatagtgtagtcagcgtcaccgtttcaca

SEQ ID NO: 427270 - DNA, 122 bp, Homo sapiens
ttgctccatgttttgtgcttcatgaagctgtcacaggcataaaagtggtctgaccagggtcgtagtaaaaggggtgggaatgaaacatccaccaaaatgttgagcaggccacccacagtcca

SEQ ID NO: 427271 - DNA, 122 bp, Homo sapiens
tcatcctctactggacagttcccaaagcccttgcagaccttccttttctgtgccatcctgcgtgtgctgcccttgagctgggtgtcccccagtagacgcttccattcactgcctgtcccatg

SEQ ID NO: 427272 - DNA, 122 bp, Homo sapiens
gacccgggcacatcaacgaggaggtcgagaccgaggggggctccgagctggaggggaccgcgcagccaccgccgcccgggctgcagccgcacgcggagcccggcggctactcggggccggac

SEQ ID NO: 427273 - DNA, 122 bp, Homo sapiens
gcctctcgcgggggcgccagggggcagctggttgaggtgcgcatgcgcactggcacctaacggctcttcttcgagtcttctcagaggttggagattccctgtcttctccaacctctgccaag

SEQ ID NO: 427274 - DNA, 122 bp, Homo sapiens
ccacccaagccgggagccgaagctaaggctgcggctggagcccgcacgaggggacgcgagcgcgcgaggagccgaagtgctcggtacatggtgctgagggagcttgggtagaatttctgggc

SEQ ID NO: 427275 - DNA, 122 bp, Homo sapiens
tgcaggccttcgagacgcaggaggccgggcctgcaaaggccgactggagatcaagttctgcgcctgaagaggctgccaaaagtcaaaagcggggcctgggaaggccgccgagagccatgagc

SEQ ID NO: 427276 - DNA, 122 bp, Homo sapiens
gccacctggcccctctttccattaagtctccgtcgtcttgagtccatccagggcggtgtgcggccggtcgcttagtcagcaagaaccctgtgagctgcagtcatcataaatgcatatttaat

SEQ ID NO: 427277 - DNA, 122 bp, Homo sapiens
ctcacatcatttctgttgaaatacttcagagcaccctctcgttctgtcagcacaaacttccggctcaaaaactgcccgttgtcccggccacgcttccagagaaaaccctcacggtaccctgt

SEQ ID NO: 427278 - DNA, 122 bp, Homo sapiens
gacatggaatcctagaccggcccggaagtgcctctgctccgtccgccttcgaggagaggtcggcatctttgttccctgcccggccattgttcgtgccgcgcttctagcaacgccgggccggt

SEQ ID NO: 427279 - DNA, 122 bp, Homo sapiens
ctccctgttctgtctacacagccagagattgcacctccgagcctgtttccgtatctgtaacgtgagggctaaggcaggatctttctcagagatttgttgagacattaaatgaccttgttttt

SEQ ID NO: 427280 - DNA, 122 bp, Homo sapiens
tgacctcatgatgctcttgagagaagatagaataactagaactggtgataccaacatagacgactagactaaagcctcctaataaggctaaattgaagatagtgcgaaggtgttcatcctca

SEQ ID NO: 427281 - DNA, 122 bp, Homo sapiens
gaactgcaagtccaggctggatatggtgatcctgccctagccttgacaagttcaaacctccgaaagactggcagaccagctccctacactcagaagcctgtccctgaaatctcccctcttta

SEQ ID NO: 427282 - DNA, 122 bp, Homo sapiens
agttccgcaacctcataatgcccagagcaccaaaccattctttggctccaaaagctccaacggtactcagtcccaccacacatttccagtttcccaatagggacagtgggagataaactttc

SEQ ID NO: 427283 - DNA, 122 bp, Homo sapiens
gttaatccgggcagccagaaactcccaggaacagactctggaagctattgcagacttacccggaggacaggtactgcgggcttctctccacacccccccactccccaccgccaattcagtct

SEQ ID NO: 427284 - DNA, 122 bp, Homo sapiens
gtctgaaggacgcgcctccacggctctgggggcctgtcgcgcagggtgcgaggggtggtgcgccggggtcaaccgttcggggacccgcctaagaaagtttgagggatgtgtcatttgagaga

SEQ ID NO: 427285 - DNA, 122 bp, Homo sapiens
aggcagagttaatctttgcttttagaagataggatcagattacttgtagggattattgaccggaaggagtcatatttctggaaatattttgtatcttaatctgggtggttacatagatatat

SEQ ID NO: 427286 - DNA, 122 bp, Homo sapiens
ttcttgtgaacaaaagtgctgtacttacaatgctaaagaaagcatcacaatccaagttggcggcacccctgaagcccaaacaccagaaacatttatgaaagaattttgtaagtggatagttc

SEQ ID NO: 427287 - DNA, 122 bp, Homo sapiens
agagacccgggtgtcaggaaagatgggccgtctgggggacagcagggagtccgggggaaacgcaggcgtcgggcacagagtcggcaccggcgtccccagctctgccgaagatcgcggtcggg

SEQ ID NO: 427288 - DNA, 122 bp, Homo sapiens
ctggacatcaccgctgaagcttctgaaatgtttccttaaaatttgcaaactgagacccatcggtgctgcctctgttgctggtgttctcagactggggcgccgttgaggagcacgcgctccgt

SEQ ID NO: 427289 - DNA, 122 bp, Homo sapiens
tataaaatctttctttttattcacagcattgctaaatcagaagcattcacagtttccctccgggaatcttcctgtttgctttccagcgcgtcccctgggtgctggggccggcggacaccctc

SEQ ID NO: 427290 - DNA, 122 bp, Homo sapiens
caccatctgggaccccagcagcaactggcagcagggctgggagcagctctggaaaggctccgcggaggctgcggctctgggtcctcccgacgttttctttcttggagccaaggaaaaggggg

SEQ ID NO: 427291 - DNA, 122 bp, Homo sapiens
aagagtgctcagcccttcctcagactgcgcagtccttcctcagagtgcacagtcctttctcggagtgtgcaggccccagccagacagactggcacaggtgcatccgcagaaggtcctgcata

SEQ ID NO: 427292 - DNA, 122 bp, Homo sapiens
cccgggttccgatcgctttgcccggccggacttcagggacatttccaaatggaacaaccgcgtagtgagcaacctgctctattaccagaccaactacctggtggtggctgccatgatgattt

SEQ ID NO: 427293 - DNA, 122 bp, Homo sapiens
gggtcagtatccaagagtgccagctttggaatcagatataatctaggctagaatcctgaacgcacctcctaagagctgagtaatcttgggcccatgatacagacctgtatattctgcaacct

SEQ ID NO: 427294 - DNA, 122 bp, Homo sapiens
gcaacaaggactcgccctccatctgggccgccgtcccagggaaaatcttcgtcaacatcacgccagctgaggttggtgtcctggttggcaaagactggtcaaactttttcgtgaatgggctg

SEQ ID NO: 427295 - DNA, 122 bp, Homo sapiens
gcccttcctagcctcccgagtgcctgctgcagagcgcagggcggcggccacctgaccacgcgcacaaacaagaaggcgcagcagccgcaggggcaccgcgcctccctgtcgcccggccaggg

SEQ ID NO: 427296 - DNA, 122 bp, Homo sapiens
ttgagatgtttcttactcactctgcacagaaacaaagaagaaatgttatacagggaagtccgttttcactattagtatgaaccaagaaatggttcaaaaacagtggtaggagcaatgctttc

SEQ ID NO: 427297 - DNA, 122 bp, Homo sapiens
atcaagaagctggggctgaccatgcagtatccagaaggctacctggaagccctggccaaccgagagcgagagaaggagaacagcaagagggaggaggaggagcagcaggaggggggcttcgc

SEQ ID NO: 427298 - DNA, 122 bp, Homo sapiens
gcgaagtcagttccactctagttacaggattggggcggggccagaaaggcgcaggcgcaacgggcggcggaagtaggagcctgggaaggaagagggaacgggtcctggcggtgctttgcaaa

SEQ ID NO: 427299 - DNA, 122 bp, Homo sapiens
tctttgggttaagagtgtgttatagcagatgtagcattatttacggtgatcattatcagacgttattggttttatgagactaaagctatctaaggacgtgcaatattgtcagctcaatcata

SEQ ID NO: 427300 - DNA, 122 bp, Homo sapiens
actttgaatcagatggtaagtttcctgttggaaggagccccctttacagtgcctgtcttccggtctttgtgccaggaatctgttttctttcagctctattccttcccttgtcctacactgga

SEQ ID NO: 427301 - DNA, 122 bp, Homo sapiens
caccactacagagaatttcaaagctaagctactcacagaaaacaatgctcaaccacagggcggatgtgctgtttttcacaccccaagtcatttatctgaaaagcaatagcagtaaattcttg

SEQ ID NO: 427302 - DNA, 122 bp, Homo sapiens
gaccgctgtgccccattgggcggcacggacgcctgggacactctttagtccaattgcgggcggcgggcggcctgtctcagggctgggcccgcctggctcctgtgggatcagggtgggtggcc

SEQ ID NO: 427303 - DNA, 122 bp, Homo sapiens
ctcatccagtgagctagggggagtctaaccgtccctggaaattgggtggtgccaagactccgagcggcagtttatgtttttgccagcgaatgtccatcctccgggtacctgttccctgtttg

SEQ ID NO: 427304 - DNA, 122 bp, Homo sapiens
aggaaacaccaccttggactacagggaagagactgatctccctcctcctgccggcccccacgttgatttcccgagaaacaagcgtgtcccaggtcttctcaaaaacttccctccttggtctc

SEQ ID NO: 427305 - DNA, 122 bp, Homo sapiens
cctcaacatggtgcctggaggctcaatgtccaggtagagatgtgaaaatcagatctgcgccgggcagggttgcaatgtccttgagttcttctccatctccctttcccaaactctctcctctc

SEQ ID NO: 427306 - DNA, 122 bp, Homo sapiens
tgcaatgtcatgtggttctacctaatgcttgcggtgtccctgccctgggctgtttcccttcggcttcatctcagcgaatcacgaacacattccacggactcacctccttggaagccttttgg

SEQ ID NO: 427307 - DNA, 122 bp, Homo sapiens
tgcctccctctgggtggaaatgaagtaggtgtgtttgtcccgcaggtcatgatgcacatccggaaccaccccgttcccgtcattgccatggtcaatggcctggccgcggctgccggctgtca

SEQ ID NO: 427308 - DNA, 122 bp, Homo sapiens
gagtgaaacgcggaccggccagagcggcggtttctatccccacaagccactaatgcggtgcgggctggtgtccctgcctccagccccgaccccaccttgtctgctcagcttcctggggacgc

SEQ ID NO: 427309 - DNA, 122 bp, Homo sapiens
ccctccagggcgtgacgccactgccccctggtggccgcggctgcccagacgccctctcctcgcagacccagcaccgccagcacttgggaaccagctttatttctgattttttttttttgtca

SEQ ID NO: 427310 - DNA, 122 bp, Homo sapiens
tcctacttttattgaacagatgattcttatataaatggtttcagagcatgcaaagccatccggttcattttattcacttaaaataaccaaaatctgaccatagtagtattccccaaaagggg

SEQ ID NO: 427311 - DNA, 122 bp, Homo sapiens
ggtcaagctgccgccatgctgccccacatctgtggacagtttcagattcttacctgccttcgccattttgcagcctgctccatctctgaaacccttctcccttcttgacactctactcagtt

SEQ ID NO: 427312 - DNA, 122 bp, Homo sapiens
ttctcatgcagctctgcctaccactgttctttttaaatgtctttctgggccgggcgggcgcggtggctcacacctgtaatcccagcactctgggaggccgaggcaggtgagtcatgaggtca

SEQ ID NO: 427313 - DNA, 122 bp, Homo sapiens
atcaaagtctgccagcagcagcctaaactatatctatgcaaacacttatgtgaatctcaccgagattgtcaagcaaataacatatgctgttctacctactgtgggaatgtttgcatgagcat

SEQ ID NO: 427314 - DNA, 122 bp, Homo sapiens
ctaaatcaactgccaaggcagtcgtataaaggccaaagagtaactaggtcactgaagatgcgtggagagaaagggaattatggtattaaagcattctggaagcaaatagcagatgcttttca

SEQ ID NO: 427315 - DNA, 122 bp, Homo sapiens
tgccccacgtgaccgggaagtcaaacactcagcctccctggcatctgccccaggcccatccggatggatggcatcatggtgatgggaggaagcactccccactttgtgacctgaaggtcaag

SEQ ID NO: 427316 - DNA, 122 bp, Homo sapiens
acataactccattggcctgggaaccacacctccatcccacaaagtagcagcagcaggcctcgcacaaggagagtctgagctcagacatgcctaaccctgcccagacctggtggtctttctct

SEQ ID NO: 427317 - DNA, 122 bp, Homo sapiens
aaagatggaaagcaagagaaagaggtagaatgacatgaaaatctgatccagaaggtgcaacgtctgttttatatgagtaccagaaagggagaaaataggagggattataatcaccaaaattc

SEQ ID NO: 427318 - DNA, 122 bp, Homo sapiens
agcgctgcgggctccttgggaggcccgggagggggcctcgcccacgacaggaaatggggccgcgactgagggcctggagggtggaggggaggaggggctgggaggccgggacactggggccc

SEQ ID NO: 427319 - DNA, 122 bp, Homo sapiens
ctgttcgatctttaaaactgtagtaaaattccccgttggttcctatgtctgcatccgtggcgctgactcttgcgatactggtccttatagctgtgttttcaggtaaagaaacgctgtatgag

SEQ ID NO: 427320 - DNA, 122 bp, Homo sapiens
tgcccgtttccgctttcttcccacccacttccgggtctcctctgtttacgaatgtttgggcgcgaattactctaagcgcggctctcagaagggtgcaagaagaatcagtggtgagtcgtgat

SEQ ID NO: 427321 - DNA, 122 bp, Homo sapiens
ggcggcgacttgtccaaagtcccactccgtggaggaagcggctctgcagacctcaggcggcggctgctctaatccctgcagcctgtgttttgccctccagacggcagagggcgcgtgttcgc

SEQ ID NO: 427322 - DNA, 122 bp, Homo sapiens
agggcttgagctgagttggcgagggtggaggtggtgccggtcccacgccgtggtggggaccgagctgcgggctggagggaggggcagcgccgagggggcgggacggggagggctcgcggagt

SEQ ID NO: 427323 - DNA, 122 bp, Homo sapiens
ggcgttccagaaataacacacagaagccacggcccggagaggtgggcggggggcccgggacgcttcaggtgggggcggggaggggccgcgcggcgccgtctgcagctgcgcgcatggccggc

SEQ ID NO: 427324 - DNA, 122 bp, Homo sapiens
cccggtgcaggaggaactggcagccgcagacgtgaggaaagcggccgcggcttcaaactccgtagtgcgcaggcgccacacaacgcgcaggcgccgcctagaagtgacttctccaaaaagtg

SEQ ID NO: 427325 - DNA, 122 bp, Homo sapiens
gaacagagactgtgctggacaacccgaagcgacagaggcaacgagcaacagcaacacccacgaaagggagaggaaaaccacacagaaaccaggagggcaacaggccggcctattccacatac

SEQ ID NO: 427326 - DNA, 122 bp, Homo sapiens
ccccagaagccctgcacccgccttgcctccgcgggctgtggcctcccccctcctcactctcgcttcctgccccagctgcactgcacgactgtgcaacgggctccacccccccgtcccctggg

SEQ ID NO: 427327 - DNA, 122 bp, Homo sapiens
gtgagcgagcagaggcttaaggtcttcagcggggcgctccaggaggcactcacaggtgagcgcatgccgaggggcctggcgccaccgggggtcggccccatccctgccagggccgtctttct

SEQ ID NO: 427328 - DNA, 122 bp, Homo sapiens
aagtgatcctgggccacccctacgacgtggccattgacatgtggagcctgggctgcatcacggcggagttgtacacgggctaccccctgttccccggggagaatgaggtggagcagctggcc

SEQ ID NO: 427329 - DNA, 122 bp, Homo sapiens
cgagggtgacccgcgagcgcggcacccgcctccccgcccctagcaggaccccctccgccccgcccccagccggacccctccccgaggccccgccccacccgcgagccgcagccgcggcccca

SEQ ID NO: 427330 - DNA, 122 bp, Homo sapiens
cgtgagcggctcccggactttctctcccgggcgggcgttccgtcctccctcggggagcggcgccggaacttccggaggaagagccggaacttttgaagcccaggccccgcccggcgctaata

SEQ ID NO: 427331 - DNA, 122 bp, Homo sapiens
tgtatcatagtttctttctccattcctcggttgttagacacctaggttgagtctgtatctcggctattgtgaatagtgctgcaataaacatgggggtacatatgttgatatgctgatttcct

SEQ ID NO: 427332 - DNA, 122 bp, Homo sapiens
gtggtgatggaaaaaccaaattctgccaaagtatttggatagctttattctaagccaatgcgagtgaccatggcctagggttacacagtcttcagagctcctgggagagtgagcccaaggtg

SEQ ID NO: 427333 - DNA, 122 bp, Homo sapiens
tgatgacggggcccccgttgaggagcactgctggggagccgctggctgccaggaagctcccgttcaccaggatggaggaggaagccgggcaaggcgcgggagggccggtccctgccaggaat

SEQ ID NO: 427334 - DNA, 122 bp, Homo sapiens
gctggctcccacacccctaaaaggcccccagcggcaggcaggctaggagccagtccttggcgagccacggccaggggctcggcaggttagctcagtcacactctccagctgagggcaccccc

SEQ ID NO: 427335 - DNA, 122 bp, Homo sapiens
tggaaacaggagggggtcgtcggttcaggtgagaggcgcacctaccgggccttaggctatcgtgggaactgtgaggaaaagggatggcagcgactgattctcatccctcccttcatttttcc

SEQ ID NO: 427336 - DNA, 122 bp, Homo sapiens
agtgtgaggggtgggatctgtggagctcagaaataccaacatagagtctgaattttaggacgttccctagcctcgccaggaaggcagctgaaccaaagagtccccacccctggctggggcgg

SEQ ID NO: 427337 - DNA, 122 bp, Homo sapiens
ttgctttctgagttgctgacgcctctgctgacagagcacaccagcccacaagccgcccctcgctcagcctcacagcagcgcaggacgtctgcgtcatctgcaaatttgattttgtttgtggc

SEQ ID NO: 427338 - DNA, 122 bp, Homo sapiens
ccgggtgactactgcttttgcgcccaaagcgcagtgctctggctcagctccctacagtagcgacctccaccgcagattctcatctcctcgctaccgtaagagagatgtaaagaatcagacgg

SEQ ID NO: 427339 - DNA, 122 bp, Homo sapiens
tcctgccagctgcctgatggaagaagtccatttcttccataaatagcatcctctgcatctcgagggtcctcgaagcgcacggaggcgaagggcacaaggccgtaccggctcttgagctcgat

SEQ ID NO: 427340 - DNA, 122 bp, Homo sapiens
caagagctctgtgcgggattctaggctcccctgtgacagccgcggcaggaagcaggcgggcgctccccggccacaggcctgttgttctcggaagggagaaagctggacatttccccacgtaa

SEQ ID NO: 427341 - DNA, 122 bp, Homo sapiens
gccctctgaaaggtttgaagcggaacaaagggagtagtgaaatctacaaaacaaatggagcgctcaaggctttcatgggatgaatcatccgggtgcctgagctacaaacagttgcaagctca

SEQ ID NO: 427342 - DNA, 122 bp, Homo sapiens
gtggtcgatgggactgggcaccgtggagcaggggttggtgctcgtcggggaggctggggccgcacaggagcccatggagtgggtgggaggctcaggcatggtgggctgcaggtcccaagccc

SEQ ID NO: 427343 - DNA, 122 bp, Homo sapiens
ttggcatcctggttgccactggggtctaactaggctacctaatcaaacacttcatttgaacggaaattctcatatacaacagctgacttgttctaaggctggtcatcatgttattatcctcc

SEQ ID NO: 427344 - DNA, 122 bp, Homo sapiens
ggatcaggtagggtgaatgagtccttcccaaggtcacctagcattgatggcggagacactcggcgttttctgggccgaatcccttcccatcagccaccggcgggtttgggagggtgtggaag

SEQ ID NO: 427345 - DNA, 122 bp, Homo sapiens
cttggtcgtcagcacctcttcctcaggaccagcgggtcattagagtcttaaccaggggcccggtggccagacctgtccctgctcacagctgggggcaaatgtctccaggagagcaaagccct

SEQ ID NO: 427346 - DNA, 122 bp, Homo sapiens
ttggacgatctataaagctgagtgcgcgctatgtgacctctcaggggtcgctgccttggacgatctgtaaagctgagtgcgcgctatgtgacctctcaggggttgtttccaaccgtgttgtt

SEQ ID NO: 427347 - DNA, 122 bp, Homo sapiens
actgcgcctttcctcatccacagggtgccttcagtttaaggcgtgtcctgaacaaggtaacgtgaaaagcaaggggccaaaccctgctggccacggccgaggtgcgggctgcagagagggga

SEQ ID NO: 427348 - DNA, 122 bp, Homo sapiens
ggcattggggtctctgtgctctacaaaggatagttacattcaagcaatcatcaatattcacgcattttgcatggtttctatgactgtttcatacatgatggttatcgaaaagaccactgaca

SEQ ID NO: 427349 - DNA, 122 bp, Homo sapiens
atttccattgtgtagatcggaaaacagtctccaagggattaagtatcttacccaataattcgtagccaacaagtattaaaggcagacctcagactcaggtctgtctggttccagggctttgt

SEQ ID NO: 427350 - DNA, 122 bp, Homo sapiens
cacaacgctggctgtataccttataaaaactgcctggatatgttgtgctacctgtgtattcgtctgtgccctacccccacagtgtcaattccaccaaggcagggaccgtgtcttgttcatcc

SEQ ID NO: 427351 - DNA, 122 bp, Homo sapiens
aggggcacgtctctaggtgtcaagagggcttggctggggccctggggcctccccatcccccgccccccccccaatatggtgaatttagagaaataacatttggagagggttgggggccacta

SEQ ID NO: 427352 - DNA, 122 bp, Homo sapiens
ttatgaaataaatcttatctcctttttacggatgggccgaaggctggcctcgatagcctgcgcgcttaactgttatgctgtgtaccctcccgagctctgtttcatggcaccgctcgctcatt

SEQ ID NO: 427353 - DNA, 122 bp, Homo sapiens
cagtttacgcagctccccagctaggtgcaaagtggccaaaggaagagccggtcttccacacgcacacctccgcgcccacactgccccaggagcttcccactcagccgggggacccccaagca

SEQ ID NO: 427354 - DNA, 122 bp, Homo sapiens
agcgaaacttcgtcaaaaaaaaaaaaaaggaagaaagaagaaaaggaaagaaaagaaagccggagctgggattagaccatgtgagacaggttgatttcacgctagtgagcatgcgtggttgc

SEQ ID NO: 427355 - DNA, 122 bp, Homo sapiens
gctgcccctgtctcttcatgcacttgggtgtgtgattctgtgcatatgtatgtgccagtgcgtgcgtgcgtgtgtgtgtgtgtgtgtgtgcgcatgtgccacacagagggcatcacattcag

SEQ ID NO: 427356 - DNA, 122 bp, Homo sapiens
agcaaaaagctggcatcccggacaacaacaagcctatggacacaggaaccataatttaaacggtatcacaacaattttccccaccacaagttaccaagcctcactagttccttggtaagcaa

SEQ ID NO: 427357 - DNA, 122 bp, Homo sapiens
tggtgaggggagacacggggtggagccttccagcctcgccgtggattgattgagcacaaacgtgggtcacactgggctctgaggatgtaaagatgaatacgttgcactttacctcaagaagt

SEQ ID NO: 427358 - DNA, 122 bp, Homo sapiens
tttgcatactattaaaattgtttttactaaagtccccagatacttcccgatgtacaattacgagggttattacaaatattcagttgctcagatatttctgcattattatcactattggcctt

SEQ ID NO: 427359 - DNA, 122 bp, Homo sapiens
ctgcagctggcatcgagccctggctggactagtcatgctaaccccttggttattaatcatcgccatgatttttcatgtgtttactatagtatgatccaggcgttgactatactgggcacttt

SEQ ID NO: 427360 - DNA, 122 bp, Homo sapiens
cctcagaagacagcccggctaagaaagcctctgggctgggccctgggactgtccctgagccgggagctgtttgtataccagccaacctctgaatggcatagactcagctcagagcagactca

SEQ ID NO: 427361 - DNA, 122 bp, Homo sapiens
gaagggccggtttgcccggagctcttgagaaatctcactccccgtggacttgcaccctgtcgccactcccctgacctgccctgaggctggggtgcagcagggaattgcaacagccccccacc

SEQ ID NO: 427362 - DNA, 122 bp, Homo sapiens
ggctgaagtgactttttaaagtgaagcaactgacactacccgtgggagaagccacctatgcgacctgtggccaaaccgcaaatgtatgtttctgtgcaacattcctgctagagcagccgggc

SEQ ID NO: 427363 - DNA, 122 bp, Homo sapiens
ccgtggcctgtgctcgccgctcgcccgagctctcctcctcgcctggcgcgatctccggcgcgagcctcccaaactgctttataaggcgggcggccgctttgatccgcccacgtcagcgcgtc

SEQ ID NO: 427364 - DNA, 122 bp, Homo sapiens
atagaaggagccaccctcgccccctgctgagtcccggctcgctcggcccgcgcgtacctgcgttgtccaccaggaggcgctcccgcacccgccccgcaggcgtcttccgccgccggccggtg

SEQ ID NO: 427365 - DNA, 122 bp, Homo sapiens
gcgatacccgggcgatcggcggcgcaggtggagcctggagcagggcaggcagcggggccgcgggccagacagaaaagaggaagacagacaggaaagaggacagaaaagagaagccagacggg

SEQ ID NO: 427366 - DNA, 122 bp, Homo sapiens
ttatttgaagcctgtcttgcatggccatttggaactgacatttctgctgcaattccaaagcgcgaactccgggggctgaagtccacctacgctccacttaaccccatatactcagaatgcgc

SEQ ID NO: 427367 - DNA, 122 bp, Homo sapiens
gcagcccgagccttacgagagcggcagttggctgagcgagtctctcgcctccgtagttctcgtgtgtctttggccgcacagcctctcgggagttgtagtttccgttcaactcccaccttgga

SEQ ID NO: 427368 - DNA, 122 bp, Homo sapiens
ctgtaggaacttgactcttgtttatatccatcaacttatgggaaaattggttttgttatacgttgctttgcttgaagttgcagtttccaagaaattatcaacaatattaagtgaggacttac

SEQ ID NO: 427369 - DNA, 122 bp, Homo sapiens
actgccctgtttcacccctgctgtgtcccatcccccgtctgtccactaactgtaccgcaccggccattaaaagatgaaggcagaccgctgcaccgccgcctgcaagcagagtttgtgcgtgg

SEQ ID NO: 427370 - DNA, 122 bp, Homo sapiens
actttgattacccagtgcctagcacaaccaagttcaggtgcccaaaaactgtttactgaacgagtgaaccactgaatgttcagttttcagcacatcaagaacgtgttaacaaaatagaaaaa

SEQ ID NO: 427371 - DNA, 122 bp, Homo sapiens
tttacaggagcgtcccacggagggggtgcggcggggggcaggggagactgaggagggaggcgcagcttcctgttctgctgccggttatcacaggctgttctaatgctgctcaaacaatattg

SEQ ID NO: 427372 - DNA, 122 bp, Homo sapiens
tgcttttactaggaaatagaaaacatttttagtgacaggctatgcttcatcatgaaaatacggttgggtgttttaggccttcacaaatttgatttcattgtacttagtgatggatgttagta

SEQ ID NO: 427373 - DNA, 122 bp, Homo sapiens
ccagcagattcccttaggccatctttcaggttcgtgattctgattccattctttgactctcgaaatcatgaacactccatttccctactacctcctctaaaacacaaataattcaccaagta

SEQ ID NO: 427374 - DNA, 122 bp, Homo sapiens
tccaccagcagacaccctggctgagctgctgcctccagccctggaggaggaggcgcgagacgagcaagacatggtgctcctgcaaacatgagcttgtccaggcgaataggagaggtgatgac

SEQ ID NO: 427375 - DNA, 122 bp, Homo sapiens
cggggaagcccctgggctgggtgggaggtccaagtcggtctctgagacacgcacaggggccggcgacttggcaggtggggagcttggcccgcggtcgtggttcccgccgtcctgtgccttta

SEQ ID NO: 427376 - DNA, 122 bp, Homo sapiens
ttcacttgattggcttcatttttgtgtgaaattgcgttttatgagctgcattttggcacccggaggacttaaactgcgtccagtctgcaaataacattatttttgaccctgagaaaaaagga

SEQ ID NO: 427377 - DNA, 122 bp, Homo sapiens
gcttagggcgcaaactgctggcggctccaccccccgtccttccagtgcgcatgctgaggccgagctgctccatattgattgatttcccttgctgcacgtgtgctaaggaacggactcttcca

SEQ ID NO: 427378 - DNA, 122 bp, Homo sapiens
caagagggagggaaatagaagggaggtgaggggcgagcgggaagagcggcggcgcgccagcggctggagagagaaaaagtttttgcaaaagggaaaaaaaaagtttgcgcttctcgcgggtg

SEQ ID NO: 427379 - DNA, 122 bp, Homo sapiens
atttataaatacctaagagtggaattactggatcatagggtaactttatgttgagtccttcgagggaatactggaatgtcttctaaagtgactagacattttgcattccctgaagcagcgtt

SEQ ID NO: 427380 - DNA, 122 bp, Homo sapiens
accccctaccaaaagaaaacgaaactgctggataggggaggtgggggaaatatgatcatacgtgggtttagcccgctggttgccaatcaatggaaaaatgtcccagacctcagaggtcggtt

SEQ ID NO: 427381 - DNA, 122 bp, Homo sapiens
aacacaaccgactgcggcagccaataggagccgctctcctgaacattcagaggatgggtgcgcgtggtgtgataaggggatgttggcgcctggtacgcgcccccctacatctggcaagtctg

SEQ ID NO: 427382 - DNA, 122 bp, Homo sapiens
tcctcaggggtctcactcatgcagtcgccacctctgtgccccaccaggaaacctccccaacggtcccccaacctgcaccactccaaagatgtctctagatcagcccagactctgttgtccac

SEQ ID NO: 427383 - DNA, 122 bp, Homo sapiens
tccccctgtcaaagcaccttggcccataagaagaaaagggggagccccagatgtgatgagcgcttccaggcttcaggctcagaaggcgcccccagctctcctgtaactcagaggccagtgtg

SEQ ID NO: 427384 - DNA, 122 bp, Homo sapiens
gaggcagcaaaccccagccctggctccaggacagggccgaaggcaggatagacggagcaacgggtccggctgccgccgggatgttgcagcacagggcctcctggctgcctggcctacaggcc

SEQ ID NO: 427385 - DNA, 122 bp, Homo sapiens
cagacccaatccccgatcacacagaacaagccactaagcgtgtgtcccagatgagccaaccgtgctctccgcactcgggatgtggctgccccgcaggggtgggtcccaggggctgacttgag

SEQ ID NO: 427386 - DNA, 122 bp, Homo sapiens
gacaagctttccctcagatggagcttttaggctggcagagaggacaggcattacataagccgtcaaataaataaagaaatatatcataaatggtggtaactgttggtattcatcatgaggca

SEQ ID NO: 427387 - DNA, 122 bp, Homo sapiens
aaaatcaagaaagaaagtaacttacctgttgggacattctgaataagaggttagtatcagcgttttgccatgtccccatgaaccctggttcagccgtagtcgttctggttccgaactgcatg

SEQ ID NO: 427388 - DNA, 122 bp, Homo sapiens
gccacagcgctgtccgcgtcggtccctccctctggtcctgtcccctctacgcggccgcagcggtacctgaagaatgaagttacgctgcgcgacagccaactcttcagagccgccattgtgca

SEQ ID NO: 427389 - DNA, 122 bp, Homo sapiens
ctgcgctcagcctctaggactgtggctccgcccgggctagttcgctctccagtcaggaggcggaggcagctttgagcactgattaaccagccagccagcgaagagccaactctcaggtgatg

SEQ ID NO: 427390 - DNA, 122 bp, Homo sapiens
tcgggccaagatggcggtgcaggtggtgcaggcggtgcaggcggttcatctcgagtctgacgctttcctcgtttgtctcaaccacgctctgagcacagagaaggaggaagtaatggggctgt

SEQ ID NO: 427391 - DNA, 122 bp, Homo sapiens
gagctcgccgctccagctgtgcctccagcatcctcttttcctcctccagccgactccgctcgccttccagctcctcgaccttcaacctgcaaggacagcaagacggtgaccaggtgtccgag

SEQ ID NO: 427392 - DNA, 122 bp, Homo sapiens
agctaaagccacaaagcgcggggctggaggtttggctcccaagaagcgaggaaatgggttcggaactcttctgccaagtcccagtagatctacccggtaaacttccggtgagtttccaactt

SEQ ID NO: 427393 - DNA, 122 bp, Homo sapiens
gttccacctcatttctgggataagcagctgacccaatcaaccccaccggcgtctacacctcggaaactgattgagtcctgggacctcttccgaccaccgccaggagcccaggccccgccccg

SEQ ID NO: 427394 - DNA, 122 bp, Homo sapiens
agagaagagggaggcagggtttgaaaagctacatattgtttactatgttcattgtctggacgatgggtttgactgaagcccaaacttcagcatcatgcaatatatccatataacaaacctgc

SEQ ID NO: 427395 - DNA, 122 bp, Homo sapiens
gcgtgctagcggaagtctccgggcattatttaatatttaatctttctattcctgacatcacgggggctcaaatgtcatcaaaagacaggctggcattaaacccggcagggtgacgcacataa

SEQ ID NO: 427396 - DNA, 122 bp, Homo sapiens
gggccgtggcgcgccgagagcctccgcgaaactgggctgcctggccgctgccactcctcccgccgcccgagctactgagacccaccaagagtaaaattcttaagttgatttagcttcatgaa

SEQ ID NO: 427397 - DNA, 122 bp, Homo sapiens
cggcggaggcggcccgagctgtcccggggcaggagtgcttcctttcgttttcaaacaaatcgtgaatttaaaagtcaggcagagaactacccagggtataaaaatagccaccggccacaaag

SEQ ID NO: 427398 - DNA, 122 bp, Homo sapiens
tgctagttttaaagtcttgtaatagaaacgaagacattatgagaagagacagctgtctaacgaagtagcttaagtgaaatgcccaggcctgattgttgagtctcataccttgttataggtca

SEQ ID NO: 427399 - DNA, 122 bp, Homo sapiens
cgccagtaccctgatcccaggtgcagaggctggagcccaggcctgtatgagtgccagggccggtttcctggggtccttggtgcaccggggcaatgaagagaggggtcagcaatgagggggcc

SEQ ID NO: 427400 - DNA, 122 bp, Homo sapiens
ctttatcctggatgccttctaaccttaaccacttgcttctacagggcccagcgtgtgaggcggccgataccagggtcagatcagaccacaacgatgagtgggggggaaggagagcccgggga

SEQ ID NO: 427401 - DNA, 122 bp, Homo sapiens
tgactgggctgttgtgtatgtaaattgcttccctgtggggctcccacctcaaaaccagcccggggagtttccaggagacccaccagctggagactcagccagggcaggcctgggaatgtcca

SEQ ID NO: 427402 - DNA, 122 bp, Homo sapiens
cactttgggtcacgtgaccgcagagtgcgaggggcggagctacagtctggcgcgaggaaccgttaagatagacaacaaatgtaaccaatgaggtactccgactagggggttgggaacccaat

SEQ ID NO: 427403 - DNA, 122 bp, Homo sapiens
acacatacacactcgcacacacttccgagcgagtgcacactcgcactcccacccgacagccggccagggacagtcacccccaagatcaatatcgcagtttgaattgttccggcaaatctccc

SEQ ID NO: 427404 - DNA, 122 bp, Homo sapiens
aaaagaatgaaatcatgtcctctgcagcaaatggatatagttggaggtcataatcctaagcgaattaacacaggaacagaaaacgaaataccacgtgttctcacttataaatgggagctaaa

SEQ ID NO: 427405 - DNA, 122 bp, Homo sapiens
gcacacacacacacacacacacacacacacgcagtggcctccctgggggccgtggctgggcgaggcctgctgttgtccgagatgctggaaggagctgtgtctctgggtctgtcccggccgca

SEQ ID NO: 427406 - DNA, 122 bp, Homo sapiens
ctcatacagccttacctgatgggggcggggtggtggtactgggaaatgtggatgcacaaacgggtgtgaccacagggtacagtgcttgccacactcagctgacgtgtttctctcccacacac

SEQ ID NO: 427407 - DNA, 122 bp, Homo sapiens
cagggacatcggttccaggacaccccgggtttaccgaaatccacgcgtccgcaggacccgcgcccaccctgtggagctgcatgtaggaaatgtcggccctccacaaagtcaggttttttcaa

SEQ ID NO: 427408 - DNA, 122 bp, Homo sapiens
gggaagagaggcaaggtgggtggtgattggctgaggccggttgccggagcctggagcctgcgtcttttgtctgccttgctcctgcgaaggagcgggagacggctgcgcgccccaagcgggcc

SEQ ID NO: 427409 - DNA, 122 bp, Homo sapiens
agcctgtgcaggacaagggagccatgacgagttctgaacacaactggggagcacttgggtcgggcatgttggaaccaaacgacacaggatgaggacagcagggcagccttcgacctagagtc

SEQ ID NO: 427410 - DNA, 122 bp, Homo sapiens
aaatagttttaacagggcctaatgttccctgcaggcttatgtgttttctcaagcaccaaacgaagtggacaagctaatgaagcctaaaaaggtcacacagctgacatcagacagggcagcac

SEQ ID NO: 427411 - DNA, 122 bp, Homo sapiens
ggattacacataaaccaccggccccggcaggttagacttggtggacacgggagccagcagcgtgtcaggtgctcgttgaccccagcgccagtgtctccatccacgtccttcactcgtcaacc

SEQ ID NO: 427412 - DNA, 122 bp, Homo sapiens
gtagacagtattatcttagactgaaacacaaacactgcaaagtccattctcccttggccacgtttcacaaaagaggaaatgggacctgaaaattaggagacttacacaggattgcacagcta

SEQ ID NO: 427413 - DNA, 122 bp, Homo sapiens
tggtaacaataaaatcaaaataaacaggcacgcaaaacaaacgccaaacaaaaaatcggccgcgttacaatctactccctcggcattcccagcgcctggcagcgtccatcgatgcactcgat

SEQ ID NO: 427414 - DNA, 122 bp, Homo sapiens
agagacgtgggaggagccgcgaagtcaccagaccatctcccggcgcgggtggaattcccgcgatctgtctcattccctgcgccgccgagaaaagtgagatcccgcgagactcccagggtatg

SEQ ID NO: 427415 - DNA, 122 bp, Homo sapiens
gcctccactccgcatctctactttccgagcgcagcgcgcacgggttccggtgggtgaagtcgctcgagggcagggtgtggtcagcctgggctccagagtccctttcagcttcctggctaggg

SEQ ID NO: 427416 - DNA, 122 bp, Homo sapiens
acaacacgagcggtttgaaagaccttggctttgacttccctgtacctgcctccaaacacacgtgggggcggggtggggtggggggagatattgccccccatccccgttgccttccgcgacgc

SEQ ID NO: 427417 - DNA, 122 bp, Homo sapiens
cccgacccccaccctgtatcccaagttgatccaagtcttaccaaatcccatacttgtccccgccagacttgtcatttctccctgagcagactccccagacattaaaaagggcagtcctctcc

SEQ ID NO: 427418 - DNA, 122 bp, Homo sapiens
cttcccagtcaagcctgggtaggtgtcattcagagcctgaagtctgggaaatcagacccacgtagcctttgtgctgcatatcttacccccagcaccaccctctgctcttcttcctttatgat

SEQ ID NO: 427419 - DNA, 122 bp, Homo sapiens
gcgcgcgtgcgtgctggcgtgcgttcattttcagcctggtgtggggtgagtggtacccaacgggccggggcgccgcgtccgcaggaagaggcgcggggtgcaggtcagcgccagcgggggcg

SEQ ID NO: 427420 - DNA, 122 bp, Homo sapiens
agcttgtgtgctcccccctggccagagcaatgactggcgtctgtgtgcagacacctcccgcggccagcatgactcaggccttggagtcctggggttcggcctgagtaagccacgcatgcagg

SEQ ID NO: 427421 - DNA, 122 bp, Homo sapiens
caacagataaatgggcagaggacttaaagagcagcttgcaaaacatgacatcccaatggccgattaatacgtgaaaacatgttcagcctcagtagtcatcagggaaaggcaaattaaaattg

SEQ ID NO: 427422 - DNA, 122 bp, Homo sapiens
tacatcatttagcgaggaagcccttatccgtgatccacgccgctcttcccacaccctgaccgcatctcctgtgcctggcactgtcccacgagggctgagggtcctctggcctcagccacatg

SEQ ID NO: 427423 - DNA, 122 bp, Homo sapiens
cacgcgcctcccgccggcccgggagcccggcgtaggagctggcaccactagagaagggctcgcatagctggactgagaccccccgccctcgcctggctttggacgttcagccaagccacggc

SEQ ID NO: 427424 - DNA, 122 bp, Homo sapiens
tcgcttttccctcctgaattcttggagatctgtccttggggcaggttgagccaccagcttcgtgtgtgtgtgtgtgtgtgtgtgtgtgtgtgttcgtgtttgtgtgggtgtttgtgttcgtg

SEQ ID NO: 427425 - DNA, 122 bp, Homo sapiens
tcctcctgaggagaagggaagatatgtgtcaatatgcctgctctataatcttgacatggccgtcccccaccctgggaccccagcatgtgctacatggcaggctcaaaggggcaatgatcacc

SEQ ID NO: 427426 - DNA, 122 bp, Homo sapiens
agtgctttggaagcactttaaatcctggacattggattcaggtcatttactgtccgacctcgttattcccagtttccgcttctgccctgaaccccacttcacagggctgattgctaggctgt

SEQ ID NO: 427427 - DNA, 122 bp, Homo sapiens
ttttcgttactgccagaatgctctttctaaaattaaaatctgattataaaaatagtcactcggaagcccttgcaatgggtttccattgtctttggggtgaatctggtttctttagcatggca

SEQ ID NO: 427428 - DNA, 122 bp, Homo sapiens
gccaccaccatcgtgtgcttgcgtttctatcctctgcttttttcgtggttccctcctggccgtacacaaacgtgctgtgctctggtctctcccatgtgggaataaatccatccgatcacctg

SEQ ID NO: 427429 - DNA, 122 bp, Homo sapiens
aggctgccgctctgggaggaggggccgcggcgatccacctgaggtcctcgcgagcggcgacgtcacttccgctggttcaagcaccgcgagactatacctagctgcccacccgttactgtttc

SEQ ID NO: 427430 - DNA, 122 bp, Homo sapiens
ggctctctcaccatttctctcctgctgggcagaaagccaacctggacaccctgaaatccacgcggaatccgaaggatccagctctcctctaccagtgggagaaactgctgagggagctggca

SEQ ID NO: 427431 - DNA, 122 bp, Homo sapiens
ccgccaactccacatcctggctcctatctctgccttccaggcatctcccagctgcacgctcgggcccggctcagagccctaagccctgcctcccggtcctggccgggtttcccagaactgca

SEQ ID NO: 427432 - DNA, 122 bp, Homo sapiens
cctcccttaaaagggcaaaagcacaaggctcagccctggctttcccagctcctctggtctcgctgctccacggacgtgtgacgtacgctggtgaaacgaagcccgcttgaatgggggcttca

SEQ ID NO: 427433 - DNA, 122 bp, Homo sapiens
tccccagtcctagctcatctgcataaagctccaattaacatgtttttcctttgctatttgcgatcccagaactcgttccccaccccgagcccgtttcccgccgcctcctcgcccctgggagg

SEQ ID NO: 427434 - DNA, 122 bp, Homo sapiens
gtcgcgaacgcgcgggacttcctttccctgcccaacgttttactattaaatagatggtttcgtgtgtttatataaaagctcacttcaaaataaaagaaatgatagcaagtgttttctaccct

SEQ ID NO: 427435 - DNA, 122 bp, Homo sapiens
aggatggcagtgcccagcttacatatcaggaagcagcactgacgagaaaagcggccttctcggcccagaccctccagtgcttccttcagagtgggagcctgtgctgcacttcaggggtctcg

SEQ ID NO: 427436 - DNA, 122 bp, Homo sapiens
ccctggttgctcaatctgacttgcaggccctctactggctcctcagaaaagggtctccagcgccaaaagaatctcctggggtgctcaagcccccagccctatgcaggatggagaatatcttg

SEQ ID NO: 427437 - DNA, 122 bp, Homo sapiens
ccccagactcagccctcacccgattttgagaaaggctgaagttgcaggccaggtcaggggcgttcccttcatgtcgcggccgcagtagctcctggacgcctccccgaagcagccgtccagcg

SEQ ID NO: 427438 - DNA, 122 bp, Homo sapiens
caaaccttgggaattgaaaccagggatgtgtggatcagccgggagtgctggctctcccctcggaagctgagtcaccgacctggctggtttatttaatcgcttggaaagtggttagactgaac

SEQ ID NO: 427439 - DNA, 122 bp, Homo sapiens
ccggccggggcctgggggatgtcacggattggtcgcggccgcgagcgcagtggtgtggagcgcgccgggtcccggagccggctgtctgagggatggacgagacgagcccactagtgtccccc

SEQ ID NO: 427440 - DNA, 122 bp, Homo sapiens
attggctaccaggaacttgcttattaggtctgttgacatggcaatgccagagcactgtcacgtaaggcagagattggagctaagattctaaagttgtggttcttactttgaaaggagataaa

SEQ ID NO: 427441 - DNA, 122 bp, Homo sapiens
ggctatctcctttctgcccactcttttcttgggcttaatcctgtggtgttagcagcctaacgtgggcaatatgtattccgggcctcattgaaattcaaggcatcattttataagagagaggg

SEQ ID NO: 427442 - DNA, 122 bp, Homo sapiens
aaactgaggtgtataggttaaccaagttgccagaggttacataaatagtaagtggcagagcgggactcaggatcccaagcggtgtgattctggtacccaggctcttaaccactatgcaaact

SEQ ID NO: 427443 - DNA, 122 bp, Homo sapiens
tggaagccttttgagtctagagaagtctttgatgatgttctccttggctgctgcccataacgttttagtccaaatcagtagctgtgactgaacttggcctaactagaagtacctgttgtaaa

SEQ ID NO: 427444 - DNA, 122 bp, Homo sapiens
ggggtggagaaagcggtgggatccgtgtcctgggggaagcgcaggagcgatcagattgaccgctgctatatggacaaggttaagcctggagagcgactgcagctatttactttggagttaga

SEQ ID NO: 427445 - DNA, 122 bp, Homo sapiens
gccacacgatttgagtcacggggcaccaaggaggtatcacagaccaggcaggagcccagccgactcacatgaagctgcatgcggcgtgcacgcctgacgggggctggcagagcccacctcgc

SEQ ID NO: 427446 - DNA, 122 bp, Homo sapiens
ttaagccaactcacagccatccgtgttagacctgcaagagaaagtgtatgagcagaggcacgtggctgcctcaggtggaagcacatcttcatacatcgagtgcaccagcagaagccctgatg

SEQ ID NO: 427447 - DNA, 122 bp, Homo sapiens
tgtgattctccgatttgctgtgagtgggatgtctgaggattactgtgtctcaccccccttcgggtctgttagcagccttggtggaaaatctcttctgatctgaggaaatgtcattttagagt

SEQ ID NO: 427448 - DNA, 122 bp, Homo sapiens
gacactgaaggggccttccacaggggaggtcagcatgcacttggtggccggagacagccccggttctggtcctcacctgcccgcaactgccttcatcattccaggtgagtcaagctagggta

SEQ ID NO: 427449 - DNA, 122 bp, Homo sapiens
aaggatgtgttcactagtgttcattaggtttaagccaaatggatcttagtagagatcttacgccattcagcaaaaggattatcacagaagcatcacaacaggcgcagacttaaattcaatta

SEQ ID NO: 427450 - DNA, 122 bp, Homo sapiens
accacccaagtgaaaatcaaagagtcttctgtcacaccacagaattgtgcttcaaaaacacgtttatcaacaggctgctgccttgcgtggaaaaccaagaagcagtttaacaagggtaaacg

SEQ ID NO: 427451 - DNA, 122 bp, Homo sapiens
tgagctgtctgttgaacagaattggtcttggagtacgatgacataaagtagaatggatggcgtgtttgcttgtttctgagagcttaattgaattcgactactgagttggtaaggacctactt

SEQ ID NO: 427452 - DNA, 122 bp, Homo sapiens
agcggccccggtggatgctaagggcttcgggatcgggagagtccaccacgcctgcctgctcggctgagaatcgccatggtaatccccgtctccctaaagtacccggggccagggcgcgcgcc

SEQ ID NO: 427453 - DNA, 122 bp, Homo sapiens
ctggcggggcccccgaggttggtggagtggcgggcggggccgagctggaggctggtggtgcgctgcctactccgggagcggggccgggtccctgagcaacgacgggcttggaagagtcctgc

SEQ ID NO: 427454 - DNA, 122 bp, Homo sapiens
gtctgacccttgctgcatatgatgacttatgtacagggtcaacctattcatacagatatacgctttgatattcaaactttcagtgtaccagtaaatgagcatgaaatcactgaaaaataaaa

SEQ ID NO: 427455 - DNA, 122 bp, Homo sapiens
agtaggtctcagactcattttacccagcccctacttaagatggagttgctctggtttacacgcctctgacaatcacgatatgtggctgaatgagtgagtgagtgagtgattgagtggagaat

SEQ ID NO: 427456 - DNA, 122 bp, Homo sapiens
aactgagtcgagtcctcagtggccctgtggagtcttgcaggtgaatgctccagtaagcgacggccacccccgaggtgttcctgagatgtagagataattccagctgtgctgtgtgctgtcta

SEQ ID NO: 427457 - DNA, 122 bp, Homo sapiens
acctgcccggaaaggttcctccccctccctccgctccgggagcccggactttgcccggcccgtcccagcccaacccacctgcgccctcgggacccacctgcgcccccgggacccacctgtcc

SEQ ID NO: 427458 - DNA, 122 bp, Homo sapiens
atggcattgatttatgtggtcagttagcacctcggttccgctgcgtgtggtgtagacttgcggcctagaggtcagggtgcatgctggacggttcgttcaagaaggcctggggacactgtttg

SEQ ID NO: 427459 - DNA, 122 bp, Homo sapiens
aatgagtgaggacaagggcttgcgcttgtcctccactttgtagctccacggcgaaagctacggagttcaagtaggccctcacctgcggttccgtggcgacctcataaggcttaaggcagcat

SEQ ID NO: 427460 - DNA, 122 bp, Homo sapiens
cttgttgaggtggcggccggaggactggaagcccggggggaaaggtccccctgctggccccgccgggaagagcactgcgtccccctaggacactgacatgcctgccctgtatgtgcactgca

SEQ ID NO: 427461 - DNA, 122 bp, Homo sapiens
cctagagcgcttcaaattgcaagcaaggaggccgcgaggcctgacgggatttgtagtcggcgctagacgccggcgcgcacgcgcagccggggccggggcggggcggcggcactgcggtgaaa

SEQ ID NO: 427462 - DNA, 122 bp, Homo sapiens
ctagaggccggaccaagttcgcgcgaggtgttcacagcctaggcgccccgggcttggcttcgtactctgcaacaagccaagctcccttgccacgagtatatcagcaacttcagaaataaaca

SEQ ID NO: 427463 - DNA, 122 bp, Homo sapiens
cagtctggccgccacccaggtggacaggtgggtgtgcctttgagtgcgacctttctctgccgctggacagttctgcaaaccgaaacgagggaccctggcaggcggaacgtgaacggctcggg

SEQ ID NO: 427464 - DNA, 122 bp, Homo sapiens
agcaattctcatgcctcagcctcccaagttgctggaattataggcatgcactatcacacccggctaatttttgttatttatttttagtaaaggcagggtttcaccatgtagcccaggctggt

SEQ ID NO: 427465 - DNA, 122 bp, Homo sapiens
ggaggctgaggtgggaggatcacttgagcccaggaggttgaggctgcattgagccatgatcgtgccactgcactccagcgtgggtggcagagagagattgcctcaaaaataaaataaaattt

SEQ ID NO: 427466 - DNA, 122 bp, Homo sapiens
acaacggccacgtgagcgactgcctccccaggctccggtgtcccccaaggcctcgagtcccgaggcacccgcctgtccctaagaggcctgtagaatccccaggcccccggctgtccccaggc

SEQ ID NO: 427467 - DNA, 122 bp, Homo sapiens
agatcggtttcctattctctcacttgctcttggttcacttcttgggaagtcatgtctggacgtggtaagggcgggaagggtttgggtaaggggggtgccaagcgccaccgcaaggtgttgcg

SEQ ID NO: 427468 - DNA, 122 bp, Homo sapiens
acctgacttgcagatggtgaactccatggcacctcccgagttgagcagcctctgcaccagcgtcttggccagcacggtgggtgtgaagagcacgggccggcggcgctcgcagtagaaggcgc

SEQ ID NO: 427469 - DNA, 122 bp, Homo sapiens
ggtgttcgatagggtctaagattctgcatttctaccaaatgcaccccccagggaggctgacgctgctcatccatggaccacactttgtgtgccaaggcactagaaaacactacaaaagtcaa

SEQ ID NO: 427470 - DNA, 122 bp, Homo sapiens
gatgattgagaagagtcagctttgaaaggctggatgctgcagtgctctgcatctgaatagcggagcctactatttcttccactagaggacaccatttctccactactaagtctgtagtcgtt

SEQ ID NO: 427471 - DNA, 122 bp, Homo sapiens
tcaccgctggcctcaacacccctgggccatgctccctctgctcttccatccccaccacaacgaagaaaggtatgaccgcacgttatatatagtaaagaagaactttgaggccgcaggacagg

SEQ ID NO: 427472 - DNA, 122 bp, Homo sapiens
gttacctaggactctgaattcattcgtgcattcagaaatatgcagtgagcgcctactttgcgcgagacactcttctaggatttagtgatgatgtagtgaacaaaaaagacacaaatccacgt

SEQ ID NO: 427473 - DNA, 122 bp, Homo sapiens
agtaaaagccttctcagatctattaatcaagtatttattgagcacctactacatgctaggcgtggttgtaggtacttaggatgcagcagtgaacaagggacaaatcgttgccatcgtggagc

SEQ ID NO: 427474 - DNA, 122 bp, Homo sapiens
caagcgccaaagggcctgtttgccacacgtggtggtcagtgggagccacgtgagcttccccgggggcctcccgcctcagaggagggagactgtgctggccctgtgtcctctcgggggctctg

SEQ ID NO: 427475 - DNA, 122 bp, Homo sapiens
aaaagaaagaaaagaaatgcaagaaggaaatcttgccagctgcgcatgccggaggggctgcgtcgtcgcgaccaggaagcaagcgaagcctacccagctggtttcctgcctgagtcaacggt

SEQ ID NO: 427476 - DNA, 122 bp, Homo sapiens
ttttgttgttgctgttgttgttgctgctgttttttggttttacaaaaaatcatttcagaacgatcatgggctgaaattggatgaggcaaatagggaattgcctctacgaattctccttcctt

SEQ ID NO: 427477 - DNA, 122 bp, Homo sapiens
tcatgagtgattacactattatgcgcacatccagctggagttgtgatggttttcctgaggcgagcgatagtagctttattggttgacagctgtatcagtcactcgacacaaccccctcaagc

SEQ ID NO: 427478 - DNA, 122 bp, Homo sapiens
ccctcccgctcacacccggcccggactcacctgcagctgcagcagcccctgcacctgtagcgtgaagaccctgctgttgctctccaggcctgagacggcctccaggcacctgaacacagccc

SEQ ID NO: 427479 - DNA, 122 bp, Homo sapiens
atctctccacccccaattaaaatgaaagtgcataagttcagcaagaaaagctctgacttacgctgttcaccaatgtcttctcagctaataggacgcttaattgagttcagcatgttatctat

SEQ ID NO: 427480 - DNA, 122 bp, Homo sapiens
gacatggaaagtaaattgagtctccgtgggggagtgagacagggagtgaggggtgttggacgcggcacgggaacctggccagagtcagcggacccaattggctgctctctctcagatgcagt

SEQ ID NO: 427481 - DNA, 122 bp, Homo sapiens
caaatggctctgcagccacaacccagaaaaccaacagtctgatggaagcacagatctctccgcaattctgcttccattctctcaagctgggtacactggcctggcttgacctggaaatcatc

SEQ ID NO: 427482 - DNA, 122 bp, Homo sapiens
ccttcaccctcactggatcttggcccaaccaaatcccttgttttgtattttcttgaaccccgaccactaccccaggtttctaactttgtaacttgcttctgatgtgggtccctaacctataa

SEQ ID NO: 427483 - DNA, 122 bp, Homo sapiens
tgtgacacatacactcatttctacctgaggagtgaggatgcagggactctacgtgacccacgcgctcatttccacctgatgcaaaggaccctggagtgaggatgcagggactctgtgtcacc

SEQ ID NO: 427484 - DNA, 122 bp, Homo sapiens
acgctcgtcagatccaagcaggcgggactggcctggagcaaaaagaaagagagaggagggcgtaaggatagaccaaggaagaggggctggggggcagcctgggggcatgaaaagtggccagg

SEQ ID NO: 427485 - DNA, 122 bp, Homo sapiens
cccttcttcctttcaagagccagcacaatgtcattttcccttggaagccttatttcattccgtagacttccaggccaggccactcctcatgaccactcccatagttgccactccacagttct

SEQ ID NO: 427486 - DNA, 122 bp, Homo sapiens
accctcagagggacctctaaatctattcactaaagacacccttcagactgatagctttcccgctttctttcaagaatgaggttaaaagtaaaatgcttgacaaataaactagattgaggttt

SEQ ID NO: 427487 - DNA, 122 bp, Homo sapiens
cagttagtccgggcccggggggccgccgtgcgcgcccgcgtaagccgccgccgccgcaggcgcagcaccctcgtccgcacggttcccggcccagtccacggcgccagcccgcccgccgctgc

SEQ ID NO: 427488 - DNA, 122 bp, Homo sapiens
ctgaagagactggtgtccaggcggctgaaggtgcctgaggagcagcagcacctgcttttccgtggccagctcctggaggatgacaagcacctctctgactactgcattgggcccaatgcctc

SEQ ID NO: 427489 - DNA, 122 bp, Homo sapiens
tcttcatggcaggccaagaaacccaggaacgcgatagaccctggctgagtgagcaggcagcgtcatcagggccgccccgcgtgagccctacctgatgtgtctaagccaggctctgtgctgac

SEQ ID NO: 427490 - DNA, 122 bp, Homo sapiens
cgtttccttgcctctgctgcagcctgcgaggagcagctgggcagaaagactgtgcctttacggtggtgagtcttccgatgcccaagcctcaccccagaccgatgaaatcagaatctctggag

SEQ ID NO: 427491 - DNA, 122 bp, Homo sapiens
gacagagaaacctatgtccagaagacaagttacgaactgaaaaatctgcgagtacccacccggcggaggacgagtggagcgccccctgccgcccctggtgttagtcaaacgacaccagcttc

SEQ ID NO: 427492 - DNA, 122 bp, Homo sapiens
atacattcttctctctgtagatataccacaagaccatgagtcaagtgttgcccgaatgtccgaggcccaggtcgccctgagaaggggtggggacttcctgggtcgctgggtccctggcgggg

SEQ ID NO: 427493 - DNA, 122 bp, Homo sapiens
gcgaggtatgatctcagggttatcgctatttcgtagattgttgcacatagattgttcagccgggtgcgaagacaccagcagtctcccgttctgtttctggccagtctgaatgttctgtgtct

SEQ ID NO: 427494 - DNA, 122 bp, Homo sapiens
aatcaaagttgaagacccttggggagccgcggcggcgggtcagtggcacaggaaagctgccgtggctgcggatggcggcccgggtgctggtgggcttctgcagtggggtctcgtcctcctca

SEQ ID NO: 427495 - DNA, 122 bp, Homo sapiens
gactgtttgaatcattttagaaaccaactgataccaacatgaagtagcatatgactctgccgtctgttaacttacaagccagtttcgtgcctgaccagtggccaccagtatttgcttaccag

SEQ ID NO: 427496 - DNA, 122 bp, Homo sapiens
cctccccgcgcccacccacccctaccttccccctcattctgcagcgaatgtctgcgacaacgagctcctgcactgccagaacggagggacgtgccacaacaacgtgcgctgcctgtgcccgg

SEQ ID NO: 427497 - DNA, 122 bp, Homo sapiens
tcctcgtctacaccagcaaagccactgacaccttggggatctcaaggctttgtaaaagaacggaaggaaagaaagaaagagagagagagagaaggaaagaaagaaagaaagaaagaaagaaa

SEQ ID NO: 427498 - DNA, 122 bp, Homo sapiens
catttggcttcccagcaacatctatactggtctcttcctctttactttcctttttctgctcgtttgctttctgttcttttgccaaaagtcgataattgatgcccatgccaatgaagagatag

SEQ ID NO: 427499 - DNA, 122 bp, Homo sapiens
tgcaaattcacccaagagaggagcccaggccagacttctgtttttatggacaggaacattcggtcctcagcagacttgcctctgaattcacaggctcctcttacaatgcaagccacaattct

SEQ ID NO: 427500 - DNA, 122 bp, Homo sapiens
gtgctatgttcagctcatggttagtacaaggtgtttctaattgcctttctggattctcaccgcctgaagtacaacctcccatggtgtagcacagttcacatctaaaaccgtgcaatttccat

SEQ ID NO: 427501 - DNA, 122 bp, Homo sapiens
tgccaggaacaacaggaaccaagcttcctgttctttgttctgtctcatgggatcagaagacgtgtcattcccgaattcctctgaggcctttcagcaacttacacgacattgtcaagggcagt

SEQ ID NO: 427502 - DNA, 122 bp, Homo sapiens
tgtctctgcggcggggccatcctgggcactgcagggccctgccaggagctccctccaagtcgtgacaaccacggatgtctccaggcctcacacagggacccctgggggcagaatcaccccag

SEQ ID NO: 427503 - DNA, 122 bp, Homo sapiens
agtcggagtcaaattattcgccatggagacgctgtcagtcactggtaacccgagcctcggcgggccgggcggctccccccggccggctccgctgacagatcgccccgctccgcgcagaactg

SEQ ID NO: 427504 - DNA, 122 bp, Homo sapiens
gatgcccttcaaaggcctttctagctttgacattttctggattgatgatgcaaatttgctcgaacactagtttgcataccacttgccgtctttctatgagcaatacaaagttagcacaagtc

SEQ ID NO: 427505 - DNA, 122 bp, Homo sapiens
tcagaattaaagccatttcccgcacgaggctgggaggaaatgagagctctcctggccctgcgcgctgacaaaaggccgctgcgcggtgcccacagcgccccctccagcaggccgcgccggcc

SEQ ID NO: 427506 - DNA, 122 bp, Homo sapiens
ctgccggtgggcggggcggggcggggcggggcggggcggggcccgaagggccaccgcgcccgcctcggacctgcgaaccgggcaggattgccccttgcgtcccacgtcctgaccggctgggc

SEQ ID NO: 427507 - DNA, 122 bp, Homo sapiens
caatgggccaagagaggctcccgggactggattgtcagacatcttacagggcctaggtggcgactttgagatgctgtaaagccaaaaccaggaggcttccacccagcccatcgagagcagct

SEQ ID NO: 427508 - DNA, 122 bp, Homo sapiens
gcggtggtcacatgctggggatccttttcttgcaggccacccactctggtccgtcctctgcgatgcccgccaaggtgctgtttctcagttctttgggctgcagggcgctgcgggggaccctc

SEQ ID NO: 427509 - DNA, 122 bp, Homo sapiens
tatttcctctgcttgaaaaagggtaggtgacacaatccccattatcaaaaggcaatgttccgctggagaggcgccccctttagaccaacaaagcactttaccagttcactaatttgaattac

SEQ ID NO: 427510 - DNA, 122 bp, Homo sapiens
cccctacgccaagctgggccttacctagaggagtctgaaactcaccactgtcctgagctacggcaaaagaaaaataatagtataatcttatttgatctgcattatgaacaggatatagagta

SEQ ID NO: 427511 - DNA, 122 bp, Homo sapiens
aaattcagaaactgcgtatatgggcggctgacagtaattcttcgacactgggaaacataacggattcaaaagaattcttcatctcagattcctctaaaaccaagtcttcaagaatgggagtc

SEQ ID NO: 427512 - DNA, 122 bp, Homo sapiens
cattgcgggggaggggcggccgaccccgccggccgggtgaagctggtgaccgggggaagacggtggttgaacataaccataccctggggaaaggtgggttccatctctgccctcctgccgct

SEQ ID NO: 427513 - DNA, 122 bp, Homo sapiens
cggggaccactggggagctgccctcagtcagctctctgccccacgccggaggtcctggcgcggcttctttcccgaactagactggcgactctgggccaggccccaaggaccgccccggcctc

SEQ ID NO: 427514 - DNA, 122 bp, Homo sapiens
atcttttttctttactctaatcccatgacagattataaataatcttaatagcagtattcacgtttgcattctcgcatccgtggcatggagtcctacacacaataggcgccctaagaaagcgt

SEQ ID NO: 427515 - DNA, 122 bp, Homo sapiens
ggtagtgaggttcataaacggttccacctacagcttaaataattccttttcttttgatctcgttaacagtttgagaatattgttcctttaaaaagtcatccctctctggctgggaaggagct

SEQ ID NO: 427516 - DNA, 122 bp, Homo sapiens
ttttttaatttgaaggaacactgatgaagccctgccatacccctcccgagtctaataaaacgtataatcacaagctctggagagaaccatttgttcggccgcgcggggcgggggaccggggc

SEQ ID NO: 427517 - DNA, 122 bp, Homo sapiens
ccccgcgtcatgactcatgctgtttcctgagccctggtgacacatgctccctcccggacacgccctcagtgcggcactaacccaccaccttctagaacacgaagcctcatgggctctggtgg

SEQ ID NO: 427518 - DNA, 122 bp, Homo sapiens
tcaggagcaaagacacgtcagggaaatcgtaagtagtccagagggcggtaccactgcctacgtgtggaacaaggggaggaaagggagagacaacaaagggagaggaaagaaatgaagttagc

SEQ ID NO: 427519 - DNA, 122 bp, Homo sapiens
accttttggctctcgtatgtgcgcatgcgtctggatccggagccaggtgacccgctcagacgtggaccatgtgcgggggaggggggaaaggagccgcgaagggggtggtagacggaacaggt

SEQ ID NO: 427520 - DNA, 122 bp, Homo sapiens
attgcaggatgacattccacacatcctagcccaagcacggaaaatcttgttcgtgattgacggctttgatgagctgggagccgcacctggggcgctgatcgaggacatctgcggggactggg

SEQ ID NO: 427521 - DNA, 122 bp, Homo sapiens
tgaaaaggggttgtgcgagggtctcacccacacgcttttccagcttgcccactgcgcaggcgtgccccgaaagaccagcttgaacaatgaagaggacctcggcgttaggtgggaccgcaacc

SEQ ID NO: 427522 - DNA, 122 bp, Homo sapiens
cctttcctagtcaaagaaaggggtgaaagaaagcacctggaaaattgggtcactcccacccgagtactgagcttttccgacgggcttaaaagacggtgcaccacgagactatatcccgcacc

SEQ ID NO: 427523 - DNA, 122 bp, Homo sapiens
gcatgcccaggaaggagtcgggacttgtttcttctgtacccatacatcccctgtggcttccgcctcctcctgggctttacggggaggtccagagggaagaggctgccaatttaagaaggaag

SEQ ID NO: 427524 - DNA, 122 bp, Homo sapiens
gtagctgactttgcaggcaggggccttgcccacgcagcctcggcagaggcccccgcacttcgcgaaccccagcaatggccccttccagacgccacgtccagctaccgcgcgctcacacctgc

SEQ ID NO: 427525 - DNA, 122 bp, Homo sapiens
aaccgggtctgtaagctcccaagtgcagattctcaggtctagcggtgacattggacaggacgagacatctccaagcctcggtcattgcctcttaaaatctcacaacgtgtttatgaggcttt

SEQ ID NO: 427526 - DNA, 122 bp, Homo sapiens
tccggatccagcagcaagatcccaaagcaaggaaagaaagaaaaagcgagggggcgggggcgctgcagaatccagcgtcctcccaagtcctcctgtgggaagacagcagcgctgctactggt

SEQ ID NO: 427527 - DNA, 122 bp, Homo sapiens
agcccccacccaacactgaccccgcttgctcctcaaaactccgccttccccggtaagccacgccccctgatgggccctagctccacccccttgggtagcactggcttctgctcctacaaagc

SEQ ID NO: 427528 - DNA, 122 bp, Homo sapiens
cctcccccagcctcgctgctgccttgcagtctgatctcagactgttgtgctagcaatcagcgagactccgtgggcgtaggaccctccgagccaggtgggggatataatctcctggtgcgcca

SEQ ID NO: 427529 - DNA, 122 bp, Homo sapiens
gacagggatgcccacaaaaatggactttttcggggactcgggtcccctccggcgcccccacgcacctcatcagcgaccacacccgggccaccatggtcgctcggatccacgcgcaaggacac

SEQ ID NO: 427530 - DNA, 122 bp, Homo sapiens
aaagtttttggaatgatgaatatgtttattattttgactgtggtgatggttttacaaatgcgtatcaaaagtggttaaattgtacacttgaaatgtgtaatttgatgcatgttaattatatt

SEQ ID NO: 427531 - DNA, 122 bp, Homo sapiens
cttgtcaatgctgtgaacacgagggggtgctgtggaggtggcggggaggatgctatagggcgtgttcttcacgcgagaaattctggctttgcagcgtccaaaggccttagaattctaatttc

SEQ ID NO: 427532 - DNA, 122 bp, Homo sapiens
ctgacttcaagaatgaagccacgaaccctcgcggtgagcgttacaactcctaaagtggcacgcctggagtttgttccttttgatgtttagatgtgttcagtttcttccttctggtgggttcg

SEQ ID NO: 427533 - DNA, 122 bp, Homo sapiens
ggaacggccgtgcctctgggatccgccttcgctgacgccgggcacctacctggacgcgagcgagcgagatgcccaaccccaaaaacagcaaaggcggccgcaaaaacaagcgcgccaacagc

SEQ ID NO: 427534 - DNA, 122 bp, Homo sapiens
ctcggctcgcgcgcgccgcagccgccgctgccgctgtgattccatccatcttgaatttgacgtcatcccacaccagggatgaggtcatcgcaggcatcgctcgtcacgtgcgcggcactctg

SEQ ID NO: 427535 - DNA, 122 bp, Homo sapiens
cataagatcttcattaactccttctttctctgctaattaacacaaaaagaatgagttgaacgtctgacaggcaatgactgacccactgcttggtggttaatggaatgcaaatgacatctaat

SEQ ID NO: 427536 - DNA, 122 bp, Homo sapiens
tcgccgccgagctcgggcagcagggtggggcaaacgcggagcacggaggacggggccgggcgacctgggcaccagcaggacccgaggccaggagccaggggcccagaaggtgagggcacccc

SEQ ID NO: 427537 - DNA, 122 bp, Homo sapiens
caaacccctcccctttgattttggctaagagagacccttagaaagactgccctttctggacgttgcaaactgtgacatataaaagctgttagctgctcctctagccagcagcattcaaacct

SEQ ID NO: 427538 - DNA, 122 bp, Homo sapiens
ataagttaacaggacccccttcttcctgggaaagaggcaaaattgcacaaaattgagaggcgagcaactgtaagatgatggtaccttctaattccaatagctttttacaatagagaacccag

SEQ ID NO: 427539 - DNA, 122 bp, Homo sapiens
aggctccaggctggtcctggcactgcccaccattggcacagggagagcttctgcactcatcgatatcctcctcacatcgggtgccggagaatcctggtggggcggaagtgggtggggagagg

SEQ ID NO: 427540 - DNA, 122 bp, Homo sapiens
caccgaggtccccgtgtgctcagggcagccatcatccgtcaactacagcactttgtgtgccgcatgcggacagggtttcagaatctgtgtcagcccagcactcggggcctggcggtcatcgg

SEQ ID NO: 427541 - DNA, 122 bp, Homo sapiens
ccaggttaatgtgaatgtttggcggcaacagctcacaccaaccctgcccttttggttcagcgagagtcagagacaacagaaactgtctcagaccccaggacacaacttctagaattggattg

SEQ ID NO: 427542 - DNA, 122 bp, Homo sapiens
ttatgatgcctgttttaaaatccttgtcagataattctgacacctgactcttcctggtgccgcccttagttggttgtctcttactgaaatggtcgtgtccctgggtcttcatatgatgagtg

SEQ ID NO: 427543 - DNA, 122 bp, Homo sapiens
tttttgtggacgccaaggttctgtcgagctgttagggtgcaagttaagaagccagaatggcgggctgaggggagaaatgcccgcatgttacaactctgcaggtgtacacacgtggacaccat

SEQ ID NO: 427544 - DNA, 122 bp, Homo sapiens
agaggcggagtggccactcagcacagagccatcagcgaggtcatcccagccaaggagacgcgcgaatgtccagggggttacatggtggaggctccagggagggaggctgggaggccacttta

SEQ ID NO: 427545 - DNA, 122 bp, Homo sapiens
tccacccccccttggctcatttccggccgccgccgctaccgctagcctgtaaggaggattcggcagagggaagaaacaacagccgccatcttgtttgtgtgctaggctgggggggagagagg

SEQ ID NO: 427546 - DNA, 122 bp, Homo sapiens
gccgtcttcacctcaacttccctgggagccgtcctgctttgcttacacgtatgagctccgcgtgcttggcgacccttgagggtgatagagggccgggtagaggggcttctcttctacacctg

SEQ ID NO: 427547 - DNA, 122 bp, Homo sapiens
cagagggactgcggcttcctgcgcagcgccccctaccggacaggcggcgggaaaacgccgcgcaactcagaccactggagcggagtagtatctggagtttctgtaacatcctttcccttttt

SEQ ID NO: 427548 - DNA, 122 bp, Homo sapiens
aggcagcaactcagtaaccgaacaaaaggcgaagagacctgacagccaagccacgcccctcgccacctcgaagctccgcccctgggggagacgcccaccctctggtgcgagctcactggcta

SEQ ID NO: 427549 - DNA, 122 bp, Homo sapiens
gcttctcttgagctatactcccccacaggctgaattatagctctcctaccagtcccacggcgctgaatgatgtcatgggatctgcagttcagcgagatgaaagggataaagcagaacccgct

SEQ ID NO: 427550 - DNA, 122 bp, Homo sapiens
tcaaactgctgtaggagctgccaaacgcttctctccatttctggccgcggggccgcggaccgccctttaagtagcccgttttatccctggcagaggtggagccttaggcaggcctagagact

SEQ ID NO: 427551 - DNA, 122 bp, Homo sapiens
tggggaagggccctgggcaccgggcgcagtcagcctgagagcgctgaggcgccagcaccgcgggccccgccgtccccccaggaacccgcccccgcgcagccccacgtcgcccggagagcgcg

SEQ ID NO: 427552 - DNA, 122 bp, Homo sapiens
gtttaaagaagaaatttttcataggcttcttgtttagtagcacaggccaaaggcctttgtcgtcgtcttgcagggtccttataaatgtgtaagacagacagcatttactattgagtcctaca

SEQ ID NO: 427553 - DNA, 122 bp, Homo sapiens
gctgtgtgcgtctgagcttcggaggcagcagggtctgaacattttggactcaatgctgcacgactcggccctcccagctttgcaccagggagcagctgcgaactttggggctcctcggagaa

SEQ ID NO: 427554 - DNA, 122 bp, Homo sapiens
agcagagacctttggcccaagttgagtaactagtttggtttattctgcatcctgcatccccggatgaagcaaacttttgtctttttccatctggaactcttaaagtggtgagatcatcaaaa

SEQ ID NO: 427555 - DNA, 122 bp, Homo sapiens
ccggaacaggtgtcggccaatcagaagccaggcttgaaccgctcgcccatgtcccgccggcggaagagactctccgcggccacgccccgagccctcgaatgcgagccaatcgttgctcggcg

SEQ ID NO: 427556 - DNA, 122 bp, Homo sapiens
ttgacccagggccagggtctctccgcctttgcggggaaggggtggggaagtgtgtaggagcgtgggtaatttgggtaggaaaaggcagggagcaccctaccagccctcctaggatacaggct

SEQ ID NO: 427557 - DNA, 122 bp, Homo sapiens
gattaggtgaccttccttgaagagccacgggtttcccatatcgaaatgctattcattacccgagtcacctaggttcttacaaaggaagcgagaaaattgcttttgttgggccatgccccttt

SEQ ID NO: 427558 - DNA, 122 bp, Homo sapiens
aagcttcagagaaagaaagtcgtcagagccagggcccccagttgtggaagtttctatatccggtaaattggatccattccagggcagaatcatttatcaacaaatgaaacaccagccacttc

SEQ ID NO: 427559 - DNA, 122 bp, Homo sapiens
atgcgattgggctgtacctctgtctgtctcctgcgcgatgtcccgccccgggaggtgtcacggaactcagctgatataagcccgggatcccgccgggtcaggttctctgctctggacttggg

SEQ ID NO: 427560 - DNA, 122 bp, Homo sapiens
gacacctcggggtgcccgcccacgccttctcggccgcagcggcaggggctgggccgcggccgcccccaggacacacccatccaggaggggctgtcatcgtctaggtctctgcaggaggaggc

SEQ ID NO: 427561 - DNA, 122 bp, Homo sapiens
gcttctgcattgaaatgtgcctcctgaatgtgtgcagggagtgaggcttcctggggccatcgttctgtggcagatgcattactgaaggccagcatgaaattgtgcaaagcacttcctcagca

SEQ ID NO: 427562 - DNA, 122 bp, Homo sapiens
ataaaagggagcctctgggatcagcaggtcatatctggtgcccatggttgactgaggagtcgggtgaggccaccctaccacaagggtccccctccccatcctacacaggaatgaaaacagtc

SEQ ID NO: 427563 - DNA, 122 bp, Homo sapiens
agggctggaaactggggctgcaggcgggaggcggggtgtcagccaaaagcactggcccctcggccctgtggctgggagaggagtctgggggagccccgggcgccagccagggatagcctgat

SEQ ID NO: 427564 - DNA, 122 bp, Homo sapiens
ttgaagccaatgtccctcaatgcgcctgcgagactcccacgccctgggaaggatgcctatcgattcgctctgggctcggcagttctttctgatagcaggcagccatcttgcctggagcctga

SEQ ID NO: 427565 - DNA, 122 bp, Homo sapiens
acacacatacccccagccccgcgcccccggagtgccatgaacaccccttgttcactggcccgggctccccttagatctggagaaagccgcatccctgcacatcccagaaatgcgcaaatcct

SEQ ID NO: 427566 - DNA, 122 bp, Homo sapiens
ggctccagcgctatggtgtggtcgtcctgacgcactcttagaagctcggccacccctctgcgcccctcctgctcggccacccctctctgcgcccctcctgctcggccacccctctctgcgcc

SEQ ID NO: 427567 - DNA, 122 bp, Homo sapiens
agagggcgagcgggctccgcttttgttccctggggctggcaggtccgtgtggggccagggcgcgcgggagacgccgcggagctgggtatcccggagaggggatgctcactcctagcggctcc

SEQ ID NO: 427568 - DNA, 122 bp, Homo sapiens
acctccccagtagaaggtggggttatagcactcttttcacagacatttgctccttgaaaccgtagatgacgatttctctgagtcttcttataagacctggcagtgccctcaccccatgacct

SEQ ID NO: 427569 - DNA, 122 bp, Homo sapiens
ggagatcgccatcctgaagctcatcgaacacccacatgtcctcaagctccacgacgtctacgagaacaagaaatatttgtaggtatttatagacacccagccctaccccatcctccctctcc

SEQ ID NO: 427570 - DNA, 122 bp, Homo sapiens
tccatatacagcccgggattggaaaaggtacattacacaacccccctttcaagttcctctcgcaggatctaaaaaaaaaaaaaaaaaggcagcggaggggggtggttggagggggttggggg

SEQ ID NO: 427571 - DNA, 122 bp, Homo sapiens
cacagagcagagccatgacaactaccagcccagaaatcatccaaaccacagttactggcacgtgcacaaggctttacatctacaaaacattttttacttacgtgatctcaatctttcttaaa

SEQ ID NO: 427572 - DNA, 122 bp, Homo sapiens
tgcacgctggctctgtcagacaccttgcaacaggcatgactgggtgagcttggggcagcccggaggtgtggagggggcagtgaagacaccagaggagcggtggcccctccagagcttgtgca

SEQ ID NO: 427573 - DNA, 122 bp, Homo sapiens
ctggcttttaaagggaaaggccttcatttcttcgtttatccccccagcagcgctggagagcgaggtggcttcaataagcctggtggtaagtttttgagtattaccatagatagtgtttaaaa

SEQ ID NO: 427574 - DNA, 122 bp, Homo sapiens
gtggctcacgcttgtaatcccagcactttgggaggccgaggtgggcggatcacctgaggtcgcgagtttgagaccagcctgaccaacagggagaaaccccgtctaccaaaaatacaaaatta

SEQ ID NO: 427575 - DNA, 122 bp, Homo sapiens
gccgctgcggagcaggctagggactggggcaggtcccggcacaggggaggggggcgggggcgctgccaaggtctcacagctgaagagggaagccagccggggcctacggaaagctggaaaat

SEQ ID NO: 427576 - DNA, 122 bp, Homo sapiens
cgacggcaaggattacatctccctgaacgaggacctgcgctcctggaccgcggcggacaccgtggctcagatcacccagcgcttctatgaggcagaggaatatgcagaggagttcaggacct

SEQ ID NO: 427577 - DNA, 122 bp, Homo sapiens
ctactgactggccgatgaactcgcaagtgtaggtagtgtgctacatgaggggcaagttttcgctaacaccacaagggtctctggcccaatgagtggagtttgatagtaattcttgctacaag

SEQ ID NO: 427578 - DNA, 122 bp, Homo sapiens
ccagttaatagagttgcaagatgggaatacatctcaggagagaggcagaagtttagttaccggaacaggggtccttcatcagaggtcagcgtagcatgacttaacaccaattccagaatcca

SEQ ID NO: 427579 - DNA, 122 bp, Homo sapiens
atgattatgagtaaacttggggctattgtcattctcatccagaacagtaacaatcacagccgcttggctttggaggggaggggtcccattgtccctggcagttactgtaaaaatgaatcgtt

SEQ ID NO: 427580 - DNA, 122 bp, Homo sapiens
tcgctctccagaagcgtcctattggcctggagccagccaacgggggagcggtccgggaggcggacccggctcctgccagggttgggtgcgccgctgaacggatggctgagggagccccgcgg

SEQ ID NO: 427581 - DNA, 122 bp, Homo sapiens
ccgtgggagccggagccgcgaggagacagtcatggaagcggaggggtagtcctgaccccgcgtgggtcctgacgccgagattaagacgagtggccatttaggaggatgtggaccctggacgc

SEQ ID NO: 427582 - DNA, 122 bp, Homo sapiens
gggaggatccggaagtggatgggcggggcgaagggtcctcgtatataaaagggccccggccgcgcggggtctctaatctgccattttctgtccctgagtgagtctctggcgtcccaaattgc

SEQ ID NO: 427583 - DNA, 122 bp, Homo sapiens
acaaacatctttgagcacttggtcattgtatgtcacaattttcaaatttacagccaccagcgtatcctactggggcgactgggggaatcaatactgggctttattcttattatatacttgga

SEQ ID NO: 427584 - DNA, 122 bp, Homo sapiens
ccgggaagcccccgccgccgccgccgccgccgccgccgccgccgccgccgccgccgccgccggcccctcgggcctcgcccctcactctgccgccgcctcccacagcagcgacaccccagcca

SEQ ID NO: 427585 - DNA, 122 bp, Homo sapiens
cgaactaaaagtataacaaacgcacactccctcatctcaggcatgcctgcggtaatgcatcgtttacattcccacgcctctgctttccaagtaggtcaacagcaactactgcagctgccacc

SEQ ID NO: 427586 - DNA, 122 bp, Homo sapiens
aatccatgctcctataattggaggaagaaacaagtaacttttttttgaagtaatcagatccggcatcactagtcagcgcttcctgctgataaaccctggggaacatacccaatgacagaaaa

SEQ ID NO: 427587 - DNA, 122 bp, Homo sapiens
agatggtgcacatgtatggcttctccccggtatgggtcctcatgtgccgcggcagcttcccggcccccatgatgactttgtggcagatggggcactgctgagaggccttgggcttcagcttg

SEQ ID NO: 427588 - DNA, 122 bp, Homo sapiens
tgacctagctgggtttggtcgccgtcactggccggagcgccgaagcaccggggacgctgacgcacaggttgcccagtcacaagcgctgctcgcacccagagcaagttaaatgggtggtttct

SEQ ID NO: 427589 - DNA, 122 bp, Homo sapiens
ctgcaggggaacgggacctggggtccgcgctgcggggaacgggacctggggtccgcgctgcggggaaggggacctgggctctgcccagggactccacaattccttactaatgttactgccgt

SEQ ID NO: 427590 - DNA, 122 bp, Homo sapiens
ggagagggacgcgcagttgggtgtgtggtgctgaatgaagggatgaaggaggactgctagcgtctaaggtgaccctaaaagacgagatgacagaagcgatctggggtgggaggagggaggag

SEQ ID NO: 427591 - DNA, 122 bp, Homo sapiens
tgtcactcttactgcctcttaaatactttaagtttttcacagccagagatcaaaactcatcgtactcatcttcaatgctgtacacaaagctgacatccaattctgtcctcacaggacttaga

SEQ ID NO: 427592 - DNA, 122 bp, Homo sapiens
tggccgcctgcgctacgtcaacctggggctctgctcgctggtgtacgaggcgcccttcgacgcccaggccagcctctaccaggcgcgttgccgctacctgcagccccgctggaccgacttcc

SEQ ID NO: 427593 - DNA, 122 bp, Homo sapiens
ggaggcagagcgggggagcttgctgcccatagaatctaaggaaatagttaatgatgcactcgctgcagggaagagcacactgaaccacggaggaggtgacaggggcccggagggagtgggga

SEQ ID NO: 427594 - DNA, 122 bp, Homo sapiens
gtgtggaagaaaccaacagggttcacgctggtgcccatttctggaaatgccaatcgcgcccgactgcgggagccaggatcaggtccccagggcgcccttgcagacagcaccctgagcgaagg

SEQ ID NO: 427595 - DNA, 122 bp, Homo sapiens
gagattttcctgacattccaattgtagcagacattgaacaaacagagacgcattaaaagccgacctggttctattatcttttattgaaggcctagcaaagatcagacatgagccctgtgcta

SEQ ID NO: 427596 - DNA, 122 bp, Homo sapiens
cccaggaggacgggccccgggcatggcaagcgcactgccccctctcactcctccggcggccgccgtccactcccagtcctagatctgagctccttcctgggagtccagggcccttcacaagt

SEQ ID NO: 427597 - DNA, 122 bp, Homo sapiens
cttttcgccggagttgaatctgtgctgcccgtgtccaggtgctgggcttccggaccgacacggatcccccatccccgcccgcggtcgccttgtcatgctgcccaaagtggagacggaagccc

SEQ ID NO: 427598 - DNA, 122 bp, Homo sapiens
cgcgatccctgacggtagcttgcgggtgttccgcgccgtgggcagcctggcgtgcaggggcgctcagccgagggacgtggctatttctgggacacacaccagtgcacggacgccctaaggga

SEQ ID NO: 427599 - DNA, 122 bp, Homo sapiens
ccggccctggtggcggtgagggagcccggcccgggcggctgtctgccgggaactgagggacgaggtggcggcggctctcagaggcaccgcgagagaagggctaccctggctactgtggggat

SEQ ID NO: 427600 - DNA, 122 bp, Homo sapiens
caagtacaacatttggaggccccagtgagaaacgccaccaggcgagagccaggcttgctccggccccccccggaagaacggccggattgtagtgggggcgccacttgaaaaaaaattttcag

SEQ ID NO: 427601 - DNA, 122 bp, Homo sapiens
tttgcagttcctggctgctctgtgttggcagctgtgtgcacgctttctcttttgagccagcgaggcacaagacaagtaatttcccatcttgaatctctcacagctgctgagctgtagtggat

SEQ ID NO: 427602 - DNA, 122 bp, Homo sapiens
tccccgagagctgctgttatttgtggcctatcggggcattgattggggttcctctgtgcccgcgcagtcaatggggctttttccacaaggggctggaggctttgagggccgccttcctcccc

SEQ ID NO: 427603 - DNA, 122 bp, Homo sapiens
cagtatgtaaacaaccctttggactccgtgtgtccttgaggttgccccagtctggcctaccgttcctgccctgcacaaagcttcagtagccctctcactttcccttccagtcctttccctgt

SEQ ID NO: 427604 - DNA, 122 bp, Homo sapiens
atgatatccttctctacaaatgccaggaacaccagggtagattgcatgagacatgactgccgtatcttggtccttactaggattcccaaatatactccttaataaccagtaaagttatattt

SEQ ID NO: 427605 - DNA, 122 bp, Homo sapiens
ccgcgcggggcgcagggccggggctggggccggggcgcggtgtttccaggccggccggcccgaggcttgcgctcccgatccccgatccccgatccccgatccccgctcctcccggccccgcc

SEQ ID NO: 427606 - DNA, 122 bp, Homo sapiens
gggtccgcccacccgggtagccggctccgcgccaagaatcgctctaggctctcgggcagacgcctaggggaggggaggttccacctcccacgcccttcctgcagacctcggccccgggactg

SEQ ID NO: 427607 - DNA, 122 bp, Homo sapiens
ccagacttcctcggaaaatgcccgaggaacaggactcctccggccgtatttgcgcgagcgcgagcgcacatacatcgtgccttggatgcctcccgccagccccccgaaaaagggaggaggct

SEQ ID NO: 427608 - DNA, 122 bp, Homo sapiens
ttaacaggcaaccatgttgcccagtgggttttctgtgcctttgggtgcggaccaatgaggcgcgtggggcgggacttccgcttcgcctaggtgttgtcgtccctgctagtactccgggctgt

SEQ ID NO: 427609 - DNA, 122 bp, Homo sapiens
ccctcgcaccttctattcccagaatcactaggcgccggcgcctccgaggcagtgtgtttccgcccagagctggagtctcccagctgccagccgaccccgaacccgcactcccgccaaccgcg

SEQ ID NO: 427610 - DNA, 122 bp, Homo sapiens
tgagattgggccattggcctgaaggtctctgggagcagcacccttccaggggaggtgggacgtcgagaacttctccctaagagatgcggggaaatggtggggcctgagagtgcaaacactgc

SEQ ID NO: 427611 - DNA, 122 bp, Homo sapiens
atccagtctatcattgttggacatttgggttggttccaagtctttgtattgtgagtagtgcgcaataaacatacgtgtgcatgtgtctttgctcagcaaaaggaactaccatcagagtgaac

SEQ ID NO: 427612 - DNA, 122 bp, Homo sapiens
gactgcgacagaagacgacaacggcacagtcccctgaaaggtcagtggactcaccatgaccgtgatggcaagagcagaaacggacagaaaccgagcgagtggggagcaccatcctgagcata

SEQ ID NO: 427613 - DNA, 122 bp, Homo sapiens
gcggggcttagatgctcctgcctcttccaccagctcctcttgccctgcatgcttcagggacgatggaggtctcggggcacccccaggccaggagatgctgcccagaggccctgggaaagctc

SEQ ID NO: 427614 - DNA, 122 bp, Homo sapiens
cagacccgggccttcaagagctatttacacctacaacagcccaccagcgcctgaccacgccggagccaatcagcggcccccaagcttgtctgattctgtctgctccaatcaggaggcgcggt

SEQ ID NO: 427615 - DNA, 122 bp, Homo sapiens
gccctcaatccctctcctacggctccaccttcctcctcccagttcatcctcgatccctcccgctcacccggaccaccagactccgggatccctccaagaagtggccgaagggaggtaaagcg

SEQ ID NO: 427616 - DNA, 122 bp, Homo sapiens
gtcgccttagacaagtttataggtttctgagcagctccctgaatacccacgaggagataccggtggaaatcgtcaaaagttctccctccacttgagaaatttgggtcccaattaggtcccaa

SEQ ID NO: 427617 - DNA, 122 bp, Homo sapiens
acaagccccagctgacctgctggaggatgagaagccacggggaggagagcgaaggcaccccggctaatagcccatcagccatcaaccatgtgagcgaggccatgctagatcaccccgggtca

SEQ ID NO: 427618 - DNA, 122 bp, Homo sapiens
ctcgatctcctgacctggtgatccgccggccttggcctcccaaagtgctaggattacaggcgtgagccactgcacccagcccagaatcaagcttttaagttaagcactgctgtctcttgttt

SEQ ID NO: 427619 - DNA, 122 bp, Homo sapiens
gaacctcaggctaatggccctgtcacccgccctcctccccttccggctcactgcccatcccgggcatcctccatcagcccgctgaggggactgctgagcctcagagacatctggcagcacca

SEQ ID NO: 427620 - DNA, 122 bp, Homo sapiens
tttaactccttgagaacctgccttcctagtgacaaaccctgttcagagagaatccaaacacgggggccttccatctcggctctcgtttccctcagtctggccagaggccccgcgtggaattc

SEQ ID NO: 427621 - DNA, 122 bp, Homo sapiens
ctgataaccccaaagctgcagcttgactaagccgtcttagcccaagagggttccacctggcgtcccagaagaatggggacagtgtcctccacatctctgaaccctacccggaatccagtaca

SEQ ID NO: 427622 - DNA, 122 bp, Homo sapiens
cggctgaagccgatcctgagtggggccccagcaattcggaatgagccttttccctccacccgcttctgccgaccggggccctcccgcgcggcctcgcaggcctccccacccgcgcccgtccc

SEQ ID NO: 427623 - DNA, 122 bp, Homo sapiens
atcccaggaccttcacattttggttcttgccattgctaacagttgtaaatgctgccgccacgaggcctgggaggaaggacccgctggtgagagcacagggagtgctgctgtgatcacggtgg

SEQ ID NO: 427624 - DNA, 122 bp, Homo sapiens
agctccagccaccctgccccgggacatctgtacttgcctggaacttatttcccttttctccggacagccagccctttctcgtcatttagatctctgctgaaacattaccctgtcaccaaagc

SEQ ID NO: 427625 - DNA, 122 bp, Homo sapiens
caggtgcacaaaggtgagtgccccgcaggctggctctgtcctctcgaagccctctaaggtcggacagctggagacagatcctcatcctgctgcccggaagcagcccctctgggcctcgcttt

SEQ ID NO: 427626 - DNA, 122 bp, Homo sapiens
ggaggctgaagtgggaggatcacctgagcctggcaggtccaggctgcagcgagccatgatcgcgccactgcacttctgcctggacaacagagtgagagaccctgtctcaaaaaaaaaaaaaa

SEQ ID NO: 427627 - DNA, 122 bp, Homo sapiens
gctggcattacaggtgtgagccaccatgcccagctaaagttctagctttttaatgaatgtcgtaatttttttttttttttttgatgtggaatctcgctctgtcacctaggctggagtgcagt

SEQ ID NO: 427628 - DNA, 122 bp, Homo sapiens
agtccaaatggtcaatgatcacgtgtagctagtggtaccttattggacaacactgtcctacgtgaaagtaactctgacttaatgtttacattttattgggtccagactatctaaaagtaaac

SEQ ID NO: 427629 - DNA, 122 bp, Homo sapiens
cgggggcaaaggaggtggcatgtcggtcaggcacagcagggtcctgtgtccgcgctgagccgcgctctccctgctccagcaaggaccatgagggcgctggaggggccaggcctgtcgctgct

SEQ ID NO: 427630 - DNA, 122 bp, Homo sapiens
acagcaagtccgagttgtacgggcaacggcagcaccttgggctttttcagcctccgacgacgacgtctcgccgcaagcccacgccgtgcgcctccgccgccacggcgaggaaaaagagtccc

SEQ ID NO: 427631 - DNA, 122 bp, Homo sapiens
agctggagctgctgtcgggggaggccaaggctgtgtcgggcagctgccttctctacagcccgaagcacatccccatagtcagggaaggtatcaggccctggcttgttgatgagccgctcaat

SEQ ID NO: 427632 - DNA, 122 bp, Homo sapiens
gatcctcatggagcagggcgagttcctcaactatgacatcatgctaggtgtcaaccagggcgagggtctcaagtttgtggaaggggtggtggaccctgaggatggtgtctctggcactgact

SEQ ID NO: 427633 - DNA, 122 bp, Homo sapiens
cccttggtcccccccaacaaccaccccatctctgctttcgtaacctcagccagcctgggccgggccacaagaacaaggaatgtttggggaaaagctgagattcgtcctgtctggtatttggg

SEQ ID NO: 427634 - DNA, 122 bp, Homo sapiens
tcggtcccaccaaccttgcgccccttctttcctcaaagcgtggccgaatgcctaggcttccgggtatcagtggccccgcctcttaatccgaccggagccgtccctcgtgattcctgggtatt

SEQ ID NO: 427635 - DNA, 122 bp, Homo sapiens
agtgagccgagattgcggcagtacagtccagccttggcaacagagggataccatggaaagcgggagacagagacgagggagagtgggagaccgtggaaagcgggagacagagacgacgaggg

SEQ ID NO: 427636 - DNA, 122 bp, Homo sapiens
acagaggagccaagacctcaggtttccagagacttgggatttgcacggcagcagagtcaccgtggagaggccagggtatcacaaacttatggattttgacaagaaaggagggaaaggggaga

SEQ ID NO: 427637 - DNA, 122 bp, Homo sapiens
tcccttatacttttatcctcatggagcttcccagagccctctgagtccaattcaagaccacgtgggactggtgtttaaaaatctagacatgagctgatggtactgttattgctgtattctta

SEQ ID NO: 427638 - DNA, 122 bp, Homo sapiens
tagaaagacagttccctttttgctgggatgagtactaattacctgtagcccttctgaatccgtctcctctataatggaaagaaccccagcctagggctggggtctcactccagtctcaaagc

SEQ ID NO: 427639 - DNA, 122 bp, Homo sapiens
aggccgaggctgggcgaagcaaaataagacagaaaccaaacatttccagaataatagcgccgctctacaaccccacaaaataagacagaagccaaatactcccagaaaaacagcgctgctcc

SEQ ID NO: 427640 - DNA, 122 bp, Homo sapiens
ggccgcagggggagggggagacagaggatcacagcccagacaggcgggagccaaccttcacggtctccctcgccgccatcttagggtgtcctagagacttttaaatatgcagattattgacc

SEQ ID NO: 427641 - DNA, 122 bp, Homo sapiens
tgtaacaccaattaaggaggttcattgactgtgccattcgacttcctgccctcatggctccgcgagccaggagatgagcagttagctgggagcacaaacggcatatggctgccaggctcttt

SEQ ID NO: 427642 - DNA, 122 bp, Homo sapiens
gggaaaggggcgggagcttggagggggcgggtccagaatggcgggagcttccggggccgccgcctctggaaggaaaaggggagggaacgtagagggggagggaacgtagagggggcgggacc

SEQ ID NO: 427643 - DNA, 122 bp, Homo sapiens
tcccgctttgaggttttaatcttgatccgccggtcctgcccaaagttcagagcagctgtccgaaaggtccccgcatttgctgtccctaggaaaggtgaggctaggaggaagggggaggcaac

SEQ ID NO: 427644 - DNA, 122 bp, Homo sapiens
acagagtggagagccagggcaggcaggcactccatgaaaagagctattttaggccgggtgcggtggctcatgcctgtaatcccaacactttgggaggccgaggagggtggatcatctgaggt

SEQ ID NO: 427645 - DNA, 122 bp, Homo sapiens
atacgtactcgtcaccccttggccctccctgaagagctggtgaccttaccgtcaaagccccgggatgccatggatcgtcctcgttggcggcttctggacactgagccactagagggcatcgg

SEQ ID NO: 427646 - DNA, 122 bp, Homo sapiens
agcagaggaggaaaggggtgtcaaagtcagaaccgcctagaaggcaacgagaagcagaagcgcaggcctgcgagatgctcatcagagtgacttagctgtgggctgcggaaagcaacggaagg

SEQ ID NO: 427647 - DNA, 122 bp, Homo sapiens
gaccctactctttatttgacatgaagaggttcggactcccagttttattcggcatgttcacgggcagcagccccattttgtttggcgtgttcacgggcagcagccctgttttattcggcgtg

SEQ ID NO: 427648 - DNA, 122 bp, Homo sapiens
ccccgtggccacaaacaaggctgcaatgaacttcttcatacacattcccttaggatcctgcgtggaactttctctgggatagagatcaactttctaattattatcagaatagcagatgcaat

SEQ ID NO: 427649 - DNA, 122 bp, Homo sapiens
ggggcaaaagcctgaagggggcgggacggcgggcggcctctagtgcgcatgcgcgccgtgcggccttggccaagcgtgatagtcactgcgcctgcgtcaggttttccagcctgaagaaattg

SEQ ID NO: 427650 - DNA, 122 bp, Homo sapiens
gggtttcttttctgctttaaagtgcgttctcctaatgcgggtggggaggtgagaggttggcgacattgacgggagggtgggtggcttttaggggaaagcttctgtatcctccccaccacaat

SEQ ID NO: 427651 - DNA, 122 bp, Homo sapiens
gcagccgacctcgcactcccctgcgttcgaggctgcggacttcggcggcaggacggacggcgcctctgcttctcattccgcccagggccagcccgggcccaggggtacctgctgtgcgtctg

SEQ ID NO: 427652 - DNA, 122 bp, Homo sapiens
tcctctgcttaatacctttgctttattagaaaacattctcctctactccgttcagctattcgctgagggcccgccaaccgccagcggttgtcagtggcctagaggcagcggacgcaaacacg

SEQ ID NO: 427653 - DNA, 122 bp, Homo sapiens
tcctaccccagtgccacttgggtaaaaatactctgctcctctcacgtttgctaataagcccgggctccgactaccaccgttcgggggaagggagccccttaccgtcattgctgggtccgctc

SEQ ID NO: 427654 - DNA, 122 bp, Homo sapiens
gcactacgggccttgtgctgctgggcgtgggtggcgtgcagcaggccgtgtgctgctgggcgtgggtggcgcgctatgggccgtgtgctgagggctgtgttggttgatctctgtgtcaggtc

SEQ ID NO: 427655 - DNA, 122 bp, Homo sapiens
gggggctgagatcctctgccacaggaagagacgggcgtccaggactcacctgctgcctcccggccctagggccctgagctgggctctccaggccccagccccttggggcacaacacctggaa

SEQ ID NO: 427656 - DNA, 122 bp, Homo sapiens
gggcatgcggtagagacttaggattcattcttacctccagaatcagtggatgggcgactgcgtcaggcttgatcagggctagagtgagctggagagcctgagggcttcgcaagattgaggcc

SEQ ID NO: 427657 - DNA, 122 bp, Homo sapiens
gcctcccctggtcgcgtccgggtccttgcggagctaactagctcgccacgacgtcaagaacgacgtaacgtcaggccgctgtgggctctgggaattgtagtccagagctagatcggccacgg

SEQ ID NO: 427658 - DNA, 122 bp, Homo sapiens
agacggagctgtgcaaaggcaggcttcgcgtctgtgcagctcagcggggagtatcaagcacgaggaagcaacctagtgaggacgctgcacacctggattcttgtcacccagaaggaagggag

SEQ ID NO: 427659 - DNA, 122 bp, Homo sapiens
gaaggtggggaggctccgggctggttttcggggcaactccccctgcctcctgccacttctcgcctgggcgtgttgtccttaagtgacaggggaccgccttgcgtctcctcactcggccggtt

SEQ ID NO: 427660 - DNA, 122 bp, Homo sapiens
tccaggtcccgttccgtaggcggggccgctcccgaggcacaaggaggcctgcgcggcgcccgaggtgtccggatcccaaaacaggaccccaggagtttctcacactcaggactggcccctag

SEQ ID NO: 427661 - DNA, 122 bp, Homo sapiens
gcagtgatgagagggcagagcagccgaccacaggggaaacagccaggcggcagcggtgtgcgcaacgaggagggataaataaaggaggagtggggtcctggaacctagaacagccggttcca

SEQ ID NO: 427662 - DNA, 122 bp, Homo sapiens
aggctcccgagcggatcctcgggaaaggggctccgaaggtcaagaaactgccctgctgggcgtccggggagtgggaaaataaagcactttttgtatcccgcccctcccccgtcacgtgacca

SEQ ID NO: 427663 - DNA, 122 bp, Homo sapiens
aactttaagtgtgcgtgcgcgtatgccctttgtgttcctccgggcggcttagccacacttcgggatgcttgcggcctctggcttggggctcagttgctgtttacccactgtcccctcccctc

SEQ ID NO: 427664 - DNA, 122 bp, Homo sapiens
gctgccaccggtgccttgcgcgcttctccgctctgggggccgaaggacgcagggctttgacgtcccgagccctgcgccccaccccgtgcgcttttacgtcacctttcaccggttcaacaccc

SEQ ID NO: 427665 - DNA, 122 bp, Homo sapiens
accggaaccacacacttggcatcggcggttgagccaaatggggactcgcggtgcaagcaacgctccccacgtgttagcgtgcgtgagattcagttggcggaattttactaggtgcgtgttgg

SEQ ID NO: 427666 - DNA, 122 bp, Homo sapiens
caggaccaaggaccgagacacagacatggaaggacttcagataccatcttattctagagacgtagctgaccaaaaagtaggggaggggctgggtctgcaaattaataaatagaagagggggt

SEQ ID NO: 427667 - DNA, 122 bp, Homo sapiens
aaaaaaaaaatcttaaaaactccttccagaagatttaatacttactttcacccaaccacccgacttgagtatcaccaataacagaggatacagtccgttttcagtagagccttagtagcaaa

SEQ ID NO: 427668 - DNA, 122 bp, Homo sapiens
aattaggtaaatttaaatgggataaacatttacgaatgagctttgcatgtaaagtcttaacgtcatgttaaattaagttgtggatacccataaaatgtctgggtgattctcaaataagataa

SEQ ID NO: 427669 - DNA, 122 bp, Homo sapiens
gcagtccctgagggatgcagaagtaaggaccctcaggcacaggtggggtgcctggagacccggctacacagctcagaaaaacagaagttgccgtgaatggggacctccaggtgccggttggg

SEQ ID NO: 427670 - DNA, 122 bp, Homo sapiens
gtcgggcgccgccgaggccctccccggccagtccctgcccctgggcgaagtttggtcttccgagggcgggttgcagtccatcccttgcaaccgtccaacctggccctagcagaggaaaggcg

SEQ ID NO: 427671 - DNA, 122 bp, Homo sapiens
aagtaacatctggttggtctgaggtttggactctggctggggccgggagcccagggctggcgactggggagcctgcacttggagctggtgacagcaggtggcgcaggagcgcagaaaccaac

SEQ ID NO: 427672 - DNA, 122 bp, Homo sapiens
gaacagaaggtacagtacattccagacaaggtccaagtcctttatccatccagaaactctcgcagcttgactcctgtcctgtattgcgaagggtcacagacactttctgcattaattatgta

SEQ ID NO: 427673 - DNA, 122 bp, Homo sapiens
gacgccccggcccggattgtgagctcagccgtttgttggcgaccttccccctccccctttcggttaagatccttgcaaggcctttgctacccagaaccctacgtggttcaaaacgcagctct

SEQ ID NO: 427674 - DNA, 122 bp, Homo sapiens
cgccgcctttcccgttcactttgtggttgctcgtagtgagttgcgctcgctatgtctggacgtggcaagcagggaggcaaagcccgcgctaaggccaagactcgctcttctagggccggtct

SEQ ID NO: 427675 - DNA, 122 bp, Homo sapiens
aattgcaggggcagggatcaggcaagaaatcagaacgtgcgtgtgagacagcaccagaaccgagtgacaagatcctttgggccagagagcgaccctcggagaaggtgagctgtctgcccgtc

SEQ ID NO: 427676 - DNA, 122 bp, Homo sapiens
gggtgagcaggaggggttgctaggcggagtctgagtgaacgcgacccccaagggtcggggcgtggggtgggacgcatctctgaaccaggaggacggcgagctgctgtcaaggccgggtctct

SEQ ID NO: 427677 - DNA, 122 bp, Homo sapiens
aggctcagagaggttaagggatatatctatggctgcacagggaccctccttcaggtctgtcggactcgtatccaccccacctctctgcccctctcctgcccctcctttccagaaggttctag

SEQ ID NO: 427678 - DNA, 122 bp, Homo sapiens
ttatagaaaaaaataaagcacaagttctctgtgacatgttcagcttatctatgaatataacggaactgaaaccatatttcaataaattattaacagcaatcccttgccaagaaggatatcag

SEQ ID NO: 427679 - DNA, 122 bp, Homo sapiens
gaccccacagccttccctctcctgtgagtgttttcaaagttaactttgggacggttctcccggagggccagacagaaactcaaagaaccggcctcaggggatctgagcaaattccaccgtcg

SEQ ID NO: 427680 - DNA, 122 bp, Homo sapiens
gatcaccctgcacgtcttctgggagctcaactatgacttcctgcccaactactgctacaacggctctaccaaccggtgagcgtgcccgccacacaggcgcccacaggcgaggcgctcaggga

SEQ ID NO: 427681 - DNA, 122 bp, Homo sapiens
ggatggggagtgtaggacactctgggagaaatttaagatcccaatctctaggattgcctgcggtggagctctgcactcatcagtatgacaggtctgcaagtatgtgctcagatatgctcttg

SEQ ID NO: 427682 - DNA, 122 bp, Homo sapiens
ggaggaagactgtgtccagggcatgagccttctggcattgtgggttcccccacgctccagcgccggaggggacccaggcggcaccagcgcgttaggctgcccccgggagcagtgctgcagga

SEQ ID NO: 427683 - DNA, 122 bp, Homo sapiens
ctggaggcgcgcccttcagtgccttccgggaactggttaggagtagcctgcggagagccgcgcttgcctcactttccggcgccggctcatggcttaggggccacagatttggggctcgggcg

SEQ ID NO: 427684 - DNA, 122 bp, Homo sapiens
acagtcaggattgacagctactgtttagttaaatcaaacaccaatgctataatttttaaccgatatcatttttagggtttggtttccaaagttggaaatcagtgtgttttagatcagtggtt

SEQ ID NO: 427685 - DNA, 122 bp, Homo sapiens
ccaattgaattcccaagtgagagactgctctgcaggaagcagcctcagagggactgataacgtccccatcatagcttacaacagtctcatacccaccttcttctttgatcctcatcacaaat

SEQ ID NO: 427686 - DNA, 122 bp, Homo sapiens
cctgcgggacctgctgtcggaggtggccacgggcagcctgcaggacggccagtccccgggcgtgtacctctgtgaggaccccatctgcggcacgcaggtgattgcttctgaagcctggctcg

SEQ ID NO: 427687 - DNA, 122 bp, Homo sapiens
cttccatacttactttatataatatggaagcttgataaatgtttaatggtggccatgcaccgtgattgaaatatactttgtgtcaccaaagtggtgacattccttccgcattgggtggacac

SEQ ID NO: 427688 - DNA, 122 bp, Homo sapiens
ccctgcacaatggggccgccgccgatgactgatgtccgtgaaaacaacttgcggggaagtcgagctgacaaacgcccattaaaggcggcgcataatgaaggggaccgcggagggcggcggca

SEQ ID NO: 427689 - DNA, 122 bp, Homo sapiens
ataatgtgatcatgggagtgggagaagagattagcattcattgacactaattgttagtgtcgattagagctggaagggaccatatattgctaaccaaaacaaataaaatactttccctggtg

SEQ ID NO: 427690 - DNA, 122 bp, Homo sapiens
tggcacatgaggtgagatcggagttaatcaggccagattatgagggcctcggatgccatacgagggacatgatgtttcagatcaattcctcaggcagctgtgtggattggcgatgggacctg

SEQ ID NO: 427691 - DNA, 122 bp, Homo sapiens
gtgggcatctacgtggaggtggacatgtttggcctccctgttgatacgcggcgcaagtaccgcacccggacctctcaggggaactcgttcaaccccgtgtgggacgaagagcccttcgactt

SEQ ID NO: 427692 - DNA, 122 bp, Homo sapiens
gagggaggaggaaggggccgggatggggctggccgaggccagggcgctggggccgggaggcggctgcctttctctcctctcttctccggcgggtgccgggtgctgaatctggcgctcccgcg

SEQ ID NO: 427693 - DNA, 122 bp, Homo sapiens
accttgaagcattaagactcaggcatctgaaccaaaaattgtacatctttggcataaacccgagtgagatgaggagccaggaccctcgacactggtgtcatctgacttaagactgtgggtaa

SEQ ID NO: 427694 - DNA, 122 bp, Homo sapiens
tgaaaagtccaggaatgagctaactgcaaaagaatcacaggggaatttgctgactaacaccggtaaaccctcagcccttccactaagattcacaggtctagagagtagcccaaaaatgtgca

SEQ ID NO: 427695 - DNA, 122 bp, Homo sapiens
aagtaagatgacataactagacaaaagtccccaaaccacctgcagccagaaggtgaatttcggcagtatggctcaaatggcttgcacttgaaatcaccatgttacataagtgaccagcatcg

SEQ ID NO: 427696 - DNA, 122 bp, Homo sapiens
gaacaatcaacagactgaaagaaatgcacccaaacttaaatcactgtatgcattcaccaacgcaaaaggaaaattctcatttgtttcacttttcatttccaaatatgatataccaggagagg

SEQ ID NO: 427697 - DNA, 122 bp, Homo sapiens
attttggattgtcatggcaggaagtgagaggctacccattggcacctgatcggtagaggccggggtggtgataaacattcacaatgcacacgacattccccataacaaagaaccacccagcc

SEQ ID NO: 427698 - DNA, 122 bp, Homo sapiens
agaccattaaaagtggctctcaaaataacctagtggtttcattgcattcagaatgtcggacgtgaagaaccaaggaagcggatgtccttggtggggggctggaggggaggagggccagcagg

SEQ ID NO: 427699 - DNA, 122 bp, Homo sapiens
tatatagcagggaagctgctgtgttggcaaaaacaacacaaaagggacctgggggtggtgcgtagggggatttctgtattctcttttttttttcatttgagatcatggggcagtgggctctc

SEQ ID NO: 427700 - DNA, 122 bp, Homo sapiens
tgcagaggcttcactctggatgacaaacgaggaggggagagtcctgctctgcctggactccgggtgaataatggccttgcattaagatattaggtcggggcgacaagaaatgtgccctccct

SEQ ID NO: 427701 - DNA, 122 bp, Homo sapiens
acgcttgctttgtgtaggagatcggctctgccggcgcccaggggccctaacgcaattcatcgagacccgcaggtcagaactgcagtctcacctgtcttggcggaaatgcgctgcgctcctcc

SEQ ID NO: 427702 - DNA, 122 bp, Homo sapiens
ttaacaccctcccacccatcacccgggaatggaacctaggagccatttaacctgcacacacgcatgaggtttaaaattaaatggtatggggctgggtgcagtggctcacgcctgtaatccca

SEQ ID NO: 427703 - DNA, 122 bp, Homo sapiens
tcccgtccgcggagcttctatgctgcaaacaatctccccccctccctccccgcaacaagccgatccaaccaaaaacgaccaggcagaccagaagcggaaatacatcatcggtgaacaacgct

SEQ ID NO: 427704 - DNA, 122 bp, Homo sapiens
agtgggcacatcaaaaccaaagcttgcccagaggcatggcagagaacttccttgttctgacgctaatgagggtggcacactcggcctgagctggagaaggggtggggcagggtatcgctgac

SEQ ID NO: 427705 - DNA, 122 bp, Homo sapiens
gagtggcagagacccccctctctgctcctggcaatgggcgggggccactctgggccccagcggctccctccacgaggagtgaggctccctggagttggtctggccccatgtgaccccctcct

SEQ ID NO: 427706 - DNA, 122 bp, Homo sapiens
tgtctgagagaagggagtgtccatacagcatggaggtagccacacgggggaatggggaagcgttaggttctgggtttgtgcttggtgcctggaaagtacacatggtccttctgtaacacagg

SEQ ID NO: 427707 - DNA, 122 bp, Homo sapiens
aagataaaactttatatgcacaaatctttgaagagtcaacaaatcatattaactatacaccgaagccttgacctcccaggctctactcccaggctctagtctagtgattctcccacctcagc

SEQ ID NO: 427708 - DNA, 122 bp, Homo sapiens
tactacttcctcctcaaactgcttattttctcaccttatattagtgaatagtagccccatcgacttatttgccaagtcagaaatgtgagctctattcctttttgttgttgctatttgtttgt

SEQ ID NO: 427709 - DNA, 122 bp, Homo sapiens
gcgggcgcgtgacgcggcattacataatgggcgctgaggcggcggcggcgggcggggacacgtgaggccgctcggctccctgacccacattccccggggccgcagggacacgtgggggcggg

SEQ ID NO: 427710 - DNA, 122 bp, Homo sapiens
ctcgctcgcccggcgcgggtgatttatgaacgccgggaaaattgaacaaagccgcgcgcccgtcctgtggtatctctgcagccttccccagcgtgaatcagaacattaccaactgtctgcgc

SEQ ID NO: 427711 - DNA, 122 bp, Homo sapiens
ctgtgacaaatgtctctaacatgaaacatgttcccagacttccaggacacaacacagagccgcggtcctctttccctgtatgaacagtgtctttgtgagagagcgtctttgttcagaagggg

SEQ ID NO: 427712 - DNA, 122 bp, Homo sapiens
gatgtaagagaatgagaatgccgtggaagatttgcttttaagcatataaaaccctgcctacgccataagaccaaaaaaagatattttgtctgtcttaacagagtccaaactaatcatccaaa

SEQ ID NO: 427713 - DNA, 122 bp, Homo sapiens
acgcggcgagtccggggcaggaagaacgcacgggtaattgcaccttcggcaggtgttgggcgggagcaagggggtcagactcgcgctgcagggggagggcgggggaggcctcgctgtcctgg

SEQ ID NO: 427714 - DNA, 122 bp, Homo sapiens
cggccctttctcactgaccagactgctgaacccatctggatcatgctggcttaaactcttcgtttgtatcctattgtgggtcatgaacccctatgagaatttgattaaaattatgaactcgc

SEQ ID NO: 427715 - DNA, 122 bp, Homo sapiens
gggtgcaacgtaggtggcagattgagaaaagcaaacaaacaagctcagcctttggagcttcggggaagaaaaaaagctgagcagtgaatgctggcttcccacggagaaggcaggctgcttcg

SEQ ID NO: 427716 - DNA, 122 bp, Homo sapiens
ttgagtttctctgtgtcgtgagtctgatgggtccctggggtgtccctctgccctgtgcctcggaggacctgcgggccaagccgagtagcctcatgggactgaccgggcctctcaggcctcct

SEQ ID NO: 427717 - DNA, 122 bp, Homo sapiens
tgcctcctccctaggttcctcagacattaaaggatttcttcctctgaggacaccaaagcccgcagtggactgatgccttcgatgggcaggatgaaggccaggggcactggagtgagggagta

SEQ ID NO: 427718 - DNA, 122 bp, Homo sapiens
cacttcccggcccccaagcccgggcccgtgaggtaatgtcacgggtggcgacgcgggtctcgtccactgaccacacatttcttgccgaggaaagtgaagagggactcgttctcctgcggggt

SEQ ID NO: 427719 - DNA, 122 bp, Homo sapiens
tcttcataacactaccagccacgtgagcacgtcccagctgcttcttcctgaccctcaccacgaggcacagaggcacctgtgctgaaactcaagcaaacgccacatctgactctgcctcatgc

SEQ ID NO: 427720 - DNA, 122 bp, Homo sapiens
ctccgaaccccgcgcagcctgggaaaggcctgagattccccgctattgggattcacatcacgacgcggcggccccaactcggggaggaattagacacggcgtgagtgtcccaagtgcggggc

SEQ ID NO: 427721 - DNA, 122 bp, Homo sapiens
acaaagctggaggcccaggacctgtaaagcaagatcacgtccagtgacattcagttttgtcgagtaagacctacttcatccttgtgatcactcactctataactgtctaataaacactttcc

SEQ ID NO: 427722 - DNA, 122 bp, Homo sapiens
cccgcgcggctcaggcagcggagggaggagcgggcggcgccgcctgagccctcgcagacgcgccctcccgctccgagcgcccgcctccgagatctgaagttagaaacgccggggctccgggt

SEQ ID NO: 427723 - DNA, 122 bp, Homo sapiens
ggacccaggccatctctggttgtgtctgtgccgactcggtgttgaatcaaatcaggtgtgcgtcaggagccggctgtgtccttcctgccacactcggggattcattccttagaaactgaaat

SEQ ID NO: 427724 - DNA, 122 bp, Homo sapiens
ctactcgcagcctccggccccgaccgcaccttccacctccagcccacgtttatgctccctcgccctcacctcgctcacacaccctgagctcgcacttacccctcggtggccttggaaagcaa

SEQ ID NO: 427725 - DNA, 122 bp, Homo sapiens
tttttttccccccggagccgcgcagtctcggggctgttgttctcagcaatcgcagggcctcgtgttagcaggaagcacagccaagtagggtttcctgcgtgttggagagaggaagctccgta

SEQ ID NO: 427726 - DNA, 122 bp, Homo sapiens
ctaggtgatttcagttgtccttcacttaaaacccctgaattgcctgggcgtggtggctcacgcctgtaatcccagcactttgggaggctgaggtgggcggatcacgaggtcaggagatcgag

SEQ ID NO: 427727 - DNA, 122 bp, Homo sapiens
cttccctcagaggcgggcagccattgtgcctcgggaacacggtctgagtagagttgtgttcgcacagctgaaggcggccggcggccctcccagggcctcgagggtctgtctgtgccctcctc

SEQ ID NO: 427728 - DNA, 122 bp, Homo sapiens
gctttgatggcccatgaggcaagaacccatccttcttctctggctgtacacacctgtgaccgtccaggtcaagtgtaagcttagatgcatacctccattcctggcagaatatcttcctaaga

SEQ ID NO: 427729 - DNA, 122 bp, Homo sapiens
acggttttaacacttggattacaggttcatctctccatgccagaagagagcagcagggagcgaactctcatcacagcacagctaccaaggcctctgcctgtactgagagcagctcaggccaa

SEQ ID NO: 427730 - DNA, 122 bp, Homo sapiens
gagtgcagtggcgtggtgtcagctcacagcaacctccacctcccaggttcaagtgaatctcgtgcctcagcctacggaacagctgggacaacaggctcccgccaccatgcctggctactttt

SEQ ID NO: 427731 - DNA, 122 bp, Homo sapiens
gaacccaggtcattcctgggtatgccttgggagggcggcgaggctggccgcagctgggcccggcatcggagaaaattgtgtctctctggagaccctgcagccttcccacccaccagggagct

SEQ ID NO: 427732 - DNA, 122 bp, Homo sapiens
ctatctcctgttcattacctcactattgagtcatgcttcctttaacaaatccagaccttacgctttctatcctgtcttttacactagtctttctgaagccattaaaactctcccatgttaaa

SEQ ID NO: 427733 - DNA, 122 bp, Homo sapiens
agacttggcctactcccggcactccgcggacagccccagcctgcggacagccccagcctgcgtcacttgtccgcatgccagctccacccgggcggacccacacatggtaggaacgtgagggg

SEQ ID NO: 427734 - DNA, 122 bp, Homo sapiens
tttgtaaatgtcactcttagaagaagataggatgttttctgaaagagttcttttttaaagcgttcactgactgaatccattctgaaggatagtttgggtagagggctttctaaaaaaaaatg

SEQ ID NO: 427735 - DNA, 122 bp, Homo sapiens
aacggcactgagaggaaaactcccatggaaatccatctttgttttcccagttcggaggcgcgtgggccctgcgtgcgcgggcctcggtctgagcggccggcctcggcagacagcaccaaatc

SEQ ID NO: 427736 - DNA, 122 bp, Homo sapiens
caccacccgccacacggccactcgcgcccgcacctggcacacacacactccagaagtgcgcgggtccacagtccccggggacccttgggcccctctgtgcctcttgggtcccgtgggccgcg

SEQ ID NO: 427737 - DNA, 122 bp, Homo sapiens
gtccgtaacttcttgttgtgaggaccagaggagcagcgcccacacagcgctcagtgaggccggcgctgcgcgcctttccccgggtggccgtgatcggaggcagcgcgttcggaccccgggcc

SEQ ID NO: 427738 - DNA, 122 bp, Homo sapiens
ctggcgctggccatcagatgcccctcaaggcccacaggaattctccaggttgccgatttgcggggatgaacgaggccctcctggcgtaggttcagaccaggtggcggcgaggttcagaccag

SEQ ID NO: 427739 - DNA, 122 bp, Homo sapiens
ggaccaggaatttgggatgaggctgtcgcctgcaaggtcaagcctttcttccactataagcgctggatgggttctttctgcgcgctacgcaaataaagaccacggtattgcagttaaaaaaa

SEQ ID NO: 427740 - DNA, 122 bp, Homo sapiens
tgcatgctgctttgagcatttgccccttatttggtgaaatcctccttttggaaagtgtaccgtcagttattatctactcacaaaggagggaggatgatgtcattgaaaaccatttatacttg

SEQ ID NO: 427741 - DNA, 122 bp, Homo sapiens
gttcctacgggagattaacacacacacaagccttcgtcgtccagtgcatggtcacttgcacgtcttgttaactatttccctctgctgtaagggcgctgggctgggatgtagcggaatctgtg

SEQ ID NO: 427742 - DNA, 122 bp, Homo sapiens
gtgagcccaacattccaaacccctaagctaaactctctcttgctaaaactgctgagaatacgaaggcttcttgggatcatactttgaacccagaaaacagaaaaggaggccctcatctcact

SEQ ID NO: 427743 - DNA, 122 bp, Homo sapiens
gttctccacgtccccaccagactcaggagcccagctggcttcacccagtggatcccgcaccggggctgcaagtggagctgcctgccaatcccgcaccatgtgcccgcagtcctcagcccttg

SEQ ID NO: 427744 - DNA, 122 bp, Homo sapiens
gaggatcccactgaaagcaagtagaggagtgactctatgctagtgtttctcacactttcacgtcacattcatcaggggtacttaacagaaatgtagattctttctaaatcagaatccctggg

SEQ ID NO: 427745 - DNA, 122 bp, Homo sapiens
agttccgtgttgtggggctcagctggttcatttatgttgtttttcctgtacctaagttcccgctgtaggtggtacctttgcagacggtgcgatgggggaagcagagaagtttcactacatct

SEQ ID NO: 427746 - DNA, 122 bp, Homo sapiens
ctggggtgggcttggagtagccggggccctgccaccccctttccacagggcagacgtaggcgtggcctcagaggttcagaaacgcacaccctggaggaacgcacgcactcccgcagcgcacg

SEQ ID NO: 427747 - DNA, 122 bp, Homo sapiens
cctgcaacaccagccgctgccccgcgcccgtgggctgtcctgagggcgcccgcgcgatcccgacctaccaggagggggcctgctgcccagtccaaaactgcagtgagtggcctggaccaggc

SEQ ID NO: 427748 - DNA, 122 bp, Homo sapiens
atatttgtactgcacgtttcagcccaatagcaccttccttgaacatattttaataataatcgtgtaatagttaatatttgtttaacacaatgtatcagatactattctaaatcctttacata

SEQ ID NO: 427749 - DNA, 122 bp, Homo sapiens
agtgaaggggcacaagatctggagatctggcttgtacttttttcctttggccaggaactacggcttaatctcttcctttggtctcctcatatgtaaaatgaggtggctgaggccgggcgcgg

SEQ ID NO: 427750 - DNA, 122 bp, Homo sapiens
tcgcctcggcgcgggccgcgacgctctccgccccgagggcacgctcccggggctcttggccgcccctcgcccaccgggctctgggtagcccctcaccaggctcttggcggccacctagcccg

SEQ ID NO: 427751 - DNA, 122 bp, Homo sapiens
aacatgtgcacccaattccagtccagtcctcacagcagccctcggggtaggcaccacaatcgcagcagaggctcaggagctcactgtaacctccgcctttcaggttcaaacaatttttctgc

SEQ ID NO: 427752 - DNA, 122 bp, Homo sapiens
ctcgtgttccaagggcacatgggaaagttggcctcacatcctaccctctcatttcagcttcgtctggaagaagcagccccggaaagaaagaggacataatcgagggaggcaaaaggccacca

SEQ ID NO: 427753 - DNA, 122 bp, Homo sapiens
ttccagcgacgcagacaggcacctgtttggggccctggccagctcccagctgcctctgggcgggtgtcttggctcagggctgcagagtcagggggtgcagttgtcctctgggtcacggctgg

SEQ ID NO: 427754 - DNA, 122 bp, Homo sapiens
aagattaaagcaaaccgaggcaaaggccacggttgacagttccaagggaacccgcaaggccgcacaggatggggtggacgttttacgggagaaaaggctggggaagtgggcgggcgatggcc

SEQ ID NO: 427755 - DNA, 122 bp, Homo sapiens
gaaagtgccctcttcctttattccttcattttttgtactaaacacaaagaaaacagcaaccgctatttaaaatgtagacaatgttatcccttgtggctattgccctctcttccagagattag

SEQ ID NO: 427756 - DNA, 122 bp, Homo sapiens
ttccaagtttagagatttagctactgaagacttcataattcaagttgtagcctgtcaattcgatgctcagtgaagtctttgaagtttctgataatgatgtatgagcactgcctataaaataa

SEQ ID NO: 427757 - DNA, 122 bp, Homo sapiens
agggggcaacaggcggttacgggtgaggacaacaggaagcgttccaactgccggaaaagacgcgagcgctgaggggccaaggcagcccggtcccccgccgcggagacgggctggcgcggcag

SEQ ID NO: 427758 - DNA, 122 bp, Homo sapiens
cggggccgaaggggacctggtgcggtgggataggacagaagtgggtgcggccccaggaggcggggcccgagcgggcgggcccacggggggcgtggccggggcgtggccggagcggctagggc

SEQ ID NO: 427759 - DNA, 122 bp, Homo sapiens
cctcctcccgcgggccgccagggattggcgggcggggggcgggccgggggcggggccgggcgcccttcatcccgcgtcgctgttgtcgctgttgcagccgagttcagccgggagcagagcga

SEQ ID NO: 427760 - DNA, 122 bp, Homo sapiens
ttgagggcgctgtggcaacagctagcgccgggaggcaggaagccgatcgggggcggggatcgaaggcctcagacgtcgacgccggcgtgggcgcgagcacggtgcactctgggagctgtcac

SEQ ID NO: 427761 - DNA, 122 bp, Homo sapiens
acacctgctgtgctacagcccagcgaacgtgtgaaggctgccccctgctgcttgggctggcgccccacccaacacactcaagtcactgccgcccagggctggcctcttggtgctgggaaagt

SEQ ID NO: 427762 - DNA, 122 bp, Homo sapiens
aatgtgtttgttaaatgtcacagcgccgagaaggttcagtgctggagttcaagaacactccgaaatgtcttattaattcttcataacgcatcgacaggcaatgcttaaaaacaaagccccaa

SEQ ID NO: 427763 - DNA, 122 bp, Homo sapiens
gtgatagtggtggtggagttactgattggaaaaggaagagtaagagccacgtacccctcccgccttccatagtggtggatcagaagactctcccttgagattagaggtgactccaaatgtag

SEQ ID NO: 427764 - DNA, 122 bp, Homo sapiens
gtgagcacagaggaagaattgcgttaggccctttggccccggaccagtgtctgccagccacgtgctcagcctcccgtgcgctaaagctcaggtccttcctgtcatcctggtatcctgcactg

SEQ ID NO: 427765 - DNA, 122 bp, Homo sapiens
agagaggaaaaccgagtctcccgtggataattgtgtctaattcatttgtcgcggacctggcgcagtcgctctcccccgcagccccgcctcctccccgcgggctcagggcacaaaaagcgcac

SEQ ID NO: 427766 - DNA, 122 bp, Homo sapiens
gcgcgggcaggggagagaggcgcccctggaagtggagccggcctggacagaggcagggttcgggagcccgcccttccccacccgagcgcgcgggccccagcgccgtcctcgcccctgtgcag

SEQ ID NO: 427767 - DNA, 122 bp, Homo sapiens
atggtatttggtttgcccgcctcggcctcccaaagtgctgggattacaggcgtgagccaccgtgccctgccaagagggctttttattggagatcaggccatcctgctgcaatactgacccag

SEQ ID NO: 427768 - DNA, 122 bp, Homo sapiens
cctgggcctctcttcttggagtctcagtgttctcatctatacaaagggtgccaccatcaccggggaggccagttctccttcctgccctgggctgagctggtggtgcggccccaccagagcac

SEQ ID NO: 427769 - DNA, 122 bp, Homo sapiens
cacagggccaccacgctcagccgcactgccatggtcaccctgactcgagctcttggcaggcgtcggaagcgagcttgtcacagaggcaggctggctttcactctccatttcatttgtgctat

SEQ ID NO: 427770 - DNA, 122 bp, Homo sapiens
aaactccagaagttctagtgcaggaagagagtttgagaagtaaaatccaggcaagcaaagcgttgtaccacttgggactccccaaagtgaaacagcaaggaaggattgtgtccatcttactt

SEQ ID NO: 427771 - DNA, 122 bp, Homo sapiens
tcaacccgccaatcaggctgcgggaacgctgccgtggtagccaataagaagacagaatgccgttgcactacgctagagggcgggaggaggcggagaggaaaccaaggagtgaacggggatcg

SEQ ID NO: 427772 - DNA, 122 bp, Homo sapiens
cccagggcagtagcccgagtttctcggtgcagcctccatccttggttttatgtcaagatgcgacatctgggcttagaaccgagggcgaactcaccgcgcctaaccaatgttgagctcccaac

SEQ ID NO: 427773 - DNA, 122 bp, Homo sapiens
gtgggttttttttttttttaatcctatacaagcctaaaaaccattcttaactcagggacacggacacacacacacacacacacacacacacacacacccccacacacaccaggtcacaggct

SEQ ID NO: 427774 - DNA, 122 bp, Homo sapiens
ggggatagcctactgcacggctatgctatacgggatggcctactgcatggctatgctatacgggatggcctactgcgcggctacgctatactggatggcctactgcgcgtctacgctatacg

SEQ ID NO: 427775 - DNA, 122 bp, Homo sapiens
cttagacaattcaacttaacctaaattagtcaaacattggaaaactctcaacacacctggcgtgtttcagctgtatgacaacctgggcctcaagcttcattgcactgatttgtggcacaaca

SEQ ID NO: 427776 - DNA, 122 bp, Homo sapiens
gacctaacctcttcagtctgtccgttgctcagcactttctgcataagaaacaaacctgggcgcttgcctccctacttaaaattctacagagtccctatatgatcgtggtacctgcctagaac

SEQ ID NO: 427777 - DNA, 122 bp, Homo sapiens
ttctcaaagttactacttcaagctctgagcctactattaagaagtgccttctttctggtccggcgcggtggctcacgcctgtaatcacagcactttgggaggccgaggcgggcggatcgcct

SEQ ID NO: 427778 - DNA, 122 bp, Homo sapiens
ctcctttttactttacccctacccgacacttgaccccggcagtgtgaaccccgctgggagcgtccaaagccatgcctcatcgcggctgcgcagcgcacgtgcacagcctcgcaggagtctcg

SEQ ID NO: 427779 - DNA, 122 bp, Homo sapiens
tgctcaacagcgccaaagcgtgtggcccctcccaggacgctgcgccctgccgggcctccccgtcctagagctctgcttcttgccacctgcccccgcttgggctgcccctcctactgctctcg

SEQ ID NO: 427780 - DNA, 122 bp, Homo sapiens
aggtcccgcgacagctctggtggaagcagcttccggcttctgcggtgcgggcggaggtggcggggtccggccctcgccgtccagtccgcgcgaggcggtgcccgcccctagatggccagatc

SEQ ID NO: 427781 - DNA, 122 bp, Homo sapiens
ccccgaactccagcaaaaacctgtgcatgggggattctaccctggggttctgtcaatccccgcccctcctctgagcttcaggttttatcctactccatcaacgcgcagggacgttgggctct

SEQ ID NO: 427782 - DNA, 122 bp, Homo sapiens
tgaggtgaaaggagctgtccttctaagtctttgtatctccatttgtctgcagtttctcctcggtctcgtgtgtctgtgtgtgccagtcccttgtgctgacacaggacgtcccttaaagtcca

SEQ ID NO: 427783 - DNA, 122 bp, Homo sapiens
gaccctgccaagaagagcttcatctgtaaggcctgcgacaaaagcttccatttctactgccgcctaaaggtgcacatgaagcgctgccgggtggctaagagcaaacaggtgcagtgtaagga

SEQ ID NO: 427784 - DNA, 122 bp, Homo sapiens
cggcgggggctgcaggcacctccagagacgacctgggtctggggcgcggggaggttggggcgcggcgcccttagtaccctgcgtacgcctccctggcgttctcgtgggctcgccctccggtc

SEQ ID NO: 427785 - DNA, 122 bp, Homo sapiens
tctctggcgtagcccatgctgagtgggcggctggtcctgggtctggtctccatggctggccgcgtttgtttgtgccagggcagcgcgggatccggggccatcggtccggtggaggccgccat

SEQ ID NO: 427786 - DNA, 122 bp, Homo sapiens
attttacacaattataaactggggatgtctactacacgtgccccagtagctcttgtgtgccgaagatgacaaccagttttatttttattgagcataaatgtccaatgtatttatataaatca

SEQ ID NO: 427787 - DNA, 122 bp, Homo sapiens
ggcatcagccatcaaggcactggacgtctacttctggatctgctatgtcttcgtgtttgccgccctggtggagtacgcctttgctcatttcaacgccgactacaggaagaagcagaaggcca

SEQ ID NO: 427788 - DNA, 122 bp, Homo sapiens
agccgcattatgccgctttcagtaaagaatcatgggcggcggcggcctggcgggggcgagcgcgctgtgggccggccccgcgcagcctcagggcacctcccgctcgccgggactgagttccg

SEQ ID NO: 427789 - DNA, 122 bp, Homo sapiens
aggagaaaggaagaaggaagaagaataagaaagaagaaagaagaagaaaaagcaattattcgtatcttatatataagggaattgaggctcagagagtttaagcaacttgctgaagagagtag

SEQ ID NO: 427790 - DNA, 122 bp, Homo sapiens
tcccaggcccgtggagaggtgggtggtctgagtgaggtcgggcttggcggcgaggaaccccggtggggggaactggggacttcaagtgagacccaggctccagacacctctagtttctaccc

SEQ ID NO: 427791 - DNA, 122 bp, Homo sapiens
agtccggctccgggctgctggggaagtcgcggtaggccacgcagatagtgcggagcccatcgcaagccatgggctcaatcaccttctttaccatctcgtcccggtcgcggggccggaagaca

SEQ ID NO: 427792 - DNA, 122 bp, Homo sapiens
gcatccactgttatttcggggcactggaaagtgtctgttcctggccaggcctgaggtcggcgagggtggctgaggctgttgtgcagtagggcactgggcctgtggagaacacctaccccagt

SEQ ID NO: 427793 - DNA, 122 bp, Homo sapiens
aagttgactttcgcgtttttaaggagtggggtgcagggaaacaatcctccgccggccctgcgggctgatgccgaccctcacctgctcccgccacgtggagaggtagagagaagccccgggcc

SEQ ID NO: 427794 - DNA, 122 bp, Homo sapiens
gcggcagcacgcggccaggccaggcggccggacaggtggggaggtctctgtggctctccacgcccccattggtctgaggaggactctatgccctttctgagcaggggcccagcctgggggag

SEQ ID NO: 427795 - DNA, 122 bp, Homo sapiens
catccaccgcctcttgggagcctgcggggccggggcggggccccgggtggggagatgggccgggctaggctgggaggagaacgcgcggtgctgggggttgtggcctgatcgcttgaggggct

SEQ ID NO: 427796 - DNA, 122 bp, Homo sapiens
aaactctctccatcagtaagtgatgcaacgctgcaccggatgcaagatcacgtgaccacacgctccccacacatgcaaagatctcacgtgaccacgcgcttcccacacacgctcacgcaacg

SEQ ID NO: 427797 - DNA, 122 bp, Homo sapiens
taagaacaaaaaacatttactaccctgagactggtgataatacagcagcagtgttgtgcacggagacaagaaaagcactgagtagagatctgatgaaaatgaagcaatgagcttctcaggga

SEQ ID NO: 427798 - DNA, 122 bp, Homo sapiens
ggatctgtataaagagcgctgtgggagtcttttgccctccgctctagctctatcttcctccggaccccgaagcttaagaattatccgcctcactctcttttttagaaataggagggaaaggt

SEQ ID NO: 427799 - DNA, 122 bp, Homo sapiens
ctgtgctgagtcgccgagcagcccgctctccatgtgacttcagtttccgtccgttccttccgctggtgctaaaataatctgatgccccacagcaaggaggtagcccagccccgcgttcggct

SEQ ID NO: 427800 - DNA, 122 bp, Homo sapiens
gtagagaggggaatgtctgtaaccagtccctgctgggagccccatgttagtctgcaggctcgctccccactcttcttgggaagagccctttcagttcctggggtgcaggttttagggacctc

SEQ ID NO: 427801 - DNA, 122 bp, Homo sapiens
ggccatgttctcagccagagccctgcagagacacacagagaagaagactgggttagtgagcgtggccccaggaggggtctcaactctaggactctgagccacctccttggcataagggctcc

SEQ ID NO: 427802 - DNA, 122 bp, Homo sapiens
tctggctgcattccaaaacaatcccgactcagatagagtgcaaataccaactgctataatcgatacagcaaaaaatggctaagagtacagaggagtagaacattttctcttaaaattaagca

SEQ ID NO: 427803 - DNA, 122 bp, Homo sapiens
gaggacagcaacacaggcaggagaaagaggtggcggtgaaacgctgtccgaatgagagggcggccacatgcttaaggtgccagtgaaaaaaccgacagccagaattctacagccaggaaaga

SEQ ID NO: 427804 - DNA, 122 bp, Homo sapiens
tattatgttaaatcacttgtttttgttctcacggcttcctgcctgctataggcataattacgaggaagcagaacttctccagaagcaagcgcacatgcgttccaaaataagagcaaattcgc

SEQ ID NO: 427805 - DNA, 122 bp, Homo sapiens
gcctttctcttcctcctccagcaggctcgcacgggctgtcctagcaggggctacggcggccgacaagtcccatgagcagcacctccgcttctgcacgcgcttcccaggccggaatgctcggc

SEQ ID NO: 427806 - DNA, 122 bp, Homo sapiens
caagagaaactgggaatggttcctgtcctggggattcgggggcaggggctgctcccactgcgttaaactcttgggattgccagagagaatggcctgggagattcagctactcccagacttgg

SEQ ID NO: 427807 - DNA, 122 bp, Homo sapiens
gagatgaggccaaagccaaggcctctgcccagcaggcgacctggagcgaagcgggaggtgcgtgctccctgcagcttccgccccatccccaccaagcttgcagggaagccccagcatggagc

SEQ ID NO: 427808 - DNA, 122 bp, Homo sapiens
atgggtggtgtgaatgaggaatgccttttccttagcactgcccctgctctcctacagagacgagccaaagctctttggagttttgatgctaaaaataggcacatcagagaccccagtaattt

SEQ ID NO: 427809 - DNA, 122 bp, Homo sapiens
tggcctctcccagcaaagctccagggttggaaagagtcccctggcagggaattggcaccccgtcgtgcccatcctctctctctgactgcctgctggaaatgcccccatctccctttgagtcc

SEQ ID NO: 427810 - DNA, 122 bp, Homo sapiens
ccactgcacccccagctctgttccagacacaaggagccaacccaggggagcccaccaggacggctccgggtcccaccatggccgggaggggaaaggctcccacgggcctgctcggccgcccc

SEQ ID NO: 427811 - DNA, 122 bp, Homo sapiens
gagcgagcccagcgccccctctcggccctacgtggtgtcgggctacagcggtcgcgtgtacgagaggcccgtggcaggtccttatatcaccttcacggatgcggtcaatgagaccaccatca

SEQ ID NO: 427812 - DNA, 122 bp, Homo sapiens
gagggctgccaagacagggccatcggggaagctgctgccggttcatttgcagcttccttccggaggcccagatgcggttctgcagaaaaagagtgcttcgggggctccggagcccaccgcac

SEQ ID NO: 427813 - DNA, 122 bp, Homo sapiens
cccgttttcggggtgggggggaccttacggagccctagagctggacggggctccggctgccgtgccgcctctcccgcggcggctaaaatgtgctgttcacgcctcagatgggcctctccgtt

SEQ ID NO: 427814 - DNA, 122 bp, Homo sapiens
taaaggaaggctaggatgcaagctgtctgtaaggctgttttgttttcacttggcttacgtcgtagacaggtctctgctgggggacggagatgaccaccggccttcccaaggctgcataagat

SEQ ID NO: 427815 - DNA, 122 bp, Homo sapiens
aaaataagggaggcccaggtgcataactggaatctaggagactgtggaaaaggcaattcccgcccccctggtgaaatgtggtgctgatttagacactaaatgaatgaaagatggacacaaga

SEQ ID NO: 427816 - DNA, 122 bp, Homo sapiens
gtcggtgcccttgtctgtgttaattctcagcctcctgctggttttcatcatgtccgtcttcgtggccgccgggctcttcgtgctggtcatgaagcgcaggaagaagaaccagagcgaccaca

SEQ ID NO: 427817 - DNA, 122 bp, Homo sapiens
gccagcattctaggagttctctagacgggctgaaacgcaccgcagggatacagggagggccggagaataggcgtttgtttccaggtagaattttggggcatacccggccttgtctgggagca

SEQ ID NO: 427818 - DNA, 122 bp, Homo sapiens
ttggcacacggcagcctgtgcctctgaccctgccaacgccagcctccgccacctcctgcccgctcagcctccggaaccatgagcaggacgttccagatccgagctgctgacaagccacagca

SEQ ID NO: 427819 - DNA, 122 bp, Homo sapiens
ctggtgctcgtacacgtcctgaggcagccgcccgatgaacacctctgacccagctggcggcgggctgcccacccagcctgtgggaagagggtatgcaaggccaccgtcaggcgacgctttcg

SEQ ID NO: 427820 - DNA, 122 bp, Homo sapiens
ggtacgccaagacacaaagtccacgtcaggactgcgtatgcccctggccctcctggtgggcgtgcaaggcgagcccagtgcccatggccagccacactcatgcccggggcagccggggatcc

SEQ ID NO: 427821 - DNA, 122 bp, Homo sapiens
cggccgaggcgggcgaggcgcggggcgcgcggcgggccaggctggggaccgggaagcccgcggagcctcgcttttaagcggaatggtctgggacagccccaggtggttgccaggggaaggga

SEQ ID NO: 427822 - DNA, 122 bp, Homo sapiens
gcccttatgacgtaagacgtgtggcacctccatcagccctgggttccccagaaaaacgcccgcggcagaggacaggtcaaaggtcagcgctagtcagcgtggactaacagcttcgggcggac

SEQ ID NO: 427823 - DNA, 122 bp, Homo sapiens
agccgcagagcgccaaggccatgctgaatgcccgttctagagaattcaggggccccatcccgggtttctggggtgcccgggcggcctgtgctcgtgagctggggtctccgggcaggcagggg

SEQ ID NO: 427824 - DNA, 122 bp, Homo sapiens
agatagggaaaccagctcagagaaggtgagtaatggacccgaggtcacacagctgtgagacgcagggccaggatttggctccagctactagcctgtagcagcatgggcatggcccagtggaa

SEQ ID NO: 427825 - DNA, 122 bp, Homo sapiens
ccatcagaattcggatttctctccacgtggcgtctgcctctgtccccttccaggctggagcgacgtttccacgttcggatgctgcagcctctgcacctgcctcagacagacccaccagatac

SEQ ID NO: 427826 - DNA, 122 bp, Homo sapiens
aggaccctcgcggtgcctcagggctggccattggcagccgaggagacaggcacttccgggcggagtgtaagacgctggccaatcacagcctggcagcgggacttccgtcgtcgtcctcggac

SEQ ID NO: 427827 - DNA, 122 bp, Homo sapiens
gctcaaacgagaaaggcaacttcaggcggggcgggagcgtggacggtgggtgggaccggacgcgggcgggcaggggcggggcgcgggcgcccctgcactagtcggaaaaaaccgagaggttt

SEQ ID NO: 427828 - DNA, 122 bp, Homo sapiens
gttgagttttcagcccatggcgccgcggagcgtttggaacctgggcctccgcccccagcccgccctcctattggtcagttccagctacagccgcgccatgagcctatctctcattggcccga

SEQ ID NO: 427829 - DNA, 122 bp, Homo sapiens
cctgatggggggtctgggcactctccctaattcatcgcgaagactctgacacccaatgcccgtcttcaggccccggcagatgcagagaagtgggcttcacacccacatctgcctgacctcag

SEQ ID NO: 427830 - DNA, 122 bp, Homo sapiens
gctgagcgggcaggacacggaggaccggagcggcctgtccgaggtgagtgagcccggggccgtcggccccctctcgccgcgctcccgccctgcgtcccctgcccgggcctgggaagcctgcg

SEQ ID NO: 427831 - DNA, 122 bp, Homo sapiens
ctggggacagccgggacccgcggcggcctcggaccggcaccctcaccgcgggcggaaacccgtctctgagcactcagggaatctggacaaacctgtctcgaggtgatgcaaggcgggggccc

SEQ ID NO: 427832 - DNA, 122 bp, Homo sapiens
tctgggcgcggtcggcagcgtttctggaccccagcctgtgtttgtcgcttgtggtggtggcgccagacctctggcgtacggagtaaaagaaattttctgttcttaaggcttgtactctgaca

SEQ ID NO: 427833 - DNA, 122 bp, Homo sapiens
gcatctgataatatccgggccgccggttgccgggaggtgaaccgaggtaaactcgccgcgcgcggggcgcagtgtacatagtaaccagccctgagtaaacgttcgtcatattcctatgagct

SEQ ID NO: 427834 - DNA, 122 bp, Homo sapiens
cccacgcgcgcgtctgctggcccaggcctggcagaaatgactgtgagtgcaaggtgtgagcggggctaagaatgggaaagagagtgactttcgcctgagaagctgcagttgtcgcctgtaga

SEQ ID NO: 427835 - DNA, 122 bp, Homo sapiens
gccccactgcagaggcaggaagtaccgcctgatgctcagcttccgctgggggtgttggcacggcccagcgccctccccactcccagggaccttcccacctcgagcctgtagcactttcactt

SEQ ID NO: 427836 - DNA, 122 bp, Homo sapiens
tggaaagtaggcgggacaggccggatgaataattcggtgtccgacttttcctgcctgcggcgcagtccctccccggcttcgttactcgagtgcacacgcggccgggctctcggccctcgatt

SEQ ID NO: 427837 - DNA, 122 bp, Homo sapiens
actatatcactacagtgtgatcgcattcagatttaaaaggtttgagtccactctcaaagacggatatatttctactttctccacagtacagtctggcttcactgagttactggtaaagacac

SEQ ID NO: 427838 - DNA, 122 bp, Homo sapiens
gaagacttgagctgaccttgagatgcattttaaatctttcattttttaagaaaatataatcgcatggcagaaaactttcaaagttcagggaaaaaatcacttcattgcagcagtcattctct

SEQ ID NO: 427839 - DNA, 122 bp, Homo sapiens
gcggccagcagctcggccggcgcctccatcgcgccgcggccgccgagtgccggccagctgcgaccccgagggatcccgccgcgccccgtcctttgttaatgaattttatgagttctttatat

SEQ ID NO: 427840 - DNA, 122 bp, Homo sapiens
cccctgaggtatagaaccggcaggcaggcaggctcggaacaaaacaccctgaaccagccacgaagactgctgctcccagactcctttctgcttcagtggtagatgaggccagggcagagggt

SEQ ID NO: 427841 - DNA, 122 bp, Homo sapiens
tacaagttccagcacaaaactggcatttctttgccatttcttgccagtaagaagttgacacggaggtatttgaaagcaatgttatgtgagtcattcttaagtgttccaagtaagtttagaaa

SEQ ID NO: 427842 - DNA, 122 bp, Homo sapiens
tcttgaactccatcttcttctgaatgctgatcatctgttccgtgcggctcattttcctgacgccctcgttgcatgccttcaccacctgggacaagaaggagggcacatcaggccaccaaagc

SEQ ID NO: 427843 - DNA, 122 bp, Homo sapiens
ttgcgaggactgcagctgcagggacgagaaggtggcgccgctggctccttgacgcgctcccgggcctcaggtatcagcccccgctctgggtgcgccccgccttttgccgttgtcatgggaac

SEQ ID NO: 427844 - DNA, 122 bp, Homo sapiens
ggtggcaagggactgggcacccatgggaattggggtcgggggaggactttgcatctggaccgtgggtttatttttcttttaattcttctgaagagcagcttaaacactggagtccttggccg

SEQ ID NO: 427845 - DNA, 122 bp, Homo sapiens
cacgcctagcgtcgcgtataccggaaaactgcatcgtccagaattgcttccgagtcggcgcggcgcaaggcttgctgggagacacataacctcgattttcttccgccatccggctaaatagt

SEQ ID NO: 427846 - DNA, 122 bp, Homo sapiens
aaggagggtcgtcctcactccgccgccaacctactagcaccatcaccagaccctcgagggcggtgccgtggacctctccagatctcaaaaggcagattcctacttcttacgccccccacatc

SEQ ID NO: 427847 - DNA, 122 bp, Homo sapiens
aaaggagaaaccctcccttgtgcagagggaggggttccgagcgtatctcccagggtgcgacgagatgcggttggttttatagatgagcttgaggatgcggtgtctgattcccacagggttta

SEQ ID NO: 427848 - DNA, 122 bp, Homo sapiens
ggaatctacctgataattaaatgcaaaggattcctggggcagagacaaacatcagcacagcgtgtgtaacctgccttattcagtaacgaaactctgggggcagaggaagcctctccacggct

SEQ ID NO: 427849 - DNA, 122 bp, Homo sapiens
tccgatccagggggctttgctctggaccgcaattgctcaggtggtctccgaactcggcctcggtacccccactaggcattgctgctttcagagagctaggctccctacccaacgatcctaga

SEQ ID NO: 427850 - DNA, 122 bp, Homo sapiens
catccgcctcgtgttccagtgcggccacggcgcatgcgccccctgcggctccgcgctcagcgcctgccccatctgccgccagcccatccgcgaccgcatccagatcttcgtgtgagccgcgc

SEQ ID NO: 427851 - DNA, 122 bp, Homo sapiens
gtctagcatttctatttttgtatgaataaatcctaatagtcctaggaacccattcaagaacgcacaaatcagaagtaaaatctttctctaaagaaatgaccagactttctttcctacaacct

SEQ ID NO: 427852 - DNA, 122 bp, Homo sapiens
gagtcaggaccagtatctctgaggtcagctgtgcctgagaaatcaaggccaccttctgtgcgcagagcgtggctccagcctggtgtgggtgcaggtgctggtggcaggccaaggggataccc

SEQ ID NO: 427853 - DNA, 122 bp, Homo sapiens
gaataagtacttaggagctcctatgctctttttttttttaaccctgttgcttgcatcacccggttccaaccctatatgaaagtttcatgagcatgtttctgtcactgaggcagcttctccat

SEQ ID NO: 427854 - DNA, 122 bp, Homo sapiens
acgcgccgtcccagaagcacctcagcttggttccgcggatgaacggacgcttctcccgcccggcccccaaaagctgccgtcctccgcggccactacgaccagctgcggtccggggcccgggg

SEQ ID NO: 427855 - DNA, 122 bp, Homo sapiens
ttcaggtccagggtgtagattgcagcctgtttttgtggtctgtcattccaacagcagtttcgtcttcagagccctggcactgccctcctcgtctgctttattcttctggctctcctgggact

SEQ ID NO: 427856 - DNA, 122 bp, Homo sapiens
tggacactgtataaaacggttgcgtgtctggaatgccgtcgttttgccccgcggccccatcgtacatgcgcatccccgcagccgccaccgtctccactttccgcagcagcgtccctgacgct

SEQ ID NO: 427857 - DNA, 122 bp, Homo sapiens
ggaagaagcaaggaaaaaactggcccaaatccgccagcagcagtataagtttttacccaccgagctgagggaagatgagggctaaaggtgcgagcccagatggcgagccccaggggatggcc

SEQ ID NO: 427858 - DNA, 122 bp, Homo sapiens
tctgccagatcctctacgtggctgtcactgtttggcctgtcctcgtcgctgctatctctccgtccacctacctgcctgtcttctcatgtgctggccactccgccagccaactctaccactct

SEQ ID NO: 427859 - DNA, 122 bp, Homo sapiens
gatcacggcaattcagactgtcccacttcttacttgtaaaacggaatttatatttgtgctcgcccttcgttgctggaatgttaaaaatctctggaagagaggtgctatgttctttcaagtgg

SEQ ID NO: 427860 - DNA, 122 bp, Homo sapiens
tgagacctccctcatgctggagtggacccctccccgcgactccggaggccgagaggacctcgtctacaacatcatctgcaagagctgtggctcgggccggggtgcctgcacccgctgcgggg

SEQ ID NO: 427861 - DNA, 122 bp, Homo sapiens
gagcagaggcggctctggaagtcggtttagtgcggagaccgcgaccggaggagcgcagaacgctcctcccagcgtcctgggctccgcaggcacaatttttaaaccagaggcgaaatccgagt

SEQ ID NO: 427862 - DNA, 122 bp, Homo sapiens
taaatgttagctacaattattattcatgaaagaaagctcacagtttatagtgaaaagacacgcaggaaaccaagtctacatatcagcctggctgggaagtgccctatcacaggggtcagtta

SEQ ID NO: 427863 - DNA, 122 bp, Homo sapiens
tcagtatggctaagatcataaggagaaggccattaactgttttgaactataatgccactgcgatccataaattagtaaataagtgatggtgataggtggcttgtggctgggctatgtggcca

SEQ ID NO: 427864 - DNA, 122 bp, Homo sapiens
aaagggaaaggcattggggccacagtgggctccaagtggaaagcttcatggtctgttttacggaagtatttgctgtccacccaatgcaaattctaaagtcgttcccccagcgtcgctgcccc

SEQ ID NO: 427865 - DNA, 122 bp, Homo sapiens
tgaaatcccgacctcaggtgatccacctgccacagcctcccaaagtgctgggattacaggcgcaagccaccgcgcccggcctaagatttagagttattaaagagtggttgggtgaacgcatg

SEQ ID NO: 427866 - DNA, 122 bp, Homo sapiens
ctagttttccctggatcttccgcggcagagaagcctgcgtccgggaccagcagagtgagccgaccggcggatgcagttgaccccattcgcgtccaaacttcacttcgagaaaacgcagccct

SEQ ID NO: 427867 - DNA, 122 bp, Homo sapiens
gtaaagctacagggaactacaagtcaacagatgttttgggcaacagattacaaatggagacgtacaacagaccatctaaggcccagaggagaagctggggtgagactctttggaaaattagg

SEQ ID NO: 427868 - DNA, 122 bp, Homo sapiens
tcacggggagggcggcgggagcaccccacagcccatgtgacaaatgcggcgccgacacaccggagacacttgcctggaaccttcaaggggacggagaggtcaatctgcaccacgggaatgtg

SEQ ID NO: 427869 - DNA, 122 bp, Homo sapiens
ggggctcagcagaggccttgacctgaggagtcttggctgtgatgggcgaggagtcctgcccggggcagcatagatgacctgtgctccaggtgagcagcgagcctgatggaaatgctcagaga

SEQ ID NO: 427870 - DNA, 122 bp, Homo sapiens
ttctcggtcttagttctactccatataaaacagtagtgcctacctcatgagatttcaatgcgcttgtgtgtgtaaagtttactgcctgcctggaacatagtaaatgctatataaatatttga

SEQ ID NO: 427871 - DNA, 122 bp, Homo sapiens
ttttgctggtctgtgcaatagaaaacgacacgtggccggctgggccctccgtcagcagatcgcggatccggaagcagggaggtggcagcgggcgggtgggggcggttgggggggtggtgtgg

SEQ ID NO: 427872 - DNA, 122 bp, Homo sapiens
taggcgcgcggagtctggggcggaggcgagcggcgggtgtgcgcgactcggggtgattcacgccggggaccccaaggaggtgagtggtgggtggggggcgtctctgggaggggccggagtca

SEQ ID NO: 427873 - DNA, 122 bp, Homo sapiens
ggcaggaagccgatcgggggcggggatcgaaggcctcagacgtcgacgccggcgtgggcgcgagcacggtgcactctgggagctgtcactaggcccttcggctcccggtctcggtgtagctg

SEQ ID NO: 427874 - DNA, 122 bp, Homo sapiens
gaacattggaggagatgctggagagtgaggcgcagtgggtccaggagacgggagggaaagcgatgaggaaaatgtgtgtgcctggcacaggccaggccatgagaagaggtcggtggattgga

SEQ ID NO: 427875 - DNA, 122 bp, Homo sapiens
aaggcaggcaggacagtgcgggcacccttggtacagctggggagactgagccctcgagggcggcggacgctagcgcaggatccctctactgttggggaaagagcatgtgcttgagcggggag

SEQ ID NO: 427876 - DNA, 122 bp, Homo sapiens
ccaacatgatagcattactgaacacaggacacacatttgcctctcttgcttattattacacgtggccagtaccttgatgcttaacaaatatatctagattgttcattaattggatatatgca

SEQ ID NO: 427877 - DNA, 122 bp, Homo sapiens
taagtgagtaggagagaatctccttaggtacttcagcaacagcctgttgtcttgcttgaacggacaagtaagaaatgtcccctgtattcttgagctcagagggctcagggcactccctgttt

SEQ ID NO: 427878 - DNA, 122 bp, Homo sapiens
ccagcgcctttctctccttcaggcctccgcccggggacaggcgccggtcccccgccccggcgcatccgccccgtggggacacttaccagcccctgcatcttgccgtcggcgcccatgcagag

SEQ ID NO: 427879 - DNA, 122 bp, Homo sapiens
accctgaacctgagactggctctgacgagacaaatggggtgctgtgaaacttccctcatccgtccacaggcctgctgctcctcccctgccatgctctgagctccctgaagaggtgaccccac

SEQ ID NO: 427880 - DNA, 122 bp, Homo sapiens
cgtcaccaatggtagtcaagtgtgtggtgcagcaggaaacatttggagtcgactcctttacggaactcaaatgccctcacatttagggagaaatagaaagaattacgactcatgaaatcgag

SEQ ID NO: 427881 - DNA, 122 bp, Homo sapiens
ccgcctgggagggcgctaccctaatgaagcggctctaagtcacctttgaaaggaaatccccgggcccaagccttgacctgcaccggggccatagtcagcaggggcggccggtccagagcctc

SEQ ID NO: 427882 - DNA, 122 bp, Homo sapiens
agtcttacgcatgaggctaaacctcttctcttacctcaaagatggcttcagtatccctcccgttacctccaacagggcaagaaatgtaccaaaagcaacacacaggaggccacagtggggct

SEQ ID NO: 427883 - DNA, 122 bp, Homo sapiens
tagagtgagggaagagaaaacagcggctgtaaccttgtctgactgtagctgattctgaaacgcatgaagttgtcccacaccaaggtcagcgactggcaggttctctacaaggtaaggccttc

SEQ ID NO: 427884 - DNA, 122 bp, Homo sapiens
cagggttgagttgttgcaacatagaccacagggcctgccaagcctcaattatctgtgctccgaccctttaagaaacacttctctcacccctgagctaagcagaataagaggggctggacgtg

SEQ ID NO: 427885 - DNA, 122 bp, Homo sapiens
gcgcgccgcccgccttccaagcccatggtgaacccctctggtgctgcgggggaccggtcgcgccaggcctaacccacccagcaacccacgcaggggcccttcctgcccagcgcccccccacc

SEQ ID NO: 427886 - DNA, 122 bp, Homo sapiens
cagtaaacacgtgttgattgaattgagcaagtgaatgagtgaacggctgcagcggacccccgaactcccccaactcgaaccaccgccgcaggtaattccacctggcccaggttccaccccag

SEQ ID NO: 427887 - DNA, 122 bp, Homo sapiens
acagcctgatctcaagtacccacagaaagccagcaaactcatgcagtgaaaactattctccgaaacccatgcaatgaaaactattctccgatgggaaaggaggaggcagagagccagcaaca

SEQ ID NO: 427888 - DNA, 122 bp, Homo sapiens
tgaatgaatccctgggattaagacggtgctgcggatgcggtgcctgagaggcggcggttgcggtgaagtgagctcagcgggccgcagtccttcatgctcggcaccgccacaggctgcccttc

SEQ ID NO: 427889 - DNA, 122 bp, Homo sapiens
gaaatggaggcagggaccatcaggaagctcaaaacctttgcttcagccgagtttgcagaacgccctgtgaggagaatgggtgagctgggtcgaggaagcttcatcctcgtccccatccccca

SEQ ID NO: 427890 - DNA, 122 bp, Homo sapiens
gaggagagcagggactctgctggtgtcttatttacacaatgggattgaaggtgtttgtctcgcgaaactaatcgatggggtgagaagtagctgaataacctgcagggggcagcagagcccaa

SEQ ID NO: 427891 - DNA, 122 bp, Homo sapiens
tgtaaaagtaggagagtttctcttttataataagattggggtcttaaggtaaagtgagttcgagagattttgtatctttgaaaaagaccacagtgctgaaggttaagccattttccctttga

SEQ ID NO: 427892 - DNA, 122 bp, Homo sapiens
ttgccctgggccgctgccggtcaggtcggccgcccctgacagctccgggagcctcaagcgcgacagcggcgccctcacctcgggacatccacacaccgaccgctcctgctccagaggcaaca

SEQ ID NO: 427893 - DNA, 122 bp, Homo sapiens
gctcactcctggcagtaatggagtaaaccgactcagagaactatagccctaggttcggggcgttaggaaagtggtcaggatagcagcaacactggaagggtagttcatcaaggaaagagccc

SEQ ID NO: 427894 - DNA, 122 bp, Homo sapiens
aagaagaaacccaaacgctctgtgaatgggacatgtgctcagaggcgtctgcagttgaggcgggtgacgttctggggtccctgggaagttgtcatcaccctgctgacatgagtgtggatgtt

SEQ ID NO: 427895 - DNA, 122 bp, Homo sapiens
ttaaaaatagtaatttgctttctcctaaaagcgtataaacacaaaaccagcccctgactgcgagacaccaagcttgtttaggtctaagcccgcagagaacccccgatcccagaattagctgg

SEQ ID NO: 427896 - DNA, 122 bp, Homo sapiens
tttggatcctgggggcggaaccggcgcgatttggccgacttcacctccgagacgcttcagcgccttatctcagagcagctgcagcagctgcatctcggcaaccgctcgcggcaagcctcccg

SEQ ID NO: 427897 - DNA, 122 bp, Homo sapiens
gccctcctagagccggagctgcggcccgaggaccgtatccttgtgctaggtgggtaatcccggcgcggccccgccaggtagagctggcaggaccggcgccgcatgggcttggcctggtccgc

SEQ ID NO: 427898 - DNA, 122 bp, Homo sapiens
gggtggcctgagtcctgcagaggggacccctgggcggtgtggcagccctcctggtcctgacgtgctctaccaatcgagccacactcccgccaaggcgacccgccagctgtgggccccgagga

SEQ ID NO: 427899 - DNA, 122 bp, Homo sapiens
aaccagctgagaaatcctcactgatttctcagggaggaggaaacctttcccttccctccccgggacaagtcgaagccccaccccgagggagatttgtgtccctgaatgtagtagttggtgtc

SEQ ID NO: 427900 - DNA, 122 bp, Homo sapiens
agaagctcaggctggcagcttgggtctcacatacctgactgactgtcattaattgcctctcgcaggctcttgccctctccacctctctctctttccttctccctccctctctctctcaacct

SEQ ID NO: 427901 - DNA, 122 bp, Homo sapiens
tggtcagtatgaacatacagcagcatggctgggaatacaggggcagaaatgtaaaggaaacgcatgtgaagtttgcttttaattactggaccgttgtattcaagaaccttcaatggcagtat

SEQ ID NO: 427902 - DNA, 122 bp, Homo sapiens
agatgaagaaaaaaacaggcacccagaggctagtctagctctcacagcaagtcagaggagcgtgggactagaatccagatctccccagtcagtgcctgggttgtactactgaacctcccccc

SEQ ID NO: 427903 - DNA, 122 bp, Homo sapiens
gaacgcggggacgccgggacccagccctgaattggggacagtggcccagcaatctcctggcgccccacgatggacgtggtccgagcttgccaggcgtaaagcctgtttgcaaacgcaaggca

SEQ ID NO: 427904 - DNA, 122 bp, Homo sapiens
agcagcgtgcagcgggtcctgcttccattcgactggctgtgcaggacggccacaaacacacgcaggtgcaccctgcgcttctgagcagaactctcggaatgaagtaatgcagacgtccacaa

SEQ ID NO: 427905 - DNA, 122 bp, Homo sapiens
agggactccttttcaataagaattaggaagatgagaaagtaatttgagattttactctgtcgaattttagagtatttgaagtgattgttagatttcacttctaaggagttgattgattaaac

SEQ ID NO: 427906 - DNA, 122 bp, Homo sapiens
aaacaaaaccctctccttaagacactgcaatagacaacttagtatcaaaacttctaatcacgtctttcccaaaccccttggagacatttagcaatcagtaaaaggtggtttcatttaatttg

SEQ ID NO: 427907 - DNA, 122 bp, Homo sapiens
tttgtctttttttaaccccagaaaggcgtgacgtgctaactgccgtcgcgggttagagtccgcggccaagcccgcgcccgcccacaaagtccccgccctccctccggcttccgccccgccgt

SEQ ID NO: 427908 - DNA, 122 bp, Homo sapiens
ctcggtggctccactccctgctgctccactgcaacagcccggggagatgctgtcccactgcgccccagaaggaaaataagggcccgggtctcacccccacccacctgcccggtgagggaagt

SEQ ID NO: 427909 - DNA, 122 bp, Homo sapiens
ccaccccatgggagctacattgtccttgtcctcaccttcattcccctcaggcgggccccccggtgacatgacatcacaagtctttgggcacaggaggagggacatacctgtggagacacccg

SEQ ID NO: 427910 - DNA, 122 bp, Homo sapiens
gttggacgtgatagtcccagctgtgtgtcagggctaggaggacttgaggcggcatgggggcggggtgggggaatgcgcggggcaagtgaccgtgcgtgtaaggggtgaggcgtatggagctg

SEQ ID NO: 427911 - DNA, 122 bp, Homo sapiens
cctagaggcagcggacgcaaacacggggagaggtgcaatcgtctcaagtgactcggcgggcggggcccacaaccggaagcgggtgggcgaccttcacccacgtgcgctgcggcttcgttcgc

SEQ ID NO: 427912 - DNA, 122 bp, Homo sapiens
acttggggccccccgacatgacggggcaggactgctccgtgcagccgtcgctgatggtgccgtagatgaggttgacgcggttaaagaagtccaccacgtgaacagccacccagtcgttcagg

SEQ ID NO: 427913 - DNA, 122 bp, Homo sapiens
gccaacgctgctcctgccgcttctatcccagtggaataaatgcttaagttaggagagcagcgggctgaagacattgccaagggggcgggcccggccggtgacgtgagcccgccagtccgggg

SEQ ID NO: 427914 - DNA, 122 bp, Homo sapiens
ggcagccagctttccccagcctctgggagtcgtttcggtggtgcatgctggtcctgctgccgccgccgccgccgccgccgccaccgccggcggggaggatcgccgaggaggaggaggcggag

SEQ ID NO: 427915 - DNA, 122 bp, Homo sapiens
catagagacaaggagttcaccacaggaccgcgccagggctgaaacgaagagtgcacgcaccgcccccacgcccgcacgtcgccacaccccttatgcgcatgcgcgcgtgagcaaaagtaacg

SEQ ID NO: 427916 - DNA, 122 bp, Homo sapiens
tcacagctgagaagaggtggaatttaactcaggctgtcatgatccttccactgcagcagacgcctcttctgccttgcccaccgccactggcagagatcacccctcagacaccctggggccta

SEQ ID NO: 427917 - DNA, 122 bp, Homo sapiens
atggtatattccgtttcttcacccatagggcttcacaacatcagcactgctgacatttggcgctgataatcctctggggtgaggccatcctgggcaccacacggtgttgagcagcatctctg

SEQ ID NO: 427918 - DNA, 122 bp, Homo sapiens
acccaggcgcaggcccgagtgctcggagacctgggccgcctggagagacgccccttatgacgcagccacatctcattggtcgaggcctatgagcgcctcgcatcccaagatgcagtgcttct

SEQ ID NO: 427919 - DNA, 122 bp, Homo sapiens
cctcacaggtgcactgcaagctgtctttgagccacagcaccgatttcttcaggtccctttcggacacaccgttcagcttgtaaatggtcttgctcttggtctccaggatgattttggtatct

SEQ ID NO: 427920 - DNA, 122 bp, Homo sapiens
gacattgaaactctgtgggtcttggtttcttcgtctgcgaaatggggccgtagtgattcccgtcttctgagggttgttagaattgagttgtaaggagctgggcctctgtgcaggagtaatag

SEQ ID NO: 427921 - DNA, 122 bp, Homo sapiens
tggtgttcagccactgtgttgatcctccacggtagcctgccacacactgctctggcgaggcgtccaaccggggcaaatgcgtacccgggagcgctctcaggatctgcgtctctcaggctggt

SEQ ID NO: 427922 - DNA, 122 bp, Homo sapiens
cctcgccggcccgcccgccgctgctcttcttccaggcacaatcgaagaggaggcagtgagcgagtcaaggccacagagtggatggaatcaaggttcacccccaaagctcacctcctttgcaa

SEQ ID NO: 427923 - DNA, 122 bp, Homo sapiens
gttttctccccataatgtcgttgttcttgctttgaattatgggtgctgggagaaactaaacgaagccgtcactgagcaatacacccacagcccgtcgaccgataggaaccttcgcgtggggg

SEQ ID NO: 427924 - DNA, 122 bp, Homo sapiens
tttgaggtcgaggctgcagtgagctatgagccggccactgcactccagcctgggggacagcgcgagacctcgcctcagaaacaaacaaaaaaagtgttggtataaatgtataaatgcagtga

SEQ ID NO: 427925 - DNA, 122 bp, Homo sapiens
cgtaacttagctgcttcatcattagcacacaccacacttaaccgtttacacagtagtcaccgtttactgaacacttatgaggagcttggcactatgcttaagtactttaggtattttatctc

SEQ ID NO: 427926 - DNA, 122 bp, Homo sapiens
aatcagtccccctaactggggcctgcagcacgaaccggagaacctggagaacactggggccggctgctgtactcaccccatttaatcctcacaacagccgcgtgccggtggggtcatcctgt

SEQ ID NO: 427927 - DNA, 122 bp, Homo sapiens
agatgaggtggacaatgaagacaatgaggatcaggtctgtcagggcgctgcccatggaaacggggatcagcatgtttttcctcctccaggagacattcctccgcggatcagaccatgctcct

SEQ ID NO: 427928 - DNA, 122 bp, Homo sapiens
tgtcctccagctagttccacgttctccaaccgtcgctctggcgacccttcgacctggattcgagcccccacgatggacgccacttgcagagaccagctcggtcaggaagaccctaacccagc

SEQ ID NO: 427929 - DNA, 122 bp, Homo sapiens
ggggggcgagtttgtcaagggcatcctggccaggcctgttagggcccccagagaaatgcacgtgtctcggggagtagcgtgccggcactttctggacccgcagagaaatggcttcgagtgca

SEQ ID NO: 427930 - DNA, 122 bp, Homo sapiens
tggaccagggaaagctgggcccttggcaggaaagcgaaggtgccaggaaaggaggcaacccggtcccgcctgacagatgcctttcaggaagggcagtctggcttgtcagagcgagggcgaga

SEQ ID NO: 427931 - DNA, 122 bp, Homo sapiens
tgttccctggtcttcagagggaggtggccctgctgacacctgatttctgacctctggcctcgagtcatgagagaataaaattcccttgttttaagccacaatcagtctgtggtcatttgctg

SEQ ID NO: 427932 - DNA, 122 bp, Homo sapiens
gggaagctcgctgggctgcggaggtctgactcttcctggacccagccctgctctgaacctcgcggcaccacggtctctgccgactctcggtcttccctcccctcgcgtttcaccctcttcct

SEQ ID NO: 427933 - DNA, 122 bp, Homo sapiens
ggtcccgcgcggtgagtgggattggggcacttggggcgctcggggcctgcgtcggatactcgggtccgctcgggagcgcgctggccgcaacgagggcggcgcgggcccgggcgatggcgtgg

SEQ ID NO: 427934 - DNA, 122 bp, Homo sapiens
atgctgcctaatgtctgaaacacgggaaagcttgtgctcaaaacaaagtgtgatcaaaaccggaaatagaaagcaataagacccaaatttgagactgacaattttccttactcccacttacc

SEQ ID NO: 427935 - DNA, 122 bp, Homo sapiens
tgggaatccagccaacctgactttagggagagtatggagccacggatggcattgtgaatccggagggccgacaccagaagaacctgcaacgtggcatctgctaccttacttcccccggaaaa

SEQ ID NO: 427936 - DNA, 122 bp, Homo sapiens
aagataatctgaacatattaagcactcaaaaaggtcgttcttaattattattggagttaacgtgtgcatctatgagctaagctaagtgcctgataaatccaatgaaaattccacaaggtgct

SEQ ID NO: 427937 - DNA, 122 bp, Homo sapiens
ggaggtgggaggatcgctcgagcccgagaggttggtcggggcctcagtgagccgaaatcacgccactgcactccagcctgggcgacggagcgagaccctgtctcagaaagaaaaagaaaaac

SEQ ID NO: 427938 - DNA, 122 bp, Homo sapiens
aagggggtgccggtgagcgaggcggagtgcacggccatggggctgcgcagcggcaacctgcgggacaggtacggccaagcgccggcgcggggcagcgctgatccggctcggggcaagggggt

SEQ ID NO: 427939 - DNA, 122 bp, Homo sapiens
gtggatacttgacctgcccctctctctgcttaaaaacatgccaggaggccaggagaggtgcgtgtatgtgtgtgtgtgtgtgtgtgtgtgtgtgtgtgtgtgcgcgcgcgcgcgcgcgctcg

SEQ ID NO: 427940 - DNA, 122 bp, Homo sapiens
agggcattcaccgggtgggtgagcgcggcacgcgagggaaatggaccggctgcgaggctgcgcgcggccgggcgggccgagctttatacctgggccttgtccccctgtccgcaccctttccc

SEQ ID NO: 427941 - DNA, 122 bp, Homo sapiens
gatgtgatgtgaggagcaagtaaaccgagagaggaatgctattgagaagtgtgctctgtccgagcctaggaagcacagcattaagtagtatcagatttaaagtgacaaaatctgatatagga

SEQ ID NO: 427942 - DNA, 122 bp, Homo sapiens
tggtttgtctcacgtgttgcagggcgtaaaagcggcttgcattcaattagcagcgaagctcgcgggcgctggcgggacaggcgcgtgagggtgagttcgcgtgaatgtgtgtatgcgtgtgc

SEQ ID NO: 427943 - DNA, 122 bp, Homo sapiens
aggcttcatgctgagggtcccctacttggccgggaaggtggggttgagatcacggactcacgcacccaactgccaaggacgctgcacgtgccagccttcacgaaactctccccagggcccgt

SEQ ID NO: 427944 - DNA, 122 bp, Homo sapiens
gcgagagcgcggtcggggccgggatccagatactttttctctcccgcaggggcccaggcccgctcctagtgctgggcctctacaacctactggttgtgaccctgatgaccgtagacctcgtg

SEQ ID NO: 427945 - DNA, 122 bp, Homo sapiens
gcgcgggaaggggatgcctcttacccggccccggcctcacctgatcgtagacgtccactacggaactacagcaggtgttctgccagcattcgacttgaatgccttccctgacagggcgctca

SEQ ID NO: 427946 - DNA, 122 bp, Homo sapiens
gacactgcccaaccagcttcagtttcactccattcacatttccgtggggactggcattgccgagacttacggagataatggggaaccaagaagtgggacaggctgtcagtatcagccatgct

SEQ ID NO: 427947 - DNA, 122 bp, Homo sapiens
gtttgtaatttgcagccaatgtggagaaaaccactgaactgggctggccacggtggctcacgcctgtaatcccagcactttgggaggccgaggtgggaggatcactgaggttcaccagttca

SEQ ID NO: 427948 - DNA, 122 bp, Homo sapiens
agcggggaggccaaacctccaaagctgggagggctacagtcaaagaagcacctcccacaccggaggcaagggacgcgccaccctcggagcggctccctcggctcttctgtaatctcagcaag

SEQ ID NO: 427949 - DNA, 122 bp, Homo sapiens
gggccttccactaggaggagacccggggaagtgagagtcggggatcagtcctgcaagctacggagtcactacagggagaggtctcatcactagaaatagccgaagaacctgcagcctcaacc

SEQ ID NO: 427950 - DNA, 122 bp, Homo sapiens
cccttttcccagccagtgcccacccctatcaaaaaatgtccccatcttagagtataaatacgatcattttctacaccttttaagagttggcttcgtaagaagcctggttctctctctagcag

SEQ ID NO: 427951 - DNA, 122 bp, Homo sapiens
cgcctctcttgtcctcaaatatttttcacaaggtggtcctcagggtagggagcctactaacgagaagacatttcgtttacttgcttcaattatcccagagatttgaagaaaaggcacattgg

SEQ ID NO: 427952 - DNA, 122 bp, Homo sapiens
tggtaccgccacacccacctccagaacttttcaccacctccagactgaaactctgtcccacgggacactcagtccccatcgctccttctgcagcccctggcaggcaccacgctactttctgt

SEQ ID NO: 427953 - DNA, 122 bp, Homo sapiens
catgtgagccgcgcgggaggcgcagagggggctgcaccggacggaaggttgcaccggtggcgggcgcaagcagcggccgccccctcggctgtgcggtcggagggcccgggcggcagcatccc

SEQ ID NO: 427954 - DNA, 122 bp, Homo sapiens
actcggcgttcactgtggggatttggctggtgcacctgcgaggtggcctgacctgttttccgatttccttcatcttctgcaaaaggttaaccgctggagtgatgcgagattaaacagaggtg

SEQ ID NO: 427955 - DNA, 122 bp, Homo sapiens
cctttcccgctgctgctgaactgatccagggagtcccgcgtgagcacaaaccaggctcggcgcgggggcagccagggccgcgcccctcctccgcggggctcccggtacagccaacctggggg

SEQ ID NO: 427956 - DNA, 122 bp, Homo sapiens
ctgaagaaccagaagccctgcgggacaggtgcggggcaggctccaggtccctcccagacacgcactcaccttctcgtagtatcggatctcgtactccgtgtcattggccccaggggctccgg

SEQ ID NO: 427957 - DNA, 122 bp, Homo sapiens
atgggacaggaagagtttgcacttggttttttgtgaaagaatgttagaaatacgtgaaaccgttggtagtattttgactatcacctgaaaggtactaaatgttaaactagtaatttgcaatc

SEQ ID NO: 427958 - DNA, 122 bp, Homo sapiens
tccctgcttcttgtcactgtgctatgcttccctcagtactgctctgatgcagtaagtactcgatgtctttctcaccagaccagacggtaaggggttgttgacattgtccactatcaaatccc

SEQ ID NO: 427959 - DNA, 122 bp, Homo sapiens
ggtgccgcggcgggtgggggcaaggaccggtcttaggggccttaggacagatcctgagggcggcagacatggggcggagaccgggcgagctctgggagacggattccgagtggcgggtggga

SEQ ID NO: 427960 - DNA, 122 bp, Homo sapiens
tatgagctctaacactcagtacaaaggtctgcagcttcactcctgaagtcagcgagaccacgaacccaccaggaggagcaaacaactccagatgcgccacttttaagagctgttaacactca

SEQ ID NO: 427961 - DNA, 122 bp, Homo sapiens
ggagatgggtaggcactgagtccaaagaggttgttgagaggcaggagtcgggcctggagacgcaaccaggaagaagagctgggcccagagaggacacccggagggtgcaagtgggtctggag

SEQ ID NO: 427962 - DNA, 122 bp, Homo sapiens
tgaaaatattcagttctcagttggtcatccctcccccgcccctcgccatctcaaggtccccgagccctgtgccagcagaaggtgacctgccaaactgatatcccgtgaagcttggggaaggg

SEQ ID NO: 427963 - DNA, 122 bp, Homo sapiens
ggagggggctggtgtggaggccagacatgcccttcctacaggtgctgccaaggtggcctccggtgagctgtggacaagtcaggcctgcctgcctatcaccgccctcaggagccactcccaac

SEQ ID NO: 427964 - DNA, 122 bp, Homo sapiens
cctgtcctctgcttctgcagacagccctgcacctggcagccatcctgggggagacatccacggtggagaagctgtacgcagcaggcgccgggctgtgtgtggcggagcgtaggggccacacg

SEQ ID NO: 427965 - DNA, 122 bp, Homo sapiens
ggctgatctcaaacaaggtgatccacctgccttggcctcccaaagtgctgggattacaggcgtgagccaccacgcctggcccttagttactattcttagaagaggggctgggcacagcggct

SEQ ID NO: 427966 - DNA, 122 bp, Homo sapiens
gactctccctaaaagtgaaacacacaagccaatccggaactgctgtgcgaaagataaaatcgagaaaggcaaggtttcggtaggaggacgcgatgaggggcccgccccaggcagggaatggc

SEQ ID NO: 427967 - DNA, 122 bp, Homo sapiens
tattatgccttaaaatagtactgctacaccatttaaaagtctttggcaggaaagatctggcggcattaatttcgtgcaaccataaaaagaatctttgctaaatgccagcaaatgaggtggta

SEQ ID NO: 427968 - DNA, 122 bp, Homo sapiens
cctattctagacctggagcccctggagtacagagcccgcagcccctcgagcctcagagcccgcagccccttgagtcctgagaagcttcccttataaggcagaaggagtgctgggtggggcgg

SEQ ID NO: 427969 - DNA, 122 bp, Homo sapiens
cttccccgagcaaagcacgccgagcacagaagacgacccagctgaggctggcaggagagacgaaggccccgccagatcccggaagccgcgcccttctgtccggctgcacgcccgattggacg

SEQ ID NO: 427970 - DNA, 122 bp, Homo sapiens
gaacctactcctcgtccccttggaagttttgtttgcagcagttcccagtactgcgctgcacgccacgcccccgtttgtctggagcaaaccgaattcctctgcagcagcttggacttctacct

SEQ ID NO: 427971 - DNA, 122 bp, Homo sapiens
atgagctgtgggagttcttctctcagtatggggatgtgatggatgtcttcgtccccaagccgttcagggcctttgcctttgttccatttgcagatgatcagattgcgcggtctctttgtgga

SEQ ID NO: 427972 - DNA, 122 bp, Homo sapiens
ccgagggctgaccggtgagggaacgacgctaaaggattggttgggcgctgcggggaatctcgacgctcctcactattggcccaagcctcagagacatgaacgtcgattggccgaacggcagg

SEQ ID NO: 427973 - DNA, 122 bp, Homo sapiens
gcaagcttccttctcgctccgccactgtcggctccttgacagaagctatttatttcgtggcgagtgaaagctgggaaaggcgaagatgaatgagcacacacagacacaggacggccatccct

SEQ ID NO: 427974 - DNA, 122 bp, Homo sapiens
tccgcctggtggtcaggaaccctgggtgcctgtggctcatacagactgtgggacctgtgccgagggggaggacagtgagggaacccgtcccacagaagaggcctgccaagggttctggtcac

SEQ ID NO: 427975 - DNA, 122 bp, Homo sapiens
ggaagcccctccccatcccctgcctttcttaagcagggtgtgaccaatatgacacgttgtcgagtttcgtccaaactgctgtctgtgcgtttaagcacatcatataaacatgtgctcctaga

SEQ ID NO: 427976 - DNA, 122 bp, Homo sapiens
cccggggcacagccccgcgcacctgccccgcccacgcccgccccgcgcacctgccgggtccgcacctgccatttgcccgactggccgcgcacccagctggcccgcccctgcccgacacgacc

SEQ ID NO: 427977 - DNA, 122 bp, Homo sapiens
gttctggggcctcagggggctcatgtccatgtccattgaatcttccatcagatggtggcacgcacttaggtgggagagaaggaggacggagataaacgaacgctgctccagagaacagccac

SEQ ID NO: 427978 - DNA, 122 bp, Homo sapiens
taggaaaagtactctgtctctgtcctgggtgttcgggatcaaggccttttgaaccaattccggaatccgccaccgggcggtggtaggagagagccagaggattcgtcagtaagtgtgcgtgc

SEQ ID NO: 427979 - DNA, 122 bp, Homo sapiens
cgtcgctgtcgaagcgcgcgtactcctctcggttatagatgtatctggtcacaagacgcacgcgctccgtcccgttggtgaagtagcacatgcccttaaactggaacacgaaatcctctgcg

SEQ ID NO: 427980 - DNA, 122 bp, Homo sapiens
aataagacacacaattgtgcagactgagtcaaacatctagtatcatgtgataaatgaccccggagcaccaaggtcattgaagaagcagaacttgccattcccaagaagttaacacctcctca

SEQ ID NO: 427981 - DNA, 122 bp, Homo sapiens
cattgaagtagaatctctgaggattggagttctgaaagaactttcttatagaataaaacacgtggcctttaggttatattttgactactcaaaggcttttcgtttggcttctgaacagtggt

SEQ ID NO: 427982 - DNA, 122 bp, Homo sapiens
aaactgcacatagaaacaattggaaacagggtccgggcacagtggtggccccgcgggccacgctacagcaagccgcagagagagcctctggtgtgctcaagacgcctggtcttcaccctgct

SEQ ID NO: 427983 - DNA, 122 bp, Homo sapiens
ggcagtgccatgcacaagcaccagcactgctgtaagtgccctgagtgctatgaggtgacccgcctggccgccctgcggcgcctcgagcctccgggctacggcgactggcaagtccccgaccc

SEQ ID NO: 427984 - DNA, 122 bp, Homo sapiens
ctcagacaccaggttaaggaaggatttggctttattttgccaggagcttcggcagactcacgtctcaacgtccgggagcttcggcagactagcgcctcaagaacccagctctctgaagaatt

SEQ ID NO: 427985 - DNA, 122 bp, Homo sapiens
ggacggggaaccctgagtccaggaggcgcgcggggctgaggcagtccagccaggctttcccgacttgtctcccgggaaaggacatcctcgctccgccctcctgccggctccttgtgtccgtc

SEQ ID NO: 427986 - DNA, 122 bp, Homo sapiens
gggctgcccctgcgcgtccctgtactgtaccaggaaggagtcaaaggggccctgggccaccgtccatgagaggcccactgagtccgaggtcacggccgccaccgccagctcccccaggcggg

SEQ ID NO: 427987 - DNA, 122 bp, Homo sapiens
ggctgggcgggcagcagggaggggcgcgctgattaggccgggccggccggggcgctgagacgttcagcgggagtcggcggcctgaatgctgggtcattattgctacaagtttagcaatttct

SEQ ID NO: 427988 - DNA, 122 bp, Homo sapiens
atttgcttttgccttcagggttagtagctggcaactaatatccactagaactgaatcacccgaattatcatagggctgagctaatatcctgctgtagatgctatcataggcagaaagaaaat

SEQ ID NO: 427989 - DNA, 122 bp, Homo sapiens
gctcctcacaagacattgccctgcgagggggtcagccctgaagccggatggcccggcccccgctaccacgtggaggctccctgtaggtgcttgtgtagatgcccccgtgcggggacttgttt

SEQ ID NO: 427990 - DNA, 122 bp, Homo sapiens
aagaggtggaggacagggaaggccgtacagtgctccatcacaaggaaaagaggatcagcacgttctcttctgggaagggaaaaaaaaagagaaggaaattgaaagtacacggccgatcttcc

SEQ ID NO: 427991 - DNA, 122 bp, Homo sapiens
tcagtgcttgaaatattttgtagaccctgcattcagatgcagcagatgacaccacccaaacggataatctggctcaaccatgtgtgtgatcccacccagggacagaagtcagccagaactca

SEQ ID NO: 427992 - DNA, 122 bp, Homo sapiens
ctggcaaatatagatcaacccttccctctctggtctgtttctttgtctgtacagtggggacgaacaagaagtatgccttttctgagagcttatggaaagatgtgttaggtttgctgactgtt

SEQ ID NO: 427993 - DNA, 122 bp, Homo sapiens
cagcaggttccccacctttcctggagtccgaggcagctgcccagccaccagccatgcggacgatggcttgcaccacagcaatgaaggtggacgtgatctgggtgtgatggtgccgggtctcc

SEQ ID NO: 427994 - DNA, 122 bp, Homo sapiens
agggttcttgtcggggtgccaacgaagggccagcttgcggtaggctttcttgatgtcctccggggaagcgctggcctgcacgcccagcacttcgtagtagttagccatggccaggggtgtgg

SEQ ID NO: 427995 - DNA, 122 bp, Homo sapiens
ggaggaggtagtctctcccatctcttctgctgagtgcagctctaaaccctgcctgaaacacgtggagaagctatctgagctgcctccaggacacatgcaaatggacactctgatcataaaat

SEQ ID NO: 427996 - DNA, 122 bp, Homo sapiens
gggtggctctccagtggagggtcctcactttttgttttgcaaataacgctggggcccctgcgccactggggcaatgcaactgtgacggtgctggttggattcaaaaggaagcctggcagtgg

SEQ ID NO: 427997 - DNA, 122 bp, Homo sapiens
cctttacctcctgagtctccattcctctaaccttctcctctgtaaaccttgaccacttcccgacctgtgggcattttacagtcttcgaatctaacctgagatctgcccacctgaggagggtg

SEQ ID NO: 427998 - DNA, 122 bp, Homo sapiens
tggcgagggcggagcggggcctgtgggcccagggggcgggaccactgaggggcggggccacggcgctgggcggggcagggcctgagggacctggggaagtagggtctgagaagggggcgggg

SEQ ID NO: 427999 - DNA, 122 bp, Homo sapiens
cggggacgtcgacttactccctcccgctggtcacgctgctccttggacgaacgagcatagcgccccttaggggctgggcacggcatgtccaattcttaagtggttgcattcaacaaaccagt

SEQ ID NO: 428000 - DNA, 122 bp, Homo sapiens
agtccctagccggccagcccccgctcgcccctcctcttcctcctcctcctcctcccacctcggctccagaaaaccctgggcgtgatgggtactttactgggtaagaggagacgggtgccccc

SEQ ID NO: 428001 - DNA, 122 bp, Homo sapiens
aacaagtatgtactagttcttgggcgtacctactctgggtgggtggaggcctatccaacacgaactgagaaagctcgtgaagtaacccctgtgcttcttcgggatctgattcctagatttcg

SEQ ID NO: 428002 - DNA, 122 bp, Homo sapiens
tttcctattcactaaggcagtttgggtaaccctgggattatctggtctttgaatcctcaccgaagccaagtgcttatttgggggcaggtctttaatgataggctctgtaaaaactaggctgt

SEQ ID NO: 428003 - DNA, 122 bp, Homo sapiens
gcccctgcgttctgagccgggtgcggacgcgccggtagtcggggaagtcagggtctttgacgcctgaaggcgcaggagcgggggtccctgggggagagggtccagcaccgtcacctcccact

SEQ ID NO: 428004 - DNA, 122 bp, Homo sapiens
accagctccccctctgcccttgccacgagtaaaagcttcctgaggcctcatcacaagctgcgcagatgctggcaccatacttgtatagcctgcagaaccataagccagataaacctctctct

SEQ ID NO: 428005 - DNA, 122 bp, Homo sapiens
tgaaccttttgagtttttttcctcattcccaggataggaatacctctgtggttcaaaacacgaaggctgagattcagaggaactacaaatcccataaagtgttgcacgtctagggcctttgg

SEQ ID NO: 428006 - DNA, 122 bp, Homo sapiens
ccttcggccccgggtggtctcccccgcccggggaccccctgtgcctcccctcccgggctgcgggggagcccctccgagaccatgaggaaattcaacatcaggaaggtgctggacggcctgac

SEQ ID NO: 428007 - DNA, 122 bp, Homo sapiens
cgaaggacaaagagaacactccgaggagccaggtatttgcgaggagcagaacccagaggccgagcggcgaagagagcagcagggaaggagcggggatttccagggggccgatcgtcctgggc

SEQ ID NO: 428008 - DNA, 122 bp, Homo sapiens
gtccacgagagggctccacggtgccttgacgtgcgctgtcatatgatacctccgctgcctcgaaatagacactctagtgcacgaattaccagaatcaaaattcagcgcatttaaaatgatac

SEQ ID NO: 428009 - DNA, 122 bp, Homo sapiens
cacggaagagagtcggaagatgacagccgagtcagcaggcacgtgcatggcccgctgttgcgtgccgtggcaactctgtgttggctggtgcacgcgtgtgctggaatctttttgtgtgtaca

SEQ ID NO: 428010 - DNA, 122 bp, Homo sapiens
ggaagaaacctaccaacagttcctagatttctgtgaggatgtgctgcccgagttcaagaacgtggggagagactgggcgcggtggctcaggcctgtaatcccagcactttgggaggacgcgg

SEQ ID NO: 428011 - DNA, 122 bp, Homo sapiens
gcatagagtaggctctcaaaaacagcagtcatcataaggataattaacggtactggaaaacgctctcctagctgaggcttgactcagccagagctgcaacagggtgccagcctctgtggaat

SEQ ID NO: 428012 - DNA, 122 bp, Homo sapiens
caacacagcgaaaccccgtctccaccaaaaaaacacaaaaaccagtcaggcatggcggtgcgtgcctgcaatcgcaggcactcagcaggctgaggcaggagaatcaggcagggaggttgcag

SEQ ID NO: 428013 - DNA, 122 bp, Homo sapiens
gtttttcctcaagacgcggtcatttgtgtgaggtgttgtactcgagcacccaaaatggcccgaactggtctgggaaacattagggagatgtgtttaccgtcctggctgacactgaaggccaa

SEQ ID NO: 428014 - DNA, 122 bp, Homo sapiens
catgggactgggtcctggagagtggtttgcagagctggccatgttcttaacctttacacccgagaggaaaaatgatgtcctgcattaagggtggagccctctctagtggatcctaatctgga

SEQ ID NO: 428015 - DNA, 122 bp, Homo sapiens
cgccgttcccccgtcccgctgctgctcacctccccgggtgaaactctgacgcagtcaccgcgggtctcggcagcgtcatagcggcgggcatcccatctgcacgtcacacctctttctcacct

SEQ ID NO: 428016 - DNA, 122 bp, Homo sapiens
gggtcggtcgggcaagggaatgggctggttagtggccaaggagccggggcccaggagaggcgcggggggtagatgggtggtaagactgggatgtggagaggagccagaggccccagcggctg

SEQ ID NO: 428017 - DNA, 122 bp, Homo sapiens
gatctgatttggttttccaatgaggcggggcgttgagcaaccctctttgcctccagttgtcgtggcttcgtggggccaaccattttcggccaggctgagaaatttcttattgatgggtctgc

SEQ ID NO: 428018 - DNA, 122 bp, Homo sapiens
gcaaaatgggccaactaggcaggaggactgaccttctgtcccagcagcccttcaccatcacgagccatgttggggacaatgggtctgagagaagcagagaaattatctgctccaatcatgct

SEQ ID NO: 428019 - DNA, 122 bp, Homo sapiens
tgctgtagggcatcattggcaatatctgagatgaatttctgggcagctaaggagatgagccgaattctagagagaaaaaacttagatgagaaggagatggacaacatactgcacaagcaccc

SEQ ID NO: 428020 - DNA, 122 bp, Homo sapiens
gccaggccacccctcagaggggggtcccatgctaaagcagacggtgccggtgccgcagggcgtctgagacccacggtggagcccgggcctggcgtgcgggaggcggccacgacggcgccttt

SEQ ID NO: 428021 - DNA, 122 bp, Homo sapiens
ggaggggccttccagggagctgattggtcgacgcggacgggggcgggacttggccggcgccgtccctcccctagacctcagaggccctgcccgcagatgtggcgccaaatcccggatgcagg

SEQ ID NO: 428022 - DNA, 122 bp, Homo sapiens
ttttggcgaaacgtgggtgtctgacggggaggctgtgcggtggtgaccaacgcacccatgcgctgggtttcacagatgcagactgaagtccaggctctgctgcagattaacggggtggccgc

SEQ ID NO: 428023 - DNA, 122 bp, Homo sapiens
tttgcctagctccagagttgcagggaaggggaagcatgtggagggcttctgtgatctgcacgtaatcgcctggacaaagtcaagtgctaagtgtttgggttaaagtgttttctaaagactac

SEQ ID NO: 428024 - DNA, 122 bp, Homo sapiens
atcctagacctcctggaggatgctgattgacactgtccagtttgagaactactgtgtccccggagcagaggcctccccattgcccttgggtagcgggcgtcgggcacagggcttctccggat

SEQ ID NO: 428025 - DNA, 122 bp, Homo sapiens
agctctccagcggaccacctggtctccttcccgggccacccttgcaaggaccaagtgtggcgggatgtggctgagccccctcagtaaaggaaaggtctcgctgcccctcccctcatcccgaa

SEQ ID NO: 428026 - DNA, 122 bp, Homo sapiens
tggcagcagggtgcgcaggagggcagcgagccggccatttccagagcgaaaaacgacgtgcggtggttgttttggtttatgaatttcctctccaggagcagggaaccctggtggggcctctg

SEQ ID NO: 428027 - DNA, 122 bp, Homo sapiens
tgggctgtgctgcggagaaggcgaggctcggcgactgcaggggagttggggaggggagggcgggaaagttaccgtcaggcgcccgggtcacgggcagccttttaaaccctgcacgctggttt

SEQ ID NO: 428028 - DNA, 122 bp, Homo sapiens
cgcgcggccggcagccggagcggcgcgtaacgcagctgagtgaggtcgtcggtggaggcacggagcagcaggcgcccggggcgctgcggaggccttataggctccccgaggggaggcgacgg

SEQ ID NO: 428029 - DNA, 122 bp, Homo sapiens
gcctcccgagaagctgggattgcagaggcacactaacacgcccggctaatttttttgtaacgttagtagagatggagtttcccacattgtccaggcagggctcaaacttctgaactaaagaa

SEQ ID NO: 428030 - DNA, 122 bp, Homo sapiens
tcaggcaggttctgccccccagaccccacacacggccgccccacgtgctgtcgctcagcccgaggcctgacttctctgggctgaggctggtcgtcctggagccctcccagtacctcgggctg

SEQ ID NO: 428031 - DNA, 122 bp, Homo sapiens
atgcgttgcacaactgcagggggcaccactgcagaccccctcctagagatggaaacctctcgtgccccgtacacgaagcagctgaagccaaggacattctcttctctgtgggtcacaggggc

SEQ ID NO: 428032 - DNA, 122 bp, Homo sapiens
acatcaaaaggacggctaggttagcgcacggcagcccacccgcacggctgtattagtgcacggacggctgctaaggatggctatattagtacacggctgtattatgcactcgacggggtcct

SEQ ID NO: 428033 - DNA, 122 bp, Homo sapiens
ctacttaccactatgaaccaccgtgctcactcccattgggaacactcagaggaatcatgtcgaatacagctcagagctgaaggtgcaagcctggagcattttgtcttgactcctctcactgt

SEQ ID NO: 428034 - DNA, 122 bp, Homo sapiens
atggggcgagcggagaggggcgtgcggagctgggaacgtcccggcggagggggctcccggcggagggggctcccggcgaggggccgagcccacactgggctgacaaggctccccttttcttc

SEQ ID NO: 428035 - DNA, 122 bp, Homo sapiens
cagtcggaagtgagggcgggcggtgggggccgttgccgcagtgacagtgctaggggagtccgaagatggcggcgtcgcgtcgctctcagcatcatcaccaccatcatcaacaacagctccag

SEQ ID NO: 428036 - DNA, 122 bp, Homo sapiens
catcccagagagcttcagtcacacacagagaatcaaggcaggcaaacatagacaggaagtcgctggctcacccatgctggaggtggggagcccaaatacagggagacagggttacacatgct

SEQ ID NO: 428037 - DNA, 122 bp, Homo sapiens
acagtatcttacccattaataacgattgcagcttttgggaaacataacaatttataccatcgcagtaatctgtattaaaaaatttttttaatcaaaagcaagttaaaatattgagtacactt

SEQ ID NO: 428038 - DNA, 122 bp, Homo sapiens
gctttggtgacacaggccacaagatcctatgtatttgaacccacgaactttttctcaactcgtgttatgtatggaatatctagtgtcttttattcagagatgcctttgcaattactttttcc

SEQ ID NO: 428039 - DNA, 122 bp, Homo sapiens
gaacacagacacctggaccttcctgccagctggctgacacctaacgccatgctgggggctcgaactggtttgcagtctctcccagtcctcctgggcgatctgctatgttcagcaaactggct

SEQ ID NO: 428040 - DNA, 122 bp, Homo sapiens
cagggtctcactttgtcacctaggctggagttccgttgcatgatggctcactgcaacctccgcctcccaggctcaagcgatcctcccacctcagcctgctgagtagctgggactacaggcat

SEQ ID NO: 428041 - DNA, 122 bp, Homo sapiens
ccgtcccccatctggtgctgcggccagtgcgggtcataaaccctgagcccctgcttaatccgccagctcccgagtcagcgccagccagacacgtgacactgcagccccacagacctgtttgg

SEQ ID NO: 428042 - DNA, 122 bp, Homo sapiens
cggccccgctggttcctgtagtacttcctcctcggggactcacaggtgctacagaggcaccgtccccagctctcagtggcttttcttgtcttcttccagtttgtttcccttgcccacactag

SEQ ID NO: 428043 - DNA, 122 bp, Homo sapiens
ggggcggggcggggcagggcgagaccccggacaatggtcaggtgggctttcgcggccgggcgggcaggaagcgccgcgcctttcctctggcccgggcagcggctcgccccgacctcggcccc

SEQ ID NO: 428044 - DNA, 122 bp, Homo sapiens
ctggagggtccatgtccctggtggatccgtctcctggagggtccgtgtccctggtggatccgtgtccctagtagatccgtctcctggagggtccgtgtccctggcggatccgtctctgaccg

SEQ ID NO: 428045 - DNA, 122 bp, Homo sapiens
caacaaaggggatgtggcttctctgcagaacaggacagggcccctgtagcctctggaggacgatgtgggaggttttgggcatggcaggaagggtcacccatatctgggggaacagacgtaac

SEQ ID NO: 428046 - DNA, 122 bp, Homo sapiens
agattgtcattttcattcattgtgcttccccatccctccttagagtctagggaaaggcagcggaggggaaacaaagagtacaggagataggttcttatcccctttaacactttctgtgagct

SEQ ID NO: 428047 - DNA, 122 bp, Homo sapiens
gcacccccgccccgcaccccagatcatgtttagtgactcatctttcagcccatctgtcaccgtgcccggccaaaggggtcagatcattcctgcctgtcgctccctgccccacagctggacct

SEQ ID NO: 428048 - DNA, 122 bp, Homo sapiens
agcgggcctctggcactgtacctatgagggagcaatatcttcccctacactgacctcttccgtgccgagatgcagccctccctgctgccactagttacagtggtccatgttccctttcaaag

SEQ ID NO: 428049 - DNA, 122 bp, Homo sapiens
ggccgccggctaaagaaacagactcttaattcacctcaaagtgtggcattttctctaactcgctcaagtacaacatttggaggcccgagcaagaaacgccaccaggcgagagccgggttagc

SEQ ID NO: 428050 - DNA, 122 bp, Homo sapiens
cacggtgccagtgagaacagcagttagtacacccatagtggggtttactagcttccacaccgtgtttggtgggttcttaacttccggatgaggaattaaattttttacccagcaggaagtga

SEQ ID NO: 428051 - DNA, 122 bp, Homo sapiens
aaaaagctgtaaaaaaaaaaaaaaaaaaaaaaaaaaattgaatgaaaatggtccaaatggcgtcattgggtagtgtgactatggacgatttaaaaacaaaacgattttctctaaatattcta

SEQ ID NO: 428052 - DNA, 122 bp, Homo sapiens
gaacccccggttccaggagcccctgctcgcctctccagccaccttcccaccagcccacaacgcacaaggaccacagcttccagaggcgccgtgcgctctctttccaggcgctttccccctgc

SEQ ID NO: 428053 - DNA, 122 bp, Homo sapiens
gtatagccaagctctgagaaggagagaatgctgacaaagtggtacatgggtgtgtgaagccgggagtccaggcagaccaccaggaatatcagcaggtttcccaacacagtcatgaggtaaat

SEQ ID NO: 428054 - DNA, 122 bp, Homo sapiens
catttctgacttacatttgggtctcagggagccaaggcactgcggggtttaatttacacccgctgggctgtttatatccccaggggcccacaaatacgcatctgaagatgcgcccggggcct

SEQ ID NO: 428055 - DNA, 122 bp, Homo sapiens
ggctccttcgtttttttccctcagggtccggccctccgggaagggcctcagggcctgggtcggcagagctggaagggtctcggcggtcagccgggccaggtcctgcatttgcagatgaggag

SEQ ID NO: 428056 - DNA, 122 bp, Homo sapiens
ctcaccaacatttcttattttcagcttcttcttacggtagccatcccagcgggtgtgaggcgcatcgcactgtggttctgatttgcgttttcctcatggttagcgatgttgtttcacgtgcc

SEQ ID NO: 428057 - DNA, 122 bp, Homo sapiens
catccccattctgagccctgctcacctttagcaggttaaggagaatgaactcattcacagcgaagagggtcacttggaagaaagtcatgatgagcagctgaatggggctgactttacccaga

SEQ ID NO: 428058 - DNA, 122 bp, Homo sapiens
tgaactcctgctttccccacccatggccgctgagcctgcaaaactgcagaactccctgcccgactggtgcctggaatctccagccctgaggacccctgcagtccccctggtccccgcactct

SEQ ID NO: 428059 - DNA, 122 bp, Homo sapiens
tgcacacagccccgccctgccgccctgcccagactggacccggagacccgggctggtgagcgcccctgtccccagcccccagctggctgtgggagggcctgcccctgcccccacctcctgga

SEQ ID NO: 428060 - DNA, 122 bp, Homo sapiens
tttgaagaggccatgtttgagccaaaacccgggggaatattggcccagcaaggaggacagcgataggcgacctgaggggtttgcgggaggcttggtgtgcttgaggaacacgtgcagcaggt

SEQ ID NO: 428061 - DNA, 122 bp, Homo sapiens
ccagggacccctgccctccccaaactggagcaccaggcgcgggacaaaggagggggcgcccggcatccctggcctgtctgagtaggtcgactactgcccccagcctctctctggggcggggc

SEQ ID NO: 428062 - DNA, 122 bp, Homo sapiens
aagaggtgaagggcattggcttggcagggcccttggacaggcaggctttcaacattatcacgaggttgctgggtgacctgggttcacctctgctcactgaaactctgtttcttcgtctgtaa

SEQ ID NO: 428063 - DNA, 122 bp, Homo sapiens
gtggtggttgttttctgacagggtttgtcactctgctgcccaggctggagggtagtggtgcgatcatggcttgctgcagcctcaacttcccaggctcaagtgatcctaccacctcagccttc

SEQ ID NO: 428064 - DNA, 122 bp, Homo sapiens
gttaaattacctctaattatgtttcaatttagaatgcagacccaattaaaagaaactaagcgttccacaacctgaaattgccagtgatcagactgatggtcacagagtttcatgattgctaa

SEQ ID NO: 428065 - DNA, 122 bp, Homo sapiens
tctttgtctctgtgacaaaatttcttccacacaaatcactaaagctttgaacaaaagatgcggaagctttgtctctggaaaccaccattaatttatgaggggaggataggggttgtctttat

SEQ ID NO: 428066 - DNA, 122 bp, Homo sapiens
cccgaggccgcgcatggccgggtcggggagcagaggcggaggtgacagccccgcgggacacggtctggttcctgcgctcctggcccgaggctcttttccgcgcgccccgccccggcgccccg

SEQ ID NO: 428067 - DNA, 122 bp, Homo sapiens
agcgggcgggcggggcccgcgcgtcagccgcgggagccggccaatccagtggctctcctccgcggtcgcgtcataggccgaacaaccaaacagaaaagtttaataaacagcggacggagggg

SEQ ID NO: 428068 - DNA, 122 bp, Homo sapiens
gtcataaacgctgcaggggcaaaggtcaaatatagactgatggctccattgtttcccagccggtgaggaggaccctgttgggggctgctgagatgcttaacccttccctgcccagccctttg

SEQ ID NO: 428069 - DNA, 122 bp, Homo sapiens
tcagttgtcagagacaggtggggagggtgggggtagggaccacgcatgagtcgaagcccccgggaagagccaaaggccaaagtgcccaactctttgggatgacccccaagcctccaacatcc

SEQ ID NO: 428070 - DNA, 122 bp, Homo sapiens
gtggtcagaaatgggacaaaattggcagtaagggtgccagaggccaggacacaggtgcaccgctgagacacacacacgtcctaaaatctgcatatgtctgagtcacatctaactctacagac

SEQ ID NO: 428071 - DNA, 122 bp, Homo sapiens
tccgtgaagttagccgagccgccgataaacccgggggaagaatagcagcccggcgccccgcgggaatctggagagcaattccaggcaagaagggccccagaaaacggggaaaggaggaaagt

SEQ ID NO: 428072 - DNA, 122 bp, Homo sapiens
aatgtggttgtatcaatccacaaatatttactcttaacagacttgtatctgtggagatttcgaacaaagacagtttagggggattacaaaaaccctaaaccccgtttttctcccggacttgg

SEQ ID NO: 428073 - DNA, 122 bp, Homo sapiens
atgagatgagcttacgtagtgtagcaggaggtttcataccagtatagttcccagttaggacgcaacaatacttgtcttttgagaggaatatttagattttacgtgcattcacgtggaaactg

SEQ ID NO: 428074 - DNA, 122 bp, Homo sapiens
gctgcttggggagacctccatcgtgccatgtccaagagccgcggggactggcaccccgtgcggggcacttgcagacagggccacggcccttgcttcccagaggaggccccgggcctccaaga

SEQ ID NO: 428075 - DNA, 122 bp, Homo sapiens
cttatccaaaggagggcccctagagtttccagcccctgccgcctacccccaagccctctgcgacttgatcgaggatcgcctgctgaaatgcccacgaaatcacctcgattcggaggtttcct

SEQ ID NO: 428076 - DNA, 122 bp, Homo sapiens
tagtgttaatcatcagtgctaacacaatgttatcatacaatggaggtggcaatatgcaaacgaaccccagcaaatccaggaaaagaccaaaattttcaagaagtatagaattctttggctct

SEQ ID NO: 428077 - DNA, 122 bp, Homo sapiens
acaaaaacgtggttggtgtctgaactcagagcctcccagcgtcctcctgaagcaccaaagcggagccttgtaactcgagccgtttcctcccgtgtggaaccggggaataggttgtttatcag

SEQ ID NO: 428078 - DNA, 122 bp, Homo sapiens
gggggtgcaggataggaggcgagcccgggacgtgcgggctccagcgccgaagctgccgggcgggctgcccacacccaggtgggcacagcgcctggcaggccgctgacctctgcccaaccctg

SEQ ID NO: 428079 - DNA, 122 bp, Homo sapiens
agaggcgaagaccctggctcaaagcacccagctgaaaatggtagcctggggatgtgaattcgagcggtctgggctgcggggctcctagtggggggattaagtacgtgtgaatggtggcaggg

SEQ ID NO: 428080 - DNA, 122 bp, Homo sapiens
gaactattctgattatcttttgctatataacaatctgcccccagatctagtgacttttctcgtagatgtgcagtttgggtaaggttaggctgaaacagcttgtttctgctctgctaggcatc

SEQ ID NO: 428081 - DNA, 122 bp, Homo sapiens
caagctcaggaaagggagcaggtatctaagagcaacgaaactaccagaaacaaaatacgacgtcgcttttcatacgaccagcctgatgggccaaagtggtggacaggccaatccataatcca

SEQ ID NO: 428082 - DNA, 122 bp, Homo sapiens
aagcatttctcacccagccctgaagtgtgcccgctaggaggccacgtggcaggccctgggcgtgctgcctttgaagaccccaggctcacctttcttgttggtgtgagaactccttctctcag

SEQ ID NO: 428083 - DNA, 122 bp, Homo sapiens
cccagcggccccgccgggctgggaagacctgagggattagacaggggtccgggcggggctcggactgttttttgttttgttttgttttcctaaagagtctctcccagctcccttttgagctt

SEQ ID NO: 428084 - DNA, 122 bp, Homo sapiens
ctggagggataaaacatctcggcacctagtaatggtaaattagtcaatatttgttagtttcgtttgagatctcaaatgttaggattttctgaagtctcagtgtctttcagagtttgagatac

SEQ ID NO: 428085 - DNA, 122 bp, Homo sapiens
atgaaaaggaggaggaaggcaggcaggcagaaattggctgttggacccggggctggcccccgcgagtcctcgcccggcccgccccactctgtccaggatctgggcaagcgctcaaagtctcc

SEQ ID NO: 428086 - DNA, 122 bp, Homo sapiens
gaagacaaagaacgggagatgtgaaaatgaaagaaaacccaggggcacggtggacactggcgctggaacacacgtgggctcggtttcacagtctgtgtttgttggtgtgaccaccagccgag

SEQ ID NO: 428087 - DNA, 122 bp, Homo sapiens
caatgaaggagagattgaagaggaaatagtacattggtgtgtggaggtgagaatttagaccgaaaagaatgatcaagccaaggttgcctaccatggtgacaatgtagaccactagaaacagg

SEQ ID NO: 428088 - DNA, 122 bp, Homo sapiens
gcacagcatttgtcaaggctgcagtaaaaacattttggtcactccaaaatttcagttacccgaaccaagtaccctatatttcgaattcagttctctattaagtataaaaatacttctcttta

SEQ ID NO: 428089 - DNA, 122 bp, Homo sapiens
ccctgggccatccctccaccccctacataatgagctccattctttcccagctctcagtggcgacagcagccaagccctaccgcatggggacaggaattggctgtacttaacctgctgggttt

SEQ ID NO: 428090 - DNA, 122 bp, Homo sapiens
tgataacttagtcctcaagatgactaggtttctcttcccccacccctcagttagcatgtgcgaacaaggattcttttgaattcccaggaggggaatgagtttaatttgactggtaaaagtct

SEQ ID NO: 428091 - DNA, 122 bp, Homo sapiens
cctgagctgcccacttagctgcttgagcctagtcactctgcgccaccgtgggaactggcacgggaggttgtggtggtctttgagccacatggtgaatgggatattgagagaggcagatgata

SEQ ID NO: 428092 - DNA, 122 bp, Homo sapiens
ccccggcctcccggatgctggggcctggcgggtgtggagcacggggagtcgggcgtggggcgggcagggagtggagtcggggtcttactccggtggctgcagggcgcagggtagccgtgtca

SEQ ID NO: 428093 - DNA, 122 bp, Homo sapiens
tcagactcgggatctgaggatctgaggatctgaggtcacaggtactcccctttcaagcagcgaccagcagggaaggcataccccagctctgggcagaccgtctgcccagcctcacggcccag

SEQ ID NO: 428094 - DNA, 122 bp, Homo sapiens
ttggttaggcttagtccccgacggcgcaagcgtgtctgtggtgtgcattaggattgtaaacgtggcccagtgcctggaagtggagaacagctgtccctaaattcattaattaattcagtgtt

SEQ ID NO: 428095 - DNA, 122 bp, Homo sapiens
tacaaattaaaaaaatgtaactttaagataaagttatagtctctcctgacactcaaatatcgacacattgctagttcctccgttatccactagcatcgatttaatgtgtatctttccagttc

SEQ ID NO: 428096 - DNA, 122 bp, Homo sapiens
ctgcctgacaccctgcagatcaagtgtgtccctgcaggtgaaggcattgccccacccccccggtttatgtgaaaactcacgaattaagttactagtagctgatgagccaatgtacgacatca

SEQ ID NO: 428097 - DNA, 122 bp, Homo sapiens
cacaggaatagcagggaaagtaagagctgacaggagagaaagaggcaggaaaatgactagcgccctaagccttgctcgaggctggcatcatgagttcatgttgagcctgtgacattcagaaa

SEQ ID NO: 428098 - DNA, 122 bp, Homo sapiens
tagtttgtcaaactagacggttgcctctgataactcaagtgaagtgacccaggcctggagcgccaagtacaaagcggggacgacacttgcacctcctggcaagccagagcacagtgaggttc

SEQ ID NO: 428099 - DNA, 122 bp, Homo sapiens
gcaggggttacagcctagcaaaagcccagaggggtagttaaaaataaagagtgcttcaaacgctcaataatggaaccattgtgctggccacatcctcctgagaacctcagccgctgagccag

SEQ ID NO: 428100 - DNA, 122 bp, Homo sapiens
tcgggcggccgagaggggcgggcactggaggctgggcgctgggccctgggcgctgcgacgcgtaatcaatattcatacaccgtgacaccgcctccagcccggatccgctttcaaccagcgga

SEQ ID NO: 428101 - DNA, 122 bp, Homo sapiens
aggtctgtactgcatgtaagacttggctcagatttatgaaccagaagcaatgcatgcacgcgcacgcacgcacactcaaagaagggggcgatccctagaaaataccacatcgggctgtgtgt

SEQ ID NO: 428102 - DNA, 122 bp, Homo sapiens
ccgttaaagaccccggcagtgttgtggtccaaggcgtctcaaagcaggtggccagatctgcgtttctcatcagcagactcactccggctgtggctattacggtaattcattctagattgggg

SEQ ID NO: 428103 - DNA, 122 bp, Homo sapiens
ttcctacccctcccccattcccagctgcagccccctaaacccaggaggcgccctggcccgcgctcgccccccagggcctcatgtcggaaccacagcctgacctggaaccgccccaacatggg

SEQ ID NO: 428104 - DNA, 122 bp, Homo sapiens
cagggtgcgcgggaccgccggcccgcggctcccgggccctcacactccaccgcggccccgcgcagcgggcatgccggcctccgggcagaccctgctaatcaataggagaacgcgcagatcgc

SEQ ID NO: 428105 - DNA, 122 bp, Homo sapiens
gccacggcgccccctctagtcacctggaccacggcgccccctctagtcacctgcacgccacggcgccccctctagtcacctgcaccacggcgccctctagtcacctgcaccacagcgccccc

SEQ ID NO: 428106 - DNA, 122 bp, Homo sapiens
atcatcctcacaccccctggatttgaggatcaatatcacaggggtgttgtgcacccccggcgaaactggaagaaatatcatcctctccacctttggattttagggacagtatcacgggggag

SEQ ID NO: 428107 - DNA, 122 bp, Homo sapiens
aggaaggtggactggctcaccgagaagatgcatgctcgagatttcactgtcttcaccattcgtggagatatggaccaaaacgaacaagacgtgatcttgagggagtttcgttatggctctag

SEQ ID NO: 428108 - DNA, 122 bp, Homo sapiens
tgcaggtgcaagcgaggggcgccttcctcttgcgggccaacgtgctcagggtcatggggccggctcaaagtgcacaactccgcatcctggcctctgctctgctccggcacgaggcgcaggct

SEQ ID NO: 428109 - DNA, 122 bp, Homo sapiens
cggccctggtcggtgaactctggggagccaaggcagatgggcgctgtggggctgccgtgccggaactgctggcgctgctgccactcgtagagctgccacacggtgccatcccggtgcgcccg

SEQ ID NO: 428110 - DNA, 122 bp, Homo sapiens
gagcaccacagaaattctcatgaaaggtctgtcaggactccaccattttgacatgaccctcgttttcccccacaatcccccttccaggaccccattgtgatgtcacatttcaggtcaaagca

SEQ ID NO: 428111 - DNA, 122 bp, Homo sapiens
cttacccaaaggaactgaaatttgggactcggacagatacttgcacgcccacgttcatagcggccaagagacggcagcaactcaggtgtctgttggcagaggcgtggataaaccaaatgtgg

SEQ ID NO: 428112 - DNA, 122 bp, Homo sapiens
ctcctacctgtgtacgaaaccaaactattctcgtcgaagtgctttcccaggctcctaagacgcagcttccatactcgccgcgttctcagctgttggtcgtatcctagcaacggccctggcac

SEQ ID NO: 428113 - DNA, 122 bp, Homo sapiens
ttaggcaggtggcgggcgaggtgcgttctacaggaaagttgtgaatcaggagtctggcaacgtgaattctcagttctccttttggtttcattacaacaagcagctattggatgtctggtgtg

SEQ ID NO: 428114 - DNA, 122 bp, Homo sapiens
ggagtacttaaggactcgtttgcactttcttttgggggatgacagtggattcattgccctcggaggttcaaccagttatgagtgagggattggccagaagatcggggcgcaggcaagcagga

SEQ ID NO: 428115 - DNA, 122 bp, Homo sapiens
gctcggagcctggcggctcagcgcgctcccggctgcacgtgctgcccccgccgccgcccacgccagacaaagcggggccctcccgggcgtgtttcctaggcgcccccttccctcgatgaacc

SEQ ID NO: 428116 - DNA, 122 bp, Homo sapiens
tagctcgggcactcaggcagcccagagggagctcatccccctatcacgcccagcaggcgccggcaggccccaccaagtgctgggctcgccaagcctgcgcccacccggaacccgagcggcgc

SEQ ID NO: 428117 - DNA, 122 bp, Homo sapiens
taatagccttcccactagaacagggctccccaactcccagggcctggactggtaccagtccgttgcctgttagggaccaggtggcacagcaggaggtgagtggtggctgagcaagcactacc

SEQ ID NO: 428118 - DNA, 122 bp, Homo sapiens
acacactggccctcttcagctcatctctgacttgctggtagatatctggagagacttccacggaagagttggttggctctggcttaactgctctggggatgggtggatggttcaggaactgc

SEQ ID NO: 428119 - DNA, 122 bp, Homo sapiens
aaaaagacccacaacgttgatctgcataattatataaccctttaacaaagagacaagaagcgctatcgtgctggagtgcatggggaaaatcaaatgtgagcatgagcaaagctgggctcact

SEQ ID NO: 428120 - DNA, 122 bp, Homo sapiens
gacacctgggcccctaccgcttccccgcacctgctgcgccgctccaccttccccccgcaccgcatccctcttgtgcaccagagtagcaccaaagcaccagcctggggccggtcccttctctg

SEQ ID NO: 428121 - DNA, 122 bp, Homo sapiens
cttaatagtttccgcggtggctgtcgtagctggactacagaccccgcctcctgagcggcccgaagccccgccccttactgccccgcagtcccgcccccgtggcttgtgccgcgcctgcgcac

SEQ ID NO: 428122 - DNA, 122 bp, Homo sapiens
tttctcattatatggtccgtattatatgtgacatgtgataggtggatgtagttactggtacggatgctgatgcaaatgtaagtatgtatttcgtaaactaattttgtctttctgcagattaa

SEQ ID NO: 428123 - DNA, 122 bp, Homo sapiens
tctgcaccaaccgcatgcgtgtgactgaaagatctcttctggatgtagctaagcatcagccgagggagacgagtggagccagtctgtgctgtacccaccccgggagccacacttcccactca

SEQ ID NO: 428124 - DNA, 122 bp, Homo sapiens
tttgcggctgcagaagccgaggaagagctccccaagcctctcccagacgctggattccagcgctcctgggctccgccggcactcggagaaattgttagtaaacctcatccccgaggcagtcc

SEQ ID NO: 428125 - DNA, 122 bp, Homo sapiens
ggcggcctccccacccatcgcccacagtcacggtgtccacagctgcaggcactcggtgtacgcctggctgcagcccactcagcaacagcaccccacctgctcaggccagagggcggcctgaa

SEQ ID NO: 428126 - DNA, 122 bp, Homo sapiens
gagctcaaggagactccttcctctttctcagcagagctgtagctgactgtggcattactacgcctccccacacgcccagacccctcactccaaaatcctactggctgtagcagagaatacct

SEQ ID NO: 428127 - DNA, 122 bp, Homo sapiens
tagcaatgccttactacaatgccgtttaacttattagagctgactcatggcagctgtcctcgctccaggccaattaggtaggtcagatactcagaatctgaagtgttagtaagaagaaaaga

SEQ ID NO: 428128 - DNA, 122 bp, Homo sapiens
ggtagttccattttgtagatgtaaaaacggaggaagttaaatgatgggttcaagggcacacggctagtaggtggtagaattaatactgcatccaggtcttctgactacggactgggtggttt

SEQ ID NO: 428129 - DNA, 122 bp, Homo sapiens
ccaggggtagagctgtctggaccttcctgcctcttcactgactgcccctggcctggagtgcgtggggcggggagggccatggcctagccctggacagaggctcagccaactcagagcggccc

SEQ ID NO: 428130 - DNA, 122 bp, Homo sapiens
tgcaagttgtacgagaagggaagttctcggggtgagtgtccaacctcttcttggccctcgcgggcgccctggggtccccggggacagtgatgcttccttaaagtcttagctttcagcagtag

SEQ ID NO: 428131 - DNA, 122 bp, Homo sapiens
cttcaggaagccgagtcccagggagagagagaaccgggaggccgtatcgccgatcacttacggctgctccgacaccgcccaccgcaggacagatccagagtccggggcaggagggagccgct

SEQ ID NO: 428132 - DNA, 122 bp, Homo sapiens
aatatccgcacctcacttttcttctttgtaaactgagatggttatagcaccagatctccccgtgctgttagggtgagatgagtcaatgcaggtagaatccctcacaggctgcctggcacaga

SEQ ID NO: 428133 - DNA, 122 bp, Homo sapiens
gcccggcctcgtcctgctgctgcccggccccgccgccgccttcccggagcccgaggccagcgcttccagcgacggcacccccaggctggcccaggccccgccgctgccccgagagcgaacag

SEQ ID NO: 428134 - DNA, 122 bp, Homo sapiens
tcatgggaggagcatccctccaggcatgagtgagctcagcatggcacagctgtgccaggacgacccccactgacatttctgccctgcttgtgttctctttgggatgcccccacccctgtctc

SEQ ID NO: 428135 - DNA, 122 bp, Homo sapiens
tctcagtctatagagtgagccctggaatgaggagtctcagtctacacagtgagccctggacgagggtcctcagtctgcacagtgggccctggaatgaggggtctcagtctacacagtgggcc

SEQ ID NO: 428136 - DNA, 122 bp, Homo sapiens
ttgagctcaaatggaaaatggagccaccctgtgacattgctccaggaaatggtactgacacgcccttaggggcggattcacttagcaggtttacatgccaggagaggccctgccttgccacg

SEQ ID NO: 428137 - DNA, 122 bp, Homo sapiens
acactcgtttgtttaattgataattgttctgaattatgccggctcctgccagccccctcacgctcacgaattcagtcccagggcaaattctaaaggtgaagggacgtctacacccccaacaa

SEQ ID NO: 428138 - DNA, 122 bp, Homo sapiens
cgctctggcgcgcccagggacacagtccggctggaaacaagctccccccaatttcagggccgttgtcgcctccgggcggtccgcgggtcccgagcggactgggactctggagacgtgccccc

SEQ ID NO: 428139 - DNA, 122 bp, Homo sapiens
tggtggagtgagaaggaccaaagtgcaggtgtgcttccctttgctcgggactcactggcacggaggccgcatccacctcctcacggccgtggaggggatgcgtgggaggcgcctggacacct

SEQ ID NO: 428140 - DNA, 122 bp, Homo sapiens
gtgtacctgtccatggccttcttcttcgaccgggacgacgtggccctggagagcttcagccgctatttcttgcaccagtggcacgagaagagggagcacgcccaggagctgatgagcctgca

SEQ ID NO: 428141 - DNA, 122 bp, Homo sapiens
cgttgccacggtggcccttgaggcaagagtcagaccccactccgagggccacgggagacgcggcctctgggaacttgtttagaacctgcatcctgtgaaactgcagagcctcctcaagtccc

SEQ ID NO: 428142 - DNA, 122 bp, Homo sapiens
caacactcctatcaggcatgacactccaagggtaaagagattaccactcagaagctgaggcgaaggtcagacttctctgggtaaagttaaattcttagtacccaactagtttcagcagtgta

SEQ ID NO: 428143 - DNA, 122 bp, Homo sapiens
catcaaatcgaattagctactaaaacaccaggtgtttggtctaggtcttgctgccctctgcgcagaaagccaatcaccgaggcaacaaggattgccagggaggaatgctttatcctgccgct

SEQ ID NO: 428144 - DNA, 122 bp, Homo sapiens
agcaaccacaaaagtgataaatgacacctagagtggttcagttacttggcacatatcaaacgaacagataaaaacagtacgcctaggtattaaatacgtagatccttgctgaacactggaat

SEQ ID NO: 428145 - DNA, 122 bp, Homo sapiens
ggcggtgcgcggggctatggagaccacgctcctccgtcccctcctgtgtgtctcaagagacgcggcagggcacaggcgaccgcctgctcctggcttccccggctttcccaggccccgggagc

SEQ ID NO: 428146 - DNA, 122 bp, Homo sapiens
cagtcccttcctccaacgcagatccctgccctgctgctttcgctgggagcgcgcgctccgcgtttccaaggcagcagcccacgccgccccacgtgacggccccgcttccgggtctgggcgcg

SEQ ID NO: 428147 - DNA, 122 bp, Homo sapiens
gatggttctggatgtcccaggtgtaaccacagcgggcaggataaggacaaagggtccacacgtggaggacgggcggggagatggtcggagtgagcaacgggagacgaactcggccccgaagc

SEQ ID NO: 428148 - DNA, 122 bp, Homo sapiens
agcctcagggaccccaaaagctgcgggctgtaagcagcaggggacttgcctgggagcagtcggcactaggtagcaggcaagccagccagcacaaaataggtagttttaggggagtaggtagt

SEQ ID NO: 428149 - DNA, 122 bp, Homo sapiens
gaagctgtcgcgattcccagaagggcagggttaacaggacacagtcatccctcgcataggcgggagagatcagtttcaagatcccagcttatacccaaatccgtgcatactaaagtcccaca

SEQ ID NO: 428150 - DNA, 122 bp, Homo sapiens
tacaataaagacctggaaaacgtactcaacttttactagctatgtatagacccttgacatcgttcaagtcaatggtggtacaggttaaagtacctggggaggaagggtcatttctcaaagca

SEQ ID NO: 428151 - DNA, 122 bp, Homo sapiens
aacggggtggggctgtcctaagggaagcctagtcgaactgatttgtccctctctgctctccgtctgaaaaccttggccgaaagggttgtagacatggcggccatcagggtaagcgaaaacca

SEQ ID NO: 428152 - DNA, 122 bp, Homo sapiens
aatcccaaacatgcatagcaaggtggtatgcttggtgtggctggctttattattatcctccgcagtgtttccatggtgattcctgtacatcgcaaatctaaccccagcactcctctgtctaa

SEQ ID NO: 428153 - DNA, 122 bp, Homo sapiens
tgcccagagcttccagccagaaaggacaagctgcaggaccctgtgggctggcttatgtgacgccaggcagactgaagctggccatggtcccagctgccacattaccacaggaacagcagccc

SEQ ID NO: 428154 - DNA, 122 bp, Homo sapiens
aaccactaaactccgttagggcagtgaaaagctcacttgcctggatcacacttgggttcccgtgttatgctcacagtgggtgggggtcaggtggatgttctgaagaaaattctcctgcactg

SEQ ID NO: 428155 - DNA, 122 bp, Homo sapiens
tcctggactcacacagaaactcaaagctatggaatgatggcaaatttaaaatatgacaagcgggagtcacaggtacactgcaaaagtgaaacttagaagctttgtgagtcctgttgtaacgc

SEQ ID NO: 428156 - DNA, 122 bp, Homo sapiens
caggacgcgcgagctcagtaaacacggcagcggcggcggctggaggccgtgagacaggcccgcggacacggcgcaaaacccggcccggactctcacccggcaggagcgggcgcggcacgcac

SEQ ID NO: 428157 - DNA, 122 bp, Homo sapiens
cttgccccagccctctcctgccgctcccatccaccctcagagcctcctaggtgcctggggcgtatgtactcaagccttagtgcagatattgggagaaggagtctttctagaaaaagaaatct

SEQ ID NO: 428158 - DNA, 122 bp, Homo sapiens
gggagcgcgtctagacgcagggttgtttgattcagcgctacctggcccgaggaggggcaccggaaagcgctgagaccaacacaccgacaagaacgagtttgaaatgcaaaccgccgccactt

SEQ ID NO: 428159 - DNA, 122 bp, Homo sapiens
cgatttttctttcgtgtgaatatggttttcgtgtcattagtttgcgatttgatttgcttacgtatccagcctggaaaatcttcatcacagggtccggttcctcgagccagccgggccccaag

SEQ ID NO: 428160 - DNA, 122 bp, Homo sapiens
ccccacagagaagaccgactgccccatccacgtgtacttcgtgctggacacctcggagagcgtcaccatgcagtcccccacggacatcctgctcttccacatgaagcagttcgtgccgcagt

SEQ ID NO: 428161 - DNA, 122 bp, Homo sapiens
agccgcccgagccgccccgcggcgcgccccgcaaggctcccagcctgctggagatgggggcgctctgcctggactcggagatcatcctgggcttcaccagccacctcctgcggcgacgaggc

SEQ ID NO: 428162 - DNA, 122 bp, Homo sapiens
atatattattgtgctcatttgggcacttaagagatagtagctgctgctataaatcctgaccgttactcaatacttagatgtgccacttacttaatcctattactgaagagagaactgaagac

SEQ ID NO: 428163 - DNA, 122 bp, Homo sapiens
gattacacataatacataagcgaacgcgaaacgtgtaaataattacttgggataggagggcggtcagagccagcaggggccctggtggtcagctaggccagccccttcgctcctgcactcca

SEQ ID NO: 428164 - DNA, 122 bp, Homo sapiens
cactgactgctccagagcccgagtcggagtgtatcacagaacctgggccgggggggacagcgggccgagcctccttcttccagctgatccctggccgggctggacctgcgctatcagcgcgc

SEQ ID NO: 428165 - DNA, 122 bp, Homo sapiens
ctagtgggggtgaaggtaatcatagcttctatttagtgagctcttactacctgccagggacggtgcaaggtgcaaggtgcggtgcaaggtgcggtgcaaggtacgttccaagcttatcagct

SEQ ID NO: 428166 - DNA, 122 bp, Homo sapiens
tgcctgctcagtgcagacagggtgcccgacgtgtctgctcagtgcagacagggtgcctgacgtgtcaatgttggacatctcaaaaggtggcatacggtcccagcagagagctgcagtggggt

SEQ ID NO: 428167 - DNA, 122 bp, Homo sapiens
gcagagcggaccagtgactggcggtgctggagaaggtcaccgatgtgcttcaccacagaccgtttgtcaagtctcagaactcgtaaccaggccagctgctcagccatccgcagcagcacagc

SEQ ID NO: 428168 - DNA, 122 bp, Homo sapiens
gtcaccgagaagcacgccgaatctaccccaaatgacatcaaatagttccaaaggtccacccgcccactcagctctccaatggacgtgactgcagacacaggtgcagttcgtagccctcgagc

SEQ ID NO: 428169 - DNA, 122 bp, Homo sapiens
tggagtgccaggcgagggcctggcagatgtaggcaaggagtggctccagggctgagtgcccgagggtccgggaagggccctcgtccttcggatccagcagcacagaggtgctcacgtgctca

SEQ ID NO: 428170 - DNA, 122 bp, Homo sapiens
aactccacagctctggatggatttgaaagtgggctcagcagctgtggggcagggcactaccgataactgtgacagcacaagttcccgtctcacacctgctgttgcctctgccagaaatgttc

SEQ ID NO: 428171 - DNA, 122 bp, Homo sapiens
gcaagacgggccgaggctccggggctccaccaccagggtcaccggttcaggtcctggcatcgctgctctctagctatgtgatcttgggctagctgcttcacctgtctgtgcgtccaagtccc

SEQ ID NO: 428172 - DNA, 122 bp, Homo sapiens
ggggccaagtagcattatctggagccccaggcttccatcaaaactgataagattggcatgcgcagggcggctgggaacgcgccaccctgggtgtctataggctcatctggccctgctgatag

SEQ ID NO: 428173 - DNA, 122 bp, Homo sapiens
ccctgcagtccgagctacgacctcacgggcaaggtgggtgggcctcttccgtgagacccccgccctcctcggcgctagccccttcctggctgcgtctgggttggactcagcccttcccccag

SEQ ID NO: 428174 - DNA, 122 bp, Homo sapiens
gggtaagggactttgcggccaccctgttctgaagatgtagagtgggattgtgttaaaatccggcgaactctcctgttacctcccgcaacgctcaaaagcccagactggcgccttgaggcacc

SEQ ID NO: 428175 - DNA, 122 bp, Homo sapiens
ttgtccacaaagatttaattgcaacctccaacagggttcattcagacccttagctccctgcgtcaaaggcaggaaggcagggctggagaggataaagagagggcagatattagcctaagcaa

SEQ ID NO: 428176 - DNA, 122 bp, Homo sapiens
ggaggcggtggtgaaatcttggcttgcagcctccagcccgcccagagccagagtcaggcacgaggctagggcaactccgccccacccctcccccggggactggccctgcgttggacatttct

SEQ ID NO: 428177 - DNA, 122 bp, Homo sapiens
gggggccgcgccggcgcccttccaggtaggggcggggccaggcggcgcgggaggcgggcgcgcggctcccccacgtggtctcctcaagccgcctcgctgggacggcctcccagtcgcgacct

SEQ ID NO: 428178 - DNA, 122 bp, Homo sapiens
cttcccacctcccgccaacctcagcccagatgggtctcaggttacccgatggtaacgaggcgggacagctagggaggattctccacccctccgcaggccctctcctcaaccccagttaaata

SEQ ID NO: 428179 - DNA, 122 bp, Homo sapiens
tggctgcgtgaaggagccggaactggcctgggccttacaacttccttaggtagctggtcacgctctgggtggggtaggggccttggcagtcactgggactcctaacaccgggccagcaggag

SEQ ID NO: 428180 - DNA, 122 bp, Homo sapiens
gccccaccgtcctcgccgtgtctggaagcgcagcagagcccacgagctacctgaggattgcgttgggctcgaggcggctctggtacagcagaccagaccccgggtgttcctgctgtggcccc

SEQ ID NO: 428181 - DNA, 122 bp, Homo sapiens
acacccgtctatgacatagttggtaatctccagaggcggagaagatattactcacaataacgtaaacacgctgtgtgtccaccgtggatcgtaatatcctggggggataggcggggtgatat

SEQ ID NO: 428182 - DNA, 122 bp, Homo sapiens
ttgccatggtgcgcctcgcgggattaggggccggtagaggtgggcgggtcgggcggaagtcggtctggtcaccatgggggccgcagacgcctgcactcgggacttcctcttccagctgagaa

SEQ ID NO: 428183 - DNA, 122 bp, Homo sapiens
atgtttgttgtgtcattcgatctgtcgaggaaggaggtgagacacttgtgggtggcagggcgggaggggagtacacaggctgtaaacagcagtgcccaagctgagacggagcaagctgggaa

SEQ ID NO: 428184 - DNA, 122 bp, Homo sapiens
tctggctgcagagataaaccacacgtgtgcttgcactacataggctcccaagcacatgcccgcatttgacttcatatgcacatacacgcacacacctactgctgcctacacacgagaatgcc

SEQ ID NO: 428185 - DNA, 122 bp, Homo sapiens
ggtctcaatctgacctcgtgatccgcctgcctcagagtccccaagtgctgggattacaggcgtgagccaccgcgcacggcctaactgcaaagtattcttgacacataggccctcagttctta

SEQ ID NO: 428186 - DNA, 122 bp, Homo sapiens
tgatggggaaaagccggaatctctcggtcccaggtggtcatgtggcccaggccggacaagcgtcccgaaagccccgggagagactaagaagcaatcctcccacgcgctttctcccaccctcg

SEQ ID NO: 428187 - DNA, 122 bp, Homo sapiens
agagaaaggggagaagactcccgagggtgaaaatggtacattcggagctggaactcagctcgctgaccccaagcagtgttcccttcttttcgccaggtttgcatccaagagaggggaggaca

SEQ ID NO: 428188 - DNA, 122 bp, Homo sapiens
gccctgggtcaagtgagcagccacctccgggagtacgtggaaccagaacagaagcaagcccgtcaccaggcatgacctgggctccaggcagtatgagctgcctgggcggggggttcaagcct

SEQ ID NO: 428189 - DNA, 122 bp, Homo sapiens
gcttcctctccatcctgctgagcaagctggacagctgcttcgacagcgtggccatcctcacggggggcttcgccaccttctcctcctgcttccccagcctctgccagggcaagcctgctgcc

SEQ ID NO: 428190 - DNA, 122 bp, Homo sapiens
ttccctcctggccttacgtaaggcattctctgaatctcggtgcagaacttcctatttcaccgcattttattctcgtgggttttgcccatagttgccaaggtatatgtagatctagcagtcct

SEQ ID NO: 428191 - DNA, 122 bp, Homo sapiens
cctcgtcggaaccgtgtggggcactcccgggtgctgggtgagtgggaccgggtccctcgtcggaaccgcctggggggactcccgggtgctgggtgagtgggaaccgggtccctcgtcggaac

SEQ ID NO: 428192 - DNA, 122 bp, Homo sapiens
gaaatgaaaccagcatggcgccgaggaaggaagcgtgccccatcagtcctcgatctcaagcgggagctgagagaggagccaggaggccagaagcgcatgaatttcttctcaactcctgccct

SEQ ID NO: 428193 - DNA, 122 bp, Homo sapiens
ttagtaatagggtggaactcagacacacaagaatcccaaaagcaaagtacattccgcaaacgcatgatcctatttcagccaaagtccacactctgaggttaatgaattgggaggcctctgca

SEQ ID NO: 428194 - DNA, 122 bp, Homo sapiens
ccctgggcaggctcagacgccgtgagtcaggggcagagcagggcggtctgagcgtgcgggcgacgcgggtctcactcgtccgctccgctctggactgcgcgccacgctctggggtccggcgc

SEQ ID NO: 428195 - DNA, 122 bp, Homo sapiens
ttcctgttcctcttcttgctcttcctgtttctgcccctcttcctgcttgtgttcttgtgtcggctcctgcctgtgctccactccttgctcctgcttgtgctctggcgcttgctcctggcctc

SEQ ID NO: 428196 - DNA, 122 bp, Homo sapiens
cctctccactggggtgcaggcagagaggcaaagaggaaggagacccttcgtgactctcagcgaggctgtgaagaagaatatccggaagccacaagaggtatatccggaagccacaagaggtg

SEQ ID NO: 428197 - DNA, 122 bp, Homo sapiens
gatgtgctcgtccagcttaatcttgtagatgaatttcctgccacattcaccacaagaaaacggcttttcctcgctgtgcgtcctctggtgggtcttcagggcagccttccgggagaagctcc

SEQ ID NO: 428198 - DNA, 122 bp, Homo sapiens
gtaaaatttggggaaatatttgcaacttgcatcacaaaaacttgatttttcgaccgggcacggtggctcacgcctgtatcccagcactttgggaggctgaggcaggcgcaaggtgaggagtt

SEQ ID NO: 428199 - DNA, 122 bp, Homo sapiens
gggcgcagcggggcggcccggagcggcgcgggcggcctggagccccgggagcggcgcgcgcggtcccggcccagcggctctcctggcctcgcgctgcacattctctcctggcggcggcgcca

SEQ ID NO: 428200 - DNA, 122 bp, Homo sapiens
ttggtgcgggaagtccttgagtgcctgtgggtcggcaggagctccggtgagactcaagttcgctcaccccacggttctgaaaccggtctcccgcctttcctaccctcaggtttagggaccgt

SEQ ID NO: 428201 - DNA, 122 bp, Homo sapiens
cctgaaaactaatttctcaggcgactggaactacagcatttgttggtaaaggaaacaatccgtcagccaaccgggagcgtcttagcccgtctgtcttttgtccaggagctcaagaagcagag

SEQ ID NO: 428202 - DNA, 122 bp, Homo sapiens
ggcggggcctgggcggggtcgcgccgtgcagtcctgactcagatgagtcctctctctcttcgcagctctccgtggactcagggccctccacctcatcgggagcctcccaggcactcagcgtc

SEQ ID NO: 428203 - DNA, 122 bp, Homo sapiens
gtactgggcctcctcctcaggagtcagctcaccggccatgcctgcgtctcctgcacctcgcggagcctccgagctgctgcccaccggccctcaacctgctgctctcagagctcgtggtccag

SEQ ID NO: 428204 - DNA, 122 bp, Homo sapiens
cccggaccccaacctctgagaggcccagagccgagcatacaggccgggtgcggtggcacacggctgtaatcccagcactttgggaggccgaggcgggtggatcacctgaggtcaggagttcg

SEQ ID NO: 428205 - DNA, 122 bp, Homo sapiens
cctgcctgtggttcgccctgtgtgcgggcggtgtgggcgtctttgccgcagggtgcttgtcgtggcaagggttctttgtgtgtacttctgcgttgacatgcatcacacccacgagcacatgt

SEQ ID NO: 428206 - DNA, 122 bp, Homo sapiens
cacgaatgtcagaggtgaatccaggctcatgaacccattgtggtcacgggactgaagccacgtggcccaacagtaatgaagtctgtgaggccttggtaaccccaaagctctcccccaattag

SEQ ID NO: 428207 - DNA, 122 bp, Homo sapiens
gctcgggcgcatttgtactttgccgcgggaagcaggcagcccggcctggcgctggcctagcgctggcgcctcctctggggcaccgcgggctcggtggattggccacccgagaaacaggccca

SEQ ID NO: 428208 - DNA, 122 bp, Homo sapiens
ctagacgccgagctagggctgggcgcctgccgcctgctgcgggaatgccgcagggtgacccgacattctggaaactggtcccaaggcccagcctgggtgactggaagtgaggttgtccaggt

SEQ ID NO: 428209 - DNA, 122 bp, Homo sapiens
gtaaccatcgcaaagtcccttgcagcccagattttcagagagtaactacaacagaaaatacgataaaagaaaacagcactgtgatgagtaataggacattggtgcaaagagaggagcttgtt

SEQ ID NO: 428210 - DNA, 122 bp, Homo sapiens
gccggggcaaagacgaagtttcaagggccagcggcagccaggctcctcctctgggttccacgccacgtccgccctgggcgcggtgtcgccttcagctgggtcacgaccccgggcttgggcgg

SEQ ID NO: 428211 - DNA, 122 bp, Homo sapiens
ggcgtaaataaagagacttcttggcttttgactcagcctttaagcccttccccatcagagcgttttaatctgccagtgtcatataacacaagagacagctccaccttgggactgctcaactc

SEQ ID NO: 428212 - DNA, 122 bp, Homo sapiens
catgggagaaagtgaaggagatgcctgatctgtccagggcttcccgggtcagtggcgcttcggccagaagccaggcagcaggccttgggcaggtggctggaccccttctgtgccacggtatc

SEQ ID NO: 428213 - DNA, 122 bp, Homo sapiens
tctgtcgccctagctaggtgtcctttctctgtcccagtcggtttcccagccctcacaggacgctggcctgaggagcctcggtccaccgaaggcccacggcccttcgctgttgtaggcgcctt

SEQ ID NO: 428214 - DNA, 122 bp, Homo sapiens
cgattagcctgcttctagatatacaccgtaagcaggagtccctaacctcccggctgcaaacggctatgtgtccgtggtctgttaggaacccggccgcacagcagatgagtggccgggagcct

SEQ ID NO: 428215 - DNA, 122 bp, Homo sapiens
caccccggccgccccctcctgtacagcctccatcctgaaggcggtgccctcctcggcactcgcacacaccaaggcctgtgctgcccgacccaagccacaggaaccctgccgcagcctctatg

SEQ ID NO: 428216 - DNA, 122 bp, Homo sapiens
gcgccgcctcacgctgggcggcatctacaagttcatcaccgagcgcttccccttctaccgcgacaaccccaaaaagtggcagaacagcatccgccacaacctcacactcaacgactgcttcc

SEQ ID NO: 428217 - DNA, 122 bp, Homo sapiens
tgtggaccttcatcaagtccttccaggtagccgcccctcatgtcctgcggcccggggaatcgcagggctgccgcgtggcccagaacacagctgacacaaggaggagccctccactctggggc

SEQ ID NO: 428218 - DNA, 122 bp, Homo sapiens
actcagagacctgcagggagctatggatgacctggacgctgacatgaaggaggcagagtccgtgcggaatggctggaagcccgtgggagacttactcattgactcgctgcaggatcacattg

SEQ ID NO: 428219 - DNA, 122 bp, Homo sapiens
tgggctcttgggaggggttttctgggctttcgagaagcttcggaaacagaggctcctgcccggcctccgacttcccttcacacgtgcccccggggaaggcaggagaagttgacggaagatag

SEQ ID NO: 428220 - DNA, 122 bp, Homo sapiens
ctgctcaccatggccctgaggcccttgggacgggtcccgcctgctcaccgtgtccccgggcgctcgggatggcgctggcctgctccccgtggccccaagatcctcaggctgctgcctgcctg

SEQ ID NO: 428221 - DNA, 122 bp, Homo sapiens
taagcaacttgacctaagtgtaaagttgagacttccttcaggtttatatagcttgtgcgccgcttgggtacctcggatgtgagggcgatctggctgcgacatctgtcaccccattgatcgcc

SEQ ID NO: 428222 - DNA, 122 bp, Homo sapiens
cttggtcccatttatgaatgcaacaggaaactgtaggatcctaactgacaatacactttccgatcattagctagtgtgatttttgcatccattgaaattggttgtcaaaataaatttctatt

SEQ ID NO: 428223 - DNA, 122 bp, Homo sapiens
ttcatagtgactgattaagatcccggtgccgggctggcagcgggaggcgtgactgcagcgcgccacatctacagcatgaaaagagatcaacttccccagctctaatcacccaggaaagcttc

SEQ ID NO: 428224 - DNA, 122 bp, Homo sapiens
ccccgcgcccgggcggccagagggtgcagggggagcgctagtgcctgctgggatggcccacgtaccgctttgccacctagccagaaaggcaaggtgccccctgtgtcctcagcatgaaccaa

SEQ ID NO: 428225 - DNA, 122 bp, Homo sapiens
actaatatggtagattgtgccaaaaatgcacacatggccgaaacaatattttcagtcctgcgtgttcttccagacctttgccttccccctcaacccccccgtggagaggagccccgctcccc

SEQ ID NO: 428226 - DNA, 122 bp, Homo sapiens
cgccatggctacgccggaagtggcctgccttcattgatggtgggacgactttgaaaagcgcgcttccgctttttccgcagcccaaacaggctcgaccaatctgaggccgagcgcacgatcta

SEQ ID NO: 428227 - DNA, 122 bp, Homo sapiens
tagagacaatgaaaggggatgatttttctgctccctccagtttaactcattctaagcagacgcaaagccattgtagaagaaacaagacctaatcctgttttccttggccccagttagatggg

SEQ ID NO: 428228 - DNA, 122 bp, Homo sapiens
actctaccaacatgggcttgcgatggccattgaaggctcttaagactggcacaatgccaacgggaagggcaggttgccctcaatgtccaggaattgtaggtagccgaatacagtgcagtgct

SEQ ID NO: 428229 - DNA, 122 bp, Homo sapiens
aagcccaagaaccaggacgaacaggagattcctttccggctccgggagattatgaggagccgccaagagatgaaaaacccgatcagtaacaagaagaggaagaaagcaggtgtgtgcaggcc

SEQ ID NO: 428230 - DNA, 122 bp, Homo sapiens
ggggccggcgggtgaccttcctaggcactgctgggggcggagccaggaaacggctcgccccgccattggctggggcgccggatttctttaaaaactccggcttccattggctcgtgcagtcc

SEQ ID NO: 428231 - DNA, 122 bp, Homo sapiens
tgcccaggaccactcagtcgtgagtggtcagtgtggggccagggctgaccgcaggctccacgcggcaagcaccacactccagcccagcagggccacgtttccaggcaagccgtggtgtcacc

SEQ ID NO: 428232 - DNA, 122 bp, Homo sapiens
gccaccaaaagcctcctttatgcacaggcctgggcagggacacacaaccaacagctctgtcgggaacttaggagcctgctcgcctacaaaaatgataagagagatctaaagaaaacaagcta

SEQ ID NO: 428233 - DNA, 122 bp, Homo sapiens
agacccccagtgcccacacgcctcttggatcctgcgcccttggtgctctccgcatctatgcggtcacagaaaagcctggcttcggcccctgctcttacagctgagataagaagacctagtcc

SEQ ID NO: 428234 - DNA, 122 bp, Homo sapiens
gtttggaaacactctgtttgtaaagtctgcaagtggatatattgacctcttagggtccttcgttggaaacgggttttttttcatgtaaggctagacagaagaattcccaataacttccttgt

SEQ ID NO: 428235 - DNA, 122 bp, Homo sapiens
gctggtcatgcggtctagcatccttcatgcactccagggacgcttaggggatccctccttcggtgacaatgatgtgtctgtggccgcattcctcaaaccagagtcacgtactgccagacccc

SEQ ID NO: 428236 - DNA, 122 bp, Homo sapiens
gccgttttttagagaagcctgaaccgggacaaaacacgccgagacctacagacacaaagccggggggtccacgctggcgctggaggcgagccccggcggccgcaagcgagcccgaggcgcgg

SEQ ID NO: 428237 - DNA, 122 bp, Homo sapiens
agacaccagccatgaatggggtaccctgactactcacacttctgcttagtcaaccccacacgtttgggggtttccatgatcctcaggttcaataatttgctagaacaactcacagaactcag

SEQ ID NO: 428238 - DNA, 122 bp, Homo sapiens
ccgtgtggctctgggggtctgtgcgcgggttcagtcccagggcctgcggagcagggtgtgcgacgcgcgtctgcctgggggtcaggtggggatggtgtttttgcatcacacagggcgggccg

SEQ ID NO: 428239 - DNA, 122 bp, Homo sapiens
tggctccagacaaaggcttatttttttcagcacagatggctgaatggttgcctcctccaacgggttgcccgcaaatgaaagacagatttctatttctaatctatgcaaatatcttactctgc

SEQ ID NO: 428240 - DNA, 122 bp, Homo sapiens
aacatagacaccagcttgacccggctcagggcattcagagcgattacattcaagagacttcggtggatttgggggaggggtgcggattggcggaatttcatttttccatcagttattaaacc

SEQ ID NO: 428241 - DNA, 122 bp, Homo sapiens
atttccctaaagttgcctcccagggcgggcttacatcagctctggcagggaacgaaactgcggacagaactgcggttaatccaatggtcagccggtaacacacagatttggaatacctttca

SEQ ID NO: 428242 - DNA, 122 bp, Homo sapiens
gatgactctggggtgtctcctgatggctagggcaacaggtccctgttgacatcaccttatcgggaagttttagacaggaacagtcttcaggctctgaagtacttgaacaccatgggattcct

SEQ ID NO: 428243 - DNA, 122 bp, Homo sapiens
atgacatggtaaggatgtgcttaacttcttaagaaactcccggaccactttccagcatggcgggacccctcccattcccactgcagcttatgagggtcccagttcctctgcatcatcactag

SEQ ID NO: 428244 - DNA, 122 bp, Homo sapiens
cggagacgtcaggctcccgcggcccaagcggccgcccggcgcggcgcggcgcagtcggctcgagtactccccgtaacgaggaggtgttctcggccgtcccacccttcactgccgtctccggg

SEQ ID NO: 428245 - DNA, 122 bp, Homo sapiens
tcattccgaaagcactgggcgtgctgtctggagagggctcggcagctttcgtgttggcgtcgtaggtgcttggtggagattcagaaggacccagatgggataatggggcaaaagcagcccta

SEQ ID NO: 428246 - DNA, 122 bp, Homo sapiens
tgggaaccccagagggcaactccagtcagcagatagtgccagcgtgcaggggatgggctgcgaccgctcccagtgaccccacgaaacccagaggggaggctgaggctctgaggccagccagg

SEQ ID NO: 428247 - DNA, 122 bp, Homo sapiens
ggagcagcaagagcgaagctctgggcgccaccatcttgggccagaggtcaagggtcctcacgttaggctagggcaggtgaggccaacaaacagcagccttgtttcaaccctattgctcgcca

SEQ ID NO: 428248 - DNA, 122 bp, Homo sapiens
tcattcatttacgcatcccacaaatgcctgtgtaacatctagatctgccaggcatagatacgtgccaggcactctgctggtcactgtggttacagatctgagccagacccagtccctgtctt

SEQ ID NO: 428249 - DNA, 122 bp, Homo sapiens
actccgctttcggaagtccctgcgcgtgcgcagaaaagcgggcagagggcggagcgtgtccggggcgcccacggcgcaggcgcggagggcggggcgggatctgggcgcgtgcgcagcccgag

SEQ ID NO: 428250 - DNA, 122 bp, Homo sapiens
ggctgtgagattgcaaatcttgcaattacttccattgcttttgggggctgtgagaatttccgcctctcatcctccacagtgaggagggtagtcgggaaaggctttctcccttaagttttcgt

SEQ ID NO: 428251 - DNA, 122 bp, Homo sapiens
ctgccctggatgagctggacatccccttccggaagcctggctgggtggtggggctggggacggatggctcagccatgttgagctgcagaggaggccttgtggaaaagttccaggaggtcatc

SEQ ID NO: 428252 - DNA, 122 bp, Homo sapiens
ggggccccttggggaggaattcattttctgctgaaggaagctccggaggcatccggtgagcgctccctggaatcccatgcgctccctttgggctcagtgttgacttggctgcgcaggctctg

SEQ ID NO: 428253 - DNA, 122 bp, Homo sapiens
cgcgccaaagacggagccacctggcgtactggtggaaagcgcagacttcagagccacacccgtagttaagtattcggactctgagattccagggtggggcccaggccatccgcgttttcacc

SEQ ID NO: 428254 - DNA, 122 bp, Homo sapiens
atttcttcctttctcatctgtatggcttttctttcctagtgttattgcactggctaagaccgccactacaatattgagttggagtggcaaaagcaaaaatccttgatttatttcctatttat

SEQ ID NO: 428255 - DNA, 122 bp, Homo sapiens
ggataggacgacgagcgcaatcgggagctccgccgcccggattcctgcttccctggggcccggaggctgctgcgtaccccactgtgacctggaacccagggacccgagtcccgacccggatt

SEQ ID NO: 428256 - DNA, 122 bp, Homo sapiens
tgaagaccaggagcagcgacatgtcggacggcagtgactttgaggacgtcaacaccaccacggggaccgacctggacacgaccacggggacgggctcggacctggacagcgacgtggacagc

SEQ ID NO: 428257 - DNA, 122 bp, Homo sapiens
aacctcggttagccaagtcatcgcagatgggtccttctatctgcctgctgtgtgcctgcacgtttcctttccagagaagccccggagaggggactttggttggtccccactccagaggtgag

SEQ ID NO: 428258 - DNA, 122 bp, Homo sapiens
gcagtgcctgctgcggcgctgcatcgacaaggctgagaccgttcagcggatcatctacatcgccacagtggtatgtgacgcctgcgggactcccggctccttagggcagccgggagacaagt

SEQ ID NO: 428259 - DNA, 122 bp, Homo sapiens
atgagctgtgtgaatcccaacaacaagcctctgttttacagaaaaggctcagagaggtcccggaatttgtcaaagtcatagactgtttctctgtttacatgttccattccttcttgtctggg

SEQ ID NO: 428260 - DNA, 122 bp, Homo sapiens
caattgggtagtgctgacgtcaccctcatggggaggggtggtgcatcagggtagtgctgacgtctcctccatggggagggtgaggggcatcaggttctccacgtggtctctgctgagcggga

SEQ ID NO: 428261 - DNA, 122 bp, Homo sapiens
gaacagtgcctgccctgtacataggaagtactagaagtgcatttgttaaacaaaaaaatacgatggttaggtgaccttggttgagtcatttgtgtggcttgttccatttcttctccaaaatg

SEQ ID NO: 428262 - DNA, 122 bp, Homo sapiens
gcagaagcttcgggggtggggcagagaggctgtctggagttctagcagcagactccgccccgcaaccgattgactccagggtcctgccgcccccaagccccgaaactcctgacttcctccct

SEQ ID NO: 428263 - DNA, 122 bp, Homo sapiens
aagcacacacacccacttcggaaatcaagtcggtgcgagggggccggtggcaactgcaggcgctcggcgttgactgccgccggctgctttgcctggaagaagaggagccaagcaaatccggc

SEQ ID NO: 428264 - DNA, 122 bp, Homo sapiens
cttggttgttcctgccgtgggactggggaatggtgtggacaacaaacctcagaattatcccgctgagggtgtgggagtttttatataccaactcctatccctcattggatggttaaagattc

SEQ ID NO: 428265 - DNA, 122 bp, Homo sapiens
gctgggggtgggacttcccctttctgtgtcttgcttgccccgtgtctcccagtgagtggccgccctgagcctggggccagcagcccagccccagtgagaaataaaagtagccatcctgcctg

SEQ ID NO: 428266 - DNA, 122 bp, Homo sapiens
tcggcggctcggggcacttacagcccggagggacgccaagcccaccagtcgccgcggaagcgccttcctcattgctgccatcttggcccagaatcccccgcggcagtccagctgggccccgc

SEQ ID NO: 428267 - DNA, 122 bp, Homo sapiens
agactcctcgaccccgcagggccacagcgcggccagccccctgcttcttcccgggggctgcggcccctggaatgagcctgccttccagcttcttggccaggacccagccgctctccacctac

SEQ ID NO: 428268 - DNA, 122 bp, Homo sapiens
tgcatgaaatacaggaatattcctagaaagttcggaggctcactctcaacgatctgtccacgggatcataaggctctccttggattagtaaaagaaatcaacaggtgagcttttcagggagg

SEQ ID NO: 428269 - DNA, 122 bp, Homo sapiens
tataagaagtaataagtcacagatctctctttctatttctgcttccctcagaaaacttggcgcatcatctggaaatagattcaggtaaacagcttgggatttggggagtcattcttccattc

SEQ ID NO: 428270 - DNA, 122 bp, Homo sapiens
cacgtggggagtccagtttctcgaccccttctcctccccgggcgcctttgtgctgtgtctcgttctgcacacctttgctccagggtgtgccccagaagcagaactgcgggttgtaaggtacg

SEQ ID NO: 428271 - DNA, 122 bp, Homo sapiens
cacgcgacggctggggctctgcgctcgaggggtcgagcctgggcagtacaggcggcggtgcgcactctgcggcggcctctgcgcctcgggcgggcgggagagagaggccgcggccgccagcg

SEQ ID NO: 428272 - DNA, 122 bp, Homo sapiens
gtctcagtccgtgtggtgaggacaggaacaaggcggaggtaaagaagaagaaaacagattcgaggatgggggcgacccctgctgtcttcagccaatcacagaaattctctgagtgaatgtat

SEQ ID NO: 428273 - DNA, 122 bp, Homo sapiens
agcaaggagtgggtttacatgagaaccagaccagccacagggagagagtgggtaaggggccgggagcctggggctcagcacagagaggcctagtacactgagcctggccccatccccatccc

SEQ ID NO: 428274 - DNA, 122 bp, Homo sapiens
aagtgtctctaaacatggtttgcatagctggatctcagcttatctgtgcctttcggctttcgcttccatacatggatctgttcccaacagtaactccaagctgtcgaaaagaagctatctgg

SEQ ID NO: 428275 - DNA, 122 bp, Homo sapiens
gcggacccgccccctcccaggcctgcccgccgcgcgcctgcctcggcgccctcgcaaccgcggccaggccaacctcagccggaaactacatttcccagcaggtcgcgcgctcctcgacagct

SEQ ID NO: 428276 - DNA, 122 bp, Homo sapiens
cgccgccgagctccccgcccgactgtgcccgcccctccgcgaccgcaccctgcgcgcctgcgcttgcgccctggcggggactgggggcacccgctgctcacaccctcccctccccagcccgc

SEQ ID NO: 428277 - DNA, 122 bp, Homo sapiens
attctttgccaaaggggggaccagaattcccccatgcgagctgtttgaggactgggatgccgagaacgcgagcgatccgagcagggtttgtctgggcaccgtcggggtaggatccggaacgc

SEQ ID NO: 428278 - DNA, 122 bp, Homo sapiens
cgtggctagatctgggctgggacgcgatctgagagcgcggtggatgaagccctgcgcctccgcggattctgcgctggggtcctctagctcctggttcgagttccggcgcgtggacttcgggt

SEQ ID NO: 428279 - DNA, 122 bp, Homo sapiens
ggttcccgcgcgcggcgagagtttcgggttttggttcgcagcgcctgcgcgcagaggagacggcccgcccccagcccgcccgggtgcccgctccgccccccgggctatgtaaagcggccggg

SEQ ID NO: 428280 - DNA, 122 bp, Homo sapiens
tgaaatatgtgaagtgaaaaagcaaagacccaaaaccccaaaccaaacaaacccagggaacgttccactatgttgttctttgggggttaagttgcctagctcatctgtcttccctctacctt

SEQ ID NO: 428281 - DNA, 122 bp, Homo sapiens
cggagagcagcgcgatggagttgcccaggtagccggagaccagctccgccacgaagaaggcgacggtgagcaccagcatgaagagcagccggcacgtcttgccagagtagcggcccatctcg

SEQ ID NO: 428282 - DNA, 122 bp, Homo sapiens
ttttttcttttttcttgagatggagtcttgctatgttgcccaggttggagcacattggcgcgatcttggctcgctacaacctctgcctcccgggttcaaggaattctgcctcagcttcccaa

SEQ ID NO: 428283 - DNA, 122 bp, Homo sapiens
aagaaagaagcgtatttaggcagtatcgcgttgatttcagtccacggaacctctggtgaccgggtagtgtgactccgtcattggtagccccccgcccacacagccgggactcgcggcctttg

SEQ ID NO: 428284 - DNA, 122 bp, Homo sapiens
ccacctgctgcgggaggctgtagagccgcttgcgcatggacggcggcagcttgtccatggcgccaggggccggggtcggaccgggccgggggcaggagcgcggcgccgcggacgggctccag

SEQ ID NO: 428285 - DNA, 122 bp, Homo sapiens
gtctgttcctaccatactcactcaacattggaaacatatgatgactactttcttcaaaaacgtccttattctgtgtaccacactttgctgctgctctttctgcctctgtgaccactccttat

SEQ ID NO: 428286 - DNA, 122 bp, Homo sapiens
cgtggcgcacgctctgtgcagccacgtagaccaagctcagctgctgcacgccctggaggacgcgcacctgccaggcccactgcgcgcaggctactatgacctcctcatcagcatccacctcg

SEQ ID NO: 428287 - DNA, 122 bp, Homo sapiens
cttttgggggtccaatattcctgattagtttgttgccagttcttcaacccagagctttcccgtcctctctagcttcatgaagctggatcttaatacatggccatgagctccagtgactttgg

SEQ ID NO: 428288 - DNA, 122 bp, Homo sapiens
atgaacggcgctgcagagccctctccaggcggaatgaaagtgcaaacccagcgtttcgggcggcagagtggcgggggccacctggcgcggccgcgcggccagggtccggtttcgcttcctcc

SEQ ID NO: 428289 - DNA, 122 bp, Homo sapiens
ccaagccctcaacaccatgctcctcctcctcctggaaagggtagaaagagtcgtcccaggcgatgctgcaggtgtcgggcagactggagaagtcctggaactctttgcagtcagcacggtcc

SEQ ID NO: 428290 - DNA, 122 bp, Homo sapiens
ggagaggggcaggaggacattcacatgctctgagcgcctactgagaaccaggtgccctgtcggtgccttcaggtcggctctcgtttcaccctcgcagtagccatgtgaggcaggcagagtca

SEQ ID NO: 428291 - DNA, 122 bp, Homo sapiens
tcttcatttgcctatctggaaaatggggataatgacagtccctccctcctgggggagctccgatgacacaggccaatagtggtgatggtgtttgtaaaccctgcggtgtcgtgttggtgcac

SEQ ID NO: 428292 - DNA, 122 bp, Homo sapiens
cgtctggggtggggatggggtcccgtaagaccccctggtctggcctcgttctcagcacgccggacctggatctcttcagttcaggagaatttgggaggccggcctgggccccggggcggggg

SEQ ID NO: 428293 - DNA, 122 bp, Homo sapiens
cacataaaaggtcccaggtctgtcaatgagtttcatttaatttggagagccagtctgccacggagaccaccattctccacagagaaaactgccacatttgtgaggtgaatgaactttcagca

SEQ ID NO: 428294 - DNA, 122 bp, Homo sapiens
agaagttccagcaagcacttctgttaaagatacttgtttcgtgaaaactatacaatgtggcgttttcattcctatctgtgattcatttcttaagttcgtggagttcctttgctccccttccc

SEQ ID NO: 428295 - DNA, 122 bp, Homo sapiens
tgattgggctgtcctacatcacgtgacggccagtacgcgtgggatttggctccgaggaggcggaagtgcagcacagaaagggggtccgtgggggacggtagaagcctggaggaggagcttga

SEQ ID NO: 428296 - DNA, 122 bp, Homo sapiens
catatgcctgcagaatgagcaaagactatatgccataagaagcaacctcctggccaggcgcggtggctcatgcctgtaaccccaacactttgggaggccgaggcgggcggatcacctgaggt

SEQ ID NO: 428297 - DNA, 122 bp, Homo sapiens
agggcgagttgattctttgttgttaaacactccttagtggattctgacttccatgcccaccgtcctgctgtctatatcaaccaacacattttctggggtctaatgggcatcagcatcaggca

SEQ ID NO: 428298 - DNA, 122 bp, Homo sapiens
gccctagggcctgttcccatgttgaaactacttgtcttcatatgcttcctagcttgccctcgctcctttgcagcagagggccctgctcctgggtgggaggttcctgggatttcctgggacca

SEQ ID NO: 428299 - DNA, 122 bp, Homo sapiens
ggcgagtgctccgggaaaggggtccggaccccacacgcactgggttccaggacaggctctcgctcgggctgggccgactctggcccgcctaggccccgggcacgctgcagtgaaggcggtac

SEQ ID NO: 428300 - DNA, 122 bp, Homo sapiens
caccagtacagggataagagatgaagagacaggccaggtcaggctcaccaagcaggtaaccggaacctttaattttattatgtggaatgcttaatgcagagttaataggggctagagtggct

SEQ ID NO: 428301 - DNA, 122 bp, Homo sapiens
gacatttagggtgattgtgaaacctcgacacggtggttgagattaaggatgattgtgaaacgtctgcacgctggttgacattaaggatgattgtgaaacgtctacacgctggttgacattaa

SEQ ID NO: 428302 - DNA, 122 bp, Homo sapiens
aagctgcagaccttcgcggtgagtgttacaattcataaaggtggcgcatccagagatgctcgtccctcccagtgggttcgtggtctcgctgacttcagtagtgaagctgcagaccttcatgg

SEQ ID NO: 428303 - DNA, 122 bp, Homo sapiens
gttccgggactcgggcgcgcgccctctgctggccgtgcgggctcagcatcgggggcccctcgcaggtgccctcccagggataggggcacctgctgagccttcaccactgcgctcccaaagag

SEQ ID NO: 428304 - DNA, 122 bp, Homo sapiens
atgaggtagtaagagggagattctattgaaaccaagaacttcagtagtaaaaatagaccacgcttatgtagtgtgccagttgtttttttgtttggtgtgtgtgtgtgtgtgtgtgtgtgtgt

SEQ ID NO: 428305 - DNA, 122 bp, Homo sapiens
atggctgcagcccgtccctgagaccttgcagaagcggcggtggcggcagctgcacctttacgccgtgacctccctctcctctggcagggcgggctcctccgaagcccgcgcggacccgcccc

SEQ ID NO: 428306 - DNA, 122 bp, Homo sapiens
ttggggaatgcacctgcaagcttggcaggcgccttggaaacgtagttgttcaggagtgatcggcgtaccagtgtttggaatgaaaatgaggctgtgcatatcgggcttcttggaattgacac

SEQ ID NO: 428307 - DNA, 122 bp, Homo sapiens
ggggacgccggtccgcgagtcgcaaactcggagacgaaggcgggtagctgaagaccagaccgtggactaacgagagaaccgacggaggaccgcgggcggcgggagggtagcgcgagagagcg

SEQ ID NO: 428308 - DNA, 122 bp, Homo sapiens
caggatttaatttgcatggcagattagcttgtcttcccagcaaggcaccccggggcaccccgagctgtaataggatcccgcctcttagagcccattaaggcaattgagagcgcctcctaatc

SEQ ID NO: 428309 - DNA, 122 bp, Homo sapiens
agccatggtgtagggagcatgaggaccgggacccaggcactggcacgccagcctgaggaccgggatccagacaccggcactccagcctgaggactgggacccaaatgccggcactccagcct

SEQ ID NO: 428310 - DNA, 122 bp, Homo sapiens
tggtcggtaaataagagtgccttctccgtcgtctcggatctccgaagcaagcagtcaaagcggccactgccttgcctgctggaaattctcgaaaatttttctcccgcagttgaccagatgga

SEQ ID NO: 428311 - DNA, 122 bp, Homo sapiens
ggagaaaaccggacagagcaatggacaccaaacacgcaacggacacacaacactgagctccgcgggtccggaaacaaacacccagccaggtggtggaaggccgccccttcctccgaggctgg

SEQ ID NO: 428312 - DNA, 122 bp, Homo sapiens
cagtctcagccaccttaagaagctgcagctggaaacagccaaaagctcaccctgccggcacggacagggaaactgaagccacaagaggggaagtgagacccctagaacccaggcccctcacc

SEQ ID NO: 428313 - DNA, 122 bp, Homo sapiens
ttatttcagatggctgaatatgccatattgttttacattaagccactcaatatgtggccccgaatctcttatgatcaaatctgagcaaagatataaagatacgaaaattatcattaaggatg

SEQ ID NO: 428314 - DNA, 122 bp, Homo sapiens
acgcaggaaattagccaggttgcgagttgcaaagctgctgccgcggcgccgggaacggagcgcgcccaatctccagcgggagccgccaggcctggcctggccggggcttcccttcgctcgcc

SEQ ID NO: 428315 - DNA, 122 bp, Homo sapiens
tagcaatttaattttcagtgcaagcaaaagcaaacacatacctgctcactgccatacgcacgaccaaacacatctggaatattcaaagcaagttcaccttctccatcttcactgtggaagct

SEQ ID NO: 428316 - DNA, 122 bp, Homo sapiens
agagtgggcttccggctccacgtaacgatgcgattgggctgtacctctgtctgtctcctgcgcgatgtcccgccccgggaggtgtcacggaactcagctgatataagcccgggatcccgccg

SEQ ID NO: 428317 - DNA, 122 bp, Homo sapiens
gttcatcatgcttgaagggacttgacctgagactgccacttctcctccatctgaaccccacgcatgcttctggcctaatcttcctatttctttctttctttcttttttttttctttttcttt

SEQ ID NO: 428318 - DNA, 122 bp, Homo sapiens
ccttccctcggccggccaggcctagccatacctgctcgctctccaacaacaccatcgcggcgacgctggctcgactccctccgcttaagcccctagcagtgagagccggaagttcggcctag

SEQ ID NO: 428319 - DNA, 122 bp, Homo sapiens
gaaaaggggggccgtctctttgagcattaaattcagctaccaaggcagggcacggtgtctcgcctgtaatcccagcactttgggaggccaaggcaggcaggtcacctgaggtcggaagttcg

SEQ ID NO: 428320 - DNA, 122 bp, Homo sapiens
ctttttttgaataaagaagaagaagaaataaagtacctgtcatcttgacaagtggcggagcggaggagtcaaggattataaatgatcacagccaggtccagctcgccccgtgattgggctct

SEQ ID NO: 428321 - DNA, 122 bp, Homo sapiens
gtagccgaggcctgactgcgtgggctgctgccacggctgagctggccggccggacgctctcgccagctgctccccaccccactcggtgccgtgtgatccgattcactgccactgcccccagc

SEQ ID NO: 428322 - DNA, 122 bp, Homo sapiens
gtccctgcagaaaaagcacccccgggagtagcggttgccaaagcgtccaggcccgggaggcgcgcgttccccctgtttatgaatggccccggagagggtcctgggattggaggagagctagg

SEQ ID NO: 428323 - DNA, 122 bp, Homo sapiens
tgctgggactgtccttgagtctagcagatgcgtcagcctctttacttcctcccagaaagtcgacctcctgtgctcgctctgtggagatcaggcaccggccactgtgcgctgatcccagctca

SEQ ID NO: 428324 - DNA, 122 bp, Homo sapiens
aacaccaaaacaccaaacagagaaacaccaaaacactgaaacaccgaaacagagaaacatcgaacagagaaacaccaaaacactgaaacactgaaacagagaaacaccgaaacagagaaaca

SEQ ID NO: 428325 - DNA, 122 bp, Homo sapiens
aacagcgcgagggcgaggcgactttggagctgcctcatgcagcgacctcgccttccgctgcgcctcctcccagaacccaagaagcctggaacctgtggcgtccagccctgaaaggaggagac

SEQ ID NO: 428326 - DNA, 122 bp, Homo sapiens
cgggacgccggccttccgggcccaggaggcctcccatcccagtctcccgcggcgccactgcggccctgcctcgtccgaacccctctccagggacgcgcaggtcagggacacccgtccacctg

SEQ ID NO: 428327 - DNA, 122 bp, Homo sapiens
gtccttgttctctggctgggctagggtcacctggagctggtgcccgtgatatccgcctgacgcggaagtgggcaccgttttctggatgctcccttactttctcagcgctgtgtggaggggga

SEQ ID NO: 428328 - DNA, 122 bp, Homo sapiens
cccttgtctaaactcaaaaccgagtccgggcgcgccttgcagggcgcccgagctctgcagcggcgttgcgggctgaacccatccggcacaaactgcgggccactggcccctcacacctggga

SEQ ID NO: 428329 - DNA, 122 bp, Homo sapiens
aaaaaaaaaaaaaaaaaaaaaaacacttggaagccgacaggagatctttgagaccttgggcgaggcagtgacactaaaggcaggagcgactacagaagaataaattaaacttcatcagatta

SEQ ID NO: 428330 - DNA, 122 bp, Homo sapiens
cttcctgggtgtttggttcaagccttggctccagcctcactctcagtcttcccgggagttcgtgggatttggaccttagattattagtattattttgagggcctcctgtgtgtaagcactgg

SEQ ID NO: 428331 - DNA, 122 bp, Homo sapiens
cagctcaaagaaaagaacattcctgatgagctttcacgaaggacatggactcgaggggctcgcgggccctgtgcgtgtgcaaggcgcgcgcgtgtgcgcttgggtgcgcgcgggggtggcct

SEQ ID NO: 428332 - DNA, 122 bp, Homo sapiens
aaatgcagattcctgcaccccaactgcagacactgttaagtgggactggagtggggcccacgggtctgcattcttaactggtaccaccagtgattctgatgcgatgcttcaatcccgagatt

SEQ ID NO: 428333 - DNA, 122 bp, Homo sapiens
agaccaaaccagatcccctcggcttactgaaaagtaggttgagaaaagctctgccgtactcgaaaaagcaacccgagtatggtcgtctttcccaatgcaacagcacaagagcttgattctgg

SEQ ID NO: 428334 - DNA, 122 bp, Homo sapiens
tgaggagaatctgtgtggcctggggacgggagtttggagaagattgaggagggctgctgacgaaggcgagagcaagcctcaagccttgcttacaggaagttccttccccaagcatagagagg

SEQ ID NO: 428335 - DNA, 122 bp, Homo sapiens
ccagggttgatgtaaattcactgagccttgaattctttccaaccaatggcaaagattccccgaggcaaagtctctcctcccctgttgccacagaaacagaccatttcctacaactatggctt

SEQ ID NO: 428336 - DNA, 122 bp, Homo sapiens
tacccacattctttcttttaatcatggaattctccaccccagccctcaccccgtggatgtcggagtaagacaacattgttatcactcagattgtcattgggagggtgaataaatgaatgctt

SEQ ID NO: 428337 - DNA, 122 bp, Homo sapiens
gcccagctgtaagggtctcgctctcacatcagtgctgagaaccaggggcctcttcagcagcgtcatgcatcgtgtttgctttctttcatttcagacacgtaagcagcacagtgaggccacca

SEQ ID NO: 428338 - DNA, 122 bp, Homo sapiens
accgcggcgcggctggtgcggcctggctagggcggggtggttgccgggactgggggtagccgcaggtgcggtaggctagtcgccgcggggccgggcgccgccgggggaggcggctgggcaga

SEQ ID NO: 428339 - DNA, 122 bp, Homo sapiens
tggctcccttctccaatcttcaagaaggtgaaacgtcactgtggtccgcagagggcaggccgcgtgtgcggagtcgctgtcatcccttagtggccacgcccgcctccctgtccacttcccgt

SEQ ID NO: 428340 - DNA, 122 bp, Homo sapiens
cccgggccggccagagggaagggccggagagcggagggaggggtctgcggtcccgcccaccgcccccggccaggcgctgcacaatctgaacttgccacgtgggagctgccgccgccgcagcg

SEQ ID NO: 428341 - DNA, 122 bp, Homo sapiens
caccaatcggaggactgtgcccattgtaattcacgaggagaaggcagcgtctgggcgcgccgaagggggctgggctggagtgcaacctgctctagctatggcttttaattccagctgtcctt

SEQ ID NO: 428342 - DNA, 122 bp, Homo sapiens
aaatgaatgaacgaaataacaaaaaagtcgccctcttcccttactttaccgaaaggagcacgaagaacaggcacggagcccaaggaatgcccaagtccctccaggggtttcctcggtcacgg

SEQ ID NO: 428343 - DNA, 122 bp, Homo sapiens
ccagcaagtgagagtggactgggttgccgtgccgggcgggtgtgggtcgccgggcaactccggagtctccccttccccatcggcccccagcagaagtcccagctcccggcgttttctgtctc

SEQ ID NO: 428344 - DNA, 122 bp, Homo sapiens
ccggggtccgcctcggggcgtgcaggcagccgagtccctggactctggaccaggcactgccgcccggaacgccaggcaggggttagtcccgctcgcaggtaacgcccgctgccggtgcctcc

SEQ ID NO: 428345 - DNA, 122 bp, Homo sapiens
ccctgcactgagctgtccctgggccagcacctgctgcgggccaccgctgatgaggacctgcggacagccatcctgctgctggcacatggctcccgtgaggaggtgaacgagacctgtgggga

SEQ ID NO: 428346 - DNA, 122 bp, Homo sapiens
atagctctgattggatagggctccaggtcccgccccctgggcactgagtgacagaagaagcgatcacacagtgctgagtcgagcgggatgaacgagttccaggcacagcccttgacagggca

SEQ ID NO: 428347 - DNA, 122 bp, Homo sapiens
cctccatgccccgcaccatgctgttcatcacctccaggctgtggcgcttgttcacagtgccgtggtgcttggtggccgtgaggggctcgctcacctcctggagagactgatgaaccaccgga

SEQ ID NO: 428348 - DNA, 122 bp, Homo sapiens
aaaataacagggcattcgttaactttgttcacctacccacttcatttaacaagcatctaacgaattacttgatgctgtgctgtgcacaatttctatctggcaggaaagaactttggaaaaac

SEQ ID NO: 428349 - DNA, 122 bp, Homo sapiens
gcgccgcaccccgcggccgcccctgccgcgggccgcgccgccactcgcggtgggcgggggcgcgcaccgccggccccccgcccccacccccgcgcgtaccggccccatccccctctcattgt

SEQ ID NO: 428350 - DNA, 122 bp, Homo sapiens
gagggaggcgcgggcggccggcggcggcggcggttggtcggtggccggcggtggcggctgcggggctggagggggtttatttacctgccgtggaaccagtccttgcagatatcgcactcgat

SEQ ID NO: 428351 - DNA, 122 bp, Homo sapiens
taaataaataaataaataaataaataaaactatgatcactccactgcattccagcctgggcgagagagcaagatcctgtctcttaaaaaaatttcattatgggctgggcgcggtggctcacg

SEQ ID NO: 428352 - DNA, 122 bp, Homo sapiens
atgttttgctgcaagattagtgagaaaactgcagcaagcagcagcaaagtcgggttcaagcgggcggtttgcaccaaaaactcaggtcagttggccaataagagcaagcccgttaagggtct

SEQ ID NO: 428353 - DNA, 122 bp, Homo sapiens
ttgttcctgatggagtctctccctctcctgcatcatttgctcgttctgcctttgaatcgccgccaacctttgcgcttcagccttttcagcttctgctttcacttgtgcctctgaggagaaaa

SEQ ID NO: 428354 - DNA, 122 bp, Homo sapiens
cccgtgtttcagacgctgctcctcctcctcctcctcctcctcagcagacgaaccggcagccgaggctgatcacgtgctcagaattagtgtgaggctatgaggttcctctttgctcccccgtt

SEQ ID NO: 428355 - DNA, 122 bp, Homo sapiens
ctctgcccacccatgtgcttcagtgtgccgtgtggctgcacgccccagatccatgtggcacgtgccggccggtgagggtgctgggcattgggaggtggcggggagggcgacgtatgcgtgtt

SEQ ID NO: 428356 - DNA, 122 bp, Homo sapiens
ggggatcgtgcccgcgaaaacctcagcccaccgcaatgtccagagcctgacccaagtgaacgtggcgcacttaaaagcgggttcaaagcattgatccgaacacggtgacaatttttcactgg

SEQ ID NO: 428357 - DNA, 122 bp, Homo sapiens
caggcccagggacagaggatgatgcccacacagccagcaaagggcagcattgttgtcagccgccaccccaccctcgtcttgggagcctgcaggctccgcggagccatgggagccccaccgcg

SEQ ID NO: 428358 - DNA, 122 bp, Homo sapiens
taaatacgttcacaaccttgggctgttgagagtggttttggctcttggcttgcacattgacgtctttaattattttcttgctaaaccaacttcagtgttggaaagatagctcatgtataaaa

SEQ ID NO: 428359 - DNA, 122 bp, Homo sapiens
gctaagatagtcctgtgatccaggttccagtgattatatgacaaatattgcagttgctaacgtcacaagggccttgggtaataagagaaaaatcagacacctcagcacatgcttttcctggc

SEQ ID NO: 428360 - DNA, 122 bp, Homo sapiens
ctggacgtttaccggagacacggccacctaggtgtattggggacttgcccggaagttcagcgtaactctgtctgtcacaagcaaacccggagcagcccgcacctgccccggcccgggcccgt

SEQ ID NO: 428361 - DNA, 122 bp, Homo sapiens
tgctcgcccgctggcagggagttggcgctgctcagttttttctgcgtgacctgctgctctcgctcggctgcttggcctccctggtccgtgggtgtctccacgccttccgggggcccctggat

SEQ ID NO: 428362 - DNA, 122 bp, Homo sapiens
acctcaggtgatccgcctgcctcagcctcccagagtgttgagattacaggcgtgagccaccgtgcctggcctgcaattaacttttaataaatgtctcctttgtgccaggcattctgctaggg

SEQ ID NO: 428363 - DNA, 122 bp, Homo sapiens
gcggcacttgtagctacagatttgcataacgtttcttttaattacatatgaatcaagacacgtacaatgggcaaaaacaggtttgggaacaaactctcagtccatccagagggtgaaagggc

SEQ ID NO: 428364 - DNA, 122 bp, Homo sapiens
gggccggttcccgcagaagccccggagctcaaagcccaggagcccctcaggaagcagagccgcctggaccccagctcggcggtcctcatgcggaaggccaagcgcgagaaggtggagaccat

SEQ ID NO: 428365 - DNA, 122 bp, Homo sapiens
ggccctttgctgaaatgtctttctgctgggtaattaattacgtggtgttgaaatgctctgcgtcaactccctttggtttagtcatcatgcttgcttaatgttctgttaatgtccatgctgct

SEQ ID NO: 428366 - DNA, 122 bp, Homo sapiens
aggctctctcatgccagaactctctcaggctggccatggattcccagaattcccagccagcgtgggcactcttagctataatagaaccctcggcccagtggtgtgctggagctgctgggcag

SEQ ID NO: 428367 - DNA, 122 bp, Homo sapiens
ttctcaccgactgcggagaggagtctcagagtgcacagtcgcagagaaggcgtgcgggggcgtgcaggggcgcacaggcgcctgcctctgcgggtgggaaaggaaggaggtgcccgggtttc

SEQ ID NO: 428368 - DNA, 122 bp, Homo sapiens
tgctgttcgtgcagcacgtcctggagatcgcagccctgaagggcagcgccagtgaggcggcggggggccctgagtaccagctgcaggagagtgtggtggccgaccagatcagcctgctgagc

SEQ ID NO: 428369 - DNA, 122 bp, Homo sapiens
tcagtgtttcttaaagaaccctttacaaaagcaggactggttgaagtggtgtctattcaacggcacagaactgaacatcggctctaaatgactgttcagtcggcttattgcaggactgggga

SEQ ID NO: 428370 - DNA, 122 bp, Homo sapiens
caggcccctcggtgggacagcggcggccttggagttaggagccaccctgggaggttgtgccggtgccatgctcctccctgtgtcttgtatgaaaggggccactgtgtgtcttcctccccggc

SEQ ID NO: 428371 - DNA, 122 bp, Homo sapiens
gaagacttaggcaggagaatcgtttgaaccggggaggcagaggttgcagaaagccgagatcgcgccactgcactcctgggattgattgattgattgattgattgattgatttagacaaaagg

SEQ ID NO: 428372 - DNA, 122 bp, Homo sapiens
ggatgggcggagaggaaggaggagcagccagagggcagcggaaagtcgggttagtggaaccggcgactcattttaatggaattacttatggagaccaggttgtgagtcacttgcctgaaaat

SEQ ID NO: 428373 - DNA, 122 bp, Homo sapiens
catcttcgctgttgctgctgctctgggcgcggcacagtcgcagcacaggaattcagccgccgcaggcaccctccggaacagcgcgacagcctccttgcagccccctcccgcgacggcccctc

SEQ ID NO: 428374 - DNA, 122 bp, Homo sapiens
ccatgaatcgtctcatagcggtggtgttggtgcctgtgctggccgaggcctccaatgaatcgtctcatagcggtggtgttggtgcctgtgctggccaaggcctcccgtgaatcgtctcatag

SEQ ID NO: 428375 - DNA, 122 bp, Homo sapiens
ggccctttttcttttccactaacctactccctagaaaacagaaaacaagcccaataaactcgcaaattaaaaagaggagccaaacaagtatggcgttttgactctgtttaaacttgccgcct

SEQ ID NO: 428376 - DNA, 122 bp, Homo sapiens
tcagccacattccacccttgtactatccatcacacgagaccttaaacaaacaaaacccttcgtgttgtttgtatttgctgggtttcaggatttggcttaccctgggcactgggaaagcctgt

SEQ ID NO: 428377 - DNA, 122 bp, Homo sapiens
ggaggttgaggcaggagaatcacttgaacacaggaggcagaggttgcggtaagtggagatcgctccattgtttatttgcatgtggacataagaaagggttaacatggccgacaactatttca

SEQ ID NO: 428378 - DNA, 122 bp, Homo sapiens
aatgccagaagaggtggttttatatagtcagtttgtaaaagagaaaaatagatattctagcgcatatagggaggcaaaagaaaaagcccgcctgtgaagctgtcaaggtcctcacagtacaa

SEQ ID NO: 428379 - DNA, 122 bp, Homo sapiens
tggttccgaagaaacacaggttaattcacttggtgatttctgtttgttcacataaacacccgttccgctcccagcctcttccctttttctccctccccaactgcaaagtcctcccccagctg

SEQ ID NO: 428380 - DNA, 122 bp, Homo sapiens
ctaggactacaagcatgttgccaccatgtcctactaatttttttaccttttttgtagagacgaggtcttactatgttgcccagctggtctcagactcctggcctaaagcaatccttccatct

SEQ ID NO: 428381 - DNA, 122 bp, Homo sapiens
cgggtgggtactcagcaccagtgacattacgggatcacggcacccatcacaatgggcccccgcctgggtcagcagggcccacagtcaccgtcctccacccccgaagcatcaacatgtgtgca

SEQ ID NO: 428382 - DNA, 122 bp, Homo sapiens
ggctggggacgccgactggggcttccaggggctgctaggtgtgttgggctccaggagggccgtcagaaggagggctttttggcaccccccggggtcacagagtgtgcgcccagggcgtgggg

SEQ ID NO: 428383 - DNA, 122 bp, Homo sapiens
accgtacgtagccaataggcagcaccgtgcagggttttcagaggctgcaggtcctgactgcgagctgcctacacgacaggcacctggttgtcatggcaggagactggctccaggcccagggc

SEQ ID NO: 428384 - DNA, 122 bp, Homo sapiens
gcagtccccgagaccagctggaggagtggcgtgtgcatggtgtgccctcagggtagagcgcgccatcttggagagatgcctctttcattcacaaagcggatctgttgcagagcccagagccc

SEQ ID NO: 428385 - DNA, 122 bp, Homo sapiens
gggtttctctgaggtgtgtgcatctttctgacagcagggctcttacctccttggggccaccgttaagtgcagcagcagaaggggtctcgtgatccgggacacggggatgagcaagcatgcag

SEQ ID NO: 428386 - DNA, 122 bp, Homo sapiens
tcaagagtttaaagtctgtttcagtctgccaaaatgtccttagtctagccctaagctctgcgtatcttttccataacttcctttcaataattcaaaattgcaaccaaaccaaccatttttac

SEQ ID NO: 428387 - DNA, 122 bp, Homo sapiens
gagaggttttcagaggtgagggcgcatctttgcagtggcgctaagctggtggtgtcatctcgtccgtgagggctgtgtactcccaagaaaacggaaaggatttgacttgggatttgactgat

SEQ ID NO: 428388 - DNA, 122 bp, Homo sapiens
tccacaagttcttaggtgcttgagacggacctggataccttgaagagcttctctggtgaccgggtcctgtttttgcctaagcggctgggccccagtcttaactggccaactctggagggttg

SEQ ID NO: 428389 - DNA, 122 bp, Homo sapiens
tgttatccctaaccccctaaccgcctgaggttgccctgacctgctggcccacactcccgtcgccatttagtagtaccatcatttcggggcctcagtttaccccgccatcccacccggcagga

SEQ ID NO: 428390 - DNA, 122 bp, Homo sapiens
gaattcgggcgccgcagggaccaccaccgcgatcttcctctgctccttggccgggcccagcgactcccaaaagaacccccttaggagaccacgaaagccccagaaaatatccctaccttcct

SEQ ID NO: 428391 - DNA, 122 bp, Homo sapiens
actggaggagggtcagcgtggctggaggtggacaggcccagactcagctgcccggcctcccgcgcaccatcctggccgaggctggccgggacacgtccctccccagggctgtgttggaggcg

SEQ ID NO: 428392 - DNA, 122 bp, Homo sapiens
aaagggggttgaggcctgggaggaggggttctcattgcctctgcctctgacagcagcttacggtgtcacctcaggccttggtgaccacctctgtcattagttcttgggttaaagcaacccct

SEQ ID NO: 428393 - DNA, 122 bp, Homo sapiens
gacaataaaaaacagtgggaattccaagaaaggaaagagcaccttaggctggggtaattgcggaggagagcaatgatggaaccagcccttgggggatgaacagaatgtcattagaagagatg

SEQ ID NO: 428394 - DNA, 122 bp, Homo sapiens
gccgggagggggcccaagcgccagccccccagctccggcggacccgggtgggcgtgcccgcggacccgcttgccgcacttaggcgagtctcccctgcagcgccccgagtccctgggggctgc

SEQ ID NO: 428395 - DNA, 122 bp, Homo sapiens
agggtggatggtccatgaatgaacttattggcatcaggacatttgagctttctccagctacgagaaggggacaaaaggggatgttgctagtgaagcgggagctcctcactccagaactgatg

SEQ ID NO: 428396 - DNA, 122 bp, Homo sapiens
actctccaatcagagatgagcagagaagagaaccatccaatcacagccccaggggcggggcgttgctgtcctccctgcagagcacacccggcctgccctgagtgaccacaggtgtccccgtc

SEQ ID NO: 428397 - DNA, 122 bp, Homo sapiens
gctctgtggcagaggaaaccaaccgtaaaccgaaccaagagcgaagcgcaggggctcttccgtccaataagcggacccgaacggggggaggggcggggcttctggttgccgagcagcgtacg

SEQ ID NO: 428398 - DNA, 122 bp, Homo sapiens
tgctaagtttttaaaacaagttcttacttgtaaagtacttacaattagtaaacaaggttccgagcaggaaatgtcttgtggcctgggagagaatctcaccacaaatgaaaactacgtgaaag

SEQ ID NO: 428399 - DNA, 122 bp, Homo sapiens
tttttgtttgtttggtatacccagggcccagaatgatgccatactcatgataagcagttccgtaaagagcgttattccctgtgacagaatgtcaggagtgaagttgtcaagtcctttttcta

SEQ ID NO: 428400 - DNA, 122 bp, Homo sapiens
ttctatatacaaacacaattttgtacactgcaattaaatagaatggaatgagcgctcctccgcattcctccccgagtgactggtttggccgccggcccactccatccccgagtgggactgga

SEQ ID NO: 428401 - DNA, 122 bp, Homo sapiens
cacaaaagcaactgaggttcttgccattgaaaataaaggccaaaaccacaattacttttgcgccaacctaaatatatagtctgaaatggaataataaatagtattaaataattaatagtacc

SEQ ID NO: 428402 - DNA, 122 bp, Homo sapiens
gagccacgcctcccaccccgcccccacactcccgagccccgcctcgtctccacactccggcggcgcctccctacccggccccgcctccgcgctcgggctgccagccctcccttgcacgttcc

SEQ ID NO: 428403 - DNA, 122 bp, Homo sapiens
ggggggcttggcctttcctggggtgggcctggggtccccctggtgggcgtgggctttccccgggtgggtgtgggttttccctgggtggggtgggctgggctcccttgctggggttggcaagt

SEQ ID NO: 428404 - DNA, 122 bp, Homo sapiens
tgctcacggacatggatacagaccctgctgtgctccacaccctgcaggcgcctcgggaagcgcccaaaggattccccttcacgttggtgcacctgctccatagctccgggcgctgcgtcccg

SEQ ID NO: 428405 - DNA, 122 bp, Homo sapiens
tctccccagactccagactctagagggcgacctcctcctgctcctgctcctggagcgcagcgagcgcacagcgtttccgcaggaatcctgagaatggcaaggcccccatacccgcggtggtt

SEQ ID NO: 428406 - DNA, 122 bp, Homo sapiens
tttcaccattaaacaaggcagcccctgaggcccaggccaagccaggaggacaatcctactcggcgtaggcccggccccactgatgacgccgccacggggccaggaggaagggagtgattcca

SEQ ID NO: 428407 - DNA, 122 bp, Homo sapiens
ctctcaccacagattgcacctctgcctgggggcgccactgggctcatcagactgagctcacggtgccccctggtgggcgatgccagtggcgccagtgcagcttggagcccgcaatacaaggt

SEQ ID NO: 428408 - DNA, 122 bp, Homo sapiens
ttggcctgaagcaagtgctccaggcgggcagctcctgctccgcgccgctgcacctggtgccggtaccagcgctggatggtgacagtggcctggttcacctggtggataaacctgcccggaga

SEQ ID NO: 428409 - DNA, 122 bp, Homo sapiens
ttctaccccgcctcaggtgcgccagcacgttttctgggcagcatctgtgtgttaggcgaccggagaggtgggttccttatagggaataagaaaactgaaactgacttccaactgcaggcaga

SEQ ID NO: 428410 - DNA, 122 bp, Homo sapiens
cctagtcgccagatcacaggcccaacgcatccctttccggagggatttaggaagtctcggcgttggtccaggaacgacagtcccaccgcgcctcacatggcgcattacccagcgactccgct

SEQ ID NO: 428411 - DNA, 122 bp, Homo sapiens
tcgcacagaggctgtcgcgggcgcgttctctcgctgcctgggcttctgtggaatgagactcgggctccttctacttgcaagacactggtgcattgcaggtgtgtttccgcagaaggtaagca

SEQ ID NO: 428412 - DNA, 122 bp, Homo sapiens
actcagtttccccattctagaacctctctgattgtacgtaattctcataccctctctgatcgtacgcgcttcacacaccctctctgatcgtacgcgcttctcacaccctctctgatcgtaca

SEQ ID NO: 428413 - DNA, 122 bp, Homo sapiens
aacttgagatgttggcaagaatgaaagtcacccactaccggtttgctctggattgggcctcggtccttcccactggcaacctgtccgcggtgaaccgacaggccctgaggtactacaggtgc

SEQ ID NO: 428414 - DNA, 122 bp, Homo sapiens
tcttaattagaaaatgtatcttatgctccttctcctccatatcagattcagctcttgctacgtagatggatgagatcttcatgtggacagtatgagcatgtctgcaatttcctttaaaatac

SEQ ID NO: 428415 - DNA, 122 bp, Homo sapiens
gagagggccccagggggtaatcctcttgggtgcctcagctggtgcggtatgaggctgggtcgtggggggggtggggcgtgtgcggggggtggggtgggggctgggctggggggggatctcgg

SEQ ID NO: 428416 - DNA, 122 bp, Homo sapiens
catttttatttgcatttctaagcccaggagagcaggaagtatgtattatattaacggcaacgttcccagcaatgccttctatatagtagcagtcagcaggtacttgctaaatggctaagtca

SEQ ID NO: 428417 - DNA, 122 bp, Homo sapiens
agagaggggtcccagaacgaaggtggcggcacgagctctgcgctggcggctgtggggggccggcgctcaggaccccaactccatccaagttgcgccgcggtgggggcgggcggaggcggcgc

SEQ ID NO: 428418 - DNA, 122 bp, Homo sapiens
gccagaattccaaccgcggctgtcggaccccatgccatcctcatgtcaacccactaaggacgggatccttctgtccatcttaaagatgaggcaactaaggcacatggaaatttaagtataat

SEQ ID NO: 428419 - DNA, 122 bp, Homo sapiens
gccctccctgcctgtcaagggcacgcctgtcgtcacttcctcggggggggacgtacataacgtcacttccgggtacaggcaggcggaagagcgtccctctccaatttttttttttttttttt

SEQ ID NO: 428420 - DNA, 122 bp, Homo sapiens
cacctcgggctcgtgataatgggaacaagtctagtcttgtcctttctctgggccagtcgtcgagaaatggcctggttcggagcgtcttggaaactgacagggctactgttagttacactgac

SEQ ID NO: 428421 - DNA, 122 bp, Homo sapiens
tgaaatgaattcagctttggtgcaccaatgtgatgactctgcttcatcaaagcctgagcacgcgataggcctagcaccatctcacacagagacaaagggcaaccctctgcttccaaaggaat

SEQ ID NO: 428422 - DNA, 122 bp, Homo sapiens
ctgcccggcgccgccccctgccggcgggagtcggagctgctcccgcgtgcgcgccggccgcggcgggctgatgacccaacgccgcaggcatccgaggataacctttcccttttctttccaag

SEQ ID NO: 428423 - DNA, 122 bp, Homo sapiens
catccatgcggctccaacggccggtcctgggtgccttatataggctggcgggccctcccccgccgcacctgcctgcgccccgcggtccagccccttaatcaccactgccggcgggcgccgcg

SEQ ID NO: 428424 - DNA, 122 bp, Homo sapiens
tgggagagccaagagggaagagcgagccggggggaaaggagcgcgcagtgtttcctgctgcggttaggacctcacgccttgccagtacagagctcggtggcaagagccgctgggagctgctc

SEQ ID NO: 428425 - DNA, 122 bp, Homo sapiens
ttacatgggtcgtccccggggaatgctcatttttcaggctccagagcttgagagaaagtgcgaacccggtccctgagcaggtctgattcccatggccccttcgccatctgctctgcaccgaa

SEQ ID NO: 428426 - DNA, 122 bp, Homo sapiens
gcagccctggcctgaggcaggggtgtcatctctttacagatgccttgctggggagagaaccggagtttccgcgaaagcgcagaagtggacacttacggagaaattcctgtcctcatatcaat

SEQ ID NO: 428427 - DNA, 122 bp, Homo sapiens
tcctgaagcaatttaagtggtgagtgagggaggtagcccccatcccaggccacggagcctcgcctccacctgagccttctgacttgggcccagcagtgccctctgcaggccgccatgggaag

SEQ ID NO: 428428 - DNA, 122 bp, Homo sapiens
ccgcccagagcgctgaaagtaactcggccgccagggtcacaacaaacttgctggcagcggcggcactagaactacagagctgtgactgctcgttggaggtgttctagcatctgaaacaactc

SEQ ID NO: 428429 - DNA, 122 bp, Homo sapiens
gtattcaggccggtctgatggtcagttaaagttcaatatcggaagacggatgaaatagagcgttatttctcgatatacagttaggcactcagccgtagatcttacagtcatgcatcatttaa

SEQ ID NO: 428430 - DNA, 122 bp, Homo sapiens
tgctaaggatgtcattttgtgaccatgtatcctataaagagccatgaagcttgactacctcgcgcagataacccattgccaaacttttccttaccttcaaccgcctttccccacacctcaga

SEQ ID NO: 428431 - DNA, 122 bp, Homo sapiens
cgcagccggcggaagcgattattccccggcgtctggcggggccgggggcgggctcgcacccggaggagacacgggtctccccgagcccacctttgatcgcaccgccccgccttcccagcccc

SEQ ID NO: 428432 - DNA, 122 bp, Homo sapiens
tcctcctcagagatcagctgctgatagtactgctgcagaagacctcagcactggtctccccgctgcggcaggctctgagcctcttggttcttcagctccacctgcaggaagaccctgggcgt

SEQ ID NO: 428433 - DNA, 122 bp, Homo sapiens
ggctaagattatgtgggataagactttaattctccaagcatctccgaaagacagcctatccggggaggcttctcctttaatcagccttcagctgaatccctcagccccatcccttaatgctc

SEQ ID NO: 428434 - DNA, 122 bp, Homo sapiens
ggcagcagctctcatgcaggccaggggtggccttgccattgctaaattctgtggacgctccgtagcccttgaatcactgttccggaatctgacaagtccaaccgcaccctccttcctggagt

SEQ ID NO: 428435 - DNA, 122 bp, Homo sapiens
aatttgcatctgtttttttctctctacctagaatgccattcagtcatttattcaataaatcgctggttcactcacccagctagcaaatatctcccgaacacctgctgtgcagagacgaataa

SEQ ID NO: 428436 - DNA, 122 bp, Homo sapiens
gtttccacagctgctggcttcagcctacccagaggaatagttttcctgaaatattaatctcggaaaaagccacactggggtaagcttgcacagtaattcaagcagcatgtgcaaaatttatt

SEQ ID NO: 428437 - DNA, 122 bp, Homo sapiens
agcccccgttgccggagccgctgtaggggctggcggggcctgggtccggcacggaggggccgccgcggctgcccgcgtagaaggcctcgggggcgctgggggcgcccagggccgtgtccccg

SEQ ID NO: 428438 - DNA, 122 bp, Homo sapiens
gaaaatcgggctgcccactgtgattgccagtcgcagaccagggcttatagtctctcgatgcggacctgtttgaaaacatcaaaaaagtgggcggagctctaggccccacctctggagacatg

SEQ ID NO: 428439 - DNA, 122 bp, Homo sapiens
ccacaggcttggattgacttgaggaatttgctagcaggttccccagaggtataggaagagcgggaggagaagcagcctctagctcctgcccagagaggaggtggttactggcctcaccttac

SEQ ID NO: 428440 - DNA, 122 bp, Homo sapiens
attcattttttgaagacagaataaacaagtccagagaagagattaagtctttgtttcacccgactcaagacagttggaaaagcagaattagaaatgctgcaacccagggttggcaaacagaa

SEQ ID NO: 428441 - DNA, 122 bp, Homo sapiens
agccctctcctctggagcacacaccacccctgcagcccaagaagagtcccagccccacgccggctaccaccatggcggagaccaacaacgaatgtagcatcaaggtgctctgccgattccgg

SEQ ID NO: 428442 - DNA, 122 bp, Homo sapiens
ccggagaggagaataactccaagtgtgtcgggctctaaagctgtactctcagaaatgctccgtctcttcagctttgaaatgacatctctgtcaaggtctcccgccgcccagttcactccatg

SEQ ID NO: 428443 - DNA, 122 bp, Homo sapiens
acaagagacacaaacgcacccaggaagacctccgctccctcagacgcggggcgggccctgcgacttcactctgggagggacatttccgctcacccagctctgcgaccctcgctcctgcggag

SEQ ID NO: 428444 - DNA, 122 bp, Homo sapiens
cgggcgggcgagcactagcaccgccccgcagagcggcaggctgacagccaggcgcgggcacgagcagtgctctcttcggctccgctggcgcgtgcccttctcgggctccaaaaatcagcagt

SEQ ID NO: 428445 - DNA, 122 bp, Homo sapiens
ttttctctgttcctccctcctcttctctcttccacacctctagactggaaaggagtggaccgccccgggagagtttgggaaatttcggagccaaatttccaagccggtgaggtgagtgaggg

SEQ ID NO: 428446 - DNA, 122 bp, Homo sapiens
aatgagagggtaagaacagaaggggagaggaagggggcaaaagacatcctaattcaggaccggctaaatgttgggtaaggataagtcaggtacaaacagaatgctgggtgatagagccgtca

SEQ ID NO: 428447 - DNA, 122 bp, Homo sapiens
ccacattccccaatgatgtttgcaccccattcaagatagccatgccattgtcatttaactcgtgaacctctctttaaaactaaaatggatgtgaaagaataaaattcagtgtactgtaagta

SEQ ID NO: 428448 - DNA, 122 bp, Homo sapiens
ttgggtgggtgctattaacgcaacccgtttataagtacaggctggggatggctggagagacgggcaccgcatagaggaggcacacaccaggaggagatggcaagggctccagacacgcagcc

SEQ ID NO: 428449 - DNA, 122 bp, Homo sapiens
tgggctagatgagggtccaggggtcagaaacctgcgtatagcaactcacctgggaacccccgcggatctctctctgggttgtaaagcggccagactagtgcgctccgaagctgctcaggctc

SEQ ID NO: 428450 - DNA, 122 bp, Homo sapiens
aaaagaatgcggtggaagtctaagattgcctcccctatgacaaaacacagccccgccggccgcccgggcccgactccgcccgcccgcccgccgcagtttcggggctgcggcccgggggacgc

SEQ ID NO: 428451 - DNA, 122 bp, Homo sapiens
gggtgacacagcgaggctccgtctcaaaaaataaataaataaataaattatatttgtttacgttgttacagaataaatttgcgtcataatttgcatgattgatttaatgtagttttggcgtt

SEQ ID NO: 428452 - DNA, 122 bp, Homo sapiens
ccaagaactgacaatgaagatttcacaatctgtctttggactaacttctgcaagcccagacgaggcatttgggatgagaaattgctgccctctgtctcagaaccaggctgtggagagacgag

SEQ ID NO: 428453 - DNA, 122 bp, Homo sapiens
gctcgctccgggccggccggcgccggggatgaggctgcccggacagggtctaggggcgcgcgaggggccgagcatcccactcagctcgccggccccggcccccgcctcccccgctcctcccg

SEQ ID NO: 428454 - DNA, 122 bp, Homo sapiens
ttcctctccactcagcctgcaggaagctggtggggcttcctaccccagaactgccttagccggccttgcccctcccctcctggtcctgctctttctgggctgggggagggaggctggctggc

SEQ ID NO: 428455 - DNA, 122 bp, Homo sapiens
gagtgaccctcatggatccaggcagaaaaaacagatgaaaagatcagggtcagtgggcaccgagtctgggtgactctcagggtccaaacaacttacttgggcagatgagggcttccttggct

SEQ ID NO: 428456 - DNA, 122 bp, Homo sapiens
acatctcagacgatgggcggcaaggcagagacgctcctcacttcctagatgggatggcgccgggaagaggcgctcctcacttcccagactgggcggcagggcagaggcgctcctcacatccc

SEQ ID NO: 428457 - DNA, 122 bp, Homo sapiens
tcaaaatgagtttaggtctggccgggtgagctcccatctgggtctgtcgtgacgacagctcggggtatgttggctgctttccagagacataccagaggcgccttaatctccctgacacgtct

SEQ ID NO: 428458 - DNA, 122 bp, Homo sapiens
cctgcccgcgctgccctggcttatacggcccctcctgccagacagtgcacagggccagggcgccaggctgggagagcttcgcgcaggcgggatttcagcccgcacttatttcggagcccttg

SEQ ID NO: 428459 - DNA, 122 bp, Homo sapiens
ggaaaaaatatttctcccagcttgtgttgatgccgcgattttgactgagacttcttcccacgatttctgtttttgcttctccaaggaaaatggcagctcccgagcagccgcttgcgatatca

SEQ ID NO: 428460 - DNA, 122 bp, Homo sapiens
tcctggacgaaaggggtacaggaacagcacccgaaaaccggcgacaggctgtggcaggcccgacgtctttcaagcccagctcctagcgtcgacgcccctccttccaagacgtttcccagcag

SEQ ID NO: 428461 - DNA, 122 bp, Homo sapiens
agatgcatttattttcagagatggcctgctggagccttctcttttctatatgcatcctctcgagacacagactaaagccacaatgctcacctctgctgtaggggagtttgcagggcaggcct

SEQ ID NO: 428462 - DNA, 122 bp, Homo sapiens
ctatgtttttatcattcttagggccagagtgaagaccctggctccctcctttccttgttccggcggctgagtgaccagcggagtaaggagcgctccctactgcatggggacttccacgcgtt

SEQ ID NO: 428463 - DNA, 122 bp, Homo sapiens
ggaaaccatgaaagatcccccaccgcagcctcagaaaggagagactgagaaataagttctcggtctccaggtcggttggagtcgtgtcggagtgccagaccatcccccaaaagaccctcttt

SEQ ID NO: 428464 - DNA, 122 bp, Homo sapiens
aagaatttttcccccctctgtttacttgcaggatcagcagtatacatgggcggattatcccgaaagacctatgttcttgtctcagcctttcattatagccacataagagcaagcgatgggtg

SEQ ID NO: 428465 - DNA, 122 bp, Homo sapiens
tccagccagaggacagaaaacctgcatgggtcaggtgagcggggtctggccgagggcagccgggcagggggcagcagggtgcggcagcttgcccaccggaacctcccagggtgcacctcagg

SEQ ID NO: 428466 - DNA, 122 bp, Homo sapiens
ccacccccgcagctggaacaagcccctcagacacgtcatccacggtcgcctgagaagcagcgccatccacggtggaggctcttggagggtctcctgcatgaagccaacgcagggcaagccgc

SEQ ID NO: 428467 - DNA, 122 bp, Homo sapiens
aagagaagaaactggagaggaaaaggctgaacgcacaggaaagaaaaaaacaactggaagcgaaatgtaacagatggaagcaaatgagatcaagagcaaagatggatggattatcctttaat

SEQ ID NO: 428468 - DNA, 122 bp, Homo sapiens
tcagaggtgagaaaaagcaaataatattccaaagaaaaattttcttggctggattgttgacgagcaagagttaacatggatccagggtaagaggactaggaaatgcaaagtgtgaaaattca

SEQ ID NO: 428469 - DNA, 122 bp, Homo sapiens
gaaggaaagccgggttgcagacacagccgcccctgctctggtcctccagcgtgtttatgacgctcgtgcaggtcgacgagccatcctatggactagttaacactaaggtggagttcagactt

SEQ ID NO: 428470 - DNA, 122 bp, Homo sapiens
gaggaaggggtgcccggctggtgaaagcacagccacggaggaaaagctgaggagcggccacgtgccttgctcttcaagcgggcagtagaaacaccacgtgaagaaacacttgccatttagtg

SEQ ID NO: 428471 - DNA, 122 bp, Homo sapiens
gaagacacggcttaaccagagattttgaatgtgaagcacttgcacttcatctcatacccacgagggggcgctgtggagccaaaattgagtttttttttccttccagtataggggctattaaa

SEQ ID NO: 428472 - DNA, 122 bp, Homo sapiens
cccccgctgtaaaatggaaaaaccacagccgcagagctcaccagggaattctgcagctctcggaatgattgcgcgccgggctgacaatgcgaagtgttagattaacgtgaaagtgttctatg

SEQ ID NO: 428473 - DNA, 122 bp, Homo sapiens
ccctaaaatgagagaggactgggattgaaaggctgactacagaaatggctgctgcccagacgccctcaaaagccaaggtcttggcagcctttttatttgccaccaaagcgaaaaacaaaccc

SEQ ID NO: 428474 - DNA, 122 bp, Homo sapiens
aaacgttatccaatcagcgacgctgggctgggaactgtccaatcaggcacgcagcttgagcggagaggacggcttccgggatgtggcgggatttgtccgcttctttgtctttggctgccgct

SEQ ID NO: 428475 - DNA, 122 bp, Homo sapiens
ggtacaaatctggcttgcagacttcacaggcaggggaagaactaaagctcttttctttcgcggctaggagacagaaagcctcgggcaagttttcaagcctgtctcgccctgcacctggaaac

SEQ ID NO: 428476 - DNA, 122 bp, Homo sapiens
gtcgcgcagccctggcccgagggttcccggggcacggccgctgggcccccggtggaggagcgtttccgccagctgcacctacgaaagcaggtgtcttacaggtaaggaggacgtgggcagag

SEQ ID NO: 428477 - DNA, 122 bp, Homo sapiens
aataatgctctctggcacagcctgctgagatgccgcggcggccacctctgcaccacccctcgcaacgcacgtgcacactgagatgtgtatcggcttgggtatggaaacatccacgtgcccat

SEQ ID NO: 428478 - DNA, 122 bp, Homo sapiens
atttctattaagagagcaaataagctattctgtataacaggatgtctgtaacgataaaatcgggcatcaagatattgaaattaacactgtctccaacagagttctctaacactgagtcagat

SEQ ID NO: 428479 - DNA, 122 bp, Homo sapiens
tatgatccttgcattttctgtcgtttaacttccagcagtacatactggcaggagctactccgggaattaaattttcttcctgtagaaactcagtctctcccctgaacttcgtatatagtata

SEQ ID NO: 428480 - DNA, 122 bp, Homo sapiens
tttgggctccaaggtgcgggttcctgccccagtagtggctcggtggacgccccaacttgccgcgcaggcgcgctcgggccctctccccctccccgcgctccgcagctgggaatcacgggact

SEQ ID NO: 428481 - DNA, 122 bp, Homo sapiens
tcacctcccaatccgtcgcacactccgttcaggctgccacggcgtctccagacccagctccggccgggctcccgctaccgcttttgctccggcagcactgcccagccctgcccagacccctg

SEQ ID NO: 428482 - DNA, 122 bp, Homo sapiens
tctgagccggcccctccatcacgggggatggaaattggatgtgtgaggagggggagggcacgctgcccaccaggctcctgacggggctaaaaggactggcctgcttgtcattgcagccgaac

SEQ ID NO: 428483 - DNA, 122 bp, Homo sapiens
ctaagacaatttcttagggccctgtgctgtccatgacaatcatacacagtcaggaacagtcgtaacggctcacatgtattgagcacttactcttttaagcattacgctaacggatttacata

SEQ ID NO: 428484 - DNA, 122 bp, Homo sapiens
attagaaggcccctttcaaatatttatacctcagacatctagttttatccggcagggagacgacttggatttgatgagatctgtcaacagctcatccccgtggcccggaattgccttgcggc

SEQ ID NO: 428485 - DNA, 122 bp, Homo sapiens
atgcaggttctgagttcctcgcagcgggggaacatctggctcggttctatctccccaaggcgctgggttcccagaagtttctagaatgaatacggagggctacatatttcacatgcgcgggg

SEQ ID NO: 428486 - DNA, 122 bp, Homo sapiens
ttgggtctttcctgagagtgacagtggccatcagtcctgcccgagcctggagcttgtccccggagagacgccctcagggtgcacgcagccaccaagttggctcacacaggagccagggcttg

SEQ ID NO: 428487 - DNA, 122 bp, Homo sapiens
cttttacactggtttagtgctacacgatgaggacttccatatagtaactttcaggcccaccgtcctaacgctggggtgggtgggctcctaaaggtctccacctttgcctcgtagccaatcct

SEQ ID NO: 428488 - DNA, 122 bp, Homo sapiens
cccacactgcaggttgctgggggcttcaggctcctggggcagagctggaatctgggcgcgcgccggccccaccggtcccggtctcacaggcgcgtctcaggcttcacgcctccctcagtgtc

SEQ ID NO: 428489 - DNA, 122 bp, Homo sapiens
acctaccggcccaacgtggaactctgccgggaccaggtgagagggtgtcccagtggcgcacgggccccctagccaaggttttctcatattcctgatggagcaagggcactgctgtcaagggg

SEQ ID NO: 428490 - DNA, 122 bp, Homo sapiens
acttcccgagggcccgggccgtcgtgtgccgttacctcagccccaggtggttcccaggctcggccaggctatgtctcacacactgactaggggtccttcggcctcagaaaagtggccccgga

SEQ ID NO: 428491 - DNA, 122 bp, Homo sapiens
ttgtgggtttacaaaaaaaccataaagcccaggcactctgccaagcccctagaacgctgccgggtcgccctttccttctccatgctcagccgtgcgtggctgccgggacagcgctcactccg

SEQ ID NO: 428492 - DNA, 122 bp, Homo sapiens
tgactccaagtctctggcagacataatggaaggcttgattcccagggttacaccactgatcgatatagtcatttgagcatgtccatagcatgttgttcactgtgtcataacacgctcctgca

SEQ ID NO: 428493 - DNA, 122 bp, Homo sapiens
agacttggtactgggagataggacgggagtctcctacacgcagtcaacacttgccacgagcggctagacttaggacaggcaagttgccctgccatccttctatcgcccccacccctccttta

SEQ ID NO: 428494 - DNA, 122 bp, Homo sapiens
tcgctaagacgccataaaaccaaagggccagatgtggcacgttatttatgtgtgaaaccgcgtttacactagatacgcggatccaaggccgatagcacgacttcgcgggaggtcacagacct

SEQ ID NO: 428495 - DNA, 122 bp, Homo sapiens
gtcccggccccaccgtctggggagagctgttccggccccaccgtctgcagagaggtgtcccggccccaccgtctggagagagctgtcccagccccaccgtctggggagaggtgtcccggctc

SEQ ID NO: 428496 - DNA, 122 bp, Homo sapiens
ttaagccttgtgtgccttcacctatgcaagtaaacctggacagaggcctagagaccaggccgaaggatgttaacacatccctgtcacaagcagtttcctacatgctcattgtttctgcttca

SEQ ID NO: 428497 - DNA, 122 bp, Homo sapiens
gatgtcagctgaaccgtggtctaggacacgtgtggcttccgcagctgcttccagagcacgcgttgcgtttgtggtagagatgtcaggcggaggacacttggctttctggggctgagcgttgg

SEQ ID NO: 428498 - DNA, 122 bp, Homo sapiens
tcggcatcgaggtgctcatcgccctggtctctgtgcccgggaacgtgctggtgatctgggcggtgaaggtgaaccaggcgctgcgggatgccaccttctgcttcatcgtgtcgctggcggtg

SEQ ID NO: 428499 - DNA, 122 bp, Homo sapiens
tatttgaagaacacagggctgtggaccctatcggttcccaaatgaaagctccccggggagcgtgtttttgccagtatggggaagtagggcggaggcataggaatgaccgcgagagtggctgc

SEQ ID NO: 428500 - DNA, 122 bp, Homo sapiens
accgcccaagccgagaaacaacttagaagacagacataaccctgggattcagggaaggcgcgagcaccgcccaggacctggtagggtgcgagccgcgagcagtccgggagggagcgcgccta

SEQ ID NO: 428501 - DNA, 122 bp, Homo sapiens
ctgctcgggttcccgcgccccacgcttgctgcagaggcaccgcctcctacgcccgagccgcgggccctttaagtgctgacggcccactccggccccgaccccgcccctccacgcccccaagg

SEQ ID NO: 428502 - DNA, 122 bp, Homo sapiens
agaggaggatagtggcggcggcgaactttgcccggtagattttactgactggggtgctggcgcgcgcctttttctcggccagaatccagttattgggatagtcttgacttctacctcagccc

SEQ ID NO: 428503 - DNA, 122 bp, Homo sapiens
catctcaaaaaaaaaaagtatgagtggcccatgacttaagaccagcatctgaagttgaggcggttttgtggggctgagctctttaacttatggaatctgacagtaaccctaagtatatatga

SEQ ID NO: 428504 - DNA, 122 bp, Homo sapiens
ggtttggctaaagattaagggactaaaacctgatcctgaccttagatagtggcctaggagcgctcgtggttccaggacgcggaccgtaaagaggtgccagggagctctgctcggtcccaggg

SEQ ID NO: 428505 - DNA, 122 bp, Homo sapiens
ccagggctgagaggccaggctggcctgaggagggacccgggacctgagtcactgcacacacgctgggtggggggtggctctgtgactcatgttctgagcccagcccctcacagactggggag

SEQ ID NO: 428506 - DNA, 122 bp, Homo sapiens
agccctcacagcctttgctcgctctccgcgcctcctcggccttggcgcccactctggtcgcgcttaagaggcccttcagcccgcggctgcactgtgggagcccccttctgggctggccaagg

SEQ ID NO: 428507 - DNA, 122 bp, Homo sapiens
tccttttaaggggagaagctccgcggcgcgggaaacgcggcggccagagggaaacgggggcggggactgcttactacggcggacgtcacataaacaaacgcccccccccccggctgcaggcc

SEQ ID NO: 428508 - DNA, 122 bp, Homo sapiens
atccagttgaccgagcttgtgctggtcaccgcggtttccgcaggacagagtccccacagccgctgggcaccccggtcccattcgcggccactttcctgtctgaagaccgcatgttgccgggc

SEQ ID NO: 428509 - DNA, 122 bp, Homo sapiens
catttttggcagacccagtgaatgttaaacaatgttgcttcacatgcatcacacatctcccggactcctctcactgctcttttccaggcaattttggctgaaatacagaaaaaacaaaaatt

SEQ ID NO: 428510 - DNA, 122 bp, Homo sapiens
tgagggcccagcctgcagtggttgtcatcctcactgactaagagggagtggatctaatcccggtgcattcgcctggcattcagcatcctgcctgtctagccttatcgccactctcctccctc

SEQ ID NO: 428511 - DNA, 122 bp, Homo sapiens
tttttgcttaggggaggcccaggaattagctatcatgtaactgaatcccctctctcccaccgagaaagtgattagtacaggtgaggttcatgagctcacaaaagagggcagtggtgtgagga

SEQ ID NO: 428512 - DNA, 122 bp, Homo sapiens
tccttgtccatgggcctagttttttagaatgttttttttcatttgctattcagctctgtacggctgttgttcagatccaccatccttaatcccatgatatgacattgcatgttggtcctttg

SEQ ID NO: 428513 - DNA, 122 bp, Homo sapiens
ccgcaagggggatacaacaaaatctactgctcgtgcaagatccgacttcccagaccccttcgcattagggcggagcgtgcacccggcagccaatccccgcttcctcacgtcgccgtatcccc

SEQ ID NO: 428514 - DNA, 122 bp, Homo sapiens
ctgctaggccttgcaccgtccctctggcgccctctactgacaaagccagtaaaattgtgccgctagcaaaggagatctttttatgggatgtagcttggtgtcaccaaagagaacagagtgga

SEQ ID NO: 428515 - DNA, 122 bp, Homo sapiens
gcatcctggtcattcctgcgatgctctgggatgagttcacatctgtccattaggccagaacgtccacaatccccagccccgggttaggcacataaatacttttgatgtgatcaatgtagata

SEQ ID NO: 428516 - DNA, 122 bp, Homo sapiens
ggatgagcacccctccctgttctctgggcagaggccactggcagggccgtcagatgtcaacggctttccatcacgcccgcccggctcgcggggcctttccggcacctggcccagctgcggga

SEQ ID NO: 428517 - DNA, 122 bp, Homo sapiens
aggttcctggggtctgtggggcgggtgaaacacccgcgtcggagttggggagtttccagacggataggccggggaaacaatggagtgtgggggggactctggcgtgagcgtgtgtggggtat

SEQ ID NO: 428518 - DNA, 122 bp, Homo sapiens
caacgcatcctctgggtgcccatggaactgaggtaccacagaattttgcaattaatgttgcggaagcacagccatagctctcactttaaaatgtacgtgtatgggccgggcgcggtggctca

SEQ ID NO: 428519 - DNA, 122 bp, Homo sapiens
tcagcgctctcacaagaatttacatcccacactgagtcatgcagtaagtttagtgcttcccggcaagcagcttagagtcaagttctgcagctattcttagctgctccacaccctgtaataga

SEQ ID NO: 428520 - DNA, 122 bp, Homo sapiens
ccaggtcggttttgagtcacgtgcttactgtgtgtcggaacacttgtgctttgaaggctgcgattggacacgtgattcccagcacgtttcctgaggttccgcctgcagcccgggcctgtggt

SEQ ID NO: 428521 - DNA, 122 bp, Homo sapiens
cgagcccactttccccggctgccggctctgggaccgcgggctcggccacgcagtcccgcccggacccaaagagccccagtccctgcgaacaccaggtccgtgctgggagacgagaaggcgcc

SEQ ID NO: 428522 - DNA, 122 bp, Homo sapiens
cggcgccgcgccccgcccgcgcctccctcctcccagcgctgccgggaactggcagcctttcggctcccgcagccgcagcggacgccctcccagatccaactttgccgcttccccgagctcgc

SEQ ID NO: 428523 - DNA, 122 bp, Homo sapiens
tggtgtattcctgtagtcccagctacttggggaattgaagtgggaggacctttctcctcccgaaaggtggaggttgcaaatgacctgagataacaccaccacactccatccaccttgggtaa

SEQ ID NO: 428524 - DNA, 122 bp, Homo sapiens
gaaaacgctctggccacagaggaagaccacaaaagcaaggccgacgcagacagtggggatcgcataaccagtgacaaagctgacgttctgctgaatataggcaatgccacctaacgacagga

SEQ ID NO: 428525 - DNA, 122 bp, Homo sapiens
gcccgggtgctaagcccctcactgccctaagccagcggcgccagccggccactctgactgcggggctcagagcccacacccacccggaactcacgctggcccgctagtgctgtgggcagccc

SEQ ID NO: 428526 - DNA, 122 bp, Homo sapiens
tgatatcagcaaacaaaacaaactccagagatgagaaattgaaactagcactcagaggaacgccagggcagtgggccttctgagcccagaaaggcccggattcacaatgaagggacctagcc

SEQ ID NO: 428527 - DNA, 122 bp, Homo sapiens
agagctcatactgctgcctccccatctgagggaatcctctggaagagccatcaccttccccgctctatcccatgggcccagggcagtgcttggtgcctggcagggcctcaagcagtgtgcta

SEQ ID NO: 428528 - DNA, 122 bp, Homo sapiens
taatcagtgccttccccattccatcctaaatgaggtcccattggcaaagaacctcctgaacggtctctattccaccacctgggcgtcccctctccaccctatacccgggatgttgagcgccc

SEQ ID NO: 428529 - DNA, 122 bp, Homo sapiens
cagagcaaatgatgctggggtgtgaggtgatgtcaaaaggtagacaccagggctagagggcgcataatcttgcaggccgtgctaatgattttgttttctacccaagaatgctacttcaggag

SEQ ID NO: 428530 - DNA, 122 bp, Homo sapiens
tgccaatcaaccctcctgggtgtggccaccatatgtgtgtgcctaggtcctccttctgcacgatccaataggagacaccagttctgactgaaccatgcccccacctaagtcacaaaatgagg

SEQ ID NO: 428531 - DNA, 122 bp, Homo sapiens
tatgcgttctagctgtatgcgttctgtagtcttttcttaggtgggtaacattttcaataacgcgcgcacagcacacaggggtgccctgagccgaaggagcaaaaaaagccaccgctcgtttc

SEQ ID NO: 428532 - DNA, 122 bp, Homo sapiens
cccaggaaaaagactggctcatcaatcacatgttgactgcgctcgcgcgaattgcgcatgcgcatgctgagccccactctccccaaccccggtcccgcctctccacccctcaccaacatggc

SEQ ID NO: 428533 - DNA, 122 bp, Homo sapiens
ttcctggagccgagccctctttcccagcccttctctcccctcctcccgcgcaccccagagcgatgggaggcccttgggcttcttgaagcattttggagctcctaggctccaaagccagccct

SEQ ID NO: 428534 - DNA, 122 bp, Homo sapiens
tcaaagcagggatttttattttgttcactcctgtttccctgtacccaggacagtgcttagcgcctagtgtgtgcttggtaatgttcattggctacagaatacagtagaacataaatggagac

SEQ ID NO: 428535 - DNA, 122 bp, Homo sapiens
cagagacacgcgctgggacccccacctccacacagagttcaaggctcacacacacacacacggagtgtatagagagacctgcatccctgcagcagagggtcgggcgtacatactgcccgtga

SEQ ID NO: 428536 - DNA, 122 bp, Homo sapiens
gctcccccggccgccccacggccgcatcccctggccttgcaccaagagaattttcagcttcgaccggttggtaaaatgtaggtacattttccctgtggtaccagaaaaagcacaatgggaat

SEQ ID NO: 428537 - DNA, 122 bp, Homo sapiens
ctgcagcctctaataactggagtcaagcgttgatcctcccgcctcagcctccccagtagccggaaccacgggcacgcaccaccacacctagcttatttcgaaaaagtgtttttgtaggaaca

SEQ ID NO: 428538 - DNA, 122 bp, Homo sapiens
gggaagggccccgaccagacatcaggtcctagcgggggaataagtgtcagcaatccacaccgcagctgtgggcaccacgaccaggcctttgagaatgcagacgtgaaaacggtcgccgccgc

SEQ ID NO: 428539 - DNA, 122 bp, Homo sapiens
cttaagtttacaaattagtttcatctttgatcaacgcatctatccagtaattagagctggcgttattcacaaaaagcaagctaagaagcaaatatttttggtggcaatttgcctaatgcctg

SEQ ID NO: 428540 - DNA, 122 bp, Homo sapiens
cgcgctttggagagaagggtggcttctctgcggtccgggggaagcctgtttccccagctgcgcctgaggaacccagatagtcaacggttgggactgggggagcaaatccctggggtcctcca

SEQ ID NO: 428541 - DNA, 122 bp, Homo sapiens
gggggctgacctggaaatgaggccccggcggcggcggcgccaactgttttcaaacagtggcggacaaacagggcttggggctggcccgcacgctgcctgatcgtttccgcccgccgctccac

SEQ ID NO: 428542 - DNA, 122 bp, Homo sapiens
ataggaccttcatggtaggagtttcatgaggattcaataaactaatccatgtgtggggctcgcagcaggacctgccacacaagatgaggcattactttacctttgagcacccaaatcaggga

SEQ ID NO: 428543 - DNA, 122 bp, Homo sapiens
agtttttttaaaaaaagacatacctaagccaagcacaaaatttccatcattagaatcaatcgacataaaattactatcaaattgctgtaaggtgtctagatgcttacaccaaatttccttat

SEQ ID NO: 428544 - DNA, 122 bp, Homo sapiens
gggccgcgtggaggccggtgtgccctctgccggccagctgaggaagtggaactgcgtgagcgtgcgcgtctcctgggtctgcacgttcttcaggtagaagctccgcaccagaaagtcctcgc

SEQ ID NO: 428545 - DNA, 122 bp, Homo sapiens
gatgtgaagtatggcctcgtcccggtcatctgggcgtgcgggtcccgggttttgatcgcgcgtttgtgtaggtgagacccacattgtgttaccctgaacatgtgtgaggacgaacctttgtg

SEQ ID NO: 428546 - DNA, 122 bp, Homo sapiens
atttcagagatccccacccggaaaaggtttccttgattatggcgaattcaacgtgtcactcgggttatgctctaatcgtcatatcaaactccaaaggttcagtggctttaggtttggtttac

SEQ ID NO: 428547 - DNA, 122 bp, Homo sapiens
caatggcatttctccacgtagggcctggtgagtcccgccctctgaatgaatcagccgggccgtgtagctgtgctgttcacaggaggagccgtgggaactagaggcattcccactcaatctcc

SEQ ID NO: 428548 - DNA, 122 bp, Homo sapiens
cgaggttgccgggggacccccaggcaggagctgagatttgtgtggagcggcgaagtggggcggcggcgcgtttggctttgacttctgatcccccgaagcgctctggggtcctttgggcccca

SEQ ID NO: 428549 - DNA, 122 bp, Homo sapiens
gtccacacgctgacgagatgagggagtgatcacacgtgcatgaaaatcacagaccacaaacgaggggaaaccccacagttcaaataaatacacccacttgataagttctggctctgaagtct

SEQ ID NO: 428550 - DNA, 122 bp, Homo sapiens
ctgcaaagaggaacagagaactcgggcgggagggggagcttaggccagctcctgggggtgcgtcccgacctctggaagcacccgcttaatgtgcctcatctccccaagccacgccagccctc

SEQ ID NO: 428551 - DNA, 122 bp, Homo sapiens
gagctttggggactgaggtatgcctgccttaaactaccatgcattcattgcttaggaaagcggtttccttggagagatcgtggtcagccttccctgaaacaacataacaacatagaggtttt

SEQ ID NO: 428552 - DNA, 122 bp, Homo sapiens
ggacagccccgaacacttcgcgaggtacacctaccaccctcgggaaatgttgggggtggtcggttccgctggatgtttgggttattttctggggcttgggcccccactttctctaagagaat

SEQ ID NO: 428553 - DNA, 122 bp, Homo sapiens
tggaggaggctgacgggaagcctcgaggaggggcaccccggtccgaggctgggctgggaacgctgctccacagcgctgtgagtggccgggaggacttaccgccaccaccgctgcctctgggg

SEQ ID NO: 428554 - DNA, 122 bp, Homo sapiens
cgtctctgaatgctggactcgccccaccctcatctcccaggcaacgctccctcccctcctcgggttctgctaaagcgtggagcttggccccctttaaatccgaccagaggaaggggcggcgg

SEQ ID NO: 428555 - DNA, 122 bp, Homo sapiens
agaggcgccgctccagccagtcacgtcgcgaggtgcggtcggggccggctgacgcgactgcgggcctcagccaatgggcgtgccactgcccgtccgctcttcagcagccggtcgcgggcggt

SEQ ID NO: 428556 - DNA, 122 bp, Homo sapiens
acaggcgtgagccactgcaccggcctattttttaatgtataagagcaatacctggctgggcgcagtggctcacacctgttttttaatgtataagagcaatacttggccgggcgcagtggcct

SEQ ID NO: 428557 - DNA, 122 bp, Homo sapiens
tgcctgtaaccccagcattttgggatgcagagatgggcagattgtttgaggtcaggagttcgaaacaagccaggggaacatggcaagaccctgtctctacaaaaaatttaaaaactagctgg

SEQ ID NO: 428558 - DNA, 122 bp, Homo sapiens
tgtggcggtgctgggctgctgggctgctgggctgcagagctgggctggcgccacttggggcgggtgcggccggcataggagagggccgggtgtgtgctgaggggaccattccagaatccccg

SEQ ID NO: 428559 - DNA, 122 bp, Homo sapiens
tttctttcgtgcccttatcttcaactgaaattttatttgtttacttctcattattggcctcgtgttatatgagctccataaaagccatcatcttgtctgatttatctactgtttcatctcca

SEQ ID NO: 428560 - DNA, 122 bp, Homo sapiens
gaaccgggctctagaaaaaaaaggagattccgaacgtatctcatcaaacacttgcaaagccgggagatctgtctgcaaatatccggaattccattgcagtatcggattaggtaggctcataa

SEQ ID NO: 428561 - DNA, 122 bp, Homo sapiens
tcaatcaatcaatcaatcaatcaatcaagaggaggctggcgggagcatgctcgtgaccaccgggggcgacatagaccctaaccctaagtccaaccccaaggcagaccccaccgtcccgccag

SEQ ID NO: 428562 - DNA, 122 bp, Homo sapiens
acagctccatgtggatgttgtcgtggatttgtaatgtgtcagcttggctagactaaactacgtgtttcagcactccctttcttacacgcatgcttcttggcataaaatagggttacatcctg

SEQ ID NO: 428563 - DNA, 122 bp, Homo sapiens
aaacaatgcatagaattttggactacattaaataattctctgcctcagtggttcaagttgcgtaaattatgcgtttacacttttcttcggattacttttaaaatgacaaccactatgttttg

SEQ ID NO: 428564 - DNA, 122 bp, Homo sapiens
ccccagcacacagtgttggcggccttcactcctcccaggatgcctaagctcctcagtaaacgtttgagtgacagatcaaacaccccgcaggagtgctttatttcatttttaaatagctttga

SEQ ID NO: 428565 - DNA, 122 bp, Homo sapiens
cttcagagcccacttcctgccgctccagccggtagatgaatggggtctcgggagctggctcgggaggcttccaggtcaacaggaccgtgttcttgtggcccttgaacatctctgccaatatg

SEQ ID NO: 428566 - DNA, 122 bp, Homo sapiens
ctgtctagcctacttgattccgggggtggggctgtgggaatcgctgcccacccggaatcccgcctgccccgagcatggccaagccccagccccgccccgccgacggcctgccgccggggttg

SEQ ID NO: 428567 - DNA, 122 bp, Homo sapiens
gtcttgaccccagcccatctcaagaagccagtagtaatccagaatcattcaggtaatgtgcgtggctggcagctgagagattttagtctccctctggacactggagccatcttcatatttaa

SEQ ID NO: 428568 - DNA, 122 bp, Homo sapiens
ttggtcccaggccaagctgaatagcccttaggaataatcacttcaactcctgattggtcccgggccaagctgaatagcccttatgaatcatcacttcggttcctgattggtcccgggccaag

SEQ ID NO: 428569 - DNA, 122 bp, Homo sapiens
tcctcgttttcttgctgtgtgagccctgccctcgggaccccatctcttctggccttcctccgggagacaaaagccctcccaggctgcagagatcagcgcccttttcctagctcccttcagcc

SEQ ID NO: 428570 - DNA, 122 bp, Homo sapiens
cttaagcctcacactctctgtgagagaaaatatcctcattttatagataacagaccgcagcgagtaagtggcaccagaattcaaacttggattttctgactctataaattcaattctatttc

SEQ ID NO: 428571 - DNA, 122 bp, Homo sapiens
ccaaagcctgggtgcgggccttgcggatgctgcggaggacaagcggctgctgacatcgtgcggactccgccccagcagacccgtgccccaggggcagtccctcccgcgcgcgcccggcgctc

SEQ ID NO: 428572 - DNA, 122 bp, Homo sapiens
cggaacgcgcggcccccgccccccgccccgcgccgctcgtccccgtcagccccgccccggcgctcttctcgccgaccaatcaggaggcgcgaccggcctcccagccccgaggcctcgccccc

SEQ ID NO: 428573 - DNA, 122 bp, Homo sapiens
tcagagtgagggctgaggcctagtgtcttgcccaatgtcacaaatggcgaggtcaaaaatcgacagtctccagagtctgctctcttaaccacttaactattctgccttaataatttcagaaa

SEQ ID NO: 428574 - DNA, 122 bp, Homo sapiens
ccctcaaaggctgcagatggaaaatggaagggaactgcgtgctggaaccttagcaggcgccgtggctttgaaaagaagctcccagcagcaaacacccaggcagaaagaaagaaagctgcggg

SEQ ID NO: 428575 - DNA, 122 bp, Homo sapiens
tgaacacttaactaaggctgcctgatcactggaggcttcctcctggaggcttctaatccccgtgtcgcttcagcctttctgtcttctcagattgcttaccccggtaggtgctgcccttccct

SEQ ID NO: 428576 - DNA, 122 bp, Homo sapiens
ccagggtggccgctgaggcctggagaaatctgggcctcccctgtgcaccatccaactgcgcgccccagaggctcagggcgccccgggagtgtgggggtgtggacagatgagcagagccagag

SEQ ID NO: 428577 - DNA, 122 bp, Homo sapiens
cccaagttcgagggaaccctggctaccagattcaacagtgcgtctgcccacccgaaaactcgcagcgagtgggacttagtagcggcgggtgaagtgggggtacggggggggatgagggtgtg

SEQ ID NO: 428578 - DNA, 122 bp, Homo sapiens
gcgaaaaatgtagctttggaaatggtgtttatagcaggcccatgggcaaaacgtttcaaccgggcaaaactgaagcaatcaccagattatggagccgtatttctgtttctttaaagacaaac

SEQ ID NO: 428579 - DNA, 122 bp, Homo sapiens
tatgacatctcttcctctctctctctgaagactgtttctaactaaaaaatgtagatgattcgccatgcaaattattttactgtacattgttacaaagataagttcttcacctcacccctaat

SEQ ID NO: 428580 - DNA, 122 bp, Homo sapiens
ttctggaccccagccactcctcaaacagggtaagtccattcctgcttcagggcctttgtacgtattgtttcctcttcctggaatcttcttccttgtacagccccagggttttctttttttca

SEQ ID NO: 428581 - DNA, 122 bp, Homo sapiens
tgcagagagcatacgtgtggggtctggtgcacacccagggcttcccatcgtcctggtcaccgggtgctcagcttggctcacagagtgttcttgccctgtctggggtccctgctgacctgtga

SEQ ID NO: 428582 - DNA, 122 bp, Homo sapiens
cctgcggagtcagcttctgctcgcggagggggaagggcaaaaggacagtgcgtcccaacccgtccctctccagctgagcctgtcagagaccagcccagctctgaaatcaagccgttgagaaa

SEQ ID NO: 428583 - DNA, 122 bp, Homo sapiens
gaggccgcgggcggggcggggcggagccgggcccagctggccgaacccggggaatgcgagcgccagcccccgccgcaggccagtcccagctggatctccggccagagcccgaggctgctgcg

SEQ ID NO: 428584 - DNA, 122 bp, Homo sapiens
gccgccctcccgggtaaggcgctgccaacttggccaacttcagggcccgggcggggggagcgccgaggcgcgggccgctctcgacttttccctccttttcccccctcttttctccagaagcg

SEQ ID NO: 428585 - DNA, 122 bp, Homo sapiens
cctaaagtgaaatcattaaataggaagatgcacatagaatgttttgtaaatgaaaaaccacggtgccgatgttagctggtattgttactgttttattagaaaggtgtagagtcgtggggaca

SEQ ID NO: 428586 - DNA, 122 bp, Homo sapiens
cctgttttgtcaccacggcaaccgtgacctcagccctccaccctgctcactggggtggggcgggagctccacgctacttttactctggggggcgtggtctgctcttggccccgcctcggggc

SEQ ID NO: 428587 - DNA, 122 bp, Homo sapiens
gctccgtccggggtgatgcgaagggggtcatgccgagggggtgactcccagcttgcactgcgtcccacagtcgcgcctcgcctcgcctcccggagcccgagtcttccaagggcgctggcagc

SEQ ID NO: 428588 - DNA, 122 bp, Homo sapiens
tctgaaagggaagggagcagaggccttgtcctgatagagggcggattcatccagggctttcggctgctggggccccaggggcacaggaagggggggaaatggggagaccgtaccagcctttt

SEQ ID NO: 428589 - DNA, 122 bp, Homo sapiens
gcagctgtgcctccaggttgctgatgagctgctgcacctgggacagctgcgcgcagtaatcgccctcggcttcggccaaggagtcctccagggatttcttctgcacgtgggagggaaatggc

SEQ ID NO: 428590 - DNA, 122 bp, Homo sapiens
gtggcctgcctgcctacttccttcaggtctttatttatttagaagtcctgtttgcaggggcgttccctggttaccctgcctaactcttgcctgtttaccaccacctgacacgccacgcctcc

SEQ ID NO: 428591 - DNA, 122 bp, Homo sapiens
ttgtacaggaatggggttatatcacaatgtgattcatgccagcttcagtaaagatgttcacgtcatatggtaaccatgactgtaggtatgaagttgaaaatggttatatgtaatcaatgaat

SEQ ID NO: 428592 - DNA, 122 bp, Homo sapiens
caccgcatggtttccacgctgacagtctgtctggactccgtttcaccacacagccagcctcgaggcaccaagtcacgctacatctttcagatctgtggcctccctaaggcatagtgggacca

SEQ ID NO: 428593 - DNA, 122 bp, Homo sapiens
ccagagagaatgccgcactgccagaaaagggcactgctatcccacctgcgttccgggaaacgaaaagctgcgtgaccagcatcatctgcaggcacagccagtcgggctggggcgagaccctc

SEQ ID NO: 428594 - DNA, 122 bp, Homo sapiens
ccgctcaacttgacgcctaaagcagccgcttccaggcctggggtttcggataggccaagccggctgctgccgacccgcacgccgccccgggccccggctcctctctaggcggtggccgcgcc

SEQ ID NO: 428595 - DNA, 122 bp, Homo sapiens
aggcttaaaataagtccaaatgtttctgcaacagagtttccaacacactgttcaggaatgcgaaactcgggacccagactagcaatccccaagtgggtgaattcttattatgtagaaacctg

SEQ ID NO: 428596 - DNA, 122 bp, Homo sapiens
tccgaatgcacctacgccaactgccacttccggagccgctcaagctcccgccagagccgccggcaggcatgctcctattggacagaagccctacgctgtggccaatacccactcttcttctt

SEQ ID NO: 428597 - DNA, 122 bp, Homo sapiens
gggcggggtcctcaccaaagactcaatgggctctggagttcctgtgtctcctgagacctgcgcctgacgtcaccctctggatggcctctggcctctacctgggctggggtgtcccaggaaca

SEQ ID NO: 428598 - DNA, 122 bp, Homo sapiens
ctggggtgaccattcactgatcggccgcatcggcatggatgggtccagccgcagcgtcatcgtggacaccaagatcacatggcccaatggcctgacgctggactatgtcactgagcgcatct

SEQ ID NO: 428599 - DNA, 122 bp, Homo sapiens
gctgcccgtggtcaaactggagtcgctgaagcgctggaacgaagagcggggcctctggtgcgagaagggggtgcaggtgctgctgacgacggtgggcgccttcgccgccttcggcctcatga

SEQ ID NO: 428600 - DNA, 122 bp, Homo sapiens
ttagaaatataactgaaatattattttgtattttaaaaatgtatgtatttattaagtcttcgccctcaaggagttgactctaataaagatgacaacacaaaaggagatagaagacatcacat

SEQ ID NO: 428601 - DNA, 122 bp, Homo sapiens
actgttttgagtctgctctgcctccaccttcagatagtacattcctttaagggcatcagacgggaaaattagaaatatcttgtagctcaggaaattagaattcttgagtttatggtgacatc

SEQ ID NO: 428602 - DNA, 122 bp, Homo sapiens
gttaattatgtcaatgtataattacatcagcccggggagacataatggcataccctgctgcgcaggccctgcctaatgacggggcgtgggggctgccggcagatgaaagccaccgccgcctt

SEQ ID NO: 428603 - DNA, 122 bp, Homo sapiens
ggctcgggctgcggaacctcggaaacccgaatgtgaggaccttaagggatccacagctgccgccccccgcagccatccagagcgcggtcacagtccgactggcggcacggaggcggcggcgg

SEQ ID NO: 428604 - DNA, 122 bp, Homo sapiens
gagcagtagcatcttagctgcttccggccgctggtcgcagggctgcgggactacaatcttcgcatgaaatggaagagagggtggtgcggatagcttgaggaaggtacggataccttgaggga

SEQ ID NO: 428605 - DNA, 122 bp, Homo sapiens
gctccagggcctgcaggcccttcggagcaggaatctgactccctcctggggtctcaaggacgccttggccgggcgatgggcctcccccacgcattgtgtccaggaggttctgttcagagcgt

SEQ ID NO: 428606 - DNA, 122 bp, Homo sapiens
ctgcccagggcccagacacggcatgcctgggttctaacctggtcaccgaggaggatggcacgctcatgcaccgctccctcacagagcctggcaggcgctaactggggctgcagagacagaag

SEQ ID NO: 428607 - DNA, 122 bp, Homo sapiens
gtcaggtgcagctgcaaatagaagcagagattttctagcaagcagttggaaggaccttcacgcccagaggcccctgaagggagggaggcggtttccaaggcaaccgggcccgggagcggttg

SEQ ID NO: 428608 - DNA, 122 bp, Homo sapiens
agcagcatcccaggcgcagacctggacagctggctcccgcacctgccctgggagtgctcccggcagcaacggcccatgcttttccaggctgaagccaaccaggtttcactgaagatctcagt

SEQ ID NO: 428609 - DNA, 122 bp, Homo sapiens
aaatctcgcgagctaaggtttcgctgcgccgggagggacttgtcgcgccccctttcgctccgcctcgtcctagaactcggccaatcatcgctctccaagccaggacctccctcccccggagg

SEQ ID NO: 428610 - DNA, 122 bp, Homo sapiens
gattagtggcccggtgttgtcatgtacttgctgtgtgatctaggacaaagtcctgtccttcgctgtgctttagtgtttctgtccacaccatgaacatctttaaggatccttctggagctgct

SEQ ID NO: 428611 - DNA, 122 bp, Homo sapiens
tgtttccacgctctctcccagaattccccttgtttgcctgtggcgttgtaacgatggagccgccggctcagtgtttccacgctctctcccagaattccccttgtttgcctgcggcgttgtaa

SEQ ID NO: 428612 - DNA, 122 bp, Homo sapiens
acagccttgtgtgcggagcccgcaccaccaagcacgccccagcccttccttccttctctgcgcagagagggccctgttacaggtacgtgtgaaatagagacgggccacagcagctgcacgtc

SEQ ID NO: 428613 - DNA, 122 bp, Homo sapiens
atcctggcacctgggggcttcctccagctcgggctccggcttggggagcggagaacggggcggggcaggagctgggaacaggttagacgacgtgacttgggctggagggaggcgggtcccgg

SEQ ID NO: 428614 - DNA, 122 bp, Homo sapiens
ccgtctgagcatgcaagtctgcagggagctgcagatggcggaggggcgccccgaggcctccgggagagcagcttggggagcggcagcagggcacgccgggaaaggcgcgaggcactctggga

SEQ ID NO: 428615 - DNA, 122 bp, Homo sapiens
gcccaggaggaaagagccggctctgggatgaggtgtcagcgtgtgtggggtgggatgtttcgaatccacgtctcatgtggtattcagcgtggtattcagcgttgttgctattaaacaagaaa

SEQ ID NO: 428616 - DNA, 122 bp, Homo sapiens
gaactaacagcagagtctcaggaagggtttgctcactgaatggagaggtcaggactgggacggagcttagcagcagccgctgggcagcagcccctgcgctccccagctgccctgtgctcctg

SEQ ID NO: 428617 - DNA, 122 bp, Homo sapiens
cctgagaggaaacagtggaggcagcggggcaggtcgcctggggcgtcggcgattatattgcggccgagccggggcgcgccgggaaaggccgggagggcggcggcgcgcgggggctgggcgag

SEQ ID NO: 428618 - DNA, 122 bp, Homo sapiens
agcctcactcggcgtcgcctgcatgggggggggggaggaggaggacggaggaagtttctgcgccgagtcctccgtcgggaaaactctaccaacttccccaggggaagggaagacaacagtgt

SEQ ID NO: 428619 - DNA, 122 bp, Homo sapiens
ctccggagcagctgagtcattgggaggcttccgctgtcacttgcactcctcctccagatccgttgagaagccatccaggcgtgactcaattgtttacagtttcctgggaccagcagggaccc

SEQ ID NO: 428620 - DNA, 122 bp, Homo sapiens
tccaagctcttcctcaggctgttggttggaaccccagctcattttcccacagaaacaaagcgggagtggaggttggcgccctgcctggcccagagcagccaggcccagcaaccagcgccaaa

SEQ ID NO: 428621 - DNA, 122 bp, Homo sapiens
caattcaggggagaaaaaagtgctgattccgacaagcggtgctgggaaggcacgtggccacgtgtaaagaacgaagctgcatccttccctcacaccatgtgcaaaagtgaactcagactggc

SEQ ID NO: 428622 - DNA, 122 bp, Homo sapiens
gcattctgcctcatttgggggaaactaaaacccaggggagggagcgacttacagcaaagtcggtggccgagcctcaagtcgaagcttcaaatgctcaatgttctctcccctcgcacctgccg

SEQ ID NO: 428623 - DNA, 122 bp, Homo sapiens
tcatctcacgcacggattcctgagcacattctcgcattcttgctcttaatcctcccttggcgaccttctactcagacatcatcttttatgcagagaagcaggcacgtttctcatcattaatt

SEQ ID NO: 428624 - DNA, 122 bp, Homo sapiens
taggaattgaggctggaccaagcacagatgtgggtctggctgagctcaggccactagcctcggagtcacccacaaaggaggaaattatgcagggacaacagaaagtacctctgagacctgtg

SEQ ID NO: 428625 - DNA, 122 bp, Homo sapiens
ccgcgcgcggggctggcggggtagggccctggggctctggcttctctggttgggcagctccgggtgtgcgcctgggcggcctgagccgggatcccgccaggagaggtcctaggacaaaaact

SEQ ID NO: 428626 - DNA, 122 bp, Homo sapiens
caagccaagccaaaggtccgctccggcgcgggtgggtgagtgcgcgccgccccgcgggggcggggagagagcctgcagccttcagaacagatattgctcattttctggcagttctcagacgt

SEQ ID NO: 428627 - DNA, 122 bp, Homo sapiens
cctcagtagctggaggaatgggcgctccacgctcccagctccgttagttgggagttgaggcgcaggagcagggagggtgcccagggtgccaattcggccctcgaagcgacgtgcggctcaga

SEQ ID NO: 428628 - DNA, 122 bp, Homo sapiens
ggcctggccgcccgttctcctcgttctagccatctcttagggtaagcaccagcatgccaacgacctggggggccaccagtccttgctcctccaggagaggagggctaactaggatagaagct

SEQ ID NO: 428629 - DNA, 122 bp, Homo sapiens
ccaaaacgttacacatgcacctgctgcggtgaaacaagaggactccgggagacgaaatgacggggcatccaataagccccaagtcggcccgcccctccctaccggagggcagtggaggcccc

SEQ ID NO: 428630 - DNA, 122 bp, Homo sapiens
gtcagagtggaaaaatggtgaagtgcttctccattcgttggtcaatgaatggggtgaagccgttctacctggaggccctagtgtaccagaaatggcttccaagcaattggattacctggtaa

SEQ ID NO: 428631 - DNA, 122 bp, Homo sapiens
ccaagaacaaagcactgagcatcaccacgcactagacgctggggtgtaagggatgcagaccgtgcctccccatccgcgggggcatcgtgatctgggtagggccagagagcagggagagggcc

SEQ ID NO: 428632 - DNA, 122 bp, Homo sapiens
atgtagtggacacagtaactccctctctcttcctgtgtggcctgcaggcaaaggtcacaccgctcacggtcagggctgtctcacttccgtttggggtgagagcaccccctcacttactcgtt

SEQ ID NO: 428633 - DNA, 122 bp, Homo sapiens
atgcactgccccttccctagtcacctgaagaaggaaagcgacaagccactgtagaacctgcgatcaagagagcaccatggctcctacattggaccttggagcacccccaccctccccccacc

SEQ ID NO: 428634 - DNA, 122 bp, Homo sapiens
ggtgtgtgtggggtcagcccagggctaagcgtgtgaacagaaggacctccagtcgcagagcgccaacccctgcccctggtaccattgctgtcagcaaggaggaggctgccagggacggcacc

SEQ ID NO: 428635 - DNA, 122 bp, Homo sapiens
cctgcggaggccatcaaggagcatgaacggtggctggccatgtgcatccaggccctgcagcgggaagtggcagaggaggacctggtgcaggtggacagagccgtggacgccctcgaccgctg

SEQ ID NO: 428636 - DNA, 122 bp, Homo sapiens
catgggaagtgggggtcgggagaggaagaggaagagacaccaagtcggcaggagcccaagcgagtggccagagcttccaccctcggtggccttgggcccatgttttagaagctcagcgtttg

SEQ ID NO: 428637 - DNA, 122 bp, Homo sapiens
gtgtctgccagggaaacagcacgggatacaggcgcgcgggtgcgggtgcgcgtgtacatgcgtatgtgtgtgtgcgcgcgcgcgtgtgtgtatgtgtgagggtgtgacggaggcgcccacgt

SEQ ID NO: 428638 - DNA, 122 bp, Homo sapiens
caattttgagtctgaggattattgtatggctgtgtgtaaagcgatgagtaagtcctgcctcgcgctggtcccgtgcggcagcaccgtcctgtctggcgtccgtctccctgccgtcttcgtgg

SEQ ID NO: 428639 - DNA, 122 bp, Homo sapiens
tgcggggcgcgcgggccgcactttaaaggaatctcaccagattttctccttggaaggggacgctctcttcgccgccttttaaaaacagcaaaattgctaccgttccaagcaacaatattctg

SEQ ID NO: 428640 - DNA, 122 bp, Homo sapiens
aggcaagggggcaggaaagtggggctcagctggatacacctgtggctgaagctgccttggcgagccagggcggagctgtccagtttagcgaggaagccagaaggctgcccatccatgtcccg

SEQ ID NO: 428641 - DNA, 122 bp, Homo sapiens
tgagacggagcgagagaggggccggggccgaatggagtctactcgcgggcccagggaggccgccagagggcgcccgggaccgaccgcaagaataacttccttcctcttccgctaacttcccg

SEQ ID NO: 428642 - DNA, 122 bp, Homo sapiens
gtgcagcgcgcagggggctcggcgcagccagctctaccgaccgcgagggggaggagcggacgcccccggccaccgcccgtcacgcccccgccccgccccgccccttgggagcgcgcgccact

SEQ ID NO: 428643 - DNA, 122 bp, Homo sapiens
tacgtcccaagtctggagtgtcccagtggcagccctcagggcatggataggctggaggcccggcacccctgccgaggctagcctagaagaatgggggtggcccctttggccatgggaagtgg

SEQ ID NO: 428644 - DNA, 122 bp, Homo sapiens
gctggctcccttgctcccttgctgcagctgggaaaggggttctgggtgtaaagaggtgtgcgtcttgtgggccaaagggaaaaacaggcaggggtcagagccagcctgccagaggcaaatgc

SEQ ID NO: 428645 - DNA, 122 bp, Homo sapiens
gctcttatctagcagttggtaatcggaggtcttttactgtaatgcttcaattgctgataccgtatgtgcctactagggaatttctcttcaatgccattgaaacgatgccttgtgtcaagaag

SEQ ID NO: 428646 - DNA, 122 bp, Homo sapiens
cgtgcaggagggtcgtggtctggctgtggcggaggagcataagaaggtaacgcgacctggcgcggcagacagggctcgaagacctcatcttgattaagaaggccacaaattcgcgtttgcct

SEQ ID NO: 428647 - DNA, 122 bp, Homo sapiens
ccagccccggcccgagcccacctggcctagggtgaggcgcggctactgggaggcgggcaacgggggcccccaacaaggccgcgcttccggccgcctgcccagtcgccatagcaacaggcgca

SEQ ID NO: 428648 - DNA, 122 bp, Homo sapiens
aggggcaccttccttccttgctgtctgttgaaatctggcccctagtgttgctgacgatggcgggagcatgtcgtggacccgaggcagccacaggctttcctgatgattcatgataatggtaa

SEQ ID NO: 428649 - DNA, 122 bp, Homo sapiens
gttgcaaagtcctggagcctccagagggctgtcggcgcagtagcagcgagcagcagagtccgcacgctccggcgaggggcagaagagcgcgagggagcgcggggcagcagaagcgagagccg

SEQ ID NO: 428650 - DNA, 122 bp, Homo sapiens
cagattaaaaaacggtgccagccaaatagttgaccaatggcccacaagaccagccttttgcgcctctccccctcctcgaggccggaccccgcggcgccctcaccatagacggtgagcgtgca

SEQ ID NO: 428651 - DNA, 122 bp, Homo sapiens
gaggaaaggcaggcagaaagctggagctccaagagtcacgcaggtacaaggacaaagaatcgtcaaatgagaataccaagaagagatagacatccatgatttattgttaggaggaagaagca

SEQ ID NO: 428652 - DNA, 122 bp, Homo sapiens
attgttttattgttcctctcttcccccactgaatcgtcggccgggctagtcttccagtttcgcctggagtcgattgcactctggcgcacgtggcctttcacttactccacatatacttattg

SEQ ID NO: 428653 - DNA, 122 bp, Homo sapiens
gaccacatcacatggagctccaaagcacgagcacggcctcccgcggctgtgacctcaaggcggagcccctggtgacctcagggagagtccccacccccgcagcccgtgcgcccggggcaggg

SEQ ID NO: 428654 - DNA, 122 bp, Homo sapiens
caggccccgtgctccagaagggtgaggtttcacagtccatgcaggttggtccctgggccccgaagtcgactgcccggcccgcaaagccgtggctgctggggaagctgccccagtccagcgcg

SEQ ID NO: 428655 - DNA, 122 bp, Homo sapiens
gggggtgtctgtgccggtcccaggagaacctgcagaggcatcgggtcagcggtgctcctgcgggccgacactcaccagcccgcactcgttcaaggccaggttctcgtcctcggacagcttct

SEQ ID NO: 428656 - DNA, 122 bp, Homo sapiens
acttcagtcgttccgtgtcagcctccacccctggtagcaccagagcctcccaggcgtccccgcagtccgagccagccttagcacccagcgctttcttgctgtcgcctggttgttcccgcggc

SEQ ID NO: 428657 - DNA, 122 bp, Homo sapiens
ccgagggttctgggaagggtggtgggcacagccaggaacagctgctgtgttcctcttaggcgtaggagaacaacccctctcgcccctacacctcctccggccctgcccgctgggcgctcaga

SEQ ID NO: 428658 - DNA, 122 bp, Homo sapiens
gcccacggcgctctccaggctgccccgtttgcgcctgagccgggaaagagcaacccatcccgtcgccccagcccgcaaggactccgacaccccagactttccactacgtctgcaaatgtgga

SEQ ID NO: 428659 - DNA, 122 bp, Homo sapiens
tgttaaagataaaataatttttccttctctgagccatctgattgacgtggtaatgggccccgcagacagggagaaggtcaggttgcaatgtaatcagttttttctagagtgacgtataatca

SEQ ID NO: 428660 - DNA, 122 bp, Homo sapiens
ctgagatgcagacaggggtgctcgtggcagcaccatttacaatgatgcgaaaacagaacccgcctaactccccgtcagccaggaggaggtgggaaaccaacacagcgcatggttatttcata

SEQ ID NO: 428661 - DNA, 122 bp, Homo sapiens
cgtgtgagcggatacaaaacccgagagaggcgtgagcagcgctgtgtttgcgagcgggagcgaggggcgccggctggggtgtgtgctcctggtgagtgacaccgaggggaaggcgggcgggt

SEQ ID NO: 428662 - DNA, 122 bp, Homo sapiens
gtcgcgggaggggaccagggctctggagaaggcccgggccagcggctgggcggggctctccgaggctcccacctcgcggtccccgcctggcggccggcggctgcggcagaaggcgaagcggt

SEQ ID NO: 428663 - DNA, 122 bp, Homo sapiens
gcagtagggaagggaaaacgtgctgtctgtggctcctcatccccgaggccaggggttccccgagctagaccggcaaggaaggagagaagggaagcattttgctgataatccccttctagtct

SEQ ID NO: 428664 - DNA, 122 bp, Homo sapiens
gtgcaggtgacacgcccatgcaccgccacaaccacgctcacaccagaacattccatcatccggaaggcccgtgtctccgctccagtctgcttttcgtggatgcaaactcatttccttgagtc

SEQ ID NO: 428665 - DNA, 122 bp, Homo sapiens
acacccaccagatttcctcctacctctcaggctgatcctcctctctcttttttgcaggtccgccttcctgactcaaccaatggtgttggtgttccctgggccaattccagcccatttccttc

SEQ ID NO: 428666 - DNA, 122 bp, Homo sapiens
ctaaggacctgcccacccttaccagctgcccgcagcagtgaggatccggctggtgagtaccgtctcccactccttcccttcccggttgcacttcaggcggctcagcttcacgccccccacca

SEQ ID NO: 428667 - DNA, 122 bp, Homo sapiens
ccctcggcggcctggggcaaaccggtactttcgccaccccttccaccgctggctcccacccgtcatccgacctcgccaaagctgtattaagcccaaacgccaccaggaagaaaacgggtttg

SEQ ID NO: 428668 - DNA, 122 bp, Homo sapiens
tctcaaaagtcacgtaaccacactggctaaggtcaccgtttcttttcactttgacttacccgcactgcagccggtggtggaagctacagggagcttttggggcctaacaggaagttaagctg

SEQ ID NO: 428669 - DNA, 122 bp, Homo sapiens
tccctttctgcatttgccagggtcttgttttcagtgaaactggcaaggccaattgtacctcggcgcccacccctcttcaccttttctccacctctgggattctcccggtccggctcagtgta

SEQ ID NO: 428670 - DNA, 122 bp, Homo sapiens
tggggtgatgttttttgttgtttttagaaaatactgctattcactcatgggaaatagggacgagggcttagatttcagctgctttgcattagacaatgatttctcttattataagcagagct

SEQ ID NO: 428671 - DNA, 122 bp, Homo sapiens
ctggctcaggggcagcacaggttagtgtttacagaattagtggaagaatgaacgactagccgggaacgactagcacaaatcacatgacttcttacctttgagaagacaatgcaagcacacaa

SEQ ID NO: 428672 - DNA, 122 bp, Homo sapiens
ggagcttcacgattaatatcactcattgtgaagggtaattaccagctcgatcacgggcgtcgggtacatttatccaccccatccaggcgtggcggaggccacatcactcacggggctgccca

SEQ ID NO: 428673 - DNA, 122 bp, Homo sapiens
taacctggacacccaagggcactgcctaacctcaaaggacgcactctggactaaaagagtcgctcactgccagggcagcagatgacccagagtgctaagaatctgcaaatccccagtgccat

SEQ ID NO: 428674 - DNA, 122 bp, Homo sapiens
gggctagggtactgagtgaccctagaatcaagggtggcgtgggcttaagcagttgccagacgttccttggtactttgcaggcagaccatgtggaccctggtgagctgggtggccttaacagc

SEQ ID NO: 428675 - DNA, 122 bp, Homo sapiens
ccgctggcctagagccagggctgcccagcgacgtgctcttcaccagcacctgcgccttcccgtccagcacgctgcctgcacgccgccagcaccagcacccccacccgcccgtcggccccggt

SEQ ID NO: 428676 - DNA, 122 bp, Homo sapiens
gaagtggttgttctgggtgcaagctgaagtgtggacatggacccgtactttgttagcactcggggacttgatatggaaagaattaatgtactggcttttttgtatagatgaatgttaacttt

SEQ ID NO: 428677 - DNA, 122 bp, Homo sapiens
tcgcgccacccgtctctccttcccccacccgcctcagggactcgactctggctcgggccccgccccacctaggggcctgcggaacccgcccgctccccgcacagcccctccccgcagccccc

SEQ ID NO: 428678 - DNA, 122 bp, Homo sapiens
cagctgggaaaggcgtctctcggagcttccgccattcagaaagtgtttccccgcccctgacggccccagcttgatgtttaccttgcgcgcttagttaggattgctctttctagtacggcctt

SEQ ID NO: 428679 - DNA, 122 bp, Homo sapiens
ctcacactaaaagaggggtggtagtcgagcagtcactccactcctctgtagggagctggccgcgagtgggtgcgcagcagggtgcgcgcggacccgtgcagcgcccagggcggctgtgcgaa

SEQ ID NO: 428680 - DNA, 122 bp, Homo sapiens
ccaggctggagtgcagtggtgccatctctacgaagtgaaaccccgtctcaatgcaagctccgcctcccgggttcatgccattctactgcctcagcctcccgagtagctggaactacaggtgc

SEQ ID NO: 428681 - DNA, 122 bp, Homo sapiens
acatcaacatataaacgtgctttaatttctcttaccttaaaaaatgaaaacttggccgggcgcggtggctcacgcctgtaatcccagcactttgggaggccgaagcgggtggatcacgaggt

SEQ ID NO: 428682 - DNA, 122 bp, Homo sapiens
ataataaagtgccacacactgagtggcttaaaacaacagaaacctattgtctcacacttccgggggccagaagtttgaaacccaggtgtgttaggatcctgctccctctgaaggctccaggg

SEQ ID NO: 428683 - DNA, 122 bp, Homo sapiens
ggcctagcctccatctgagagcatgggggtgttacgtgaaagcagcgtgccagggtcaggcggtcacgcgtgtaaaggccgctgtgcgtgtgcagcgtgcctgggtcaggcggtcacgcaag

SEQ ID NO: 428684 - DNA, 122 bp, Homo sapiens
actttgtgaacttgggcaagttttttaacctctctgaatctggttttgcaactttattatcgacactgcagaatttctgggaagatgaaatgagcgaacgtgtgtgtggaagtttctacctg

SEQ ID NO: 428685 - DNA, 122 bp, Homo sapiens
agacctgatctccacctattttgtgtcaacagttgctgaggctggtgttgggtgattaaccgttaagcacggaagcgcagtacccagagagaccctctctctcctctcacttacatcatcat

SEQ ID NO: 428686 - DNA, 122 bp, Homo sapiens
cacaactgtgcctggggactcagcaaaggcttctgagaccagaagatgttagggttgaatcgtgaaagggaagtaggaggttgccaggcatgtagggcgcattccgggtggaggaaacagtc

SEQ ID NO: 428687 - DNA, 122 bp, Homo sapiens
gagaagtgaccccataactgcataaaataatccctcttctttgaagctcttggcaggaatcgctcagccagcaggaaacctttaacccaatacccagaaaaacagacatttggaggaagagg

SEQ ID NO: 428688 - DNA, 122 bp, Homo sapiens
ttccagtcgcagaccccgcgtgttcgcagactctgccgccggcgaaactacatttcccagcgggccgcgcgccctccttccggcaggtacccctcaaaacccggaaacgccttgcggggcag

SEQ ID NO: 428689 - DNA, 122 bp, Homo sapiens
tgtcccccggcatggacgacccctcagtgcccctgagggcccagggtctcgcccccgtcccgaggcaggccatgtttgaatttatttggagaaattcgcccagcccaggggacctctttctg

SEQ ID NO: 428690 - DNA, 122 bp, Homo sapiens
gccgtgtggtcaaatgcgctgccgtttgacgcaggcgcagagctgcagactagacctgttcgctgttactttggggaaatgtggttctgcgccaccttgtgaacttgctctcacagcgccta

SEQ ID NO: 428691 - DNA, 122 bp, Homo sapiens
cttttgatataattttttgaaaactgatgcacatatttttcttgcaagttcagccaggcacggtagctcatgcctgtaatcccagcactttgggaggccaaggcaggcagattatgaggtca

SEQ ID NO: 428692 - DNA, 122 bp, Homo sapiens
gatgccctaggctgggcccacctggacgtccagggtcagttgggggaggtgctggggtcccgccccacctggccaccccagttgctgccgggcagccgcggcctcagcgtgtcctcagccgc

SEQ ID NO: 428693 - DNA, 122 bp, Homo sapiens
acacttgaccagtttgtctgcagaaagagaagggggccgggggcagggtaggaaggaagacggatcaggactcaggcaggcacaggcccaaagcaagggtgtactccctttgggaggtgggt

SEQ ID NO: 428694 - DNA, 122 bp, Homo sapiens
ggccaagagccggaaaccttgcgtctcagattccccgggtctgtgcacccccaccccaaccggtcttcccacccaggccccccctgatgccagctgcgggcctggacctagcccggggccct

SEQ ID NO: 428695 - DNA, 122 bp, Homo sapiens
tccccgcgccgggtctctgcggctctccaaagagatgggcgacggggaccctgtgcgagccgtcaggctttgggggaaccccgtccccctcccgcgggggcgccctttccctgcacttcacc

SEQ ID NO: 428696 - DNA, 122 bp, Homo sapiens
tcgccttccagagttatgtttatttaacatgctttaacccagaaaatgaacatttgccagcgagcaccaaacaactgtgcgccgcagtgcttgagcgagtcaggtcctgaggccactctggc

SEQ ID NO: 428697 - DNA, 122 bp, Homo sapiens
tcttggtgctggtgggatgttgcactttggtgtggctgactgagtgggccaatatcctgtcgtgagcacccggactgtaagatcaacaccacctaaagatacctatgtaaaacagaaagaga

SEQ ID NO: 428698 - DNA, 122 bp, Homo sapiens
gaccaaggaggcaccgggcgcggcgaacacccccggggcccctccccgagcggggccccgcgtcccaccgcaaaccaggggagcttgggcaccacctggctggcaccgccgggcccggccgg

SEQ ID NO: 428699 - DNA, 122 bp, Homo sapiens
aatgtcatagtctggactccaagttatatatgctcttagacctgggtgtgtccactgtctcgacactcccttctccttgctcactttttattataagaatgcttccctaggttattgtttaa

SEQ ID NO: 428700 - DNA, 122 bp, Homo sapiens
gcccttctcagtgaccacagccaacgggacgatctccttcaccgagatggtgcaggtgggcggagccgggaggcaggatggcgtggctgaggctgcggtggcccctggcctggctcctaccc

SEQ ID NO: 428701 - DNA, 122 bp, Homo sapiens
gccggcagctgctgggaactggaaggcgcccggtcctttctttgactggagcggacccgccggacgcaaccgcctcgccagccggagccagcgcgagctcggcacggtggacacccggtccg

SEQ ID NO: 428702 - DNA, 122 bp, Homo sapiens
aactgaaaaaacaactcaccactttattacacaaagttgaaccagatggggctggttctgcgcttacataactggtccaactgtttctgtacctcgcttctgttttctggacatctatttcc

SEQ ID NO: 428703 - DNA, 122 bp, Homo sapiens
cgtgatccacccgccttggcctcccaaagtgctgagattacaggcgtgagccaccgcgcccggccgaccaggaattatcttaaacagaaaaagaatactctaaggaggggtataccggccag

SEQ ID NO: 428704 - DNA, 122 bp, Homo sapiens
ccttagcgaaaggctagccagcccgagactggccaggcagccggcggaggaatacgcgctcggtccctgcccttgttgatatcattttaaaccaacaggagctctaggcctatatttatgca

SEQ ID NO: 428705 - DNA, 122 bp, Homo sapiens
ctgagtctccaaattgtctattctgcttattatgtttatatacctccccacttccagtttcggccaatccattacttttgctttggtttaggcctttatttttcttctactggttgataggg

SEQ ID NO: 428706 - DNA, 122 bp, Homo sapiens
catcatgaccaaaactggactcagtgtcttcttcagctggcagttcccattagcacagcccggatgcataacccacacccacaacctgccctggcaaatgaccagctttgaaaggacaatga

SEQ ID NO: 428707 - DNA, 122 bp, Homo sapiens
cgcacgcatgtgcgtcctgctcacgggaacgggtccgtggttttgtcctgtacaggttctcgggaggacagtgtcactgcccagcagccaggccccatcaggctggaggtcttcagttctat

SEQ ID NO: 428708 - DNA, 122 bp, Homo sapiens
cagatgccccagatgcaaccaggctgtcccgagaagaaagccggtctgacaatggaaccacgggctagacagatggaaatacacaagggacagccaggcagagcctggggcagaaacacaca

SEQ ID NO: 428709 - DNA, 122 bp, Homo sapiens
gttccggtcaccctcaggggtgcggcccctgcgtgctagtcctgcaaagcgctgattggccggcggctcggttgcctcgcgtcccagcgccagctgggcctagggccaaggtctcgggaagc

SEQ ID NO: 428710 - DNA, 122 bp, Homo sapiens
ttcaagggagagaagatgctacacctcggggatttcagccaatcagtagagagcaaatggcgagtatctcctgtagccgaaagccccacagccgttgtagccatagccgaagccatagccca

SEQ ID NO: 428711 - DNA, 122 bp, Homo sapiens
ttctgactcgaatccggtaacctgataagtccgaagcgttccagtgagggcggggcctcacgaaggcaacccttcgcgcaacctatcagaatcccccctagcaacgctgtgccccgcccata

SEQ ID NO: 428712 - DNA, 122 bp, Homo sapiens
agctaagcgggaactacgtttcccagaattccttgcctgtaggtttccggggttagcacacgccacgtgacctgatgcgggcttcgtgaggcggaagtgacgcagtgttgtcgtctcgtagg

SEQ ID NO: 428713 - DNA, 122 bp, Homo sapiens
aagcccactaagggtctatttaccactttttttttgtttgtttgttttgagatggagtctcgctcccatcacacaggctggagggcaatggcacgatctccactcactgcaacctcctcctc

SEQ ID NO: 428714 - DNA, 122 bp, Homo sapiens
tcttggcgttcccgaaggcctccaggatggggttggcctgcagcagctgccgctccagctcgccctgcaaggaacccagggacgcagtgaaggccgggcagcgacctgggctgccgagcctg

SEQ ID NO: 428715 - DNA, 122 bp, Homo sapiens
cttaaacaacatgcatttatcatcctgcacttctaggatagagagctgagatcaaggtgtcgacagcattggttccttccatgagctgtgaagaaggatctgcccaggcccttttctgtttt

SEQ ID NO: 428716 - DNA, 122 bp, Homo sapiens
gcggcccccagcctggcacagaaagtccagtagtgcctcctggctcagctctcgggccatcgctgccttgtcctccgccccagaggtgtctgagtctcgccctcccggggctctccccagcc

SEQ ID NO: 428717 - DNA, 122 bp, Homo sapiens
ttgataatgaatgtcagaggagagtttccttttccatcaacgcttcaggagacagcggaccgccaccaacacagggcggaagagcacccctgtcacgcagactgtgccgcccccggctcgcc

SEQ ID NO: 428718 - DNA, 122 bp, Homo sapiens
gtctgtgctgaggaagagacagagacagttaggatggtccaggcagggccaggacagaggcgcccatccccgcaactgcgacaaggtccttcctgcagggtcgccctggtgtggaggcccaa

SEQ ID NO: 428719 - DNA, 122 bp, Homo sapiens
gtccatgcacagagctgggcttggataggatgaggaggcacagtgactacccggagtagccggggaggttcctcaaccacagatcaaagtgacagagggaaccatggaaaggtcaggaggaa

SEQ ID NO: 428720 - DNA, 122 bp, Homo sapiens
ggcctctgacgacgggcacctgcaggagccaatcggaaggcgcaggcagggtgtggggcgcggcccggtgccctgggtacccagctcagggccccggtctggtcaacccggctgttgctggg

SEQ ID NO: 428721 - DNA, 122 bp, Homo sapiens
tgggggggagcccgcggcgcggcggcctaaggtgcgtaacgccccatgaacgacatcttccggtgggttagggagagacacccccctgtgacttggtatcactcagtcaaacccatgatccc

SEQ ID NO: 428722 - DNA, 122 bp, Homo sapiens
ggggaggtgccgggcggaaggcctgggccggtgcgcgggggcgggtgaggtggccccacccgctcgaggggggggcgtggccggcgccggctcttgcggccgagcagagttgcggcgtggga

SEQ ID NO: 428723 - DNA, 122 bp, Homo sapiens
gctgcacggaaatgtttgctccttttgcaagcgggccttcccttccggacacctgctggacgcccacatcctggagtggcacgattcgctcttccagatcctgtctgagaggcaggacatgg

SEQ ID NO: 428724 - DNA, 122 bp, Homo sapiens
acacgatgtggtggaaagagtcatgaagtgagatgaaacctgtgcactgatatgtggcatcgggtgggtaattataaacatacacttgaaaaaaaaatgaatgacatggagtcccgggtcca

SEQ ID NO: 428725 - DNA, 122 bp, Homo sapiens
acctgactcacctgaagagtcggtcccggccctgggtctggttggtgaagcgggtgaaggcgtccatggcttctagcccaaaggccacgagtcgcacggggctcaggcgtgggtcctctggg

SEQ ID NO: 428726 - DNA, 122 bp, Homo sapiens
caggcgcctatggggtggaatcctccctccaactaaagctgtttatagagctgagaacctcgggaaaccgcttgcgggtggatgtgacaagtcaggaaacttgactacccaatcacccaaag

SEQ ID NO: 428727 - DNA, 122 bp, Homo sapiens
aagagcctcacaaaggccaattttcaatttctcccttgtgggctgtgtgtgtgtttatgacggtcagaagaagacagactctcatttaaaactattctctcttcaaagcaattataaagtgg

SEQ ID NO: 428728 - DNA, 122 bp, Homo sapiens
ccgcagcgctgcagggagcagagcgactgggcatcggacgtggaagtcctggggcccttgcgtcccgggggcgtggcaggctcggccctggtccaggtgcgagtgcgggagctgcgcaaggg

SEQ ID NO: 428729 - DNA, 122 bp, Homo sapiens
aggctgggggtgagagaggggctctggcctgcgaagcgcacgggccagggggtctgagagcgggtgctgaggagtctgggagtggcaggaacttgggggagactcaaaggagcagggttggt

SEQ ID NO: 428730 - DNA, 122 bp, Homo sapiens
aagctatcctcctgcctctcctcctaaagtgctgggattacaggtgtgagccaccgcacccggctggatctatgttaatattcaaatacaattccaggcagctgaagcctgcctaggctgag

SEQ ID NO: 428731 - DNA, 122 bp, Homo sapiens
gcacctctggcccctcctctgtaagatgagaatggcccctgcaggcctagggcagcctcacgtgagctcagatcctctcagcacttagaagagtggcctgggcctggggatggaagtgctac

SEQ ID NO: 428732 - DNA, 122 bp, Homo sapiens
atcgtggcggcttggcatgtatatccacaaacactccgaaagtccgcgggaaagtgcgtacgccggctcacccggcctcccttcggaggctgcagccgcggcggtcgcggcggctggcggcg

SEQ ID NO: 428733 - DNA, 122 bp, Homo sapiens
caattccacccaatatctctggtccactgttagcaggaaaagcagctacttcccacccatcgtcttctgttctctgccactggcatgactcacacaccacaccctgtcccccaagagccagg

SEQ ID NO: 428734 - DNA, 122 bp, Homo sapiens
gaaggcgcacctggccgctcgccctcaggaagaacttaattatggatggcgttgggtctccgcttagaacgggcgggaggcttagcacccccgtgtggggcaggccgggcagcctctgaggt

SEQ ID NO: 428735 - DNA, 122 bp, Homo sapiens
gcctcccttggctaccccaactgttccccggcctcagcctgactcagcctccctccacctcggcacccccctaggctggctctttgagctggagcttggcctgggtctgtctgtacacctgg

SEQ ID NO: 428736 - DNA, 122 bp, Homo sapiens
ctttgttcctgttttcagctggaggttgtgccaggggttctctggaggcccaagtcaccccggagacacagggacaccccacagccacgaccgtcccacatgggagtctgagtggaaagtgg

SEQ ID NO: 428737 - DNA, 122 bp, Homo sapiens
gtttgggtgctgtgtccctgtcctgcccccccacccccggcagccggcctgagcacccaccgctgtgttgcagctacctgaccgacgttgaccgcatcgccaccttgggctacctgcccacc

SEQ ID NO: 428738 - DNA, 122 bp, Homo sapiens
tctttgtgactggcaggcattcagaccaatagtgattaggaaaccttgaagcctgcccaacgatcgtgggcaggaggtggtttctggtttgttggggcgtgtgtatgtgtatttggggggac

SEQ ID NO: 428739 - DNA, 122 bp, Homo sapiens
acgctgagtggctgaggaggaggagggagaggaaggattggctttgctgtctcggggtgacggaggtagaagaaaatccgccgataatcagacccacgcacccatgccgtccaaacccacgt

SEQ ID NO: 428740 - DNA, 122 bp, Homo sapiens
tagcggcggagggagacgaagcgggtagggggttgctgtttagctgtgcggccgtggatccgcttccttctcggcctccctttcccatccctgattggctgcgaaggctatcgcgtcattcg

SEQ ID NO: 428741 - DNA, 122 bp, Homo sapiens
taggagccaccttttgtataaaactaatgttcctcgaaaagtatctgcattttaagagtccgcaacatagaagtttattgttgattgggtgctttattgccactttactttgagggttcagt

SEQ ID NO: 428742 - DNA, 122 bp, Homo sapiens
tgctgtcctctcctggggcagaggccacagccaaggcctagaggagggcagggcacacagcggtacccccaccctgaccacggggcagggcacacagtggcacctccaccctgaccatggtg

SEQ ID NO: 428743 - DNA, 122 bp, Homo sapiens
actcaaccaaccctcacacacacacacacacccactggggtgcacccaaaggtggcctcacgtgggagtcagagctgttatggccgttggagctcaggggccaccccagctcctgctgaggg

SEQ ID NO: 428744 - DNA, 122 bp, Homo sapiens
agtttccccagcagtgtatacgggctatgtggggagtattcaggagacagacaactcactcgtcaaatcctccccttcctggccaacaaagctgctgcaaccacagggatttcttctgttca

SEQ ID NO: 428745 - DNA, 122 bp, Homo sapiens
tttgagtgtgtttggtatttctgattattgcatgctcaggcataaatagtctttagtgaacgagatacatgttgatatttaattatggcggtggccccatcaagagttggaacagcagggca

SEQ ID NO: 428746 - DNA, 122 bp, Homo sapiens
gcgcctttagacagaagcacacagaggaggagaggccacagcagcctggccatggccagacgatggtgaacagccccgccgagggcctcaggtggtcccgcaaccgctcaggagggcgggca

SEQ ID NO: 428747 - DNA, 122 bp, Homo sapiens
cttccgggaaaacaagcccagaaggcggcggacactcgcataaagtcacgcagtagtactcggagcccggggtagaacctggacttcaaatctctgcactcccggccgggtggtgggcgcat

SEQ ID NO: 428748 - DNA, 122 bp, Homo sapiens
gcagcattgattctccgccaccctcagagcggtctccggaaggctccgccaccacgcgctcgcctcacccctgcgcggagccaccaagagcaccgtgttccgaccctctgccctgggatccg

SEQ ID NO: 428749 - DNA, 122 bp, Homo sapiens
accggcttaaaaaacggcgcaccacgagactatatcccacacctggctcggagggtcctacgcccactgactgtgctagcaatctcgctgattgctagcacagcagtctaagatcaaactgc

SEQ ID NO: 428750 - DNA, 122 bp, Homo sapiens
catcccaggatgtgaattgtcttcactgattcatagttacaccctgcctgccacaaccaacgctctcctaaacaagattccaccctctccacaatccggatgaatcatctcttttccaccct

SEQ ID NO: 428751 - DNA, 122 bp, Homo sapiens
catggcctggcctggagcagcccagagcaaggagactccgctctgatgctgctctggctccgttagcagctcaaaatagcacaggctgtggccccgcccagttcccgccctctccccggccc

SEQ ID NO: 428752 - DNA, 122 bp, Homo sapiens
gtggggtacacagaaggcaggaccgagcttggcgcagttggactttctagcaccacccaacgctgatgaggaagaaaggaggtggttgcaggcttgagtcaaacagttagatttcacccact

SEQ ID NO: 428753 - DNA, 122 bp, Homo sapiens
ggtagagcaggttgcccaagggagcgaagaccgcgtccggcagcgcccccagggcgttcccgtccagccgcagcttgactagactctccaggccctcgaaggagccgcggcttaggcggctg

SEQ ID NO: 428754 - DNA, 122 bp, Homo sapiens
taaattctgtggacgctccgtagcccttgaatcactgttccggaatctgacaagtccaaccgcaccctccttcctggagtccagacagcaccctccctggttctgcccctccctgcaagtca

SEQ ID NO: 428755 - DNA, 122 bp, Homo sapiens
gctgcgcatcctgccgtaagcctgtagtgggtgggacaagaaagcttctgtcacccaccgcgcctctccgccgagccgctcgggggcggcacctcgttcatcaaatcttcgcacgcaggaaa

SEQ ID NO: 428756 - DNA, 122 bp, Homo sapiens
aaaaccaaacccgctgtaaattaatgatgttggaattcctcttagaaagtgaagtgctcccgtttggaggaatgctctgattagaactgcttgagggttaaagaggaggcctcagaggctct

SEQ ID NO: 428757 - DNA, 122 bp, Homo sapiens
tttttgggtttttttttgaggtggagttttgctcttattgcccaggctggattgcaatggcgccatttcggcttactgcaaccttggactcctgggttcaagcgatactcttgcctcagcct

SEQ ID NO: 428758 - DNA, 122 bp, Homo sapiens
cacctcccctgcaccccaggtgtgatctttgccaatggaaaccgctggaaggtgcttcggcgattctctgtgaccactatgagggacttcgggatgggaaagcggagtgtggaggagcggat

SEQ ID NO: 428759 - DNA, 122 bp, Homo sapiens
ggaatcaaaggaatcctgatttctgacttgacagggtagaaggaggtgtgtgtgtgtgtgcgtgtgtgtgtgtatgtttatgtagggacagtgacacccaagagaggctaggaataggtttg

SEQ ID NO: 428760 - DNA, 122 bp, Homo sapiens
tgcttttcagtatgcatgtttttaactatttgtgaaacgtattgttaagaggttttgaaacgatgggcagagtgccaaatccaggtagactttgaatgaagacatttgatttgcctgaaggc

SEQ ID NO: 428761 - DNA, 122 bp, Homo sapiens
agccaagccctgaaggcaacaagataccatccctcctgcccaagtgtttggctgagtccacgcttggctgaggacagagccctgaaatatctcccaggcccctcatgggagcagaagggagc

SEQ ID NO: 428762 - DNA, 122 bp, Homo sapiens
cggatccagtgcggagtctcgaacagctgcggagctgggagctacgggacatgaagagagcggggtggaagagaagacggcggaggaaaatcccccggcgatgctcaactgcggctttctct

SEQ ID NO: 428763 - DNA, 122 bp, Homo sapiens
ttgccttgggtagggctgggtgggggtggtgaggtgggggcgcagcaggttgtccacacccggttgccagtctgaacctgagccgctccaacaagcgagcccttctccgcggccctttggct

SEQ ID NO: 428764 - DNA, 122 bp, Homo sapiens
tacctacctacctacttacccactgattcctcttgcattcttccacgtccaaggatcttccgatctttaatttctttaatatcttttcagtcggcctctttcttgtagggttttcgcagaag

SEQ ID NO: 428765 - DNA, 122 bp, Homo sapiens
gtccaaactctggtgacccaaaggacagctgggctgggaagccggagaggggacagccctcgtgttcccccccggcacccagtcccccggatgaactgacatcaggtccgtcgatgctggcg

SEQ ID NO: 428766 - DNA, 122 bp, Homo sapiens
acccattgcttaacagagctcccaggcaaggctcagactgcttggctacaggccccacttcgatggcaagagaataaactgcagtcttcttgttgacataaatgagcaatagatcaacataa

SEQ ID NO: 428767 - DNA, 122 bp, Homo sapiens
tctctctttctccctagctgaaggcgccacgggccgtgtgtcgttgccttccacttttggcgtcccaacgtctctccgctcccatctttctactaacgtccgacgcacgctccgcctctttc

SEQ ID NO: 428768 - DNA, 122 bp, Homo sapiens
agcctcgccgccctcagcctgggacttggggatcgggcgcttgcccagcccgcgtcccagcgcggccacatggctccactccgcgcgctgctgtcctacctgctgcctttgcactgtgcgct

SEQ ID NO: 428769 - DNA, 122 bp, Homo sapiens
cctttagctctgttcacgagacactcgtgggatattcctagccttctgcccccttagttacgggcattgccgtctcactgctgtataaccagaggcgtgggagctgcagctgtcagaatcct

SEQ ID NO: 428770 - DNA, 122 bp, Homo sapiens
ggcggcactagtgctctggggtcagggagtcgtgttactcagcttgagagcagtgagtgccggaaggaggggcgtttactgtaagtttctgcttctgctcccactcatatctgacttagact

SEQ ID NO: 428771 - DNA, 122 bp, Homo sapiens
gatcttaacggagggctgagtttggttgggcaggtgctacgcggagctcctgaatgtaagcgctcctggactgtggcctgttcaaacaccgaagccgcagagcgggcgtcagagcctgtggg

SEQ ID NO: 428772 - DNA, 122 bp, Homo sapiens
gctgcaaccatgtctaaggctggttctaggaggtgtgcagagagatgggcacaaggcaggcgtgggctgacaagggcattccgaaggaaagtgctgcagtctggaatgtcacctcccctgct

SEQ ID NO: 428773 - DNA, 122 bp, Homo sapiens
ccttccttccccaggcctggctggaggtggaggcaggcccaaagttagggggtcagctcgcgcacctagggccgggagacagacaaattctggcggaaagttggcagccacggtccccctcc

SEQ ID NO: 428774 - DNA, 122 bp, Homo sapiens
tggcgacgccgcgggcggaatgcgcatgcgcgccacgagccacaatcgtagggttgggcgcgccctgccggccaccaggggcagcgcaggagctgagcgcaccccatcagcgaaagaagcgc

SEQ ID NO: 428775 - DNA, 122 bp, Homo sapiens
gacagagaggctgcgcttcgtccagatgttcgagaccttccgaggaggactgtagccgcccggcacgacccctcccgccgccgcagcagcaaagtcccccatgtcgaaggagtggctgcgtt

SEQ ID NO: 428776 - DNA, 122 bp, Homo sapiens
tgcggaaaaggggtgaaagggtgacatcacccaggattgctccacctctggggcaattatcgggagcagggcggccccagtcagacgcaggcagccccaaagcctgaacaggcagggccaga

SEQ ID NO: 428777 - DNA, 122 bp, Homo sapiens
tcatccagcttccctctaccctgcccttttccaactcaaatatacccctttccttccagtcgtccttgtctgtgatgcacagactcctcatcaacctggttgcatttcactcggtaaaggag

SEQ ID NO: 428778 - DNA, 122 bp, Homo sapiens
tgctgtgtttggaggaaggggagtactaacacttcctatgcaccccaggtatgaaggatccggtcctggccctgacaaaaacagtccatttggatcctggccagggttgaatggatcggcta

SEQ ID NO: 428779 - DNA, 122 bp, Homo sapiens
acacttaacaggtatggagggcggagcagagccccgcagtcactggcctgacttccggaacgaaccgtcgccagcaagcacagcagtaggaccagggggatgcaagagcgggggcggccggg

SEQ ID NO: 428780 - DNA, 122 bp, Homo sapiens
actggcctgcgggttgtgggtgcatttcagactctgggctgggaaatcatgcacccgtgtcgcattcccactccagacgccgcagttttgaggcgcaatggggcctttggcctgatcatact

SEQ ID NO: 428781 - DNA, 122 bp, Homo sapiens
ggccgcccacagccttcctgctcagttcattttaggagcattagtgtcggattcttcatacgtcatttcacaggtttccatatttcagctttctagcacaacggtttctattttagtaggct

SEQ ID NO: 428782 - DNA, 122 bp, Homo sapiens
tcgcgggcctcagaccgccgcccggaaggcgaggggcgcactacaactcccagcaggcaccgcgccaatcccgagatgggatttccacggtgtcccgtagttggcaaactgtaagcagacgc

SEQ ID NO: 428783 - DNA, 122 bp, Homo sapiens
tggtctgccggggagggaagggctgccttatttggagacctgcaggaatgccacctcccccggcagctcctatatagctgggcggacctggctgccaagagggtgtgctgggggactgtgca

SEQ ID NO: 428784 - DNA, 122 bp, Homo sapiens
gaagccaaagcacaggagttgctggtgcgatgcgcagagaatccaagctagggaacatcgcggggcgccttaaagccaaaagctaaaggagtctaaatcagcctgaagggaaattggggagg

SEQ ID NO: 428785 - DNA, 122 bp, Homo sapiens
accgcaggcataacagaaaaacctcaacttaaatagtgctgagctgcaacttgttttccgcggcttgtagtcgaggaggagcccacgaggctttagctgctgcaagatccaagcgcgctccc

SEQ ID NO: 428786 - DNA, 122 bp, Homo sapiens
gcgggcgggagccgagcctggggtggggctaggggctccgggcgggacggggagggcgggcgccggccccccgtgacgctgccccgcccccaggtcggagagatcttctcggcggccggcgc

SEQ ID NO: 428787 - DNA, 122 bp, Homo sapiens
catccactctcttggttctccctttttctgacctgtcaaacccacgtgttcagacagtcccgcaggcccttggttatgagggagggaggcgctgactcagtttccatactccaggaaagcag

SEQ ID NO: 428788 - DNA, 122 bp, Homo sapiens
gccggggcggggcggggcgtgccggggcggggcgtagtacggactgggcctggcctggggcgtccccgcgaagcctgggcctgtcaggcggttccgtccgggtctcggccaccgtcgagttc

SEQ ID NO: 428789 - DNA, 122 bp, Homo sapiens
catcgctcacaaaattctgctttgacctgatcaaagactgacagcagaccaggcactacacgaggcgccagcgacacaaaaccagcaagaacgtccacctcagagagcggagggtctcacgg

SEQ ID NO: 428790 - DNA, 122 bp, Homo sapiens
gaagctttctgtgctcccagatcagctccataaaaaagtaagtgttctaaatatcaggcacgtcaatactgacaaccacagcaaatttaacgccaaacgtttttatcattgcagcagatggt

SEQ ID NO: 428791 - DNA, 122 bp, Homo sapiens
acatcggcacgagctgctctgtgtcaggtcagtgctagaggctggggcacagcggtgagccggccacatgcaccctggctttctggaaggtgcagacagtgtgagactcgtggagcagcccc

SEQ ID NO: 428792 - DNA, 122 bp, Homo sapiens
tgtgttaatttttacattcctcacttgatactattttgtttcctcatgctcacatttggacggccatttcattaggatatgtggcaggacaacgataatgatgaatgaaaagttcactctct

SEQ ID NO: 428793 - DNA, 122 bp, Homo sapiens
cagatggctggctccttgatggagtcccctgatggcagctccttaggagacaatacaggacgttcaggcggcggctgcagttcagtggcagcctggaggggctgtgcgtgatgccgggctgt

SEQ ID NO: 428794 - DNA, 122 bp, Homo sapiens
gagactagtcatttccaatttgatttaaaccttttgtttcccaagtctcctcagcaaggacgaaagcaaacactcaagcaatatcctgaatacttcctgatcattcattcatttggacattc

SEQ ID NO: 428795 - DNA, 122 bp, Homo sapiens
gggaaagtcaggacccgggagccgccggcgcccccacccccgccgcaagagccgcttctccggggccacgtccaccccaggattctgccaggcatcaggccgccctgggggtggggggacgc

SEQ ID NO: 428796 - DNA, 122 bp, Homo sapiens
ggccagagttgcgggctgcggattagcagagggggcaccagcctgtcccctgggggccgccgctccaccccgggctctcgtaggcggtggggggctttgcggcgcccccaccccagccacgc

SEQ ID NO: 428797 - DNA, 122 bp, Homo sapiens
aggagaaacgcagagccagacgaggggcaggcagaagggcgggcgtttgtgacccgaggccgggcgcgggccccgccgcagggctgtgaggccgccgtgggactggttccaccgacactgga

SEQ ID NO: 428798 - DNA, 122 bp, Homo sapiens
cctcttggtcacttctctggatccactccagctctatgatgaatcagaggggcagcagctcgccctgtcctggctgcgataaccatcagccattcttgaagcttcccaggtggctctagctg

SEQ ID NO: 428799 - DNA, 122 bp, Homo sapiens
gggaaactcaggagtccccaaagacctgggacctaagctaggagcagaactttagaggtccgggggagcagctctccaatccccccatccccgccagtgctgctcacacccccctcgttgta

SEQ ID NO: 428800 - DNA, 122 bp, Homo sapiens
ccgctcccaggaatcagccccctccccggctcgcccagccaggacacagggacccggacgcggatgcggccacagaacggccaggcctgcagcgtcccagcaggacagcatgtgagcgtttc

SEQ ID NO: 428801 - DNA, 122 bp, Homo sapiens
gagctccacagcatattcctccccgttctccgggcgagcttctcgggccgtttcagcacacggacagctcctctgcttatagggagccgctgcgcctgactccgcactgccacactgacgtc

SEQ ID NO: 428802 - DNA, 122 bp, Homo sapiens
aggggtgcggggagggtgtgtgctttgtgcctttccgttcactcacttcttccggcaggccgctgcctatttttagaaacttatttctgcccttcggggagtcccgggagcccgagtaactc

SEQ ID NO: 428803 - DNA, 122 bp, Homo sapiens
ttcttctggccagccaggtgcccccggtgagagaggattctcacccactgtgcttccagccggctcaccttgaattcgtccatgattttgcgaatggctttgccgcgggcaccaatgatgcg

SEQ ID NO: 428804 - DNA, 122 bp, Homo sapiens
cctgcctcgcggctgctcgctgggatccgagggcggaacgggacgcgcaggaacccggcccgacgggcgcggctcacacccgtgctcttcctgcgctctcggcctcactttgcggccagagc

SEQ ID NO: 428805 - DNA, 122 bp, Homo sapiens
gaggcatatgcgtcattggcagtgtctaagcactcacgataggcgtggatcacaggggctcgctctgtaattaaaaggaaaagggtttttgttgtgttgttgttgttgctgtttttgagaca

SEQ ID NO: 428806 - DNA, 122 bp, Homo sapiens
gggcgctggctctcagctttcaggatttcacttcaccctcagtcagtgctgaacagttgtcgcggaggcctgcgtgagtgaggcctggcgtgccctggaaacattcccctgagttgaagaaa

SEQ ID NO: 428807 - DNA, 122 bp, Homo sapiens
gtcccccatggtggacctgagctaaaaggccgggtgtgggcgtggccgtctgcgctgcagcgtgggacagctgggcacgtgggtggcaaccttgggacccctaacaccagctcccgctggga

SEQ ID NO: 428808 - DNA, 122 bp, Homo sapiens
agagcgccccctttgggcctggaggcgcactgcggacaccggcgccatctgttgggccggcgagggctttctggtccaaaccctgggagcgacagctgaactgagaacagtgggggcaacgc

SEQ ID NO: 428809 - DNA, 122 bp, Homo sapiens
agccccgtcctgtggtctgcctcagtttcccctcctaatacatatggctgttttccacctcgataatataacacgagtttgggcccgaatcagtgtgttctcatcatttttcaggcagggga

SEQ ID NO: 428810 - DNA, 122 bp, Homo sapiens
tgatgctatggggcaaataataagggtaggataaatcaaaaatataattccccactcctgcgagacataattaaccattttaaataataagctttctacatgtgtgaaagaactagagaact

SEQ ID NO: 428811 - DNA, 122 bp, Homo sapiens
aagagaaaggggaggtggaagaagaaaaaaccaccatcagaaactgagtattacacaggacgtaacctgtgctctgagagtgaaggaggccacacagcagtagaaccccgacaggaaaatca

SEQ ID NO: 428812 - DNA, 122 bp, Homo sapiens
agctgaaatgagccccagtgaggtcagcgattaggaaactgccccattgaacgccttcctcgctaatttgaactaattgtataaaaacaccaaacctgctcactaaactttctgtcattggg

SEQ ID NO: 428813 - DNA, 122 bp, Homo sapiens
attcttgtagcaacccctcaactcaccccttccctaaattaaccactcctcctttgcctgcgaaaccagttgggactagaactaaaagggttaattaagtggggtccccgccctcctccgcc

SEQ ID NO: 428814 - DNA, 122 bp, Homo sapiens
tggtaacaaattcctttgtcatagagagggtgaatgtgagacagagagagagtgagtcagcggtttggagcaggaacaaaagccaaaggtcaaatagaggcaaggcagtaggagcaagcatg

SEQ ID NO: 428815 - DNA, 122 bp, Homo sapiens
cgaggctgccctgtccagccaggcggtgcggggggtttggggagagcctctccccgaggtcggtctcagagggccacatggccggtgtgggccggacattccctttccaatggttgtgccca

SEQ ID NO: 428816 - DNA, 122 bp, Homo sapiens
tatattgacacacacatatgacaccatggtacgtaaagaggccttttgggaacagaaggccgtgcagctggaggtggagagtggcagcaggagtctattgggagatcgcttcgctcggtctg

SEQ ID NO: 428817 - DNA, 122 bp, Homo sapiens
aacagagcagccgtgcacagatcctcagacgtttacgcagtgggatgacagaggggccgacggtgctgagtcacgtgaaggtcccgttgcagactgggagagaacggccagacatggaccca

SEQ ID NO: 428818 - DNA, 122 bp, Homo sapiens
acaaatgagtaaacaaaaccagacgcaggtgcgaggagagcagtggccaagtccaaccaccggggcccgggctgggtcagacggacaggcagtagctccggctgctacgggggtacgtggtc

SEQ ID NO: 428819 - DNA, 122 bp, Homo sapiens
cgggtcctggcgctggcatcccgggcaaaagcggcgaggaacgcttgaaggaaatggaggcggagatggccctgtaaggcccgcgacagagagtgataaaagtcgtcccagagccagagcca

SEQ ID NO: 428820 - DNA, 122 bp, Homo sapiens
cagctactgctgctgtcagcccattggctaggccaggggtggggcctgcttaaggtggcacgggctttaaggtggcccttgcagatcttgcagacattttcgtgggctccagggacgacact

SEQ ID NO: 428821 - DNA, 122 bp, Homo sapiens
ctgaagcctagacccatccatgccgcgttcgcctatcttttttggaaatatcgaaggaaccgactttgaactccagagggatcttttctttggaggttccccgatgcagccctcaagatgca

SEQ ID NO: 428822 - DNA, 122 bp, Homo sapiens
gcagctgtttcagcgaatagttctgctagaacttactcctctgcgccaaactctcacacccgtttccattccaccaagtggtcaagagcggggacttcgagagatgtagacctccagaagag

SEQ ID NO: 428823 - DNA, 122 bp, Homo sapiens
ggagggcgtggcggagctgtcggggagccgtgggggcgcgcgtggtcagcacttggggagcgcattgagagccgtggggagcactgagggaggatgcggtggccacggctgcgtggcacccc

SEQ ID NO: 428824 - DNA, 122 bp, Homo sapiens
ggaagggtggtttatgcctgggaaaaggcaggccgggtgccgggatgtagtgcgcctgcacgccgtctccagactacaactcccagaatgcgcggcgccccgagcgtatttccgcttccggt

SEQ ID NO: 428825 - DNA, 122 bp, Homo sapiens
tccaagcatggtttcaactctggcctctcctttaatcaccaacactttgagtgttatgtgcgaagcactacctaggttcttgtttcagcgaatctgcacaggccctggcgaggactgtgttt

SEQ ID NO: 428826 - DNA, 122 bp, Homo sapiens
ggcgcccccggctggaaccaggtgtaactgcagagaccctgggatcgcaggaacggctggcggcaggactgtccctacctcgagaaggtgacggggtttcctgcgctgccagccgatgaggc

SEQ ID NO: 428827 - DNA, 122 bp, Homo sapiens
cactcatgacgggtggcgtggcttggtgctgttccccaggcgcccagcatgtagcaggcacggtgccggctgcagaggtcctggagagccagggtggctggctggatgcctctggtcggggc

SEQ ID NO: 428828 - DNA, 122 bp, Homo sapiens
cagatgtcttcacagctttgatttcccatcccaaagtgcttagtgcagggtaacgctcaacgtatagtgaataaacgtcaactggaagatggagctaaacttccccaggagatgctattgcc

SEQ ID NO: 428829 - DNA, 122 bp, Homo sapiens
gggaacaaaacagaccaacccctgccctcgtggggcctcctttctagatgaggatgggggcgcagagcagatgacgagggatgggttagaagctgctgggtctactgagggcgggcggggag

SEQ ID NO: 428830 - DNA, 122 bp, Homo sapiens
ccgtttatttaaagttcagttgtgttgggcatctgatccaggacaactcgcccaggagcccggcgggtttcagctgccaccacgaaagtaaggatcggttctgccgcgtcgccccctccttc

SEQ ID NO: 428831 - DNA, 122 bp, Homo sapiens
agggaagttctgccaaggacttttttgtccttgctatctgcctaaataatttctatctcccgtatcagaaatgctttttcccttcaaaaattttttgagcactgtgctaggtgctggggata

SEQ ID NO: 428832 - DNA, 122 bp, Homo sapiens
gcggggactgtaggcgcgcagggctgggcctggagggcaggcggggcggggcccgttaggcgcgcggggcggggcttcggccgctgggcggagccgtcaatgcgcaggcgcggcgtcgcccc

SEQ ID NO: 428833 - DNA, 122 bp, Homo sapiens
tgaaggactgaggaagtgttcaaagaaacggaaaggaaaaaatacattaatgaatgcttacgaactaaacatggtggacgcaagcatgtacatctcatcagttttcttcgcaatcctgtaag

SEQ ID NO: 428834 - DNA, 122 bp, Homo sapiens
tcagtcttaagatcttcagcttttgaaggacctcagccttcctctagttctaactcctctcgttctaaggagatccttcccattcctgcagaacgtctccccaacccttcttcttcacagtt

SEQ ID NO: 428835 - DNA, 122 bp, Homo sapiens
gccttgccgcagctcagctccaggcacccaggcgagcgacggaccagatctgcggctccgcgcttccctgttggcctaacatcttaaaaccagaggcgggcttcctggtgccgagacgtcac

SEQ ID NO: 428836 - DNA, 122 bp, Homo sapiens
gtactttgttatagtggcacaaatgaactaagacagtctcttcttctccctctttttttccgtccttctctttcttcttcttcttcttttttttttttttttttgagatggagtctagctct

SEQ ID NO: 428837 - DNA, 122 bp, Homo sapiens
taggtctttgagtgcagtgcgggccggcaggcaacgctgggcccggcctttcctcatctccgctggcggggatccccgttcgcctcaggaggcttccgaccccacagcatcccgccgctctg

SEQ ID NO: 428838 - DNA, 122 bp, Homo sapiens
acaacatttacaaagaccatgctgaggaaggcatgtcctggagggatccatcatggcaaccgtagctgctacctgccctgctcaagacttacgatattagacctctttacttaccatccttc

SEQ ID NO: 428839 - DNA, 122 bp, Homo sapiens
gacgattgtaccattgcactcagaagaaacatcccaggccctgagcagcgtgtctttcctcggccgagtcaggcttcctggtgagcctcagggagtgcatggtctcagatgccatccttctc

SEQ ID NO: 428840 - DNA, 122 bp, Homo sapiens
ttgcccagagttttgtctccttagcctgggcaaggcccagaaatcctcatgtttgacaaacgccctctggagagccccatgccccagaatcacactgaggagcaccaggagaggttacaaag

SEQ ID NO: 428841 - DNA, 122 bp, Homo sapiens
tttgtcttaaaataaaattcaccttacaagaaaccaccaattttaaaaagtattctaattcgtagtagttaacttaataggcacccctaaaatcacagaacaattatagaaatcacagaagg

SEQ ID NO: 428842 - DNA, 122 bp, Homo sapiens
ggttttgaccaaaaagatgaagacactatccctcctttaggaagttcacggtctagtgaccgacgcaaacaataatttgaataggaagcggtggagactaacgagatggaagggtggggcag

SEQ ID NO: 428843 - DNA, 122 bp, Homo sapiens
gtacatacaactggaggcaagaatcttgcacggtaattgggacagaaagatccctgggcgcgcagtggcacaaagcctcgggagatcagagaccgactgtacgtggagaccatagctggaga

SEQ ID NO: 428844 - DNA, 122 bp, Homo sapiens
ggacaaatggcaaggagtgtgtttggggcaggggaggtggcacgtctgtgcctggcactgcgagttctggcaggtgacagcaaataggatagaaagatatgaatgtctaggatatgtaagaa

SEQ ID NO: 428845 - DNA, 122 bp, Homo sapiens
gacagcaccacctgcccctcggtgtgccgctgcgacaacggcttcatctactgcaacgaccggggactcacatccatccccgcagatatccctgatgatgccaccaccctctacctgcagaa

SEQ ID NO: 428846 - DNA, 122 bp, Homo sapiens
gggagggggttgtgtcgggcgctgtgagcatatccctgcatcctccgcaaaccgccgagtcgggccatcccttggtcctcaggcctggagcctcctcagccactagggcaggaaggggatgg

SEQ ID NO: 428847 - DNA, 122 bp, Homo sapiens
agtcatccgccctcctcggcctcccaaagtgctgggattacaggtgtcggccaccacacccggcctcaatatatgtttttgagattcatccatgttgttgaatgtagaagtattttttattg

SEQ ID NO: 428848 - DNA, 122 bp, Homo sapiens
gcaagcggacaaaggcgcttcctggcgcccgcactaaccgtcggtcgggtggattgaattcgccccctgcttgacctttccagacgcccgacagaaggctctctacgctccctctctccctt

SEQ ID NO: 428849 - DNA, 122 bp, Homo sapiens
ctcccatccaaggcctctttctcatgactttttaatctcctgctcggaagtctacgaggacgcttccgggtcacgcggcgcggacaccaggagtcatgtgatgtcaagatggcggcgccgcg

SEQ ID NO: 428850 - DNA, 122 bp, Homo sapiens
agatgcggaggctcatgtaagtgtaccatctaaatccagtctggcatccacatcatactccgttttatgagaggcaagtcagtaaaattttgtttcctctgtgtatgtctgtctcataagag

SEQ ID NO: 428851 - DNA, 122 bp, Homo sapiens
ggtgggtagggggtggggggctgttcccaggattcccctctacgctttctgtggtgaccacggattactgcgtgacaacgggaagccgggagccgaggcccggtccctgaccacgcgtgcct

SEQ ID NO: 428852 - DNA, 122 bp, Homo sapiens
caggctcctttcttcacaccctggagggcccccgcttccgggcctcccagtgcatctatgcgcatcgcacgctgccccacgtgctggctttccgagtgtccatcgcccgcctggccccgggg

SEQ ID NO: 428853 - DNA, 122 bp, Homo sapiens
ttttttttccctcaagagacagcttgtagttctctaatctcctgctctaggccgaagaggcgggagcaggactgtcatccaggctggattgtagtggtgccatcatggctcactgtagccct

SEQ ID NO: 428854 - DNA, 122 bp, Homo sapiens
ccacaggctgattctaggtaaacatttgaggctaataaaaatgtacgccataggccggcgcggtggctcatgcctgtaatcccagcactttgggaggccgaggcgggcagattacgaggtca

SEQ ID NO: 428855 - DNA, 122 bp, Homo sapiens
ccacttacctcactagtgaacatggcacagaagtaatcactacaggcagccagcacaatccgatgggcagggaagtctttctgctctactctcaatgtcacatcacagagggtattgctctt

SEQ ID NO: 428856 - DNA, 122 bp, Homo sapiens
tgagggcgcgcggccgacccaagtgtgtttgggcaacgctagagagaaatttcccaaatccgagttgctctggggacttcgtaggagacagagaggcccgaaaccagtgcccgctgtgcgcg

SEQ ID NO: 428857 - DNA, 122 bp, Homo sapiens
agagcgagcaaagcctttcagaaaatactgcaacactgcgtgcccgaggcccccgcacatcgctgcaatcttgatgtgcacagacaccgtcgagaaccaaggcttggcagggaggggggatg

SEQ ID NO: 428858 - DNA, 122 bp, Homo sapiens
atgatcattaagtagaacaaaggttttctggcttccactgtggtgtcctttacaataggccgaaatgaaatcactcccagtcaaaaattctaggttctcaaacaatatataatacgtccttc

SEQ ID NO: 428859 - DNA, 122 bp, Homo sapiens
tcgggtgtgtgctgggctgtgtctttctctctgtgggttggacgtagctgctcgtgaagccgctcctgcagcccagcagcccctatctgggaaacctttcagtgctttcaaggttcatttta

SEQ ID NO: 428860 - DNA, 122 bp, Homo sapiens
gtttccctccggggctagggctgagggaggagaagagggcggactggctccttccgttctcggccaccctccccgccactccttgaggctgctccatgctaacaggagactgtttctcggag

SEQ ID NO: 428861 - DNA, 122 bp, Homo sapiens
atccctgctttaaacccatactccagaaactttctatctgttcatggtgatagcaggctgcggcgtctacagggagtgaaaactcaccgcccacactagagaagtggcatgagttaggctga

SEQ ID NO: 428862 - DNA, 122 bp, Homo sapiens
ccgccctctttgagaacttgcgcggccaactgggcggggccgaccgttaagcagcagtttcgcggtccgcgggctgcgcgcgcagtcggcgccccttgggagcaggacggcgcgctctgggt

SEQ ID NO: 428863 - DNA, 122 bp, Homo sapiens
gaacggacggtgtgtaggggtgaggtgtcacttcagagaggttccctgggtttccggcgacgccctccttcaagcgaggccgcaggcttcggaggcgtgcgctgctgctgggtgtgcagccc

SEQ ID NO: 428864 - DNA, 122 bp, Homo sapiens
ctgggacgctctcaggatggctctcggagggtgcccgggcggcaggcagggctcagaatgcggctccgttgctcactaacggccttcagagtcttctgagcagtccaggatgggggcagcag

SEQ ID NO: 428865 - DNA, 122 bp, Homo sapiens
tgtgattttaaggaagaccggcaggtccgggcccccaagggtcaaccccacacacatccccgcactttcctgtatgcaggcctgcgagcgtagagggagtggaattcacagcctccccaccc

SEQ ID NO: 428866 - DNA, 122 bp, Homo sapiens
aaggccaagggctagagagcaattagctgggtgagaggcaccacctcccagctcgtaaggcgcccagtacctggagcctgggaacctgcaccgctccaactacccctgggcgaaggcgttgg

SEQ ID NO: 428867 - DNA, 122 bp, Homo sapiens
ttgcttccaaatttcttatttctacactgtcaacaagccgcaggtgtgcacggcatgagccgccgccgctgtggtttggaggcctgtgctgacagctttgcatccagcatgcatttgtcctc

SEQ ID NO: 428868 - DNA, 122 bp, Homo sapiens
ggatcacaggccagctgctggacatcaatgcggtcctcctttcggtaggccaagcatcgtcgaatcaacgcctttgcttcaggtgttactaccggctttggcgggaactgcacttcagtagc

SEQ ID NO: 428869 - DNA, 122 bp, Homo sapiens
gagatgtggggagcgcctctgccccgccgccccgtctgggatgtgaggagcgcctctgcccggccgtgaccccatctgggaggtgaggagcgtctctgcccagccaccccttctgagaagtg

SEQ ID NO: 428870 - DNA, 122 bp, Homo sapiens
cacagattgtactcactttaaggtaagacctatttgaaaagtctcagaggttagatgtgacgttggttggtacatccatcatgggtttatgagtcatacagtcctcagtagtagttacaatt

SEQ ID NO: 428871 - DNA, 122 bp, Homo sapiens
ggacaacctgtccagcagcacgggcgaggccccgtcccgggcagtcggacatcatggggacggccccaggccctggctgcgtggccagaagaaaagcctgggcaagaaaagggaggagtcgc

SEQ ID NO: 428872 - DNA, 122 bp, Homo sapiens
aaacagccaaatcttctggtattcagggaatttttgtttgattgtctactgagctcccgacgtatgtcaggctgtcaggctgcaatgatatttaaggagaatcttttttttttttttttttt

SEQ ID NO: 428873 - DNA, 122 bp, Homo sapiens
ccacccgcctcctctgtgtggtgctcccagcatctgctctgagacgatgcttcaagagcccggatgcaaaacaaattctcccaaacaccgagcgcccaggatccccctttcaaaggcgtgcc

SEQ ID NO: 428874 - DNA, 122 bp, Homo sapiens
cgttgatcacctgttgggccactgtcgagaatcacggctggggtgagaactgtggcttggcgtcacttctcagtgagggttactttggtgtccggaaagggcgttgggccaccagtatattg

SEQ ID NO: 428875 - DNA, 122 bp, Homo sapiens
accagccagagaggaccagaggactgtcagcagtcccatgagcgagcctggatgtgaatgcgtcccctgatccccgacgttcagctgtgagatggccgcagcactggccacagccttgactg

SEQ ID NO: 428876 - DNA, 122 bp, Homo sapiens
cagtaaagatgataaataaagggacctgaagctctaggacatctgttaaccccacgagaacgaattctgtcacttctgaaatgttatccatcaaagtcatttgggaattatcctgagagtta

SEQ ID NO: 428877 - DNA, 122 bp, Homo sapiens
tgtcaacggtttcctctgagggcctctgctgtgtggcgttacttctcaattacatgtgcccgagacattttcccttctttttgacatttcagaaatgccatttgatatgttaactgacgctg

SEQ ID NO: 428878 - DNA, 122 bp, Homo sapiens
tttccccatttagtttattttttgccttttaatgataaacaatttctccaggatttgctgcgcagatatttgtggaggagatagtctaatagaaggatcagatgatacctagccttaaaaac

SEQ ID NO: 428879 - DNA, 122 bp, Homo sapiens
ccaggttctgagttgccaaagaggagtcttttcctccaggtgagctaaggcttagaaccacgatttttggtcactttttcttattttcagtgtgagaagtggcgagttggctgtccaggtac

SEQ ID NO: 428880 - DNA, 122 bp, Homo sapiens
accccacgcccctctttggcctagtgacgtggtaagagttacttaggaggcgggagtccacgaggcccactcagaggccaccaattagggtttcaaaaagtttgaaagaacgaaacctgagg

SEQ ID NO: 428881 - DNA, 122 bp, Homo sapiens
acacaataaaccctgccctcctcacctttcagattgtctgtgagtctaatttctcatggtcgtgtgacaaggaccccatctttagctgaactaaggagaaagtcaacaacagtaatgtgata

SEQ ID NO: 428882 - DNA, 122 bp, Homo sapiens
agcagaaatactagctagctgacacagaaagatgcattaagtgattgagaagggctctcacgctagctgggtggctatccagagctgggaatgtgagggttctaaggatagctttggagtta

SEQ ID NO: 428883 - DNA, 122 bp, Homo sapiens
cgtgtggacattcctgccctgggcgtgagcgtcaccttcaatggccaagtcttccaggcccggctgccctacagcctcttccacaacaacaccgagggccagtgcggtgagtgggcggcggg

SEQ ID NO: 428884 - DNA, 122 bp, Homo sapiens
ggaacatcctggctatgcttgtggtcccagcattgctatgaatattccccctttcactcccggcagtgcccgaggttggatgatgtattataagagtgactccctttggcttcttcatgtcc

SEQ ID NO: 428885 - DNA, 122 bp, Homo sapiens
agcttcccaagtagctgggatgacaggcatgctccaccatgcccagctaattttttttaccgttagtagagacaaggttttgctatgttggccaggctggtctcgaattcctgagctcaggt

SEQ ID NO: 428886 - DNA, 122 bp, Homo sapiens
cggggccacctgcccgccgctccttcctctcctggcttattttccaaacaatttgcttaacgtgattcccggccaagctaaacatgactaatcgtgtttacccggtgatcccgcgcctcctg

SEQ ID NO: 428887 - DNA, 122 bp, Homo sapiens
tgaggccccggggccgcccccgcccacgcctgggtctgtgttaggtgggcggcctggcggcggtgagggcctcctgcctggactttctgcccctgccctgcacagtgcccgcttcggtcact

SEQ ID NO: 428888 - DNA, 122 bp, Homo sapiens
gccctactgaagggaacagcctgagccgaacatgttatttaacctgagtatagtatttaacgaagcctagaagcacggctgtgggtggtgatttggtcagcatatcttaggtatataataac

SEQ ID NO: 428889 - DNA, 122 bp, Homo sapiens
tcactgaattttgctggattttacagatggcctctgctcagggctcttctccatgcgggacgttagggttaggggtgcttctcttcttcagaggtaggcctgtggcttccaggtgggtgtgg

SEQ ID NO: 428890 - DNA, 122 bp, Homo sapiens
gaagtgactactaaaagaagtcactgagaaagtaacgaacacaccaagcctaatggtaaccgactctgaatagatacatgcaatacatagccataatgaaggcagagtaacaataatcagga

SEQ ID NO: 428891 - DNA, 122 bp, Homo sapiens
tcccacggggggaggatctccccccaaaactccagagggcagtgacactgctcccgtccccgctctgtcaccccatgcagacactcctgctcaggccttgcttggggaagcccaccctctag

SEQ ID NO: 428892 - DNA, 122 bp, Homo sapiens
aaaggaggataggagtgtgcatagctactatagcccattacagtgacaaaagggatttagcgtattaactggaatattttgatgcccattgctagtgaaactaccttaatgactaaagcaat

SEQ ID NO: 428893 - DNA, 122 bp, Homo sapiens
acctggaggatccgccaccctcccccattctccaaagccctggctcttcctgagcgcgtgcgcggcccctgtacctgcagcttcctggatgaaggcagagttgcgtttgaggatgagcagga

SEQ ID NO: 428894 - DNA, 122 bp, Homo sapiens
tttagtgtgtgtttgtgtgtgtgagaaaatatgtgtgggtgtatggtgtgtgtgtttgcccggtctgcagcctgcatcagattcaaaggggttcaatcctcaagagttcagggaaggagttc

SEQ ID NO: 428895 - DNA, 122 bp, Homo sapiens
caggaacctgagaggtccttcccattggaggggcagggggaggagacccagcccactccccggccttagccagaaaggcaagagagcaaagccagcgtctctagcttggttgccacactggg

SEQ ID NO: 428896 - DNA, 122 bp, Homo sapiens
cgtgcggggtaccgggggcagaaccagcgcgtgaccggggtccgcggtgccgcaacgccccgggtctgcgcagaggcccctgcagtccctgcccggcccagtccgagcttcccgggcgggcc

SEQ ID NO: 428897 - DNA, 122 bp, Homo sapiens
tcccttgagcccaggagtttgaggctgtatgatgatgccactgcaattcagcctaggaaacgcagtgaagtcttgtctcataaataaaacaaaacaaaaaaaggatggaggacattaaaacg

SEQ ID NO: 428898 - DNA, 122 bp, Homo sapiens
tttactgtagttcttaccttattacgggggaatatgagccaaagccatgtaactcgctgccgggcaggaactaacagagccagcacatgcttctcccgtacccttctctccatcaggtggcc

SEQ ID NO: 428899 - DNA, 122 bp, Homo sapiens
accacataaattagccaagggtggtggttcacacccgtagtcccagctactgggcggcggcggaggggttgagggttaggggtcaggggagacctgaggcaggaggattgcatgaacctggg

SEQ ID NO: 428900 - DNA, 122 bp, Homo sapiens
ccaccctctgcactgcacggacacttggcatttcccaacagagccggggcccgtcggaaacgtgggttgggttcagaggtcggtttccatggcatcctgccacattccagctgctggtctcg

SEQ ID NO: 428901 - DNA, 122 bp, Homo sapiens
agccgaccagtctgcggatatctattggtctaggctggcgccggtcagtggggttgtgatcgctgattggctggctgctccagctgttgcaggtccattcaccattttgtgtgttggagtaa

SEQ ID NO: 428902 - DNA, 122 bp, Homo sapiens
gcacctcgttcaggtacccagacggcaggcgcggggccggctccagccctcgggtcgctgcgcccaggccggccagtccaagtccttttgttgttgtgcagcgctcgcaacagctgatcggc

SEQ ID NO: 428903 - DNA, 122 bp, Homo sapiens
agtgatcctctcacctcgacctcccaaagtactgggattacaggtgtgagtcgccgcatccggctggagcccaagtcttctgaccttctggttggccttataaaaggcccatctcctatgtt

SEQ ID NO: 428904 - DNA, 122 bp, Homo sapiens
tagagcgggaccctgggggcttggcgaggggcgagggtcgggggcttgtctccggcgtctcgtctccggcggccgcgaggcctggtgggatcgcccgggggcggggcctggcgctcgggccc

SEQ ID NO: 428905 - DNA, 122 bp, Homo sapiens
cagggacttgaaccctggaccctcagattaaaagtctgatgctctaccgactgagctatccgggctcacggtagtaacgttgcttccattaatgaagactctgttaccattatgccgtgaac

SEQ ID NO: 428906 - DNA, 122 bp, Homo sapiens
tgcgctcgccgctctccatgccacccagcccctttcttgggcaggccaggtcagtgtgggcgccgcggcccgggttcgcagggcgcagtcccccggcccccagggcgcccactgcgggcggg

SEQ ID NO: 428907 - DNA, 122 bp, Homo sapiens
gtggagcagcgcctggcgtgtggtaaacgctcaacttatgcgggttgtaactgcctgaggcgtttccttcggcgcgccacttggccttctctttctaaatattagcataataaatataaatg

SEQ ID NO: 428908 - DNA, 122 bp, Homo sapiens
tccgttgctcacccagtgcctggcacagtgcctagcccacaggagatttacaatagacaccggtggaatgaatgagcttggacaagatcagtaaacagaatcttaatttcctctcctataaa

SEQ ID NO: 428909 - DNA, 122 bp, Homo sapiens
aaacagcggccagttcttgttcgatgtaaggaacactagtacccaagggctcaggagttccgcctctcttccccagttctgggaaaagaaacgaaccatagagatgtggcttcctagagatc

SEQ ID NO: 428910 - DNA, 122 bp, Homo sapiens
aaacccgggtgaacagatgtgcatggtgccctcacccagccccggcatggcctagacaaccgctgctcagccctgcgcccgtgaaattacattattttctccccggcccaatcatcgtttta

SEQ ID NO: 428911 - DNA, 122 bp, Homo sapiens
ggggaagatgagatggaggccagcatgcagggtgtccccctcctctgaggcccttgccttcgctctcttccctcttcaaacagtaagagtgttcccattaaaggtagactgatcctattgtc

SEQ ID NO: 428912 - DNA, 122 bp, Homo sapiens
cgctgcggctccagggtacggcccgtagagcggagccccctggctgtactgataggtgcccgggccgccgcccccgccgctgctaccgcccgcgccactgcccgcaccggctcctgggccga

SEQ ID NO: 428913 - DNA, 122 bp, Homo sapiens
gtccaggcttgcccgtctgctgccaggcaacaacgcccctagtctctccgttcgggaagacgcgtggccctgcctgccacccaccggaagtgagggcaaatggcaacagcggctctggaatt

SEQ ID NO: 428914 - DNA, 122 bp, Homo sapiens
cccaaacttcgctttctgaccccatcctggaggcgccattctgaactactgttacgacgtcgccacccctaggaaatcaatccactgacaccccgagagatcagtgcgctcacctgtaaaat

SEQ ID NO: 428915 - DNA, 122 bp, Homo sapiens
gttgtctgagcctcccggtgctgccgctgtggccgtttctttgatgaggctctcagaggccgagtcattcactgccagcctgaagctgcccatgcgcatattcgggctggagcctctgaggc

SEQ ID NO: 428916 - DNA, 122 bp, Homo sapiens
ctggttggaaccacctaacaaacatcaaaagatcctgatgcccaggtcttaacccagagacggtgtggtccaggcttgggaaattctaaaagagctccaggtgactgccatctgcaagcgag

SEQ ID NO: 428917 - DNA, 122 bp, Homo sapiens
ctggtagtcccccggtcatgaggggagattctgctggaggaaagaggtctccattcccaccgtttgaaatgtgtaggatgccctcagattctttggcccattcataggtatagctatgctaa

SEQ ID NO: 428918 - DNA, 122 bp, Homo sapiens
tgacaatgcaggagggttggcaccccaacccctgacattgttccaggatcacctgtaatacgatttattgtaaggcattggctcatgcaattgtgaagagtaagaagtcccacgatctgctc

SEQ ID NO: 428919 - DNA, 122 bp, Homo sapiens
accctccccaaagcctcccaccctgctggcaccttgttttcaggctcctaggctccagaacgatgagggtaactttctggcattttgtggtcctaagaaactggtaggagcgggaacctggc

SEQ ID NO: 428920 - DNA, 122 bp, Homo sapiens
ccgccgcagccgcggcagccgccggaggattcctgtcctaatatggagctgggattcccccggccccgcccccgcccccggcccgcggggagacagaggctggcagcagggcggggggaagc

SEQ ID NO: 428921 - DNA, 122 bp, Homo sapiens
ctgagaaaattttgagtgttagccgtctctcggtcgctggctaataaaggactcttaattcgtcttaaagtgtggcgtttttctaactcgctcaggtacaacaattgttgtaaggaatgatt

SEQ ID NO: 428922 - DNA, 122 bp, Homo sapiens
cgatgagatggtttaattatctgccttttctccccccacccccacccagcagcttcctgtcggacagactgaagcctggctgggctagtgacggtaaaaatcactgacagcaccagcaaaca

SEQ ID NO: 428923 - DNA, 122 bp, Homo sapiens
aaggattaaatctgaaaagcttcacctcaaagactttaggatcaacctcccagacaaaaacgtccctcctccctcgatagagcctttgactcctccaccgcagtatgatgaagtccaggaga

SEQ ID NO: 428924 - DNA, 122 bp, Homo sapiens
ccttggctccctgacctttccttgctattttgtccctttaaagaggtttactttggttgtcgtttactttgtgatgcttttagtaaaagccccagaagttttaaaagttttggatttaagat

SEQ ID NO: 428925 - DNA, 122 bp, Homo sapiens
catgcgttagagctccgtgtgcggatgtagaggggcagacagccatgatgtggtggtaaacgagaaaagatggctgtacagaaatgtctaaataatcaagttgaatgatcaagaattaattt

SEQ ID NO: 428926 - DNA, 122 bp, Homo sapiens
ctggaaggagaccccgccgcgaccggggaaaattgagcgaacttgggcgcaaaacccgcccggcaactcgtgacgtcatctcgtcccgcgctcggataggctgtacccactccacgctggtt

SEQ ID NO: 428927 - DNA, 122 bp, Homo sapiens
gcctaggaagatctagaggagatgttccctaggcagttagattcaccatcttcagcagctcgggggcattctgggctggagatgaaattcaagagccatcatccggcaggaggttgttaaaa

SEQ ID NO: 428928 - DNA, 122 bp, Homo sapiens
agaaacagaaaagcgagtgctaaaacataggcccattaaaaaagtgtgtgtgtagccgggcgcggtggctcacgcctgtaatcccagcactttgggagggtgaggcgggtggatcgcctgag

SEQ ID NO: 428929 - DNA, 122 bp, Homo sapiens
taagcccgctggggtggctctgccaaccagggacagagtgaggatttttaatgaacacatcgattataaatgcacacatatgcattcgtgcacaagagtatctgtaatgcatgctcagcatt

SEQ ID NO: 428930 - DNA, 122 bp, Homo sapiens
cgccctggggggcaggggggcggggagcctgggtccggagcaggggaggggcagaggcgccggtgctagctgacccacaggaaacgagcgctgctgacctagtttgggacaccggaagtggg

SEQ ID NO: 428931 - DNA, 122 bp, Homo sapiens
cccaagctgcctctttccgggcccttggaagacggtgcgaattccgcggcggcccgctctcgccagcgccacagccctgactcccacccggaggcctgagttcaaccgctttcgcttccttg

SEQ ID NO: 428932 - DNA, 122 bp, Homo sapiens
agagcagggaccatgccatttttgcccacccttatgcttcttcagtgcccagcaactcatcgggcacagaggaggggttgcatcagtactgggggaattatgaatggggatgggagaagttc

SEQ ID NO: 428933 - DNA, 122 bp, Homo sapiens
tgcgttttgcgggggatccactgccaggaagctgattagctccggagtgaaagtggaacccgggctggacttgcctcccaccaccacctacaggtgtatagcagcatggagcagctgtcgca

SEQ ID NO: 428934 - DNA, 122 bp, Homo sapiens
tttgaacatttggaggcctgtggggcatggctgtctgctctccaagatgacccctggtcacggaatgcagtgttcaaagctagtttctgataccatctgttgattctaagagccttgaactg

SEQ ID NO: 428935 - DNA, 122 bp, Homo sapiens
gagtgctgggttttaaaaaggaaaatcaggttcctgggcccaacccagactgagtgaatccgaatgtccaggaggaggcatagcaatctataaattaaacaaataccccaggggaattacat

SEQ ID NO: 428936 - DNA, 122 bp, Homo sapiens
gcccagcaccacccctgggcagcagcatcctcctctctggccttgccccaggccctgcagcggtggttgtcacaccctgacttcagggaaggtgaaacagggcttgtccctccaactgcagg

SEQ ID NO: 428937 - DNA, 122 bp, Homo sapiens
taaagtagtggtggcaccttaatctactgggaacttttctgcctttccttttgttccactcgaggccaggcaccagactttcatcattatccataatcatgtcaactctctgacttttgaga

SEQ ID NO: 428938 - DNA, 122 bp, Homo sapiens
tcttaaaaaataaaataaaataaataaaaacccctgcgttcatccgagcgcagtggctcacgtctgtaatcgcagcactttgggaggtcaaggccggaggatcacgaggtcaggagatggag

SEQ ID NO: 428939 - DNA, 122 bp, Homo sapiens
tctgagggaggaggggctggggcctgaggggggcggaaggggcgtggcggagctcggggccgggactctcagcctatcaagtgtctgtaattaattaaccaactgagatccagttcaggggt

SEQ ID NO: 428940 - DNA, 122 bp, Homo sapiens
agtgggaaacggcccaagattcccggggcaggcacaggtgcaggagcagcagggtgagcccggccagctgggaaggcctcacggacaagacgagcaggttgctgatggcatggccaggacct

SEQ ID NO: 428941 - DNA, 122 bp, Homo sapiens
ccgcaccacgttcgtggctttcgctggcgccatggcacggagagaaaagcgcgagtccctcggacccggtacccacagtctgtggccgccacgcttcggccggctcttcccgctgcgcggct

SEQ ID NO: 428942 - DNA, 122 bp, Homo sapiens
ttggatctgaaccaaatcttttgagatcccaactaccctgaagaacactgaagacatttacggggcatattaaatggtatcttaaatactagttgtatacctcataatgtctaaggcagcta

SEQ ID NO: 428943 - DNA, 122 bp, Homo sapiens
ggcgcctgacctgtgagtgacagccagaggcaccccagggccccgcagggggacggggaccggctgagacgcgcctcatgctgactcccttcctcctaagcagcacaacctacggggtcctc

SEQ ID NO: 428944 - DNA, 122 bp, Homo sapiens
cgtgagctggccggggcggggcctatggaggggcgggaccgcggcgccctataagtactgcggagcgaggcgcgcgcccggccagagagcgagcgcgcaacggcggcgacggcggcgacccc

SEQ ID NO: 428945 - DNA, 122 bp, Homo sapiens
aattaggctgggtggcggtagtaggggtggagtccctggggctgccccttggcgcggcggcgggagcgggcgctaccacctctccgtcagcgccctctggaggcgggacagcgcgggcggcc

SEQ ID NO: 428946 - DNA, 122 bp, Homo sapiens
gagcaggggagcgggctaagagtagaatcgtgtcgcggctcgagagcgagagtcacgtcccggcgctagcccagcccgacccaggtgaggggcgggagacgcctgcgtgcgtgcggcccggg

SEQ ID NO: 428947 - DNA, 122 bp, Homo sapiens
tgctgagggcaggaagggaaggtgcgggctgggttaggtggtcctggaaccttgcagtttcgaaactgaaaatatctgagatctaggtcttcaggacctttgagccaccgaccccattgata

SEQ ID NO: 428948 - DNA, 122 bp, Homo sapiens
cgctccggcctggtcgccttctccgggcgcatccagggaactcgctcggtcctccttaagcggggaagctcggaaagcgtctccccgactccgcccccagggttgcctttcccttagaaggc

SEQ ID NO: 428949 - DNA, 122 bp, Homo sapiens
tccagagtacttatcactaatatatttgctgtctgtctctcttcagtaaaggaagctccacgagagtaggaattttgtgttttattttctgctgtattcatacaatttacaacagtgcctgg

SEQ ID NO: 428950 - DNA, 122 bp, Homo sapiens
aggaaatggccaccttcaaatgggaagtctaggctccttatgatggcttatggtagcttccgtgacatggctccaggccatcccttcaactctactctttagctacaaacatgttgatgcta

SEQ ID NO: 428951 - DNA, 122 bp, Homo sapiens
cggctgctgctaacatcctgcagtacccaggacagcctcacgatggagcacaactcagcccgaggctgagttaaaccaactgctgttttttgtttgttttgaggttttttgatttgttttgt

SEQ ID NO: 428952 - DNA, 122 bp, Homo sapiens
ggcgtactgaagtgggaatctgcaaagatgtctgctgcagtgttgtgtagagaaggggaccggacagacatacttgaggtgcacaccaagcaggggtgtggacgcaccgagcacgccacggt

SEQ ID NO: 428953 - DNA, 122 bp, Homo sapiens
cacccccaggccagcaaggctgtgcataggtgtctggaacacttcctactcccggacagtcgagtcaccccacccttcttgctgtgaaccacctgtgatgcttttgtttaattgcagtcact

SEQ ID NO: 428954 - DNA, 122 bp, Homo sapiens
ctttgggacaaagctggggacaagtaagcccagaagatcctcgggaagccgagaatttcgcgctccgctctcccacccacgctccgcctcccgcttgcatcctacagctcagctgcggtctc

SEQ ID NO: 428955 - DNA, 122 bp, Homo sapiens
gccacagcgtgaacctggaggacatcatgctcagtcacagatgccaaactcagaaggccacgcagtgtgtgatcccatttctatgaactgtccgggacaggcccatccagagacagggaggg

SEQ ID NO: 428956 - DNA, 122 bp, Homo sapiens
tctaccaagggagataacaattggatagagtgagccaaagaaacgggaatatgccagctacgtggtacatcctttcagatgtgcagagagcttgctttctggatttaatctatggtatcctc

SEQ ID NO: 428957 - DNA, 122 bp, Homo sapiens
gaggataagcaataggtgttggtatagatgaaacaaaactgtccgtgaactgctatacaccgaatatcactgatgatgcctgggggttcactatgcttttctaatagcatagtgaaatttcc

SEQ ID NO: 428958 - DNA, 122 bp, Homo sapiens
atgcaggcaaaaaccagcaagcacgctggaggcagggcagccgtggccacctgacacgcacggctgcctgacatgcacggagcctggcccctttctcgacggagcacacgccgttcagacgt

SEQ ID NO: 428959 - DNA, 122 bp, Homo sapiens
gcggcgggaggagggaggagggaggaggcgggcgggagggggggcaggtctacacccgcgcgcccggcctggggctcccgacccgggactgcatcccggacctagtccagcccgctccgccg

SEQ ID NO: 428960 - DNA, 122 bp, Homo sapiens
ggagaaggacctatttaaagctaccctgttgctttggctttctctgtctgccagggtctccgactgtcccagacgggctggtgtgggcttgggatcctcctggtgacctctcccgctaaggt

SEQ ID NO: 428961 - DNA, 122 bp, Homo sapiens
tggtttggagacagagttctattcctgccagcattgacactgtgtctgaaaagccagcatcgacactgtgtctgcaaatccctcagctattctgagtctccgttttctccctgtgagatgga

SEQ ID NO: 428962 - DNA, 122 bp, Homo sapiens
tttccctgttttcaagttgacatccccatggtgaccatcttagcttctttctagtactgccgtcgctgaacactggttccatatcgatgctcatacaatcttagtttgccattctttgacaa

SEQ ID NO: 428963 - DNA, 122 bp, Homo sapiens
atatcgatgccaaatacctaagtaacactgtcatcttgttaactgcatttttctatcttgcgtggcacgctgatggataaagcgtaaaattatctagggcaaacgggggattagaagacttg

SEQ ID NO: 428964 - DNA, 122 bp, Homo sapiens
ttgattatctttgttttggtatctgaagacttgtgacatatctctgtcgattgggaattacggcaggctctccttgtaccatagtgtcagttttctggagaatgtctgtctagcccttggaa

SEQ ID NO: 428965 - DNA, 122 bp, Homo sapiens
actggctcaggtgtgtgggtcgggggacggcgtccctgcgggcctcgaatgctgcagcagcgtcgtgtggccagtgggtacctgccccgagcagcaggcgctcaccggcaacctgcactcag

SEQ ID NO: 428966 - DNA, 122 bp, Homo sapiens
cgcaggtccgtcttaaactcctgcgcgatctcgcgtaccagccgctggaagggcagcttgcggatcagcagctccgtagacttctgatagcgccggatctcccgcagagccacggtgccggg

SEQ ID NO: 428967 - DNA, 122 bp, Homo sapiens
ctcaggagctcattaacaataggaactcctttccttgagaataaatgatttgcaaaccagcgatcactttctctgttgtaaataagaatctaagtcaaaaacaatgatatgcttttctttta

SEQ ID NO: 428968 - DNA, 122 bp, Homo sapiens
gactaagggaaccttacatggaagttcacacttagaaggactgataggaggcatctgtcacgtcaccctttctagagccttcagccaagtgaaaacttagcctctgcctgaatactcactat

SEQ ID NO: 428969 - DNA, 122 bp, Homo sapiens
ccagcccccaggacaccggcagaggtggctgtggcctgctgagacttaccaggatgtggccgcccgggggtccctgagcttctgttcatggggaatggcgcacccgggccagcaactgtggg

SEQ ID NO: 428970 - DNA, 122 bp, Homo sapiens
gcacagcttcggggacaatgcctgccctggcaacgtttgttgaatgacaaacggatgtaccggtgaagtggctggccaggcctcaccacctgttggtggttgatctgagacgagagcccagg

SEQ ID NO: 428971 - DNA, 122 bp, Homo sapiens
agcctgcagctgctaaggaagcagattacccttcccccaggctgctggtctggttcctttcgttggacgcccccccggctttgagtgacattagctcagggcgctgccctgtccagccccac

SEQ ID NO: 428972 - DNA, 122 bp, Homo sapiens
atctggccaggagaaagatggtcacttggctcagctccaaggaagtatgcctaagccttccgtttgagagctacatgcagaaactgagcatgatctataatcttggtgagatgctaggagtt

SEQ ID NO: 428973 - DNA, 122 bp, Homo sapiens
ggctcccatgtctggccctgctctggttcccatgtccgggacccaccgtggctcccgtgtcgggcctggctgtggctcccatgtcaggccctgatgtggctcccgtgtctgagccttgctgg

SEQ ID NO: 428974 - DNA, 122 bp, Homo sapiens
ccgcgagccgcaggtacgggcgggcgagcgggcccctagggcactccctgcgcctgcctgcgggcccagtggagggtcttccggacaccggtccccagtgccagtctggaccacccctgcat

SEQ ID NO: 428975 - DNA, 122 bp, Homo sapiens
gcaagatgggcatcggcagcggggcctggaggaggagctgcggaggcttcagagcgagcacgacaggtgccgcccctgccacagcctctagcagctctcagtggccccatcctgaaagtggg

SEQ ID NO: 428976 - DNA, 122 bp, Homo sapiens
tctcaaggtatggtctttgggccaccaggcctcacaatcactttgggtactggctgaaaacgtaggtttccaactccaaagattaaaaaacataaaaatatatgtttttttaacgtaaaaat

SEQ ID NO: 428977 - DNA, 122 bp, Homo sapiens
cacctcacagatcccgttccgctgggtgctgctggccagcaggtgtgcactgtcaagcagcgcagacatctgggacacggcgaacttgcggatggccttcacgcggatggccacgtccagca

SEQ ID NO: 428978 - DNA, 122 bp, Homo sapiens
cctggagaactttggctggcgggacctggagcccagaaaagggggagcgcgcggaagcgccgccaaatgcggggactggctccgagcagctgagagtacagccccaaccgcatgagcacgac

SEQ ID NO: 428979 - DNA, 122 bp, Homo sapiens
ggctcctgctccagtgagtatggagggacaagatctccactctgacaggggcccacagagcgacattccctggagtgaccaggccccttgtctctattagctgagccccccaagtctggggt

SEQ ID NO: 428980 - DNA, 122 bp, Homo sapiens
acctcaccataacagcaggaaacccagaaatgattcacagctgaaacctctggcccacatcgacacatcacatcacatggttgtttcaactggaaaccaaacagccatctgggcatgattat

SEQ ID NO: 428981 - DNA, 122 bp, Homo sapiens
tctgatcgcctttacagagagaacatctgggcctcagagacaccagaacacccagcggcccgcgtccagggagtctagaaccttgggctcccgcgcacacccaggccaggtcctggccgtca

SEQ ID NO: 428982 - DNA, 122 bp, Homo sapiens
ctcttcctggtttgcacgctcttcggtagtaatcgcttgtccttcgcacctgggttgtctcgcccaggtgtgctgggtgggactggggctgggtaaggatggtgggggaggaaggtgttggc

SEQ ID NO: 428983 - DNA, 122 bp, Homo sapiens
ggaggtccggccatggggcaagagagctgttctcgtgaggccacggagccatccccgggtcgcgcgtggggcggtagggaaagaaggaaggagggggtctcccaaatcacctggctcagggg

SEQ ID NO: 428984 - DNA, 122 bp, Homo sapiens
ccccagttcgagccgccgcccgaaaggccgggccgtcgtcttaggaggagtcgccgccgccgccacctccgccatggagctgatcaccattctcgagaagaccgtgtctcccggtaggacgc

SEQ ID NO: 428985 - DNA, 122 bp, Homo sapiens
cctctttcttcctctcagtgcctggacgcagcgccctcttgcgacagggaggaaataatgcgtcgagggggcatcctcggccaccgccctggtcctcaggctttcctcgtacctggtgcgtc

SEQ ID NO: 428986 - DNA, 122 bp, Homo sapiens
ctcagaacaaatgctggccttgaacctgctctcctgctgttgtgaccagttttaattccacgactgctacgtaatccatacaacacagttcaaaactctgcagtataaagataccgggtgcc

SEQ ID NO: 428987 - DNA, 122 bp, Homo sapiens
gctgcagtcgctccggagctgcacgggtgttttgcgtgttgctgcgtcatcgccagtggccggtttgaatgagactcgtcgcaccgaagccgccgccaccaccgcgcctccgcctcggccgc

SEQ ID NO: 428988 - DNA, 122 bp, Homo sapiens
gagactcagcatgagattgagagatggggacagagatgcagacagtgacagggagagtctcgggcctccagagggagaaaatgacacagggttctgagcaaaaggcaggccgagaggccagc

SEQ ID NO: 428989 - DNA, 122 bp, Homo sapiens
gaaaagccggtagaggatccttagggaagactccaaaatggcggcgtcgccggggtccatcgggtccacacgcggcaccacccccaagcaagaggtaactactgaagtgcccgaataaaaag

SEQ ID NO: 428990 - DNA, 122 bp, Homo sapiens
gccacgggccaccggggctcacacccaaccgtgcggccgctcctggggacccccggccgccgccagcccccaaacacctcccggcgatgctggccgcccccggtctcgcgttccggatcccc

SEQ ID NO: 428991 - DNA, 122 bp, Homo sapiens
attaggagtatacaatgtttgaccttagcctattttcataaggctcattttgaatttattcggtcatatacattaaaaatagcagagacaagttacttgggaatcctaaagaagaaagaggg

SEQ ID NO: 428992 - DNA, 122 bp, Homo sapiens
tttgcatggagcagcagtgcattagctactttcaaaacatctgactgatcccagattacacgagacaaaggcctggatcctttgcctttagacaggtgcataatagtgtgaattttctgaaa

SEQ ID NO: 428993 - DNA, 122 bp, Homo sapiens
ctcgagagaggaccccgaaggggaagccgcacgcccagcagccgggtcgagcctctgcctcggactcctcggctccctggagccgctccaccgatggcaccatcttggcgcagaaactcgcc

SEQ ID NO: 428994 - DNA, 122 bp, Homo sapiens
acttgtatgcatgttcattgcaacttaaaagcgtaaaaaccccaaatgtccatccacagacgaatgtataaactgtggtatccattacacaatagactacttactactcagcaataaaaatg

SEQ ID NO: 428995 - DNA, 122 bp, Homo sapiens
gagcaaacagcagaggttgcaaactcctctgtctatggagcccagcagggaagatgatcccgatgctggttagaggggagagtggggagtggtggccctttgcacctgagcacaacccacag

SEQ ID NO: 428996 - DNA, 122 bp, Homo sapiens
ggcatggcctgggtggccccgccccgcaggccctctggctaccaaacctcccagcgcccccgcgcccctttggagttctgaccccgcgggtgcacccgtgtctcctggacacagaggctgcc

SEQ ID NO: 428997 - DNA, 122 bp, Homo sapiens
tgactccaaccatgaacctcagattcacacactcaagcaccttcaatctacactagagcccgagtaatcaacctaaagcactctccttccataatctcttctatgactccgcatcaccttca

SEQ ID NO: 428998 - DNA, 122 bp, Homo sapiens
tctggactcttgtctgcaaaacaggcagggtcttgtgtctaataagcactcaatgaacatcgatggaatgaatgaggggggggaacttctccactcagggttcccttttgttcctcttctga

SEQ ID NO: 428999 - DNA, 122 bp, Homo sapiens
gaccccgtagcatgtgctggtcccagtgtctgctgcaagatgcccaaatgttgcaaacagcgactgccagagccctctggagacacttggctgggactttccaagctgcagatggacctaga

SEQ ID NO: 429000 - DNA, 122 bp, Homo sapiens
ggtccccttgggacaccgaagccggcctgtcattggggcagaccacaggcgtgagaggcacggcggggctggcaagctggcaacgggggagacgggagttgccaagaccctgcctctcctcc

SEQ ID NO: 429001 - DNA, 122 bp, Homo sapiens
gagactagctggcctccggaagccgcctcctgaccccgcgtcaagcaccgcggtggatggcgcaacccagctttgggaattaattacccaaggcgcgtttccgtgcagtctggcctccctcc

SEQ ID NO: 429002 - DNA, 122 bp, Homo sapiens
acatcaaaaactgggttgcaccatttgcgattaagcagggcccctattcggtgaccgctgcgccgccagcctggcgcgggcctcctgcaagacaatggccacgacctgacgcgcgagcgcca

SEQ ID NO: 429003 - DNA, 122 bp, Homo sapiens
gaagtggaggcggtgaacgcgcgtgggcgcgcctcccgggacacggcgctggctctgcggcgctacctgctgggcactccctaatcgatggtgacgccgtcgctgccgcccggcgaccggca

SEQ ID NO: 429004 - DNA, 122 bp, Homo sapiens
cccagtcactaatgctaccattaccaagggccaggtactttgcatgcaggtaatgttgcccgtctttttttgctaatctagtgtgacatttgagatgccacctttagaggtctttccttgat

SEQ ID NO: 429005 - DNA, 122 bp, Homo sapiens
ctctgtcctcaactttcttctgtccctttcctcgaaggacacctctcccaggactggggccgcgctccagggctccccctcccccgccacccgcgcagcccggcatatgcctcgacccagca

SEQ ID NO: 429006 - DNA, 122 bp, Homo sapiens
tttatgtcttaatggtatcctactgagcatttgcacctctgttcatttcacacagtgaaacgcaattttacctagtttgcactatatgatcagtgttactgcctataatcttatacaacagc

SEQ ID NO: 429007 - DNA, 122 bp, Homo sapiens
cccagcctggagcccgggcaccgcccatctctaacccgccgctagccccggaccctcccgcgcctgctccgcaccacggagccgggcctccagagcagcaaggtcaccaggtggcggtgctg

SEQ ID NO: 429008 - DNA, 122 bp, Homo sapiens
atcattcatgaattaatattggttgaagattgtcctaaacacggctgacttcagcagagacgtacagtgaagcgtgagccggtcctggggttggtgggtagagagcggttctaaaacaggac

SEQ ID NO: 429009 - DNA, 122 bp, Homo sapiens
gggcggcggcgactgggctggccctgggctggggccggtgcgtcttagctaagtgcccagcgctccggtgggggcggtaggggcggagccgcgctctccagggcctaaggacagtgacgtgg

SEQ ID NO: 429010 - DNA, 122 bp, Homo sapiens
cagaaccagcatcctccagccagtgtgccacagagctggttggtcatgatgactgggtagcgtagtggattacaaatggctacatagcggtcaaaggccatgatagcaagaaggatgtactc

SEQ ID NO: 429011 - DNA, 122 bp, Homo sapiens
taggaggttaatcgttaaaaaggtggactcccccagggaaatagatgaaaggatcgtgcccggagaacttgtgtgtgcccactcacaagtgcagagaattaatctcggcccggactgcggca

SEQ ID NO: 429012 - DNA, 122 bp, Homo sapiens
tatgaagaaactctgcaaacacagccatgaaggaagcacccaaagacagaactgaattcccgggtccaaaatatattccctctagaagcaactcattctatttttaagaattaatcacagtg

SEQ ID NO: 429013 - DNA, 122 bp, Homo sapiens
actctgctcttcggcgcgacccctgctcctggggtcctctggggtcctctggggtcctcccgcacacccaggccaggcacacccaggttgcgaagccgagtgcctccccgtgcggccgccag

SEQ ID NO: 429014 - DNA, 122 bp, Homo sapiens
acaggagacttcagatttatggtttagtttacttttctaccccggtctgcttgtccgagccgaatctcaaatagcttttctcatgcccctcccggcccctttccccttgtggaagagaacaa

SEQ ID NO: 429015 - DNA, 122 bp, Homo sapiens
gtcggtcttttgtgtgtctgcagcacctccttccacacgggcccaggagttctctatacgcgctctcaccgcaggtcttggaattccaagccatttccaattccaggtcttggaaatggctg

SEQ ID NO: 429016 - DNA, 122 bp, Homo sapiens
taaaagcagtccgcgctccaagcaacaacttgcactttttcttttcttccacagaaaccccgcgagatgtagatacattgtttgaggggcaactgcattttcaggaactcctcaaggatgaa

SEQ ID NO: 429017 - DNA, 122 bp, Homo sapiens
actctgagtccagaacgacctccaatggggctggcacagccaccaactctgagtccagcacgacctccagtggggccagcacagccaccaactctgagtccagcacaccctccagtggggcc

SEQ ID NO: 429018 - DNA, 122 bp, Homo sapiens
ggatccggagaaactgcgccattgttgtcttacagagaaacaaccttctaacactctcttcgccgccatctttttcaagattttaaattgaaaatactttttttgacggctcttgccattat

SEQ ID NO: 429019 - DNA, 122 bp, Homo sapiens
gtgacagagtgagacctctccaaataaataaataaaaataaataaaactaacaagcagcacgactccaaaatcagaaaacttgtaacgaccaaaaaagtgcaaacgtgccttaaatcagtca

SEQ ID NO: 429020 - DNA, 122 bp, Homo sapiens
gggtctcaggggcgggacttataaatgaagaccggaagtggggtcccgggagaggggttccggggtgaaagagtgagtcacctaaggagaaaaaagtcaagactcaccagggcctcatggag

SEQ ID NO: 429021 - DNA, 122 bp, Homo sapiens
cccacccactaggccagcccgagcgcgtctgccacgccctgctgcattccgcggcgagagcgcgcgataggattggctctcaaggccccgccccaacaggtcgccgctcagggtgacccgga

SEQ ID NO: 429022 - DNA, 122 bp, Homo sapiens
cagaaagaggcagagctgggcatgcgcaatttccgcccccgccacagtcttgggagtgggcgggctcgagggctgggaggaagccgaaagctgaccgagaggagaaagaagcccgcccccgg

SEQ ID NO: 429023 - DNA, 122 bp, Homo sapiens
aagatagatacaccaaaaggagcaagcagtgtctgaaaccagcaaagacttaaaagttaccgaagaaggtgttcatgctttcattttatcttttttttttaacctagcaactgatgacactg

SEQ ID NO: 429024 - DNA, 122 bp, Homo sapiens
ccctgcggccaggcggggccgggaggggcggatgccggagggcgctgggggaggccgacccgcgcggggctggtccgagggcggaggcaatccgccggcgacgccgcaggtcccgggtggct

SEQ ID NO: 429025 - DNA, 122 bp, Homo sapiens
gatgctgatacaaatccactcgctttcgtctaaaagcaaacaagctggctctgtgtctgccggcacattcgcctggaaacgggcggcaaggcccatctctgtgtttgtttttccagggcctg

SEQ ID NO: 429026 - DNA, 122 bp, Homo sapiens
tcagtcagggtggagttgctgaccttagtggccggcccagccaggggaaggagtggccatcggcaacccccaccccaaccccaatccctgaggcgcccgctctggctcagccactctgaccc

SEQ ID NO: 429027 - DNA, 122 bp, Homo sapiens
gctgctgcctaaggcaagggggtggccgagggacccttctgggcccagccctcttggactcgctctgcccatgggtcatagctcagcctcccagggcagctcagcctcttcccgcagagcta

SEQ ID NO: 429028 - DNA, 122 bp, Homo sapiens
tccgggccctagcggcgggcccagtagcggaggtggtggcggcggtggaggcggcggcatcgaggtaataggtgactgatctccccgggcgctagctctgagcagatgcggactctcttcgg

SEQ ID NO: 429029 - DNA, 122 bp, Homo sapiens
atgggactgttttggtcattaaatgccaatttgtatataaagtgcttagcgcaagcctgacgacagaaacactcggtaattgaaagctactgtttttccacaaggacttcctttcagggacc

SEQ ID NO: 429030 - DNA, 122 bp, Homo sapiens
ctctcaaggcccctcattgctttacatgtctctcaacatgatctcagataaagacggttacgagaagacttagcccagggtcactgtacacctacagggccggcctggaatgtggaaggtag

SEQ ID NO: 429031 - DNA, 122 bp, Homo sapiens
gcagccagagtctctcccggctgcgctgacgcctgccgcgcgtctcattcattcattcaccgcgtttgaatggctcctactgtgagccaggcagcacactggcgctctcggtccccacgcgg

SEQ ID NO: 429032 - DNA, 122 bp, Homo sapiens
ccagtcagatgggcatgggttctgatgggggccctgccataggccgcctggtgacccacgcggggctgccgttccttcgggggttcaacggcatgatcaaagacaccgggatgtgtgtgtgt

SEQ ID NO: 429033 - DNA, 122 bp, Homo sapiens
agctcgcccgcccaggcctggcctcctgcttttccatttgattccctgcctctttctattcggactggaatgccgggccaggctccggggcgcgccgctgcggcagccgcacctcgcaggtc

SEQ ID NO: 429034 - DNA, 122 bp, Homo sapiens
cactcctgggccgcagccccggcggcaggcggagaggagtgctcggctggcctctgcctccgggagccaggccccctgcacagctgccctggagctccccagggcccagctcatggacagcc

SEQ ID NO: 429035 - DNA, 122 bp, Homo sapiens
ctgaagagtggtttgcatgaaaccgtgggctgtgtccacaccaagctccttgcacacaggcgtgcaataccagtttttttcagttaagagctttcgatcgtgcaagttcaagggagggactt

SEQ ID NO: 429036 - DNA, 122 bp, Homo sapiens
tcctcaccgtcatgtggttgccctggtgttcgatctccttgtccggcttcagcagcagcgcgatcttccgcacagccaagctgatgtctgtgggggctgcctgttagtaggggtgctgctag

SEQ ID NO: 429037 - DNA, 122 bp, Homo sapiens
gcggcccgcggattagtcagcagttgttctagtccgggtcccttcccccagccctcccgccgatctccgtctccctgcagggccgactcttcagcgaccgtccctagagccagcggacggaa

SEQ ID NO: 429038 - DNA, 122 bp, Homo sapiens
gaaaacatttccaaagctcacggagggaggccaacttcccctatgggaaacccattcactcgccaaagggcagaaggcatcataaatcacccattgatacattggtggggggctccctgtcc

SEQ ID NO: 429039 - DNA, 122 bp, Homo sapiens
atacaaaatattgaataaaggagaaaaaggcaaaaacaaaaaaatgctcattatatgttacgggaaaaatacaaagaggcctgtattttccaataagaaatctgaggtgagatatcagattt

SEQ ID NO: 429040 - DNA, 122 bp, Homo sapiens
ggcgccggagaccgcgactggcgggttgggagcagcactgctcatgcgcggaagggggcgcgcgcctgcgcacttgcaaaccaccggccgggatcgccgaggtgtggcctgttttcatggcg

SEQ ID NO: 429041 - DNA, 122 bp, Homo sapiens
cttgaattccgcggaacgaggtggtgccaacgctgtgtttcaacccggtcactaaacatccgcgagcatcctgtcagagctctcagctcattggcgaaagtaaaacgccaaggaaaagcacc

SEQ ID NO: 429042 - DNA, 122 bp, Homo sapiens
taggacggggcttggagtgtggggacaacgccaagcagggagctgtccaggggcactgcccgcccggggtctccagctgtgaagttgcgctcctcgggagattcctggggtcagaacgagag

SEQ ID NO: 429043 - DNA, 122 bp, Homo sapiens
ttggttccgcccgtggagacgacgatagtgtttctgtataataaagtgtctgccggctcgcgggccaggatcctctcggtgggatgggcaccacagacaggaggcccctcaggcccgtgcgg

SEQ ID NO: 429044 - DNA, 122 bp, Homo sapiens
ccactggacgctcaccggagacctggaagaggcaggcagccgagcccacatcgttggagacgctgcactcgtagctgccgctgctgtcgcgagttacggcgtcgaggcgcagctccgcgtga

SEQ ID NO: 429045 - DNA, 122 bp, Homo sapiens
tcttgcttctcttccaggtgctctatcccctcgagaccctctggtgccaggcttgcttcacggccatcttgtgttgtcactgcagagtttggaggccagttttccacagcctaaacagggag

SEQ ID NO: 429046 - DNA, 122 bp, Homo sapiens
cttggcggtggtgtcactggatgctgggaagagatggtgggaagagcctccatccattggcgcgtcactaattagacaaggaggccttgggctcccttgagagagtcacggtttctcctccg

SEQ ID NO: 429047 - DNA, 122 bp, Homo sapiens
ccctcccccacgtgccctcgggagtcccggggaggagttgccgcgcggaggaggcgtggccgcggtgcctgcggaggcgcgagcggcgcggcgcggcgcggccgggactttggctttgacac

SEQ ID NO: 429048 - DNA, 122 bp, Homo sapiens
agggtcgggcgccaggcgcccctgcccgagctgcgcgcttagctcgctcccccggccggccgcgctctccagctgcaggaaattccagaagctctccatcatccccgcgcagcgcgcagccc

SEQ ID NO: 429049 - DNA, 122 bp, Homo sapiens
tggcaggggtgctccaagagcctctgcatgaggcggacgtgtaagtggccactcctctggcgacatcccacggcagggaccctcgtgtggacacccgcccctgctagctcagggctccgatg

SEQ ID NO: 429050 - DNA, 122 bp, Homo sapiens
gttctgtgacttgtttaatcttaagacaaaattgagacagtttttctttaagttaaaaaacgtagaagtttgttcattttctgctactgctatgggtataaggtataacttcagttttagta

SEQ ID NO: 429051 - DNA, 122 bp, Homo sapiens
tgagaaacagcccagcgcctgggcctcagataggcagggatctacaagagtttcctggtccgcacaggggattctgtaagatctccatggatactttccgaatctccatctccccggactgt

SEQ ID NO: 429052 - DNA, 122 bp, Homo sapiens
aatatgtttgcaatcaatttgctgtatacacaatatgctaccagagcaatcttttgtgtacgtagttgacctttatctctggcaatcttgtcctataaagaagagtgaaatcctccattgca

SEQ ID NO: 429053 - DNA, 122 bp, Homo sapiens
ggctcctgacagaaaaacgtgcgtggttgtccccacccctgggaggggttgccggtgccgcgcgcggccgcccagtcgccagcgctctctcctgggaggatccgctgccggaggaaggagtg

SEQ ID NO: 429054 - DNA, 122 bp, Homo sapiens
ctcagttttgtctcaaccactcccctggcttcttctcgcctccatctccccaggtgtccacgcttagcagctttctcaccgccgccaaaccttgcctgggcactgggaccgtgggtggccgc

SEQ ID NO: 429055 - DNA, 122 bp, Homo sapiens
cgaaatagctgtcaccttgctccggtgctgaagttcgggatgcggaactagctgagcatgcgtacttcctccctgccggccctccctccgtcccgttggctccgccctccgcggacgtgctg

SEQ ID NO: 429056 - DNA, 122 bp, Homo sapiens
gtttcgtttagactctgccacaaaacgccttcctgttcaagaagctgcaccttctttcagcgaggcctgtggctcagaagacctccccagataatgagtccttgctgggtctcagggaggcc

SEQ ID NO: 429057 - DNA, 122 bp, Homo sapiens
tggacagctttcaatatttggtatttgcacagtaaatactagttgattaattcagggagccggaagtagggagtactgacaagtacatctacctactttcaagtgtacagactctgtttctg

SEQ ID NO: 429058 - DNA, 122 bp, Homo sapiens
gaaaaggatggaaacgaagggcctttactcattgccaccattagatgtctcttatagacacggtgatctgtttatccccttcactgctggtggccatttgagtcgtttgaagatttagacta

SEQ ID NO: 429059 - DNA, 122 bp, Homo sapiens
tggcccaaagacaccagctgaaccagggcttcagaacatcagtagactccacatccagggcgctctgtctactaagccatgtttctaacctctctgctctgtcccacctcaaataaggccag

SEQ ID NO: 429060 - DNA, 122 bp, Homo sapiens
cacttagtgactatcacagccgaggccgggagtcagaaattcaggagccagtgagccaagcgccacagccagcaaagacaggtggggtcatcacggaaacagaacagccagtggttcacctg

SEQ ID NO: 429061 - DNA, 122 bp, Homo sapiens
cttggcaagcagcgccgctagttctgtgggtataataaacagcgagttacctatgatccgcgctcctgtttcctcatctttaaaatagcaataaagatagtcgttactgtgtagggttgtaa

SEQ ID NO: 429062 - DNA, 122 bp, Homo sapiens
gccctacaccgggacctcgttcggcgcggcgagtcggacgctcactccagccgccgccgccgccgcggctgctgcttcgccaccttggccgccatcttgactcaacccctctccctcccccc

SEQ ID NO: 429063 - DNA, 122 bp, Homo sapiens
ggcgggacgggataactgctgagcgggggttggagggctgcagtgtgggtcctgggccctcgctcacaattggaggaaagaattcaggaagtgctcacagctgctcagacatctcggagcca

SEQ ID NO: 429064 - DNA, 122 bp, Homo sapiens
ggcgccctccatcccgtcccacgccggcccctcctccgggagtgcaggctccagcccaagcggtgctcgcgccccccgcccaaagcccacgcgagacaaagcccgaggcttctccgcgcgcc

SEQ ID NO: 429065 - DNA, 122 bp, Homo sapiens
agcctcccttcagagggagggtggagggagaagggaggagggggaggaaacgcagaaaaacgcccgtgacaccacactaagaaaagcaagcacgttaaagggggcagctccgagaagcggac

SEQ ID NO: 429066 - DNA, 122 bp, Homo sapiens
cctgaggtggtcaggctacaattcgtttttatgtattattgggagacataagacatcaatcgaaacatgtaagatgtacattggtttggtcaaaagctaaaagccccacacgaagtgggggc

SEQ ID NO: 429067 - DNA, 122 bp, Homo sapiens
cttaacaattagcataattttgaaccgctccctaatacctaaccccaatcccaaaccggacggtcgagcctatccaccggcagagaacaccacccaatctcgccctcactctgacactcacc

SEQ ID NO: 429068 - DNA, 122 bp, Homo sapiens
gtgtcattagggcacagatggtaccttctctgagcaaacttccttcacagctcctcctcccgaggctgtaggtgactctactcttgtcacctggcacacagagttctatcgtacgatttagg

SEQ ID NO: 429069 - DNA, 122 bp, Homo sapiens
gtcctgcggctgcaccctaatggcggctttggcaaactccttcagcatcttcggcagctccggcgggatgcatgttggcttatctgtctgagccattgattggttggcctattctcaggaga

SEQ ID NO: 429070 - DNA, 122 bp, Homo sapiens
tcacttctatgcgtagccctggtgcccgccgcccacagccggaccgcactcctcggcctccgcctaacccctggctcagccacacgagtgacagctctgcccgcccgggcgggcgacgccga

SEQ ID NO: 429071 - DNA, 122 bp, Homo sapiens
cctccgcagccactggcccgggtgctaagtccctcattgcccggggccagcagggctggccgcctgctccgagtgcggagcccgccaagcccacgcccacccagaactccagctggctcgca

SEQ ID NO: 429072 - DNA, 122 bp, Homo sapiens
cacccctcccctcccctgagcaaatgctttcttttgactggaaacaaaacaggggctcggcgaaggctgaggtgaaatctgggtggcatgggcgccgcacaatggggccgctgttccccggc

SEQ ID NO: 429073 - DNA, 122 bp, Homo sapiens
ccagcacgttctccgagacccagcgctggtagtcgccctgggcggtgtgagctgccaggacgtgggccaggagcgagaaggccagcgtgctgtaatggcatctggaaggagagcagtggcaa

SEQ ID NO: 429074 - DNA, 122 bp, Homo sapiens
tttctttactcatcatgttgccaaagctatgttggaaatatcagcgagagtgttcaaaatcgtcctcaggcagggcccatccttccaccaaagtattgtggaaggctctacgagtaactgtt

SEQ ID NO: 429075 - DNA, 122 bp, Homo sapiens
ttgatgttataatgagatgaaacttttgggtctaggggtgagaacactttgccagatgaccgtgctttgggctcaggaaagcccttgaccagagcctggttctgcttcctgggtccacagtc

SEQ ID NO: 429076 - DNA, 122 bp, Homo sapiens
ggacagaatgctctagtgccggcagcctaggttctggtcacagttctgtcctgactcctccgagtgaccccggacaagctccggcctgtccccagcctcagcctcccatcctggcgcacctg

SEQ ID NO: 429077 - DNA, 122 bp, Homo sapiens
gtcctgtccagcacgcggcaggagctatcctggcctcagtgttaaaaggtggccctgggtcgaaggagtggcataaggtcccacttgggtgcttgataatgatctagagcctcgtgccctta

SEQ ID NO: 429078 - DNA, 122 bp, Homo sapiens
cctcccccaccaatgagcgccggacacccgagaaaggggcggggtctgcatcgccccaaccgcgagcggcttgtgaattgcagatgctgagaacttgataatgttgcttcaattggggccct

SEQ ID NO: 429079 - DNA, 122 bp, Homo sapiens
aaggggcattatagtgttcccacccttggctgttgtgagtggtgccactgtgaaggttcgcgtacaagaatctgtttgagtctatttccagttcttttgagtgcaaacctagcagtacagtt

SEQ ID NO: 429080 - DNA, 122 bp, Homo sapiens
gcatcttatcttcccataagatttgactgtactgcttattgcaaattatttcataaagtgcgtcctaaattcacctgataattgaagtagcagtttgttttagctaattgcctttatctgaa

SEQ ID NO: 429081 - DNA, 122 bp, Homo sapiens
aatgacaccagataaaaaagaccactaagctcagaaacatctatttggtatctgtatcttcggaactgtcttccactcagtatttaccaacacagttaaaaaccagcatatttacaatgctt

SEQ ID NO: 429082 - DNA, 122 bp, Homo sapiens
gacagccgtctcctctaaggcgcttcttttagccaagaaagcgttctttgcgtgctgtgacgtaaaaagcagcgccggaagggagagggcggaacttccggctgagccccagcgaccgctct

SEQ ID NO: 429083 - DNA, 122 bp, Homo sapiens
ccccacctcgtcgtcgtcgtcgtcgccgctgttgtcgtcgctgccgctgcggtcgagctccggggccctcagctccgctgggcaataacgttattccacacacgccccacacatagcggtaa

SEQ ID NO: 429084 - DNA, 122 bp, Homo sapiens
tcatcttggaaatatgaatgctagccaccacatccagcaaatcatttttgatgaggatgacgttggctgcctcgatgaccacatccgtgccagtgccagtggcaatgcccaagtctgcctgg

SEQ ID NO: 429085 - DNA, 122 bp, Homo sapiens
ctggggttgtatagtaaagaaaaagctgtgatgcaggtgtgctatccctcccaggccccccgtcccagtagccctgtctgatagcacctgcccagcccactgccccgagttacctggttgag

SEQ ID NO: 429086 - DNA, 122 bp, Homo sapiens
cctttcctagtcaaagaaaggggtgacacacggcacctggaaaatcgggtcacttccacccgaatactgcgcttttccaaccggcttaaaaaatggcgcatcagattatatcctgcacctgg

SEQ ID NO: 429087 - DNA, 122 bp, Homo sapiens
ggccccggccccggccccggcccgacgtcctctagcccctcttcccagcactcaggaccgcggatttcagatgaccaaaggccaccctgtgacaacagcgtcggaaccacggcacttccgcc

SEQ ID NO: 429088 - DNA, 122 bp, Homo sapiens
acaggcattcagggcaggagccaggagctcacatcctgggctcatatcctgcctcttccacgtaccggctgggtgacctcggacagatgacctaacctctgtgtctcagttttctcatctgt

SEQ ID NO: 429089 - DNA, 122 bp, Homo sapiens
cgggagttcatgggcctgggactcagacgcgaaaggatgctggggcgccatgggtgggggcgcggataaggaagaagcagaacggagggagggggctggatcagactggccaggctttcccc

SEQ ID NO: 429090 - DNA, 122 bp, Homo sapiens
ggctcatttttgtatttttaatagagatggattttcaccatattggtcaggctggtctctcggcctcccagagtgctcagattacagacgaagaatatttttaagaagggcaaaagcacatg

SEQ ID NO: 429091 - DNA, 122 bp, Homo sapiens
gtcatcaggtcccatcaaggctccttaaaagggtctcactctgtcacccaggctggagtacggtggctcgatcacagctcattgcagcctcttaactcctgggttcaagggatcctcctacc

SEQ ID NO: 429092 - DNA, 122 bp, Homo sapiens
ggtattgtgccggttactatagcatcaccttggaaagtctcacttggtgagagcggcaggcgagctggggtggggcaggagggggacgcggctggctggaggggctggagctaggccacgga

SEQ ID NO: 429093 - DNA, 122 bp, Homo sapiens
aaaaggggaataataatggaacctacctcatggtactgttaaaaagattaaatgacataacgcctgaaaagtactcagccaaatggctagcctggagtaagtggtgaataagtgtagttatt

SEQ ID NO: 429094 - DNA, 122 bp, Homo sapiens
ctggtccatgtcctaaccctgccggggatccttggtctggcagctgggtacttgcttccccgtcctgtccctttgccgatgtcccctaagtccccacaattctgccggacaatggttgacaa

SEQ ID NO: 429095 - DNA, 122 bp, Homo sapiens
gtataggaaatgaccctggtctgaactctacgctgagcaagtgaaatgccggcgaattatcgatctgtcgtgggaatccagtctcccttcctccttccgctgcagttacttctacttcccag

SEQ ID NO: 429096 - DNA, 122 bp, Homo sapiens
agctggctcttgagagaacctgtcatcaacatccctgtccccgtgggtgtcaggaaggttcggccttctttaaggtaggcactgtgtcctcatggactgttcattttgggaagaaccttggg

SEQ ID NO: 429097 - DNA, 122 bp, Homo sapiens
gagactgattctaactgcatctgcattctagttcccttacctaaaggagcaaactcagaacgcaaaatggaactgccatgatctctgcagatgcctttcttcaaagctgagttctgctatcc

SEQ ID NO: 429098 - DNA, 122 bp, Homo sapiens
gccaggcctcctggaaacggtgccggtgctgcagagcccgcgaggtgtctgggagttgggcgagagctgcagacttggaggctcttatacctccgtgcaggcggaaagtttgggggcagcag

SEQ ID NO: 429099 - DNA, 122 bp, Homo sapiens
ttctttgtagccacctcaggggaagcaacagatcgtcactcggtgttctcaccgaaagcacgtaatcgccggtgtaactcatgttggctggggggcctcccggcgcgcgcggagaggctggg

SEQ ID NO: 429100 - DNA, 122 bp, Homo sapiens
cttgatctcctgacctcgtgattcgcccgccttggcctcccaaagtgctgggattacaggcgtgagccaccacgcccacctgatgaatgatctttttaatgtattgttgaatttggtatggt

SEQ ID NO: 429101 - DNA, 122 bp, Homo sapiens
agatctgcatttcacccaacatccactgtccatttcccagctgccgcgaaccgtgcggatcgcagtcagatgtatttgctggggctcatgtccccacaattggaacaagaaagtgaacacta

SEQ ID NO: 429102 - DNA, 122 bp, Homo sapiens
gcccaccgggccgtgcttgctgccagcagctcctacttccgggacctgttcaacaacagccgcagcgccgtggtggagctgccggcggctgtgcagccccagtctttccagcagatcctcag

SEQ ID NO: 429103 - DNA, 122 bp, Homo sapiens
ggactgtcctacggggctagcaggaaaaggagatcggctctctccgctcccggtggaaaacgagaaggtcgccagaggtcctgttttcggggtgatctaaagcccccgccccagcgctacag

SEQ ID NO: 429104 - DNA, 122 bp, Homo sapiens
tgtcggttaagacatgaagaaattagctatcaaactccaaagagtggtgacagactaagacgcagatttccaaaggtggctgagaacctgctggacaactgtcccccagtgagaggaagggc

SEQ ID NO: 429105 - DNA, 122 bp, Homo sapiens
aaagaacttttcctctgctcctaactgtactgtagaaggtctttttcaccatttgcaaagcgcggaacccctctgggactgccctttcccggatccctaaagaggtaggattagcggtgctg

SEQ ID NO: 429106 - DNA, 122 bp, Homo sapiens
gaaaagaaagagaccagctcaggctcaggaaaagagagagacccagagaaaaggagcactcgaggctgagacagatctggacagagatacagagacagggaccagcagacccagtactgggg

SEQ ID NO: 429107 - DNA, 122 bp, Homo sapiens
tggccccgcctccttgagtggtgcggagctttgtgatgcggagcttcgtgatgcacgccccgatgcctgcggggctataaaaacgctcgcaagcgccaagtctcctcaggagccgccggcaa

SEQ ID NO: 429108 - DNA, 122 bp, Homo sapiens
agaccttcatctggggctgctgctggtctattcctttccgtgcacttctactgacacacccgagcatcatgatacctaactcaactcgactttaggtttaaaaagaattaaaatcactaggt

SEQ ID NO: 429109 - DNA, 122 bp, Homo sapiens
aagtctccactcacccagaaagtccaaatggcttcacttctcagaaggatccctccatctcgggctcctagaggcttcaggcaggaggagccacgtgagagagaaaccctgcctacggtgac

SEQ ID NO: 429110 - DNA, 122 bp, Homo sapiens
gccctggggcgacagcgactggcggtcggggtgcgtacctggatggcagtgcagggcctgcgagtgctcacagcggctcccggtgaagccagctgggcagacgcacacgtagctgctgctct

SEQ ID NO: 429111 - DNA, 122 bp, Homo sapiens
cgtgctctgcgcgggtttccggggctctcacgtgctctgtgagtcggtttccaggactctcgcgtgctctgcgcgggtgtgcggggctctcgcgtgctctgtgtgggttggtttccaggact

SEQ ID NO: 429112 - DNA, 122 bp, Homo sapiens
ctcctgggttcaagcaattctcctgcctcactgtcctgattagctgagactacaggcacgcgccaccatgcccagctaattttggtatttttagtagagatgggggtttcatcatgttggcc

SEQ ID NO: 429113 - DNA, 122 bp, Homo sapiens
cctaggtgactactgcagaagtgatcggtagactgggggttttgtttaattccccaaccccgatttccatttcttgacagctgaggttacaaaagaaaggcagccccaaggagctgatgatg

SEQ ID NO: 429114 - DNA, 122 bp, Homo sapiens
tggttgtcccctccacagcgccctgcagcctcatgctgctgctttataggaggggacccacgggccgtgtttatttgccacctgggtgattttttgacttggtgacaggactgtgctcctct

SEQ ID NO: 429115 - DNA, 122 bp, Homo sapiens
ggatgggggtctccaggggagcaaatccacagtaacacactgggcttctcccagatccaccggacattcctgatgagtgaccctggctgcagatggctcttggtgagtctccgttgaccggg

SEQ ID NO: 429116 - DNA, 122 bp, Homo sapiens
gcacctgctcccacagaagggggaacgcaaggggcgtcccaagacctcatctgcctgcagcgtcacaccgatggcctggcctcggcttctcattatttgcaactgccatggatgtttacagg

SEQ ID NO: 429117 - DNA, 122 bp, Homo sapiens
cccagctcctggccagtccccagctcctccctgcctggccctatcccaggatcccctccccggcctcccagctatgatctaccccggggcccagacttcaggcgccttcacgatgccggcgg

SEQ ID NO: 429118 - DNA, 122 bp, Homo sapiens
ccgccttcgctaggtgtaaactggctcctgggcgcagtgactaatacctcctgctctaggcggcccccaccccctttccctcaagggtcagctgggaggaagcaggaaatagatcacatggc

SEQ ID NO: 429119 - DNA, 122 bp, Homo sapiens
tttttcttgaaaccttctgttgagaacttttacactctggtgataagcacggccctggaccgggagaccagatccgaatacaacatcaccatcaccgtcaccgacttcgggacacccaggct

SEQ ID NO: 429120 - DNA, 122 bp, Homo sapiens
actgaacggggtcctcagcacgccccatgtgtccacaggggccctcccaccagctcagtgcgtcctgcccaaaagtgagtgaccttcaccgcccacaccctgcttacagcagttgcgtttgt

SEQ ID NO: 429121 - DNA, 122 bp, Homo sapiens
cctacttttacaggttaggtggctgaggcctccattccccgggttacagagacacctgcccggagggagccctgctggtggcctgcatcctctccctgggttctggcgcagctcacagtctg

SEQ ID NO: 429122 - DNA, 122 bp, Homo sapiens
agcccttggctggtgtaaatgatgacttcacttttttccccatcagatcgacaatgctgacgtcttatattttgccagttagttctgatacatcggcctcaaaaggcccggccttgttcgtt

SEQ ID NO: 429123 - DNA, 122 bp, Homo sapiens
cgcctggaactctgggaggtgcttatttctgggcacgccccctttcccctctgagccaatcggagcagggccgagagcgcaccgggcactggcttcctttcccggagctctgggctttcctc

SEQ ID NO: 429124 - DNA, 122 bp, Homo sapiens
gcagtcggtgctcctccctgagccgcggcgcgcaaggaccccagccggttgtccttgcagcgcttcccaaatcaggcagaagtgaggcagccccacccagtcacgaggaccctgcagaactc

SEQ ID NO: 429125 - DNA, 122 bp, Homo sapiens
cccggcctttcggtggagggcagcttgcccctgtatgttgcgcccttccgtgggtcagaccggcggcaaggtgaggcggcggcggcagcagcagccgccttgggctcctggacgcgctcccg

SEQ ID NO: 429126 - DNA, 122 bp, Homo sapiens
aacaatgaacttctctctgactctctgacacacacacacacacacacactcgccccccgacgggaagttgtgaactactagcccgagggccaatggcgcgactccccaggcaacacggcggc

SEQ ID NO: 429127 - DNA, 122 bp, Homo sapiens
aatatgtgttccaggttaggaaacaaaggcctagaggtaggaatgaacaggttgtttctccgatccagtgtggcttgaatgtaacattctcagtcagtgtatcacttcccatttcgtgacat

SEQ ID NO: 429128 - DNA, 122 bp, Homo sapiens
acaagccacaaaaggccttttttcattaatcctctgttcttctgagcctagctctgaaaacgtcagaaatagcatctagaaagcagagagtagtagaaggagaagcagagaagtagaaatgt

SEQ ID NO: 429129 - DNA, 122 bp, Homo sapiens
ttgtcagacctccacttctggagatgtggttttccagagaggagcctgggctggagaggccgcaacagggagagagtgtacatgtggactattgttaatgttgataaggtaaggatgacaga

SEQ ID NO: 429130 - DNA, 122 bp, Homo sapiens
accgcgagccacgcgcagcccaggttcttcctcgaagaggggcagcggagacgccatctgcgcagcctggattctccagggtatggtcagcaacggagtgcccaagcccctgctcattccat

SEQ ID NO: 429131 - DNA, 122 bp, Homo sapiens
gatttttgatgttggaatgagggttaaggtttacttaaaaagcagcgaaagtttgttaagcgcttgtttttaattaagcactctatatactgtgctttgagaggggaaggaaaaaaacatga

SEQ ID NO: 429132 - DNA, 122 bp, Homo sapiens
aagtccttctcctcaagatactcggctgcgtctggccccgcccctcactgagttccgccccgggcgcaacctcatcttatggcaccgattggctggcccctgtgcgtgaggacgttgcgccg

SEQ ID NO: 429133 - DNA, 122 bp, Homo sapiens
gctcagcccagcaagtggctcccggggcccgagacgccgccgcccgcccttcaccgagtccggtgactccgcaagcgccctcaaaacgcctttcctgacagaaatgtcccccagctcccacg

SEQ ID NO: 429134 - DNA, 122 bp, Homo sapiens
tgtccaacagtctgcatttcctatctaggcacaaacaggcaacacttcataacccagtggcggccctggacccaggaggtttgtgcagtcatggacagctacacaggcgcctgccatggacg

SEQ ID NO: 429135 - DNA, 122 bp, Homo sapiens
ctcgggcttcttggccctgggcggagtgggattgggtgtcccggctgttcgcagtggccgcgagtgcggccggacctggagtagtacctgagccgctctggccgagcaaggcgcggggcccc

SEQ ID NO: 429136 - DNA, 122 bp, Homo sapiens
atccctacctgaggcaatccgagaagttattttcaactatgagggcagagaggctttaatcggcatgagttgtgcaagttcatgcagtgtgtaaatagttgtgccggaatttgaacccagat

SEQ ID NO: 429137 - DNA, 122 bp, Homo sapiens
cagtgcttgaggggcctttcagcctgcggctgcactgtgggagcccctctctgtgctggccgaggccggagctggctccctcagcttgtggggaggtgtggagggagaggcgcgggcaggaa

SEQ ID NO: 429138 - DNA, 122 bp, Homo sapiens
gtctccctttatggagggttggggttgggcgctccgcagtcctcccagggccgctctgaccggccgctctgtaacttctcgcctcctcttcgccgtccctcccacagcggctgctcggctcc

SEQ ID NO: 429139 - DNA, 122 bp, Homo sapiens
gaagtaaaattgttaaacgccccccgcccccaagcattacagatggcttatagctgtcaacggggttggtagaggtcagaaagggaagtgttctaggccagaatgttcctatttagaagaca

SEQ ID NO: 429140 - DNA, 122 bp, Homo sapiens
acgctcctctggattcaggcacatggaacttaaccttcaaattgcagtatggtcttttctcgctttttcctttctctcttccctcccccctttccctcccctcctctcctttctcctccccc

SEQ ID NO: 429141 - DNA, 122 bp, Homo sapiens
ttagtccagtccagtccaccctgggatcccccagttcccctttcctaccctatagggagccgctgcatcctccaggaagcgcatggtgtgggtagcgtgctccccagcctcccggcacacca

SEQ ID NO: 429142 - DNA, 122 bp, Homo sapiens
ccgcgctgctccgggagccgctgtggcagcgtatgctgccacggggactgaagatggcgccgcgaggtgagattccggaggtgtgtgagtcgctggtccctttcccttcggtcgctccctcc

SEQ ID NO: 429143 - DNA, 122 bp, Homo sapiens
cgacagagggcgccacggcgtccgcgacggaccccgcccccaggcagtgcgccgcgctcccgtgacgtatttccgcgtcatctgccgccgaggcttgcccccattggttgtctgcgaggcaa

SEQ ID NO: 429144 - DNA, 122 bp, Homo sapiens
acctggggcgggggcggcagcgaggactgtgagtgcgtggatctagctggggccgggctccgccaccgtctcgcgtcgcgaccttggtcaagcccttacccgggccctgtccctctggggag

SEQ ID NO: 429145 - DNA, 122 bp, Homo sapiens
cctgggggaacggccttgcttaaatcccaccctaggagcagctggaccgaaacagtctttcgccaccggggagccatgcccctcgtctgccctccctgcacacacctcttgggcggcagcta

SEQ ID NO: 429146 - DNA, 122 bp, Homo sapiens
gtttctctgtgaatttacgcaccgagagcagagcgggtccagtgcgtagcgtacggacggcgcccacccccagctgccagggcctcggcgggcagggcgcggcgggtgacgggaccgcgcgc

SEQ ID NO: 429147 - DNA, 122 bp, Homo sapiens
tgatggaaggccattccacatacctcacatttgtgaggcttctctccagtgtgaattcttcgatgattggtcaagtttgacttcccactgaaagctttcccacactctaaacatttgtaagg

SEQ ID NO: 429148 - DNA, 122 bp, Homo sapiens
ggtctttccctgcacagtcacttcagcggcggcgtcgctggggctgaggccgggtgactgcggctaggcatgcggatttagttccccgcctgtcatctttgtggctccttgtgggggagggg

SEQ ID NO: 429149 - DNA, 122 bp, Homo sapiens
tctaattcaacacggaatgttgagcttctgagcgtgatatagcggaagtgccttctcttccggtctctctggtcttggccgcagaagccagatgacgaagggaacgtcattgtttggaaagc

SEQ ID NO: 429150 - DNA, 122 bp, Homo sapiens
gaataaagacataggaaaaatggtctcatacaactaattagagtcctcacagagcacacacgaaccttttgagcaagggtttgttgactgaataaaacacaaacaaaaacagacattgaaag

SEQ ID NO: 429151 - DNA, 122 bp, Homo sapiens
gggggaggaaccggtggagaggccccagtctggacctaaaaccagcgagagctcaggtttcgggagccccgaagaggtgccgcgctgggaggcagacaaggaagcccagggtgctcggaacc

SEQ ID NO: 429152 - DNA, 122 bp, Homo sapiens
accatatcgaaaacacgtttaggttctctgagtatgcatgcgaagccgccatgtacactgcgtttcttgctccaggtaggctctaagcctggaactggtagggatagagtgcagaaagcagg

SEQ ID NO: 429153 - DNA, 122 bp, Homo sapiens
taggctcctactgccttagtaagtctcgtaataagttacctaataaaaatggtgtaaattcgttttcggcttggttctcaaagaaatcaggagacatgtcagcttcttaatgaccttatagc

SEQ ID NO: 429154 - DNA, 122 bp, Homo sapiens
tcctccgccccctgcagggggcggtaatgacagagtcctaatttccggttccggcagtaccggtagcccagtcgagatggaggaagatgcgaccggcagacggcattcgctgggaacgacgg

SEQ ID NO: 429155 - DNA, 122 bp, Homo sapiens
gccccatggcgccatcactccacggccccatcaccccacggccccgtcgccccacggcctcgtcgccccacagccccgtcgccccacggtcccatcaccccatggccccgtcatttcagcac

SEQ ID NO: 429156 - DNA, 122 bp, Homo sapiens
atgatttgagtcggtcttgccagatgtgtctggagagaatttaactccaagatcatcccccgtgcactctgaggggctgggacaggatgtggtgccctttgtgcccaggaggagaagcaccc

SEQ ID NO: 429157 - DNA, 122 bp, Homo sapiens
gctgcacgaactcctcggcagaggtgcagcgctgtgcggtaccgatcagaaactgggcgacgtgccgctcgctcagccccaacaccgagtgcagctcgtcctgaacccagcgctccagaccc

SEQ ID NO: 429158 - DNA, 122 bp, Homo sapiens
gctgtgctgctgctgaccgacggggacgtgcacatccgtggtgggtgcctgcaggcctcccgcccaccccgctctgcagctgctcctccggggcctggcctcaccacagttccccaccatct

SEQ ID NO: 429159 - DNA, 122 bp, Homo sapiens
tggcgccttctacatccctgtggctttgattctgctcatcacctggatctatttcctgtgcgccgggctacgcttacggggtcctctggcacagaaccccaaggcgggcaacagcagggcct

SEQ ID NO: 429160 - DNA, 122 bp, Homo sapiens
gaaggtgatcccgcacgtaaagattccggactgccaagctcatgccacgcccagagacttcggaattctcaacaatgcaaaggcgtcctgctggccaaacacaatgagtctgcaggctgaaa

SEQ ID NO: 429161 - DNA, 122 bp, Homo sapiens
ccctgggaggcagggagggcgtcagctggctctgcggatgccgggagagggcggcggcgccggaagtcgaggctccctcagcattggctctgccctagcttctgctctgggtgtcccatgag

SEQ ID NO: 429162 - DNA, 122 bp, Homo sapiens
ggggcgcgcgaggggcgcagcgcccggagggctgcccgggggaacctggagcccccgccccgggcctcccgacccgctcgcccgctccggcctggtctgcagcagagactgcggcggcggcc

SEQ ID NO: 429163 - DNA, 122 bp, Homo sapiens
gcctgtttgaagcaagactatgaagaccgaaacacaccgggagcctaaggcaccactccccgctacctaccgaggtgcatcctgcaggctccttaccgcaagcctgcaaactcgccctgccg

SEQ ID NO: 429164 - DNA, 122 bp, Homo sapiens
caggtacaactgccgagggtggaaacggagcttcttccgcctgccaagggagcacgggagcggggagagaaggggagctcctcagattccagcatcagcctcgacaccactcctctggcctc

SEQ ID NO: 429165 - DNA, 122 bp, Homo sapiens
ccataacagttttaaaaattctggattaaacaacccaaacaactaatgaaatcaactccccgtcaaaagcacatctgggaatgcttctccaaaaaatattattgtaattgactaaaatttaa

SEQ ID NO: 429166 - DNA, 122 bp, Homo sapiens
gcacgcgggccacacctggggggcctgtctccagtcagcgcgcgggccaggcggggtgggcgcgcgcgcgtgggggagtccccggtccctgtcaggggcggggcgagaccaaggcgccgggc

SEQ ID NO: 429167 - DNA, 122 bp, Homo sapiens
acagcctccgaacctctaggtgatggacgaggcagactgcagtcatgaggctctcattttcgcttgtttactgcggtttgcagaactctaaattcctattcctccagggagcatgaaaacac

SEQ ID NO: 429168 - DNA, 122 bp, Homo sapiens
attaggaagccggcagcccgcgggtgatgcttccgaggcaccagtgactcagtccacaaacgtgggcgtaaaaggcctcatgattcaggtggagtgatggtgcgatgcgtggtgcagtgata

SEQ ID NO: 429169 - DNA, 122 bp, Homo sapiens
cgcgtccggccacccgcgggtgggaaacgggcaggggcgccggcagccgccctcccactacggccactgacaacctggaggccaaaggaaaactgagcccaaatgcacgcacccccttcagc

SEQ ID NO: 429170 - DNA, 122 bp, Homo sapiens
cctgtcccgccaggggcagcttcctgtccccaaagagctgccggaggtcgtcggcggtgacggcggggctcaggttcccgatgtaaagcttgttcatcatccgtctcttccccgagagcccg

SEQ ID NO: 429171 - DNA, 122 bp, Homo sapiens
ccaacagacccaggtgtgcaccaaccccttcatgtctaccatcccatgaggcctttagaacgtgtatgtaaccgaccacacctttgtcccactttattactgatgtttttactgccaaggag

SEQ ID NO: 429172 - DNA, 122 bp, Homo sapiens
cccggggggctccaggcctgcccgcaagaggagctttaatttgtccaaactaacacagggcgcgccctcacgtggtcggctggggcaacgtgaactgcgctaggacatcctcgggggttttc

SEQ ID NO: 429173 - DNA, 122 bp, Homo sapiens
gccaattctaggcagaccaggggagccaagcaaggcactatctcacgtccaactcccactcgcaggacctccgccagggttcatgaatctacttcggcacagccaatgtctgtactgactgc

SEQ ID NO: 429174 - DNA, 122 bp, Homo sapiens
gtgccttaccttgggagtagcctgcaccgcttccagagactgccttctctctgctttcctcgtgaacacatttctttaaataacactccctgttacatgccttctgttgttctccagaaatc

SEQ ID NO: 429175 - DNA, 122 bp, Homo sapiens
ggcgcgctccctcctcccttttttcctccctatggtgggcagttggtgacacacagtaaacgctcaataaatgtttccgctactcgatctccttggaattaaggggatgctcctgagcgccc

SEQ ID NO: 429176 - DNA, 122 bp, Homo sapiens
tgaattgctctgttctaagctagagggcttcgtgggttgagcgtattttgcatgccatcacgagtctaaaaggcccaggctacattttagacttctactggtctgatcattaagctatcacc

SEQ ID NO: 429177 - DNA, 122 bp, Homo sapiens
atcccgagagctccccaacagctaacacgaagcggtgcgttttaacaagagcctgggtgccggcgggctgaggcgtaaaatggcgtcagcccccaaaatggcgtcagccccaagtgaggacg

SEQ ID NO: 429178 - DNA, 122 bp, Homo sapiens
attttgttcaacactgtgtcccagactaaacccattctgcaattcacattgtgtcctgagcgaatgaatggatggatgaatgaatgaagtactgagtggggaagagcacagtcttcagacag

SEQ ID NO: 429179 - DNA, 122 bp, Homo sapiens
gcgaggggcacaggggcagcagtagggcctcgggggcaggaggcgcgaaggcggagggcgcgcaacccgcgcgggccccaaacacacacgacacacacgcccggcgggggcggggctctccc

SEQ ID NO: 429180 - DNA, 122 bp, Homo sapiens
gcgtacatctgaaattcaaccaggagtccggagccctcattcctctctgcctaaggtgagcgagacagccctgccacacagtttaccccacagcacccagctcagcctccagggggcacttc

SEQ ID NO: 429181 - DNA, 122 bp, Homo sapiens
gaccctgtggggtgagagggactggtgagccagcctgcatggcacctggagtcccccgtgcggcttgcatcccccttccaccagccgtgcctggttcacggtgggccctacagagccctgaa

SEQ ID NO: 429182 - DNA, 122 bp, Homo sapiens
ccctcacggagaggatctgtggatcggagtcgggggtccggcgtgggggcgaacccggcacgctgtcacaggggtttacaaccaggatgacctttattacctgggtgacacaggtggataga

SEQ ID NO: 429183 - DNA, 122 bp, Homo sapiens
tccctcagcgagcacccggggagagctgtcctaggagagtctgtagagtccctcgattaccggtcgcaaacgcctttgggagcgcagtctgctgcgagcgccgaagggtgagacgcacggcg

SEQ ID NO: 429184 - DNA, 122 bp, Homo sapiens
ttggcagaagcttggaggagggaggaggatcatcaattattagccattgatttgcttgaacgtctttgtgtcctgctaaaccagaagtcacaaaaggagctgcttttgttaccatttctccc

SEQ ID NO: 429185 - DNA, 122 bp, Homo sapiens
acctcgtgatccacctgccttggcctcccaaagtgctgggattacaggtgtgagccactgcgcctggcctaaggagataattatttaccacattgtagtgaattcagtcaggcagctaattt

SEQ ID NO: 429186 - DNA, 122 bp, Homo sapiens
cggctaggggtgtgggcttgaggtggccggtttgttagggagtcgtgtacgtgccttggtcgcttctgtagctccgagggcaggttgcggaagaaagcccaggcggtctgtggcccagagga

SEQ ID NO: 429187 - DNA, 122 bp, Homo sapiens
cctctgggtcttaccttcactgaggtttctacccgacaggtttaactggccgctcttcctcgctgccttcaacagcccttggggtaccgaggtaccgcagtctcttccacctgctttgaaac

SEQ ID NO: 429188 - DNA, 122 bp, Homo sapiens
tctaacattggggcctcgtttcagtcttcaagttttttcttttttagcgcaaactagacgcgctctgagagccaaaattagcgtccgcgaaccccaccccattgcctccaacagacctagct

SEQ ID NO: 429189 - DNA, 122 bp, Homo sapiens
tgaagcgcctgcctcccggccagagtccgctgccttttagtagcttataacatcaggtgacgcctccagccctcccattccccgccccagcccggataaacgtcctccgtgaccttagaagt

SEQ ID NO: 429190 - DNA, 122 bp, Homo sapiens
actccatggacaccgccccccagctcaactgagacgcccccgccactcaccgcggtcaaccggacgtcccaggaacagctgccgcgacttcaaaaccagcttggaaaccgtccgggccgagg

SEQ ID NO: 429191 - DNA, 122 bp, Homo sapiens
tgactaaagatgcaagtgcctaaaaggttgcgttgggcaggaggcgcttggagggcagcgcgggttcccagccattccttgggtccaggtcgaggaaggcctcgggagacgagtcccacagt

SEQ ID NO: 429192 - DNA, 122 bp, Homo sapiens
gtaatacttgacctccctgaacatctcctcaggaactttgggcgcctggtccgacatgatcgcggcggcccgggaggctccgcggcggcgcccggccccgcccaccccccgcccccggcccc

SEQ ID NO: 429193 - DNA, 122 bp, Homo sapiens
ggcctctggctggattcttagcagatggaagccgtgcaagggcaggaggcaggggcctgacgtgtttggattgaggttgcaggaggggcccctggctgcttcagggagaataatttggaggc

SEQ ID NO: 429194 - DNA, 122 bp, Homo sapiens
accctgcggccctcgcgagctccatgttctcctctttgggacaagttgttgaaatggttccggagttgggatcggggctgttacataacgcccacccgaggggcgaggagcggggctgacgc

SEQ ID NO: 429195 - DNA, 122 bp, Homo sapiens
atgaaagaagaaggcctgccccagtggggtctgtgaattcccgggggtgatttcactccccggggctgtcccaggcttgtccctgctacccccacccagcctttcctgaggcctcaagcctg

SEQ ID NO: 429196 - DNA, 122 bp, Homo sapiens
agggaggaaaggaaaggcagccaggggcgtatgtaatcagcagtgagagttcggggagcccgggcaggggaatgtcccgggtcgtagccagactccatctctttcccaaacaaaagaaaact

SEQ ID NO: 429197 - DNA, 122 bp, Homo sapiens
ttggggctctccgggtggttgttgccaagtgtgggctgcgcgggcgcgggcgcgggggcgcggtgcaggctgcgctgcccggccttcctgcccacggcggcgccggcgttgctgtgggctag

SEQ ID NO: 429198 - DNA, 122 bp, Homo sapiens
cccgactcttcgtagccgctcgcagcggccttggcatcacgagtcctgggaggggtcaggcgcggagagcagataatagcagccacggtgcttcttcccgactgtttgagatccgggccccg

SEQ ID NO: 429199 - DNA, 122 bp, Homo sapiens
tcttttctcctaatactcaaaatcctggcgcgtccttggacccctggcacgttagaagctcgagttcctcggcacccaccttgcgacggcgtagggtgtccaggcgcagccctgtgcccagg

SEQ ID NO: 429200 - DNA, 122 bp, Homo sapiens
cccatctgagatgtgaagagcgcctctgcccggccgccaccccgactgggaggtgaggagcgtctctgactggcggccccgtctgagaactgaggagcccctctgcccggccgccgccccgt

SEQ ID NO: 429201 - DNA, 122 bp, Homo sapiens
cgaccacgtatccctgagtttcctaacttagttcaccccttttcctccaagtcagcagcccggtgagcattccagggtcagtcctggtgctcaaagtaagggcaatcttccatctctgcctg

SEQ ID NO: 429202 - DNA, 122 bp, Homo sapiens
acgcgagggccagcttggtgccccttagcacctagggggtggggctggcgctcagaaagacgccctcaggcccagcccagagaaggccctgcacccgcccatggggcttttggaactgggtc

SEQ ID NO: 429203 - DNA, 122 bp, Homo sapiens
ggtggctggaagagcggagagccagcgaccgccgatctgttagctcgtgcgacccagcggcgggggtcctccactgttcatttctctacaactgaaggaaaatactgtgtgttgagcacctg

SEQ ID NO: 429204 - DNA, 122 bp, Homo sapiens
agaaaaatagcagagtataactttgccattttaaacagaaggtcggggtcctaatgaaagcgttttcttggttcaggatttctgtgggtatttctgccagggagaggctagaagcaggagag

SEQ ID NO: 429205 - DNA, 122 bp, Homo sapiens
gctcctggcccctgggtaactgctaacctcaacggaggagcgggccggccttggaaacgccgttccagggcccctcgctggttccacggatgcctttttgtggttggataaaggaagctcat

SEQ ID NO: 429206 - DNA, 122 bp, Homo sapiens
cgctgaccgacaggcagacggactcggtattggagctgaaggcggcggcagagaacttgccggtgccagctgaggtgaggtgatgggcaggaaccgggccggggcgatggggctgggattct

SEQ ID NO: 429207 - DNA, 122 bp, Homo sapiens
caatagtaggagtgttgtgaatctaagaatagggaccttggttaaaaagtctcatttcagcgttagcggctgccaagaaatgaaagttctgtatagtatttgatcatattgcttccagaagt

SEQ ID NO: 429208 - DNA, 122 bp, Homo sapiens
tctgggaggtggggagtgcctctgcctggccgccctgtctgggaagtgggcacctctgcccggccaccccatctgggaggtaaggggtgtctctgcccggctgccccgcctgggaagtgaag

SEQ ID NO: 429209 - DNA, 122 bp, Homo sapiens
gaggggcgtgtgaggtcgcgtgtgtgaggggcgtgtgagaggtcgcgtgtgagagggccgcgtgtgtgtgaggggcgtgtgtgagagggccgcgtgtgtgtgaggggcgtgtgtgatagggc

SEQ ID NO: 429210 - DNA, 122 bp, Homo sapiens
tgggcagtgggaccagagcccctctgtggccctggccctgccctgcacccacctggcctgcgctagcagagctcgcacgtccccaatggtgttgtcaggctgcatcatcagtaggaaggcct

SEQ ID NO: 429211 - DNA, 122 bp, Homo sapiens
tttgtatttaaggaactgtttcagttcataccttccactgcgataggaatcatgtctggtcgcggcaaaggcggaaaaggcttggggaagggtggtgctaagcgccatcgtaaggtgctccg

SEQ ID NO: 429212 - DNA, 122 bp, Homo sapiens
gttgtcaccctagctggacctggtaagcttgtgctggggaacgctaactccagcattaagcgctcgccgcctcggtcctgaggagggcagtgacgggtacggccgctcactcccagctcggc

SEQ ID NO: 429213 - DNA, 122 bp, Homo sapiens
aggagagatggggcccatgggaagtgctgccggacaggctgtgtatcttaggatgcctcccgcatgcatggactttgagtctttgaggctggctggaccggggcagcactcgcgggccactt

SEQ ID NO: 429214 - DNA, 122 bp, Homo sapiens
cagttcccagaggatgaccttagcacactcctggattttgagctgccctggctaaggagccgcaccccagtcctcgcccgcagctcaccgaagatgaagttgtctggcctgaagacctgccc

SEQ ID NO: 429215 - DNA, 122 bp, Homo sapiens
cccgacgccagatccagagtctaacgtgcgaggtggacgggctgcgcggcacggtgagtacgaagctgcgcgctcgggcccggggagcggacgatgaaatgttctgcaactggccccttcca

SEQ ID NO: 429216 - DNA, 122 bp, Homo sapiens
gtctcccagccttatctcaatgtggattgcaacaaactgggcctcatctagggggcagggcggccagacagtagaggagacccaaacccttttgcatcaagcactgttgagagacctggcag

SEQ ID NO: 429217 - DNA, 122 bp, Homo sapiens
gttcggtaaagaatgaggtgtctgtctgttggccgctgaaataccgagcccgagtgaagccgaaaagtgagggaggagatgaatgcgctgtaagaggcggattcatcggaggagaaaataaa

SEQ ID NO: 429218 - DNA, 122 bp, Homo sapiens
ccccagggcctggctatcgggctatgcggccctgctgcagtctgaagctgcttcctactgcgaggcttgggcagcatccaaatagccatcagccacagccgcatccgtatccgtgccttgtg

SEQ ID NO: 429219 - DNA, 122 bp, Homo sapiens
ccctcttcccagagggaatttctttcagaaattccagggtgggcttgtaaaagacgcttccgcagagcaggtcccgtcagggtctttttcctgttcctggtgccagcggtcggcccgggcgc

SEQ ID NO: 429220 - DNA, 122 bp, Homo sapiens
ggaaaagaacgggaataagttgtcttttatatttcctcaaatactgtgaatggtctgaggcgcaggtcaggtgtatttaaaaacctttaaacagtattcccccgccccaaaaactggccttg

SEQ ID NO: 429221 - DNA, 122 bp, Homo sapiens
caggctggaatgtagaggcgagatctcagctcactgaaacctgtgcctccccggttcaagcgattctcctgccacagcctcctgagtagctgggattacaggcatgcgccaccatgcccagc

SEQ ID NO: 429222 - DNA, 122 bp, Homo sapiens
agagagctgccagcagtgtcccgggtggtgcaggctctggaaactccacctgtctgtccccgactctgggagggaaaaggggaccattcaaatctccacccggtcactccctccctaagacc

SEQ ID NO: 429223 - DNA, 122 bp, Homo sapiens
ctgtaaaacgcggaaacacccgcagctcctctttttctctacctactttgtcgcacattacgcaataatgtacagaaattgctccaggcctcccacgtgacaatgcctccgcctgccacgca

SEQ ID NO: 429224 - DNA, 122 bp, Homo sapiens
cgctgccgctggcgccgctcctcctccgtgtcagttgttgggctgtaatggcgactgggccgcccctgacgaagtgactcccgggccggggagcggggccagacctgcgccagagagaactg

SEQ ID NO: 429225 - DNA, 122 bp, Homo sapiens
tttcaatgagcagaggccacattcattccccagtcagtgactggcgttaatgactgagggcgcagcaaatgtcaccaggaaagtctttacaaaaagacatcatcccgaaggctttctagacc

SEQ ID NO: 429226 - DNA, 122 bp, Homo sapiens
tggactgatttcctttgtctctgcctccatctcctaggatgctcaggacccagtcagcggcgggatcaagaaaaacaggcagggtttcaatgtcaaccaaggcaattagggaggttaacaaa

SEQ ID NO: 429227 - DNA, 122 bp, Homo sapiens
gctgccgccgccgccgccgccgccgccctccgcagcccagctcgcgccccgcggcagctccgcagtgcactagccaccaccgccgccgccgccgctccgccagacctgctgccagcttgccc

SEQ ID NO: 429228 - DNA, 122 bp, Homo sapiens
agccactgcaccctgccttccaaattaaaaactttttaaaacctcgtacctcgccgtgggcggcgaccgtcgcggactcgccgggaagacggccccacggagccgggaacaccgcccgctgt

SEQ ID NO: 429229 - DNA, 122 bp, Homo sapiens
ctgttgctaggcgactgcctggcgtctcagccgtgcgactctgtctccctctacccggcgcggtcacgtgacacgcctgactgccctgtggctgcgacccggacctggaatttctagagctc

SEQ ID NO: 429230 - DNA, 122 bp, Homo sapiens
ctgttcgcttttgcaagatcttggaatctctgtttgttcacatcacaactcaagaggatacgttctcattctcccaatgtttgtcttctgcccattgcatcaaattgctcttccttgtttgg

SEQ ID NO: 429231 - DNA, 122 bp, Homo sapiens
atccccgtgctctttattccaatttcttcttcctccagaaggttctgcacagctcccaagcgtgaattaaactgaaaggtgtcaaacaccgcagttccagagttgagtctggaggtggaaga

SEQ ID NO: 429232 - DNA, 122 bp, Homo sapiens
agtgcaggcttgagggaagcatggaggtccatggcaagcccaaggctagcccgagttgttcgtcgcccacccgggattcctcaggagtcccagtgtccaaggagctgctgacggcgggaagc

SEQ ID NO: 429233 - DNA, 122 bp, Homo sapiens
tcttttttgtgcttgtttcactttgcataattttagcatgatatcgtccagctccatctacgttgttgcaagtggcattttttttaaaggctgagtattagtgcactgtgttttatacacac

SEQ ID NO: 429234 - DNA, 122 bp, Homo sapiens
taacatcatgatgaacgattaggaaatatttcgggaagatctgggcgcctcatcctcatccgccgtccacaagcggtccctgccacaaaggacacagggcgcgcttgttgctcagatccctg

SEQ ID NO: 429235 - DNA, 122 bp, Homo sapiens
gagctaggccgtgggcatacgagggcggctgggtctcaggctgggctttgggctgtagcgcggagcggggccgagctaggagtcctcaggccggcaatgaatgaaccccggccgccccagcc

SEQ ID NO: 429236 - DNA, 122 bp, Homo sapiens
tgtaaaggggagactcgggcaatgtaggatgaagtgatccgtgacactgaagaaaattaccgaagagtatcaggagggaaaagtggttacaaaagttagctgagttggggctcaagtggatt

SEQ ID NO: 429237 - DNA, 122 bp, Homo sapiens
ggtcctgaaaaatgggaatgggtcagcatcgggggtacctaagccgccaagtccttgactcgcccctgctctgccgcgcagggtgctggagaagaagcaagacaccggggagacaatcgagc

SEQ ID NO: 429238 - DNA, 122 bp, Homo sapiens
gggcccacagcataccgaggctcattaagcaataaagatcgtgactgagaatattgttcacgattaatgacaggctgggggccgaaaacgcacagctgacggccaggaagcccagttggtaa

SEQ ID NO: 429239 - DNA, 122 bp, Homo sapiens
taagcctcacgttagatttcagatttgcacatcgagtcccgcccctatccaatccggggacgtcaccgccctagtcttcggctgttttaaaagcaagcggtttttaaaacccccaatcctgc

SEQ ID NO: 429240 - DNA, 122 bp, Homo sapiens
gatccttgcatggattcatggaaactatgtaagactgaggaaagaaccactggaaataagcgggcagaacaattcctagggttcacatagggctaggactaattcacattccccgtatcttg

SEQ ID NO: 429241 - DNA, 122 bp, Homo sapiens
cttgatggcggggggacgtcactagtgcgtcaacaccataccaaggccaggcctggttctcgccccaaacagaacagcttgctccgaccttcccagcgaccctgagcacctggtcccatact

SEQ ID NO: 429242 - DNA, 122 bp, Homo sapiens
cccggcttagcgcctttggagctccgcgctgaaggggccttgctccgcacaggcacggcacgcaagcttttggggtgcccagtggctctgttttcaagtcacagccggcccgcagggtgcgg

SEQ ID NO: 429243 - DNA, 122 bp, Homo sapiens
ggtttggagcacaccctgcatcaagggcccggggcgccgcgccccctccagcgcctgcagcgccaagaacagccgcaccgcctcctcgcgcaggggtgcatagcccggacctgtgggagggt

SEQ ID NO: 429244 - DNA, 122 bp, Homo sapiens
ccagagagaatttgccagaacagccaccaaatcaaacacagagatggagttggctggacacgtacagtcagagtgagtcacacatagttggtaccacagcatactacgtgcacacagacaca

SEQ ID NO: 429245 - DNA, 122 bp, Homo sapiens
cagggtggcaacgtgtgcggtcgggcgattccggagcccctgcgtggaggaactgctgggcgggaggagacgccggcggctcgggcgatggctgacaggcgtgcagcaccaggccggcccgg

SEQ ID NO: 429246 - DNA, 122 bp, Homo sapiens
ggcgggcaggctggagagccagggaggagccagcggtgcagttcaggtttgaagcctggccgctggcagaattccatcttcttccagggaggtcactcttcttcctgggggtgtagaaccac

SEQ ID NO: 429247 - DNA, 122 bp, Homo sapiens
atctttccggaatgtagatagtccaaggcagagacaatttctgcaccatagaaacgtgtgcggtcctcagagaacacccgctctctcgacaaatggaaaaacagctgcagggtaaacagcag

SEQ ID NO: 429248 - DNA, 122 bp, Homo sapiens
gccacgccccctcggtgggaggtcggcctgcgctggtggccgcagatggcctaaggctggcgggcctttgattggccccggctttgcccttgccacgcccctctgcgctgggattggcttag

SEQ ID NO: 429249 - DNA, 122 bp, Homo sapiens
cccagagccttagtcttggagctggagccagacgcagaggtgccctcggtctccctgggccgctgccaggcggctgtggccccttcttgctccttctctgttgcgccgtcttccttccttcc

SEQ ID NO: 429250 - DNA, 122 bp, Homo sapiens
ttgtgctctgagagcccagccctgagcactgacgtgagtgcatttttgtggggtctgcatcgggccctgcgtgtcctgttcctggaccctccttacgtccccgtaagctcacgtcctcttgc

SEQ ID NO: 429251 - DNA, 122 bp, Homo sapiens
cattccaggcagggacgctgccccaggaggcccagggaggtacctctgagcagttgaatccggcgccggcagaaaggggctgccagaaagcatgaggctcccccacagacccctctgctgag

SEQ ID NO: 429252 - DNA, 122 bp, Homo sapiens
cagatgtgggagtggggcctttgaggaggtgattgcaacaacccagcaaagagatgacagcgacttggggaggcctagtgtatgagatggccagatttctcctattgtcctgtgatgaaata

SEQ ID NO: 429253 - DNA, 122 bp, Homo sapiens
tagccggattcttttacaccgctcggtcacagttagttaccgactttccagctgcgaggacgatgcgcgccatttactgtaattgaattgctgtaataacaccttgcaaggggacagcaatg

SEQ ID NO: 429254 - DNA, 122 bp, Homo sapiens
gaccagcctggccaacatggtgaaaccacggctctactaaaaatacaaaaattagccgggcgttatggcgcgcacctgtggtcccagctactcaggaagctgagacaggagaatagcttgaa

SEQ ID NO: 429255 - DNA, 122 bp, Homo sapiens
gcctgtctgtaaagatactccggaggagcagccgagctggaaaagacagctggtgcgtggcgacgtccctcggaccctaaaaggcccatcggtttagcaacgagctgggatttctcgagctg

SEQ ID NO: 429256 - DNA, 122 bp, Homo sapiens
gtctacatcagcaaaaaaagcttatcgtcgtacttctctgaccaaaatcaacggaacccccgaacccacagagagcatccattttggattccccgaagacccttcgttcctgcattctcttc

SEQ ID NO: 429257 - DNA, 122 bp, Homo sapiens
acattctccccacaaaaacaaacgcgaaaacagaagccaccttttcaccaccttgccttgcgttagcctcacacttttggtgacctcactagcttagagcccgcagcgcttctatttctcca

SEQ ID NO: 429258 - DNA, 122 bp, Homo sapiens
cgagagaatttcgtgcgttagccatctctcagtcgctggctaataaaggactcctgaactcgtctcaaagtgtggcgtttctctctaactcgctcggatacgacagtttcaactatggtaga

SEQ ID NO: 429259 - DNA, 122 bp, Homo sapiens
cgctgggaatcagaggagcgcctggtcactgagcgcccctgggtggctcgggtcggtggccggggctgaccaagtttgggaagactgagatagcaaatcccgaacgtccaaaactttgttgg

SEQ ID NO: 429260 - DNA, 122 bp, Homo sapiens
ctttccttagatcccgtgacctcttctattcatgcacttcaggaacagctattggccaaacgctggtttattgcccagctatcactttttcttcctttcaaattatttggagttgaccacac

SEQ ID NO: 429261 - DNA, 122 bp, Homo sapiens
agcacactctacgccaggcaaacaaacctcaacgcttagcctcccggcacctcctagggccggaagcttctcagcccaaagccgctgctggctgcaacctccgtcccgcagtccaattagca

SEQ ID NO: 429262 - DNA, 122 bp, Homo sapiens
agtcagtttcagatatgctatcactttaagaaaccttagatctgagcaccaaaaaagcaacgagtgcttacttcccttcaaaaataatcttttttttttttgctaaagaaatttgttttttc

SEQ ID NO: 429263 - DNA, 122 bp, Homo sapiens
ggcccttcatccactttgcagtctagacctagagcctgtgtgttgatggcagcagcaggccgtctggagcagccactaccatcattgacatacagccttgttttgctttgagtctaccaaaa

SEQ ID NO: 429264 - DNA, 122 bp, Homo sapiens
tgcttctgcttggagatgaaaggcgtgcggggctgggccaggccagagccccagccccagcgccctgttttgttccagttgtgctttctacacgcgagctctcccctaaaagttgtactaaa

SEQ ID NO: 429265 - DNA, 122 bp, Homo sapiens
gtccgggggcggacccctcggcacggccgggcggggttaaagggttgggccgtgggacggcgcggtcagatcccaggtagtggcgccggtggatccggatcgagggcaggaggctgagaccc

SEQ ID NO: 429266 - DNA, 122 bp, Homo sapiens
cctcctcgcggggaaatcccggggaagtggtgagtctggagtatcgactcccttcctcctcgcggggaaatcccggggaagtgctgagtctggagtatcgactcccttcctcctcgcgggga

SEQ ID NO: 429267 - DNA, 122 bp, Homo sapiens
gaatattttcctgaccctggggcagaggttggaaacattgaggacatttcttgggacacacggagaagctgaccgaccaggcattttcctttccactgcaaatgacctatggcgggggcatt

SEQ ID NO: 429268 - DNA, 122 bp, Homo sapiens
aaagaagaagtgatgtccactgcaggcaaccagggagggagtttaggattgttctgaggccgtgaaagccattgaaattcacccataagaaggcagagcaagggaatccacatgtcttgatc

SEQ ID NO: 429269 - DNA, 122 bp, Homo sapiens
tttcctttttcacaactttctcacccctgtggtttcccatgtcatcatgtggccgcttcccgcaaggccttagcggggtgcaggtatgaacatagtgtcaggcaaggaggcatctggagggg

SEQ ID NO: 429270 - DNA, 122 bp, Homo sapiens
cagacgtcctccagcttccacagggaaagagataaatgatcccagggctagcgaggggcccggctgctcagccacactggaagggcagagagacccggctgccaagctcccggcagttgcat

SEQ ID NO: 429271 - DNA, 122 bp, Homo sapiens
caaccgcccggaagggtgtagcctgccagtaggtctgctcggtctgcttccacatgactacgtagaagcggccactgtcttgataactgaagagaaagcctgcgtagtcatcatcagtcact

SEQ ID NO: 429272 - DNA, 122 bp, Homo sapiens
gccatggaggccgggggcggagccgcagagggacccgcggccggccaatcagagacgtagcggagcccggcggactacattgcccagtaacctcctgggctccgctgtgtttttctattctg

SEQ ID NO: 429273 - DNA, 122 bp, Homo sapiens
tctgccctcacacctgcttaggtccctggagccctgatctcctctggatgccacagatggcgtggacactcagtcccagcattgggttggctcagagctggctctgcttggctgggtgggga

SEQ ID NO: 429274 - DNA, 122 bp, Homo sapiens
attgatctgaagggacatctacaaaatatatatattttttgagccggagtcttgctctgtcgcccaggctggagtgcaatgatgtgatcttggctcactgcaacctctgcctcccgggtgca

SEQ ID NO: 429275 - DNA, 122 bp, Homo sapiens
ggttatgggcccactcaggcatgcatggagagcccagtgtgtgccatacagttctgtgagcgtagagattcactcaaagtcactctgctttaagctgcagagctgcaactagaacccagaac

SEQ ID NO: 429276 - DNA, 122 bp, Homo sapiens
cggctcagccgggcggttcagccgcaggaagatcagaccacagaagcggaagaggcggggcgtgcggacctgccaatcaccgcctcctacccggccccgcccctgagcacggcccctgctgc

SEQ ID NO: 429277 - DNA, 122 bp, Homo sapiens
gctcccacatcgctatataaagatggggatgaactctgtggctgtgagtcaccataactgcgacactcactcatttgcgcttcaccagacacagagcaaccgccagccccaagagcagctcc

SEQ ID NO: 429278 - DNA, 122 bp, Homo sapiens
acagctcctcagtgccccctcccctccacctcctctctcactgccagtgacccgctgggccgtggcaagctctggttaccttggctcactggaccctgtctgcacccttcttggtccacccc

SEQ ID NO: 429279 - DNA, 122 bp, Homo sapiens
tcaccccttgcaaaggctagggcagatggggcggaacagggcacctctctggccggtgcccgggagtgtgcaaagtcacaggaagtgtgcccctctctcaggcagctgctaacacctgtctt

SEQ ID NO: 429280 - DNA, 122 bp, Homo sapiens
tcttgtttttgattttaaaaaactcttcattcctagatgggcattacccttattaaacaacgaatagaatatgtgatatccaatgatacatttaaaacaagacaaccaatatcttggtgtac

SEQ ID NO: 429281 - DNA, 122 bp, Homo sapiens
tcagtggcccagaatttgggacttcagctgggagagggagagtcggcctctgccaaaacacgggctgcagctgacatcttctttaaacactgagagtgtgctgggggcagcgccttgccctg

SEQ ID NO: 429282 - DNA, 122 bp, Homo sapiens
ggaatgcaccaggtagggtgcggggccgagtagctggtgcccgacgggaagcttgcaagacgctcggcttcctattgcaagaccgcacccctgccccgaagcgttgggacctaggcagaagg

SEQ ID NO: 429283 - DNA, 122 bp, Homo sapiens
cccgccccgggcctgggccttggctccgggctacagtgtgagatcccgggctaggtggcccgcctggggcaggtcgccgggacaaccccaccgccccgcaagtccagcccggcctcgggcac

SEQ ID NO: 429284 - DNA, 122 bp, Homo sapiens
agcagctccctgcagcccggtctgacgacggctccaagcagggtgggcagagtgtgtacacgtaacgacattatggtcgcctctgagtctcttcccggtgtcttttccaccggctcagcctc

SEQ ID NO: 429285 - DNA, 122 bp, Homo sapiens
gaaagaaaaaaaacctgatatcttacagcagaatataaacctccaaatacaacttacactcgatccgacttccagaagtcgctcgctaagcgcttcattctcacggccgtcctaaaacgcca

SEQ ID NO: 429286 - DNA, 122 bp, Homo sapiens
acagctgaagggacagtgcaggcagggctgaggcccagtggcacccgcgctggtctctcacgcacgaagaacgcacgggaaattgagcagttggctgctgttgccagcctggcggagagtct

SEQ ID NO: 429287 - DNA, 122 bp, Homo sapiens
gaaaaatcccatgaaaaccataggcaaatattaaatgattgaggcttttcttttttaaaacgtggctatgttctttttagatagcctggattcagggacttgggaccttgtaaagccaaagc

SEQ ID NO: 429288 - DNA, 122 bp, Homo sapiens
ccccatccctccctcccccaaataatacaccagtaatagccaaaaactacacacatgctacgctgtaaaaatgcagagttaacactattgggaagaaggctgtgggttgtggagatgctctt

SEQ ID NO: 429289 - DNA, 122 bp, Homo sapiens
aatgatatataacgcagtggcaaacataacattcaggcattgtgaatgttttaaatgatacgtatgtacaaactcgcccagaaaaatctaatttctacaaattgtgtgagttgttattcaaa

SEQ ID NO: 429290 - DNA, 122 bp, Homo sapiens
gagtgtaccttggcagtcaggtcgcccttcacctccaccatgaaatgcagcgaggagaagcgacgccgcaacttctcacagtcgatgttggagccagtgcgggtgcggagcccggactcacg

SEQ ID NO: 429291 - DNA, 122 bp, Homo sapiens
gggaggggacggccccgagcaacccacgtgaccgccgacaaccgagcgcgtgacgcaaagcggcgggcccaacgctcgccttgtcttttgggaaacgtagttctgatggcagccaagtcggc

SEQ ID NO: 429292 - DNA, 122 bp, Homo sapiens
ttcaaaggggcgggttctagagtcagttttgcctcagcgggccctgggattggccgacagcggtttaccggtggcttctattggcctcccgggccgtccgtcggagccgaggaggcggggca

SEQ ID NO: 429293 - DNA, 122 bp, Homo sapiens
tgggtggggtcacgttgaggatatgctgagagctgaatacaaattagaaatacagactcccgggtgggcgcggtgactcacgctcgcccgtaaccctagcactttgggaagccgaggtgggt

SEQ ID NO: 429294 - DNA, 122 bp, Homo sapiens
ggaggcgctggtcccggtgcagtcccgggccgctccccgggagagccgagcccgcccgtgcgtcttcccccgcgcgcccgcccctgcgccctgcgcccgccccagcccagcccagcccagcc

SEQ ID NO: 429295 - DNA, 122 bp, Homo sapiens
cgcggggcgcgagggctgaggctctgggcgtggcatcactctcggtccctctgctgggggcggcgaggagagtgcagtgtgtggaaagggatgctgggatgaagggtgtgcgctgagagggg

SEQ ID NO: 429296 - DNA, 122 bp, Homo sapiens
gagcgaaagaaccgcccccagcaggagcaccaccacggcttagcaaagaatcccagaccccgcccgggaaggcagccgcaccatggagtcttccagttcatctaactcttatttctccgttg

SEQ ID NO: 429297 - DNA, 122 bp, Homo sapiens
ttccatctcctgactgagacttccccagtgaaagcctgagatgagtgctctctagtcattcgcttttttcgcactcagcagggaagccagatggatgcaatctgaagaggtcagactccatg

SEQ ID NO: 429298 - DNA, 122 bp, Homo sapiens
agagggcctacaaccataccccgacatggtgggccctggcacctccacaggccctggcctcggcagcctccgccccctgcctcacacccgggaggtgatgtagacagagtgcacgcgctctg

SEQ ID NO: 429299 - DNA, 122 bp, Homo sapiens
ttcccttccgtatggaaatgaggttaactcatttgcaggaacctaacgcccgccctcccccgactcggatcgctggcgtgaacccagcggccccgtgctctccgggtatccctggatcgagg

SEQ ID NO: 429300 - DNA, 122 bp, Homo sapiens
gggaagcgaggaagtaggagcagatgagggctctcgctcgcggggtactctgtgggggaacgacgccctctctccagcctacggctcagaaagctgcggcgtttgccgagcaccggcggaca

SEQ ID NO: 429301 - DNA, 122 bp, Homo sapiens
gggaggaggctacactgcaaggggtattttgtcactaacatttttttataattgctggtgcgcagtatcaataaaaagttggcttcaggctgggcgcagtggctcacacctgtaatcctagc

SEQ ID NO: 429302 - DNA, 122 bp, Homo sapiens
aacttttcccaagtccaccacagccgcccgccgccgccgccactgtggctccctctgagccgcctaccctacccaaaccccagaaacaaaccgaggctcgaaaaggctcccttctcctgccg

SEQ ID NO: 429303 - DNA, 122 bp, Homo sapiens
ggcgctcaggaggcctgaacactcccacactgcacagcgttactctgcacagggttagaacgcttcctcgagaatcttgtcatgagtgcatttctcttgcttaaaaaagagtggcgaggctg

SEQ ID NO: 429304 - DNA, 122 bp, Homo sapiens
tctacccgcctctgccttgagattctgtaaaactgagatgctcattctcttaaccaaacacgtcacagaggaggaaacggaggcccaaggtcacctagacttcggggttaagcccagaaccg

SEQ ID NO: 429305 - DNA, 122 bp, Homo sapiens
ttcattcattctctcattcactctcgagtattttctgaaccagactgtgcgctgagggtacggtagggaacaacacagagtcccccgccctcgcttcctcctgactgagataaaagacaaaa

SEQ ID NO: 429306 - DNA, 122 bp, Homo sapiens
tccagcccctcccgccagtctgtctcttcactcacccgggcatctgtgaccttgaactctcgcaggatatactgaggcatgttgtattctgccatcggatctaccacaaagtactggtagcg

SEQ ID NO: 429307 - DNA, 122 bp, Homo sapiens
cagcccccagtctcctttcattccctactcttcaggctcctttggggccagtgggtgaaccgccatttagaacggtgcctcggactcgggggtcgtgcgctccatctctgcctcccccctgg

SEQ ID NO: 429308 - DNA, 122 bp, Homo sapiens
aaagggcaggagcaagaggcattgcatatctactgtcttttagcgaggacactactccaccgtccttcttggggctgtctttgtgtgtctagtatagcccctggcacatagtatagagggaa

SEQ ID NO: 429309 - DNA, 122 bp, Homo sapiens
caaggaaccactcttggtgatcaggttttcctctgaggtgtcatttctaatcacactgaacggcggaaggtccttgggtttctttcctgctttgtgtctgcagcatctcaaagccctctgcc

SEQ ID NO: 429310 - DNA, 122 bp, Homo sapiens
ttgggctatccctagtatcctcgcacacaagctctgtgctgtcattcgcgtgtcatcgttcgtgtcttgggctatccctagtatccttgcatattgtttcgcctgcccagaacatgtgtgtt

SEQ ID NO: 429311 - DNA, 122 bp, Homo sapiens
agggggtggggttgatgggcggggtttagaacacccagtggggcggggccagtgctgccacgcactgcattggggtcaggggatgtgggatatgcggcaatttgtttgcagcaagatcgaga

SEQ ID NO: 429312 - DNA, 122 bp, Homo sapiens
tttcttttcttcctttccaaggtgttgatctctaaaacaccatgaagtcctcttgaagaacgctgtccttgcttctgcctttggaaaacccaaactgcaagggcaaagggcacagaagcagt

SEQ ID NO: 429313 - DNA, 122 bp, Homo sapiens
cgcctacaacttaagcatagcgcaggtccggaagttacgcaaccccataaggtagcacgccgttacccgtggggagcgtttccgccatttttgaaaattaattgggaaggtactggttttaa

SEQ ID NO: 429314 - DNA, 122 bp, Homo sapiens
cgggaaaacttcacgctgccaaaatgtcaagtttagagtattccgggacagaaaagggcacgtcccagcaaaggaggacctgcctagacctgcccaggtaaagcatcacagatttttaaaaa

SEQ ID NO: 429315 - DNA, 122 bp, Homo sapiens
ctccactccctgttgaacccattctctaaagttgctgatatgtagtatatttgatgcagacgagaccaggcatagcaatggcagcaaaaaagcaaaaaaaaagcggataatcaatccatgaa

SEQ ID NO: 429316 - DNA, 122 bp, Homo sapiens
ctcccctctcatgccttcactttcctgcctgcaaagggtttaaaacttctgctgcccaggcgcaatggctcactcctgtaatctcaacactttgggaggccaaggcaggtggatcacttgaa

SEQ ID NO: 429317 - DNA, 122 bp, Homo sapiens
cattaatagcagcctccctcaggcccctgacgcgtctgggcagctgctcagcacgtcccgcgtccctcggccccaaggccagcccactctggctcagccaggcacactaaacttagtggcca

SEQ ID NO: 429318 - DNA, 122 bp, Homo sapiens
tgctaagtgtagagatgcttttctgcctagacaattcaaagaagggaaaaaagggccaggcgcagtggctcacaactttaatcccagctactcacgaggctgaggcacaggaatcacttgaa

SEQ ID NO: 429319 - DNA, 122 bp, Homo sapiens
ctgtgggttgcgaagcttggggcgggacttccggcatttggatgggacgtaatttgggagcgacggttccgtccacgccggctctagggagggggcggtgttccgtggccgcctccctggcg

SEQ ID NO: 429320 - DNA, 122 bp, Homo sapiens
agggccccgggggaaaggcggtaagcatgagcaagagggtatcaggagtcgccccagcctcgccgccccggggcggttcccactagcacctcgggaggatcccttcactccgccggtccccg

SEQ ID NO: 429321 - DNA, 122 bp, Homo sapiens
agcaccccactgccctctgccattcccaggagggggttccagagaggacagaccctaacacggtcatcatgcccttctctgcaccagggccagggttccaccgtttcacacagcttgcttac

SEQ ID NO: 429322 - DNA, 122 bp, Homo sapiens
gtaagtgccactttagattatatcccattttgtgtggtgtcctatatcagttaaacccaccgtattcattgtataaatcaaatttttcatatacttactgtattagtccattttcacgctgc

SEQ ID NO: 429323 - DNA, 122 bp, Homo sapiens
gaggctccacgagggcaccgctctggttttcttccctggtgatcccagcacctagaaggacgcccgcccgctgcctgtgctcagatacattctcaaatgaacagctctcctgtgacaaggac

SEQ ID NO: 429324 - DNA, 122 bp, Homo sapiens
ggcagacatgcaagcccttgctgaaatgtccctctctcgtaacccttccggggtttaatacgatggaaaaaatcaagtatttccagatgtattttggacacacagaggagggagaccaagtc

SEQ ID NO: 429325 - DNA, 122 bp, Homo sapiens
gctagtcctggcaagtttgacgtgacggggacgcagtcatccaacctgcaggcggaggcccgcaggcactttctcctgtcatttcgcccacctgggccctcccccagggcgcccagggggcc

SEQ ID NO: 429326 - DNA, 122 bp, Homo sapiens
agcggaccatctctcgtgccctcgctctctgcgctccggggcagctgagccccggccacccgctctccaagatgaagaagctccagggagctcacctccgcaaggtagggcacgagggcggg

SEQ ID NO: 429327 - DNA, 122 bp, Homo sapiens
gccattagacaaggcttttccccacgatctgactgcttgaagtgacatccaggatcaggtcgatcctgtatccaggaatcatgaccctccctgaggcaccagtcatcatgagacagtcagtg

SEQ ID NO: 429328 - DNA, 122 bp, Homo sapiens
gagcgctgggcccaacccccggcctggagcagcgccccaactccgagcaccgtggagcaccggctgccagctgagaccccagaggggtaactaacggcctgaggaaggcatttcttcgggga

SEQ ID NO: 429329 - DNA, 122 bp, Homo sapiens
cctgtccccgtggccagaatggggctacatatacaaccctaactaaatcatgggcaatgtcggcaaggggatcaggaattccatacttggcctggattgcattgttttgttttgttttgaga

SEQ ID NO: 429330 - DNA, 122 bp, Homo sapiens
aaggaccctgccaggtggccactgtcgttccacttctgcagatgagaagctctggcctaccgagcctactcctggagccaggtggttgctgcccacaccccctcccacctgagctgacccct

SEQ ID NO: 429331 - DNA, 122 bp, Homo sapiens
gagcgccccgctgccgggctccagaccccaccgaaggttggagaacccacttcctcgtgccgcaccttgactctggggagagtaggtagtgagtgacctggattgccctgcgggggcagatg

SEQ ID NO: 429332 - DNA, 122 bp, Homo sapiens
agaggccctcgggcctggagatgtgaacacaggcagcgaccctgttccagagggcttctgcgagtcctcgtgagaccagtgcttgtcgtggtgtggggttcagcacggacggaatgtgtgtg

SEQ ID NO: 429333 - DNA, 122 bp, Homo sapiens
ctatgacaggaagcatttaagtttctgctgtaaaggaaagaagagattcggggcagaaagcgtcctgactctggggcattactgaactcccctgctgaggaaggaattttggggccaaacag

SEQ ID NO: 429334 - DNA, 122 bp, Homo sapiens
ctggggcagagttttgttgcctgtgtccattgtggtactgaaaccagaaaacagagtccccgcactgagccctttaacccaatcacacagtcctagaaagataaaaagaatggattcatgaa

SEQ ID NO: 429335 - DNA, 122 bp, Homo sapiens
gacccagggcgacactcaattttctaacaggagccacagcccagaagctgagaagccttccggccgatctgtggccctgaggtcgcccttggagggcgagtgagaaccccccaggcgttccg

SEQ ID NO: 429336 - DNA, 122 bp, Homo sapiens
tctccggtgaccggagcgtgttactcagaaacggatccgtcagaggccaatgggagctgccggccttcagggcgcgcctggtggcgccgagcatcctgggaggtgtggtccgggcgctgtgc

SEQ ID NO: 429337 - DNA, 122 bp, Homo sapiens
gccttcctacgagcagcttaaaatgcagaagagatcagctgagacacacactctcctccacgtgctccctctccctccccacctgatcctgcttctatcccctcacccctcctgatgaggga

SEQ ID NO: 429338 - DNA, 122 bp, Homo sapiens
cattggcaccagtaaggttttgaggagctggcaggcttcaactgataagtgagggtggtgcgtaaacccagtctgagagttgcagcaggtcgtctcagtagtcgttagacaaaactggtttc

SEQ ID NO: 429339 - DNA, 122 bp, Homo sapiens
cagctcttggcagggtgggtaagtgatgcccacgcgagggaacgaggctcgggcctcactcgccaggagaaggatggatggtggcaagtgatggcgacaaacacccgacagccagcgaggcc

SEQ ID NO: 429340 - DNA, 122 bp, Homo sapiens
ttgggttcctttcatttcatactacaaattcagagctcaagttgatgcccctggctcttgcgtcactccagctgtggcctgcttacagctctctgaaatccagagctaccccctcctgattc

SEQ ID NO: 429341 - DNA, 122 bp, Homo sapiens
agtaacctcagaaagagtccccccgcagcagcaaattctcccaatgcagttttgaaacaccgcaagaggaggaagcctctttaatcaaataataaccagtcagagataaggcctgctaggct

SEQ ID NO: 429342 - DNA, 122 bp, Homo sapiens
tggtgccaagggttcccatacagggttggggcctgacgtgagcatcacaggacaaagatacgaagggactaggatggggttactgaatatgccacacagtggattaaaggaactagaggcag

SEQ ID NO: 429343 - DNA, 122 bp, Homo sapiens
tgatttaatggtctatgcctcagtttcctctcttgtaaaacagagataaagatcatatatcgtttatggggttaactgtgaaggctaacgggggtcacttttatggggtgcttcaccgagtg

SEQ ID NO: 429344 - DNA, 122 bp, Homo sapiens
caaagcgcggaagcaccttggaatgagaaatgaggatacctgagtcaaaaggcaagcaggcgaatgaggcccgaaagataaaccaagaaggattcctgaatgcggagtgtgagtaaagaaaa

SEQ ID NO: 429345 - DNA, 122 bp, Homo sapiens
tttgggtcctaagtactgtgcccaaccggcccgaggggaagggggaggagacaggaaccgcgcccattttccggatcaggttcttggaaccagcccggaaatcctgggactcaatctggggg

SEQ ID NO: 429346 - DNA, 122 bp, Homo sapiens
taaataaaattccagtatttttaaagaagctgattcaaacataagctacatattatactacgttatttcctctctgtacagggacactatcaacggccaggagacagatagaatcattcttg

SEQ ID NO: 429347 - DNA, 122 bp, Homo sapiens
gctgctgccctagccctgccaagctcagccaagggtcttagggatcacaggtgtgagcctcggtcacgttcactagggatcgcgggtgtgggcctcggtcacgttcactagggatcgcgggt

SEQ ID NO: 429348 - DNA, 122 bp, Homo sapiens
ggtgatccacccacctcggcctcccaaagtgctgggattacaggtgtgagccaccatgcccgacctatttcagcaagatttttcagcacacttgtatgtatgtgtgtgtgtatgtgtgtgcg

SEQ ID NO: 429349 - DNA, 122 bp, Homo sapiens
gaaagtctgagaaagtttgaggtgaaactcaagggcagttatataggcttctgcacctcccgggggtcagtttctcatgccatcgcatccctcctcctccctaccagtcaggcgcaacaccc

SEQ ID NO: 429350 - DNA, 122 bp, Homo sapiens
cccaagaagtctgaacacctgtggcagacagcagcgtcaagcagctgtggttaaagccctcgtttccttaaatgactcccacggtcaggacgagcacatttaaaaccctgtcctgttgattg

SEQ ID NO: 429351 - DNA, 122 bp, Homo sapiens
tgacaggtgatcacgtactgaatgattttgaagtagtacaaacaataaaaattctcattccgcatcatcatgcggtccatgatgatgaggccgcaagtgaggtgatgggactctttccttta

SEQ ID NO: 429352 - DNA, 122 bp, Homo sapiens
caatgctggctcctgtgtgatattaattataccctgtactcatggcaaataagctaaaatcgctggcaagaaagactaagtgaggtgtcctggttctgaccgtcattcggatcaaacagccg

SEQ ID NO: 429353 - DNA, 122 bp, Homo sapiens
acccactgaaataggtccaaacagtctgagcttcacctcgagacacctgtcagggctcttcggccctaggacacctaaaggcaaggaggatggagccccgcggacagggtgattgaacttct

SEQ ID NO: 429354 - DNA, 122 bp, Homo sapiens
aagctgccaaggccccggaatccaggcccactccaacaggagacagagttggcccggaagcgattcaggttctgtggtgtcattgctgaacaagagctgaagttgcccacccggtgaccaga

SEQ ID NO: 429355 - DNA, 122 bp, Homo sapiens
ggagatgtagtttccggaggtttgagcaacggaagagccggggctaaacactaaaataaccgcgatttttagtttcagcgctaagaccaaaaaaaaaaaaaaaaaaaagtagcctcaactct

SEQ ID NO: 429356 - DNA, 122 bp, Homo sapiens
gctttttccaccaccaagaatcccagccgattctcaccttgaagggtgaggcagggaaaacgactcacagggccgagctgccctcgtggtgttacacaacctcagtgtgctgccaatgtttt

SEQ ID NO: 429357 - DNA, 122 bp, Homo sapiens
acctgctgagaagcgtcgtcggaggctgcaggaggcggcctagctgtgggcggtgcagctcgcggcctcctccctcgtcgttcccggccccggccccccacccatccccgtgccccctccct

SEQ ID NO: 429358 - DNA, 122 bp, Homo sapiens
cggcacttggagacctcgattgaatctattcggcaggagagctgaattcagagcagcccacggctcaccccagcaattgtcagtgctggaaaaatcaccaccgttggtgtattcccggccac

SEQ ID NO: 429359 - DNA, 122 bp, Homo sapiens
ctcttctttcggcctggttcttggggaaatccctcagccctcggcgagagggttcccaggcgttgcgtctccccgcggagcccgccccggtctctccctcccctcacgccccgcctttctct

SEQ ID NO: 429360 - DNA, 122 bp, Homo sapiens
cgtcgcgcttaccttccgtttttgcgatttctgctccgaagaccgagggcgggctcgtcgcgtccaggaccggctcagcagcacatagaggggaccttcctggcgtgcaaagcgcttcgctg

SEQ ID NO: 429361 - DNA, 122 bp, Homo sapiens
aggtgctgttgccccagcgcatgtgtgggtgggctgcagtgagtccccggagggctgtatcggcgggccccctctgccccccacatgcccacagccccgtgtctcctgatgcccccaccctg

SEQ ID NO: 429362 - DNA, 122 bp, Homo sapiens
cctaccggtcttaccgtcccagggggagtggttggttttccaggggatctgccgaggaagcgtgacttccatggacccctctccccagaagcccaatagtgagcagcgcccccggggaatcg

SEQ ID NO: 429363 - DNA, 122 bp, Homo sapiens
gctgggcgtggtggcgggtgcctgtaatcccaattactcggtaggctgaggcatgagactcgcttgaacctgtgaggcagaggctgcagtgagccgagatggcaccactgcactctagcctg

SEQ ID NO: 429364 - DNA, 122 bp, Homo sapiens
atgtaattaaattttgaggctttgactgttgcatagagttttagcatcaacagaaaagctcgcaaaacataggtgacaatcaaaaaggagtgctgggttggagccctaaggtgagtaatttt

SEQ ID NO: 429365 - DNA, 122 bp, Homo sapiens
ctggggccccggatccagctctggctctggcactgcacggttcttcggcccctgctggttcgctacatcccagcgcgcgaggccggggcttcctcggctcggcccgctcctcccgccgccgc

SEQ ID NO: 429366 - DNA, 122 bp, Homo sapiens
tccttttcatcccctcttattttgggggctactatccagaaaaagtctgctggtaggtcacgtagtgctctcaagaagcctcagagagcactatccaccactacatctgtagatgtttctta

SEQ ID NO: 429367 - DNA, 122 bp, Homo sapiens
accaatccgcagtggccgaagtggaagtcggcgtaacggcactaaggggcggggccgaagcggcccagggggcgggcgtttgaaatcagtgccttagagtagaccctaaacctcattttata

SEQ ID NO: 429368 - DNA, 122 bp, Homo sapiens
ttttctccactgggtgtggtattcctcaagctgtttcttctggcatcggtttcagtaacgcgagtgtttccagtaagttgatttggggcaggctccgtagctgtcggtgtccatccgtcacg

SEQ ID NO: 429369 - DNA, 122 bp, Homo sapiens
taccatttcaactttaacacagcatgatcgaaacatacaaccaaacttctccccgatctgcggccactggactgcccatcagcatgaaaatttttatgtatttacttactgtttttcttatc

SEQ ID NO: 429370 - DNA, 122 bp, Homo sapiens
ggggccaggggcagctcgggcgtgtgccgcagctcctcgcgcgggatctcatggatggagcggcccgcctccttcaccgtggccaccaggccctcatgggccggcttcagcttcagggggcc

SEQ ID NO: 429371 - DNA, 122 bp, Homo sapiens
tggggctctgctgacttgattctagaaatgtctaatatcaccagaaccattcaagtgccacgaaataacacatttatgtattattctgcttcaggtgagctcaggaggaaaagacagatatc

SEQ ID NO: 429372 - DNA, 122 bp, Homo sapiens
atttctgcctcctgcctcctatgctgccagcgcactgagggatagcagcagtaagcttcccggaagctgacttgtagactcctgccctggttttccttccttactacccattcccacccagg

SEQ ID NO: 429373 - DNA, 122 bp, Homo sapiens
gcagagcggcgcggagcagctggtccggaaggaagcgccaggcgcctgcccggtcccaggcgtccgctgccgcccacccacaccagaccccgcccccgcgcgtcaagccccgcccatccata

SEQ ID NO: 429374 - DNA, 122 bp, Homo sapiens
aggcttagtggcctactaaataggtttagaaacctactaactaggtttcagacttctgagcgtagtgtctcaggccttccatgacctggctccagctggttttatctgttttgtccctgccc

SEQ ID NO: 429375 - DNA, 122 bp, Homo sapiens
ccctccgcaaggcgccgctgaggatctcctcccgcaggtgaggaaagaggaagtcccgggcggcctggaggtcctggaagtagcagaactggacaatggagcaggccatggctccagggaac

SEQ ID NO: 429376 - DNA, 122 bp, Homo sapiens
gcaccgggatgtgcaccggaaaaggcccgggggtaattagtacccgagggggagaggggccgtcattgtaatcgcacaacgtttcagattagcaagcagaaagtaaaaatggcaccaaagtc

SEQ ID NO: 429377 - DNA, 122 bp, Homo sapiens
tttcctttcagaataaacaagaagctagaaaggggtttctaagaggccactcctctgaatcgagatgaagcctaggttgggggtgctaagagtatgggttaccttcccccttttactcaact

SEQ ID NO: 429378 - DNA, 122 bp, Homo sapiens
ctgctgctgctgctgctgctgctgctggggcttcagcgacatggtgaggggcccatacaccggctcgcacgccgggcggggacagccgggagccgggcgcgccaaggagacgccggaacgcg

SEQ ID NO: 429379 - DNA, 122 bp, Homo sapiens
ctattgatatctttagacctcacttctccagagcttttcctgatttttcttctgcctgcccgtgtcttccctggtatatcttactggcttccccagtttgacatgttgtaaatggaattatt

SEQ ID NO: 429380 - DNA, 122 bp, Homo sapiens
gaaaccgcctagttagaaccaacactctccgtcactgaggaaggcaacactgaagttggccgggcacgtattatgcacagaatctgtgtcggggtgcggggacggagcgaccccccgttacc

SEQ ID NO: 429381 - DNA, 122 bp, Homo sapiens
cagacctaggggccggctacagttgggagggcaacgggaaagatcaagccacaatcattccgaattatcgccccagacacctccctagactctggggaacgaacgcgtgctgagcctccccg

SEQ ID NO: 429382 - DNA, 122 bp, Homo sapiens
gcacctctttgcatttggtatttagaattcgaccaaatgagatgctcctttcctcccagtcgccaccaggcctctcactctgtgccactcaacccagcttagttggagatgctggtcagtcc

SEQ ID NO: 429383 - DNA, 122 bp, Homo sapiens
gctgcttccccaggcggcccccagaactcccaccgcggtggttgtaaagaaactgtgaaccggagcgctcaggcaccagacacagccacctgagacaacggcagtggcagggaagccgtttc

SEQ ID NO: 429384 - DNA, 122 bp, Homo sapiens
cacatttgtgtgggttttctccgggtactccggtttcctcccacatcccgaagctgtgcccgttaggtgaatcagtgttcctgcatggtcccagtgagagtgtgtcggtgtgtgtgagtgca

SEQ ID NO: 429385 - DNA, 122 bp, Homo sapiens
ccctacacagaagccggtttgttcattcctctgccacagggctcagctgcagaatttttgcgacttccctgtcaccctcagaagcaatgggggctgcattgttcagaatataattttacaag

SEQ ID NO: 429386 - DNA, 122 bp, Homo sapiens
ggtacaggcccacaatcccttatcttaactctgaaagccagaaagctatgaaaaccaaaacgttttcagtaagtttggcaccacatcttactgggcagccagatctgactaaaactaatgta

SEQ ID NO: 429387 - DNA, 122 bp, Homo sapiens
caatggtagcatagagtttgcaaagcaataagagactttatgttatcactgccactcatccgtttaaaagactctaaagctaaacattcaactgataatacaataattttttcttctaatca

SEQ ID NO: 429388 - DNA, 122 bp, Homo sapiens
atccactggttccccagcaaggaacagtgtgtgctggtcctggtagacaccagtgcagatcgcagcctcatctatgggaacccggataagtttctgggcaaggctgtatgtatagacggctg

SEQ ID NO: 429389 - DNA, 122 bp, Homo sapiens
gtacgaccgtggtcccggaagaggataatggagctgaaaactcctatcgcctggtgatttcgatggcaccgcacattcctcacgtgtttgtggtataaacaaacctactgcgtgccagtcgt

SEQ ID NO: 429390 - DNA, 122 bp, Homo sapiens
tgggttgagcatgccttcttccagcccaccgataaaaaaatactcacccccttctccaggcgtgcagcccttcggcgtgccgctgtccatgccaccagtgatggcagctgccctctcgcggc

SEQ ID NO: 429391 - DNA, 122 bp, Homo sapiens
gccaccttccctctgtgcatagagttgattttttttttttcagcctgggcattaaaattccgcctgagtgctatctttaaattgctttgatgctaggtgggttccaaccctgacctgtcctg

SEQ ID NO: 429392 - DNA, 122 bp, Homo sapiens
tagaaaaaggcaggaaaaaacacactagagttgacccttgaacaatgcaggagtcacgggcgctgaccccctcacacagttgaaaatccaaatataacttctgactccccaaaaacttaact

SEQ ID NO: 429393 - DNA, 122 bp, Homo sapiens
gcggggaagaggagagaccggccagtgggcgcgagaaagacagctgctgagagagacagacggggccaggccagcggcgggcagacaagatgacccagacaaaccgagagaggaagtcgccg

SEQ ID NO: 429394 - DNA, 122 bp, Homo sapiens
gtgtggcacttactcagaaacataagacacacacctctgagtggggcagcttaagaagtccgttattgtaagttccacagtatcttgttcagtctcagctgcaattgtaacaggtttcacag

SEQ ID NO: 429395 - DNA, 122 bp, Homo sapiens
cttccagtggatgtcaatgctgccagctcagggttagtgtgactaatatgttctggtttgcgcaaggccttcctggttttagcaatgaaaatcctgaatgcagggaaacccctcagtcctgg

SEQ ID NO: 429396 - DNA, 122 bp, Homo sapiens
tgagtttaccatttttttcctccagtctccactagactggactcaaggcagcttaacacccggaagggagcatcaacatggacagagagagctccaggaaaagcagaaaattggtctcctaa

SEQ ID NO: 429397 - DNA, 122 bp, Homo sapiens
tccgggaccccgggaccgcgcgctgcaccccccttcacacacgcaccacgcatgcgggcgcgtggccccgcccccaaacaaggccacgcggcgtgcgctcacccgcctctcggggacagtac

SEQ ID NO: 429398 - DNA, 122 bp, Homo sapiens
ggatttccacagcctacagattttgaaactgaagtaggtggccctgaaatatgagcctttcgttttaatggagctattgctactgtaaaacaactgtataaatcctttccaaaaaatccctt

SEQ ID NO: 429399 - DNA, 122 bp, Homo sapiens
agaaaaaagcgtagatgcctagatggagcatgttttcgcagttggccggaaagcagggagcggtccttgttgccagagagtgggatcctgagccacctcccaaagaggggcctcccaaagag

SEQ ID NO: 429400 - DNA, 122 bp, Homo sapiens
gccgggcggccgaggggtggaatgaggggcggcagcgggaaactaggacggtgcggctgccgggcccaggagtgtggactcttgagtttaggcgcctttgttagatcttgtgaaggtccaag

SEQ ID NO: 429401 - DNA, 122 bp, Homo sapiens
cactgacttgttcaactgtgaatatacattcccatgcttccctgctgcctcaactttgctcggcttgtaatgaaatctcctgtagctctgcacataaatgctatccacactttaagacacat

SEQ ID NO: 429402 - DNA, 122 bp, Homo sapiens
gccacagctacttcccaccagttccaaccagccctttcgccgtctctcgggatgtcggaccgggcactctcaccatttctaggcttctagggggtcctggcgtcttagctgtggatctccca

SEQ ID NO: 429403 - DNA, 122 bp, Homo sapiens
gtgtagacctcaccctcaccccccaatgcttgcggtttgtacagctgggatccagagaagcgtccagcgggccctagaggggcagacacctcagcaggcaggtgctcaggttgataaacaac

SEQ ID NO: 429404 - DNA, 122 bp, Homo sapiens
gaagattcttccatctggtaatgttgagaagacttcatttggtaggagtcccttactttacgtgtgtaaattcctaccaggaaagaatacatatccaatagattggagaaagccagagatta

SEQ ID NO: 429405 - DNA, 122 bp, Homo sapiens
tgctgccccttcagggtttggaggagccggaggtgcggaattcctccggtttcaaggcggcgggacgggacagaactaatctgccttagctctctcctgctgctgacccggggcggttgcct

SEQ ID NO: 429406 - DNA, 122 bp, Homo sapiens
tatcttgaaatattgtcaacatgaatcgtaacagttgtcctttctaacacagtttttggacggctcctcagtaggttcagaagcagtgaccacaggctgcttggctgggagttaaaggtggc

SEQ ID NO: 429407 - DNA, 122 bp, Homo sapiens
cccctgcacccagtccactgttcggagggacttagagcagggtcccttccctgagggcctcgcccccgaggacgtggcgccggagccgtgcgacccattggcttcagcgggtgggaagcctg

SEQ ID NO: 429408 - DNA, 122 bp, Homo sapiens
aggaccttggggggagcgccgggggagggccggaggagctgggaccctactgcctcccggcgggctggggaccattccagaccccaggatggagaagagcgaggaacagagcccagaaggga

SEQ ID NO: 429409 - DNA, 122 bp, Homo sapiens
ctgtgctgctcgagactacatttcccagagcgacgcgcgcggagcgggcgggaaagagagcgtttcgggtccagtgcgcaggtgcgaaagccatctttggttatataagggaggttcaggaa

SEQ ID NO: 429410 - DNA, 122 bp, Homo sapiens
tgggctttaggggtacagaggtgaactctggaatccctggctatggcggtgtcatgatcccgtgggcatcagggactggggggaggctcaagaagatatgaggaacggggcgtcctgaggct

SEQ ID NO: 429411 - DNA, 122 bp, Homo sapiens
tttatgacaggataaatacacgccctctattggggtcaggttttgtgcctgtagttcttccgcctactgtatcatagcagcttagaatcccagctgctggctcgggctgcagttctctcatg

SEQ ID NO: 429412 - DNA, 122 bp, Homo sapiens
agaagctatttaagttttacccggatttacgtgggaggagttttcaagggtctctcggtccgtctgcgctgctactgaggagctgccaccgtgaaggcagctgccgtggccgatcctccaag

SEQ ID NO: 429413 - DNA, 122 bp, Homo sapiens
actagaccttggaaaaatcagaatggagagtcaggttgagtcacaggagctttctgctggcgtttagccattaatgtgattcagcttcttgctctttatgcctttgctcccttctctctcct

SEQ ID NO: 429414 - DNA, 122 bp, Homo sapiens
cggtcttcagctaaccaggccgggcggcccaggatgcgcacatgagggccagggtccggacgtgcccatcccacctggccctcgtgacctaacccaggagtgggccagtggcactaagatct

SEQ ID NO: 429415 - DNA, 122 bp, Homo sapiens
ctatgcgttcaatgggactcagcgcgttgtggacgggctcatctacaaccgggaggaatacgtgcattttgacagcgcagtgggggagttcctagcagtgatggagctggggcggcccatag

SEQ ID NO: 429416 - DNA, 122 bp, Homo sapiens
gacgcgagtagctcggcagggggactcgcttggctttcgtgccatccgtggacacagtcgcgcgggtaggtgaccgggttggatttcaaagtccagcaggaaatcctgccctctgggttgca

SEQ ID NO: 429417 - DNA, 122 bp, Homo sapiens
cgcgccccaggctgccctgccaggcgtcccggggcgccaatcgcaagttggcgttgccagcgtctgcccaagtcatctgcagggcgcccggagcgccaaggcggcctccaacctcgggccca

SEQ ID NO: 429418 - DNA, 122 bp, Homo sapiens
gtccataattcactttaatggatctttattcaacaaatctgtattaagcactgggctagacgctaaggattgaagcaggaataacatcaaggaggaagtgctgctctcctggagcttacatt

SEQ ID NO: 429419 - DNA, 122 bp, Homo sapiens
cacgtgtcctagccatgggtatgtggtcatgcctgaggctggggccagacagatccctgccggacagcatcactgaagaaaagcagaccaaggcctggggtagagggccggatggaggagag

SEQ ID NO: 429420 - DNA, 122 bp, Homo sapiens
gcccggggagcgtgatgaaggcctgcaggaatgccctttatctgagggtatctggttgcccgccgggatgccgggaagccggagttccagccctcccctgactcctgcgaaaacagaaatag

SEQ ID NO: 429421 - DNA, 122 bp, Homo sapiens
cctattaaaggcttacttaattactttaatgactctggacaggctttaaaacgcactcggcgctgggacggcgggcttgctgggatttgtaaacaggcgatcatgtgagactcagcggtggg

SEQ ID NO: 429422 - DNA, 122 bp, Homo sapiens
gtgggtgggaaagggcgccccgtcctgggcccccccgcccctgcgcgcagagcagagacgcgcagacccgctcccactccgcttggctcccttggagcagccccggcggcggcagcgatggg

SEQ ID NO: 429423 - DNA, 122 bp, Homo sapiens
gtccgaggcggtcttgccacgtcctcactggcacttctggaaaagcagcgtctcagcccccgttcagggcggcgcactacgtaccactactctaacaaaccagtgcctcgaaagctatttct

SEQ ID NO: 429424 - DNA, 122 bp, Homo sapiens
cctgccttgctttgcagatttggaggaaaacagaatgaatcctacacatgtgtacaaacccgcaaatgaggggaaagcacagggagcttgtgtcaaattctccagcaaagatgtgcacagtt

SEQ ID NO: 429425 - DNA, 122 bp, Homo sapiens
agagaaaaggcctaagcacctcatccccaaaaacaacctgaggaggccgttggaaagctccgagttgacaagtctcatccacgcacatgctcggtgcttccaatcggtgatcaagaccactg

SEQ ID NO: 429426 - DNA, 122 bp, Homo sapiens
tttgttttctttatcaaagtctttgtctttaaaattcctgcagaatgtgaaataggatggcgaaaactgagagaaaaggcattcctggatgaatggacagagcatcaggaaatgatctatgg

SEQ ID NO: 429427 - DNA, 122 bp, Homo sapiens
ggccaaagcatgggggaaggcgtggcaggaagagggggactctgtggtcagggaactgctcgctgagcacagctgcacagtgctgtcagaacggccgatctccagcccaagatgattccagc

SEQ ID NO: 429428 - DNA, 122 bp, Homo sapiens
ctcactgcaccctctgcctcccaggttgaagtgattcttctgcctttgccttccgaggagcgcatgcaccactacgcctggctgatttttgtattttagaagagactgggttttaccatgtt

SEQ ID NO: 429429 - DNA, 122 bp, Homo sapiens
ttctttcagaaacagtcattctgtaataatagctaaataaagttaatgctgtacaactaacgtcttgtttcttgatggtcagtttgtatggaatgcacctgcaagggtacctccttgtctga

SEQ ID NO: 429430 - DNA, 122 bp, Homo sapiens
acccttctataattccaattgccagttatccaaactctgattcggtggtcgagctggcctcgtgttcttatctgctaaccctgtcttaccttccagcctcagttaagtcaaatcaagggcta

SEQ ID NO: 429431 - DNA, 122 bp, Homo sapiens
gagcggggggtgcttttctgcgcccggcgaagcgcgtggaacttgcgccctgaggcagcgcggcgagagcccagtcccagagaccggggcgagcctcctcaggattcctcgccccagtgcgg

SEQ ID NO: 429432 - DNA, 122 bp, Homo sapiens
gtcatcaccgaataagactaggaggccttccggaaagggacaattttctgaaaagcttgccgaaactcttcattaaacacagtgtagattattggattgatgagggagtttaaatagcctag

SEQ ID NO: 429433 - DNA, 122 bp, Homo sapiens
cttacagctagtaccaagtggagggggcagggcccctgagtcaggaccctgagtcccccacgtatatggcagggcacagcatggggagggctgtaacagagaggcctcccatccaaaggggg

SEQ ID NO: 429434 - DNA, 122 bp, Homo sapiens
gatcgcagacctgcagcccaacacagagtactcgtttgtgctgatgaaccgtggcagcagcgcagggggcctgcagcacctggtgtccatccgcacagcccccgacctcctgcctcacaagc

SEQ ID NO: 429435 - DNA, 122 bp, Homo sapiens
cggaaggtccaaaccgatgcaaagccactattgagccagagtccttctgcaccgccctcccgaaggtccaaactgatgcaaaggtgctactgagccagagtccttctgcaccgagactaccc

SEQ ID NO: 429436 - DNA, 122 bp, Homo sapiens
gccggaagtgccccttagcgggtgggggaagctggtaggcacgggcggctccgcagtgaccggactcgggggaggtgagtgatttgcctaagtaaaagggaaagataattgagcgcccccgg

SEQ ID NO: 429437 - DNA, 122 bp, Homo sapiens
ctccccaatcctccagcccaggagagagcctccaagcctggccctccgtgccgccatgaccggccccacagccctgcccctcgctgggcacccgccccagccccatggccctgcccctcgct

SEQ ID NO: 429438 - DNA, 122 bp, Homo sapiens
aacataaaggctgagataagggctgctcctctggacctcaacaatgccaccatcgttttccgtgttactgcagcgttctcaatgtgtctgtctgcccgctggcatacggacccttctcttcc

SEQ ID NO: 429439 - DNA, 122 bp, Homo sapiens
ttggtacagtttcacagcccctttctgttctcctggtgcaatcttttctctgcatcacctcggcctgctaaggagactccctgcttaatctgggaacgtaacatggtcttctgttcttttgg

SEQ ID NO: 429440 - DNA, 122 bp, Homo sapiens
ctccctctcgttcacagcctcctgctctttgtggatgaagcggacgccttccttcggaagcgagccaccgtgagtgtcactaagcctctggccacaatggggtggtggggtgggcacagccg

SEQ ID NO: 429441 - DNA, 122 bp, Homo sapiens
gaacatataattatgctgagcagattcaaagtcacattgttttacttttatttcacgagacggtaagtaagaaaaagatacagtgtaagccatgaggttgagaacatttgacaatgcttgcg

SEQ ID NO: 429442 - DNA, 122 bp, Homo sapiens
cgcgcggggggaggcggcggagggcggaggagactcgcttgcaccccagggccgcgggcacgcagagctgtgttgaaggacatacttttcaggttcctgacagtcactgagctatacgcaat

SEQ ID NO: 429443 - DNA, 122 bp, Homo sapiens
agtaatgtaatttatattcattttttactcttttccatcaaaacataattttactaagtacgcatgttctgtgtccgtgttttgtcatcactgaagccacttttggagtcacctagtaatag

SEQ ID NO: 429444 - DNA, 122 bp, Homo sapiens
ctggactgtgttcccagccagcccatcatgcacgggaattgggcctcagatttgatttctcgtccctgcccggctgatcacaaagcacaccctgctcgggtttccagggcattttctcgtcc

SEQ ID NO: 429445 - DNA, 122 bp, Homo sapiens
gcaggattctgtcactgctcgttgcctgaactgtgctgtctcccacagaatcatggagaacgggcaggagcgggtggaagtggaggaggatgggcagctgaagtcagtcacaatcaatggtg

SEQ ID NO: 429446 - DNA, 122 bp, Homo sapiens
cggtgggccggctctgcaacagctaggcgaggcacatggggtcagcacgcccgcggtccccgtgcaggccgctgcgattcagggatcaagtccagggtcacccttcaccacccatccgggaa

SEQ ID NO: 429447 - DNA, 122 bp, Homo sapiens
agagcaggttaagcttgggaagaactgtatctgctccccacttccctccgggaacgaccgcgggttaaaaatcctttgaaacgatcccagggtttgctccgttcgtttgagaaaagcccctt

SEQ ID NO: 429448 - DNA, 122 bp, Homo sapiens
attcactgaacacaaactgagttcatttaatacttgcctctagttaatctctgctaccaacgctttgaataaaaggcatcctttaggtgtctggatgtttgttattcgacatcttagtcatg

SEQ ID NO: 429449 - DNA, 122 bp, Homo sapiens
aagtcggttgtaacggagaattcctgtcatgttaaaaacgcgaagcattttatattacctcgtgctcgaccagggagtgaccaactctgaggatgaattccacctaaagcctaacccagatt

SEQ ID NO: 429450 - DNA, 122 bp, Homo sapiens
tgttactgggtggcagggggaggaaagtattcagtgttttcagaaccacccaccaggaggcgcttttgcatcaggggcccaatcaggttagcccagagcacctggatttaagtagcaaaaac

SEQ ID NO: 429451 - DNA, 122 bp, Homo sapiens
cgggcgctcgctcgggggcctacagaatggcgtgtttcggggttgtggcgggccgaggggcggggtcgcagcaaggccccgcctgtcccctcctgggcctctcaaagtctgagccccgctcc

SEQ ID NO: 429452 - DNA, 122 bp, Homo sapiens
caggatctgataaaagcccccgaaaatgccccggtcagcccagccacacccgggcaacaccgacagccattctccaccagggccccagcgcccagctgagtgagacccacccggtagcttcc

SEQ ID NO: 429453 - DNA, 122 bp, Homo sapiens
agagaagacagagaaccctcctgtgaagcaggaagtggtgagtgccaggagaaagttcaacgtggaatcaaaagaggaagaccctactccgtcttttcattgtgaattctcagctcttaact

SEQ ID NO: 429454 - DNA, 122 bp, Homo sapiens
agggctgtgagcgcttgcacgaaaggaaaaaccccaggccgtgtgaagtctaactttccccgtcctctcggtcaggcaatcccaccggggcacctgtctaaaaacaccccgcctccgaacgc

SEQ ID NO: 429455 - DNA, 122 bp, Homo sapiens
gccatccatcctcttgattctttttgagtagctaggactgcagatgtgcattgccatgcccgactaatttttttttctttttagttgaaacaaggtctcactatgtttcctaggttggtctt

SEQ ID NO: 429456 - DNA, 122 bp, Homo sapiens
gggccccagatccaggtggaaggacagcagcgggtcggcaggcgagggcgctgcggactgcgggacggcgggcggcggcggggagcgcggggcccccgcggggggcgcccggggctcggggg

SEQ ID NO: 429457 - DNA, 122 bp, Homo sapiens
taacactccagaagcgaggagaagatcgccgcgactggcggcctccacggcccgccccggcgaccaggccactttaaggcttccggccacacccccgccaggccacgcccctcatggccaag

SEQ ID NO: 429458 - DNA, 122 bp, Homo sapiens
cgctgccgccggggcccccacggggtctgtccccaaggaaacttctggagcacgtggcgccgcagctgagccccagctgcctgcgcctgggctcagcttcacccaaggtaccacggacgctg

SEQ ID NO: 429459 - DNA, 122 bp, Homo sapiens
gctaaaattggtgggctaaatagttggaaaggggcctggttaagttttgcgttagaagtgcgtttaacttgcaggaatttcgccttcctgggcatccgttggaccccattgtactgtaaatt

SEQ ID NO: 429460 - DNA, 122 bp, Homo sapiens
gccaactttatgctgaaatttcttttctgcccttttttgggatgtttccccattgggaggcggagccgggctgcggcggggaaggcggagggcgaggggaagagtcactgagctgcggggca

SEQ ID NO: 429461 - DNA, 122 bp, Homo sapiens
tacacatacagtcacacatcgcccgatggcagggatggttctgaggaaggcgctgttaggcgatttcgtcgctgtgcgagcatcatagtgtgaacttactcaaacctagatggcacagactc

SEQ ID NO: 429462 - DNA, 122 bp, Homo sapiens
ggtgtgagccaccacgcctggccagaaattgtttttaagtgtcatagtgaagatgaggggcgggggaagcatttattaatggaattaggtgctgtaatgggtgcaactctgtgcagaaactt

SEQ ID NO: 429463 - DNA, 122 bp, Homo sapiens
ccactgctgggatgtttggggtgcagcaggaattgccagtctctgcagctctcctctccccggctcaggaaacttgacttcatgcttgcctggaaacccaccttccagccctgccctcgctg

SEQ ID NO: 429464 - DNA, 122 bp, Homo sapiens
agtgactctgtcggggactacaaatcccggcatacaaagcagctacccgcttttgttgggcgttcaggggccagagctatctcagggtccctgtttgtgagtaaatcgaatcctttcatctt

SEQ ID NO: 429465 - DNA, 122 bp, Homo sapiens
cccgcgtgttgcttttctttttaattatttttctgtagccctcctttgcggccacaaactcgctttctaacccaggttcagcccttttattggctgagtgaccttgtgcaagtcacttttcc

SEQ ID NO: 429466 - DNA, 122 bp, Homo sapiens
tccttctggatgaggagggccacatcaaactcactggtgagtggagggcgcctgccccctcgggacccaggggaggacaggacaaggtcatgataggtctcggctgagtgctgggggctcat

SEQ ID NO: 429467 - DNA, 122 bp, Homo sapiens
tgggaagccaaggtaggaggcttactcaaattcagttcaagtccagcctgggcaacatatcgagacccatctctaaaaaataataattattaaaataaattaatttttttaaagccactcca

SEQ ID NO: 429468 - DNA, 122 bp, Homo sapiens
ggaggggacagggaggtgaggtgggggaggaaagtcaactaatgccagcctgtggggttccgtcctgctggggacctccaggagaccctgcaaactacacctcagcattgtcccatccacag

SEQ ID NO: 429469 - DNA, 122 bp, Homo sapiens
aggggctcaggatattcactctgtggtccagagtcaactgttcccataacccctagtcatcgtttgtgtgtataagttgggggaattaagtttcaagaaaggcaagagctcaaggtcaatga

SEQ ID NO: 429470 - DNA, 122 bp, Homo sapiens
cccacctcagaattgatgctcaaaatgaagcagtatttgtgaaacgaaaatacacacgctcgtggtacgccagatcggtgtttacgtcctcgtcagtgaacgcgtcgatgtttaataagaag

SEQ ID NO: 429471 - DNA, 122 bp, Homo sapiens
ttccggtgatccaccaccctcggccttccaaagtgctgggattacaggcgtgagccaccgcgcctggccggaaatcatgtaatttaaaactatatatgggtgtcttaggcggcatcggtccc

SEQ ID NO: 429472 - DNA, 122 bp, Homo sapiens
cacacaccgtggcgcctggagccatgcctgatgcccacgctggcggcggacatgaagacgcggctgcacaccttgcacacatacttcttgtccttgctgtggacctgcagaggcagggcagg

SEQ ID NO: 429473 - DNA, 122 bp, Homo sapiens
gaatggataatctagatgatgaagtaatttgctggctacagacccaacactctgcagactcgactgcggtccgcctccgctgcgccgcaggctgtgcagcgcgacccccgcggcgcttggtg

SEQ ID NO: 429474 - DNA, 122 bp, Homo sapiens
tgtagggagaggcttgggcttcggttatcatagaaacagaggccggctacacctaaaaggcggggcgtggacctaagtcgtcgccaaagaaacggcgttctggacggggacgtagggtcccg

SEQ ID NO: 429475 - DNA, 122 bp, Homo sapiens
gctgtgaatttgacaaggaaggctctggtactgcaatagtttattgttatctctatcaagcggtgcaccccccaccccccacccatcatttcttaagcgctccagtcccagctcactaaggg

SEQ ID NO: 429476 - DNA, 122 bp, Homo sapiens
tcacctccgctcactccctgagagccgctggcctgggccgcaggaggagaggccataaagcgacaggcgcagaaaatggccaagccccgaccccgcttcaggcagatcttgcatctcccctg

SEQ ID NO: 429477 - DNA, 122 bp, Homo sapiens
tgtagaagaaaagcctcatgccactagatttggcagtgatttcttggatataacaccaaacgcacaggcaacaaaaaatagataaatcagacttcatcagaatttaaaacgtttgtgcatca

SEQ ID NO: 429478 - DNA, 122 bp, Homo sapiens
tttctgctgttacttgacatccagcatatttctgttttgttatggcaggaccttgttgctcgcctggatgaactcgggggcgtgtatctccagtttgaagaaggactggaaacaacagcgtt

SEQ ID NO: 429479 - DNA, 122 bp, Homo sapiens
aaccagcagctgacagtcctcctttgccactctgcaatccagtttcctggagcaaagctacgggccttttaaaaacccagctgccagtccctcttcactcacttcaccggcctccaacttgg

SEQ ID NO: 429480 - DNA, 122 bp, Homo sapiens
tccttttccaatcgcctttcccaatgcagtgatctctccatacatcctaaggtatagtcacgctgaggttcactcatctatttttgaacacattacacacttaaagtctttgtgtttttaaa

SEQ ID NO: 429481 - DNA, 122 bp, Homo sapiens
ccacctccccaggggagcacgggcgctgccaccacacgctgggtggttttcacacaagggcgtactcgctccctatggcatccacgaggtgcgactgtcactgtccccacttccatagatgg

SEQ ID NO: 429482 - DNA, 122 bp, Homo sapiens
gacttccggcatgccttttttttttttttttttccctttccccgcaccgtcacctggtggcgcttactggaagccgcaccgaggcgtgtgctgtattttaaaaatcccatttctggtcaatt

SEQ ID NO: 429483 - DNA, 122 bp, Homo sapiens
tatcttcaatcacataaactaacgatatttggtacagacatgtttactgactttacttcacgttaccattccactcttcactcttctttcttgcaattcagacagtcctgaggtcattctcc

SEQ ID NO: 429484 - DNA, 122 bp, Homo sapiens
gtggggctgggccggcagccgggaccccgggcctcctgtcccgtcccttcacggcgactgcggccccggctccggagcctaatctgggcagctccgcgtctccccacattatgcgggggcca

SEQ ID NO: 429485 - DNA, 122 bp, Homo sapiens
aatccagctccagaggggaaatactggtctgattgggctgtgtcccaaaacgctgggccacgctactagtgggcaagatctccatgcattaaggtctccatgtggtctgcatctcatgatta

SEQ ID NO: 429486 - DNA, 122 bp, Homo sapiens
gggtgcggagcgctaagatctgcccgagcctctcttggaacacggaagagcaccgcagagcgggtaagaacgctaggcgagttggtcttagtgcgtctgcaccccgccgcctctctctgcgg

SEQ ID NO: 429487 - DNA, 122 bp, Homo sapiens
ccatccttactggatgggaggaaagtaggggaaaggggagatgcctgaggggccggaaagcgtcttcctggtcactctgggcccgcccccacccccaccgtgcagactcatttcgacctttc

SEQ ID NO: 429488 - DNA, 122 bp, Homo sapiens
agcctgctcttcaagtcatggggaaatcctttctgaaggaagaacctaagtactgccgggcgggaggaaggggagagaggcgccatcggaacagaaacctgtcccatcttccggacacctgc

SEQ ID NO: 429489 - DNA, 122 bp, Homo sapiens
ccctccctcttcatgccagtggccaggcacttctgatagcggcagtactgacagcggttccgctggcgcttgtccactgtgcagtctttgttgtcccggcaagagtatgtaaggtctttgcg

SEQ ID NO: 429490 - DNA, 122 bp, Homo sapiens
actgcacaaagcacttagtaaaaagttatctcaattcatgagtcgcgcagcacaaagggccgatgtcactaccaacataccccgcagcccaaaaccgaagcagcaacccccagcgaagggaa

SEQ ID NO: 429491 - DNA, 122 bp, Homo sapiens
cacatcacaggaatgtctccgaggaaatgctcaaacacgagctacactatgccgccttagcggcatagtcttttccaaagactcgctgggatacatgtgtccagttgttaatactggtctgc

SEQ ID NO: 429492 - DNA, 122 bp, Homo sapiens
ttttcaggtaagtcactggtatcatattgagttcacttggtgagattatattttcctgaacgttctagatgcttgtggatgtatgtcgatgtctagatattgaaaaattaggcatttcttct

SEQ ID NO: 429493 - DNA, 122 bp, Homo sapiens
agggggcaggagagcccaaactaaatatgtcagggcatccgatttattattcttggcctccgaatggtgtgtactctggtaactccccacccactctttcattccggcccggacgcggaagg

SEQ ID NO: 429494 - DNA, 122 bp, Homo sapiens
ttatttaatcataagtccatgacatgccaggcactcaggaaatagtaaaaattggacatgcgatattctgcccttgtgtagcgcacactagagtgggaaagaaagtgcacttttaactggac

SEQ ID NO: 429495 - DNA, 122 bp, Homo sapiens
tggggggccagtgttctggagagctgtgcagagaggaacacaatgtcagacagcaggagccggagcccagggaggaaaccagatggaaagggctctgctcagaccggctcattgtgggcaca

SEQ ID NO: 429496 - DNA, 122 bp, Homo sapiens
cccttcgtagcttttagtgaaggctacaaaagtatgctttttatggattacacatgtgcacgcaactactttaattactacagaaaaaaacgaggctccttattaaaaaaaaatcagaaaca

SEQ ID NO: 429497 - DNA, 122 bp, Homo sapiens
ggcaccgcgctttcagcacggccctgcccgggcgcgggggtcccagctcgcggccgcggccgggtcctcactgcgtgcccccgcagtgctgccagatcctggtagtgaacggcgcggagctg

SEQ ID NO: 429498 - DNA, 122 bp, Homo sapiens
tacaaagttacattcctatgcacatgaagacttggccctggagaccagtctgattggttgcgggaggggaccaatcagaggtattttcagtttttcatctgccatgtagaaaaggaggggct

SEQ ID NO: 429499 - DNA, 122 bp, Homo sapiens
actgatcgccggagaccctgggccttggaagaagtcgcctccccagatctctaagcaggccgcgcgaccctcgagtctcaggtaagcgggaaatcccacttcacaagaaagcccctctctcc

SEQ ID NO: 429500 - DNA, 122 bp, Homo sapiens
ccttgacggatgagggcgttctgcatgaaggcagctcctccagcacccatatgctctgcacgctgtgactccagccttgtggtccctgcagcccccggctccctgcaccagtgccacggcat

SEQ ID NO: 429501 - DNA, 122 bp, Homo sapiens
ggagtcggatacgccccgcggacaccatgcacccaatcagcgacgagctgtcgcggatcgcgggacacgccccctgatccaaaggcccgagaagctcttgcacaggacagcctctggaaccc

SEQ ID NO: 429502 - DNA, 122 bp, Homo sapiens
gaagtgattctgtcctatcaatgcctacatggccactcacaggattaatgtgacttccctcggacctctcctctaccactttccatgcaggctttgtacaaattataagccactttatcaga

SEQ ID NO: 429503 - DNA, 122 bp, Homo sapiens
gagggcaatgccgagactgcacaggtgctgggcctcaccccctggatggactatgagttccgggtcatagccagcaacattctgggcactggggagcctagtgggccctccagcaaaatccg

SEQ ID NO: 429504 - DNA, 122 bp, Homo sapiens
tccagcctgggcaaccagagtgagcactgtctcttaacagaggccaagtgcggtggctcacgcttgtaatcccagcattttgggaggctgaggcgggcagatcattggaggtcaggagttcg

SEQ ID NO: 429505 - DNA, 122 bp, Homo sapiens
gaagcagcactcctacttactagggcaagactcatgaacagggggcgggggctccgggggcggggacgcgccccgttctctttcgctcttcttcccggcagccttagcgccaggcccggcgc

SEQ ID NO: 429506 - DNA, 122 bp, Homo sapiens
tttcgctccttccgtgttgaagacctctaattccccgacagtcttcgttcggttgtccagcgtcctgccactctcatctcaagcggctggagagccacattttctcagctttggatcgcact

SEQ ID NO: 429507 - DNA, 122 bp, Homo sapiens
atggtgaggatggccagcgtgagcagcaggatgaaggtgagcaggctcacactgtctggccggtggctctcttccgcctccttctcagtgacgagctcctccatggcgctgctgttctcgac

SEQ ID NO: 429508 - DNA, 122 bp, Homo sapiens
aggaaggggcccggggccaggtggaggtgggttgcaaggtagggccctgtgcgcgcggggcgtctggggaggaccgagcgcaggggtggcgggagacccgagcctgagactcgacccgctcg

SEQ ID NO: 429509 - DNA, 122 bp, Homo sapiens
ccctccccgaggccccgcccccacggcgaaggcccggggcagttaacccttctcttgctgcggcagagtccgcacccgggcaggcccatctcagaattaacgctttgatggcatcaccgcgt

SEQ ID NO: 429510 - DNA, 122 bp, Homo sapiens
caccgtcccccatccagccccctgtgggaggagccgtgggaggggtcgcctcttgcccggcgcgtgcggcagtagcgtctctgcgttcggccccgccctacccagggccccgcccccttcct

SEQ ID NO: 429511 - DNA, 122 bp, Homo sapiens
agcccaggctcctctggacatcatgtgacttgggggacgacttgcctttcttctgaaacacggctacagactataactttaaaacacggggcttagctccccctcaataacgacacggccgt

SEQ ID NO: 429512 - DNA, 122 bp, Homo sapiens
ttgttgcagtttcacactttcctttcttactgtatcttccaaatcggggtgtgcttggcacggcacatcttggttgggaccagcacatttcaggagctcatcagcccatgtgcctggggctg

SEQ ID NO: 429513 - DNA, 122 bp, Homo sapiens
gacacccttccataccaacccaggaaaaagtgattcagctccggtccaccctgggtgcagcggtccttctgccaagatgccttcatatcatacagctattattttcgggaggattccaagtg

SEQ ID NO: 429514 - DNA, 122 bp, Homo sapiens
gggtcgcagaagcccaggccagcgagccctacagagtgaggacactgaagtgtgcaggagcgaaggttaacagtaggggagattgtcgatctcatcaccataataaagagtttcctgtgccc

SEQ ID NO: 429515 - DNA, 122 bp, Homo sapiens
tttttcttgtgctgtctttgtactctttcctgtgaattgctttttccctttaacttccatcgtagcaactctggaaaaccaaaaccaaaaccaaaaacaatcactgcagttctcttcatcaa

SEQ ID NO: 429516 - DNA, 122 bp, Homo sapiens
gacccaggacagtgctgggcccaggataggcggctgcaaagcgagtgggcaaatgaagagcgaggggtcgctgaaaggcaaaccactccccggggatagggccagcgccaggggcagctgct

SEQ ID NO: 429517 - DNA, 122 bp, Homo sapiens
tgacctcactgcaccacctcctgccctcacctcctatctcccagctccagccaacacaggcgctggcagggatttcagggttgccacctccagccatgctgccctggggtccctggaagatt

SEQ ID NO: 429518 - DNA, 122 bp, Homo sapiens
caaagaaaagggggcggggaggagcgcgtctgatgccgactagggggctcagaccaggcccgggagagcagcagcggctggggggacgtgcagatcctttacattttaatggtggcctcttt

SEQ ID NO: 429519 - DNA, 122 bp, Homo sapiens
cggcggcggcggcggtggtggcggcggtggggtggcgggagcggagcggcatggccacggcggcttctaacccctacctgccggggaacagcctgctcgcggccggctctattgtgcactcg

SEQ ID NO: 429520 - DNA, 122 bp, Homo sapiens
gcgcgccgataattacagccgggcgcacagaacacaggatgcatatgctgcgggtgtgtgcgcgcagtgttgtgcctttcgccagggctgaatggggtgtgtgtgtattccgtaggcatctt

SEQ ID NO: 429521 - DNA, 122 bp, Homo sapiens
gtcttcagtttaaatgcctataaagtgagaataatcattgttccttcttcatctggtgaacgggggcagtaggtgagatagggcctgcaaagggcccaaacaggatttatctcgaagacccc

SEQ ID NO: 429522 - DNA, 122 bp, Homo sapiens
gctgcagagtccccttcctggagcctgctggggtttcaggcccaaggcagacagcagcttcgatgtgggaacgctggagcaggttgtgagcagagagcactgggtccagctcctcgctgtgc

SEQ ID NO: 429523 - DNA, 122 bp, Homo sapiens
gtgggtggtaggtgggtgggtggtctagtgaatggatggacagatggacggacggatgcacggatgaatggatggatggagccccgtgcaaaccaaggtttcatcacgtgcctaacgactcc

SEQ ID NO: 429524 - DNA, 122 bp, Homo sapiens
ctggctcccgatctggctcccgttcccactccccgcccggtgtgctcagcttgctcggggcgtctccctactgaagaattatgttgcataaagcagccgccaccatcttgaactggcagtga

SEQ ID NO: 429525 - DNA, 122 bp, Homo sapiens
gtcagttttgttttgttttttttttaaaaaagcatgccttcattccaaatccccagattccggctctcaggaatgtttcagggtaaaacttggggcaaagcaaggccgttatgatgggggtg

SEQ ID NO: 429526 - DNA, 122 bp, Homo sapiens
tattattagcacgcttactcttttggattaaaaaaaaaagaagcaggcctcttgtctctgcgagggtagagtagaagctggctcctcaaaatgcctaataaaagctcatttatgcagcaaat

SEQ ID NO: 429527 - DNA, 122 bp, Homo sapiens
tgcattgagaagggggatgaaattaatgagataatagcagggccaaggacccggagcgcgcgtctgccctcacggaaggctctgtaattccttttccgcaacgggagctgcagatctaaagg

SEQ ID NO: 429528 - DNA, 122 bp, Homo sapiens
cctctttacaattcacgacgttactaccaactttgccattgagtggttcctctccctgcccgaattcctggccatcttcgttccagagagcgatgcaatcatggccttgaaaccgaacgggg

SEQ ID NO: 429529 - DNA, 122 bp, Homo sapiens
aacctacgcttttccctccactctgaaatattcatggagcattgaacatacaggccccgtcgcagttaagagtatgtgataaatattggaggagagatttaagtctgggaaagccaggaata

SEQ ID NO: 429530 - DNA, 122 bp, Homo sapiens
ctcaggtgtttttaaaggacgtagacccggtggtgattgttgtgggacgatgaaagggtccggccccaagatcgatgtagtttagggaaatatcttttcccaaggaatgtctccgagtttac

SEQ ID NO: 429531 - DNA, 122 bp, Homo sapiens
taagtacgagggctggaacagtgagcaggatcagtccattgcttttgcctacctgctgagcgctgattggtccccgtttaggaaacggaaaaaggggcgtgcacgcgggcgcggctgcgtga

SEQ ID NO: 429532 - DNA, 122 bp, Homo sapiens
gttaagaagattgcaatgccatgacgggctgaggttgcatttctggacgctgcttactcccgcttccttccatctgtttcaggcaaatcattatgcagttctaattagaacaatcttctaaa

SEQ ID NO: 429533 - DNA, 122 bp, Homo sapiens
ccaccccggcctcctaaagtgctgggattacacgcgtgagccaccatacccagcccagaccggggtctttaagggccatttattctttgggagacactctaaagtaacatcatgtatgaggg

SEQ ID NO: 429534 - DNA, 122 bp, Homo sapiens
aaaagtgtcttttgtccaggaggttcttttagttatatctccctcagatatttcagcagccgactgtgattcacattgcttctacgaggactttttgaaagtcagggtgtgtgcatgtgagt

SEQ ID NO: 429535 - DNA, 122 bp, Homo sapiens
atacattcttgaaagcaaaagaaaaaaaagttgtgggggaggttcaaaatgacctgttcccgtcagtctcctctggaaatgtactgggccagaataatctgagctattgggggaaaaaaaca

SEQ ID NO: 429536 - DNA, 122 bp, Homo sapiens
cctggcataaaagggcaagcagtgggggagctgctgacagctggaaatgccaacgtcctccggggtttcacattccgggtttcacattccagaagccaagatctgccagccctgcctgttct

SEQ ID NO: 429537 - DNA, 122 bp, Homo sapiens
gcctcttccgggcttggcagcgggcggggtccattgagtaaagccttgcgtgcctgcgcccgcgacggaggcgcgcttcaaagcgcaggcgcggggagggggtgggggaggagggaaagcgg

SEQ ID NO: 429538 - DNA, 122 bp, Homo sapiens
ggtccagggactgccagatcaggggaccctttgcgtcctggagccttgggggctggatgacgtcgccgggcacctgaggaccccgcccattcctccctcggttccccagggagcgggcggcc

SEQ ID NO: 429539 - DNA, 122 bp, Homo sapiens
aagactctctgatagtgtggacaagaacctggtaactgtggttgtttctgggaaaggaatcgtagatagcaccagatttatttatttgcaaagaagtaaagccaataaagtttaccggatga

SEQ ID NO: 429540 - DNA, 122 bp, Homo sapiens
accaagagcatgttcgtgtcccgggccctggagaagatcctagccgacaaggaggtgaagcggccccagcactcccagctgcgcagggcctgccaggtggcgctcggtgggtgagccgctcc

SEQ ID NO: 429541 - DNA, 122 bp, Homo sapiens
gttgcatttcagatacaagtagaagacgccacaatcacacacgtggatgtgagcagagcacgtgctgcgtggatgatgctgacacaaacaggcctctcaatgtcaccctgggaaaagcaaca

SEQ ID NO: 429542 - DNA, 122 bp, Homo sapiens
acgccagggcctcgaaatagaacaaaaccggccggtgggggagggggaaggtgagggtctcggaggacacagggggttagagagctctctgcaaatgccgaagacccaagcaggcctgccgc

SEQ ID NO: 429543 - DNA, 122 bp, Homo sapiens
gggggagggggagggagtagctctgcgccaatcagtggcgccggcctgggaggttgctagcggtatccacgtaaatcaaagggcgcggagccaatgggagggggcggagggggcggggccca

SEQ ID NO: 429544 - DNA, 122 bp, Homo sapiens
aataacaaaaattgaaattcacctttgggaggatactcagttctctctgtcttcttatggcggcagtcattagttcagcctacaaatgagcatgtgaagcaaatgttctgctttcttatagt

SEQ ID NO: 429545 - DNA, 122 bp, Homo sapiens
taacctagagcaaaccaaaataaagagacagtcttgcatttctagtgccaggacccatctcgggtcgatgaaatctgagatgagtcaaggcatgagaggcagctgtttgaataaattcattg

SEQ ID NO: 429546 - DNA, 122 bp, Homo sapiens
aagtgctttcctgaaggagcacgtgaaactcacatggggctgtgcttggaggagcagaggcgaggccagagtccggacataagcatgctgaacaggtcaaacaaaacaagggcgatgtaatg

SEQ ID NO: 429547 - DNA, 122 bp, Homo sapiens
accccatcactcatgtcctgggaagtaggagccatttccctttttgccctatctacccaccgtatctagtgctagataggtcttcatttgcccaatttctgccccacagcaatgaaagagag

SEQ ID NO: 429548 - DNA, 122 bp, Homo sapiens
gtagaagagtggccgctttccttctgggcacgcacttgggaaaaggcttggtgagagcagcgagaagaataggtctaatttcttgagccagtgtgcggaggtgcttcccagcccaggctaag

SEQ ID NO: 429549 - DNA, 122 bp, Homo sapiens
cctcctgggttcaagctgttctcctgcctcagcctccagagtagctgagattaaggtgcacgcaataggacagactttctgtgttgaattgcaagggttgttagtaggatttgttgagacat

SEQ ID NO: 429550 - DNA, 122 bp, Homo sapiens
aacaccgtgaccggaagaggcttcacacgcgtcggctgcagggtaggagacccgacacagcgccgggtcctgatgggctgtgacgtgaagatggggagaccaggcccttagcagccacagaa

SEQ ID NO: 429551 - DNA, 122 bp, Homo sapiens
attccggcgttgcatcagagagcgtagatctgagggcgcctgcgagaatcggccgagcgccgcggttccattggttacgagaggtgggcgagcggcgccggggccgccatctttggtgaggg

SEQ ID NO: 429552 - DNA, 122 bp, Homo sapiens
gaaggacagatgccagaagcgacactcacgctgggacctcttccaggaagtcttagtgatcgatgcagagtttcactgctgaacagagtgagccggtgcagggtcgagttacacatttaccg

SEQ ID NO: 429553 - DNA, 122 bp, Homo sapiens
ggctcacgttccaaatctaaggtgggttagggttttccgaggtctgaacttcaacctgggcgttcagactcctaggcgagaaaaggagggataagaaccatcctaaagctgtaggactggaa

SEQ ID NO: 429554 - DNA, 122 bp, Homo sapiens
gacgatgggcggccaggcagagacgctcctcacttcccagacggggcggccgggcagaggcgctccttgcttctcagatggggcggccaggtagaggtgctcctcacatcccagacggggtg

SEQ ID NO: 429555 - DNA, 122 bp, Homo sapiens
tcctgttcacagaatcacagtcccagagtacactggggaaggctgcctgctcaccttctccgcagtcttcgccagcatacccatctttgcagacacagctgccatcgtgacactctcctcgg

SEQ ID NO: 429556 - DNA, 122 bp, Homo sapiens
gcggacaggatccccaggcaccgacccccgtggggggagatgcggtccgggcgcggcccccgccccggcccctccggccccagccagcaggaactcgcagctcagctcgtccaggcaggcgc

SEQ ID NO: 429557 - DNA, 122 bp, Homo sapiens
ttggctagggggaggggccgatgggggctgtctggggttcccctttctggaagaccattccgaagcagggcagcatttctagaatgccttacgttttctctggaacagtctccactgagatt

SEQ ID NO: 429558 - DNA, 122 bp, Homo sapiens
gcctcccccgccccctcccggctgtgggctcctgcgcagccccagcctcccccacgagcgcggctgcctgctcctcggcgcccagtcccgtcgaccgcccaaggactgaggagtgcgcgcgc

SEQ ID NO: 429559 - DNA, 122 bp, Homo sapiens
gccgcaacgcgcagagcgctggttgacggccgggactccattttgttcgccgttactctgcgcgtaagtcgcttgtccgtggcttctctgagaagaaaagttgaaaaagggtaaaagttttc

SEQ ID NO: 429560 - DNA, 122 bp, Homo sapiens
aaccaccaaagaacatcacgctgtcttatgtcaaatgctcgacaatacctctcagtaggacgttgttgcaaggctagctaattttaaatctggtatgagtaatacagtcaaacctagttagt

SEQ ID NO: 429561 - DNA, 122 bp, Homo sapiens
caggcaattgataaaggcggcacaatggggaaggagaggtgaggtgtctccttagccacccgacaccatctcaattcagttcaattgtgaaccactaggagaaacagaattaaataactatc

SEQ ID NO: 429562 - DNA, 122 bp, Homo sapiens
cgccatggcagcggcgggggcagagagacgggtcggcgctggggacaaaatgcctcaacgcgtaacggacgccagccacccgacagggcggggccacggccggaagtggcggagagtgctaa

SEQ ID NO: 429563 - DNA, 122 bp, Homo sapiens
cttggtttttcagagcttcctaatttgacagaagcagcgtggtttccttccttgtcaagccgctatagcaccagcttcccaatcctacaggctgctagctagcttcctgattttggaggcag

SEQ ID NO: 429564 - DNA, 122 bp, Homo sapiens
tggaccacaagaactgggtgtgcagctgcaatgctcccagggccgccacggaaatccgaccgccaggctgcctcacacccctagtccgcctgctggaaagtgctgcagcgccggtcctgccc

SEQ ID NO: 429565 - DNA, 122 bp, Homo sapiens
attagttggtgcatgataacactgagaccagagtggaggagatttaactccaggcaaccacgccacactgccactcaaaagaaagctctcctgaaaccagacagcattgtttctgtgccaga

SEQ ID NO: 429566 - DNA, 122 bp, Homo sapiens
cctgagccacctggggccatctcggcgccccctccccatttccttcctcctcctcctgctcgccttggctcccgcagcccctccgcttgggcactcccggaaacccagctgtgcctcagcct

SEQ ID NO: 429567 - DNA, 122 bp, Homo sapiens
ggcggcggggcctggagccggatctaagatggcagcggcggcggcggcggtggggccgggcgcgggcggcgcggggtcggcggtcccgggcggcgcggggccctgcgctaccgtgtcggtgt

SEQ ID NO: 429568 - DNA, 122 bp, Homo sapiens
tgggtgaagtctgccatctggttggccgtgggtctggggtagatccctcttctgctctttcgggctgtccatcagaggtgaaaccggccatctagatatctattggggcgaccgctgcggtc

SEQ ID NO: 429569 - DNA, 122 bp, Homo sapiens
gtgatgcgattcaccctgtctgtccgttcctctgctgatggacactggtgggggctgggtcgttcggggctgagcgtgtgatgagatcaggagcgcctggttttttgggggaggtgagggct

SEQ ID NO: 429570 - DNA, 122 bp, Homo sapiens
ctgggaaacttttttttccgctaaattcctcccttcccgaggaacagggggcaggcggtgcgctcctgtccgaggggtgagggagagggagggggaggaagaaaaagactgagggggaaaaa

SEQ ID NO: 429571 - DNA, 122 bp, Homo sapiens
agagaggagtagggagagggagagggggcgagcgagcccagggcacacttaccgagcccacgcaggagtccttgacgtccacccacacggagtcggccaccacctccctctggccgctggca

SEQ ID NO: 429572 - DNA, 122 bp, Homo sapiens
cagccgctagtacgcccaacgcaactctcacctgcattgcggcggccgaggcggctgccacgatttcacttccggttttccagtcagcaaacgcctacgagaaggcttcgtccaccaatcag

SEQ ID NO: 429573 - DNA, 122 bp, Homo sapiens
gccagaaagtgggggagagctaccctaaggctatctgggaatgagaggcaggctagaagtcgcctgcatgcccaaatctgcccctaccacccaaagaagggaggaatccagcaaactgtatt

SEQ ID NO: 429574 - DNA, 122 bp, Homo sapiens
gggtgtcaccaggaaaggcagatgttcctgcaagtaaccagatgaatgtctgtgagtgtccggggagtttcccctgctgggcgtcagtaccaagccagtttcgacttcagtgaaaaagcatt

SEQ ID NO: 429575 - DNA, 122 bp, Homo sapiens
tcccacttcatttgattccaaatcctatccttctccactgacacactcaggaaagactatcgtggatactagaatattgtgtgccacaatatctattcagaatccactatgtgaaagacttg

SEQ ID NO: 429576 - DNA, 122 bp, Homo sapiens
tatttgataagactgttgagtgatgggatagcatggtggacaatccacataactgagtatcgagacacctgtatctggacccagctctgttagtaagaagctgtaacctcagcaagtcactt

SEQ ID NO: 429577 - DNA, 122 bp, Homo sapiens
acccttgccaccttcacctccccccaagtgaggtgggagctggagccatgagatgaaagacgggaaagccatgaaaaactcatgataaagaatgttgcttctttggttaataacagtcgagt

SEQ ID NO: 429578 - DNA, 122 bp, Homo sapiens
cagccatgggaaacccccttcttactgagctgcctgccctgaccctttctcccctgactgcggactctgatttgtggctctggttgggaatgtagatttggggacattgtgctcctcatggg

SEQ ID NO: 429579 - DNA, 122 bp, Homo sapiens
gatgcgcgatgcttccggtctcgcgatagcggaaagggctgtaccatccggaaatgggaccggggccggcggctgttggagccctgcgagctgggacggccggcgtgtgtccttccgtcttc

SEQ ID NO: 429580 - DNA, 122 bp, Homo sapiens
aaccctgtaacaatcccccctttatgacatcactgctcatcaccatggaaacatttcctccgagtcacagagactggattgtggcatcatagcatcaggcaggaggaggagaagaggaaagg

SEQ ID NO: 429581 - DNA, 122 bp, Homo sapiens
aactcgagagtatgacccagatgaattcgggagatggatgaatgctgtcgtcgatgggggcgggctttaggcatctcacatgttgcatgctacggtggacctctgagctttttgctgccccc

SEQ ID NO: 429582 - DNA, 122 bp, Homo sapiens
catgcctgtaatcccaacacttggggagtccggggggggcggatcacgaggtcaagagatcgagaccatccttgccaacatggtgagacgtccttgacctgatgtcactttttctgtctgtt

SEQ ID NO: 429583 - DNA, 122 bp, Homo sapiens
cctgcctttttctacctggcttggctgacctgcagtcatccacagatttccagaggtgatcgggacatcagaggtgtggtggcagttccccttgattctgcctcctgatattcacacttatg

SEQ ID NO: 429584 - DNA, 122 bp, Homo sapiens
ggatgccgttctcttgcaggttcaggtaccgcgtgttgaccgggatgctggctgggacctcggccaggtctctccgtgtgcagatcacccggctggcctggttgctgcaggagcaggccacg

SEQ ID NO: 429585 - DNA, 122 bp, Homo sapiens
gcccccagggagaagctactctcactggtctgtgacgctcagctagagaggagatgacggcgtgagtttggttctgggctggaatttcttgttgcaacatcccagcgtggcccctcttagaa

SEQ ID NO: 429586 - DNA, 122 bp, Homo sapiens
catattccaagtcacattattttaccaatggaattatagaattaacagtattttaaattacgtttataacactgcagagaccttaagtgctaaacttagtggagtttgtgaccagagaattg

SEQ ID NO: 429587 - DNA, 122 bp, Homo sapiens
tgaaggctcttgcgggatggcctgtttcgttccccagtgaggtgagcactagctggagaacgaggagacccctgaagacacaaaagaaggctgagcggtggggaagcatcccaggttggtgg

SEQ ID NO: 429588 - DNA, 122 bp, Homo sapiens
catccggaatgcacccgcaatcccacagcatccggaatgcacccgcaatcccacagcgtccggaatgcacgtgcaatcccacatcgacagcgtgttttctcactgtccctggggattccaag

SEQ ID NO: 429589 - DNA, 122 bp, Homo sapiens
cagggaaactgcatattagcgttaaaaggtttctacgttctgtacgttcacgtttgtcagcggaacccctgcttctgcgcggattgtgcgcagctgcagccaagcgtaagctgaaaattgta

SEQ ID NO: 429590 - DNA, 122 bp, Homo sapiens
gctcccgcctcccgctgtgtccctgaccatccgccaccggagacgtcacagctaaagccacgcctgtctgagtgatgtcattcctggccaataggaagccaagcattggacccgtggcgcca

SEQ ID NO: 429591 - DNA, 122 bp, Homo sapiens
agatgggtccctgctggcaggtttggtaaggtggctgccctccaaagctccctgagtagtcggggggaggggctataaataacccaggttcctaagtgccactgtggggcaggatctctggc

SEQ ID NO: 429592 - DNA, 122 bp, Homo sapiens
ccacagacttcatccctaaagtggtcaagccatctcagacacgtttgcttctggtcacaccgatcaagattgatccagccactgaagtaatccaaacaactcacttctaatgggccagaggt

SEQ ID NO: 429593 - DNA, 122 bp, Homo sapiens
ccctgctggctgcagggcaaagtctaagcccttaaccaggcacaagagaccgtccctcaccggcctgtgcttccactattatttcctgccactccttgccccttgccttgaactttaagctc

SEQ ID NO: 429594 - DNA, 122 bp, Homo sapiens
tctgtaaaatctagcctggcacatagcgaacattccaaaaaatgtacctactgattttatcgcagaaatcagcatctcttcccagcctggaaataaataaaaattattttctctctctctct

SEQ ID NO: 429595 - DNA, 122 bp, Homo sapiens
ggcaagcgcctggaggacccggcgcccgctccaggccctgcccctccaagtcccccgccccgcgccaggccccgcctctccagggccccagccccgcgccaggccccaccgttccggggcgc

SEQ ID NO: 429596 - DNA, 122 bp, Homo sapiens
ctgaggctggggggacaggggcgcacgactgcactcccggtccggggcagtgcaggtattcggggaagaggaatcgcctctccagaaccgactgctgttccttccaccacccgtaacctctc

SEQ ID NO: 429597 - DNA, 122 bp, Homo sapiens
tcaggtttccccgcggcctccgctgccgccatccaccgctgggtgccgtctgcattccctcgccgcgccacggtgcttctctgttgccggctcacatcaaccgaggttccagatgggtgcaa

SEQ ID NO: 429598 - DNA, 122 bp, Homo sapiens
cctggataaaatattaaacatgcaaatctgagacagagccttaacgagcgacagactgcacgaccacagcctggcaaacgagacgcacgacgtccgggggtgggggggtgagaggtatatat

SEQ ID NO: 429599 - DNA, 122 bp, Homo sapiens
gaggcgataccctgtgcagaaggatggaacggagccggccatgcccagggaacacgcatgcgcaaggcgggcacacaccccccccacgcggagcagtgggctcgtccaagctccacggtttg

SEQ ID NO: 429600 - DNA, 122 bp, Homo sapiens
gaagaacatgcttggatgtctaggtgtgtgtgtgaaggatgagggccccagaaatattttcgtaagtttaaattctgacctgactgtatttcaaaccagaagcgactgagttttgttgaact

SEQ ID NO: 429601 - DNA, 122 bp, Homo sapiens
ccccaggctggaaggcagcagagctgtggcgtcgaggcacccagcggactgcggggctggcgtgcccgcggttacctgcgcggccagagggctccgcgagatcgaagaaccagaagagcagc

SEQ ID NO: 429602 - DNA, 122 bp, Homo sapiens
ccatgctcttaactgctgattcaaacccatgcaatctacaccacagcccatgctcttaaccgccgatgctctgctgcctcgtgatggcttctcaggctgtgactcctttctctccagttccc

SEQ ID NO: 429603 - DNA, 122 bp, Homo sapiens
tccctgattgcgcgctccagcctaggcaacacaccccactactgcttgacttccttcccacggcaaggtgattttgcaattactacaaggaaagaggagaaatgctaatttctcattttgta

SEQ ID NO: 429604 - DNA, 122 bp, Homo sapiens
atttacagtactaaggtccagtccagaaagtggcagatttaaacagagtagcccaaagttcgaagtgtctatttaaaataccagtttggaaataaactaaggaaataatatatgtactatgt

SEQ ID NO: 429605 - DNA, 122 bp, Homo sapiens
ccctcaacgtggttttccttaattccctgggcggtcctgaaggtggtgtggccagtcctccgcctcgctccgtcagtttccccctgctgaactattgggtgcggggcgggtggtggcgcagc

SEQ ID NO: 429606 - DNA, 122 bp, Homo sapiens
gtgaaaaactctgttggagaagttttacactttgcaagtcctgtaatgagagtcagagaacgccatcaggaagacccataagcctgtgtgaagtgagacttacttattttaatgaaaagcac

SEQ ID NO: 429607 - DNA, 122 bp, Homo sapiens
gtggttttattggggctgaggcctcaagcaggggaatgtggcctcctgagacactctgggcggccagggcctgcctgaggtgggaccaagcatggtggagtggctggagcccggtggggaag

SEQ ID NO: 429608 - DNA, 122 bp, Homo sapiens
acctcatgatccatccgcctcagcctcccaaagtgctgggattacaggtgtgagccattacgcccggcaagggttcctactttcacagaattactccagggattatgtgtcagggtggtaac

SEQ ID NO: 429609 - DNA, 122 bp, Homo sapiens
ccaaactgaggagcatggaggaccctgggcattgatggcagggtggcaggaagcacccatcgctttcctctcccggatcttcccagcacccttccaccttcagcctttataccccgagacca

SEQ ID NO: 429610 - DNA, 122 bp, Homo sapiens
ccgggattgcgtttatctggcgaccccatggagttcacaggctcggaaaaaccaatctaacgttgggctgaggcatgagaatcgtttgaacccgggaggcggaggttgcagtgagccgagat

SEQ ID NO: 429611 - DNA, 122 bp, Homo sapiens
acaggattaacatacggagtaggaggatattctcaaaaatcgaaaccttataaatatctacgtccaatggcagaaaatacgaggctcatgaaacttctcaacatgcgctcccatggctaaac

SEQ ID NO: 429612 - DNA, 122 bp, Homo sapiens
gacaatttctgacccgcagaaacctgcagtggcgctgacgtttacaagtggtggacaaaacgccacttgcaacactggaagaagcggaaaaccccacccactctggaacaacagcgatcagc

SEQ ID NO: 429613 - DNA, 122 bp, Homo sapiens
actcccctctgccagtaatataggtatgactcagggttttgacctcatcaatgcagcactcgaatcaaatgacatgatcaatacacaagtgcgttgatcatgactggtgtgaagctgatatc

SEQ ID NO: 429614 - DNA, 122 bp, Homo sapiens
ccttcccaggaaagcagtcacaggcattgccccatgttcccagtgcttctgcagcccaaccggggtggaggaggcattcctgcgtccagcagccggcccccatcacaatgccaaagttgcac

SEQ ID NO: 429615 - DNA, 122 bp, Homo sapiens
attccaggcatttggacaaatgtataatgacatgactccaccattttagtatcatacagacgagtttcactgccctaaaatcctctgtgctccactgatacttactccttcatccccttgct

SEQ ID NO: 429616 - DNA, 122 bp, Homo sapiens
ccgccggccagctccccccacggccccctgctcaggggcagcgagaaggcgggggcttcgcgccacgtgcgccccactcctcgggaaaccagccctgatctgccaccaaagggcagcccgag

SEQ ID NO: 429617 - DNA, 122 bp, Homo sapiens
ttgttggttgaaggagggaaggataccgggtgggtgcccgctcgaagaacctggcaaggccggaagagccgtagttaatgggtcatgtgtgcagtacccgcccgactttgcggtcggtcctt

SEQ ID NO: 429618 - DNA, 122 bp, Homo sapiens
tctccccgccccatgtaacgaggcccctgctgagacagacctgctgatcgtcgtcgtccacgtcctgttatttcaatgctcgtcgctcaccctgccccagcccaccgaaactcccgcatttc

SEQ ID NO: 429619 - DNA, 122 bp, Homo sapiens
aaggcgggatccctccccgggcttgtgatgggacggcgctgtgggcccgagcagcagagccgtgcaggacaggcatgggcaggggtggggcagctggcccgggaggccggcaggtcccagaa

SEQ ID NO: 429620 - DNA, 122 bp, Homo sapiens
tctgcgcggggcaaacgtccttgcgatgcgactagcagacaagaggcaggagatgcgaggcgtcctacccgaatttagtacctccagcaaatctgtggcccagcgtggcccgatcaacaatg

SEQ ID NO: 429621 - DNA, 122 bp, Homo sapiens
agggggagcaaggcccgggcagcccctgacgccgtgcccggcccgtggcggaggcgaacccgccgcacagcagcccagcgccctcctccgtgtcccgcccggccccgcagggcccgcccttc

SEQ ID NO: 429622 - DNA, 122 bp, Homo sapiens
ccctgcgatcctgcttcgcacgcaagccaggaagtgtgtgtctgaactcccatctgtgagcgtgtcgtcgaggtgtgcacctccagcgacttcgtgctcggcagcgcggacgcacctgcccg

SEQ ID NO: 429623 - DNA, 122 bp, Homo sapiens
cctgagctgtcgggtacagggtgttgcagtttgattctgaaccataccttgaaggcagcccggtctggaatggctaatgaggctgaggcaggttagatatcataagcataattagatgaaca

SEQ ID NO: 429624 - DNA, 122 bp, Homo sapiens
aggtgggcaagggagctgagcagggaccgggggctactgtacctccttttcacctcctcccgcatctggagcccctcctcctccacatgtgcgaatccaggagccacagaaggtggggcgca

SEQ ID NO: 429625 - DNA, 122 bp, Homo sapiens
caaatgtgggaagaaaaagtaaacccagtaagaccctcctgaaagtgttaaatgttgaaacgatatctgaaagaaccaacttctttggaggatttttaaaaataagaattggggcatggatt

SEQ ID NO: 429626 - DNA, 122 bp, Homo sapiens
aggcttgggggtgggagtgggaggacgtggctgttgctgtgggggcatccctcttgtcaccgtggcagaggagcctggaggagatcccagcagtgcccccccacacacacccggagcggatc

SEQ ID NO: 429627 - DNA, 122 bp, Homo sapiens
gacgtgagaagaccgagctggctcttgtgtcaggtggcaggtccatgggtgtttgtcacacgatgaaaacaaaaaatacaggtgtggagtcctaattagggaagagaagtcaggctgggggg

SEQ ID NO: 429628 - DNA, 122 bp, Homo sapiens
aagcccagagatgggggtgagagctcaggagcccttgtggcgcactctcccgacgggaggcgaagtgcgcacgcgcgccggtgggggggccgagtaacgggagagggggcgcgcgagggagg

SEQ ID NO: 429629 - DNA, 122 bp, Homo sapiens
cggccggagctgggggccctccgagccctgtggaacctccacgtggccgggccgggcaggcggggtccactggcctgttcccgctgttaccggcccacggcccccgccgccgctttccctcg

SEQ ID NO: 429630 - DNA, 122 bp, Homo sapiens
gggaaggagagacagtctgctcttacccagtccttgctgggcctgtgccccggggtcggccgtctccgttacctggttgggtggggtcacagtgcccagagttcagattcagctcatgtcac

SEQ ID NO: 429631 - DNA, 122 bp, Homo sapiens
acatcacccgggagggcctccccagacccagcccgggggacgcaaaccccgggagacaggcgaggagcctggagaaaagtctgctcccgaggcaaagcaagcctggccagagctcaccttta

SEQ ID NO: 429632 - DNA, 122 bp, Homo sapiens
cctctgtgttcctgcatcttcccagcccctcacctcctctggcgtggcctcacctccagccgggatgccccattagctgctcacccaagctgctagaacctcaggctaatggccctgtcacc

SEQ ID NO: 429633 - DNA, 122 bp, Homo sapiens
gtctgtcatctgtcggtggcgggcttggcagttgctcgaggcaggatcaagtcccgggggcggggcgggtgggctggcggctgtcctccagcaacaggtgcacattcccgggctcctcgtca

SEQ ID NO: 429634 - DNA, 122 bp, Homo sapiens
caaggcactgtgtacctcacaaaataccaaacctctccccctgctggctaatatgagtgacggctgtttctttaccagccacaactttatccttgctctgctctgcatttattatgggtaag

SEQ ID NO: 429635 - DNA, 122 bp, Homo sapiens
acatccttagaagtaagtactaaatgttctagcctatagtaaaaatccatatgttgcctccggccaaaactcaacatcgctctttttcctcgaatctttcacaaaaacataatcctaaaaat

SEQ ID NO: 429636 - DNA, 122 bp, Homo sapiens
gagggtggcctgagtcagggtgcaggcaccagggagcggagccctgctggcagggatgggcgcaggaaaggccttacctgcctggagaggtagaccacagccaccagggaggtctcggagtg

SEQ ID NO: 429637 - DNA, 122 bp, Homo sapiens
ggcagacccgtcgaccccttggggttgggggacatgggggagctgctggagctggtgagacgcggcctccgtcggcttcctgccatggctgtaacttgagggagccgccctccttgggcctc

SEQ ID NO: 429638 - DNA, 122 bp, Homo sapiens
tcactcgtgtccacactcacagcttccaccccttgcaccccccatggagggggcggcaggcggccgctcaaggtccgctccccgtgccctgcccgccacgcccgccctccctccccgggctc

SEQ ID NO: 429639 - DNA, 122 bp, Homo sapiens
tgtgcccaggttgtggtcaaatctaatggtggttgccacccggctttctccaatccctcacggccccgagccacacagcgaagcttgggactcatcgtcaggggcctgttctgggaggtgga

SEQ ID NO: 429640 - DNA, 122 bp, Homo sapiens
cccgccacgtccttctggcgcctctacctccccccaaaagaatgttttctaaaatctgttcgccagaggccccacagcctttcagctttcctcacgaccaccaagccttcttagctaacgtt

SEQ ID NO: 429641 - DNA, 122 bp, Homo sapiens
tcggtcaggacgtggaatactcaatagggaagcctcgcgtccacccaaaggctctacgagcgtctatggttcttccttttcagacaggataactcaacctgcagttctgagagaaatagggc

SEQ ID NO: 429642 - DNA, 122 bp, Homo sapiens
gctcacataagcgcgcgcacactcggaggagcattcgcgcacacagaggctcagcggcagcgccgcctgcagcccaggcacctggatggcgatgggcatcatcttgccctcgggtccaaagt

SEQ ID NO: 429643 - DNA, 122 bp, Homo sapiens
gtcgcgtcccctttgacactgcacccggctcccagtcactcaatcttgttggccctcaggcgatctcccgttggatgaaatgctcctgctgaaactcgagtcccctttgatttgccttcatt

SEQ ID NO: 429644 - DNA, 122 bp, Homo sapiens
gtaactcttggccatgttgtgcaatagtccctaatcagcaatgtcagctgaggacacgtccggtccacattatatttaatgatggtctagcactgtcattacccattttttaacaagatggc

SEQ ID NO: 429645 - DNA, 122 bp, Homo sapiens
tttcacagcggccaaggtacatgaggatgtagcttatcgcccttttaagggactctcccacgttcgactctaagcggaagtacccgctcagggctccggaagtggcctcagagcccctcagc

SEQ ID NO: 429646 - DNA, 122 bp, Homo sapiens
acaacagaagtaacaagaaaaacacacgcaaattgatgagcacttccaagagatctcttacgaggcacaagcagtgaagggtcagcacctcctgtgggctgatccattgttgttgatgggga

SEQ ID NO: 429647 - DNA, 122 bp, Homo sapiens
ggattcaaaccaagattgtcggttccaaaatctattttcctaaccatgatgtcattctgccgctcagtatatattacatttctatagaaaagttttccaaacatagcagtccactgacattt

SEQ ID NO: 429648 - DNA, 122 bp, Homo sapiens
cagacattcttccccactagttggaaaaagtatgctcctgtggcaccacagtgcaggggtcgctggcgggggtagggggtgtgggtgggtacggagtcctttcactgcccgtcggcagttgg

SEQ ID NO: 429649 - DNA, 122 bp, Homo sapiens
attaggggcagacagagcaggcaatgggtgattggaaacccctctccttacccatgctgccgactggtacactttgatcccggcgggtttgctgtgctggtgtcagaggccgctgttccggg

SEQ ID NO: 429650 - DNA, 122 bp, Homo sapiens
ctggctgctggatcctgcaggcatctcaaactcagtatttccaaaaccagttttcaaaaccgagttcatctctgcacctgctccctcatctgctccctcacctactccctcacctgcacttc

SEQ ID NO: 429651 - DNA, 122 bp, Homo sapiens
cttagtggacctttgccccaagattttctctcagcttttcctaggtaagacagcatcacccgggcgcgatggctcatgcctgtaatcccagaactttgggaggccaaggcaggcggattgcc

SEQ ID NO: 429652 - DNA, 122 bp, Homo sapiens
gtttgacatattgcgagaattaccacaaggagacgtggagtgggcatgctgctggaagagcggcactgacggggttggagagggggtccctgagaagtagatcctgaagaggctgtttctga

SEQ ID NO: 429653 - DNA, 122 bp, Homo sapiens
agggaagagggagtggaatcagggcagcgacagctgtgtgggtcggcccggaggacttcccggaagaggagggcccgagggttttgggggatccccggggaggcagagccaggggcacccac

SEQ ID NO: 429654 - DNA, 122 bp, Homo sapiens
aggcgcaggtcatggtgcagtcctggccgcggagcaccgtgtgtggcttgaggggcgtcacgaagcgcggcgcgtggcgccagtccttcttctcgtagggcttgagcttggcgctcaggtcc

SEQ ID NO: 429655 - DNA, 122 bp, Homo sapiens
tcttggccccctaatgtgctaggattagaggtgtgagccaacccaccccacccatacttacgtatttctgttcagattttattgagtttttatgaccaagcctatggtctatcctggagaat

SEQ ID NO: 429656 - DNA, 122 bp, Homo sapiens
acattttttagggcggcggtggcggctcccgggaccagggacttttgtctggagcggctgcgtgtttgtgtgtgggcggggtccggagccaccaggcagtcagccttcccaagcttgctcag

SEQ ID NO: 429657 - DNA, 122 bp, Homo sapiens
ggaaacctcaggcgtaactgctgcaggtgcggcccaccagcaaacacagcccatcagcaacgctaacacagtgggcagaagcttatggagcagctgtggatacactgtctcgaagcacctgc

SEQ ID NO: 429658 - DNA, 122 bp, Homo sapiens
taagtcagaataaccctttcaggaacctggtcttcctttcacttctgcttttaaatgaaacgtctggggtttggctaagtaagtgggtgccccctggggactgcaggcccagcattgtcctg

SEQ ID NO: 429659 - DNA, 122 bp, Homo sapiens
cagggccacggaatgaagcctgcactgcggacactcactttcggtttcatgtattggcttcgtgacaccccacagcgaaagaccctctgttctgggggaatgactgtgttggtgacaaaacc

SEQ ID NO: 429660 - DNA, 122 bp, Homo sapiens
catgcactgtccaataggcagccaccagctccatgtagccagtgagcacttgaaacagggcgactgtggctgaggattagaaattccatttcgtgtcatttgaattggcttaaatttttttt

SEQ ID NO: 429661 - DNA, 122 bp, Homo sapiens
agcggaggctgcggaggacgctccaagcccatcttccgtggctcagcccagcggctcccgcggctccagggcagcgccaggcatggcttctccccgaaggcacagaaggctccgaagttgcc

SEQ ID NO: 429662 - DNA, 122 bp, Homo sapiens
agggagcgcttggagatttgttcctggagtggactcacccgccgggaccacaggtgtgagcggaggcattagagcccacgccgttcccttcagttctcaccactgagagacatacatacaca

SEQ ID NO: 429663 - DNA, 122 bp, Homo sapiens
cccagcggactcttataggccgcgggcgacgtgcccattggtccgggccgctgccaacagcgagagccgccccgcctctgaacgctccggacactggtctgtagagctttgcacgtgagtca

SEQ ID NO: 429664 - DNA, 122 bp, Homo sapiens
cttggaacagtgtctgaaacatggtaagagctcaataaatattggttcccttctcactaacgccatgtacctagaaccataaagggttttgtttctttgcttgtttttgttttttgaatatt

SEQ ID NO: 429665 - DNA, 122 bp, Homo sapiens
gcggtgtctcttgcgccagtttcaggggaggtgtctaacctcctggagggacagtctatacgtgcggagggaggacacagcagacctgtttctcagggatatgacgaggctgcgtttcctct

SEQ ID NO: 429666 - DNA, 122 bp, Homo sapiens
aggctgaggcaggagaatggtgtgaatccgggaggcagagcttgcagtgagcagatatcacgccactgaactccagctggggtgacagagcaaaacatcgtccaaaaaaaataaaaataaaa

SEQ ID NO: 429667 - DNA, 122 bp, Homo sapiens
gcagggctacattgtttttgtgaaactctttaggatggaaaagggcatctctgaggtcagcgacagaagccgtggtggtttcatgccaccagtttacctttgtcctgagctgtggaggttgt

SEQ ID NO: 429668 - DNA, 122 bp, Homo sapiens
gaatcctcccaccagcacgcccgcctctgctgggagcatgaggcagcacgattctctgggcggcagcttgtctccaccgcggggctctaaccgatctgccaccagagccactgacgtccttc

SEQ ID NO: 429669 - DNA, 122 bp, Homo sapiens
gggggcaaggacgagaaatgcgcactcgctcgggccagagcagaataaaagttcgccccgcggagactcacccacgccgtatttctcgtgctccgtaggtatccacatggctaaaggggctc

SEQ ID NO: 429670 - DNA, 122 bp, Homo sapiens
cccgcagccctgcctttctctgtcctcgcttgtgtctgacatggccactgttttctgtgtcggcctttttgacaggcatgtggtgatacgtcgttgtggtctttacctgcgtttctgtcatg

SEQ ID NO: 429671 - DNA, 122 bp, Homo sapiens
tgtgaacacacaatgaaccggttagatctcacaggcatgcagaaaataacctgacaacagcgtgcacattcttccccagggcaccacttccgcctccctcatccccactgctcccgatccct

SEQ ID NO: 429672 - DNA, 122 bp, Homo sapiens
ctgggcgctgccatcttaggcccagtccccgctgcgcgctgccatcttaggcccagtccccgctgcgcgctgccatattaggcccagtccccgctgcgcgctgccatcttaggcccagtccc

SEQ ID NO: 429673 - DNA, 122 bp, Homo sapiens
acgttctccaggaacaccttcagaacaccacgagtctcctcatagataaggccagaaattcgcttgacaccgccgcgacgagcaaggcgccggatagctggcttagtgatgccctggatgtt

SEQ ID NO: 429674 - DNA, 122 bp, Homo sapiens
ttatggaaatgcgatctctgtgttacagctcttccaactttgtaaaaaagagatgccaaacgttttatttgacattccaaattttatatgttggcaactggttcattttcttttaaacactt

SEQ ID NO: 429675 - DNA, 122 bp, Homo sapiens
aggccagttccacaggtggctctgactgcccatggtttcgcgcgagtggtgggcacgcttcggtttacctcccccgcgggtgacagcccagtgcttccaccacaaccgatgtcaactctcct

SEQ ID NO: 429676 - DNA, 122 bp, Homo sapiens
ccccacccgaaggccactgtttttggctcttgctgctatggaaggacaggagtgagctcccgctcttgacaggaaactctccaggagcagaagctgtaacttcctcatctttgcatcatcag

SEQ ID NO: 429677 - DNA, 122 bp, Homo sapiens
gtcctgcgcggcgcggcagggcacacggccgggtgctcccgcagctggtggctgggcggccgccggcctacctggaggtaatagggtttccttagccaggcccccggacagagactcctcgc

SEQ ID NO: 429678 - DNA, 122 bp, Homo sapiens
gggagtcgcgcaacaggtttccttctccatcgctgcgcccacaggggacgcgcgccctgccgggagaggggcttctcggttcgcactctcgctcccagtccaggtttgtttttctcttcctg

SEQ ID NO: 429679 - DNA, 122 bp, Homo sapiens
ttcttgttgcccaggctggagcgcaatggcacagtttcaccttggaaccctaatcctcgtcgtctctccccagttgacccagatttggggctgtaattcagtacagctgactcagaggggct

SEQ ID NO: 429680 - DNA, 122 bp, Homo sapiens
gcccggccgccaggccgccgggcctccggggccctcgcgcatccggctccgaaagctgcgcgcagccatcatcagggcccttctggtgttagaagagaccccggcatcatcttttcgtcgcg

SEQ ID NO: 429681 - DNA, 122 bp, Homo sapiens
gagacgagtgtgtatgtttgaaaaaaaggtttgttctgggtcactcttctttcatccagacgcattaaaggaattagaagggggtctccctgccacccccgaaaccgtgagagtcaaacgga

SEQ ID NO: 429682 - DNA, 122 bp, Homo sapiens
ggccacacccccgcatctacccggttcccccacgcagcactgtctgaagggggcgcgcggcggcccgagagaccttatcctggggctccaacgtcctgggcctctccagcccgaggccccca

SEQ ID NO: 429683 - DNA, 122 bp, Homo sapiens
aacgtgaggggaggctattggaaagttttaagcagtgaattaacatgatcagggtaccttcggacaccaatggctaggtggagaacaggctacaacaaagtgttatcagagtccagtcacga

SEQ ID NO: 429684 - DNA, 122 bp, Homo sapiens
gggtgtggagggaaccggtgctcacggccttatttcctccgaatggcagtttctgtctggcgggctgaactcatttctaggttagaagtagtcacagtattttactttaagtcagtgttttt

SEQ ID NO: 429685 - DNA, 122 bp, Homo sapiens
agggtttgggggaacattcaacctgtcggtgagtttgggcagctcaggcaaaccatcgaccgttgagtggaccctgaggcctggaattgccatcctcctgccggtgactctgaccttccaga

SEQ ID NO: 429686 - DNA, 122 bp, Homo sapiens
attctttcctcttgctgtttagccatttgcttgttcttgagatggttccaacatcttgctcgtgtaggtagtgccttggtaaggtgttgtggaaatgtgcctgccaaagcagcattcctcca

SEQ ID NO: 429687 - DNA, 122 bp, Homo sapiens
ttgatggatgacagacttctgccagtgaagaactggaggggaatgaaggggcagtggccacggcagggggtgactgaacaagtaaggaaccctggagatgcaggtgtataggggagcaggga

SEQ ID NO: 429688 - DNA, 122 bp, Homo sapiens
cccatttcttcccaaatagtcatttatcccactaattcctccccaagggatgtgacagggcggtgcaggtcattcctccgtgtatactccattgacctaccctcttctaaaatgtctaaaaa

SEQ ID NO: 429689 - DNA, 122 bp, Homo sapiens
gctccatgaagggctgtcaaaacgtctgatgggtaagtagacggacggattaccttgcaacgaatgaaaaattaattctggacatcaccgaaaacgagaaatgggcttccaccacgttagga

SEQ ID NO: 429690 - DNA, 122 bp, Homo sapiens
ggcccctggtttggatgtgtaggtgtttttctgtgcttgagtgtgtgtgcacccagggagcggctgaccatgcatctgctgtgtgtttggatatgtgtttatatgtatacttaggggagggc

SEQ ID NO: 429691 - DNA, 122 bp, Homo sapiens
gaggccacatcttggaggcaagactcagggtagtgttgccaggccccacccttcatgcctcgccctgcccctctgtaggcgcccgatggcctcatcttcccagaccgggccacgctgtatgt

SEQ ID NO: 429692 - DNA, 122 bp, Homo sapiens
cgggcccggcgctggcggccgcagtaggagcacggaggcggtgggggcttctcaggggtccgacaaggcggctcgcacgccccctgctggtcatctggggcagcgcggggccctcggcgctc

SEQ ID NO: 429693 - DNA, 122 bp, Homo sapiens
ttatttgtattccaattgctttgcttttgtaataggggtgagcaggaattcaacagccctcgagatacaccaaaacagaaccctgattctgatggcatgaagaatctcaggccgggagcagt

SEQ ID NO: 429694 - DNA, 122 bp, Homo sapiens
cgcttggtcctgcttaatgccctgttgttttattgtactctgttctcagttggcaaggggcgatctgagggcactaaaggtcaccaaagtatttcttcatcctgagtaatttgcttgtccca

SEQ ID NO: 429695 - DNA, 122 bp, Homo sapiens
agcggcggaggagccccgcaccccaggctggggcagtgggtgggggcggggacagccctgcgccgaggaccgggcgccgctcccgggcaccggcacacgcccggacggctgggtggaggctg

SEQ ID NO: 429696 - DNA, 122 bp, Homo sapiens
cctgactttctacaacaacgtcaacgcctgcatcctcttcctgcccctgctcctgctgctcggggagcttcaggccctgcgtgactttgcccagctgggcagtgcccacttctgggggatga

SEQ ID NO: 429697 - DNA, 122 bp, Homo sapiens
cgccccccgccccccacccgcccagccccgccgacccccgccctgcgcacacgcccttggcgggccctggcctcgctctcgcgatccagagagtatggttttcagggctcctttaaaagaaa

SEQ ID NO: 429698 - DNA, 122 bp, Homo sapiens
caacagcctccatccagcagcttaggacagggcctgagccaacccaccaccttcttgagccgtcttccttggactgcatctcagcctccccgtattacaacctaatcctttcccacgccaag

SEQ ID NO: 429699 - DNA, 122 bp, Homo sapiens
gcctccccgcggggcagggctcgggacccgcagcccgccatgcctgagcctcccccacgccgtgggctcctgcaccaaccaagcctcccggacaagcgtcgccccctgctccacggcaccca

SEQ ID NO: 429700 - DNA, 122 bp, Homo sapiens
gtgcacatagatgcattaaaaggtcttggttagtgtacatacttcttcatatgtggtctgcgaaagctggggccatacaatatcaaggccactgacttctatcatgtggctttgtaaagttc

SEQ ID NO: 429701 - DNA, 122 bp, Homo sapiens
attataatagtagcataattgtgtctcttatcgtaactaagcataggttatcttattttgcgcttccagcagccctgtggatattgagacctgtagagatttaagatacttgttcagggtca

SEQ ID NO: 429702 - DNA, 122 bp, Homo sapiens
tctgaccattaggtcagtgtatcttttccctcctgggcagttaggttagtggaagaaacccgataaaatcttggagaggaatttgatcattctctgaaggacttacaagttgtttggcctgc

SEQ ID NO: 429703 - DNA, 122 bp, Homo sapiens
aagctggagatggagccacgatctcctttatgagctctctcagtgcccacctccagctttcgttgggcggctggtgccctgcacaggcctgtgagcgcgtgccgtgacactgtagctgaagc

SEQ ID NO: 429704 - DNA, 122 bp, Homo sapiens
cgtttctttgctcctctgaatcccattcctaatgacgtctcacgcctggagccctgaattcgtgtgtgactcctaccccgcccgaggaaaatgagattatgccagtgtcttgaatgagcgcg

SEQ ID NO: 429705 - DNA, 122 bp, Homo sapiens
tatttgtatttcttctgatgttctttgctcaccatagcaggttgctgggttcctaacttacgcccttccgttcctgggaacctgagcatccagcaatctgctctggcttcagtgggtctcgt

SEQ ID NO: 429706 - DNA, 122 bp, Homo sapiens
gcgttttgtgctttgatgccaggaatgccgcctagtttatgtccccggtggggcacacagcggggggcgccaggttttccttgtcccccagctgctctgcccctttccccttcttccctgac

SEQ ID NO: 429707 - DNA, 122 bp, Homo sapiens
cccgcattcccagccgtgggtgccacagggagacactccttctgcctcctgctccttcagcgcgcacccactcgcttcatctcctcctggcgcgagctgttgcctcccagaccctcgccacc

SEQ ID NO: 429708 - DNA, 122 bp, Homo sapiens
ccacaagtatctcactttctctgcagaaatcaatctttacttcatcagagagacctaaagcgattcttacaaggagcttgctgcaagaaacacggtcattcaatcacattgaggagggtcca

SEQ ID NO: 429709 - DNA, 122 bp, Homo sapiens
gcagggtcagctcgggagcaaggcggatcagatggaacagaacacgtagaccacctcgcccgcccttagtcagctgggccattgaaaatcaagtccgtagaaagacctagaaataagtcccg

SEQ ID NO: 429710 - DNA, 122 bp, Homo sapiens
ttgttcagtacccatgctgttggggagatgtttgtgcaccctgaggctagcactgaccatcgggaagctctgggtggcacagcttcaggtcctggcaggtgcgagcagggctgtcctgggtc

SEQ ID NO: 429711 - DNA, 122 bp, Homo sapiens
ccccgcccccaggattcaacccacgcccccaccccgcccccaaggtcaatcttgcgccaccgccccgcccccaagggctagcctcgtgccaccgccccgcctccaagagccaatcccctccc

SEQ ID NO: 429712 - DNA, 122 bp, Homo sapiens
ggaatggggattattccctcattgctcatccccctcccctccgttctagccgctttggaacgccttctggttctactgcgcatgtgtcagtgtcagaccaatcggaatgcaccgtgaggtac

SEQ ID NO: 429713 - DNA, 122 bp, Homo sapiens
taacctttctacaggaataatgctaattagcgaggcttaatgagaacttcccccaggaagcgcagcccggtaggggcggccggactcgggcaaacgcagctccgggtgggagcagggtcact

SEQ ID NO: 429714 - DNA, 122 bp, Homo sapiens
ctctttgaaaattagagaagcatctttcacatacctgggctaaagaaacttcttttgcaacgttctgatgctattgactttcaacatttaattcttcttacaagaaaattatagtaacatat

SEQ ID NO: 429715 - DNA, 122 bp, Homo sapiens
aatgctgagaggatctaatgggaaaacgtgggtacacgtcttagctaagaccctcgcccacgataagcccttaataagtagttatttttcagtggtggtgattaccatcgtcattattgttt

SEQ ID NO: 429716 - DNA, 122 bp, Homo sapiens
cctcatgactgcaaagacttgttcccagcccgaagaaatctaaaaaccacaagaaaactgcgaacgccacggacacctccccatcaaaagccacgaaacccccaccatggaccaccacgaac

SEQ ID NO: 429717 - DNA, 122 bp, Homo sapiens
aggcttgaagacccctgggcagtgtgcatgcaagtgggttggagggtgcaggggaaggaacgctcactgctttccaagaagtgtagctagacccccttcgggtaggttgctttctgtggcac

SEQ ID NO: 429718 - DNA, 122 bp, Homo sapiens
agcaagctgagagccctttgggctagctgtttgtggagggaggcatcagccctccctgaccgggactgttgggaagatctggtgagcaccatagtattctaaaccaagggatggccaggcgc

SEQ ID NO: 429719 - DNA, 122 bp, Homo sapiens
ggcttgcttccttctgcccctgttcaatgctcggagtagaaaaagagaggtgcctgagcacggagattatccagagaagacccgggttactcacaaaccttaatgcatcctttaagactcct

SEQ ID NO: 429720 - DNA, 122 bp, Homo sapiens
tcaggatctcgtgcacctaaaaggggacgacagcagagctgtgagctcctagttcccccccgccctccaccgtgtgtcaccctcaccactgcctggcaggggcgggaggcgcccgggctcat

SEQ ID NO: 429721 - DNA, 122 bp, Homo sapiens
gcgtcctagctggcttacagggcggcggcggggtgtgtgtcctctgttaagagtgctactcgcccggggttgatctgtgcatgccactcctgggtcagacggtgaggtcggcgtctgcgagg

SEQ ID NO: 429722 - DNA, 122 bp, Homo sapiens
gacatccccggatgccatctgaggtctgatcaacctcggtcaccagcgtgcccacattggcggcagcgggattccagcccggagcacggaaacttgacgttctcgacagcctggaaatgtag

SEQ ID NO: 429723 - DNA, 122 bp, Homo sapiens
aaaccagctcttcgaagtgcccatgtgaagtgcttgctgtgtggctggccttgggttaggcgctgtggagtgctcagaataaaggcagcccactccctgccctagaggacgaaggaggaagg

SEQ ID NO: 429724 - DNA, 122 bp, Homo sapiens
tggactcaggttgcccacctgcctgcctgcatgatttcgtccctgggtgatttgtcacttcgtgcttgctctgtggctggttccactcagctggttccatccgccttccctcttcatccatc

SEQ ID NO: 429725 - DNA, 122 bp, Homo sapiens
ctgcgagaaggggaaggcaggggtgacttggcagccaggcagcttttcggcatgcttggtcgcagcaagggatcacactcctgaccctcctggccttgcaggccaaaacgtttgcttcctca

SEQ ID NO: 429726 - DNA, 122 bp, Homo sapiens
ttctatatgaccctgtaattctgagctaaattctagaacttggacttacacacacacatacgcatgcacacacacacacacacacacacacacacacatatataacacatacacagacatgt

SEQ ID NO: 429727 - DNA, 122 bp, Homo sapiens
tgggtgctttaagattcactatttgatataaattcagataggctatttttcagtagtcagcgttaagcctgtctggatcaatataaacaagtagggtgtaggcagtcctctatttgcatgtt

SEQ ID NO: 429728 - DNA, 122 bp, Homo sapiens
gagcgctggcttggctcaccctgtcccatggttgcaggccgctcctcttatccacttggccgcagaaagcgcctctctcaaactgttgcttctgggctccttctgggctttctgtcttccag

SEQ ID NO: 429729 - DNA, 122 bp, Homo sapiens
tctgtgggggcctgctacatgctgctctggcgacgcgttccactggggcaattgcctacccgggagcactctttggatcgcgtcactcaagctgtctggagtcccccacagggacgctccac

SEQ ID NO: 429730 - DNA, 122 bp, Homo sapiens
caagcggtggggcacaggcagatccccgacctgacctggaccacccttctcctcttggcccgccccttcaactcgcctccgcttaggtctggattggccccgccccctgacctgagcctggt

SEQ ID NO: 429731 - DNA, 122 bp, Homo sapiens
cacccgccccccggaagtgccggtggttgggctccggtagccgtctctgaatgctggactcgccccaccctcatctcccaggcaacgctccctcccctcctcgggttctgctaaagcgtgga

SEQ ID NO: 429732 - DNA, 122 bp, Homo sapiens
tttcatagcccttgtctctgttttgtaattatctgtttctggtctgattccctaatagatcgtgagttccttgaaggcaaggcctttgtctcattcaactgtgttctcccaaaccctagaac

SEQ ID NO: 429733 - DNA, 122 bp, Homo sapiens
cgtcagtctggctcctcccccatcagtctggctcctcccctgtcagtcagtctggtttcccgctagctcagccagtaggaatcatggcctcctgaggatttctgggatcagcagttggcctc

SEQ ID NO: 429734 - DNA, 122 bp, Homo sapiens
ggagctacacattaatatgtatcgccttagagcaagagctgtgttccaggaaccagatcacgatttttagccatggaacaatatatcccatgggagaagacctttcagtgtgaactgttcta

SEQ ID NO: 429735 - DNA, 122 bp, Homo sapiens
aaacgactctcaggtgtggggcgcgcgcgccagcgggggtgcctgagggacttgcccgcccggcctgaggcacctgccctgcgcttgggaagcctgggccccgctccctccccggtccgcag

SEQ ID NO: 429736 - DNA, 122 bp, Homo sapiens
cagccgcgtcggggaggaagatttatggacagggaagggaaagtaacagacagaaacggacgtgagggacagagacagctggactgattacagcccgcatttgccttattttaacagggttc

SEQ ID NO: 429737 - DNA, 122 bp, Homo sapiens
gagcaaaactgtctcaaaaaaataaaatgaaatacataaataaatgtgcctatcctgtgccgggtgctgttcttgccagtggggatacatgagagaacactgccttgcccgcatgaggcttg

SEQ ID NO: 429738 - DNA, 122 bp, Homo sapiens
agcgacgggcctgaatgggggggcgccaggcagcagcaggcccaagctggccctggagggcggccggcacggtcaggcccgcgctgggctgtggggacccccgtggtccccagcctcggagc

SEQ ID NO: 429739 - DNA, 122 bp, Homo sapiens
ggatccgccggtttccttcctcactgctcccatcagtgcgaaagcaacgtgttgggggttcggggtgtgtggcggctgaacagctgcctgaagttctctgatggcgctggagggagctccag

SEQ ID NO: 429740 - DNA, 122 bp, Homo sapiens
agcaacgtttcatggacatttctcaaaggggatctgggagagaggagctagaagcaggcacgttagtgcccaacatgggaggaaacaatggaagaggtgataatgcttacgtgcctaaatat

SEQ ID NO: 429741 - DNA, 122 bp, Homo sapiens
gccgactggtacactttgatcccggcgggtttgctgtgctggtgtcagaggccgctgttccggggaaggagcgaagggagggaatttatacaaccagctgggggtggggcagagaaggagga

SEQ ID NO: 429742 - DNA, 122 bp, Homo sapiens
cctcatcctccccggcttcagtcaatgactctcgaggtccacgcaccacagaaccgtcgacgaagagcatgatggaggtggaacggaagctggcccaccgcaagaccagcaagttccccgag

SEQ ID NO: 429743 - DNA, 122 bp, Homo sapiens
cagaggcaccggtatcgtctcggcgcctgtgcccaagaagttgctcatgatggctggtatcgatgactgctacacctcagccaggggctgcactgccactctgagcaacttcgccaaggcca

SEQ ID NO: 429744 - DNA, 122 bp, Homo sapiens
agtctcgcccccgcccgcccgccggccgttgccccctcagcccccggaggcagggtcctgcgaccagcaccccgcgggtcagttgccttcgtgccacctgggctccaagtcctcgccctgcc

SEQ ID NO: 429745 - DNA, 122 bp, Homo sapiens
gtgtattgctttgcccgggagctggggggtaagtctgggactggcaggacccggcccctccgcctctctttgagtatctattattctccccaactcccatcctccggggtccttatgcaact

SEQ ID NO: 429746 - DNA, 122 bp, Homo sapiens
tgcttcacatgtttaatctctttttcctgaggcttctgtgagcacacaaaaggagctgaccgggcttgggccaacagctattgagaagttcctctcaacaccacaaggaccttttccatttc

SEQ ID NO: 429747 - DNA, 122 bp, Homo sapiens
tttctcaggaaagcaccttgcatttgaaagctgacactctcttgcggcctcattacgaggcgtcaaatctgaccctgcttcctttatcacaaatcttatccccttcttaataaacatacaat

SEQ ID NO: 429748 - DNA, 122 bp, Homo sapiens
agttaccagaagctgagaaggttggggaataggggtgaggatagcagtgggatgaagagacgttggttaatggctataaacataagagctggatggaaaaaataggttctaatgttcaatag

SEQ ID NO: 429749 - DNA, 122 bp, Homo sapiens
acgtgagttgagcccaggggaaaggatcatccgggagatgcctgaggggctccagggcatcgtaatctcttgctcagctggcagagtggggctgacacggccagctgctctctggagtcctc

SEQ ID NO: 429750 - DNA, 122 bp, Homo sapiens
tgggttccggggacctgggctgcccctgggcgcggggagccccagccctgaagaggcgcccgcccggcgtgtcccctgtgcttcgtcatcgcccttcataagcgtcccagaggtcatggtga

SEQ ID NO: 429751 - DNA, 122 bp, Homo sapiens
gtcatagtacacccggaacgtgtggccgtgagctccagggcggtgaatgaatcatcgccccgcggaccgggccccgatgattcatgcggggtacacacacgcgcgcgtactcgctatgtacc

SEQ ID NO: 429752 - DNA, 122 bp, Homo sapiens
gcggcagcccctcggcgcccgtttgcagggagcgagctctggctcctcacaggatccagacgcggttcccatccgtccccagccctgcagggcacacgcgcgcgtgcacacgcacgcgctta

SEQ ID NO: 429753 - DNA, 122 bp, Homo sapiens
ctgtccgacatcgccatcgccatttctctccgggtctcacgcactcactgtcactatcggcgccgcagccgccgcggctgtctagacccacccaaggccaaccgagctcctgggctgaggaa

SEQ ID NO: 429754 - DNA, 122 bp, Homo sapiens
atggcgaatcgtcaggtccgcaaaaccacccagttcagcaactcatggctatgccgagcccgccgcgctcagctcggccagaaacagctcctagagccagggactggaccgcccccgctggc

SEQ ID NO: 429755 - DNA, 122 bp, Homo sapiens
ttctcccaacaaatttgcatacatgacaaaaaacaggcaaaaggcagagagacccaaagacgggatttattgggggcccagtcatcacctggaagtcagaaggcgttgaagtatcgcgggga

SEQ ID NO: 429756 - DNA, 122 bp, Homo sapiens
acctccttgctggggctctggggccacctgcctctcctcttttctgcagaatggagtgtacgcgtcctgctcagcaaacgctgtgctcccagatgtcccaacgacaacatgaagttcgaatg

SEQ ID NO: 429757 - DNA, 122 bp, Homo sapiens
cccccccccccccagccctcctagccctgacacacagctgggactctcaggtccgaccagcggtcctgaacccgctcccacggcacgggaaatccttcgtggcgcagcagcaggtggggaag

SEQ ID NO: 429758 - DNA, 122 bp, Homo sapiens
gtctggggaggactggaagcatccaattcactcgtgaaaaaaacatcgagccagccaaaccgaacacgtgttgggcccctttgctactgatggattcaacagccccaaaatttaaaaacata

SEQ ID NO: 429759 - DNA, 122 bp, Homo sapiens
ctcgccaaagaaaatcgcgggcgccggtgcctcagccgtcctgcctgagagactcgcctccgagaggaggaagggacagaccaaagcagtaaatcggccatcctgcagaggagccgccttct

SEQ ID NO: 429760 - DNA, 122 bp, Homo sapiens
catcgtggagatgcagctgaggcagcacaaggtggggactgtacgtggacggcctcccctcggcccacagccagtgatgctaccggcctcagcattgctatgaggcgggttcttttgcatac

SEQ ID NO: 429761 - DNA, 122 bp, Homo sapiens
aagcaaaagggttcgcaggactagaaaatgtttctgcataaaactggatcaagtctcttacgggccttataactgttatcgccatctcgaaaaacgtgtgcgggtttttttttttttttttt

SEQ ID NO: 429762 - DNA, 122 bp, Homo sapiens
caaacccgcagctaagagtccagcttgtgaacttgaacctgaacttgctgaagaagctcccggcggccccctgctgtctgcggcctttgtttgagggagaggctggggtcacccggttgggc

SEQ ID NO: 429763 - DNA, 122 bp, Homo sapiens
actcgccgctgcgcagcacacatctcagcgtgttgatgaataagattcccagcacgacagcggcaatgagtttcttaagaacagaaagacatggtaattgtcaccagtgagatgcatccggt

SEQ ID NO: 429764 - DNA, 122 bp, Homo sapiens
gaggagctggagggcaccttcgccatccggggaggggtcaccatgtggagacacagtggccgctccgaggccggggcagtctgacctccagtgccccatttgttggcagttagggcacgggc

SEQ ID NO: 429765 - DNA, 122 bp, Homo sapiens
ggtgaaaagggaaaaacggggaaacagggatgctctgcaaagccggagtccctgctagagcgcttcctgccaagccggtggaatttcaggttccacacaggaagaggaggggccaggctgct

SEQ ID NO: 429766 - DNA, 122 bp, Homo sapiens
ccagggagcgagagcccggacagcgggagtcggaggcaggaccaggagctgcagaggggccgcgggcagagccccagcgagcgcgctgccctggcgcggagcccaggggccgcccactggcg

SEQ ID NO: 429767 - DNA, 122 bp, Homo sapiens
aagttgtggtacccaagccatactctcataaatccagccaggtcgcgctgaaacagtttccggaagcacttctcctagatcgcaccgcctcttcctcctggaagctatataatgatatcgcg

SEQ ID NO: 429768 - DNA, 122 bp, Homo sapiens
cagggggagaacttgcagggagtgcaaagctgcgatcagcaaccaaggcgctggtcctgccggccaccatcccgtgcccatgccctgaacccgaacacactgcagatgacaaggcaggtcac

SEQ ID NO: 429769 - DNA, 122 bp, Homo sapiens
actttgggttgagtggtcaaggaagcctccctgagaaggtcacactggggctgaaccctgcgcagccacatgtggatctgggggaagtgtattctagggtgaccaaagagttggtgccaagg

SEQ ID NO: 429770 - DNA, 122 bp, Homo sapiens
ataggacagatgcgcacagtacagcactttcagtctgcctgggaggtgggtgtgggtgcccggacctcccacgctgaccttgatcctgaaatataacccaatggctgtctcctttcccttct

SEQ ID NO: 429771 - DNA, 122 bp, Homo sapiens
gggcttgggtaaagtttaacattgtctcagataggaaaatgctgaggcatgttctctatgcggtttcccagatcccagtgggagttaccagttccttacagtggttactcgtttgctccaca

SEQ ID NO: 429772 - DNA, 122 bp, Homo sapiens
aacagcttctcagtacgtgggatgctcagcaggattaacagccagctgcttattgtgaatcgtggatgtcggaggacagtgggacggcgcattcaaaatgctgaaagaaaaccactgtcaac

SEQ ID NO: 429773 - DNA, 122 bp, Homo sapiens
agcttccagaactgtgagaaataaatgtttgttgtttaagccacatagtctttggtaatacgttagagcagcctgaactaagacaggggtcacattagaagttgcctaccataatgtgtgca

SEQ ID NO: 429774 - DNA, 122 bp, Homo sapiens
agtgaaaagccacagcctgtaagtacctaggaaatcctgggttctatccctaaagggcatcgcccttccaaaagttcattcactattttcccaaagggattgcaaatcaggaagcttcaacc

SEQ ID NO: 429775 - DNA, 122 bp, Homo sapiens
agagtctctgaggtttggggttgagagggaaagcaagaatttgcacttctgacaagctcccgggtgatacggatgttgctgtcaagggtcacactttgagagccactacattaagtaataaa

SEQ ID NO: 429776 - DNA, 122 bp, Homo sapiens
aatgaaaagttctcgggctgaaccactgcgaccgcggggggtgggggcgttgcagcggcgcggtcacctccaggctccacccccgagacgcgccgccttggcccgtcggtcccgaacttggc

SEQ ID NO: 429777 - DNA, 122 bp, Homo sapiens
tcatcgatcttgctctgcagcagatccttgaggctgttggtctggctggaggaattgaggcggctgtactgctgcggggtgcaagggcgggggaaaccacaccgttaggcgaggcgcgggga

SEQ ID NO: 429778 - DNA, 122 bp, Homo sapiens
ttttacagagttgctatccctttagggtggagtctcatcaccaaaatatcacctgggacccgaggtgctgaggctcataatcagccacttagctctgaagacttcaaattcaccccagaggg

SEQ ID NO: 429779 - DNA, 122 bp, Homo sapiens
ccaggtcccggagaccatgatggcacccacagtggacttcgcaaaggagcgtggggaccccgaaggccaggccacccctcagaggggggtcccatgctaaagcagacggtgccggtgccgca

SEQ ID NO: 429780 - DNA, 122 bp, Homo sapiens
cccgactcgggctgggacgggtactagggctggagcccgggccggggctggggctgggcccggcggggtgggggccggggccggaggaggggaggggtggcgtaggcgctctcaccccaacc

SEQ ID NO: 429781 - DNA, 122 bp, Homo sapiens
cccgctcggctccaggctgcgaggtgcgtaatccccagccggcccctcgcgcagcgggcacggccagcgctgccacaggtgacttgatttctgcgacggtagcttagccacccggggccaat

SEQ ID NO: 429782 - DNA, 122 bp, Homo sapiens
taagactcgtcaactttcatctttcctggtttctgcaaagttgatgatgaaatttcctaacgtcttctcagaaagcttaacactggatttagacttgtctctatcaggcactttctggtgcc

SEQ ID NO: 429783 - DNA, 122 bp, Homo sapiens
ctcaccagcgccctgcaccccatatacatccccacatttacagagggctcggaggagattcgtcacgtcggacctgcctctcggctcttggcatccaaggatgggaggagggagcagaaggt

SEQ ID NO: 429784 - DNA, 122 bp, Homo sapiens
catcctatcccagtacttattagatacatcataaggacaagtttcttaactcggctttaacgtgtgtgtaataatatctagctattaaaaggttgttctggaataatgaatatacagcaact

SEQ ID NO: 429785 - DNA, 122 bp, Homo sapiens
cggacaccccggcctgtcccagcacttgcaggatggggccggagggaccgagggggagggcgggaggaagcaggacattggagacattttacagcaaattatgaccatcacagaccagagtt

SEQ ID NO: 429786 - DNA, 122 bp, Homo sapiens
aggcctgcgacgctccccgtctgagcatggtgctaaacacagtgcctagcacccagtaagcgcacacgcatgagggaaggagctgggagctggctcggcaggtctggaagttggatagggtc

SEQ ID NO: 429787 - DNA, 122 bp, Homo sapiens
cagctggccggctgaaactggcccgcacctcccgccccggggccgggtgctcctggtccgcgcaaggtccccacgcactcccgcggccacgtgggtgcctgtcccctggagcggggttgggg

SEQ ID NO: 429788 - DNA, 122 bp, Homo sapiens
aacaaaaaataaagtgcctcaaatcctccaaaaacaatgaaatataaacacttcaaaatacgcagttagggctgggcatagagactcatgcctgtaatcccagctactcgggaggctgaggc

SEQ ID NO: 429789 - DNA, 122 bp, Homo sapiens
cagggaaggggcccctctctccagaccctcatatctccaggtccaggccccattttcctccgctgacagctcagcagcgtgcgcttccgctggattcaggccaggaccagcgaagccgcacc

SEQ ID NO: 429790 - DNA, 122 bp, Homo sapiens
ttttttcatcctccataccaacaaagctttcttcaatggtaattaaaagtgacttcctctcgaggttatagatcggccatcagcccacgaagcattcctaaaaggtgggaaactctttacac

SEQ ID NO: 429791 - DNA, 122 bp, Homo sapiens
aaaaaaaaaaaaaaaagagagacaacagggagctctctcctggatttctccttgtgaggacgcagcaagagtacagtcacctgtgaacctggaagcatgccctccccagacagtgaatttgc

SEQ ID NO: 429792 - DNA, 122 bp, Homo sapiens
acctactcatgccccaaacaatgtagtaaacacaaattgagagcgagcaacaaaatagcccgagagttcaatataatgtggaaattcataatttagaaacaaagtctgtcatttttaatacc

SEQ ID NO: 429793 - DNA, 122 bp, Homo sapiens
gggcgcgccccggccacggcgcacgcgccggcctcagcgctccctcctccatgccctcggcgcacggcgccgcccactcacccagctgcacctctccgtgcgtccccaagctcacccgctct

SEQ ID NO: 429794 - DNA, 122 bp, Homo sapiens
agctttgcatgaatgcagccgcagtgtggcaaatgggcacaggggggcagtgtggccccacgtggctccgaagccctctgattctgcatgaggcctgacccgggctggaatgccggctccag

SEQ ID NO: 429795 - DNA, 122 bp, Homo sapiens
tggggtctgcgcccagcggggccaaagccttgagttccttggcagagagtgtggaacagccgtgagcccttcaagacatgcctatgagcccggtgatttttttttcaagggggctttgatca

SEQ ID NO: 429796 - DNA, 122 bp, Homo sapiens
ctctctcttctcaaattgaatttacaattcaccaggaatcaggggatctcaggggagccccgggtcacctcttagcggccatgtctctgaatccggctaggcagaaaagtactaactcgcaa

SEQ ID NO: 429797 - DNA, 122 bp, Homo sapiens
tttgattgatgagccaccttcaaaccaagtcagcatgaaacagaagcttgggttagttcacgttgtttgatataataggacaaggcagactaacgtctcttgagaatgaagggaagtttttc

SEQ ID NO: 429798 - DNA, 122 bp, Homo sapiens
ccatggttgccagagtgtttagtgtcaggatggccaaagagggaggtaatatctacttttcggccactaggatgctagtacagtatttgatataattttacatatgaactaggctttattaa

SEQ ID NO: 429799 - DNA, 122 bp, Homo sapiens
cccgccagggcgtaacggcgggtaacccgccccacccgccgcacaacacacccaactgcacggactcacgtccgggatcccctgcctgcctctcgaggaagacacctgcccaggccggccgc

SEQ ID NO: 429800 - DNA, 122 bp, Homo sapiens
tagatccgctggctcccgcgtgtcacatagatacgctggctcccgcctgtcacgtagatacgctggctcccgcctgtcacgtagatatgctggctcccacctgccgcgtagctacgctgcct

SEQ ID NO: 429801 - DNA, 122 bp, Homo sapiens
gggggtgcctgcacaaaggctgggtctcctgcctccgggcctggggtgcacagagggagccgacccagggaaggcaaggggcttccctagacaccggccgagcaaagccgggcccaatcctc

SEQ ID NO: 429802 - DNA, 122 bp, Homo sapiens
tgttccgaggaacatgttgggcggtttcttccgggccggggaaatctgagcagccacaggcgaatctgggacgatggcagattgttaatatctcagagccccagagactcggcgtctccgac

SEQ ID NO: 429803 - DNA, 122 bp, Homo sapiens
aagccatcctgggttttcatccaagacccctggatgataaatatctaaagtgtagatgcccgtgatgctatttgagtgaaaagagatgctctttccctctagaactcttaccttttcctcta

SEQ ID NO: 429804 - DNA, 122 bp, Homo sapiens
catccaccagagctgtagctgagcccaggaatgtggtcacttctgtgatatcaccacaaccgctgggccagacctcttcctgagctcagctcatttgttggaggttttcccatcaactgggt

SEQ ID NO: 429805 - DNA, 122 bp, Homo sapiens
tagccagaaaaacaattcagtccgatgccgagacattctccaatcagctaagccagagaccggcctcgcctcaacgtacgtccgggaggcctggcgggaggtagcagcgattcccccaccgc

SEQ ID NO: 429806 - DNA, 122 bp, Homo sapiens
gatgtgagtacctctggcaccataccactccccatgaattcaaatgcacctggtcagaagcgggggaacataaacaagggggatgaggtacgccatggagaggagactcttttacctgttta

SEQ ID NO: 429807 - DNA, 122 bp, Homo sapiens
cactttggccagtggtctctgggcaacaacaaggtgggaccctgatgcctgggctggggccgcagggaggctgcctctccatcagtgccgctcactgtctggggtcttctggcaagctggcc

SEQ ID NO: 429808 - DNA, 122 bp, Homo sapiens
ctgcttgccggggcgagtgtgacatgtgtcaaatttgggctcggcgttggggtcgcattccggacccagcatcaccacttgttgttctctttcattttgctttgtgatgggggaaaaagggg

SEQ ID NO: 429809 - DNA, 122 bp, Homo sapiens
cccaatgtccccagattaggcctctttcccttataaatcctgttggtcttggaatccattcggagctctggctcctcctcctctgtccaaagcctgtgtttcagacattgggcgagggggta

SEQ ID NO: 429810 - DNA, 122 bp, Homo sapiens
agtgacggcgggagtacaaggagcaatggcagcgggagctttgtggctgctgggccgcaccgcacgggagtcaaacctgcggccgcaacgccgccagcagccggaacctgcggcgcgcagcc

SEQ ID NO: 429811 - DNA, 122 bp, Homo sapiens
tttccccagacccagctgccccacgggctttgccttgaggtggtcttagacaaaagagcccgacaagggcagcaaggaggttcctacgcggaaggaagcccgtggcttctgctgcgctgcga

SEQ ID NO: 429812 - DNA, 122 bp, Homo sapiens
ctcatgcggtcagggggtgtagctcagtggtagagcgcgtgcttcgcatgtacgaggccccgggttcgacccccggctcctccagttgtccattttcttcattctcctttctggttctttgc

SEQ ID NO: 429813 - DNA, 122 bp, Homo sapiens
accctgggtcgcgccgcgcggaggggcctacggctggggatgcagcccggggcgcgcccacgcccccagcacagactggccaggcgccaggttcccggctctcactcacccgcgctcccgcc

SEQ ID NO: 429814 - DNA, 122 bp, Homo sapiens
tccaggagttcacataacatggccaaaggccgggcagcgtgcagcagaatgcaagatgagcggccaggttatagggcgagatcatgaaggattcttccccggccccaaatgttctttaagag

SEQ ID NO: 429815 - DNA, 122 bp, Homo sapiens
ttctccccagcaccaagaggatggtggcccttggcctcctggtgcagagcatcagtcccacgctgggagtgtggagaggtgcgtgggaagcaagccattgaggaagtggggccaacagagag

SEQ ID NO: 429816 - DNA, 122 bp, Homo sapiens
gcgggcgggccgggaggaggcggcggctccgagaagaacatgaatcagcggcggcgacggcggcgacggcagtggaaggagcgcggtggcgcgggagcggccccggggaccccgcgctgctg

SEQ ID NO: 429817 - DNA, 122 bp, Homo sapiens
ggtacaggccccgcccagtccggtcacatcccccggaattctcgcagctccccttagctccgcccccagtgactttccagctttcgtggcgggaggcaagcttaggggaagcgggcgggtcc

SEQ ID NO: 429818 - DNA, 122 bp, Homo sapiens
aggcgggccttcttccgtctccttcagcaggaaggcagccgagtagggtgtgaagacagccgtgtagatgaccagcagcaggatgagccagtcccacacggccttgaaggggctgtaatgca

SEQ ID NO: 429819 - DNA, 122 bp, Homo sapiens
gaaactaggcacccagtaccactgcagtgaggcagccccaataatatttgccttaagaaacgcttcctttccagaggcagacttaaaagtacagctttgaaatccatttgctcgattgtggt

SEQ ID NO: 429820 - DNA, 122 bp, Homo sapiens
caaaggataatgaacaagtcagactctgtgccctcaaagaacttagagttttaaacgactcgaatggggaaagaaagtaaaaaatagggcaaaagacgccgattttatcatgaataaaattt

SEQ ID NO: 429821 - DNA, 122 bp, Homo sapiens
ccaacttcgcggccactgaccttgtcttcgcaggcggcgcgagagggggctgcagttgggcgcggcaagagcaattaccagtgttagggcgccgggctcccccctgcagcagagggagggag

SEQ ID NO: 429822 - DNA, 122 bp, Homo sapiens
ataggaagacccccaggtcaacccaagaaacagccacacgaatgtgagggtgtccagagccgctctgcttccaggcacctccctcctcattcagacaccttctaaacccagcttggaaggat

SEQ ID NO: 429823 - DNA, 122 bp, Homo sapiens
ctaaaagcatttcataaatgtctattaaagcgctacgaatgtaagatgaatttagtggcgcggctgcctccctgaatccgaacggtaatgatggatttatcaacggggattcgccttcagcc

SEQ ID NO: 429824 - DNA, 122 bp, Homo sapiens
taatatttagcctcttttaaataagttgtctgctgcttgaaaatggattgtgcgtaaagacggagggtaattatagatataccacctagtcttcttgatccgaggcctacagcttttgatcc

SEQ ID NO: 429825 - DNA, 122 bp, Homo sapiens
gggctttcactcggctctgttcggctcctgctcgggaagggtgcgcgggggcgagtcctgcgcatgcgccctcaattcctgctgctctcagggctgcgctcagcctcgtgttttcacttcct

SEQ ID NO: 429826 - DNA, 122 bp, Homo sapiens
agtagagacgaggtttccccaagttggcgaagatgttcttgatctcctgaccttgcgatccgcccgcctcggcctccgaaagtgctgggattacaggcgggagccaccgcgcgggccttaat

SEQ ID NO: 429827 - DNA, 122 bp, Homo sapiens
tcatcaggattttgggtttttcacatttcacgctaaggagtagtggccctgacttccggtcggctggccagctgactccctagggccttcagacgtgtatgcaaatgagtgatggataagga

SEQ ID NO: 429828 - DNA, 122 bp, Homo sapiens
ttaaggtagaaaatggtaagaaatgtgaaatctctttgaaagatcagcattgcttgacttcggtctgctagatgttgtgctgtggtaaattttgtgctctgaatccatctaggtgcagcgtt

SEQ ID NO: 429829 - DNA, 122 bp, Homo sapiens
gttctaagaacctcaggaggccggcgtagccgatagtggtgaaccagcgggaagggtaatcggagatgggtgtatgtgttgggatggagttggagtgcagacccagtcagtctcagaataag

SEQ ID NO: 429830 - DNA, 122 bp, Homo sapiens
ggcgggagtttgcaggtggggaacggctggaggaactcgtggaacagcctgagaggtgtccggcgaggtagggcatgggtggccttgagccctgaggctgagcggagctgtctttgagagcc

SEQ ID NO: 429831 - DNA, 122 bp, Homo sapiens
ttgctggccactggacggagaggcagagggggctgaaattcgggcccatgcctctgtgagcgatgacggagcaacagctctccagcacgtgaagctctccagacagctgttcgtgagaagcc

SEQ ID NO: 429832 - DNA, 122 bp, Homo sapiens
ctctaggccgcgcggaggtcccggcgtctcggtggtcccaccgcgccggttgtcgccgcgcgaagccgcccgggccccgggacacaaggacccgaatcaggagagtctctccagtcggcatg

SEQ ID NO: 429833 - DNA, 122 bp, Homo sapiens
cctatcacgagtcccaagggcaagagatgagcagaaaagtgctgggtgcagagggctgcgcggaacacgaaggcaccagcgtgcacacaaatagggaggccaacgttccgggccaggccgaa

SEQ ID NO: 429834 - DNA, 122 bp, Homo sapiens
tcgtacagcactgttaggtactgtatggaaaagagattggtaggagatctgtttcttaaccgttaaaagaactactttaaatatgtgtgatgagtaaattggtaccaatttacggtattcag

SEQ ID NO: 429835 - DNA, 122 bp, Homo sapiens
tgtttgttatcctcctactttccaaactgtgttattatctgggcaattgcttcacttctccgcgttatatactagacacggccaggaaatgatgcaattaccaaaggagtcaagacacctta

SEQ ID NO: 429836 - DNA, 122 bp, Homo sapiens
cgtctgcccttgtctaccgacctccgggctcactcagtccgataacaggttagatggaatcgtggtagcaacaggggctgggggctggggaggaggccgtcgaagcccacacagggtgggag

SEQ ID NO: 429837 - DNA, 122 bp, Homo sapiens
atcaagcaggtgagctgagaccacgggctgtcttccttggaaagcacagagaacctggcacgattgttttgctaccaggactgcagggctgtctttctgcgaactttcattaccagaggttt

SEQ ID NO: 429838 - DNA, 122 bp, Homo sapiens
cagcattattttatgggtatagaaacaaacttgagaagtcaactaacaaacttgctgcagcgactattaagttgtgattgaggaagtagaacgaactcagatttctctgactccaaagtaca

SEQ ID NO: 429839 - DNA, 122 bp, Homo sapiens
actaaaaatgcaaaaaaattagccgggagtggtggggtgcgcctgtaatcctagctactccggaggctgaggaaggggaattgcttgaaccagggaggtggaggttgcagtgagccaagatt

SEQ ID NO: 429840 - DNA, 122 bp, Homo sapiens
cccatcagccaagtccagcccacagctaccatcccagactccagcaggttacaggtccatcgagaggcatttctcaaaatcagcaatccggtgtttgcccggtacacaggaaatgagtatcc

SEQ ID NO: 429841 - DNA, 122 bp, Homo sapiens
cctccccgctgctgagggggcctccgggcaggatgagactccccgggcaagggccgtgctcgtccacctctgctgtccacggcgacccacccttctcccctgccctgtcccctgggccaccc

SEQ ID NO: 429842 - DNA, 122 bp, Homo sapiens
tatagcttggggctgctctggcaagaatcggaggagttgggcagcaggtgccccctgtagcgggggcaggggttctggacttgccatagtttcaaccctgcccactgttccttccccagcct

SEQ ID NO: 429843 - DNA, 122 bp, Homo sapiens
tggccaacctggtgaaatcccatctctactaacattacaaaaataagacaggagtggtggcgtgtgcctgtaatcccagctactcaggaggttgaggcacgagaatcccttgaacccaggag

SEQ ID NO: 429844 - DNA, 122 bp, Homo sapiens
tgggtccctggtctcctgggactactagccctttgttgatagggagaagccaacatctcccgcaggaccccctaatcttcagggcagctcccagagcatggatccctcctgattccactcag

SEQ ID NO: 429845 - DNA, 122 bp, Homo sapiens
aaagaactttctgttgctctggaaagtttcccttgctccatcttactcaacaccaccctgcgtctgcactcaggggaaaccactgttctgacttctgtcaccacagatgaatttgatccatt

SEQ ID NO: 429846 - DNA, 122 bp, Homo sapiens
ccacgtggaacattttctggcgtccgggccaggtcaagcggaagtaaacactagagcctgcgcatgcgaacagcggagccttcctgcttttctccctcacttccgcttccgcctcggctcag

SEQ ID NO: 429847 - DNA, 122 bp, Homo sapiens
agtgtcccacggcagagggccgtccacctagaacaccaatagtgctgcgtggcagagggccgtccacccaaaacgcaacagtaccccagttacacgctcctggtgcaaatgaccctcctctc

SEQ ID NO: 429848 - DNA, 122 bp, Homo sapiens
tcagcgtgctgacgtcacgggccggaggtcccggggctgctgggtgcgggcggtgggctgcgcgttgtccgctggactgggtcccggtcacgccccgccaagccccgcccctcaggccgggg

SEQ ID NO: 429849 - DNA, 122 bp, Homo sapiens
agtaaattactctatttctgtgcttggcaggaatgtaatatggagtaacaagagctgtgccgcagaagccctggagacagaagttgattctatagtacctaccttcttaaagctcgtgacag

SEQ ID NO: 429850 - DNA, 122 bp, Homo sapiens
ttcgggggagccttcgggagggcgcctgccatagacgactgtaaaggggcggggtcagctcggggaggaccctgcgggcgtggcggcagttatgggtgaagcctgagggggcggggcctgat

SEQ ID NO: 429851 - DNA, 122 bp, Homo sapiens
ggaggcttaccgagcagcgagcctatgaagatgacgacctgcacggtggtggtgaactggcggtacagctgcgcctcgccgaactccccgagcgcgctgcggttcacacccgcagcctcggc

SEQ ID NO: 429852 - DNA, 122 bp, Homo sapiens
ggatggcaggagccgcgcaggggacccacccctccccgccagccccggggcggcccccaccggccttacctgtgatactgagcttgcaggaactggaattcgtctttgatcctgtcacaaga

SEQ ID NO: 429853 - DNA, 122 bp, Homo sapiens
ctgccgccctaatcccaccttggccatgaggcagattgtgctcacgcagaccgggcagtgcgggaaccagatcggcgccaaggttggcagccagggctctgagggcccagctcgggcctgcc

SEQ ID NO: 429854 - DNA, 122 bp, Homo sapiens
ggaaggttccagcagctgccactgcctccaacggcctgccctggccaactcccccaggggcgatgttgcccgtcccaggcaagaggactgtcactcggacagacagagcagcaagagtgtgc

SEQ ID NO: 429855 - DNA, 122 bp, Homo sapiens
gctctgtcagcgtctccccgagctgcttcagcaccagtgccttctcctccagctcagggccgggcaccagccggtggttgtgggacacgtctctctggatcttctccaccgatttctccagg

SEQ ID NO: 429856 - DNA, 122 bp, Homo sapiens
catgtgttgacagggggcagggagccgagctcgggcagcagctcagggtgtgggtccaggcgggccagacggctctgctccagggcaatggcttcggctgagtgcttgcacttctcagagcc

SEQ ID NO: 429857 - DNA, 122 bp, Homo sapiens
taaatgattactcctgggtgataggcacaaaccaggactttcccaggcaaaaggaagaagcgctgtacagaatatgtattttcaaagataaatgcacctcgggtcaattctttgaactcaag

SEQ ID NO: 429858 - DNA, 122 bp, Homo sapiens
acgggctacatagatcatgacatctccatgttcaaggcaccagcttataccctgcatagccggcactcagagaagcgtgagcgttgccaccccagtcatccggctggggttggagctgttgt

SEQ ID NO: 429859 - DNA, 122 bp, Homo sapiens
agagtcttggtagaagatacgcagtcccttgtaagtgaaaaacttgcctgaagacttccacgagtgaagatcaggtgacagctgagtgtatgggatgtgcaggtacgcagcaagcaggagcg

SEQ ID NO: 429860 - DNA, 122 bp, Homo sapiens
accggaatactgcgcttttccgaccggcttaaaaaaggggcgcgccacaagattatatcccgcacctggcttgtacggtcctacgcccacggagtctcgctgattactagcacagcagtctg

SEQ ID NO: 429861 - DNA, 122 bp, Homo sapiens
ccacaaagcgaggaagggcaggggctacggagtgggggcaccccgaaagccttgagcccccgagtttgctcggttgagggtgttgggggcacagggatgctggcccccagctccccactgga

SEQ ID NO: 429862 - DNA, 122 bp, Homo sapiens
caggggctgccgtgcctgccgcctccaccccattcccccaacaaggcagcgaggccttcccggaaaataagcctgggctcttcacacccctgctggaggcaaggcccgccctgcactctgga

SEQ ID NO: 429863 - DNA, 122 bp, Homo sapiens
catcccaaaagctacacccggagccccgctgccgccagggagacagaaaatgatgctccacgaagcacacagcttcaaaacaggaaagatgggatccagtgatggctacaacttccaaaccc

SEQ ID NO: 429864 - DNA, 122 bp, Homo sapiens
cccagggctcgttgggatgcaggtgaccagaagcacaagccccagccttgtctcggtgcacgtttactaggaacgcacaccgtgctctcggtgcgtgtttactaggaacgcacgccgcgcca

SEQ ID NO: 429865 - DNA, 122 bp, Homo sapiens
atgtagcaactcaggggttaaccttgacacaccaggaaccctcccagacctccccaagctcgaaagacctgtggccttgtcccttgaggccctaaggctctactaatcattatttattttga

SEQ ID NO: 429866 - DNA, 122 bp, Homo sapiens
ccgggtgcagcagggacatttatgtcctaaccagcaggatggaagggcatgtggctccctcggataagtcagggctctccccggagaagacgacaaggacgtgtggtgagcacgtgctcacg

SEQ ID NO: 429867 - DNA, 122 bp, Homo sapiens
agaccaacccacctgtgaacactgccttctcatgtggacgtggggaatgaggaggagacacggcaagcttgggaccaaaggaaaaagaggctgaccttgaagcctcctccagtgagggacaa

SEQ ID NO: 429868 - DNA, 122 bp, Homo sapiens
ttttagttaagcattttgtaatatctccttttctaccctgatataaattttttatgacatcgatataatgtcctagctataatataaagggaaaataaaagtgattcatagtaaaatatcat

SEQ ID NO: 429869 - DNA, 122 bp, Homo sapiens
ctcccctggtgacagggagacagtgacatcatcttcctcgatgttcacatttcaaaaagacggctccaaggccctaaagaaagacatttatagggaccgggcatggtggctcacgtttgtaa

SEQ ID NO: 429870 - DNA, 122 bp, Homo sapiens
gcccacggcgtccccggtcgcggtaagtttcttggccctcactctggcgcgctacacctccgcaccccaccctgtcccagccacctccacgctgggccgagctgcgactttactctgctccg

SEQ ID NO: 429871 - DNA, 122 bp, Homo sapiens
cccagtccttaaatacaaagcaaggagaatgaaaaggaccctccctctgaaatacagcaccgacctcagcatggaggcaaaaggacagtgggcaagaccacgtccctccgaagggagagggc

SEQ ID NO: 429872 - DNA, 122 bp, Homo sapiens
aatcacgtgaccgtctgactccgcctagtgcccccgccacatgatcgctgccttcagcaacggtctcccagcccccaaacgtgtaccccagccgaggtcctctgagcacccaggctaagctg

SEQ ID NO: 429873 - DNA, 122 bp, Homo sapiens
ccaaagttctcccacacctagtcaccaatggcaggcccataaatcacaagaaattacacacgatttttttttaacattatgcaattaacgcctataatgtgggaaaacattttataatatat

SEQ ID NO: 429874 - DNA, 122 bp, Homo sapiens
cagaggtagccagtggatgaggcatgcgcagagcccacgctcaaagcctggcgctgttggcgcccaacctggaaactacctttcccgtgaggacgcgagagcagcccttcgggattggcaga

SEQ ID NO: 429875 - DNA, 122 bp, Homo sapiens
atggtctcagggaagtgggccaggccctgcagcagctcggggcacttcttgtagtagacacggacggagagcagcgccacacaggcaccgatatcctggaaggccaggtagaagcctttgcg

SEQ ID NO: 429876 - DNA, 122 bp, Homo sapiens
cctgctccccaggaagggggaatggagcccccacacaccgccctggcgcaggaagccccccgacccatcacaacttcacccagaagggactgcctctgatggaattccacagccaagctatt

SEQ ID NO: 429877 - DNA, 122 bp, Homo sapiens
tgggacgcagggagtcggaggagggtggagggagaggcagaaagctgcagggtgagagaacggctccccaccccaccatggaggggccgtctgtgcatccatacactgcacacgcgtgcgca

SEQ ID NO: 429878 - DNA, 122 bp, Homo sapiens
aactttaggattgagtttccaacgtatggaatttgggggacacagtcaaaccatagcactcggtatctgaccaccctcaacatcttagcaccctgtcctgctttcagcaataatcctgttag

SEQ ID NO: 429879 - DNA, 122 bp, Homo sapiens
tctttgaagttactattataattactttgggacatcacaaacagcacccatataagacagcgactgtaatccataaatgtgtgtgttctgactgctctaccaaccctataccttcctccata

SEQ ID NO: 429880 - DNA, 122 bp, Homo sapiens
tggtggtgggcacctgtagtcccagcaacttgggaggctaaggctgcactgagctatgatcgtgccactatagtccagcctgggcgacagggcaagaccctgtctaaaaaaaaaaaaaaagt

SEQ ID NO: 429881 - DNA, 122 bp, Homo sapiens
cttaaggacgcagagtggcgtcagatttggagaagcgccggggaccgtggaggaagtcatcggcctggatttctttggatttgcagatagggttccagcagaactggaaggtgggcgagaca

SEQ ID NO: 429882 - DNA, 122 bp, Homo sapiens
tcatctctgatgtcgtctgggagcagtgcgggcccctgcattgccaaggccttataggcacgggctgggcgggggtgggcagtccgccagccagcggcattctgcagggctctgtgcaagcg

SEQ ID NO: 429883 - DNA, 122 bp, Homo sapiens
gggcggggcccgtgctcaagggctgggcctggagagtgtgcagcatcctcatgatggcatcgccttattttctagaatttgtctccaaactggactccagaccatcctgtcctcagccccga

SEQ ID NO: 429884 - DNA, 122 bp, Homo sapiens
gcccctccttctccagcctcttctcccgggaactcagcccggctgagtgacagcagcctgcgctctaatgggcccccggatgctgcctcctaattagcttggaccttctcccctacggctgc

SEQ ID NO: 429885 - DNA, 122 bp, Homo sapiens
gaaatctgactgaggccggtggaccgaggcctccagctcaggagcagccccgtgaagttgcgcctacgagagtttcagttcacggtttacctccagctggtgaagagtcgcaccaggtgtgg

SEQ ID NO: 429886 - DNA, 122 bp, Homo sapiens
ctgacctggctccttttgtttcccatggctggggtccttctttccctctagagcctgtaacgcccccgctctgtcaaattcctcatacagcaaacttattctactctctttacccagaaata

SEQ ID NO: 429887 - DNA, 122 bp, Homo sapiens
actgataaaatcacttatgaccatttttcattatataaaccacatttagctaagggcttacgtttactgtccatctcccccaccttggctgctgtatgactcagagaggcttgttccccagc

SEQ ID NO: 429888 - DNA, 122 bp, Homo sapiens
gcggtgagcccacattgtgcgagtgaaactccttctcaaaaagcaccgctgcttcgggcgcggtggctcacgcctgtaatcctagcactactttgggaggccaaggcgggcagatcacttga

SEQ ID NO: 429889 - DNA, 122 bp, Homo sapiens
gcgtttcctggctgctattttgttgtcttctagcttgtgttggggagacaggtctcaccacgcaccatttcagcactacggacagcgcctaggcgccttctcctagaaacggaaggggattc

SEQ ID NO: 429890 - DNA, 122 bp, Homo sapiens
ccgcgcgccgggcaggccccctcgcgcaggcgcgctgccgcgggcggaggatccgggccgcgcttcctctcgccaggcctgcgagcttcctcccagcggagccctgggcgagccgaggttgg

SEQ ID NO: 429891 - DNA, 122 bp, Homo sapiens
ggccggggcaggcgtgggaggtggcgagccggcgacagagggccggggtccgtctgcaagcgtctaaaggagcaggagctgatacctggtatggcttgtagtcttcattccaaagcccagag

SEQ ID NO: 429892 - DNA, 122 bp, Homo sapiens
gctgagagtactgtgtgcccctaaaggcttcatgccgtcagtgggctggacgagtggctccgggcagccccctcctccgcccactcccctccctgctcccagctccccctcccagggcgaaa

SEQ ID NO: 429893 - DNA, 122 bp, Homo sapiens
acaggagggacactaggtcattgtaaaggatgtaaatagggtatcaccactgtggttttccgcctccaagttgctactttgcctggctatgaagagggcaggaaataggcaggggacagtag

SEQ ID NO: 429894 - DNA, 122 bp, Homo sapiens
atggtgcacctcctccaggaagtccagcacacccctggggtcaatgggcactccgtggtccggccaggtccaaaagtggtattgccagaccattctctccatattcccttgcccaacctttg

SEQ ID NO: 429895 - DNA, 122 bp, Homo sapiens
actcaggacagtggttactttggggatcagatggggttggagatggatcagcaaaaatcccgcagggggctttgaaggtactggtgggtacacaaggatttgttttattattgttgctattg

SEQ ID NO: 429896 - DNA, 122 bp, Homo sapiens
aaaaagggagagggaaggaaggagagagaaagagagaatgatggcagaaatcaacggaggcggaggcgtagtttcctgaggctagaaactcagtctggggagacatgaaagcgtcttttggg

SEQ ID NO: 429897 - DNA, 122 bp, Homo sapiens
gcttcggcctcgcactccccgggtatgctgcgggccctctccatccggggaggcggggtccggggaggacacatccccggcccggcctctccgagagaccctttggatttttctcttccaca

SEQ ID NO: 429898 - DNA, 122 bp, Homo sapiens
agcctagtactgagggcggaggaactcctgactcatcctcagccctgagtactgcagagccgctggccagctgcctgcctgggtcacacggctgcctctgatggccggaacctagcagaagg

SEQ ID NO: 429899 - DNA, 122 bp, Homo sapiens
cacactcaaaatatgagaactgcctgttccctcccaccctcaagacaccacctcaccccacgaccttggcaggcttacccaagctttgagacagagcaaaaagaaaacattctagggtttag

SEQ ID NO: 429900 - DNA, 122 bp, Homo sapiens
ggaagattcataagcagtccatttccttcctcactggagatatgtttgaacatatgtttacggaggagttctttctgagcccactttcaggcaggcactatctcaaagggtttattgtagtg

SEQ ID NO: 429901 - DNA, 122 bp, Homo sapiens
ttccttcctctcactgtggggctctgtctctctctctctctctctccgtgtgtgtgtgtccgtgtgtgcgtgtgcgtgtgtgtgtgtgtgtgtgtctcgccttccctcttaccccccacctt

SEQ ID NO: 429902 - DNA, 122 bp, Homo sapiens
gccagcttgagtggtgtgtttccgattcggttgaaagcgtatttcctttccgtggaggggcggcggtggtagtgcctgcaagaacactgcagcttgagaaactggcaggctcactgattagt

SEQ ID NO: 429903 - DNA, 122 bp, Homo sapiens
cccccgccctccacctcccctcccgggactcacaacccggcctttggagtttttctgatccgcggaacccagaggttcctcctgcccacgctctacgaaagtggggggctgggagggatctg

SEQ ID NO: 429904 - DNA, 122 bp, Homo sapiens
tagctgcccctccccgccccgcccctccccgccccgccccggccctcgggccaccccgcccgcctgagccccgcgcgccccgggccataccctccccaagcccagccgtccgggcccgcacc

SEQ ID NO: 429905 - DNA, 122 bp, Homo sapiens
tgttacactatgacaaaacatctggcatatgataacacagcaaacgagagcgacagattacgcagctctagggcagagtttctcaaccttggcactgacttatacgtaaagcacttactaca

SEQ ID NO: 429906 - DNA, 122 bp, Homo sapiens
aatgtcatgatgtcatttgtcacgtttctgttccattcttttcgagcaagcaggaagccacggggctacctcagttgctcttagccagtagctctctccacaggtaggccttcatcggaggg

SEQ ID NO: 429907 - DNA, 122 bp, Homo sapiens
cccgggcctctgcaagcttgccaggatccccgggagcctgcttcctccaatgcacagagccgtggcgcgtgtcaaagtgtgggaaagttcctgggagagggaaggggtagaaaatacagccg

SEQ ID NO: 429908 - DNA, 122 bp, Homo sapiens
agctggcggcgaggggaggcggtccctgcggctccgccgggctgggggaactggctcctgcgcctctgcctcccggaggatcgcactcgctcatccttacacaccacacacacacacacaca

SEQ ID NO: 429909 - DNA, 122 bp, Homo sapiens
cagtgagagacgcatttccagttctcaactacgagccacgagtttgcagatggggctgctcggcggcgcctgtggctgagggagagcagcggcggcggggagcgaccgggagcggcggcagc

SEQ ID NO: 429910 - DNA, 122 bp, Homo sapiens
gcaggtgccgtggagccccacaaggcccctgccctagagcgcctgctctggagggcctgccgcggcttcctcattgccagcttcagggagctggagcagccgctggagcaccccgtgacggt

SEQ ID NO: 429911 - DNA, 122 bp, Homo sapiens
ggaggctatttataaaggcgggtgagatcagcggccggccaaggctataaattcgcaggccgcggccgggccccacaggagcagccgcccggggcaccggagctgcgggctgcgtggccggg

SEQ ID NO: 429912 - DNA, 122 bp, Homo sapiens
ggcagcggcggcgggagcgggcggtgcgggccccgaacctggctggggaggcggcggtagcgcgggaatgtccccaggagcctcggggccgctagcgctcatgccggcctcccgccgctccg

SEQ ID NO: 429913 - DNA, 122 bp, Homo sapiens
acgtgggcctccacgattccttggcatgcgtgtcactctgggcaacaggctggtcggccacgactgcgcaggcgagaggcacagagcgactggagactgtagtcccccggtttccctggaga

SEQ ID NO: 429914 - DNA, 122 bp, Homo sapiens
gtgcttcataaaaataaacagctgaataccactctacgctttgtgaaatccaatgtagatcgttaaaaacttgtttccagtagcagtgcagctgttttgtctagtaccacttgaccttccta

SEQ ID NO: 429915 - DNA, 122 bp, Homo sapiens
agtgcggcccacatagtcagcggtctcttccaggtcggagtttgtctccccgaacccaggcgtcccaaagcagctgggggccgccattttgccgtacggcactggctacgcccggactccgg

SEQ ID NO: 429916 - DNA, 122 bp, Homo sapiens
cgttctctgccgtgggctgcaggtgctgcagcatggtctggaactccgaagtcatagtgccggttgatgtcgtcctggtgatggcgagctgccgtcccacctgccccatggtgctgctaggt

SEQ ID NO: 429917 - DNA, 122 bp, Homo sapiens
gaaacgacgtggatctaaaggcgaagcccatgctgaggacttttcaaaatggcctcttatcggccccactcacaggagcttcaggcttcggtggccctgtaggacaaccctggggtgtcatt

SEQ ID NO: 429918 - DNA, 122 bp, Homo sapiens
gccagtcactctggcacacagagagggtgtgcgatttgctgcggccggttccctcagccccggctgtcaggaggctggcctgcggccgtccgcgtccccacccggcatccatccccggaatt

SEQ ID NO: 429919 - DNA, 122 bp, Homo sapiens
gctggcgcacggtagtgccacgggccgagtggagggcttctccagcatccaggagctctacgcccagatcgcgggcgcgtttgaaatctcgccgtcggaggtaaggcgccaggtgctcaggc

SEQ ID NO: 429920 - DNA, 122 bp, Homo sapiens
ggctccccacctgccccatctgggccgaggctcctcccttgcctggggctgggccagggccggccgccatcctcccagcttggcttagaccagcacctgcaggggactggggagagtactcc

SEQ ID NO: 429921 - DNA, 122 bp, Homo sapiens
ctcagggctcgtgaccctctgttccggcccacgcttctgaccggtgattagaaagcggcacgttctatcctcggccctgtcagccctgcagggcgcaccagctgctctcacgggccacagaa

SEQ ID NO: 429922 - DNA, 122 bp, Homo sapiens
gtgctgggggcggcgcactctttacgacatataagcggaaaattctgcaaaagtggcccccggggatccccgcccgacccctgtctgtcgctaatgtgggcctgtctccggaaattcgaggt

SEQ ID NO: 429923 - DNA, 122 bp, Homo sapiens
agccccggcctcctgcttgctcagctgagacggcagaggctgaagctgcacgggaactcccggggtcactgtcaggtgagcacccgcgagggtcccggggaggtacgggtgaccctggcggc

SEQ ID NO: 429924 - DNA, 122 bp, Homo sapiens
aggtgggagatccagaccctactgagacccggaaaccgccggccactccgcctccggaagcgacactttgggacaaagctggggacaagtaagcccagaagatcctcgggaagccgagaatt

SEQ ID NO: 429925 - DNA, 122 bp, Homo sapiens
ttctccaaatggagggagttctttttttcttcttccatctcatctactcaataacggagccgctgcagccgctgcacgctgcacacacacggcacagtccctgggtccgggagccagagcag

SEQ ID NO: 429926 - DNA, 122 bp, Homo sapiens
agggacggccgggcatcgagggtgacgtgtaaacagatccggtgaccaagaagggcccgtcgcctcctcaggactgcgggctgggatgcccggccctccccgcccggccggacgggccagac

SEQ ID NO: 429927 - DNA, 122 bp, Homo sapiens
agccccgcccgaggcctgagggggtttccacaagggaaaataacaccagggaggaaactccggcatctattttccactgtcagtgaggcagagctggagtaggagacagggtactcccccat

SEQ ID NO: 429928 - DNA, 122 bp, Homo sapiens
gcgcgcacacggccagcgacacggcgggctccatggtgcggcgccgcgcggtaagcgctgcgggttcgcgcctcctgtcactgccgccagctccgcgcctggcccgctctgcgcctgtagcc

SEQ ID NO: 429929 - DNA, 122 bp, Homo sapiens
cctccagagtccatgcttcttcctaaataactgctcgaggcttaacagggtcactatagtcgtggctcagttctccaggagtgggtgttttccttttaatggaagacaaagtctaatgcctg

SEQ ID NO: 429930 - DNA, 122 bp, Homo sapiens
tggccttcaccacaaaactgcacatacacctgggacgcggaagggtcaaaggggaagatccggtgacaggaggacaagctttacctccgcatgttgctaaatgaccagtgacgtgtgcaaac

SEQ ID NO: 429931 - DNA, 122 bp, Homo sapiens
ctcgcgggatgatgcctttggaagttcagggtttttctctccaccggactcgtctgccctcggggccaaatccgcgaagcgaggaggagctcccaccacacagcctgctgtccctatgggcc

SEQ ID NO: 429932 - DNA, 122 bp, Homo sapiens
acacccccctggggccggacacacccacactcccctcgggccgggcacactcatacccaccgtggacaggggcacactcacactcactctggacaggggcacacccacacccacattggggc

SEQ ID NO: 429933 - DNA, 122 bp, Homo sapiens
accccctgcggcagtcccggatccgagcaacccccaatggctgtgtgtggaaggaggaagcgagaatgtggttacttaggcagggccatgtgacagcccacaccccattgtttgtgacagct

SEQ ID NO: 429934 - DNA, 122 bp, Homo sapiens
gtgggagtgcggggggaggggagccatgggagctggggtcagggccgctgttgctgcagtcggccctacacctgcctgggagggctggaccagtcctgaaagcccccggtggtggtgccatg

SEQ ID NO: 429935 - DNA, 122 bp, Homo sapiens
tgacgccaccggctgggctccgccatgagttcggcgccggcctcaggctccgtgcgcgcgcgctatcttgtgtacttccagtacgtgggcaccgactttaagtaggtttcccaggcgcagcg

SEQ ID NO: 429936 - DNA, 122 bp, Homo sapiens
ccccgtgcgggccccgcgacctaggcgatggaagctccagcactggcagcgtgggcagtccggatcagttgcccctggcctgttcccccgatgattgaaggcactgcttcctccacgccgac

SEQ ID NO: 429937 - DNA, 122 bp, Homo sapiens
atgctaaaagggttcttgactgatccattgctaacagcctgagactcttcaatgcctttccgaaaactggtttctagtaaagccttgaatgaacacacacacacacacacacacacacacac

SEQ ID NO: 429938 - DNA, 122 bp, Homo sapiens
accaaacacttgtacggggtttcatggcttctaaaacctctccatgcaggtgagtgcattcgattttcacggcaactaggtaagatgtaataggcacaattcccatgttacacttcaaggaa

SEQ ID NO: 429939 - DNA, 122 bp, Homo sapiens
ccagccggcgccaggcgaggggccttgggcgcaggcatctggagctccgcgtccctggagcgggacctccctccgcgggcgcccgcccggcgcggggcattcgcgtccccgagagggcgcag

SEQ ID NO: 429940 - DNA, 122 bp, Homo sapiens
ccttagcatctgcctcacaattgttgtcaggtaacctagattttttcagtccaaagaggccgttctgcttccaaatgcctactgaaagtgaaatgcaaaatctgtcggtacacagggaagtc

SEQ ID NO: 429941 - DNA, 122 bp, Homo sapiens
gctgcccaatgctgtgtgttccttgttacattcctcactggggacaggtatcccatcaaccgttccctaaagaccagcaacatccgtaagtacctgagggacaatggcccttttctggggtc

SEQ ID NO: 429942 - DNA, 122 bp, Homo sapiens
gcaggcacagagagcaaggaggcaggggatctccccaggcgtcctggggtggcaggaggccggctctgagggcgctaagatgccatctgactttttgtgaaacattatctcaagaaaggtac

SEQ ID NO: 429943 - DNA, 122 bp, Homo sapiens
acgatcaggcttgccggaggacgccccctggggaccccgagggcggggtcgttgaacggccgccaggttctcacattcagaattctcctgccaccaaagagaacctgaagttcatttacaag

SEQ ID NO: 429944 - DNA, 122 bp, Homo sapiens
ctgcctcccaggttcaagtgattctcctgcctcagcctcacaagtagctgggactacaggcgcctgccaccacaccgggctaatttttttgtatttttaatagaaacggggtttcaccatgt

SEQ ID NO: 429945 - DNA, 122 bp, Homo sapiens
accaagaacccagaagaaatcagaggcgggggacttctcaagtacagcaaccttcttgtgcgggacttcaggcccacagaccaggaagaaatcaaaactctagagcgctacatgtgctccag

SEQ ID NO: 429946 - DNA, 122 bp, Homo sapiens
ccagagctcggcgagaacgcgcgtcttccgggccgccccgccagccgccggccgcccccgcgcccgccttgcggacggccccagccccttccgcaccctggcccgcgcttacctgcagcctg

SEQ ID NO: 429947 - DNA, 122 bp, Homo sapiens
tcctctctttaagggtcaggtgggtgccctctggctgcaggccatgttggtcaacctgaacgcggggaaggctgtcaggatagccagtccttgagacccctaccgaccccattccactctct

SEQ ID NO: 429948 - DNA, 122 bp, Homo sapiens
aggcgtgtcctctcaagtgcttggcgaacgctgcgctgtgggtgaagcagcgcccgcactcgctgcagaggtagagttcctcagcagcgtgcgtcttccggtgcgccaggtaccgcctgtgt

SEQ ID NO: 429949 - DNA, 122 bp, Homo sapiens
tccggttttcccgaaggcgccgggccaacacaggatctgatagtgcagggtcaacgcctacgtgggaagacataaagtcagagcactcagcccttgaagggactagaagagtaaaaacccta

SEQ ID NO: 429950 - DNA, 122 bp, Homo sapiens
acacataatctatttttactttcccgcatcctataacttggatcttgataagactcgattcgttgttttatgtggtttgcaatctcaacaaaacaaaatttgtgttctttgacaaggataat

SEQ ID NO: 429951 - DNA, 122 bp, Homo sapiens
tacttttcccagccaaagccacacaacccttaccatgtccacagtgatttggcccaccaccgtcttgccatgttgctgcctgaaagtcttaattctggcctgctccttaggtatcaggtcag

SEQ ID NO: 429952 - DNA, 122 bp, Homo sapiens
gaagcggaagaggcgctcggagcggggagtggggcctagctgcagccggagcctgggagacggtaagtgtgggctggggtccgcggcggcgacagcggcggcggcggccgggggtgagtcgg

SEQ ID NO: 429953 - DNA, 122 bp, Homo sapiens
ctcagcgtcctccctcttctgtggtcctctctcctctgtgttcctccctcctctgtgttccgcagcatgactggagctctccgagagcgcctgtctctccagcaggtcatcgtcagcttcct

SEQ ID NO: 429954 - DNA, 122 bp, Homo sapiens
aaattatattcttatagtgatcttgaagttaacatttatgtattattgagatcaaaagttcgttgaaatcgaactagaaaactaaggcataatgtttttagagctgtgtttttgcttagaga

SEQ ID NO: 429955 - DNA, 122 bp, Homo sapiens
gcgctgccttaacagctgtaacattcaccgcgaagatctgcagcttcactcctgagccagcgagactacgaacccaccagaagaaactccgaacacatccgaacatcagaagaaacaaactc

SEQ ID NO: 429956 - DNA, 122 bp, Homo sapiens
cggctggctcaccccgcccctcccagagggacgatctacacgcagtgttaggagggggcacggagtccacagatcatgggaagaactccatgaatggcctgtgacttgaagcagaagcagac

SEQ ID NO: 429957 - DNA, 122 bp, Homo sapiens
ctggcactgatcctcggcatcagaaagtgacagagaacagtggggactgtggcagtcccgcgaacctaggttatatctgaagggggcagctgttacttatcttcagttgcttgttgccagat

SEQ ID NO: 429958 - DNA, 122 bp, Homo sapiens
atgaaccaagacttctgcctatatacatgggctgctacagttggccaccccggcagtctgcggcctcccaagcgggggcctgggtcttaatccttacttctctctaagctgcatgaagggtg

SEQ ID NO: 429959 - DNA, 122 bp, Homo sapiens
ctcagtcgggggtgcggggctgtgacctagaggcttcagtgtcgatccccgaggtgttcgcgcgcgccagctgtcctcgcggccgcctgcgcgctggccgcctgcgcgctgccagcccgccc

SEQ ID NO: 429960 - DNA, 122 bp, Homo sapiens
cgcagttgacgccagtgacgaaggaggcccgggcggccggctcaggggtgaagtcgaggtcgtggtccaacagctggccccattgcatgaacatgagtgagcgctcctggtccggagtcagc

SEQ ID NO: 429961 - DNA, 122 bp, Homo sapiens
atgttgtggtggggtcattcagacaggacctgagtgccgctcttcatttggtcctgaattcgggtgtgcggtgaggctgcgcctggcaccccggatccctccacggcttcccccttatctag

SEQ ID NO: 429962 - DNA, 122 bp, Homo sapiens
cacacacacacacacagaacaggtgcaggactacacgccaagatcagcacatccctaccccgggacacacacagatatgcaggcaacacctgttggcgtgccccacagcacatcctgcaagc

SEQ ID NO: 429963 - DNA, 122 bp, Homo sapiens
tctgccctgacggttgagtctctgcccagacagcattcaccacacactgacttgagaggccgtgggccttaaggaaacatccgtggaagtctggcagtactccctgtggcctgtggtgatgg

SEQ ID NO: 429964 - DNA, 122 bp, Homo sapiens
ttctgtgttagagagtattgtcaatttctttttcagcagcttgtagtctgttcctgtattcgatgtctgcctgtagcactgcaaattctctgagtctacagcatcaagccgcccatttctcc

SEQ ID NO: 429965 - DNA, 122 bp, Homo sapiens
cacatccctccatcttctccatcactgtgtggtcacttcttaaatcatgcgtctggaaggcgccctcctgtaccccatcctggaggcttcctgcacttcccctcttgtttcttccagaaatg

SEQ ID NO: 429966 - DNA, 122 bp, Homo sapiens
acctcaaagcctgttaggggttgtggaggagggtggagggccgggctaggaatggaaatgcgtgagagacttttcagggtctactggatttttaaaatgcatggcgacattgtggaggtgcg

SEQ ID NO: 429967 - DNA, 122 bp, Homo sapiens
attaacacccccatatggtaattcagagttttcatagcgcggtcaaacgatctcatttaacgcctactacaaccctaaaaaattctaattactaccatcctatcattcttgtttgtagagtg

SEQ ID NO: 429968 - DNA, 122 bp, Homo sapiens
gagtatctagaaaattctaaagttctgtatggttgggatgtaggggtcacctagcagacccgtgagagatgagataggagaaatagacaggagccagggtacagaaggccttgcagttgagg

SEQ ID NO: 429969 - DNA, 122 bp, Homo sapiens
tttagtctctgcattcaaaaagctcaaagtctagtggggaagaaaccatgagcaatggaacgatccatatagatatataaagtcatgttcaagaaagggaagaacattatcctaagtaagct

SEQ ID NO: 429970 - DNA, 122 bp, Homo sapiens
cagcgcgaactcaaactgctcctgcagggcgagaaacgagagaagtgccaatgagagcggcgtccccccgactcctgccacagcgtcggctccctgcagatgaaagcggcgtccccccttcc

SEQ ID NO: 429971 - DNA, 122 bp, Homo sapiens
cctgaccaacacggtgaaaccccgtctctactaaacacaaaaaatcaccgggcgtggtgacgcccgactgtaatcccagctactggggagactgaggcaggagaagcgcttgaactcgggag

SEQ ID NO: 429972 - DNA, 122 bp, Homo sapiens
accccgctctgactactgcgtcccattaccggctgtccgggtcctcagcgccaacaccaccgacgccatgctttcgatcactcacttccggtctcgaaaagtttctacttccgctatcagga

SEQ ID NO: 429973 - DNA, 122 bp, Homo sapiens
catgatccacctgcctcagcctcccaaagtgttgggattacaggtgtgagccaccgcgctcggccaggactctgtttttgtatatctgcacaggtctgcccaactcttaaagggacactacc

SEQ ID NO: 429974 - DNA, 122 bp, Homo sapiens
tttgcatccgcagagcctccaagctcatggcctccttaggagcgaacccaaggaggacaccgcagggaccgagacctggggcggcctcctccggcttccccagcccggccccagtgccgggc

SEQ ID NO: 429975 - DNA, 122 bp, Homo sapiens
caaatacatccacgttgctgcaaaggacacaatttggggccaccatcctaagcaaattaacgcaaaagcagaaagccacacgctgccacacactctcacacggaagcaggaaccagacatca

SEQ ID NO: 429976 - DNA, 122 bp, Homo sapiens
cactggcacggcagctggcatcccttgccgtgggtgccaggtgcgcagagctcctcgcagcgccatccacggaagccggcggcgcacacgcaggcgcctgtgatggggttacacagggcgcc

SEQ ID NO: 429977 - DNA, 122 bp, Homo sapiens
gcctccagacaactcgtcaccttgacgaccaactgaaaaaaccggaagggatggaagcagcggatcatctcgcgatatctggagcgtctgcgcctgccttcctgacctgggacttgtttcca

SEQ ID NO: 429978 - DNA, 122 bp, Homo sapiens
tgcaagcctcagatgattgtactggttactgaatgggttgacctctctctagtagatagacgtgcaatggacacatagtaggtgcctgataaatgtttattcttatataatgtgtattaccg

SEQ ID NO: 429979 - DNA, 122 bp, Homo sapiens
aagataagaggccagtggctgggtgtcgtattacaaagctgagaggaagaagcgaagaaacgaagagctctctcaagaaagatcagagaaagctgtgattatgcaatatgcccactgcagac

SEQ ID NO: 429980 - DNA, 122 bp, Homo sapiens
actctccccatcttctatagccttaagttttgcgaaggtaagtttctccccgcttgaaagcgcccccagggacaagaattcatcttgaccaagcctaaggccgtggcatgcaaggtgttgag

SEQ ID NO: 429981 - DNA, 122 bp, Homo sapiens
aggcccatggtcctaagagattctcattcatatgtgtggcagcctggagaattctcatctcggatcttaaattacaggaggcttaaataaccagtggtcctacctgctgtgttctaaaagtt

SEQ ID NO: 429982 - DNA, 122 bp, Homo sapiens
tgaataggtgtgaagcccaagaaaccttttgactgcctgtgcgttcctgccctagacaaccgggcttcgaggttatctctgggatggtcagactgtgtgcagtcagctggggtgatgtccct

SEQ ID NO: 429983 - DNA, 122 bp, Homo sapiens
gtgcgggacccgccaaacccacgcccggggaactctaccagcaagcgctgtgcgcagccccggttagcccccgtgcctcttgctccacacctccccgcagcctgagggagccggctccagcc

SEQ ID NO: 429984 - DNA, 122 bp, Homo sapiens
agtgttcagcacgtcgtgggcgcccgtgccctctcagtcgtccgtggtatatcacccgtacggcccccagccccacctcggcgccgacacgcgctacatgcggacttggctcgagccgctgt

SEQ ID NO: 429985 - DNA, 122 bp, Homo sapiens
gattgtacttctgaatcaagaaaacacctttgagcatattggcgcacccccctccactcccgcaaaactccaacatgcactaggaatagcctgagtctgcgtggacgctcgcggcccacctg

SEQ ID NO: 429986 - DNA, 122 bp, Homo sapiens
cctgccccggcccccgccgaaggctggcctaaagacgggctccgtgtctggtggctgagtcggtgatcccggccccgctcaccgatggacacgcggcggtggaaccccgtgggccccctcgt

SEQ ID NO: 429987 - DNA, 122 bp, Homo sapiens
cccgccccccggtccttccagcgcgccaattggcggctgcgtggaacgtgccagggagagcgcgccgtgcccgcggagagagcgcggcgcgggaggccggcggccggccggctgcatggcgc

SEQ ID NO: 429988 - DNA, 122 bp, Homo sapiens
ccagccggtctctctgtgctcggttgtcttggggtggggcccatccgccgaggtggggaccgataggagaagccggtgggttgtacccttacacttgtggagtctcctcttgcctctaccta

SEQ ID NO: 429989 - DNA, 122 bp, Homo sapiens
taattagaaatatggctcagtgattccttaatgtcactactggtttgtgacagaaaaccacgacactggcattaagaatgacaatttcctccttacttgcttcgggaggaggcagctatcag

SEQ ID NO: 429990 - DNA, 122 bp, Homo sapiens
ggtgcttctagttcctgacgatgatgtcccgcagccccgggaaggacagacttggggaagcgtgttggtcattgtcatttgtcccctgcctgcttgcctgagtgcgcggcaggacatatggg

SEQ ID NO: 429991 - DNA, 122 bp, Homo sapiens
tctcttcccacttttggaccctgaaagctgggccccgatctcgagttatagaccgcagcgcgcgggcgctcctgaaaggctgcttcaggggaggggttctcccaggtagagtaggccgaaag

SEQ ID NO: 429992 - DNA, 122 bp, Homo sapiens
gctgatcaggaagcgacattgaccaggggtgcctggcattcttccctgccctgggatcagcgtggcctcaggagtgcacccaacaatgccatcaggctgccaggaccctctactgccagctg

SEQ ID NO: 429993 - DNA, 122 bp, Homo sapiens
cccaggcaggatttcttcttcttcagggaaacctcggttctgctcttgaggcctttcaaccgattgcatgaggcccacccacctcgcagaggagaacctttgacttacagccagtgatcatc

SEQ ID NO: 429994 - DNA, 122 bp, Homo sapiens
ttcaacaaactgttaattctgtataaataaaacattcacaggcttcatcagcacgtgcatcgggacaaatgctttgggccttggaattgtgaaaatatttcctaacatttgagatgtgccaa

SEQ ID NO: 429995 - DNA, 122 bp, Homo sapiens
tagtctttccacctgagaaatgaacacggggatcgttcacgctgctgctattctatgtcccgggaccgggttctaggtacaattcggtgggggtatgcggcggcctctgaggttccgaccac

SEQ ID NO: 429996 - DNA, 122 bp, Homo sapiens
catcattatctgtatttttaatatgaggaactaaggctaagaaaagtgaggtaactagctcgggatgccattgttggaaaccagtagaacaggactgggagggctgttcctacataccactc

SEQ ID NO: 429997 - DNA, 122 bp, Homo sapiens
ttgttcagtgcttttcagcagtgaggcattctctacccacccacctgccttgcctgtcatcggactggccctcacccaatgccattgcatggagtgaaatgaaacactgaggagctggcact

SEQ ID NO: 429998 - DNA, 122 bp, Homo sapiens
cccacccagccttggagcacctggacttcccaaccaccagggtctccccttatcttgactcgaagactttccccacaccagaaggccccctccccctccaaatccgccccagcctcccagag

SEQ ID NO: 429999 - DNA, 122 bp, Homo sapiens
agtcagggctgtgtgtggaatttttattcctctaatacagcctaggcaggatgtagtacacgagttctccagaggaaatgcattcaataaaaatttgatgggctccggcagctcagcagaat

SEQ ID NO: 430000 - DNA, 122 bp, Homo sapiens
gattggataatgtttagggcgccaccccctaatgccctgagtgacagaatatgtgctcagcggctgggctgaacgtagaaagagtgaaatccaagctgcagggttctcagggaagggcttcc

SEQ ID NO: 430001 - DNA, 122 bp, Homo sapiens
tgtgaggagcccctctgcctggctgcccagtcagggaagtgacgagcgtctctgcctggccgccatcccatctaggaagcgaggagcgcctcttcccggccgccatcccatctaggaagtga

SEQ ID NO: 430002 - DNA, 122 bp, Homo sapiens
ctctttcccgcctggggttctcgtgaccaccttccggaaagctctcgcctgctttacagccgtgccaggcaggcctgggcagccgcacagtgaaattactgcagggtcagagccaagtgctg

SEQ ID NO: 430003 - DNA, 122 bp, Homo sapiens
tagtcagtaaggatacttaatgagagacaccaggtgaagttttcatcatgtagacagtggcgactcagtattttaagtgagggaatgataatccaatttgtgtaaagcagggcttcttagga

SEQ ID NO: 430004 - DNA, 122 bp, Homo sapiens
gggcagcggcccgcgggaggcacctcggagatctgggtgcaaaagcccagggttaggaaccgtaggcatgctgcgccccaaggctttgacccaggtgctaagccaagccaacactggaggcg

SEQ ID NO: 430005 - DNA, 122 bp, Homo sapiens
ccccgcagccccgggatgttccagctctgacaatgccagtgccttccaccagcggtcggacggtgcggtggcaatcctgacatgcttgggctcccgggaggttaatgggaattaaaccacag

SEQ ID NO: 430006 - DNA, 122 bp, Homo sapiens
gaggacacacaaacgtgtgatgatttgctgggtgttgctgtgtccaacccgcggactctgcggccgggctaaataagctcaatatgtggctcctttgggtgttcccgagcgtgacgcaataa

SEQ ID NO: 430007 - DNA, 122 bp, Homo sapiens
tgtctgcagataaattagatggagcgggaacacgggcagctccgaggtgtgcggaccgagcgaggggaacgtctgtgcctgtgaatttgccagcgccgtgactgctttctcctcgcagtgac

SEQ ID NO: 430008 - DNA, 122 bp, Homo sapiens
ggggatctgaagggagaggaggcaaggaggaaaggaagcaaactttacccaactcttcagcggcccagctgggtgtctgcgatgtccacatatggctgagagctccaagtctgggacacaga

SEQ ID NO: 430009 - DNA, 122 bp, Homo sapiens
acagagatggggttgcgccatgttgctaggctgctcttggcctgaagggtcctcccgcctcggccgcgccatagttttctatttttgaccaacataaacactgtgctgggtctgaatttttc

SEQ ID NO: 430010 - DNA, 122 bp, Homo sapiens
tcttgagctcaagcaacccacccaccttggcctcccaaagtgctggggattacaggtgttcgccacgggatttaaatccaggcagtttgactccagaacttgccctttgaccactctgctag

SEQ ID NO: 430011 - DNA, 122 bp, Homo sapiens
tcttcccccgccccaactcccaaggtttctcagcgggtccacggaccctggggtgctctccgagtcagtgtgtcgccttcagaaaaatcccggacttctatggtggaagggaaggtgggagc

SEQ ID NO: 430012 - DNA, 122 bp, Homo sapiens
tggctttccaaataccacatcttcccatccactccatcctgccacaggcagctactgtgtcgggtgctcagggagccggaaccacatgcctggaaaccctgagcccctgcccgccgccgtcc

SEQ ID NO: 430013 - DNA, 122 bp, Homo sapiens
cttttcccttcctaatcctgcttctctctctccattacagatttttcctgaagaacacatcgtcaataaatcacctgcacccaaatctccatctcaggcgctacttctggcaaggcatatca

SEQ ID NO: 430014 - DNA, 122 bp, Homo sapiens
attgcattccaggtactgttagaggccagcaagatacctagatgattgagacagagtcctcgccctccatgaagtgactgttcattttaaaaccctaaagctgggttcttagaggctactgc

SEQ ID NO: 430015 - DNA, 122 bp, Homo sapiens
aaaaaaactaagcatgtcactgaagtcaaaggagtgagatgtagatagcagttgtgggaacgaagaagagactggaatctgtaaaacaaattggacagagaggtccaactttagttactatt

SEQ ID NO: 430016 - DNA, 122 bp, Homo sapiens
tttgtggatccttttggtctccgagtcctgcagtctgcaggtgctgcccctgggaacctgcgtgccacagccccgcctccctgcctggagcacactttagaattctgaagatgtgaagcctc

SEQ ID NO: 430017 - DNA, 122 bp, Homo sapiens
taaaaataaataaaaataaaatcagtgatttctgatgtggcttttaaaaactaggccgggcgcggtggctcacgcctataatccagcactttgggaggccgaggcgggtggatagcctgaga

SEQ ID NO: 430018 - DNA, 122 bp, Homo sapiens
ggagaagcaggatggcttcccagagcagtgcatccccgtgtggatgttcgcactgcacagcgacagacactcctgaaaaagcagtgggaatgaacgactggactgggcagtggtgctttggg

SEQ ID NO: 430019 - DNA, 122 bp, Homo sapiens
tggttttctatctctgcattccactaggaccacctacccagaggccacgccctactgacccggttagccagagcctgagactaagcgtgagcacacagagggcagtaccagtgcaggcgccg

SEQ ID NO: 430020 - DNA, 122 bp, Homo sapiens
tctttttcaaagcaccagcccttgaccctgcaattcgctgatttccccggccactggaagcgcccctgccaggttaaagaggcgggagacacaccccctctggagccgggagctaccgggcg

SEQ ID NO: 430021 - DNA, 122 bp, Homo sapiens
ccgtccctccccgttacaccatggtgaccgagctgtctgtcagggggagcttggggtcgtcgagcacgcgtggtgccctccaggctccgcgaagagggaaaggcatgagtgtggagagggag

SEQ ID NO: 430022 - DNA, 122 bp, Homo sapiens
ccctgggcatgagggcacatggcggctggcttccagattctgggcccattaatagggtagcgagggcaccgtggggctctgtcacctgcccaggaccctggtcccttgctccaggcctaaga

SEQ ID NO: 430023 - DNA, 122 bp, Homo sapiens
gggcagaaggcctttttgcaaaaagactcggcagcccgggccccgtaggttcggcgcatgcgcagcgcgctcggcgcccgggttccttcctccgcgccacccggaagcctcggcgcgaccca

SEQ ID NO: 430024 - DNA, 122 bp, Homo sapiens
tcccggcccagcccctcaacgctatatataacacaaattacagcctgcgggccgagggtgcggcccgccccttagcccccaccccagggagcccctgtccgaggctgccttggaccacccag

SEQ ID NO: 430025 - DNA, 122 bp, Homo sapiens
tcggcatttttgtccaattagatagccgatgggaagggcgcgaaagcggagaacggaagtcggatgttggaccgctgggaagaggttgaaccttcgcctcaaacgatgttgcgcagacgcag

SEQ ID NO: 430026 - DNA, 122 bp, Homo sapiens
ctgaggctgtgacatcactgattcttgttgctgtggcagcagccctgcagccagacaatacggttttacaacagaaccaggtccccagttggtctcctgggccaggcactgagacaaaaaac

SEQ ID NO: 430027 - DNA, 122 bp, Homo sapiens
gccagcagttcctgcagagcagaggtgaggtcgggctccaggctagagtcatgtctggtccgcacttgatctctcacccataaatcctttcctgtatgacaacaaatcaaataaaggaggaa

SEQ ID NO: 430028 - DNA, 122 bp, Homo sapiens
ggcgagcgctgcccacagagcgtgggctggatgcccggcctcaacgagcgcacacggcagcgaggtgacttccctggcacctatgtggagttcctggggcccgtggccctggcccggcccgg

SEQ ID NO: 430029 - DNA, 122 bp, Homo sapiens
ccagtatctcctaataaccagaacctacaaagaacctacaacatggtgacatgcttgaatcgaagcagctcaatgttctcatccttggtacgtttattttaaattcacgagaaaaaaaaaag

SEQ ID NO: 430030 - DNA, 122 bp, Homo sapiens
cctcgccctccgcccctaatgtatctgtacagtttcagggaacttttctccgttgcgtctcggatacaccctaccctcagtgaactacggcgctgcggaagggtccgtactgtccacccttc

SEQ ID NO: 430031 - DNA, 122 bp, Homo sapiens
cctctttcttagcttctttgtccctaagggaaacctccccgtacccttaggtggggctcccggtcactgccaccacccctcttgctgccgaagccggctccctggccacctggtgccctgcc

SEQ ID NO: 430032 - DNA, 122 bp, Homo sapiens
catcagaaacgtgggaggctgttcctgggtcttacaagttccccagatatctctagaaaacgctagcccaggctgccccacggggggtcccgctgctaaggagaagtgggcacagagggacc

SEQ ID NO: 430033 - DNA, 122 bp, Homo sapiens
aaccactgttacaaatcaagtccacatttaaaatgcatataaccttgcaactacatgcatcgagtttgtaaacatcctgatccttgtaacatgtggcctattgtaaaagattttttaaaact

SEQ ID NO: 430034 - DNA, 122 bp, Homo sapiens
cttttgaggaaagctgtgttgcaaaaccatatggcctcagatatactcacagcagcacagcggggggcctgcaccatcataaaagctgaatgctgtgtgtatattccacatgaatcgaagaa

SEQ ID NO: 430035 - DNA, 122 bp, Homo sapiens
aagagacttcaagctgtgtgtgaccctggcgtccggttcctctcacaggctggagcttttcggaagtggcatgcaaagagtccaggtttggccttggggggagttggggttaggatccctaa

SEQ ID NO: 430036 - DNA, 122 bp, Homo sapiens
tacttgaaattgctggttttgaacttgatatctcgccaacaaagattggctcatcatcatcgtcatcctcaacttcttttactttcttctgccatggttccagctcctcttcttcacattcc

SEQ ID NO: 430037 - DNA, 122 bp, Homo sapiens
atgatgcaggaaaacatgagttggatggtagaaatgtcagaagatttgcagctggggaaacgaccatatcttaaaagcccagtctgcacaaagggaggccccaaataagtgaccacaaggct

SEQ ID NO: 430038 - DNA, 122 bp, Homo sapiens
ccacgtgatccattccgtgctggccccacagctccgcccctgtccacttccaaattagcccgcgttttctgagctaccagagttgtgcactgggtcagttagttgactgggtcgattagttg

SEQ ID NO: 430039 - DNA, 122 bp, Homo sapiens
ggggtgggactgaattgggtcaaggttctcttcattctgtctcaccaaggaatagttgtacgctaatgtaattaaatgccaaaactagcttgcagaaacttttctcttttctcaaagttctc

SEQ ID NO: 430040 - DNA, 122 bp, Homo sapiens
agttgcttaagtccagtgggttatgacattgtttcccagccttccttcatatgtggccttcgtgtctgcatatcgctcacactaatactgatataatatttttccttaaatattgtgtatac

SEQ ID NO: 430041 - DNA, 122 bp, Homo sapiens
aaagaaaaaaaatcacaaaggcaccactggggagcccttggggtagtgctggcgaagaggcgaacctggaggagggtagtccccgaacagctgggactgccgcagggcgatagcttaaaaga

SEQ ID NO: 430042 - DNA, 122 bp, Homo sapiens
aggacatgaaagaaacacactgtctgggtggtggttgtgtcctgtctgcacggtgatgtccgatcatgtttcagctgctgtttgagtgttgataaacactctttgtagctacacgtctcctc

SEQ ID NO: 430043 - DNA, 122 bp, Homo sapiens
aatattcctttacctggacagggtgggggaaggaagcgagagatgtggagagagacggagcgacgtcctggccctctgtgacctccgtgccaggaagagggacccaggatgtttgagagttt

SEQ ID NO: 430044 - DNA, 122 bp, Homo sapiens
cgcaacaggaagtggcgcacgcattgtggggtgagcagctcaggagacaactgctcggcacgtggaggcacagacggggtctgcccacggcccgggcgggactgggtgcccactaaggttcc

SEQ ID NO: 430045 - DNA, 122 bp, Homo sapiens
gaggatttatatctaggtaagtgttggagatttaaacctaccctttgcgccatcagtctgcgctccaataaactcctggatgtgtcgtatatttaatatcccagtccggataagaaagtgat

SEQ ID NO: 430046 - DNA, 122 bp, Homo sapiens
cgggagtaactaagggatggccccgggccctggcgggaaggccgggccagagcctgggggcgggatgcggacgtccgcagggtcgccgcttcggttccagaggccacacggccgggcggggc

SEQ ID NO: 430047 - DNA, 122 bp, Homo sapiens
tgaaagacgagaggaaggggtcttctggtagtcctgttttcctttgggggtttcgttgcacgcagaggcttgggcgcttggcacccagacttcaggtgcgcacagtcctcctgcgacgtcag

SEQ ID NO: 430048 - DNA, 122 bp, Homo sapiens
cagcttccggatggctcggtacctgacccggagatgaggccccttcctgacttgcgcacacggacctggagatgaagccccttcctgacttgcgcacacggacccggagatgaggccccttc

SEQ ID NO: 430049 - DNA, 122 bp, Homo sapiens
gctggtcctccacttctgtaggatttatgctggacagaaagcctgaatttgctgttgagccgccctctttccgtgtgtgtgtgtgtgtgtgtgtgtgtctttaaccctcgccttcccttcaa

SEQ ID NO: 430050 - DNA, 122 bp, Homo sapiens
tcatgcgattcttgtgatggcaggcgtgtctcccaccaccgaaatccagcttcgcattgccgcaccccatcacttttgcgcccgggaggacgcgtgcgattcttgtgatggcggatgcatct

SEQ ID NO: 430051 - DNA, 122 bp, Homo sapiens
aacatatgaccatatttctgtgtgtgtgttttgttttgttttgttttagagacaaggtctcgcggtctcgctctgttgcccagactggagaggtgcagtgtgccatcagagttcactgtagc

SEQ ID NO: 430052 - DNA, 122 bp, Homo sapiens
ccaactggctcaagttccacattggtatcaaccggtacgagctgtactccagacacaacccggccatcgaggccctgctgcacgacctcagctcccagaggatcaccagcgtgggtaggtgt

SEQ ID NO: 430053 - DNA, 122 bp, Homo sapiens
ccctccgaccccgggctctggcagggccgggaggcgcaggaaccccgcgggggatggggccggcggactggcactgaagacactgggatgcaagcgggaggctgggggcggggggctggggg

SEQ ID NO: 430054 - DNA, 122 bp, Homo sapiens
gggctgcgggaggctgcaggggcctgggcggcagaagaggcggccctgagctggctcatgcgggccagtctcggcagggtggctgggcagggctcgcgaggccacggctcggagcccagacc

SEQ ID NO: 430055 - DNA, 122 bp, Homo sapiens
ttaaccacagagttgttcttgattgtaagggacttcgcccacttggttgaagtggagagccggtcctcattccagacgtcccgcacggcagtcgctcatggctccctccaggccgggagcca

SEQ ID NO: 430056 - DNA, 122 bp, Homo sapiens
gctctctaccaagtgctttctgcgccacctccatcaatgatcacaagaaccccagcgaggcggcactgctgactgcctgcccaattccacaggactggagaggtaagacccaggcccaccgt

SEQ ID NO: 430057 - DNA, 122 bp, Homo sapiens
ccctcttacggggaacccaggaacattctggaggctccacagctgtggcctcaccgctggcggaatgccatctggctgtctactagagaggggtttccagaaacgcacaatgccactttctg

SEQ ID NO: 430058 - DNA, 122 bp, Homo sapiens
gggacccaagatggccgcttgtctggggacaggagcggaggccaatacgcgcagagcatgcgcctacgccgggccaattgaaagccatagtgacagtaaccctgattcaggggcgggaaaca

SEQ ID NO: 430059 - DNA, 122 bp, Homo sapiens
ggagcggccgggccttacagcagctcggagttgctggagggccaggagccggacggggtgcgctttgaccgcgagagggcgcgccgcctgtgggaagccgtgtccggtgcccagccggtggg

SEQ ID NO: 430060 - DNA, 122 bp, Homo sapiens
aggaagtgtattcaaatcgcgcgctctggcaggggctttcgggggctcacgctgaaggatcgcggggcactcgtgagacctgccgcctggtctgtgcgtcaggccgccctggcttctagtaa

SEQ ID NO: 430061 - DNA, 122 bp, Homo sapiens
tactctttaccctctgatgccttaagggcagctcatgtttttcctcattccaggaaagggcggaagagcaatttgactagaattcatcttagatatttattttcctctttcacattaattga

SEQ ID NO: 430062 - DNA, 122 bp, Homo sapiens
aatggaaactgctaatttttgaagcagaaggttgacagcttcagtaagatctcaagagagcgagaagactggaatcaggtgaggccataacttcttatctaaacttagtttctggggtggaa

SEQ ID NO: 430063 - DNA, 122 bp, Homo sapiens
cacacgggctgggaggggcagggagaggaaaggcggcaaggttcccagcaaaagagaagacgccactccaggaaccccgggaggtataagggaaccctgtttagtaacgctgcatgtgcaac

SEQ ID NO: 430064 - DNA, 122 bp, Homo sapiens
ggtttctccatgttggtcaggctggtctcgaactggcgaccttaggtgatctgcccgcctcggcctcccaaagtactaggattacaggcaaatcatttttttttcctaacaaaaaacagcct

SEQ ID NO: 430065 - DNA, 122 bp, Homo sapiens
cggcctggagcggagcggagaatcctggaacgctggcgacttggctgtgactggctaggccgggccttagctacctttttattttctttatttatttaccttttttttgagacggggtctca

SEQ ID NO: 430066 - DNA, 122 bp, Homo sapiens
gtgggggctgggcagcgtgtttgtcccacctgtgtaaactctgattccagcaacttattccgcatgcgcccagtctaattaaaataaaagtgaatcaaattttgaatggattggtgtttcga

SEQ ID NO: 430067 - DNA, 122 bp, Homo sapiens
taggtcctctgtagggcttctctgatttagttactaattctctgtggtcccacagttctccgaacatatctataaagcattgaaactttctcattctctagacggtgagctccttcatctct

SEQ ID NO: 430068 - DNA, 122 bp, Homo sapiens
accgggggcaaccaggtcaattatggagacacacaatcacttcgaacccagactagtgatcgctggggtataattacaagggaaaacggggtgaggagagcaaaggttttggagacggaaag

SEQ ID NO: 430069 - DNA, 122 bp, Homo sapiens
aacagcccgagccggcgctcataggctgagcacactgaggtcgggactgggaggtggctgcggcgcgtgctcattggctggtgtatggcttgcagccacccttgaattggttgactctgtac

SEQ ID NO: 430070 - DNA, 122 bp, Homo sapiens
ccttcggcaccgacggaacatctctacctgcgccccgggagccctcgccgtctcacctcgcgcgctgccgtccgctggaagcacctccgcgcctccccaggcgccagactccatcccgcccc

SEQ ID NO: 430071 - DNA, 122 bp, Homo sapiens
aggtgctaggacatgagcgaagccttatgttggtgggtaagattttacaccgatacattccgtatgaaagtggggtaaagccttgggctgagctgacttagctctgcaatggtgatggttca

SEQ ID NO: 430072 - DNA, 122 bp, Homo sapiens
caatacccattcagatgaacagaggctcagctgggttaatcatcagttctgggccaggcgcggtggctcacgcctataatcccagcaccttgggaggctgaggcaggcagatcacgaggtca

SEQ ID NO: 430073 - DNA, 122 bp, Homo sapiens
atctttcctattttaggaaatgacacatcattcacccagttgttcatgccagaaactggacgtccttcttgacactactttttcagtgaccccggcctatatccaatacattggcaagtcct

SEQ ID NO: 430074 - DNA, 122 bp, Homo sapiens
ctaacagtggcttaaaaccttttaaaaggacatctgccattgagttaacaagaagtttagcggtagaaagtcctagagatggtttagtagctcaataatatgtttacggttctatcttccta

SEQ ID NO: 430075 - DNA, 122 bp, Homo sapiens
acctcctgattcactcgccttagcctcccaaagtgcggagattacaggcgtgagccaccgcgcccaacctacaaaaagatttttaaaaaattagctgggtgtggtggtgcacgttcatagtc

SEQ ID NO: 430076 - DNA, 122 bp, Homo sapiens
tcaagagcccagctggctttgcctagtggatcccgcactggggccacgggcggagctgcccgccagtcccgtgccacgcacctgcactcctcagcccttgggcggtcgatgggaccgggcgc

SEQ ID NO: 430077 - DNA, 122 bp, Homo sapiens
cttttcttcttgcggtgagcggctaggaccgccccggagcagggcggcgggaggggtggacgagggaggaaggcggagtagagggcggggaaagaagggcgggagcctgcctggaccctgga

SEQ ID NO: 430078 - DNA, 122 bp, Homo sapiens
agccgtcagtatcgagaaggaactcaacgcaaggcttcacagctttccaaggacagggaccggctctggagtggccgtgcgtgagatgtcaggcacgctcacacgcagggtcctgtgttggc

SEQ ID NO: 430079 - DNA, 122 bp, Homo sapiens
cgcagaggaggagcgtcctctaaggcaaggggggtgggtgctggctacgagtcccctgaccgcctgcccggcccgcgtgcgctggctgcatatttctatgcataatccaattttctccgtga

SEQ ID NO: 430080 - DNA, 122 bp, Homo sapiens
ctggcttgcccttggcaggcatcagacccaggcgtagcgtgccaggccgagtggacagaacgagcctagcgggctagagaaaaactcgggcaaagacgccactgtccacagaggtttccagc

SEQ ID NO: 430081 - DNA, 122 bp, Homo sapiens
atcagactggttaacaataacattactcgggaaccaatggactccaaggggtggagacggcgtagaacgaccgaaggaatgacgttacacagcaatgtggcaccacaggccaatagcagggg

SEQ ID NO: 430082 - DNA, 122 bp, Homo sapiens
tggccgaagtggaagtcggcgtaacggcactaaggggcggggccgaagcggcccagggggcgggcgtttgaaatcagtgccttagagtagaccctaaacctcattttataccttcaagaacc

SEQ ID NO: 430083 - DNA, 122 bp, Homo sapiens
aacaatccagtgaagtgaatgccatcactgtccccattttagagacttgagaggcacttgcgcagtatcatagctagtttgccttgggcagtgttttgtgcttgagtaggatgagtctagac

SEQ ID NO: 430084 - DNA, 122 bp, Homo sapiens
tgacctcgacgggcaggattgagaggtctggagacagggctttgcgtggctgagtcctgccgggctgtgctaggggcttgtgcagggacgtggggagctggatctgagccgagtggctgggg

SEQ ID NO: 430085 - DNA, 122 bp, Homo sapiens
tcctaagtcctcaggggtctgtgttctcaattccacgctcttcttccggcagctgacaaccgaagccggaagcgggtgtctgagaagaacaagcgtgacttctctgccttcaaggatgcgga

SEQ ID NO: 430086 - DNA, 122 bp, Homo sapiens
gcagcggcgtagctggcgccggagaccgcgactggcgggttgggagcagcactgctcatgcgcggaagggggcgcgcgcctgcgcacttgcaaaccaccggccgggatcgccgaggtgtggc

SEQ ID NO: 430087 - DNA, 122 bp, Homo sapiens
aaaggtaaattgcataatataaataaggtgtttcctccgtgtttgcagaaatacaccaaacgtgtgaccacccttcgtgaccggactacagcaataactaagccagtggggtaggaaggaga

SEQ ID NO: 430088 - DNA, 122 bp, Homo sapiens
atggactctggctatgttgccagactggagtgcagtggcaagtcacaggagccatcatagcgcattacagcctggaacttctcgtcttcagggatcctcccaagtagctgggatttcaggca

SEQ ID NO: 430089 - DNA, 122 bp, Homo sapiens
gccctctcccgggcctccagaatggcgcctttcgggttgtggcgggccgaggggcggggtcgcagcaaggccccgcctgtcccctctccggagctcttatactctgagccctgctcggttta

SEQ ID NO: 430090 - DNA, 122 bp, Homo sapiens
ggccaatgacaggtccggttcaggtggcccttgcccagggacagaggcttctcctggctccgtgccttccagctctcagtcctggtgtgcacagcgtcaccgggcttccgatagctgccggc

SEQ ID NO: 430091 - DNA, 122 bp, Homo sapiens
tggagactctaaaggcgaaataaaactttgttacatattcggcggtttggccagaggttgcgcggttggagctgaaatgcagtctttctgggcagatttcattcatgttgctgcctgtctgt

SEQ ID NO: 430092 - DNA, 122 bp, Homo sapiens
tgatgaggttgatggtgtagaacaagggcaggcgccggatgtacagcgagtatgtgatgtcggggtagatctcctcgcagcagttgtacttgatgtcgtgtttgtagcctggggctttgatg

SEQ ID NO: 430093 - DNA, 122 bp, Homo sapiens
tcagtgagtaaaagattcaaactccaaagcccagctttgcagagtctgaagcaaacactacgctgtacagagtctagtcacctatagtcactgctgatcttgccatgtctcgggcaccactg

SEQ ID NO: 430094 - DNA, 122 bp, Homo sapiens
aacctcatcttacctccagccaccaggcaggagtcaatgcgagcagcaaagtttcccgagcgctctcatccactgtgagtcacttaatactcaggacaaatgggtgaggtcactggggccca

SEQ ID NO: 430095 - DNA, 122 bp, Homo sapiens
gttaggcgacgctgacttgctttcaggagaggcactcggtaatcgagaagaaccggctttcggccagccaggagtggccagaggcctagaaggggagaggaaggcctgcctgcccagcattg

SEQ ID NO: 430096 - DNA, 122 bp, Homo sapiens
cctgaaggtcagaggtggcaaccacagtgccaatagctcaccaaagccacttttcctgcccgggtggaggcgcggggcaaagttggccaccggctgcgcgcgtcccgttagccgtaccttgt

SEQ ID NO: 430097 - DNA, 122 bp, Homo sapiens
gcaagagcccacggagggctccctgggaagtggcagctcatttatgcacaccacccagggcgctcactcagcagaaagcacctccaatgactgattgttaaaactgaagatggtgagataag

SEQ ID NO: 430098 - DNA, 122 bp, Homo sapiens
gcgcagtgtgcgcgccgctaggaagcggcgctcgaaactctgcagcaagagtttggtacccgcgttctcctcaggcgccatgacgtgggcggggccgcagcgttgccaggagaccgggcgga

SEQ ID NO: 430099 - DNA, 122 bp, Homo sapiens
agggagaaagcacagttggctgggccttgattcacgaagggggcctgccccatgccacggcggtccctcctggcacccgcctcctgataaccctcgtgctgtgtcgataccacagatcctgt

SEQ ID NO: 430100 - DNA, 122 bp, Homo sapiens
tagttcgtccaccaaggtcagttggagaaacttccatccagaactgaactctaaggcactcggatccctctgctggctgatagcagaagcaccacttagctttttcttttctttttgttttc

SEQ ID NO: 430101 - DNA, 122 bp, Homo sapiens
tccccatccaggaagctatcagaggatggagcatgtttgaaacaaaaaaaaagaaaacttcgaagaaacttacacaggaatacacaaactagcatttgggactcctgattcagaggaacaga

SEQ ID NO: 430102 - DNA, 122 bp, Homo sapiens
agaaaaaaagctacataaatatatattatgtggataaatctatagacaagagctctctcgcgcgcgctctctccctgtctctctgtgtgtgtctttctctgtttttttttcctcctcgcacc

SEQ ID NO: 430103 - DNA, 122 bp, Homo sapiens
atgtgtgcctgtctacacacgcagaggggaaggagcggaggttcagacctacagaccgcacgatccagaagacacagcctggatgttcatgtccagggatggggcagggaggcccccgcagg

SEQ ID NO: 430104 - DNA, 122 bp, Homo sapiens
tcacccggattaccgaggggttccacgcctggaggcagagctgcagcgtgggcccgctcgcggctttgcagaaaacaaataatgacacacttctctggaagcccggggcctgggcccagagc

SEQ ID NO: 430105 - DNA, 122 bp, Homo sapiens
cgcccctgggcgggctgggagcgccggcctgggcggagcgcgtccctgaagcgtaagtcccgcccaccattcttttgcagctaccggttggcccagcctggcctagtatacgcttgcgattg

SEQ ID NO: 430106 - DNA, 122 bp, Homo sapiens
tggcgggcggagggaccgagggaccgacaggcggacagggccggggtcacgtgggcccggcgaagtgtccctaaggctgacctggggagagacctggctgcgggcccttgtcttccggccac

SEQ ID NO: 430107 - DNA, 122 bp, Homo sapiens
ccgcacctttgagggagctgatctcgttctggatggctcgcgaggggtccatgtctgcgccggggctgagggcggctgtgccaccaccaggcagagtccagccccgcaccgcactgcccagg

SEQ ID NO: 430108 - DNA, 122 bp, Homo sapiens
tcctaaaatgcctctttaaaatttagtaggaacagcataaaatgcatatttttttgtgtgcgaatgtaattagaattctaaagagggaatagggaagatattctaataatgactaataatga

SEQ ID NO: 430109 - DNA, 122 bp, Homo sapiens
aaagtaccgacagctgagctctgaaagcgcagatctgttttaaagtgctaagcgatttctcgcaccagaccctagaagggaagtttgcgaatcagaagttcagtggacttctgataatgtct

SEQ ID NO: 430110 - DNA, 122 bp, Homo sapiens
cacccggctctggggtcagagagatcccggcaagagccctagccctgaccccaaccagggcgcgctcctgagcaagtcacccccctcctctgatccgccagctctctcctggggctggaaac

SEQ ID NO: 430111 - DNA, 122 bp, Homo sapiens
ccaagaaaaacgctccaatcacagcacctccacgaaacttgacggcaattgtcatgcaaccgattcttagccttgttacatgacgccatcatgtcacactgtgaactttgagttgatttgaa

SEQ ID NO: 430112 - DNA, 122 bp, Homo sapiens
gtgctggggagacagaaggcgaagcgcacaggtcccacacccagcacagccccagggcctcggcagtcactgctgcaggcgctgcccacagcagcagctgctcccacgctgcatgctggccg

SEQ ID NO: 430113 - DNA, 122 bp, Homo sapiens
actaattaaactttgggagggggagctcctgggggcctccccagaaccttgtggtctccacgttgggaactcctttaggagtaagttggaccagatgtagtgtgtggtgtaggaaatgtccc

SEQ ID NO: 430114 - DNA, 122 bp, Homo sapiens
tcttcactggcctcaactgtgagctcatgagtgggtaaaactggggtcgttcatatttgtcgtcctcatagcaactatttcagtgctttgccgcaaacagccacttaagaaatactgcgtat

SEQ ID NO: 430115 - DNA, 122 bp, Homo sapiens
cgccttctctgtccagccctccctgaaaatgaccccaggctaaggatcagctcagagccccgagctgtttttgtagctttcatgttgacagaacatcctggccactctgctgagagctccat

SEQ ID NO: 430116 - DNA, 122 bp, Homo sapiens
gcgacccctcttcccaaacactggagcatctcctgagattgctccagcgacaaggtgagccgcgaggaggaaaagcccgctctcgcctctccctctgagcccccaaccctaccgcaggaggg

SEQ ID NO: 430117 - DNA, 122 bp, Homo sapiens
ctggcagcaaacagccaccaccgccacaccctggctggccctgctccccctgcaggccggcggtacctcaagcttggccagctcctcgcccttgtggaggatgcggaaggagtagaggtggt

SEQ ID NO: 430118 - DNA, 122 bp, Homo sapiens
cttagtgatgttggaaaagctttcatctgcccaccgtacatctgctccttccttatgttacgcaaataaagggagtcatgactataaaggaatgagaatattctgaaaataatggagtcttg

SEQ ID NO: 430119 - DNA, 122 bp, Homo sapiens
aggggaaagccgggctggagtgggagccgcaccgcgaagccgggcgaggggcagcagtgtcgctgtggtgtgaagcgaagacagaccgcctgggcgggcgaggccgggctgcagccccacgc

SEQ ID NO: 430120 - DNA, 122 bp, Homo sapiens
ctgtctcagctagaaagtgggagactttcatttaaaatggaaattggggcgaggggttggcggctgggcgaagggagcattcaaaagcggagaatgtcactttacccgagaaattcactacg

SEQ ID NO: 430121 - DNA, 122 bp, Homo sapiens
tctctgcctggtggtcagatgcaggttggaaggggccttgctgagtggcgcaaggccgagcgttcccagcagggggagaaacccttcacaccccaggcccttcaggaactggggccttgcct

SEQ ID NO: 430122 - DNA, 122 bp, Homo sapiens
cgatgctttttcagctattatatgcctacttttcctccacaaatcctcccccaccctatgcgattctagccagtttctttgaatttacagagggagatgttgaggctcagaaggataaaagt

SEQ ID NO: 430123 - DNA, 122 bp, Homo sapiens
gcacctgcaaacgtaagctgtaacccttagagaacccagaaaatgatatctcccctggaacgtttgcgttctgctcggctatgtctccaaagcttcagatctccttccctgaccttgcgttt

SEQ ID NO: 430124 - DNA, 122 bp, Homo sapiens
agtgctgggattacaggcatgagccacctcgcctggcctataaactacgactctgatgaccgcatagtatttaagcaagaaaacaaccaaaatgttctagctaaagtggagaccacttaacc

SEQ ID NO: 430125 - DNA, 122 bp, Homo sapiens
ctacacactgaggcaatcactgcagtaaggcgcatcttgtccatacactacctttaaaatcgtgcgctaaaatcggggggaaactgctggcctggtaaaacccactgttcacaaaacaatgt

SEQ ID NO: 430126 - DNA, 122 bp, Homo sapiens
ccctggacactagggacgcgcaatcaagtttggtttcttctggtccctgctctcccctcccgcccctcctctaagtctccgccccctttccccgccccctcaggctccaggcggaagcaacc

SEQ ID NO: 430127 - DNA, 122 bp, Homo sapiens
tggccgcgaagcgagacaggccagcggaacggaaaacggaagcacgagacgggggcgtgacgcaccgggcgcatcacaaagaacggcgagagggcggtggcgccgggggcacggctgggcgg

SEQ ID NO: 430128 - DNA, 122 bp, Homo sapiens
gcggagccgctgtgagggccgggtagagctgcggcaccagggcgtgtggggcacggtgtgcgacgaccactggaacatcaggaacgcccgtgtggtgtgccgcctcctgggttgcggccgtg

SEQ ID NO: 430129 - DNA, 122 bp, Homo sapiens
cattgactgtaggctaaagccagcctccaacactgatgaatatggtaaggaaaagagcaccggacaaagagtcagcaggtcccactgtggccttgcctgagtcactcccctctctctgggtc

SEQ ID NO: 430130 - DNA, 122 bp, Homo sapiens
caacagccaagcttcttggtagttttctatactcatttagtcactttcttaccttccattcgctcaaaccttctccaatctaggttccagccccatcactcagcagacattattctcattaa

SEQ ID NO: 430131 - DNA, 122 bp, Homo sapiens
ttctggaacgaagcggtgctgcccagaaccaggggagtccagccccgcggctgttagctgcgccgggacgcgtcaccgggagcagacaccggcgtcccccctccagaactccacttctaata

SEQ ID NO: 430132 - DNA, 122 bp, Homo sapiens
agtgccagactgtgctcactagtgggcgcaggccagtgggtgcgcgcacggtgtgcgagccgaagcagggtgaggcattgcctcacctgggaagcgcaaggggtcagggagttccctttccc

SEQ ID NO: 430133 - DNA, 122 bp, Homo sapiens
aacagcagcaggtagagctgcggccgggaaccgcggccctggcctggcgggtgcgagcggcgggagcgactggcgccccaaagcctgtcatgcaacatcccctttgccactggggcggaacg

SEQ ID NO: 430134 - DNA, 122 bp, Homo sapiens
agttttccagaagcaggtttcagtgcagagttttcctacacttttcctgcgctagagcagcgagcagcctggaacagacccaggcggaggacacctgtgggggagggagcgcctggaggagc

SEQ ID NO: 430135 - DNA, 122 bp, Homo sapiens
gtggcacatgcttgtaatcctaacaccttgggaggccaaggcaggaggattgtttgggcccgggagttcaagaccggcctttcaaacatcgcaagaccctgtctctacaaaaattaaaatta

SEQ ID NO: 430136 - DNA, 122 bp, Homo sapiens
acctctcctccagactgacaaggtccagctctaaacaaaacttcccttcaacactgcgcccgggccttctctttctcttgtctctctcagactaagttatagtctccacagcttcagcgaca

SEQ ID NO: 430137 - DNA, 122 bp, Homo sapiens
gggtgttaggatcaggaaggcagagcctgaagctagagtggcgagtgaggctcctccctgcggagcccgaggggcatctgcagcccgaatttattcttcgcagggaggtagagaggggacat

SEQ ID NO: 430138 - DNA, 122 bp, Homo sapiens
ctgaggaccagcagcatctgcatcacccggagcttgtcagacacgcagatgctcgggccccgcccaggcccgccaaatcaaaagctgcatgttaagagggtcctcaggtgatgcatatgaag

SEQ ID NO: 430139 - DNA, 122 bp, Homo sapiens
cctgccactgctcaccccccgagggcaccatcaccaaagaaggcatgctgcactacaaggcgggcacctcctacctgggcaaggaacactggaagacgtgcttcgtggtgctcaggtgggag

SEQ ID NO: 430140 - DNA, 122 bp, Homo sapiens
atgtgtgtgtgtatataagctcccacatagatacatgtaaaacatattcacacccatgcacgcacacacatacacactgaaggccacgattgctggctccacaatttagtaacatttatatt

SEQ ID NO: 430141 - DNA, 122 bp, Homo sapiens
aggagcaggggagcctgggaagtagggatgacacagatagcaagtcctagtcagagctgccgctacatttaggagaaacagcggtgtctgcggctcccacccttcggggggcccgtgggggg

SEQ ID NO: 430142 - DNA, 122 bp, Homo sapiens
gccaggagtgtgatgccagggctgagcgtggcagtgacgccaggagtgtgatgccagggccgagcgtggcagtgatgccaggagtgcgatgccagggctgagcatgggtcaccaccataggg

SEQ ID NO: 430143 - DNA, 122 bp, Homo sapiens
ctgtatctcctgacctcgtgatccacctgcctcggcctcccaaagtgctgggattacaggcgtgatattatttccatagatgagaatctgaggtactcaagagttaagtaactggcccaaga

SEQ ID NO: 430144 - DNA, 122 bp, Homo sapiens
gtcctggggctccagtagctggcgcgggctggggtgggctgggctggcctgggaccgcctcgatgggacaggctcgggtttccctggcgctgtttctccctcctgcggtctacggcgaggcg

SEQ ID NO: 430145 - DNA, 122 bp, Homo sapiens
ctgcccctaactcctaagccctatctgaggcttgatccttatctgagggacacttcctagcgtccctttttctgaaccacattgctccaggcacaaccctggtacctgagcccttcctttct

SEQ ID NO: 430146 - DNA, 122 bp, Homo sapiens
ctgaggctggaggggaagactcacagggactacggtctacggggaggccgccttgcgcgccgcggctcggaagcggcagggggcgcccgcggctcctcgcggccccgagccgtgaagggctg

SEQ ID NO: 430147 - DNA, 122 bp, Homo sapiens
ccagaaaaattagccaggtgtggtggcacgcacctaactgagcccaggaggtagaggctgcggtgagttatgattatgccactgcactccagcctgggcaacagagcgagactgtctaaaaa

SEQ ID NO: 430148 - DNA, 122 bp, Homo sapiens
cacccgaatactgcgcttttccgaccggcttaaaaaacggcaaaccacgagagtatatcacgcacctggctcggagggtcctacgcccacggagtctcgctgattgctagcacagcagtctg

SEQ ID NO: 430149 - DNA, 122 bp, Homo sapiens
gtcggctccaaatgttttccatatttgttcagcctccataattcgaataccagggcaggccgagccagccgtgcgccgcgctccagggcccagggcgccgcacacgcacccacccacccacc

SEQ ID NO: 430150 - DNA, 122 bp, Homo sapiens
caattcgggcccacgtagacttaatcccgagaggcaattgttcccttgcttgggcggctacgctccccgcggggctgcctgcagcccccgggcccttgcagctccgggacggcgcgcggcgg

SEQ ID NO: 430151 - DNA, 122 bp, Homo sapiens
ggaggtcccaggcctggcagcatcagggcccaccactaggcggggctgctgcctgggcctcggactccagggtttactccccatcagcttctcttgtgggtctgtgaagccactgtgggaag

SEQ ID NO: 430152 - DNA, 122 bp, Homo sapiens
aaggttaatagagcttgagccctgctttaatatgtagtgaaagataattctgtagaaaaacgtcagccagtagggtaaagtcattctactgttcttaatttttatattgaggaacaatattg

SEQ ID NO: 430153 - DNA, 122 bp, Homo sapiens
aaaacacacacctcgcatgtcctcgcatgcgtcatcacatacagaaacatacaccttgcacgtcatcgcacgcgtcatcacatgcaaaaacatacacctcgcatgtcctcgcacgtgtcatc

SEQ ID NO: 430154 - DNA, 122 bp, Homo sapiens
catttcctctctagtctgatattccactggctgaacttgctgctatttgaatactcaatgcgttaatgcctcctgaacttttcatggaatagtctccttttcctggaatgtagttcctccct

SEQ ID NO: 430155 - DNA, 122 bp, Homo sapiens
gaaagtcaggagaagcttgtgagggtcacagttgctctcatcatgtaagccatggcaaaccgcagcacagggcagtgaacctgggttccaacgagaggcggtctgcgttcaaatcccagcct

SEQ ID NO: 430156 - DNA, 122 bp, Homo sapiens
cggatgctggagcatcctcaggacaaagtggatggagagtctgtagtaccagctgggacacgtcacaggcaaaaccctggcaccagagacagggtcccactgagatctcggcccctgaaggg

SEQ ID NO: 430157 - DNA, 122 bp, Homo sapiens
caggccctgcccgcggagctctcccgggagtcgcggacctctgccgtcctcagtcacccgcgtcatgcaggatagctttcaaagtcattttgcagagaaaaaaagatactgagcaatctgaa

SEQ ID NO: 430158 - DNA, 122 bp, Homo sapiens
tccgcggccgctcgcacttcttccggcacctgcggacccacacgggcgagaagcccttcgcgtgtggcgcctgcggcaaggccttcggccagagctcccagctcatccagcaccagcgggtg

SEQ ID NO: 430159 - DNA, 122 bp, Homo sapiens
agttcacgggtccaatcacccagcaggccctctgggatgtggaagggctggccgcgccttcggcaaaccctctgttcccatggccccaccggaaagggctgagtgcttgcctgctgagcact

SEQ ID NO: 430160 - DNA, 122 bp, Homo sapiens
acgcgcaggagctcacctgcgctcaactctggagcggagcacctgaccgcgccgcttccccgccccgcctcctggcttctattggctgctgcagagatagtcacttctgcctgggttgcccc

SEQ ID NO: 430161 - DNA, 122 bp, Homo sapiens
cgggcgcaggaccgacacgcgggtttccaatgcgctggtggggcggtcgcttcaaacacgcgggaagatttttcagtcgaatggcattaggacaactggcaggccatttggaaaaatagaag

SEQ ID NO: 430162 - DNA, 122 bp, Homo sapiens
tgtattataccatttgaagaatgccatagctttataaaataggtagagcagttatattcacgtgttgtgcatgaggaaactgtttatgagtagtgtcttgcctagaaagtggtaccatataa

SEQ ID NO: 430163 - DNA, 122 bp, Homo sapiens
ctcttagtgcctcattagggaagatgtagcttttttgaagctggctgcaaagcatcatgccgattccctgctggcatggttggatcatggcaaggagaggaagaaaagcaaaggaaaattac

SEQ ID NO: 430164 - DNA, 122 bp, Homo sapiens
agggtgatggaaatgccctgagcatcaggacccgcgccgaggcagcctgaggggaagcgccggcctgcctcgtctcacttcgcctctgtaaagcggcccctgggcttccctccaaaactcct

SEQ ID NO: 430165 - DNA, 122 bp, Homo sapiens
tttcttttcttttttgagacggagttttgctcttgttgcccaggctggagtgcaatggcgcgatctcagctcaccacaacctacgtctcctggggtcaagtgattctcctgcctcagcctcc

SEQ ID NO: 430166 - DNA, 122 bp, Homo sapiens
cccgcccgtgccgctgggcaatactcggccgactcggccactttgcctttaaagaaacatcgccacattccaccttaaaagatcaggtcccctcctccgctgggagctcaggacttggttcg

SEQ ID NO: 430167 - DNA, 122 bp, Homo sapiens
ttactcccagtatctcagaaggtgcacacgcacacctgtgatatagtttctaatatccagcgggaaagaggctgctatgactttcaatatcccagtgggtgtacccgccgcccgtggtattg

SEQ ID NO: 430168 - DNA, 122 bp, Homo sapiens
ctacgactgggcggagacgggagccacgccgggtacgctgccggtcgctcaagagcagcacggccccgccccgccccgcccacgcccttggggccacgcccactcccggaagcagtcctcag

SEQ ID NO: 430169 - DNA, 122 bp, Homo sapiens
agctgccttctcgctggcggagcggagggtctgcgagcgccggggaaggcaggctgggggcgcagcccgccccccactggccgggccccgcagggcggagaggaggacggacggacagacgg

SEQ ID NO: 430170 - DNA, 122 bp, Homo sapiens
cccccacaacccccccgccacacgtcaatagagacccccccgcccacacacacccacacacgtcaatagtctagaggcgtccagaaaactcacaaccacctgcccacctgggttggttggga

SEQ ID NO: 430171 - DNA, 122 bp, Homo sapiens
cagccttcagaatgaagacccaaagatggaggagaaattgtctactatgtttaggtttaacgaaatatgtacaggcatgcagaaacatgactggacaaaaaggtatgatctactgctcaaga

SEQ ID NO: 430172 - DNA, 122 bp, Homo sapiens
attgctcgagaggctttgattggctcaacaggcgctgagcgttcattggctgcgctgggtcgtcagggcgacgaaaaaggggaaggggtgctgggcctggcgggcaaactaaggctgcggac

SEQ ID NO: 430173 - DNA, 122 bp, Homo sapiens
aaaacattacttgaattaggattacacaaaaaaaactaaattctaagtgagcacaactatcgctgagaccctgaaatttcaggaaataaacatggttcaaaactcaaactgttcatcaaaat

SEQ ID NO: 430174 - DNA, 122 bp, Homo sapiens
tagcggtccgtcaacgaccgcaaagccccgcctcctacggcggcccgccaatcggctgcgcggcccgggcccaaccctcgtgagtcacgtgacaaggccaggcccgcttccggcacgtcgcg

SEQ ID NO: 430175 - DNA, 122 bp, Homo sapiens
acaatccgaataccctcagcgttccgcacgccgggcggacgcccttccgcagcggccacgcgtgttctgggttcagcgctcctgcgcgtcccttctcgccgaacccaaggtgctttgtcccg

SEQ ID NO: 430176 - DNA, 122 bp, Homo sapiens
aagccgccgctcgccacatccccgcgggacttgacgccggcacccagtgaacccaacttgcgctccgaagtctgctccgctccaggacgccctcgcagaccccggagcctccgctggcgccg

SEQ ID NO: 430177 - DNA, 122 bp, Homo sapiens
cagggcggggcccgacacagagaatgaggagggggtggggcttgcctccagacggagaagcggagccttgacattgaaaaaattaaaagtggtctgaccctgacaggaggatgttttttttt

SEQ ID NO: 430178 - DNA, 122 bp, Homo sapiens
gagcacgtccgtaccgcaagatggctgctcggacggggacagagctcgcctctgccgcctcgacaactgctcctgggtcctctaagaggaggaagcgccacccatggcacacagtgtcccgt

SEQ ID NO: 430179 - DNA, 122 bp, Homo sapiens
ggcgttcaccaagaaattcaatgacaaaaacgcctctcatgtgattctggatggggaagccgcgcccggcgtgggtgggcgcggagggagcagaaaggaggcgatgcggctgctggggtggg

SEQ ID NO: 430180 - DNA, 122 bp, Homo sapiens
gtcccagcagcctagttctggcctgcgggagaccctgtcggacaaggaggaaaagcagtgcgcactgggccctcagatcagccccctgaagcagagcagggcagagggctggggaggagctg

SEQ ID NO: 430181 - DNA, 122 bp, Homo sapiens
tactagaaagaagaaaagcaaaaacctcagtgctgtgtccccaatttataccctggccttcgtgtgcagcacagcagtccctgtcttaagaatcctattgtgttttttttcagtcaggtctt

SEQ ID NO: 430182 - DNA, 122 bp, Homo sapiens
aaataaagcacattcgtcgttttgccacagttaggacgtgaagttctctgaatcgaagtacggtgtcagtggatgggacagaatagtacggtagtgagtttgcagaaccctgtttccgactg

SEQ ID NO: 430183 - DNA, 122 bp, Homo sapiens
cgcgtgcgcctgctccagcagccggcggcctaggcggtagtgcagcagctcgcggtagcacggcccgtactcctcccagcgcggctcctggtagcgcttcatgtactcgctcttcaccccgc

SEQ ID NO: 430184 - DNA, 122 bp, Homo sapiens
tgcactggagccagtaaatgcgacgattagaagcctctgcttccgttttccatctggacgcgatcgaaccggagatgatatggaaaaatgcagtgatacaaagggtatagaaaccattctaa

SEQ ID NO: 430185 - DNA, 122 bp, Homo sapiens
ggagccctgctggtctgcgccgtcctgggtgagtgcgggcacggggtagcaccgcagagtcgctggcccgcgcgttccctgcaacccgggcggccaccgcgcagcctgcatgcactccgcgc

SEQ ID NO: 430186 - DNA, 122 bp, Homo sapiens
ggggagaaaaaaggacagcaatgactcaagtcccgaaaatttatgagcccatttcttgctcgggcagtatcaatttcctgatagggatccatgtctaagacaagaggccctcagaagagtga

SEQ ID NO: 430187 - DNA, 122 bp, Homo sapiens
ccaggaagccaactggggctgacagcaacccagacaaaacttaatggcttgatagtgacacggcatggcgcagatcttgatgaaagttcaccagtagaagggcccagaagcaagaagagaca

SEQ ID NO: 430188 - DNA, 122 bp, Homo sapiens
acagttaactttggattagcactcacagattgaaagcaaaacacatcaaaacactcatcacgcactctgggcttgtggtgccacttgtatgtgtgtttctaaatcaatgatgagggtatcag

SEQ ID NO: 430189 - DNA, 122 bp, Homo sapiens
cctcaatccacgtatagatgtctttcaaagtcatgcgcttcctctcagtgctgttgatggcgaattgtatcatggccatgtaagagtagggtggccgctcagacacagagttctgccaggac

SEQ ID NO: 430190 - DNA, 122 bp, Homo sapiens
cttttgacctgcagccgataaccccaggggctggcagacgggagattcgggctggaacagcggtaatgggcacaattaccctaatgacgcccctcgcggcatcttcccgtcctccctgtgcc

SEQ ID NO: 430191 - DNA, 122 bp, Homo sapiens
acagctggagaatggagtcaggtacggggagcggctttgagtggaaccgtgtgaaagagccggggtgggtagtcgctggcgggtcgttgagtcggccatatgaaacaggttcgggggcaggg

SEQ ID NO: 430192 - DNA, 122 bp, Homo sapiens
ccagggaaagggcagcgccaagcagcaccccgcacggggccggggccgccttgcagaagccggagcgtgttgctaatgccgagaagcaagtgtctgccccgtttgcctgtttgcccttttgt

SEQ ID NO: 430193 - DNA, 122 bp, Homo sapiens
caggaaaggagctcaacctagaagaaatgggatcccaggagggtgtttgtttgtttccaacgtaggagacacttgagcacatttaaatgcaaatatgaaggagccagtagagggcaaagctt

SEQ ID NO: 430194 - DNA, 122 bp, Homo sapiens
aaattttaatgaagacacagggtttcttacactgtgttcttcctaagtttcaaaatgcagcgtcaggaatgtatttagagtgacatccagacatagtataacttacagtacactaactttgg

SEQ ID NO: 430195 - DNA, 122 bp, Homo sapiens
tgaactcatgacctcaggtgatccacccgcctcagcttcccaaagtgctgggattacaggcgtgagccgccgtggcaacccgcatgcttcttatgtataagaaaaaaacagctagaaagttg

SEQ ID NO: 430196 - DNA, 122 bp, Homo sapiens
aatgtacctgtgagaggcgacagcgtgctggcaagccctcacttgctctgcgcgcctcctcggtcttggcgcccatgcttgagaagaatcccttcagcccgccgctgcactgtgggagcccc

SEQ ID NO: 430197 - DNA, 122 bp, Homo sapiens
ttctttgactaggaaagggaactccctgaccccttgcacttcccgagtgaggcaatgcctcgccctgctttggctcgggcaaggtgcgctgcacccactgacctgcgcccactgtctggcac

SEQ ID NO: 430198 - DNA, 122 bp, Homo sapiens
gggaccgaaccgtcccgggcccgtatccgcgcagcctgcaccccgcgctgagctggcgcccgaccgagccgcccacattccgaagtattcggagacccccacctagccggcccgagctgacc

SEQ ID NO: 430199 - DNA, 122 bp, Homo sapiens
ataacgtacattatattatttcccatatcttacatagtccccttgtatatgaaataagaacgaattcatctcacaaggattttcttttgagacggagtctcactctgtcacccaggctggag

SEQ ID NO: 430200 - DNA, 122 bp, Homo sapiens
aagtaggagcccaggcagaggaggtgccgagagcgagcgagggctttaggactgccagcacgctgtcacctctcactaatctcaagtacccagggacagaaacactgcggaaggccgcaggg

SEQ ID NO: 430201 - DNA, 122 bp, Homo sapiens
ccaggaaaacacaaactcggccaggaaacagccacccgggggtgcctgaagaggacgctgcgaggcggattctttttccgggcctgcggcgagcgcttccggggcggtggcgacggaggcgg

SEQ ID NO: 430202 - DNA, 122 bp, Homo sapiens
cgtgggctgggggggcggtggagcccggggctggcttgttgtccggggctgaggtgacatcgtgggctggcggggtggtggagcccagggctggcctggtgactgggaccgaggtgacatcc

SEQ ID NO: 430203 - DNA, 122 bp, Homo sapiens
agtattgggatgtgcagaaggacgcgcaggacgtggaaccctgtgtgcttgggtcgtggccgtgccttccggatgcttcgagggaaatgacctggctcctggtcagacataaaagtgggaag

SEQ ID NO: 430204 - DNA, 122 bp, Homo sapiens
cccacagtcgcctgggggtggcccggagagtcgaggtgctcatagtggagccctggctcccgggcggacggagccgcacggtagtagatgggggtgtggccgtggcccccgactctgctcgg

SEQ ID NO: 430205 - DNA, 122 bp, Homo sapiens
tgtaattgctcagaaaaagcttcagagaagaggtagtatttgaaccatcaccttctcttgcgcttttatttcaaggaagaaaaagcacttaaactagaaaaagcaaaaaggagacatgggtt

SEQ ID NO: 430206 - DNA, 122 bp, Homo sapiens
ggagggagtcgggagggagcggccgaccgccctcctcgcaggacctggttcccgcggggccgcctccttggctgtcacaggactgggaaagagaaactgttagtgaccgctcgggttcaaac

SEQ ID NO: 430207 - DNA, 122 bp, Homo sapiens
tgtggaattggcgaaacaactgccccagtagtatcctccgcctaggactccaagaggtggcgaattggggcactacgcccgggtaaggcagtgcctgttcagggctgccgacctgtctcccc

SEQ ID NO: 430208 - DNA, 122 bp, Homo sapiens
ctttgtaggcctggcggcccgtggcgtgcgggcggcttcttcgaggtgtctgcgagggatcgtttgtggttgtcattgtagtggttgaacctggggttgaacttgtctcaccggaaactgaa

SEQ ID NO: 430209 - DNA, 122 bp, Homo sapiens
aggaggagtacttttcccctgttatttaggtatggaaaagacttgccctcaatctgaaaacgctcttaaccctctgatgccactgtggtggggcctcaggctaagacaataaacaggctcaa

SEQ ID NO: 430210 - DNA, 122 bp, Homo sapiens
atctgctcctggggtcatagatcctgttcctcctcttttccctatcactcaatggtccctcgtgctctcaggtggcacctgctcaaaatgttaatagcaacctcaacttcttccagtctttt

SEQ ID NO: 430211 - DNA, 122 bp, Homo sapiens
acctccagcagccctggtccctgggtgtggtcccccgaccctgcagcccggctgctgtagcgcgtttttgaagtgagctttcactgcctcccatggtttcaagatttggggtgctcggcgga

SEQ ID NO: 430212 - DNA, 122 bp, Homo sapiens
gtgggagaaagctggagctgctggagtcgcagctgcctgcggagcgggcccgggaggaagcggggccgagcgtgcggcgtccacgcggtgagtgtgcagcgctttcattcaaactttctcca

SEQ ID NO: 430213 - DNA, 122 bp, Homo sapiens
ttgtccaaactggaaggctttggaagtcaggggagctgcagggataagtgtcaccagggccgtctcaggtgtgtggggggaaggccctggggacccaccgtctaaaagacggcttatcttct

SEQ ID NO: 430214 - DNA, 122 bp, Homo sapiens
gtagatactattcagtacattttcttagggtgagtaagggtagaccaggggaggagggggcggagagagtgttacagaagaaagaaaataagtaaccctgatggtttaagccctttataaaa

SEQ ID NO: 430215 - DNA, 122 bp, Homo sapiens
tctggatacctttctcaggccacagcggtgggcaggggaggtgtctcagccttgacagttcgatgccagcaccgaaagctacaaccacaaacagaggccctggggctgggaagatggatttt

SEQ ID NO: 430216 - DNA, 122 bp, Homo sapiens
ggtgatccgcccgccttggcgtcccaaagtgctgggattacagtcgtgagccaccgcgcccggccatcgaggtgctttcaataagtgcttttcgcgtaaggttggaccgtgtgagagacctt

SEQ ID NO: 430217 - DNA, 122 bp, Homo sapiens
aggagcagagctataaacagaattcagaattctcctcctcctctggggctatctacttagcgcttttgccatttacttcctgagacagactcatgggggatcggggctcaggtgcacctgga

SEQ ID NO: 430218 - DNA, 122 bp, Homo sapiens
aatagctccgttgtgcacccaggggccaccttcatcagaaaggcctctgggttcacgcagcgctagggaaggcagcgcctcggtgcgtcccaagccccattacctgcacaagtgccagtctt

SEQ ID NO: 430219 - DNA, 122 bp, Homo sapiens
tcacatttatttgcattaacctccacagaaagcaggacctctgcactgcttacaacactccgagaggccatttgcataagcctttgcatttacataaggcatagatttaatggatgaggatg

SEQ ID NO: 430220 - DNA, 122 bp, Homo sapiens
tttcccctcagactcagcgcccagctctccccaatacctctccctctatatccccgcccccgcctctgatccccgcaccgtccggcccccacctcagaaaccgtctctcgaggcgaccctcg

SEQ ID NO: 430221 - DNA, 122 bp, Homo sapiens
cgggggccaggggcgactatggcgcgggggaggctgggaattgtagtctccacctgcctccgagggcggggtccgagggcggggctctcaggccgagggggtgggtgggtcgccgagcgccc

SEQ ID NO: 430222 - DNA, 122 bp, Homo sapiens
gagagagaggaggaggggcctctgagtggggcctctgttgctggcgccagtttaactccccggagccttagaaagtctgagccttagaaagtctgggcctgagcatccaggcccagagctgg

SEQ ID NO: 430223 - DNA, 122 bp, Homo sapiens
agcagcagcgtgaaggtgacgtcggggtagggctcggagcagcagccgtaggtgagcacgcgccgccgcgccggcatgcccagcacgcgccactccacgttctccacgaagtccgccaggct

SEQ ID NO: 430224 - DNA, 122 bp, Homo sapiens
cagctcagcaagtgggatttgaaatcgggtctttgtaactccagcttcccagaacccacacgcttagcgactgtactccacttcctactcagaaccttcccaacacctgcagcacttcgagg

SEQ ID NO: 430225 - DNA, 122 bp, Homo sapiens
gtgacagaggtgcctgttctgacttagaacctctggaggaggaggggggtgccttggtctcgtgttactttgctgtgcctgtgctgagagaccatgtgcccgagcatctggttgaccggcat

SEQ ID NO: 430226 - DNA, 122 bp, Homo sapiens
ttacactagcgttttgcaggttaggaacggtgccggtgggaaccgagctgacaccgtaagcgcttccctgggactgaattgaccctacaatcagtggagggaaaagtcaccctccggggggg

SEQ ID NO: 430227 - DNA, 122 bp, Homo sapiens
actacacagaaagagggaggagcctccgggtaggttggagtgagtaggatgtagggtagccggcaggggagaagaggggcaaccttctgttccgtaatattgataccacccatttgtgtgtc

SEQ ID NO: 430228 - DNA, 122 bp, Homo sapiens
cactatgacctacacccgagtgggtcgagtttgctcttcctccaagtctctgtttcgagccgtgggctcttcgcagtatcccaggcttcacagtcacatccaagtaaatgttgttccgctcc

SEQ ID NO: 430229 - DNA, 122 bp, Homo sapiens
ggggaggggcggggaggcacccaattattctagaaggttctgagatctcccagggatttccgagaggctacgaggtgtaactggcaaatcaatgacttaagagtagctttctcccagcctcc

SEQ ID NO: 430230 - DNA, 122 bp, Homo sapiens
aggcagagggagcgagaaggcgaggctggaagaagcaacggttcatgaatatctgagcagcggatggagagaaggcacagccggctcagggcacactgaagagcagttgactccccttggga

SEQ ID NO: 430231 - DNA, 122 bp, Homo sapiens
ggccgccctctcgagcccagcttcactcaggggtgagaggtggcagcggcggctccctcacgtctctcccgggtgtcctgtcagccagcagtttcccccgggtccgcagcgccgcctccgcc

SEQ ID NO: 430232 - DNA, 122 bp, Homo sapiens
atcattcctcacgctttccttcatcggctcgcaaagaaacgtggcgatcaaggaagacagcgaaggctccatcctcgtcgggggaggataattcgaatctcagcctgtgagtttactcagca

SEQ ID NO: 430233 - DNA, 122 bp, Homo sapiens
gaggagctggaggcgctgatcaccgaccccgatgagatgcgtatgcaggccttgttgatccgggagcgcatcctcagtccctcgcaccccgacagttcctattgtatccgttacaggggcgc

SEQ ID NO: 430234 - DNA, 122 bp, Homo sapiens
tgtttccagagctgggtgcttcccactacaccggtccctcgtgcggaggaacaggaagtacgctcatgagtgagtactgcggatccaccacacgggacctgcctatggcacgggctgttcaa

SEQ ID NO: 430235 - DNA, 122 bp, Homo sapiens
ggaacggaaaaagaggctggtttggtcctcagcttcctggtcaggtttccccgcggcctccgctgccgccatccaccgctgggtgccgtctgcattccctcgccgcgccacggtgcttctct

SEQ ID NO: 430236 - DNA, 122 bp, Homo sapiens
gtcaaagggcccctcaccatggctgggcgtttggcacgaggaaggggcttcagaaataagcgccatgtggggttgggctccagagccacaccatcccgcctgggccgggccaacttcccagt

SEQ ID NO: 430237 - DNA, 122 bp, Homo sapiens
ctgggagaggcagccacacagctagagtgaatggtgaactggactaggaacatgggtgggcgtgtttcccacactgccccacagtgacacagcgggggcggggacagcccttaaaatccgat

SEQ ID NO: 430238 - DNA, 122 bp, Homo sapiens
ccaggtcgggggggggcgggtccaatagaaaggcggaagccagtgtcccaggcgttctcacgcccgcaacaattcctgagtagggccttgcttgagttcttcggaaagtctcatccaccccc

SEQ ID NO: 430239 - DNA, 122 bp, Homo sapiens
gctgctggcccgggtgctaatcccctcactgcccggagccggcaggactggccggccgctcggagtgcgggcccgccaagcccacgcccacgcccacccagaactctagctgggccgcaagc

SEQ ID NO: 430240 - DNA, 122 bp, Homo sapiens
tcactgagaagtacaacacacacactcgccagaactaacaatctgccaagaaaataggaccggccactgcggctccagcccggtcccgcgggacaaggcgggggaggggggccggcggccgg

SEQ ID NO: 430241 - DNA, 122 bp, Homo sapiens
cgtacccaagaggggtgggtgcgagggcggccggcttgttcaggaacctggctaactttccgggtccgtttcctagggattcgggcggttccctctggacgggggcagggactgggactcgg

SEQ ID NO: 430242 - DNA, 122 bp, Homo sapiens
ggtcttgtcagctctcttgatatataatgtactaattcaagcggttcaattccttgttgacgataatgatacaatacatgtattgagtacttaaaagccactgacgttctgtctgcaggggg

SEQ ID NO: 430243 - DNA, 122 bp, Homo sapiens
atcactgccctcccctcccagtgctatctggggactgggctagataatgggcactggatccgctggagatgcagtcctgagcctgaccccagtgctcatttcacatcaggctcagggtcctg

SEQ ID NO: 430244 - DNA, 122 bp, Homo sapiens
aggaggggggtgacaggcgcaggccgacggcgtcgtctacgccacgcgtcaccctcggcgcgaccccttttgcgtcatctcgccggcgccgcccccggttccgagcagttccttccggtcgg

SEQ ID NO: 430245 - DNA, 122 bp, Homo sapiens
ggtctcccagggttggggggcatcattctagagggaccctgtgccccacagcagcgccctcggctggggaccacacagctttatgactaggtaggtgtggccctggtttccaggacaggtgg

SEQ ID NO: 430246 - DNA, 122 bp, Homo sapiens
acttttcaacgtggtgtgtcaacgctggcctcatcctgcagccgcggtgacggtgagcctcggcggtgctctgttctgattttgtcaactctgccgatgtggtttcctttctatatggctca

SEQ ID NO: 430247 - DNA, 122 bp, Homo sapiens
ccagcagtgcagctgcggcctgccatcgttggttgtcgtgtcactgaaagtagagagacgcgaaaaacctggagagacgaaagagccgccccagtccgagcgcagccagattttgttcaagt

SEQ ID NO: 430248 - DNA, 122 bp, Homo sapiens
gaaggggcgtgcactgcagcagcagggactcaagtcagacggcaggagggactcctgcggcgctctggagggaggctagcgccaggagcccccgatcggctggggccgggggcgcagcgcct

SEQ ID NO: 430249 - DNA, 122 bp, Homo sapiens
acaggcaacccggtgaccccgcgtcctggccaggactgtttgaccgggcctagggggagccgcctgcccgccgccaccagcatctccgccgcctacttgggcctcctcggggctcctggagc

SEQ ID NO: 430250 - DNA, 122 bp, Homo sapiens
tatttatttatttattttgagacagagtcgtgctctgttgcccaggctggagtgcagtggcgtgatctcggctcactctgcgtctggggttcaagagactgtctgcctcagcctcctgagta

SEQ ID NO: 430251 - DNA, 122 bp, Homo sapiens
ggcggcggcggcggcaccggcaccagcgcagtttcccctctccccagccctgactctacgcgcacatgcgcattgcgcccgcagccctggaccatttgtcaggactactcgtgagacggaga

SEQ ID NO: 430252 - DNA, 122 bp, Homo sapiens
tcacattgggtgaacgaggggcagacggcagatacgcggcagctgtgcaggggaggctagcgtgtggtggtgggtgggcggggcacacacctggaaggtcaggtgctgaccagggcagcctt

SEQ ID NO: 430253 - DNA, 122 bp, Homo sapiens
tctttgtaaagggtgcagccaagctctgcagacttttgcaggattgtctagcctgagtaccgggctacttcttaaatgccgtcactcctgctgagataaatgcgtctttaaaaatagtctct

SEQ ID NO: 430254 - DNA, 122 bp, Homo sapiens
ttctcccctcccacagggatgatatgaggttaaagagatttatcttcccccgaatcaattcgagagggtaaatagagacattcgggtaaactgcttcactagggatgggtggttatgaatgt

SEQ ID NO: 430255 - DNA, 122 bp, Homo sapiens
ctcacctcagcctcccctgtaacagctgagactataagtacccaccacacccagctaattcgaatttttttgtagagatgagggtctcactaatttccccaggctggtctcaaactcctggg

SEQ ID NO: 430256 - DNA, 122 bp, Homo sapiens
ccctaggctggaccctagccttgagagtacttcctactgccagagcccccagatttcttccggtggcagcagatactgccagaagagcctgcggtgcacacaccagaatccgggtacttgga

SEQ ID NO: 430257 - DNA, 122 bp, Homo sapiens
gcttcaacacgttagaacgatcagaaatgttgcttctacttttgaggcgcttccctgaaacggtggtgcagcatggggtgagatttgattcttccccttcttttaatataaaatacaatggg

SEQ ID NO: 430258 - DNA, 122 bp, Homo sapiens
ccccctttctgccgcggcagtcagcgcagcgcccgctccgcccccgtcccgccccggcctcgcgttccgccgccagtcccagctatccaggtctccgtcgcaaaaccccagctccctccaca

SEQ ID NO: 430259 - DNA, 122 bp, Homo sapiens
gggacagagctcgcctctgccgcctcgacaactgctcctgggtcctctaagaggaggaagcgccacccatggcacacagtgtcccgtcggacagcagaaccagccgtcgtcccacgacacga

SEQ ID NO: 430260 - DNA, 122 bp, Homo sapiens
atgggcctaacaagcagcccagcctgggaggtggttagtgaggtcactgggtgtcactggcgcttgggaacctgcagagggcagtactagcggcagtgcccgcggggatggaggcagggagg

SEQ ID NO: 430261 - DNA, 122 bp, Homo sapiens
ttcacaggctggggcaggcgtccttaataccagtaactggctgggccaagctttctgccccgtttggggaccagaaggtctggggtttcccgaagctgaagtgcagtccctcctaggtcagg

SEQ ID NO: 430262 - DNA, 122 bp, Homo sapiens
agatttaacatcaggtgtttgcttcattttcttatcaccattaggcattgtcctacttagcgtgacaaattcactgcctaacagtgctcatgttttcagtatcttttactacagccgcccca

SEQ ID NO: 430263 - DNA, 122 bp, Homo sapiens
gcgggcccaggggccgccaccaaggctgtgacgaaggtgaggggccgggaggccggcactcggggcccgggccgcgcgccggcgccccatgtgcccgcccccgcctgccggggaagcgtccg

SEQ ID NO: 430264 - DNA, 122 bp, Homo sapiens
agcttgtgcataatgtaactgcttgtgtttagccttttcaggcgttccccagggtttctgcgtgacctaaaaacctataatcctgagaaacacccaaatgggcggctcttatagacacttag

SEQ ID NO: 430265 - DNA, 122 bp, Homo sapiens
cacccgaatattgcgcttttcggacaggtttaaaaaatggcgcaccacgagattatatcccgcacctggctcagagggtcctacgcccacggagtctcgctgattgctagcacagcagtctg

SEQ ID NO: 430266 - DNA, 122 bp, Homo sapiens
gactcctatggacttctaagaccagctctttgtaaaatatctctgatctgtggcacttaccgcacagtattataatcacttattgttttaattagtctccccaccttgactgggagcacttc

SEQ ID NO: 430267 - DNA, 122 bp, Homo sapiens
ggccttcccctgcgccttccccctctctcctacacacaccatctgactgtccttccagcacgtacacctccagatgcttgggttggcctgacccaaaacagtctactctcccggccaagcca

SEQ ID NO: 430268 - DNA, 122 bp, Homo sapiens
gcgctgcggaggcgagtccagcattctagccagccgcgcacggacgtcggttcccagatgcgccaatgccaggtctctccagcccggctggccttttcagcagcagcagcagcagccgcagg

SEQ ID NO: 430269 - DNA, 122 bp, Homo sapiens
gatgggaatgggactagtggatgggagccaggctggccatgccactgtgccggagggtggcggagcagaatgcctggatgtcaagaccctcttcccttccaacctcctcttccttggtcccc

SEQ ID NO: 430270 - DNA, 122 bp, Homo sapiens
gctccttctgcgggttggggtgcgaggccggaggccgggccggctgagcgggaggcggagcggggtgggtggggaccagggcggggtcgggctaaagagggatggattcagggcggggtggg

SEQ ID NO: 430271 - DNA, 122 bp, Homo sapiens
tggatcacacacaaacacagtcacacacacacagacacacatacacacacaactcaaaaacgtaataaagcaagaatcacagagtatcccaatcccagcagctacatgtgtctctcttcaag

SEQ ID NO: 430272 - DNA, 122 bp, Homo sapiens
caggcagcagggccctgagtcatcccattgacaaagaagtggagagtcccgtcctcccgccgtaccacgcccaccgtgtcccctgccttggaagaagggggtgctggagtgaggagtcaggc

SEQ ID NO: 430273 - DNA, 122 bp, Homo sapiens
aagcagcgttctcgccctcatcctgattactaaggcatgaatagtgctgcttctgatggccgtttccggaaacgttctgcacacgggagcttctcttgaaagagcctcggccctcagaggcg

SEQ ID NO: 430274 - DNA, 122 bp, Homo sapiens
cgggtgtgatttgggggtccccctcggggttctacttggcctctctgcggcaggtggaggcggcccgcaaggccatccgcgccgctcaggtggagcgctatgtgcccgaacacgagcgatgc

SEQ ID NO: 430275 - DNA, 122 bp, Homo sapiens
gccaagcggctcatggtggtgaccccggccgggcacagcgacgtcaagcgcttttggaagcggcagaaacatagctcctgagagcgcgggacttggacacggacctcggcgggcgggactgg

SEQ ID NO: 430276 - DNA, 122 bp, Homo sapiens
gccccagagctgaggcccagcagatactgtgcacccatcccagactcagcaggcttgtcccggcggagctggttttgagggcgggcagcagggaaggccggggcatggggtggctgcccaat

SEQ ID NO: 430277 - DNA, 122 bp, Homo sapiens
acgtcggagtgggcgctgggagttcatggaatcgtggagtaatcaaaggaactcagaaaccgccccacgaaccctagattttaccgggtttctacagaaactgaagccaaggggtccagcac

SEQ ID NO: 430278 - DNA, 122 bp, Homo sapiens
gggagcagtaaagcgccataaaagcaccacttggatgactattgcaaagtaagccttcttcgctcggattctatgtttcatgagggtaggcactggatcttcatctttatgtcctaggcggg

SEQ ID NO: 430279 - DNA, 122 bp, Homo sapiens
atggcagacacgatgaacgcgtttccgaagaagagcgcggaggacttggccgagagattgcggctgaaatcctgcaggagcaggtcctcctcagactgctgtttggagctgcctttaggagc

SEQ ID NO: 430280 - DNA, 122 bp, Homo sapiens
ctcaatctcctgacctcgtgatccgcccacctcggcctcccaaagtgctgggattacaggcgtgagccaccgcacccggccgatttctggtcttttacttgtgaagataagctggtagttga

SEQ ID NO: 430281 - DNA, 122 bp, Homo sapiens
acactccccgcaggacctcggccagttcaattaacaggcaagggtttacttctactgtcccgccgggctcctccccaaaataaagagacgttgttcactaacatgttgaaaagacgtgcttg

SEQ ID NO: 430282 - DNA, 122 bp, Homo sapiens
ggatgtctgtggagtgaggtgtgtgtgacatattcatgtgaccacccgtgcagcgtcacgcgcctggccctgccgatgacaagggtgtgggcctgcgtgggcatgactgtgtgtgtgacaca

SEQ ID NO: 430283 - DNA, 122 bp, Homo sapiens
agtgatttgggtcatgaggatggagccatcacgaatggccttcttaggccctagagagctcgcaccctctttccctcacatgaggatacaaggagaaggtggccacctgcagtccagaaaag

SEQ ID NO: 430284 - DNA, 122 bp, Homo sapiens
gcagagcttgggtttgaagccaagtttaaccaactctgggcttcataccctgcaaagggtcggataagtgtagaaccccagggctggaagtccctaagcaaggcagtcaggaacagaaggca

SEQ ID NO: 430285 - DNA, 122 bp, Homo sapiens
ttaccgtacttacctccccgcccccacgccgaacccgggccgagagcgcggtggaggccgcgcagtgcgcttccaattgggactgagcaaatggaggaaaaggaaaccgcctttcagttcaa

SEQ ID NO: 430286 - DNA, 122 bp, Homo sapiens
tcaccacgttgagaccgggaacgccggaagaggcggggcaggggctgccgtgagcggaagcggcgccattcgtcttccgagcgctactgccagctgatgccgggagctaactaccgcgccgg

SEQ ID NO: 430287 - DNA, 122 bp, Homo sapiens
atgccagggagtgcccctgtcaaaactaggggctggcggggagacagtgccatgggaggccgctaggtggcagcagatgcccacagcagctgcaaggtctccaggataccaggggacaggca

SEQ ID NO: 430288 - DNA, 122 bp, Homo sapiens
ggcttagcacccaggcaagcagcttcggagggtgcgccagttcccccagcactgtcagcccgcctgcgccatgctcgaattcttgccgggcctcagcctcttccttgcgggacagggctcgg

SEQ ID NO: 430289 - DNA, 122 bp, Homo sapiens
gggtcactctccagaactcacggggggccccaggccagcaggagcacacgccatattcaccgcagatgggggttactctccagaactcacagggaggcccctggaatcaaagagaaaaggcc

SEQ ID NO: 430290 - DNA, 122 bp, Homo sapiens
ggattgggggttcaaggtaccgcatttgccacgtgagggagtctctggagaccaccaacccgctggtgggcggccaagcgtcaccaccagtccctctcagtgcgtcccacctctgttctcag

SEQ ID NO: 430291 - DNA, 122 bp, Homo sapiens
acggcgtggcccgtggagccccgcctctcgcggcaaccacagagaagccggactgggccacgtctaggaagaggtaggaaaggatcggcgcatcatttctccaatgggaaaggatgtgtttg

SEQ ID NO: 430292 - DNA, 122 bp, Homo sapiens
tctttaagagctgtaactctcactgcgaaagtccccagttccgttcttggtcagctagaccgcgaacccaccggaaggaataaattccggacacaagggggcgcgcggggcatgcgtaaaag

SEQ ID NO: 430293 - DNA, 122 bp, Homo sapiens
atgtgaagaaggcctgaggcaggtgctgcgggctgcgggaaggagccctgcctggtgaatcgcaggccacgttagggtccctggaggctggagatcctggatcaggagggcagcattctggg

SEQ ID NO: 430294 - DNA, 122 bp, Homo sapiens
aaccgtgagcacaggcaagctcctgggctgaatgtgcgggaacctgtcttggcttggctccgcagccattccctgtccccccaggggccaccgcaggctgcccagcctgccctggggggtag

SEQ ID NO: 430295 - DNA, 122 bp, Homo sapiens
tttttctttttgtttattaggaaatagttttctgagacaaacttgtatgaacctagttcacggagcaagcttaatccccaacttgcttgcttttgaaatgttggccatgttagctggagaag

SEQ ID NO: 430296 - DNA, 122 bp, Homo sapiens
tgcacaggcgcccacactgtgtggctggcccagcccagtttcattcctggaatgggaccccgggagccgagaggggcaagggcctctgggcggcgcgtggggcctgggtgacagcacgggtc

SEQ ID NO: 430297 - DNA, 122 bp, Homo sapiens
gtctctccttcccgtgagtggattttccccaattctagtgctgggatcccacctcccctgcgcctacagaggtatcaggtccttcagggtcactgtgatctagctgcttcccacatgtcaac

SEQ ID NO: 430298 - DNA, 122 bp, Homo sapiens
ggcagaggggactgtgagattaagaaccaggggtcactcactctgttgtcctctctagttcgtcggtaggatgagattcaagggcttccagcctgagggggagaagaggatctatctgtcca

SEQ ID NO: 430299 - DNA, 122 bp, Homo sapiens
ggctggccaaggccggagctggctccctcagcttgcaggcaggtgtggagtgagaggtgccggtgagaactggggctgcgcgcagcgcttgccggccagtgagggttctgggtgggtgtggg

SEQ ID NO: 430300 - DNA, 122 bp, Homo sapiens
tctcagggaagtgggccaggccctgcagcagctcggggcacttcttgtagtagacacggacggagagcagcgccacacaggcaccgatatcctggaaggccaggtagaagcctttgcgggtg

SEQ ID NO: 430301 - DNA, 122 bp, Homo sapiens
ggaatccgaatccctcaaatgcagcggggagacggtgtgactttgcctcctgttctccttcgttcctgctgagtgtgagaggcctgcttaggtgctgagaggtgtgaggggcactaagcctc

SEQ ID NO: 430302 - DNA, 122 bp, Homo sapiens
gggtctttaaaagtttccatttgccccaacttctttggacgtacctatgatccagcatagcgcatgtatctaaattgcaatcccctattattcccaaataaactacagtttcaggatcccat

SEQ ID NO: 430303 - DNA, 122 bp, Homo sapiens
gagccacagtgtttggatgtgaaattattctagatggaagactttccactctcagatttccgacccagagttactttaacaattttttttaacaacttgcctttaacaagcttttccaatgc

SEQ ID NO: 430304 - DNA, 122 bp, Homo sapiens
gtcgctctgtccctcctttacccgctttcgtggttctgctttttcatcccgcgcctcccacgtgtctttttgcccgggtggtccctccttgggaagcagcgtatctctgtgcttccatccct

SEQ ID NO: 430305 - DNA, 122 bp, Homo sapiens
cccctcggtcactgcattcagaactcatgtgccctatctgcctggacatgctgaagaatacgatgaccaccaaggagtgcctccacagattctgctctgactgcattgtcacagccctacgg

SEQ ID NO: 430306 - DNA, 122 bp, Homo sapiens
cggggcgggtcggctcggctccggcggcagcgggctctgggtggctggctccaggagggccgctttatagaacgctgatggacagggtcagttggagcagccgggggcaggggtggggggcc

SEQ ID NO: 430307 - DNA, 122 bp, Homo sapiens
cccaattaagtatttcctagagagagcagttgatctcttttgtctgaaactgatttttgccgtgctaagctggcaaaatatctgaggtaataactttaatgttgaagtacaatgaaagttcc

SEQ ID NO: 430308 - DNA, 122 bp, Homo sapiens
ctggcgcccagagcccccacctcgcccccgcccccggcccggcccccgcctccagccgcccgcccacagccaccgaagggaaaccccaccctcagtctccacctggggagggaggcgggaac

SEQ ID NO: 430309 - DNA, 122 bp, Homo sapiens
tgtgatccccccgtctcggcctcccaaagtgctgggacgacaggcgtgagccaccgcgtccggcctaaaagggtaaatgtgattacacccacgcgtatttgttcaacagacatttattgagc

SEQ ID NO: 430310 - DNA, 122 bp, Homo sapiens
tgattaagggtgttgaccagctttagttgtgactttctaataaaggttgaataccagtgacgtgtgagttggagatgggaaagtttaacataagtttaagtgtgggaaatagatgtgttgta

SEQ ID NO: 430311 - DNA, 122 bp, Homo sapiens
agctgagcgatggacagtccaaagcgcacaatcaccacgtctgaagtgttgggcaccgggcgcgcccagcggttgtagccccggaagaggtgtttgaagagccggtcctcagtctcggtatg

SEQ ID NO: 430312 - DNA, 122 bp, Homo sapiens
cctcagggcacctccaaggcccggggaagggccctagggaatgtgttcgctggggtcccacgtatgctttttctgaaaatgctccacaaagcctaggacggcccccatgcctcgggtctgtc

SEQ ID NO: 430313 - DNA, 122 bp, Homo sapiens
gccttgtatgtttgatgaggtgaggacccctccagctggaccccgcccgaggtcgacccccgcaaaagcagtctttctggatgtctggacaaaagcacgcggtcacacaggctgtcgggcca

SEQ ID NO: 430314 - DNA, 122 bp, Homo sapiens
tgaggaaaccactatcactggaagtaaagattcctataggagagttgtggggagtgaagccgggtaggtagagtgggcccagattgtagaatagacaatgttaagagttaggcagaggccag

SEQ ID NO: 430315 - DNA, 122 bp, Homo sapiens
tcatccctgggcctgtcgagcccttcagcatcgtgaccatgcccgggccccggggtccggcgccaccctggctgcccagccctattggcgaggaggaggagaatctggcctgagatcttaga

SEQ ID NO: 430316 - DNA, 122 bp, Homo sapiens
aagaataaagtactaagattgtgctcaatacacagaaaagtttcaaacctactaatccagcgacaatttgaatcggttttgtaggtagaggaataaaatgaaatactaaatctttctgtata

SEQ ID NO: 430317 - DNA, 122 bp, Homo sapiens
gaaacttcaacttccaagagaccaggactgagctccaccgcggcctatccaggggctgtgcgggaagtttcctgtacctgggaggcttcatctcgggggagctctcgatggaccggagggcc

SEQ ID NO: 430318 - DNA, 122 bp, Homo sapiens
ttgggcacgaaagagatcttcctcaagccacggagaagacaggcttgacaaggagcaggacggccttcacagcagcacaaatgggaggccctgtgaaattctccctggaaggcagagctaag

SEQ ID NO: 430319 - DNA, 122 bp, Homo sapiens
gaagtccagtcagctcggcttgtctgggcgctcccgccggggtgtaagaaccaacccgaccgcaccaactgccctcaagctctgcccggactccagccactagagtttcattttaacggcgc

SEQ ID NO: 430320 - DNA, 122 bp, Homo sapiens
tggccagagtcctgagaaggcctcccactgagtgcggggctggggaggggagcagcaacccgaggatggaaaggcagaaaaccccagtcttccttagggcactggtgaaaaccattgagaat

SEQ ID NO: 430321 - DNA, 122 bp, Homo sapiens
gaagaaattataaaaggtaacatgctagccacactcaagtcacttaaagaatcaagccatcgatggaaagaatctaaacagcctgatgccatccctggtgatattgaaaaagctattgaatg

SEQ ID NO: 430322 - DNA, 122 bp, Homo sapiens
gaggagggtggatcacctgaggtcaggagttcgagaccagcctagccaacatggtgaaatcgcatctctactaaaagtacaaaattagctagtcgtggtggcgcaggcctgtaatcccagct

SEQ ID NO: 430323 - DNA, 122 bp, Homo sapiens
atcgcccccttctgctttgaaggcgctgcctacggtttgcgcaggatgtgcaagctgttccgtgcctccgaacctttgtccctgccattccttctgccagaatgcccttcccaccttctcct

SEQ ID NO: 430324 - DNA, 122 bp, Homo sapiens
ccctggagctcaacagggacctaattaactgacagttggtctgattgccaagctgaggggcggggcggggaggggggcggtcagttgctgcttggctcacgtagcaaggagggcaacttttc

SEQ ID NO: 430325 - DNA, 122 bp, Homo sapiens
ctcctgcaaccacagcagagagaagggatgccattcgaggtgctcagtaacctcaccaagcggccctaatgcttccactccgagtttctgaggaatctgaaggcacttcaccttgaggcttg

SEQ ID NO: 430326 - DNA, 122 bp, Homo sapiens
aagaggacccctccccctgcgggccgccgctgcgcccgtgcatccgtcacaggtacaattcgcaccggaacttgcggcccggcttcattacgtgatgctttttagctgctctggtttctttt

SEQ ID NO: 430327 - DNA, 122 bp, Homo sapiens
gcagggcgcttggggataatcgaggacgcacgtctcctgttactgcccccacaggtgaaacgctttctttgaggggacttttcaaaggacaggtgtgggctgccctgaaggcggggacttcc

SEQ ID NO: 430328 - DNA, 122 bp, Homo sapiens
tttcattactatcccattagaaggatcaatttgaatttcttgtatttgagtggaaaatgccgaagaatactgaggtttgagtttctgatgttttgtgaatttttcactgttgatatttcatc

SEQ ID NO: 430329 - DNA, 122 bp, Homo sapiens
gagagtggtgaagttaggaaggtacgaccccctaggccgaacagcctgtgggctagctggcgcctcctgccgcagtaaacacaaagtggggtacagaaacgaaaactccgggaagaaacggc

SEQ ID NO: 430330 - DNA, 122 bp, Homo sapiens
gctgcggcgagcggagcttcgcggggatcctgctggactgcacgaaaaagtgagcgggggcgcgggccgggacacccccggggtccccacgcgacacccgcctccgccgcccggagacccgg

SEQ ID NO: 430331 - DNA, 122 bp, Homo sapiens
tgaacctgaattgggaagatccccaccacactgtcccccacaccccatggcagagggcagcgtgcttgctgtggccacaggctgcataaaggggcctgtgtgctggctgctcacctcccact

SEQ ID NO: 430332 - DNA, 122 bp, Homo sapiens
attgcactgatagagaagttccacgagatggcagcatcggcccatgagccttatgcctggcgctctccgctccgcccgtcgcaccgcccccccgccccaacgccccgcaccctcccccaaaa

SEQ ID NO: 430333 - DNA, 122 bp, Homo sapiens
tgtggtctgtaccatttgtggtcagtcttatttgtggtttatatttggccagagcatccacgacctcaaaagccttttccagatctctgtgtaggttttggcaacttctttgtactctgaat

SEQ ID NO: 430334 - DNA, 122 bp, Homo sapiens
gagcccaggagttggaggctgtagtgagctactgctgggagccaaaaatgccaaagggaccgtgaccaactcagcattccactggtggctatatgatcaaacagcaaactatttatcatgaa

SEQ ID NO: 430335 - DNA, 122 bp, Homo sapiens
ggaaccagagagagggtctttaacctaaatataaatgaatgactggattcctgaagaatccggaatggcttgttgattggatagatggatggatggatggacggacggacggaccgatggat

SEQ ID NO: 430336 - DNA, 122 bp, Homo sapiens
gcagaagggagacaccagccagaggaaggatgcattttaggcaccgaactttaggtaaagcgctctgggtcaggggtctcctccagagtggtctgtttaaagttaaaaaggtcgccttcaaa

SEQ ID NO: 430337 - DNA, 122 bp, Homo sapiens
ccatactggccttcgaaggggaagcgccttctcgtcggcgcggcaccaccccctccctggcgcagccagcctgctaagggtgcctgttgtacattttctcagctccaagttaggggtgcggc

SEQ ID NO: 430338 - DNA, 122 bp, Homo sapiens
gacgacctggcaggctgcgagcgccagcgccgccagagccgagtttgcctgcgccctccccgcctccgagtgcagagttccttacctgccctccgcccacccgtgggcccctagccaacttc

SEQ ID NO: 430339 - DNA, 122 bp, Homo sapiens
ggagtggggtgctgggttcggaggtttccacggcggcctcaaaacactgggccattgcttcggcagaaaatgtgaagggtccctgaaaaatactatgggggcccccacacgtgcttacgttt

SEQ ID NO: 430340 - DNA, 122 bp, Homo sapiens
ccacgcaggtctggcggagaaggcagagacttccacgcccacgctggacccccagcgacccgcaaggtgcgtggtagaaataagtgtgtctcaaaagtactgtccagaggagttgagattgc

SEQ ID NO: 430341 - DNA, 122 bp, Homo sapiens
gcgtcccagaccccgcgggctccagtgggcttagccaggcccaggggcggggggctccagcgccgcggacggcccgggaggggaagccaggcggagacagctcggaggcacagaggggaagg

SEQ ID NO: 430342 - DNA, 122 bp, Homo sapiens
gataatctgttgttctggtttgcatgactgtggtagtgttgggggttccctccctggtctcgggagaccttgaatgctggctggacagcagcttctagacaccatgagagagctccctcagc

SEQ ID NO: 430343 - DNA, 122 bp, Homo sapiens
ccgtctccatagatacaggacgcgcaggaaacggcgtcttcagatatcccagggcaacgacggcagcccgagtaagtcaagattcgtagaaggcgaaggcaccgcccaattttatttcctat

SEQ ID NO: 430344 - DNA, 122 bp, Homo sapiens
cacgcagctgtcaagaacaggcaccctgtctcgaaagagcatcaaggcccctgccacacccgcctccgccaccttggggtgaggcctcgccgcgacgccaactagcctagccctgccccgcg

SEQ ID NO: 430345 - DNA, 122 bp, Homo sapiens
cttcccgcagggcagggctcgggacctgcagcccgccatgcctgagcctcccaccccctccgtgggctcctgtgcagcccgggcctcccggatgagcgccaccccctgctccacggtgccca

SEQ ID NO: 430346 - DNA, 122 bp, Homo sapiens
ggagatgggatggtagaagagggtgtctttaatctccagggaagggttccccacctatctcgtattaccctcatcccatgaatccctgtctgtcctgtctcttcccaggggggatggatgaa

SEQ ID NO: 430347 - DNA, 122 bp, Homo sapiens
cggagaactgtgtgaagggacagcttagggactagcgtcctgggactagggggaagttcgcgactttctgaagactggcaggaatgtgcctcctggccctcgatgcttcccccctgagggga

SEQ ID NO: 430348 - DNA, 122 bp, Homo sapiens
tcacaatgaacatttctactgccatctaaaatttccaaaggaagctaataaatatttttgcgttggagctcagaacagcttgcttatgtctaagccctatgtcccttttaactaagctgctg

SEQ ID NO: 430349 - DNA, 122 bp, Homo sapiens
agtgtcaaaatcgttcagaggctcacaacgaggtcatagtagactacttcggggacgggacgggaaaacgcgtcagcagcggggaagttgtttctacgaagggtctttcttcatagacagga

SEQ ID NO: 430350 - DNA, 122 bp, Homo sapiens
agaggtgaaggcccctctcctccccttccccagagctggaagctgtggaactcggacccccgcagctctgcccgccggtgtcccggcgcttctggacccaggatctgcaaagctgagcaagt

SEQ ID NO: 430351 - DNA, 122 bp, Homo sapiens
gcctgaatagatagtgccctcacagtagctactcacctgcatagaccagccttcttgcaccgctctggtttgactcgttttgctctgattctagcctgagctgtaactccctaacacggcac

SEQ ID NO: 430352 - DNA, 122 bp, Homo sapiens
taaaaatagccgcccaggtttatgtattcatccctaagctgcaatgaagcgcctgcctcccggccagagtccgctgccttttagtagcttataacatcaggtgacgcctccagccctcccat

SEQ ID NO: 430353 - DNA, 122 bp, Homo sapiens
agcgcattggagcaccggaaggagacgcggagccgaggccaggccttccggcggtcgttacgggacgccgctgccatctacagcactccgtgaagaatatgctggccgccttcatctcccgc

SEQ ID NO: 430354 - DNA, 122 bp, Homo sapiens
tggggctcagagtccagccagaggctttcttggaatattagagacccagaacatttgtcccggccctctgagaaacccaggctggtgagaggctggcctgaggcttgacttaggggccgaga

SEQ ID NO: 430355 - DNA, 122 bp, Homo sapiens
atttggtggtgaagaaaatagatgaattgttccaaccctcatggagctcccaggcaattccgaacaggcaaacatacaaagataaattgccagtgtgctgatatgaagaaggaaaaaacaaa

SEQ ID NO: 430356 - DNA, 122 bp, Homo sapiens
tggataaaatgaaataagccagtattaactgtcaaacccaacatgtctggttatcaacaacgattattatatatattaatgagaaatgccaaagtcacaataaagaaataatcagaaaggga

SEQ ID NO: 430357 - DNA, 122 bp, Homo sapiens
gatagaacccccagctatgtcccggcgctcagtgactcaccagcttactggaaagtccctcgagtcctctattaactagattcagaaaagcctacccaatctctttgagtgaaagctcactc

SEQ ID NO: 430358 - DNA, 122 bp, Homo sapiens
tgaggacctggcagcctctgaaagcacgtctgcagaacatgctgaataggccagtgcccacgggaagatagtccttagggctagctagctgctgtactcactttcctaggatggctgtgggt

SEQ ID NO: 430359 - DNA, 122 bp, Homo sapiens
gcgacgagggggcagcggccggctctccagcagctgcgcgcgactgtgtgggattttagacgtcccgggccgaggccgagggacaggctgcgagggtcatggctgcaggcggcgagcccaca

SEQ ID NO: 430360 - DNA, 122 bp, Homo sapiens
cttttcatcagagttatggaaaagtaatgagtctaggtggaaaattaatatgtggatgatcgtatatgggtgtttctgcatttacacgtgtaaatgttcacaattcagagcccagtcattgt

SEQ ID NO: 430361 - DNA, 122 bp, Homo sapiens
catggggcgggggaactggcgtgcattgcctaaatcaagcgcaggagtttgatggtaccacgaagcgccacagggtgtgggagcctgagaggtactcacgcaatgcccgctggaagataagt

SEQ ID NO: 430362 - DNA, 122 bp, Homo sapiens
gaaaccccaaagtggttatggactggctactcagatttttttcttcacttgctcaggctccgccccatctgaaacgtcttctctgctaggaactcactaggagaaaatgaccagtgagctta

SEQ ID NO: 430363 - DNA, 122 bp, Homo sapiens
ggctgctgtattccccagatccaagctcagtgcctagcacatggtaggggcttaggatgtcgttgtgtaatgactgaatggggaaagagcttggttgggtacaggtgttcttggttaggagg

SEQ ID NO: 430364 - DNA, 122 bp, Homo sapiens
gcatttgtgcagaacattcctaaatgttcaggtgacactgacctactaggccctttagctcgctatgtgaggaaataagatagaatcttcaaagaagtttggttgtcaagaagcctctggga

SEQ ID NO: 430365 - DNA, 122 bp, Homo sapiens
ccaagggtctagctcacaccacccactcccaagaaaatgatctttctcaaatcaaaccctcgtcccatggacctctactcctagagtaagcctggggaacccatctccccagaattagcatc

SEQ ID NO: 430366 - DNA, 122 bp, Homo sapiens
tcttaggtggatccctcagcgtggcttgcccaatggagcaatgccggctggtggcctggccgctccgccccttccctacccctcgcggagggcccgccccctgccccgcgccggctagcgga

SEQ ID NO: 430367 - DNA, 122 bp, Homo sapiens
cgctgcactctccacgccgagcaccccggccccgagtactccacgctgcactctccacgccgagcaccccagccccgagtactccacgctgcactccacgccgagcaccccggccctgagca

SEQ ID NO: 430368 - DNA, 122 bp, Homo sapiens
ggacgaggtggccgagccgcgacgcccgccgcgccccccgcctttgtctgcctcgccccgcgccctccccctgcggaggagccccaccgccgcggcgccctcaccctgctcgttacccgggt

SEQ ID NO: 430369 - DNA, 122 bp, Homo sapiens
taaagaacacaactcggtaacagccgagtgcaagagatgcgcagcacggggggtgaagggcgggagtgctgtcctcacagcacctctgtgtgcccacctgcctggaagctctccgaaccctg

SEQ ID NO: 430370 - DNA, 122 bp, Homo sapiens
caggcccagaccagggcgccgcgccgctggggcagtcaggggtccgagcggggtcgggggcgctctccgcggcccctccccggcagacaaagggctggccgctcccccaagccccggcgcgg

SEQ ID NO: 430371 - DNA, 122 bp, Homo sapiens
gaaatcctcaagtgaccttacttggcaaaaccaacaaaacaaccaaatacaggtctcaagcgatttacagctcggtgcttaactcggtcaccggccgaggggcagccctctggcgccaaagc

SEQ ID NO: 430372 - DNA, 122 bp, Homo sapiens
gtttatctgttgtgctgtgtactccgtaagtccctgctgcttgcagacttacattcttctcggaagtatccttgccttttttggtagttccctctcctttgttttcattattctctctggaa

SEQ ID NO: 430373 - DNA, 122 bp, Homo sapiens
gaatcaccaaattgttttccacagtggttacacccatgttacatttccaccagcaatgcacgagggttctaatttctccacatcctcaccatcacttgttattatctgttttcttttttaat

SEQ ID NO: 430374 - DNA, 122 bp, Homo sapiens
aacacaggactgaaatatggcagtttcttaagtcactggacttgcctagattggatttagcgtaacacatgagcttatttggaaaatgccagcctctcctttgtgtggtgtaggtgtgtttg

SEQ ID NO: 430375 - DNA, 122 bp, Homo sapiens
ccgcgcaggcggatgggatggaaccagccctggggacgcgggtagcccaatgggcagcctcgccccggaggcgggcccaggccggaagccaccccgcggcacagcggccccgcgatacggtg

SEQ ID NO: 430376 - DNA, 122 bp, Homo sapiens
cccttcccctccaacccagctggtagttgggtatactcactgcatccagtttggcagcaacgtgccacgggttacagacccttatctccaatggtagtctgtaaagggttaacaacaggggc

SEQ ID NO: 430377 - DNA, 122 bp, Homo sapiens
gttgggagtgaggagccaacccagcagcggggtgtaacggtacgtggctctcaggtaaggcgagcgcccctccgtgacgaagcgcgcggcgtcggtgaagacctggtagtcgatgtccgtat

SEQ ID NO: 430378 - DNA, 122 bp, Homo sapiens
ggtccttggagacccagtggtacctgccggcgccgggcatagtgtggcctggaggcggaacgatggcttcttctggtgaaatctgtgtttgctgaacttagcttggaagttggctgtgcagt

SEQ ID NO: 430379 - DNA, 122 bp, Homo sapiens
ccagatctatatataacagctctgaagttgtcagcctaacgagccactttctggcagacccgttgctatggcaatgcttgctaatgagcccagtgccgtgattggcactgcttgaaggctcc

SEQ ID NO: 430380 - DNA, 122 bp, Homo sapiens
atttcaggattcattctatttcatcaggtgacgttttaacagaaacaaaaccgcaggcagcgggtggggggagctggaggttggaatcacaccaacattatagcattattactctaaaaaaa

SEQ ID NO: 430381 - DNA, 122 bp, Homo sapiens
gcgggcgaacccagccatgggtgtctgcggggaggcctgcgcgcgtgcagactccgcaggcgggaggccatgggctcccctagttcctgctcagcctgtgtcctcacccaccaggccggcca

SEQ ID NO: 430382 - DNA, 122 bp, Homo sapiens
ccaggtctccaaatttccgacatggggtgcctcaggctcgcgtaagggatcccaggtctccgaatttccgacgtgggtgcctcaggctcgcgtaagggatcccaggtctccgaatttccatt

SEQ ID NO: 430383 - DNA, 122 bp, Homo sapiens
cctctaactctgggtgtttcttttgtatcagaaataaacttattcacactctgatgttatcgaagtcatgcgcatttctttttcatgaacatgtgcattttaaaaggaagaaaaaattcacc

SEQ ID NO: 430384 - DNA, 122 bp, Homo sapiens
aggccaaaagaagctggaagacacaaggaaggatcctccgttagaggctcagaggaagcgcggccctgctgacaccttgatttcagaccatagcctgcagaactgcagggtaatgcatttct

SEQ ID NO: 430385 - DNA, 122 bp, Homo sapiens
caccgcggctgcctccggagcgcagaaggctggggttcgggagaccgcggggctgggaggcgtggcttccgccaggcccctccccagccgcgctccggaggcgccttcagcctctcaccccg

SEQ ID NO: 430386 - DNA, 122 bp, Homo sapiens
ccgccccggccccgcccaggcccgggcggtcccgccccactgagctgtggctcggggagccgtgggtccgactcctgcgtgtgatgtgtcaccaagttgactttggggtcccccattcttcc

SEQ ID NO: 430387 - DNA, 122 bp, Homo sapiens
ttcggagtcccggattcggtatccggaacccgtgtagacgtggtctatggagccctcggccgtctggcccctgcggctcccgaagccgaataacttcatggcggtgactacttctcagaccc

SEQ ID NO: 430388 - DNA, 122 bp, Homo sapiens
accgcgggaagccggcggggccaccgagcggcgggctggcctggcggggcggtgtcagggcggcaaggcggcgcctccccaaagccgtaaaccttcccgcccggctgactacgccggcccag

SEQ ID NO: 430389 - DNA, 122 bp, Homo sapiens
aacttggtgttgtagttaccctgctctgccgtgcacttcctacaactgcacccacagtcgcggccaagcagcgaagatttaagaaagtaagaaagcgtgacggtttgctccactcttttggg

SEQ ID NO: 430390 - DNA, 122 bp, Homo sapiens
gtctctgggaaatttttttcccctttcttcctaataagcctgcgtggaacgcagagcctgcgcaatagccccggtgaagttgtcgatgccctgaactctggtttttttactgccaggcgtgg

SEQ ID NO: 430391 - DNA, 122 bp, Homo sapiens
cgtgtgagtgcctgtgtgtgtgcacggatgcataagtgcctgtgtgtctgtgtgcatgtacggatgcgtgtgagtgcatgtgggtgtacctatacatcacagaaagagtggtgaagcgattg

SEQ ID NO: 430392 - DNA, 122 bp, Homo sapiens
ggaggagcagttttggccagtggaggtgcccttgggtcctgcagtcgtgcataccctgggcgttttgcctgagcccagtgacctacctgccttgtccttcccgggttcggtggcagggagag

SEQ ID NO: 430393 - DNA, 122 bp, Homo sapiens
aatcaataaacatttatttgatacagtcattttaatacatacagtgatggcccgtccccacgccactcgggaccagggcgcggggcggggacgaggaccggggacagatggtcacaaggcgg

SEQ ID NO: 430394 - DNA, 122 bp, Homo sapiens
cccccgacgctccgcccgccctccacgctccgccccgccctcccggcccccgcctgcgcccgcgccctgggctggtgcccgccaccccagcgatctcatactggcccctgggcgcacggtga

SEQ ID NO: 430395 - DNA, 122 bp, Homo sapiens
ctatcagctctgtcttcccatagcctatggtactttttttatgtggatgtctttattaagcgtgtgttatcttgtagtgtaagtatttatcatctgacttcccttttaaaccataagtccct

SEQ ID NO: 430396 - DNA, 122 bp, Homo sapiens
cattaagttactgattacagaatattatgcatgtatttttgcagtaaagccagttatggtcgccattgtcagtgtttacataaattgacactcaagtatttggcctttattttgtccttaga

SEQ ID NO: 430397 - DNA, 122 bp, Homo sapiens
aggcgcaggcaggaactggggctgtgcggcgctcgcgggccagtgtgtgttccgggtgggcgtaggctcggtgggctccacactcaggagtggccggctggtgacaccagccccgggcagtg

SEQ ID NO: 430398 - DNA, 122 bp, Homo sapiens
acggcagcgggagaggcgcggccgagaaggcagaggcctggttgggctgtcactccgagccggggcggcatgtggctgggctctccaaccgcgagcggtcggggcaggggaaaggaatacgc

SEQ ID NO: 430399 - DNA, 122 bp, Homo sapiens
gagagggtgcttgtgctgggcatttgggccacttagtcctgtctagtcctgtggcctggacgacaggcactgccccaggccgctgtggggcaggcaccctgggtgatccattagggtcagga

SEQ ID NO: 430400 - DNA, 122 bp, Homo sapiens
atgaggtcaaagccaccaccccatgctcacagagccgtctgctggctatgcctagaggcacggggtgggcacgcagatggcagctgtgatttccctgaaaccagacatctgtgccacacaga

SEQ ID NO: 430401 - DNA, 122 bp, Homo sapiens
taaactagagaagctcagatattttgaattgaatagggtgaccaactctcctggtttgcccgagactggaagattcttagaacttttagttttaaagacaggacaatttcaagcaattttag

SEQ ID NO: 430402 - DNA, 122 bp, Homo sapiens
tctcctgtaaaatgagatagaattacactacctgccccgtgttggaattaaatgagatagcgagtgtaaaagttctaacacactgcgtgaagcttcatgtgcgaaaatgcgtattgcctgat

SEQ ID NO: 430403 - DNA, 122 bp, Homo sapiens
cagactgctgtgctagcaatcagcgagactccgtgggcgtaggaccctccgagccaggtgcgggatataatctcgtggtgcacggttttttaagccggtccgaaaagcgcaatattcgggtg

SEQ ID NO: 430404 - DNA, 122 bp, Homo sapiens
tgggagcgccaatgaaatgactcagtgaccatctacaacaaatcagcaagaagcagggctcgcagctgaccaatggccgcccgccgggggtgggctgtcccggcccttttccaggcccaact

SEQ ID NO: 430405 - DNA, 122 bp, Homo sapiens
ccgcccccggcccctgcggtggaaaagtaccggggcgccgaggtccccgccccacggccccgcccccgggccggcaccggcccctcccggccctccgggcaagccccactctcccgcccggc

SEQ ID NO: 430406 - DNA, 122 bp, Homo sapiens
tactggtcaatttcaccaataaacttgattgactagaaattaatgacctagaaattactccgtgaattacagggtctgaggctgaggattctaaaccaggagtcactgtccctcaagaaaca

SEQ ID NO: 430407 - DNA, 122 bp, Homo sapiens
aagagaggattgaattgcaatgcattgcaaggagagagaaatagactagaggtgcttaaacgattttggtgacctaatgagataaggaaagtgagcatatttaatagtgcagtgagcagcaa

SEQ ID NO: 430408 - DNA, 122 bp, Homo sapiens
cacccaacacagcccttagttgtggctcccacattattctcccaccttgctcccaaagtgcggggattataggcatgagccaccacccaagcttaaatttttgtttccttttttttcttttt

SEQ ID NO: 430409 - DNA, 122 bp, Homo sapiens
agacaatgaccgaccaggcgggttttcctgcgcacagggtcaggcgaataaaggcgccgacgctgtttaaacgaaggaccttgtaagagaaagggagaaaagattttgtgtgtggagcgtgc

SEQ ID NO: 430410 - DNA, 122 bp, Homo sapiens
gggcctgtggatgcttgagtttcaggggagctggtgccacttctgcctgccccacagcctcgcctcctgatggttggtgctgtggtcggcagccatgccacagggcctgcctccagaggagg

SEQ ID NO: 430411 - DNA, 122 bp, Homo sapiens
agcttcctgcagggctgcggcagatgtagaggccggcatcgccgcgcccaacaaagaagacggcatctcggaaatcgtagacaccagggtccagaaaaagtcaaaaaccaaggagaaacaag

SEQ ID NO: 430412 - DNA, 122 bp, Homo sapiens
gtgggctctgcgtgtgtgcatgtgtgcatgtgtatacatgcatgtttttgcatgggcatgcgtgtatgtgctcacagcatgcctgcctgtgtatgccagtgtgcgtgtgtgcacactcgtgt

SEQ ID NO: 430413 - DNA, 122 bp, Homo sapiens
aaagaaacactgtatctttcctgtggctgccctctccctctgagtgagtatctaaaataacgtctgcatttatgaggcattatgactttggggaagcctgagaccttgaatctattcggagt

SEQ ID NO: 430414 - DNA, 122 bp, Homo sapiens
gttcctgcttttcttgtgtagagcctccggtgccctccacctaaccctgccccaatgcctcgggtcttttttgaactaatgctgtgcgtctccgcaatctgcaattactttggatatttctc

SEQ ID NO: 430415 - DNA, 122 bp, Homo sapiens
aagaataattgctcctaatttacagatgaggaagccggccctggagaagaagagggacttcgtgtacacacagctagctgtggccaagccagaccataactgaggtgtgtcagcccggagcc

SEQ ID NO: 430416 - DNA, 122 bp, Homo sapiens
gtgcggacccgtccggtcatgctgaggtccccgaccttacccgcgttttcctttctcccccgcccgcggcacagccccaccccgcgctgccgctgcctctgcccctgccgccccagccggcc

SEQ ID NO: 430417 - DNA, 122 bp, Homo sapiens
tggtgctcgatcaatgctaagtagaacagagagccaggaagctcatctttaattcagcgccgacaatcctcagctcagctcaaacttggcaaaacgctttcttccctcgcatctattcatag

SEQ ID NO: 430418 - DNA, 122 bp, Homo sapiens
gtgctaccaccacgaggaccggcagatgaacaccaactggccagcctcggtgcaggtcagcgtcaatgccacgccgctcaccatcgagcgtggcgacaacaagacctcgcacaagccactct

SEQ ID NO: 430419 - DNA, 122 bp, Homo sapiens
gccaggtctaaacgtgatgcattgggggtggggggtgcagtggctcagaagaagcaggggcgatgagctctagctgaaagcatcccctgctagaagccgactgcccacggcgctcctgtagg

SEQ ID NO: 430420 - DNA, 122 bp, Homo sapiens
aagcaaggagaaaatacagcttcttgccttggcacttcacgtaggacctgatgctcctggcgggctgtgattgaaagtaggtcttactgcccggccctctgaagccgccttttctaaaaatg

SEQ ID NO: 430421 - DNA, 122 bp, Homo sapiens
caagcaaagcttcatctgtatttacagtgtctccgcattgctcacatcactgcttgagctcggcctcctgtcagatcaggaggggcattagattctcacaggcacatgaaccctattgtgta

SEQ ID NO: 430422 - DNA, 122 bp, Homo sapiens
gggagccacatcctggaagagtggcctaggacagctcctctcctgccagagctaggcaggcgccgaagtagccgcatggccccgtcagaagaccccagggactggagagccaacctcaaagg

SEQ ID NO: 430423 - DNA, 122 bp, Homo sapiens
gcctccgcccgcccgtcccgcccgctccgggagggggcgtccagcccggcctggcgcccccgccccgtccgctcgcactcacggagacacaggagccaccatcttgggcggtggacgctctg

SEQ ID NO: 430424 - DNA, 122 bp, Homo sapiens
tggactgggtgatgcctcaggagaaaccaccctagtagttccgctccgagggcggaagtgcgcgtctcttgtttgtgcggctgaccagttggcgacatggtggcacccgtgctggagacttc

SEQ ID NO: 430425 - DNA, 122 bp, Homo sapiens
gaaacaggtgatatgtaggtgctgggaaaatggaagcttaaggaggttgggtaacttgcccgagttcacacacatagcaagtaaagaactcaggctcaaaaccagtcaggcaagctccagca

SEQ ID NO: 430426 - DNA, 122 bp, Homo sapiens
gcgcccactcagacttgctgctcaggtgcctagagcagaagccacctcctcagaggccagcgcgccagcctggcaccacggggacgctcccagggggtgcccagagggaacgtgcgcatcgg

SEQ ID NO: 430427 - DNA, 122 bp, Homo sapiens
acccttatgtatctgattcacgatgacaccagctaactctgagtacagtagaaaacgtaccgtcgggcaaccagaaaatgcgcactccagtccccaccacgggacagcgccaggcagtaccc

SEQ ID NO: 430428 - DNA, 122 bp, Homo sapiens
gagggcgggcgaaagcccggagggggagtgggccagctggagggctggcccttttaaaagcgggtcacatgtccagataaagttcaggttgctatcccgcccccctgaacccttcctattgg

SEQ ID NO: 430429 - DNA, 122 bp, Homo sapiens
cttgaactcatttccagattcaagatccttaagcttttccgggccatttgcaaatcaatgcgagaaccgaggctgagtcgttagcagttacaccaatcaatcttgttcagcgaggagtttgg

SEQ ID NO: 430430 - DNA, 122 bp, Homo sapiens
tggaaatatgggggcccacgtgcatggccacagaacagtggacgaggtcgggcagcaaagcgaccttggatcacacatcgcgcctcttcacgcctcctcacacccctgcctgaaacctgccg

SEQ ID NO: 430431 - DNA, 122 bp, Homo sapiens
cctcctgtccagcagctgaattttgctgccaatttctgagctctgcatggctggatcctccgtaacacctgctcttccttctttttctaccaactcctctaacctcagcactgtttgatctc

SEQ ID NO: 430432 - DNA, 122 bp, Homo sapiens
gcctctcacctgccctttatcatgctcaaagatgactatatcccctcatgccctaagctacgttaccaaagcccctcttttactatttcaaggggtgttaaggagtcatctaacctagatat

SEQ ID NO: 430433 - DNA, 122 bp, Homo sapiens
agggtcagcctccacccggaaccggaggatgcagcgaagacgtctccttgaagtgggatacggatgtgaaccggcccaagtgctcgccggtccgtcaagacgcgctgcccggctgctcccgt

SEQ ID NO: 430434 - DNA, 122 bp, Homo sapiens
agtcattgtcgtcagaacagtcgttgtcgttggaatgctcattgttgttggaacagttgtcgttggaacagtcgtcattggaacagtcgttgtcgttggaacagtggtgctcgttcgaacag

SEQ ID NO: 430435 - DNA, 122 bp, Homo sapiens
tatgctcaagttgaacaccactgcattaggctgtgtgcagccttaccgtttcaccccttccgagaaaaacaatgcctctgatggaaaagctcccacagtttgtgtgtaaaacggaaatggtt

SEQ ID NO: 430436 - DNA, 122 bp, Homo sapiens
tttgggttagtcaatgtctcctggttttcttcgtaccgctctgacagtcggtcaaagtcccgcttcacgttttcctctgtcgcccaacccctcgctctgtacactgaatctcagtggtctta

SEQ ID NO: 430437 - DNA, 122 bp, Homo sapiens
caaaaggcggagtcgctaggcgaaggggccagatctgtgagcccagcgctgactgcgccgcggagaaagccagtgggaacccagacccataggagacccgcgtccccgctcggcctggccag

SEQ ID NO: 430438 - DNA, 122 bp, Homo sapiens
aagtgcacttgaaccttgtcaatgactgtctcctactccgttgctcacttgctcttgtctcggtttaattttgcacagctccagtggaaatttcagtgatctgataatttggaaaataaatg

SEQ ID NO: 430439 - DNA, 122 bp, Homo sapiens
tgaagtgtggcttccaggctcataggaagtgaaggtccgctgtcgggaccttgccagcctcgttgccccagatgtcaggcttccagaggaactctgcagtgcgtgacgaacgtattgttgca

SEQ ID NO: 430440 - DNA, 122 bp, Homo sapiens
tgggtcaggcccgggatgtctggttcccgaaagcgtctgccactgaccaggcggaacacacggggccccctctgcttggccgggggcggctgccatgctggtcccgatggtcagccctggtt

SEQ ID NO: 430441 - DNA, 122 bp, Homo sapiens
ctgtggccgggcacggtggctcacgcctataattccagcacttagggaggacgaggcgggcgaatcacgaggtcaggagttcgacaccagcctggccaacatcgtgaaaccccatctctact

SEQ ID NO: 430442 - DNA, 122 bp, Homo sapiens
tccgagaggggcggcgcgctccgcccccgggccgcgcacgtcggtgctcggcggcgcgcacgcctgcgggagccctctccaggcaacctagtgctgatcgctcgtgccggtgcggccgttaa

SEQ ID NO: 430443 - DNA, 122 bp, Homo sapiens
cgttggagttaaatagacccatactaaggcagggtatgtgccactgggtaaggagagtaacgttcccaacagaaactaacagtgccggccttgccgggcagttaggagaattagatgaaata

SEQ ID NO: 430444 - DNA, 122 bp, Homo sapiens
ggtgtggccagaggaatggagatccacatgggcctagaaggcagcagcccagagcctgcccggctttcaccctgcatcaggtacccactcaccgtccttctcaatccttcctgccaccacaa

SEQ ID NO: 430445 - DNA, 122 bp, Homo sapiens
gagagagatacctcttgggctgttaaaaggtgaatttccttccaaaacattcttaaagtgcgttttgtagaacaccttggtgatgaccctgaggtagaccccagtaaatgagctcacttccc

SEQ ID NO: 430446 - DNA, 122 bp, Homo sapiens
tccaaacattaccaataatttctgaataaaatttcgctccagacagacgaggcgtgcaggcgtgaccgccgtcgccttccgacagcaccgtgcccaccccccggagatggtctcgccctggt

SEQ ID NO: 430447 - DNA, 122 bp, Homo sapiens
actgcggcagaacccatgtgaagacacttaccatgtgccactttggttcaaggcaggaaacgaaccctactttctcagtgagctgcaacttcagagcctcgagcgctcttcctaaccggatc

SEQ ID NO: 430448 - DNA, 122 bp, Homo sapiens
atcttcccactggttgccttccgcctctctcctcggggcttctccaccagccgcctctgccgctgataattgaattgtgagcagcagaggggctgggcattaggtcccaagtttttctgggt

SEQ ID NO: 430449 - DNA, 122 bp, Homo sapiens
tggatcacttactgcattctgtactctagcactgtgtatgcatcactcttccttatgccccgtccaccccaccacctggtctccagactcagcagaacagaggtgactgattccttggaggt

SEQ ID NO: 430450 - DNA, 122 bp, Homo sapiens
ccagtgaaaacaacctgtacgaagcctttgctcaggttctaaaatatgtttgtccttgcacgaattttgtatatttcaaatatttctgtaaaggtttcttcttttctgttagagtgtggtgt

SEQ ID NO: 430451 - DNA, 122 bp, Homo sapiens
ctgccctggctgaggctggagcagtgaccacgaagccacagaagctttgagggaccctggcgtggaggggtggcgggggcgggtggggcggggaggccaagggcttagctggagggcagcgc

SEQ ID NO: 430452 - DNA, 122 bp, Homo sapiens
cttggttaccgcgttacctcggtacccatagcaaccagaaagctgggttctgccactgtccgccggcagagggcgaaaaggagcctgcgaaatgagagagaatggtgatcacaggaaggaaa

SEQ ID NO: 430453 - DNA, 122 bp, Homo sapiens
gaggaagccggttaatgtcctcttctcttgttatttactttgcaaactaccattaggattcggatgcgttccagagaaggctttttatttagcaacatgagaactaggcaacctactttttt

SEQ ID NO: 430454 - DNA, 122 bp, Homo sapiens
gattattcctcctggggtgggggacagataatcctgatcccatttgtgggacacagaaaccgatgccaaggtccaactggcacagaagctgggagcactgggcttcctctgcagaccaagct

SEQ ID NO: 430455 - DNA, 122 bp, Homo sapiens
aggacaactggaagctgctcctggttctgcctggactctgccctaagtgccttttccttccgaatgtattctatagcctttcatcgtaataaaccataaccgtgaatagaacagcttgtcta

SEQ ID NO: 430456 - DNA, 122 bp, Homo sapiens
gagggaggcattcggccagcagcgagaccaagtggcagggccaggggtctgtggaagagccgcttgtcagagcctggtgtggcaggaggctggccgcagggtggcgggtgaggggacagtgg

SEQ ID NO: 430457 - DNA, 122 bp, Homo sapiens
tgaatgctgagaaaaaggcatgcccagtagtcccccttttatctgagatttcactttccacggtttcaggtaacaggtctgtgatctgaaaatattcaatggaaaatcccagaaataaacaa

SEQ ID NO: 430458 - DNA, 122 bp, Homo sapiens
aacacccggaagccgcccttgtcctctccagctgcagcctgattgcccggttttcggccccgtgccccttattggataaagcttcaggccccgtccccagtccgtgagtgacagaagatgtg

SEQ ID NO: 430459 - DNA, 122 bp, Homo sapiens
acagcttgaacagacagcttgaacttctccagactttggcttcaaaggctcattccatttcgttgggctggtattaatcgtgcctttttatttttatatttctgatgtgttgacattttcag

SEQ ID NO: 430460 - DNA, 122 bp, Homo sapiens
catgtgctacctcctgtgtgcacaggtggccgctgtgtccaaccgtgtctttgtgtgtttcgggttgcctgaatgtgcacaggcggaggacatggagggggggatttgagtgcgtgcctgtg

SEQ ID NO: 430461 - DNA, 122 bp, Homo sapiens
ttgaaagacaagtgtgtggtttgatcttttggcttggccttttatatgttggcatacttccggagtcttgcattacttctccctggattcttcccttagggtgggctgtcacctgggagggg

SEQ ID NO: 430462 - DNA, 122 bp, Homo sapiens
acgttcaacactaaccaaggggctgacaccaagcctgatcacacacaggtgcaatgccttcgtgtagtgtactgcagtccttctcccagttttctttcctgctttcccgccccgactttttt

SEQ ID NO: 430463 - DNA, 122 bp, Homo sapiens
acacattggttggctgaacgtgctcattgtaccactgggtcgagttacacaagtccaggtcgatgagatccacacgtgcctccatcagcatagatgatggcctgggggctacagtcagacca

SEQ ID NO: 430464 - DNA, 122 bp, Homo sapiens
ttgcaggaaaaaaaataagcgcctctggctctttaagtttggcctccccctcaaaacccccgcaacggtcccaaaccccttccagggactgggactacggaccctggtccgaccttctcgcg

SEQ ID NO: 430465 - DNA, 122 bp, Homo sapiens
ttaagtttaatataggtcaaacccatcacataacaataatagaattcctgggagagtgtgcgtaaatgctgtttggaaaaaaatcacatgatattttaattgcactggagaagcaggcaagt

SEQ ID NO: 430466 - DNA, 122 bp, Homo sapiens
agatctgcctgttagccttttgcctggcttcccagctattgactggtctccctctacttacggtgcctttggacctgcagacagaagcttttcttccactgtagaaaagtgtcctaaacatg

SEQ ID NO: 430467 - DNA, 122 bp, Homo sapiens
tgacggaacggatacgaccgcagattgcgggagctgtcctctcaatcagcccggcagcggcggcccacaatttacgcgtgtgcaaccctaaccccggcccaagcttgacctacaatttgcgc

SEQ ID NO: 430468 - DNA, 122 bp, Homo sapiens
gaggtcacttccggcgcgacaccttggaatccagggccgtcaattgaggggcgtggcacccgggaaatttaagaggttggaagaacgtcccttcggccttacagaattgcgcttgggtagtc

SEQ ID NO: 430469 - DNA, 122 bp, Homo sapiens
tagactttagtcatagccgcataatattcttttaaggcaaaatttataagaattaaaattcgcaaggccttttattcctggggatcaatgatgagaagcacaattacgatcttattcaggtt

SEQ ID NO: 430470 - DNA, 122 bp, Homo sapiens
gcttttttttaatgtattacctctgtgccttccgtctgtagatcttacaggcatctgcctcggacctcaggagagtagggcagaagctctagctgggtataaattgcacataaccatctccc

SEQ ID NO: 430471 - DNA, 122 bp, Homo sapiens
cgagagccaccgcgccggccggccgccatatggattttgtccagtctttcgatcttccagcgaccagcaaatgtaaacagagcagctcacatgagggaagaagtcgcccaggaaacgtcctc

SEQ ID NO: 430472 - DNA, 122 bp, Homo sapiens
aggaggggcatcctgctttgccaaggcaggccatacaatgtagcagtatctaatcagattcgtggataggtcacaatcctcccctgcgttctccctctcccacctcccccagatgccctggc

SEQ ID NO: 430473 - DNA, 122 bp, Homo sapiens
agaacaaacatgattgattgaagaataaacgtgccctcccaacttaaacagcttccaggccgcctcagtaacgtgaggattgagggaaaatgcctcagcctggctcagacagtgcctcccgt

SEQ ID NO: 430474 - DNA, 122 bp, Homo sapiens
ccctctggggtgtgagcgtaagtgtgtgtgtgtgtatgtgtgtgtgtgtgtgaccatagacgacccatactaatcaggtctcagagtaaatagcagcgcagggcgatctcaatgtaaattgc

SEQ ID NO: 430475 - DNA, 122 bp, Homo sapiens
gtggcttccactaagcaaggatgtcctctgagcaccctgaccctcccgattcccgtgcaccgccccagcctccgctgtcgcctgccctccacctggcgcctccgttatttacttgttcccca

SEQ ID NO: 430476 - DNA, 122 bp, Homo sapiens
cgccaggcgcagctcccggaccctcaggggtctccccgccctaccccaccagcctgggttcggtacctcggggctcagatgtgcagtcagctgttaatgtggcaaaatttggggaagtcctc

SEQ ID NO: 430477 - DNA, 122 bp, Homo sapiens
cttttgggactgtgcaccaccacgagcctgattattggttctttctccaggctcatgcttcgtactcatgcgttccaattaaaattggaaaggcaggaacaactttgtaccatagtgtcagg

SEQ ID NO: 430478 - DNA, 122 bp, Homo sapiens
tgacttccaggttagaaaaaagttacgaggagttagctctactaattgtatctacgttagcgaatggacgaatactatgtcgtgtaagagaagctaaagctagttcctcaaaaggtaactgg

SEQ ID NO: 430479 - DNA, 122 bp, Homo sapiens
gactcgggtcctgtgtggtcgggacaggggtccatgaagccacagcactgatgtccagttcgctgctggacagacccctcgtaggctctcacacctgctttgccccgacaccgtggcctcat

SEQ ID NO: 430480 - DNA, 122 bp, Homo sapiens
tcccattcgccccggtcatttccggagcgtcttccagcccgttccccgccatgacagcgacgtgtgctttgagctcagtccacagcaaagaccaccttggttcttgtcccgccgcaaccaca

SEQ ID NO: 430481 - DNA, 122 bp, Homo sapiens
ggccctccactcagagcaaccagctggtgccgctggctgggcagtgaggggcttagcacccgggccagcagcagcagcagagggtgcgccggatcccccagcactaccggcccgcccgcact

SEQ ID NO: 430482 - DNA, 122 bp, Homo sapiens
atatacactaataggactacttacactctgtaggcatggtaatgattgtttccgttgtagcgtgataatcgtcatcttccaaagagccatcgctgctgtcatccctctggacatcatactga

SEQ ID NO: 430483 - DNA, 122 bp, Homo sapiens
acccctaagcaggtgatggagaagttgttgcccaagagagtccgggaagtcatggtcgcccgaaaaatcaccttctactgggtggataccaccgaatggtctaaggtaaggaaggttactgt

SEQ ID NO: 430484 - DNA, 122 bp, Homo sapiens
gatttgcctaccagggctattttatatgaacgtcttttgtgacttgcttctttcacttaccgtaatgattccaaggcttattcatgctgtagcataaactataactttgttgtgtttcatta

SEQ ID NO: 430485 - DNA, 122 bp, Homo sapiens
cggcatgttgctggccatggctcagcagcacgagggcggcgtgcaggaggtaacggcccgcgcggcgtcggcccacccggcggccttggccacgctccttccgcccttctctgccttcgagg

SEQ ID NO: 430486 - DNA, 122 bp, Homo sapiens
aatccacagggaagctcaattatcctaataggaggatagctgcccttactgagagttaaccgagttaggagccacagcctttacagaaaagatggatgaaagctggagatgaacctgacata

SEQ ID NO: 430487 - DNA, 122 bp, Homo sapiens
ccccgctgccaggcaggctcgaccaatcagaagaggtcttgggcgggcgctgccgtccagcgagccaataggcgggcagtcggagccgggcttgcccgggcatgtgggagctgccggctttc

SEQ ID NO: 430488 - DNA, 122 bp, Homo sapiens
tcgaaagttcctggctcgcctttaatgcagacgaatgggggatgcagcctcattattttccgtggttaggctcgccagcgtggggcctgatgcagcgtgaaatctatcatcattagacccgg

SEQ ID NO: 430489 - DNA, 122 bp, Homo sapiens
gagatctggaaacaggtctgcaaatctggtcactggtctcattgccagtaacgctgtgcgcggttgagggagtgtgttgggagaatagccacgcgttgtctgtcctggaaggaacaagccag

SEQ ID NO: 430490 - DNA, 122 bp, Homo sapiens
taacactcaccgcaaagatctgcagcttcactcctgaagccagcaagaccacgagcccaccgggaggaacgaacaactccaaacgcgctaccttaagagctgtaacactcactgcaaaggtc

SEQ ID NO: 430491 - DNA, 122 bp, Homo sapiens
gtggcagtacgcctccaggctggcgaagaggatgtacaggagccagaggcccaggaagagcgcggtggtggcgagcttgggtccgcgcgggccgcccagctcgccgccgatgtgcggccggc

SEQ ID NO: 430492 - DNA, 122 bp, Homo sapiens
gacaaatgcattcatttgtataacccaaacttctatcaagtatagaacatactatcaccccggaaagtccttcatgctccctaccatttccactttcccagggacaaccaatgttctaattt

SEQ ID NO: 430493 - DNA, 122 bp, Homo sapiens
taggtgagaagtggtaaggggataagccaaggcctgaagaataaagagttactaaggaggcggcattgatcggaactgagaactgattaaatgaagggagaagtaaggttgacacttaagta

SEQ ID NO: 430494 - DNA, 122 bp, Homo sapiens
aagccttcaccagaatttttctttagtctatcaattacttctattgaatcatcaccatcccgtttcttttatgctatctcatctttgctcctttttgtaacaaaactttttttttttttttt

SEQ ID NO: 430495 - DNA, 122 bp, Homo sapiens
acactctagttccttcttctcaactttgtgcccagcgggctggggagctggagcctgggacgggggctcagggctatttcctgggggcactacggaccacagtgaacgacctggcatgctct

SEQ ID NO: 430496 - DNA, 122 bp, Homo sapiens
ctcccctacgttccccgaaggctgggttctgataaaaatggtgtcattgcaagccaaatccgtttgtcctgacctcccttgagccatttcgttggttcttttaaaagtaggcgggggtgggg

SEQ ID NO: 430497 - DNA, 122 bp, Homo sapiens
ggtgtctccgctgcctctctgagaggaagtcccacccagaaaggccagcgtggctgcagacgggcccagcatgttacgagaccccttctcagtaaaatatttttctggtctctcttctacct

SEQ ID NO: 430498 - DNA, 122 bp, Homo sapiens
aattttacgaggtgactttgctgatgggagatttaagagcagatcagctcattttcctgccgacctacttcccagaggttacagactgaagtctggttgtcttccatttgagccttcattct

SEQ ID NO: 430499 - DNA, 122 bp, Homo sapiens
acagcgccacgataattcactccccagcccgccctttgaaaaggtgggccgcctctgcgccgctccccagcaagataaatcatgtactcgaaattaacttccattgagagggagggcaggaa

SEQ ID NO: 430500 - DNA, 122 bp, Homo sapiens
agggaaactgactgggcaagagccaggctcttaggagctgtctgtactttgcttcccatccgtccgctctcccccagcagccaaagtctcctccctccattatattgcaaatcaatgaatcc

SEQ ID NO: 430501 - DNA, 122 bp, Homo sapiens
taatttgcgggctttcgagtttcaatttgcacctttcagacgcaaagcagcgtcccactccggcgttacaatggggcgctgtgacgacagccagggcacgcgcagccccggccgtgggcggc

SEQ ID NO: 430502 - DNA, 122 bp, Homo sapiens
tgcgctctttctcttcttttctccacagatatcgcaaacggcaccagttcaggggggtaccgcccgcctcccagaaccaaagaagtcatcatcaatggccagaccgtgaaacttaaatactg

SEQ ID NO: 430503 - DNA, 122 bp, Homo sapiens
gggctgcaccgcctggcgaatgggagggggactggcaggctctcccttcccaagggaggtcgtcctgtcgccctagactaaacccaggaaggcttttaaaagaagcagagtctccgcggggg

SEQ ID NO: 430504 - DNA, 122 bp, Homo sapiens
gtcacccgcctgcagcgggtccttgcaccatgcgccagactggtgctctgactcgtgtgtcgaggtgggctccagcaccttctgcagggtccctgggcacacgaagactgggcagagtgggc

SEQ ID NO: 430505 - DNA, 122 bp, Homo sapiens
ggtgctggagcccttaaaaacgtacaggcccctgtcattgggggtgaggtacggtctcagcgtcacccggtaggaatcgggtttcagcgtgttggggaggcggtaacgattccacgctttac

SEQ ID NO: 430506 - DNA, 122 bp, Homo sapiens
ggcaattccttattcatcctaggaggctcttaatcagcgtttgttgagtgaataggtgaacgaatgtgggaatgggataaacaggaaataagccctgtgcctgccttaggtaacttagtagc

SEQ ID NO: 430507 - DNA, 122 bp, Homo sapiens
ccgccccacctgccacacccggtggctgccgcccagtgtcaaatgaggttctggaagagccggccctagatgccatctcagcacaacccctgcgcggagaaactgcctccttcattagcctt

SEQ ID NO: 430508 - DNA, 122 bp, Homo sapiens
gcggtggctgtggttggtcggtggctgtggttggtcggtcacgctggggaaatactcttacgggccgctagggggccgagcatctgtgccgctctagggcctggcttccagtatcaagttct

SEQ ID NO: 430509 - DNA, 122 bp, Homo sapiens
caaaaagaaaaaatttacctttagtttcacaaatcccctgggctgcatggggccatgatccgcatctgggggtaaaatatcagacatgattatgttttgttttccttctaattgaaagacta

SEQ ID NO: 430510 - DNA, 122 bp, Homo sapiens
ggactgcatctcccgccgcctgcagcccagacacaatttctcccggagcgcttctaaccgcgcagcggtggcgttccagagactcttcatggcccttgctctcgaggatcccttggagtcgt

SEQ ID NO: 430511 - DNA, 122 bp, Homo sapiens
ctccctgcatggccctgccgggctctggtgagggaagataagagtgtgctccaaggctggcgaggctggggttttcgtctgcacctggtgaaaggactggctcctacatcaccagcttccct

SEQ ID NO: 430512 - DNA, 122 bp, Homo sapiens
aggcctggcggcgctcgtgtgaagaagttaattcaattcgctctgataaccgagttattccgatctggcccctcagccccgcccccagcgaggtcccatcccggcggagactgcggaggcgg

SEQ ID NO: 430513 - DNA, 122 bp, Homo sapiens
cgcttcagggctttgctcagctgcagctggtgacctccagagagggagtctctgatgtcccgctggggtggatgtcctgagaccgggaagggggaagagacccactgaaatcctatctccca

SEQ ID NO: 430514 - DNA, 122 bp, Homo sapiens
ggtgcttcttcatgtgcgccttcaggaaccaggtctggctgaaggcctggccacacacctcgcacgggaactccccggggctcagctcgggcttgccgttctccacgcaggcctcgccgctg

SEQ ID NO: 430515 - DNA, 122 bp, Homo sapiens
cctccatcggtctgggagcgagtggttcgagttcagatgctgggaaccgtcgcttctccccggccgggctcgctgttttctcctccgctcgccgtcatcaagcccggctatgagcagggctt

SEQ ID NO: 430516 - DNA, 122 bp, Homo sapiens
caggggacagcggagtctggaaacccgccgcgcaccgctcctcagctcccgagcccccagcgtctagagagtgggcaggtcgcagactggctccaggcctcgtggacttatctctggccaga

SEQ ID NO: 430517 - DNA, 122 bp, Homo sapiens
ctgaaggctcaaaggctttggaatcataaattaaatcagggagaattgtatatcacaccccgtgcaaacaggcttttgtgaaatcattccaggcctctacaataatatcaataataagttta

SEQ ID NO: 430518 - DNA, 122 bp, Homo sapiens
aggatcacgtggggttgcatgcgagtgtattcccacagggggcttggctggattgactagcggcgggtctgggggcgcggccggattgactagcggcgggtctgggggtgtggccggattga

SEQ ID NO: 430519 - DNA, 122 bp, Homo sapiens
ttctgcgaggatctggaggatcatatttttcctttggcatccctgttagtctgcattcagcgcgccaggatccgggcggcggcggcggcggtggcgatggggcggctggtgctggtgctgcg

SEQ ID NO: 430520 - DNA, 122 bp, Homo sapiens
ttacccagccaggaggagtggggggaagggcagacggtgggggcggtgacctaggcgccccggcttctcatcagagccactcgggccgggcctgtggtccacaggcagcctcgcctcctatc

SEQ ID NO: 430521 - DNA, 122 bp, Homo sapiens
gggggagtttatcatggaagtagctgggcatgttcatattccttggtgtatcgattgccacgttgatctgtaagaatcgatttgctgagatctgtcagatccaagagttggtttgtccttgt

SEQ ID NO: 430522 - DNA, 122 bp, Homo sapiens
ggaacactccccaaggggcgatgaagttcccatcacttggggacgtggcggcgatcctggcgcaagctcagagtgctcatgctgtgggaagaggctgcacggggccccgggagtggccgctg

SEQ ID NO: 430523 - DNA, 122 bp, Homo sapiens
ggaggcgtaagaagcagtcagaacgtctggattggagtcttggtcctgccgcgtgctggccgtggagctcttgctctgtgtctgaactccttttcctcctgagtggatttgggtgttgccag

SEQ ID NO: 430524 - DNA, 122 bp, Homo sapiens
catgaactttgccatcttccaaaatctgaaaaatataaatcatgtgagtagcggcatgaacgaaggcctcagagtacaaaacaccctccatatgaagtaagcaaagacataaatgatagaac

SEQ ID NO: 430525 - DNA, 122 bp, Homo sapiens
ctctggtttctgttttcccattagttggttgaagtacatacaccctcatctatcggaacacggggcttagtaaagtgaaaagaagtaggttctagctcattctagcacttttggaaaattgg

SEQ ID NO: 430526 - DNA, 122 bp, Homo sapiens
tctctcctgacctcagggtgatcagcccacctcggcctcacaaagtgctgggattacaggcgtgagccaccttgcccagcccacatcatacagtttgaaatgaaactttgccacaaccagcc

SEQ ID NO: 430527 - DNA, 122 bp, Homo sapiens
agaccccagaccccacttcccatacagtgcggcgaccaacgtgaaggctgaaacccctaccgctcaattccctgatgtggaggcctccaaacccagcctccgcctggtagctgcctcagcct

SEQ ID NO: 430528 - DNA, 122 bp, Homo sapiens
tgatgctgagcccgggagcctggcggacgttcccggtctctttctggccgtgcgcttccgcgctggctgcagagccggtgctccccgcccctgcctccagccactctttgttttcctgcagc

SEQ ID NO: 430529 - DNA, 122 bp, Homo sapiens
gaaaggggctaatctggcaggggagaacagcgttagtggggaagtgcaaagaggcaggggcgcaggaaagctggggttaggaaactgcaattcactgcaacaaagaggatgaggtcaaatct

SEQ ID NO: 430530 - DNA, 122 bp, Homo sapiens
cgtgggggttagtggggcaagtcaagtaggttacctctagttgtcttatagggaggtggtcgccaggaggtggttgtataaggaagatatctggattaaccacactgcagaactaggaggag

SEQ ID NO: 430531 - DNA, 122 bp, Homo sapiens
cctgacctcaggtgatccacctgcctcccaaagtgctgggattacaggcgtgagccaccacgcctgggccaaaaaatttttttttagaagatgaggaaatcaggccaggtgtggtggctcac

SEQ ID NO: 430532 - DNA, 122 bp, Homo sapiens
ctccccctcgccattcaaaagggctggctcggcactggctccttgcagtcggcgaactgtcggggcgggaggagccgtgagcagtagctgcactcagctgcccgcgcggcaaagaggaaggc

SEQ ID NO: 430533 - DNA, 122 bp, Homo sapiens
ggactggcccaggtcgtggattagcctgcaaaagcatttgggggtcctgggcgggccattcgctgaagtcctaggcttaagtccgaactccccccaggacgaggcaggaggattgcctgagc

SEQ ID NO: 430534 - DNA, 122 bp, Homo sapiens
agcttcctgcctggagcgcagccctgacacccttcctgcaagatacacgttagcaacgaccgttctctctacgccaagctcatttgtctgagcgtatcagcaacacgacacctcgcagttca

SEQ ID NO: 430535 - DNA, 122 bp, Homo sapiens
ctgaggaattaaagaaagaagccatctatgttcttcctggggcatcatttgagctcattacgtggacaccgctgcctctgaagctggttctgccacacgcctgacaggccgatcacagcctg

SEQ ID NO: 430536 - DNA, 122 bp, Homo sapiens
gcagctatggggctcctgaaatatgcagaccctgctggctcccctcaagcccaccgaggccgacttcgtggcctatgctgaggtgtctgcatttgtgaggctcctgcagtggggcggggcag

SEQ ID NO: 430537 - DNA, 122 bp, Homo sapiens
tgtggccgccgcaggacgcccgccgtgcccgggccatgaagtagcggctgctggcggcgccgctgcccaaccgccagccccagccccgcgctgcgctgcccggtcctctcccggcggggtcg

SEQ ID NO: 430538 - DNA, 122 bp, Homo sapiens
ggtccactcctgagctgctgtactcagagaaggccccaatgacttgcttttctattcttgcggcaagaatattgctcaggaccacactgatgctacaatctatgctcattctaacagaaaac

SEQ ID NO: 430539 - DNA, 122 bp, Homo sapiens
accctgtctctactaaaaatacaaaaattagccaggtgtggtggcgtgcacctgtagtcccggctactcgtgaggctgaagcagaagaatcacttgaacctgggaggcagagcttgcagtga

SEQ ID NO: 430540 - DNA, 122 bp, Homo sapiens
cagcagaatcgacagccccagggggcgagcggggtccatggtgcagggggtcgggcggcccgctgggcaaggcgtccgagaaagcgcctggcgggaggaggtgcgcggctttctgctccagg

SEQ ID NO: 430541 - DNA, 122 bp, Homo sapiens
aggtggggcctcaggggcaggtgggaggtgctcgggttaaccgtccgaggcccggagacccgcccgtctagggcgcctgagggaatcccgttcgggcagcggcctcttgttacccgggagga

SEQ ID NO: 430542 - DNA, 122 bp, Homo sapiens
aatcttttcctttctctagccctcacatgggaagctattttagggcaggtgccattgtggcgaggcaggacagctcaggccacagggggtggggtggttgtgcgtgtggaaagaaggggagg

SEQ ID NO: 430543 - DNA, 122 bp, Homo sapiens
gtgggtgaggcaggcctgggccagagcagagggagtggaagggagcgcgagggcgggcggcgggagcacacaccagcagcaggcggatgaaggacagaaggcagtcccacagcgccccctgg

SEQ ID NO: 430544 - DNA, 122 bp, Homo sapiens
gaagactaccatgagcagctgaggtcagacagggactgtagaaacacaggctaaaggacacgaagaattgtgtaattgactaaatgttcagggcacagccaacaaaactcaattgttctgga

SEQ ID NO: 430545 - DNA, 122 bp, Homo sapiens
gcccttgagaagcttcttgggccttgaagatttgggggcgcgtgcctcgagcccccatctcggatgacccttcgggcgtgaacgctccttgtgctaggtctcagggtggcgggctaaggcgt

SEQ ID NO: 430546 - DNA, 122 bp, Homo sapiens
gcgccggggaacccgcccctattctgcccaggctgtttggcagtggggacctgcagaggccgggcatggcccttcgccctttgccagtgatcggtggggaggaatgaagccaggggaagctg

SEQ ID NO: 430547 - DNA, 122 bp, Homo sapiens
caaagaggggagggtggctttgcccgctctcggggccgcaagattgaataagatgaacggcgtcaaataactaatgcgaagtggtagcacattagtcagcacttgacatacctgtccccttc

SEQ ID NO: 430548 - DNA, 122 bp, Homo sapiens
aaggttaaggtcacttaggaggcccaactggctctgtctgctcaaggattcttctggcctcgtctccattttacatgaactgttgcataaataaacacagagtacctgaaacaacggaggtg

SEQ ID NO: 430549 - DNA, 122 bp, Homo sapiens
cacccgaatactgcgcttttccgatgggcttaaaaaatgtcgcaccacgagattatatcccgcacctggcttggagggtcctacgcccacggagtctcgctgattgctagcacagcagtctc

SEQ ID NO: 430550 - DNA, 122 bp, Homo sapiens
ctgcctctcaagaatcagctcaaggtaaggccatcagatgcaatggcctagctgcaagctcgggaagccccatccacttcctgcagagagcacaccgctaggggcatctggattcctggaat

SEQ ID NO: 430551 - DNA, 122 bp, Homo sapiens
ccagggctgggggtggtctcgacacagccagcccggcgcttgggaccccggccgctggcgcggggcctcaggttcctataacagaggaaagcccaggcagaacggcattagagcaggctcgg

SEQ ID NO: 430552 - DNA, 122 bp, Homo sapiens
gccatcatttgttttttatcttttcacacagtgcaagtggtggtcgctctttccttctctcgtagcagcaagccgattctgctattttctatagcagcatacttcaggagtggagagggaga

SEQ ID NO: 430553 - DNA, 122 bp, Homo sapiens
aatacgccttccgattggttggctcgggactgacgtctcagtcctattggttacgagagccgcggttggggcgaggaggcgggagtttggcactggttctgataggacgggtgtttgcgttc

SEQ ID NO: 430554 - DNA, 122 bp, Homo sapiens
gcagagcatgaggctagtgccagagaggaccctcatagttctggcagcacgggcagcagccggcacggttgtgggaccagtggggtccaggtcttatcaaccccactgcccgcccagccttt

SEQ ID NO: 430555 - DNA, 122 bp, Homo sapiens
aaacaggttgagttcagggtgcccggtcagtttgttgcatagagcaaagtttcctgagggcgacgtcgctggcgccgctgcagagtttcaatcagaaggtgacgcgcaggtgcctttacctg

SEQ ID NO: 430556 - DNA, 122 bp, Homo sapiens
tgaacataggaagcctgctgctcagggcccaggtgctgtgggtcaaaggaaacacagacacgtttcataaatctttcttttattccaagtttcaagtatgtgtaagtgtctgtgatgacaca

SEQ ID NO: 430557 - DNA, 122 bp, Homo sapiens
aaacgagtgaaaacagggaatcatgacactttgtttttttacgtgtaaatattcgcaaaacgcccaaactggtaactttgggaacacgggttcacgcagaagaagggctgctgtctggggag

SEQ ID NO: 430558 - DNA, 122 bp, Homo sapiens
agggaagacagcttttagccagggctaagagggccttgtatagcacacgtaggagtgtaacgcttgaaagggctttcactgggagggcaggctatggagagcttttatgcaaagggataagc

SEQ ID NO: 430559 - DNA, 122 bp, Homo sapiens
cacaagaaagcagcagggcggtgtccccttctcccccaacactccccccctccccacccccgactggagagatgagaaaagtgcttgcaaaacggctgagaaaatttgcaacagaggctcac

SEQ ID NO: 430560 - DNA, 122 bp, Homo sapiens
atggtcctatgacatgggatcattatgaatgcaaactaaactgcagatggcttggttaagcgttctaaaatgcatatttcaggtaattcagaagcttaaaatatttaaaacaatatgccaat

SEQ ID NO: 430561 - DNA, 122 bp, Homo sapiens
cttcccccagcgcagcagcaccctcgctacggtcgggaagggcctgtacgcctctagcgacggcagaaccagtagatgcggatgcagtttccggacgagtcatattgcagaagacacatggt

SEQ ID NO: 430562 - DNA, 122 bp, Homo sapiens
gaggagtggggggtcgctttagttttctgagctttctgaagctcaacgccttaactccttcgtttccctttgccccgtggtgtttctcttgactcctctaaccgcaaggggtgaggaagaga

SEQ ID NO: 430563 - DNA, 122 bp, Homo sapiens
gcagagaaccagctggctgcaccagtgaggaaacatggctcccggctccccaacccgcagcgggtcaggtaaaacagataaacaccaatagaatgcagagaaccagctggctgcactaggga

SEQ ID NO: 430564 - DNA, 122 bp, Homo sapiens
caaacccggcagcaagcgttgcgccaattgccgctgacccctccgggaccctacccactgcgagggcacccactggtcacggagccgccgcttccctggccgcctcctccagcatagaaccg

SEQ ID NO: 430565 - DNA, 122 bp, Homo sapiens
gtaagggtctagagctcagtgcaccactcaggcatccctggaaaatagtcttcaagaattcggtgatgtcactacagggcccaaggctcagagacagataagctttgggggaacagaaagaa

SEQ ID NO: 430566 - DNA, 122 bp, Homo sapiens
acacccctgggcttccagaagtcggatggggctaaacgtggagagcaacaagcagggagacgcgacgaataccaggccgagggatctccaaacgcagccaactcctcccggggacacagacc

SEQ ID NO: 430567 - DNA, 122 bp, Homo sapiens
tcctgctctgagtgttgaggagctcacaggtggtaagggatggaaaagcacactgtaaagcgctgtacacaggcaatttatcttttcagaatggcagctcctccggggcaggcccctaggga

SEQ ID NO: 430568 - DNA, 122 bp, Homo sapiens
ggcgaagatctcccaatcgacacgaaccaaggaattcaaactctcctcaggggcaggatacgtctccaggcttaacttgctcagcccactggtgtggcgcaacaggtccttcagggcaccca

SEQ ID NO: 430569 - DNA, 122 bp, Homo sapiens
ggtggcggctgaggcggtggggtaacctctgcatcagttacaggcggcggcggcgtcacgcgccgcctgtgcaaacactatcgcgaggctcctgcgcctccggtagcggcggcggcggcggc

SEQ ID NO: 430570 - DNA, 122 bp, Homo sapiens
agcatttttatccctcctaagagtcccagataggaaacaccaatgagtttaatttgaatgcgacatcaaattaatagtaatagcttccagaaatgctgttagaagggaatctagaacagagc

SEQ ID NO: 430571 - DNA, 122 bp, Homo sapiens
accgggaaactggggggccaggagactcgggggctgggagactcaggcggccgggagactcgggggttgggagactcggggggccgggagacttgggggctgggagactggggggtgggaga

SEQ ID NO: 430572 - DNA, 122 bp, Homo sapiens
tcacttttggatctgcagagcccaggacagcacctggcccgtagtaggtgccgcaagaaacgcttcttgaaggaaggaaggaacgaacccacgagtattgcaggaggattaaatgaaagatc

SEQ ID NO: 430573 - DNA, 122 bp, Homo sapiens
cggcatcagagggagagatgggcatttatggcaccataaatcaagggattaaaccatacacgagcagctggcacatgtgctaataactataattattaatcatgtcaatttcacacccttca

SEQ ID NO: 430574 - DNA, 122 bp, Homo sapiens
aagtggagggagagcttcggacgattttcactggtatctcctcgtgggtattaagggagccgctcggaaactcataaacttgtctaaggcgatggaagtcgtccaggagcccgatgagtcaa

SEQ ID NO: 430575 - DNA, 122 bp, Homo sapiens
acagaacgtgcaatatatttgtaatcacttgaacacaatgaataaaacaatatttgtttccggaggacatataagtgaatggaatttaggtagctttcaccaaactgtgaaaatctatggag

SEQ ID NO: 430576 - DNA, 122 bp, Homo sapiens
ctactaatttcctcctcctgcttctgacttgaaaaacacgagctaaatctgtctgcctaacgcacaaaaccagatgtccactcttcatctcacataattgacatctgcgtcttttatctacg

SEQ ID NO: 430577 - DNA, 122 bp, Homo sapiens
aatatttattgatcttttgtgacacgcgcgtgggtttccatcagcaatgaagtcaacggtcgcggcgctggagcctgcagaactcgcgctctagatctcgcgagatctccgcccagggcttc

SEQ ID NO: 430578 - DNA, 122 bp, Homo sapiens
caatcggaaatctgtccgcgacgccagtctccccacccccagacccggagaaagtctttgcgtttctgctccggaattggccaggttcagccccgctctcagttaccttagctactgttact

SEQ ID NO: 430579 - DNA, 122 bp, Homo sapiens
aggccacacagccagaaagtaggaaagtcaaatcagcctggccccactgcctgtgtgcttcgattcacagttacacgatggctgctgtgcctccagaccttgcatctgctgatcgggcataa

SEQ ID NO: 430580 - DNA, 122 bp, Homo sapiens
ggaggtggtggagctgctgctttggtcgccggctcaacggtgtaaaacggcgagcgggagcgagagaagctgataaatacattcacagggggttgaaagaacaaaaaatgaagcacctctgt

SEQ ID NO: 430581 - DNA, 122 bp, Homo sapiens
agtgggagctcattaatatctcccttcccaccaatggaggtacctgccactgtagcctgtcgacttctggatatcatttctacttcaaaacaagacccaggttttggcctagaatcccagaa

SEQ ID NO: 430582 - DNA, 122 bp, Homo sapiens
gccttgcaagtagggaaatggtgagtctttcccgccccctcatttttgcgacagttgcagcgaaagtcacggcagttggggctggtgtcagctgatttactgcagtggcggcggcggcggca

SEQ ID NO: 430583 - DNA, 122 bp, Homo sapiens
tgttgtgagagtgtggcaggagaaactgagtctgtttattcctgtatacacacagggcttcgtgctgtgtcactccatcgctgggggtacgggttctggcctgggctcctacctcctggagc

SEQ ID NO: 430584 - DNA, 122 bp, Homo sapiens
accgggagagcagtgtcgcgatccctggtagcctggggcgccttccactaaaacccagggcgcgaggtgtcccttccgggtcccgggcgattccggctccggcctagcaacaacaagccccg

SEQ ID NO: 430585 - DNA, 122 bp, Homo sapiens
cggctgggggaggcggagccggggtgggcagtgtggtgtatctctctccaccccgggccgcgctccgggagggaaaagggactgcagaccccctgtccgtgctccctgctgagacgccagcc

SEQ ID NO: 430586 - DNA, 122 bp, Homo sapiens
tcaaaacctgtctcaaggagacctgaacctattttggtcaactgttatgccacaaaaaaacgggagatgccgccgggcgcggtggctcacgcctgtaatcccagcacctttgggaggctgag

SEQ ID NO: 430587 - DNA, 122 bp, Homo sapiens
taaagagccacagaacctttactgccattccatccaaggagctgggacatgttttagccacggactatatgctccctaggatttctgggaattgtagtccttttccgtaaagagtcaccatg

SEQ ID NO: 430588 - DNA, 122 bp, Homo sapiens
agggaaagacattgaccagaaaaagtgtttattcatcaagtctttaaagatacaaaaacacgtgtcttctgtggagctctgagaacaggactccagcaaagcacttttcagccttgtggtct

SEQ ID NO: 430589 - DNA, 122 bp, Homo sapiens
cgttgaggcttttgttatctttccgttctggaggtcagaagtccacttagcctcagtgggcgaagatccagggatcgccagaatgcgttcctttctgaggattctaggggagaaactgttcc

SEQ ID NO: 430590 - DNA, 122 bp, Homo sapiens
actttccctcctgctcagcctactctgggctttcagtgcctcgctgtatctattctatgccgctcattagctttgctctttccgatgtcaatccagaccgccacaattctcccactaacctc

SEQ ID NO: 430591 - DNA, 122 bp, Homo sapiens
gtgacggcggcgttgatgtaccggggcatctacaccgtgcccaacctgctgtcggagcagcgcccggtggacatcccggaggacgagctggagggtgagtgtccgccgggatccccgccccg

SEQ ID NO: 430592 - DNA, 122 bp, Homo sapiens
cagtttctaggggatccagtctttggccggtgggcttaacatgaatggcctagatggccacgtgggaatattgggtgcggcaggctgtggagttaggttcctgagtttgaattcctcctctg

SEQ ID NO: 430593 - DNA, 122 bp, Homo sapiens
ccctggcttttgatcgcagtggagccgcccgtcgtccggaaagagctgttgggtctgagccggcaggcgaaggcgaaagggtctgggactacaaggtttagctcccagccagagcaggaaag

SEQ ID NO: 430594 - DNA, 122 bp, Homo sapiens
ggcaatttctcggaggcctggcacggcggcaccggaagcgggtactggtgccctaaggagcgggagggtcaacgtccggggcctgccctgcactcgccgaggtgatgggttggttagaggag

SEQ ID NO: 430595 - DNA, 122 bp, Homo sapiens
tggcgcgcggcgggcgcgagtcatcaattatgcaaggactcgggcggtgcggggggcgggcgcggggagcgctccaagatggcgcccaccgcagtcccgcccgccgcatcctcggcgccttt

SEQ ID NO: 430596 - DNA, 122 bp, Homo sapiens
tttaaaaaaacaaaaaacaaacaaacaaaaaaacactggcgcttgggtccgtcgctgcctcggtgtccctgtcgggcttcccagcagcggcctagtggaaaagtaaaagatgtctgaatata

SEQ ID NO: 430597 - DNA, 122 bp, Homo sapiens
cccttctaggccctcctgccaacacgacacacaactttcgccctcagtttccctcgcctccgtcaaccgtcgtccaggcggccccgtcagcaaccgccgcccttcccgcccgcgaagaaagc

SEQ ID NO: 430598 - DNA, 122 bp, Homo sapiens
agctctgggtgggcaaaaaataggctttccaaaactcacctagctttccagcccaccccacgtacatgccccacacgtgaagtcttcctttctttcctcgtttctttctccttcccccctcc

SEQ ID NO: 430599 - DNA, 122 bp, Homo sapiens
gaaccctgcgaccctagtgttttccctcttttcctagctcttcgccgtctttcccgatgtcggccaatcaggggaaaaggaaaaggcccaatcagcagaaagtccacagctgaaggacccgg

SEQ ID NO: 430600 - DNA, 122 bp, Homo sapiens
agtctgccccggaatctgaacgccgtcgaccatagagatgagacattctaggaaaagcggcggaggtcggctaagaacgtgtggagtttgaccgcgcaacacccttccccttcttcctcgcc

SEQ ID NO: 430601 - DNA, 122 bp, Homo sapiens
gctgggcccaaatgtgggctctggagggagccgggctggggctggtgctggtgctccctgcgccgcccccgggctgcgtcacctgcgccccagccaatgaagtccccgggtcgcgatcagcc

SEQ ID NO: 430602 - DNA, 122 bp, Homo sapiens
ttcgggcccaatagcagagtcagagccgagacgcatgtcccctgcaccggccaagggtgccgctggggctcgcgccaaggaggcaaaggcggggaccagaggcgccggaggcggcgcaacgc

SEQ ID NO: 430603 - DNA, 122 bp, Homo sapiens
acctcaagtgaggcacccgcctcggcctcccaaagtgctggaattacaggcgtgagctaccgtgcctgccctggaaatcactttcataaacaacctggatgtgagactttcaggatccattt

SEQ ID NO: 430604 - DNA, 122 bp, Homo sapiens
tccatccaagtactaaccaggcctgaccctgcttagcttccgagatcagatgagattgggcgcattcagggtggtatggccatagacacattgggaagagattctgctcaggctctcctgcc

SEQ ID NO: 430605 - DNA, 122 bp, Homo sapiens
gcaggaggatcacttgaggccagaggtttgagaccagcctcttctacattagaaaggctccgtctctacaaaaaaatttcaaaaataaaataaaattttaaaaagccaagtgtagtgataat

SEQ ID NO: 430606 - DNA, 122 bp, Homo sapiens
cagaatgacacggcgcgaccagagaggcgcgggctcgggatgggggctctgcggctgtggcgctgtcctgtgggggtgaaggaagagggacagccccacgtgcctgctagggatgtgggcgg

SEQ ID NO: 430607 - DNA, 122 bp, Homo sapiens
agtacacacccagaatcctgcatattcatacttccgggtaccacatacacagcccttgaacgctccccagcccagtccacttacacaactcttgtatattaccccatgtgcacggaaggaca

SEQ ID NO: 430608 - DNA, 122 bp, Homo sapiens
aacatggtagagaaggtcaaagggaaagcagacacctgtgaagagacaaaactcaaagaacgtgctggtttcaaaacaactcactcttgcgggaattagtccattcctatgggaattaattc

SEQ ID NO: 430609 - DNA, 122 bp, Homo sapiens
tttgaaagatgagctacatttaataagcaggtaaccattctcatctcgcacagaaattaccgtgccttttacgaaaatctattttttaaacatgaatcctctgatcactttttaggatggtt

SEQ ID NO: 430610 - DNA, 122 bp, Homo sapiens
cctagaagctgagtcccgtcccttctccgagcgtggtttcctctcccgccttgcctgcgtcgcaagcagttgtgggagcagaagtgtgtctgtgcatctgtgtctctgtgcaggtattttag

SEQ ID NO: 430611 - DNA, 122 bp, Homo sapiens
gatgagcagaagaggagggggcgtgggctgctggggtctgtgtccctgcacacatgcgcccgataggtccttctgagcctttctgtggctgcacttggggacccttgtggaccatggggtgt

SEQ ID NO: 430612 - DNA, 122 bp, Homo sapiens
gaaggcaatccctgtgaccagcagaggctcatctttgcaggcaagcagcgggaagatggccgcagtctttctgactacaacatccagaaagagtcgaccctgcatctggtcctgcgtcggag

SEQ ID NO: 430613 - DNA, 122 bp, Homo sapiens
acccgggcgccaggctgggcatgatgtgcggggtgggggcctggctggggctccaggaggcgggcgcggcttcctcccgggcctcacgtcgagacgccttccccagggcccgccgctgacct

SEQ ID NO: 430614 - DNA, 122 bp, Homo sapiens
tctgtcacccaagctggagtgcagtggcacaatcatcactcactgaagcttccacatccccgacttgagggagccaatagtttgtcacggtaaaagtcagagagccctgaactggaatctcc

SEQ ID NO: 430615 - DNA, 122 bp, Homo sapiens
cactcatgattctttgggctttggtttcctcatcttttataccggcttaataatgaccaccgtagagttgtcatggaagttaaatgaactcatgtaccataagtgaccaatacaatgattga

SEQ ID NO: 430616 - DNA, 122 bp, Homo sapiens
gggatgacttggcccgctaggtgaagaggagacggaagcttcctggcagtccccgcgtcacgtggggccctacctagtcagcctcctaacgcccctccttacgcatgcgcccattcactgct

SEQ ID NO: 430617 - DNA, 122 bp, Homo sapiens
ccgaaggggccgaggcggctacgcgtgcgcggtgggcggagcgcggctctcctaccttctcgggcagcccagtctttgccatccttgcccagccggtgtggtgcttgtgtgtcacagccttg

SEQ ID NO: 430618 - DNA, 122 bp, Homo sapiens
tcccagcagtaactcactttgtctctccttgtgtctctcttccatgcttccacgccccttcgaccaccttgaaggtttatctgcgggattcttttgggttgaagactctattggcccggggg

SEQ ID NO: 430619 - DNA, 122 bp, Homo sapiens
aggggcccgacactccccagggctgtggggtcccgtcccagcagggagttagttggggggcgtcccaggcagggtctgggggccgggcgcacgcaggcggggtgacgagctgggggggcggg

SEQ ID NO: 430620 - DNA, 122 bp, Homo sapiens
cccattcctcctttccccgctggagccctggatagagggctctctggcctgggaggaggacgctgtccttgtttcaaaagcagagggagctccaagatcaaggctgagtttccctaagtcat

SEQ ID NO: 430621 - DNA, 122 bp, Homo sapiens
tccacccccttcagcctcccaaagtgtggggattacaggtgtgagccactgcactgggcccgataatagttctcagtcggctggaaatctgtgtttaggggcatgcttgcaagggggcttgc

SEQ ID NO: 430622 - DNA, 122 bp, Homo sapiens
ggacaccatatgtacccatgaattccgcctttggaagtgaacttgattgcagcctattttcgtctggaggcggtggattcccggtaggaggcgccttcagtcctcggctcgatcctgtgacg

SEQ ID NO: 430623 - DNA, 122 bp, Homo sapiens
gtacggcagaggccgagagccaaaggccggtggcctctggaaagggccgtgggcagaaggcgggctgctctgagaggctatccttggcagcccccaggagctgggtgaggtggaggcatcag

SEQ ID NO: 430624 - DNA, 122 bp, Homo sapiens
caggcacggcggggagcagtctcgaaggaggctggcgccaggccaagcgccgggccttgacggctggaaccgtggagtaaagtctttgggctgcgcatgcgcgatgcttcgccctgccccac

SEQ ID NO: 430625 - DNA, 122 bp, Homo sapiens
tgttaagaataggtgattctttttgccccaggcaggcaagaacataatgtcatttttgttcgtttgtatttgcactctgaaggagggctgctcctgttggggaatggttttccctctgccag

SEQ ID NO: 430626 - DNA, 122 bp, Homo sapiens
ctcatctggtcttctaatagaagctcctcagatggagatgtttgctggttaaaattgcagcgattttcctcttcatgagagctgcagctactcacaactacctcaggatctgccatctctag

SEQ ID NO: 430627 - DNA, 122 bp, Homo sapiens
gcggtggacgcgggctggtgacggcgcgggctggtgcgagttggaggccacctctggcctcggcggagcctttccccgaccccgtctggggatagaatccggcgcccggtctcccgatgtcg

SEQ ID NO: 430628 - DNA, 122 bp, Homo sapiens
gcctttttctcctgtccacagagaccccgcaaacaagcgcatcagaggatctgggtggtgcgagagcctcctacagcagccaggtacacacaaggcctcagtttttccatctgtgaaatggg

SEQ ID NO: 430629 - DNA, 122 bp, Homo sapiens
gtaccctctcctttcacccgcgtcgtccccatacccttcggcaggagcccgcgaacggtccggtgatttggagcaacctgcgacctgcctgcactggagaccccaccttggtcccccagagc

SEQ ID NO: 430630 - DNA, 122 bp, Homo sapiens
cctcatcttcactctccactgatgaccttgcttcatcagaaaattgtacttaagagaactcgaaccagcacatggaaccccaagctgcacctgtgcccaaaccctctgctttctcccctggg

SEQ ID NO: 430631 - DNA, 122 bp, Homo sapiens
agctgggaccgcaggtgccgccccccacacccggcagcaggtgagtttttgaagactaaccgtcacatgaattaatactgatacttccaatttgaacttaggaatttggaatactttttact

SEQ ID NO: 430632 - DNA, 122 bp, Homo sapiens
cacagggacaaatggaagcagatgattgcacactcagcatcaacatcgctgaatttctatcgcgcgttcgcaggccttgccagaagtgtactcagaagactaaatggtagaagagtctctcg

SEQ ID NO: 430633 - DNA, 122 bp, Homo sapiens
gcggaggcgccggagttgccgccattttaggtcccgaggtgcgccggccgagaaccagagcgcaggcgggctcagtcctggcgccgggccggccccgcccccggggcgcctggcgcccgccc

SEQ ID NO: 430634 - DNA, 122 bp, Homo sapiens
tgcttctgcctccccctctatcagatcggcttcctccagggccagcacctcttggtgctccgcggcttgaactgctgtaggaatcacgtgaagaagggtaccccctttctacagaaggggga

SEQ ID NO: 430635 - DNA, 122 bp, Homo sapiens
tgagattgcgccattgcactctagcctgggcaataagagtgaaactatatatatctttcccgatagcatgaaagctccctaagaccaaaccatgtctgtcttgttcaccactgtactcatga

SEQ ID NO: 430636 - DNA, 122 bp, Homo sapiens
tgggcatatgccctcatacttggctcctaccagatggctgctgcaccctcagctcccacacgcacattctagcaagaagcagcagccaacaggtcaagagcaataaggcagatgcgaacatt

SEQ ID NO: 430637 - DNA, 122 bp, Homo sapiens
gtcgccccacaacctcttgctcccacccctgccccccaccaccaccccacctcctccccacgggaaccgcccgtgccaccttgcgtgtcatctcctagcctaggctacccagaggcctctgg

SEQ ID NO: 430638 - DNA, 122 bp, Homo sapiens
atgctacaagggtaaaggacccgctggcaggagagacggcctttccaaggggaggcggcacggcaggtcgggtggaggctgcacgcagacctgaggctgatggaagggggagatgcaggctt

SEQ ID NO: 430639 - DNA, 122 bp, Homo sapiens
aggcggtcctggctgccatggggatgggcgatgccttcagtgagcacaaagccgactactcgggaatgtcgtcaggctccgggttgtacgcccagaagttcctgcacagttcctttgtggca

SEQ ID NO: 430640 - DNA, 122 bp, Homo sapiens
cgtgaggctggggtcctggcgcgtggttggcagaggcagagacataagacgtgcacgactcgccccacagggccctcagaccccttccttccaaagggtaacctccgcgtgacaggaatgag

SEQ ID NO: 430641 - DNA, 122 bp, Homo sapiens
cccagaaactataatcctgagtcaaatggtgtcgatgttctcattatcctggaagaatcacgctgaccttggctttaaaaggttgaatcacctcggacttgcgaacggcaacgggtctctca

SEQ ID NO: 430642 - DNA, 122 bp, Homo sapiens
gccgggacaggggctgggtgggtgggcatcggcgcagaggtgagggctgcagacggtgggcgggggccgggcgcgcgggcggaggtgcgggaggacgcgctagtgtcgcggcagggctggcc

SEQ ID NO: 430643 - DNA, 122 bp, Homo sapiens
acctggaaccgtggccatctcagaggaaatgggcctgtctcgggactttctcacccgcatcgcggggagggccctctgggctgcctgcagtgcaccgtgtgtccagcagggggcaagcgccc

SEQ ID NO: 430644 - DNA, 122 bp, Homo sapiens
acgactcagtctttcccctccgccaatctcttctccgggaccacaaatcccagaagtcaccgcggccgcccccactgcatgaccttctgggatttgtagtagtcagggccacgcggctgggc

SEQ ID NO: 430645 - DNA, 122 bp, Homo sapiens
gagtcagtcgctactcacgctggggagaccctcttgatgagagttttacaggattactcacgaacggcccaggcaggggccttactagtaagcacgttttgggaagtcctcagggcacgcag

SEQ ID NO: 430646 - DNA, 122 bp, Homo sapiens
gccgccgcgtatcccctccccctctcgcctccgcggattttgccggccggtgcctatgaccggaaagggtctctaacggccgtttcttggttaatcttaaatcctctttattattgcgagct

SEQ ID NO: 430647 - DNA, 122 bp, Homo sapiens
cttcattgcggtcacaccccaagtctgcccttatcatgctagggcctcttcctaactcatcgctgtagcccatgctttatctatagcgcccccgaagcccacctgtccttcaggtcacccaa

SEQ ID NO: 430648 - DNA, 122 bp, Homo sapiens
ctcttggtgcgccgttttttaagcccatctgaaaagcgcagtattcgtgtgggagtgacccgattttccaggtgtcgtccctcacccctttctttgactcagaaagggaactccctgacccc

SEQ ID NO: 430649 - DNA, 122 bp, Homo sapiens
tgcgtgacccgagtcacccccaggcttcggctcagacatggtgactctggtgctggccatcgggagaagccggtccctgagacatgtggcgcttggaaggaacttcaacgtccggtgcaagt

SEQ ID NO: 430650 - DNA, 122 bp, Homo sapiens
acatttgttctgtctgcaggcttggtctcattccaattcctcagccggtcccttctgaggcggcaaatacctcagggtctccagccacaggattggcttggccaattattgcatgtgaccgc

SEQ ID NO: 430651 - DNA, 122 bp, Homo sapiens
gatactcgcagagccaggcggctgtccgtggagcattggtgcagccgtgccttgctgccccggaggtttggctgccgcagtcctctccattcactgagctgtaaatcgaagctgtctacacc

SEQ ID NO: 430652 - DNA, 122 bp, Homo sapiens
acagagcaagactccgtctcaaaaaaaaaaaaaaaaaaaaaaaagtgcagtggagatgaccgaatgaggaaagctaggaattgcagaggatagagcagaacttgcacttaaatttaagaccc

SEQ ID NO: 430653 - DNA, 122 bp, Homo sapiens
tgacttagaattttccaaataggaaccaaaatgttgtaagtgctgtggtagaaatcccaccgggccaatgggaagaaatcagctctgtctgtaagaggagagacaggatggaggccagcaaa

SEQ ID NO: 430654 - DNA, 122 bp, Homo sapiens
ctgtgcccacctgcggagggggtggcagggggtcagtgcgcaactgcagagggtgcggtccgggggtcagtgctcacctgggagggggcagtcgggggccagtgcgcacctggggagggggc

SEQ ID NO: 430655 - DNA, 122 bp, Homo sapiens
gcggcaaatgattatcagacaagcacatcagccatgagagtgttagacagaattaaaaagcgagtgcacacagatgtcaagatagcagctttgtaggtcttggggccccttgtaatagagac

SEQ ID NO: 430656 - DNA, 122 bp, Homo sapiens
gacatcctgccggccccactgaggcagagggggttcgggtggtccctcggctctgaagcccgcagcctccctgtagaatctcggatgagactggcttccagcctcagtctcccttcccgagt

SEQ ID NO: 430657 - DNA, 122 bp, Homo sapiens
tggttacatgttaggtgtcaatgttgcagtctgattctgctatcagctgacaacataaaccgtggacactgacaaagaaaacacataccatcactccaggggtgatattttttaaacttttt

SEQ ID NO: 430658 - DNA, 122 bp, Homo sapiens
ggtgtacttgaaggactgtcgtcctggcagaggcacgctgtctcaccagagccatggtgtcggcggtgcccccgtccccactggagggggcgtctcaggacgagtgggtgggtccacccacc

SEQ ID NO: 430659 - DNA, 122 bp, Homo sapiens
cccggagctgaggccccgcgtgggggcctctggaagggaaccgaggctaaggttgttggccgcgcgacggtgctgggccgggggcggagaccgtggttccctaagtggcgcagaactcccgg

SEQ ID NO: 430660 - DNA, 122 bp, Homo sapiens
ctccttccatcagtcaccatgccctctagattcattcttcacttcatggagtttcctgttcggcatgctcctcggtttttgcaagggctctgccaactacagggccacgtcatgccagtgac

SEQ ID NO: 430661 - DNA, 122 bp, Homo sapiens
cttcgccccttctccgtccggtagcttccaggaggcagccggcatcgtatttcagtacttcgtgtggtgttgatgggatgtgcaacttataaatagctcaaggctgctttaagaaaagcgtt

SEQ ID NO: 430662 - DNA, 122 bp, Homo sapiens
caagttcaccagacctggcatgtccatcctaccatcatctccactgtattggcgaaacatcgcgactatgtccaacatgactttctcacctagagggatattcatctttgctttcaaaaagc

SEQ ID NO: 430663 - DNA, 122 bp, Homo sapiens
agagggctcccggagctgcagctggaggcggaaccgggggtgggaggacacgcaagcccgcggaggacctggtcagctgcttaagccaggagacccaggaagcaggggcagctggtgaagag

SEQ ID NO: 430664 - DNA, 122 bp, Homo sapiens
tgcgatccccacgtcacagacggggatgctgagttgaagatgggggctggccaggctgctcggccgctgacctgtcccccctggccccaccgaccacagccaagtacatgcagaactgcccc

SEQ ID NO: 430665 - DNA, 122 bp, Homo sapiens
gtagagatttggggtttcgcacaagactggaagatgaggctctgcagattcttgatcgtccgttggatgatccgttagcaaccaccccaccccgacgaggaggcgcatcccagggcgcctta

SEQ ID NO: 430666 - DNA, 122 bp, Homo sapiens
gttatctaccttcgccctgccctgtggagtgtggaaagggtgggagtccctgctggctgccgagtcaactctggcattggggcctggctcaggtgtgggctcccgctgctctgggttgggta

SEQ ID NO: 430667 - DNA, 122 bp, Homo sapiens
ggggagggtgcgggcgttgagaggctgcagcagagggcgctgggtcgccagcctgggccgcgtctcccattggtcggggctggggcgctgggctggagagttggtggaaagtgacaagttga

SEQ ID NO: 430668 - DNA, 122 bp, Homo sapiens
cggaagccggccggaagtggcgcgagggagccgtttacggcgggcttctagggccgcttccgcccgccacttacggccgtcgctgggaaactccggaagtgagagcgggaggcaggcgggaa

SEQ ID NO: 430669 - DNA, 122 bp, Homo sapiens
ttttgaaaatgatgtctctgcagttgcacagactgtgttggacctaggtccgtagaacgccgtgatgtcatcattgatgtcagagaatctgcgatgggcctggtgacctttgaaccttaaca

SEQ ID NO: 430670 - DNA, 122 bp, Homo sapiens
tgatggtagctcccttgaggaccattggcctcattacaactcatcagtaaagggttagctcgctcaatttcaaccactcagtctttttgtatcttgacactgaacactgatggttttgaaga

SEQ ID NO: 430671 - DNA, 122 bp, Homo sapiens
tccccagcggtttacagttccttcgtgatctatttggttcattcattcaacaagtatttccgggctgcagcttgggtgcccagccttggggtaggcagtgggactacaaagaggaaaggacc

SEQ ID NO: 430672 - DNA, 122 bp, Homo sapiens
cagccgtattcatattccttgagcactgtttgactgtggcagaaacacagaggggctggccgggttgcttcctgtttgctgctcaccctcaagcccaaccagatgcttggcactcactggct

SEQ ID NO: 430673 - DNA, 122 bp, Homo sapiens
atagcccacagcagggaggactcgtctccttcccagaaagccaggtttcggctgcagggccggagctgatagctcgtgccttcagcacagctgtgtctgtttcgcagctgttaaaggacttg

SEQ ID NO: 430674 - DNA, 122 bp, Homo sapiens
aggggcgggggctatggaagtggcaaaaaaaaaaacggtgttcctgttgtgttacctctgcgagctccatcccatagaaatgcagagctgctaccagcccaagtcctcaggcgggggtggag

SEQ ID NO: 430675 - DNA, 122 bp, Homo sapiens
ggaggggaaaagggtgttgactgtaagctagaattacaaatgtcagggaggggtacataacgctactttgaaaggagaagctaaatactgtaataaggacaaggtgatgaaaagtaagagca

SEQ ID NO: 430676 - DNA, 122 bp, Homo sapiens
tcactatttgggtgactggttcaacagaagcccaaacctcagcattatgcaatatatccacgtaatgaacctgtacatgtacaccatcccccaccatctaaaattaaaaaaacaagtgttct

SEQ ID NO: 430677 - DNA, 122 bp, Homo sapiens
gaagaggacgggggctcacttaagtgggtagccagtcaagagggtggctgggaaactccacgatcgcagggcgggtaaaagcgacccccattcagtggagccgccccggggctgggtttgac

SEQ ID NO: 430678 - DNA, 122 bp, Homo sapiens
gggcggaggaggagctaaagacaggcgctcatcgccatctggtggccaaatagggatgcccgtcacctgccgccaatttttgaggaattcatcccacgttattgggacctttctcgtagcct

SEQ ID NO: 430679 - DNA, 122 bp, Homo sapiens
aaaagtggccaagctggggtgcaagcccagctctgtctgcttctgggattgggactcttgcgctctgggccatgcatttcttagtccagatgagttgtctgattaatgaacatgggtagcag

SEQ ID NO: 430680 - DNA, 122 bp, Homo sapiens
ctgggcaggatgaaggctgagtgcccagattgtgagaaaagggacttaaacttagtgacacggggctcaactttacctggaaaggaatgctgttttcttagtgtgcgtcctctgagggaggg

SEQ ID NO: 430681 - DNA, 122 bp, Homo sapiens
ccatttgtttctacgtctgacatcctcctcttttctctggtccgtgggagcttttgcaagcgggaccaggccccaacacccgaaccagcagcgagagaaggagcccggcatgcggcgactca

SEQ ID NO: 430682 - DNA, 122 bp, Homo sapiens
tggagttttcttcaaatatttaatgcttctttactgttatttatatttaagagtgatacacgaagaggttgattagaggccttgtgagtatgggcatagctgaaggcctactgaacttagtc

SEQ ID NO: 430683 - DNA, 122 bp, Homo sapiens
tctcatgctcactgtcaacattgtaaacctgagggaagcgtgttctcagctcattgtcgacgtaaaccccagggaagcgtgttctcacgctcactatcgacgtaaacctgagggaagcgtgt

SEQ ID NO: 430684 - DNA, 122 bp, Homo sapiens
caaagaattttctgtgaatgcttccgtttggtttttatgtgaagttatttcctttaataccgtaggccacaaagcagtccaaatctccaattgcagattgtacaaaaagagtgtttacaaac

SEQ ID NO: 430685 - DNA, 122 bp, Homo sapiens
tagttttaagtttcgcccaatgaaaaaacaaaaggagagggacagaaggcgggtcggtgacgtaatgcgggttgattggcatgcaggccttggacgtccaggattagccacgcatttcgcca

SEQ ID NO: 430686 - DNA, 122 bp, Homo sapiens
gggtcagggcgcacacggggatgcggcggtcgggggatcagtgcccacctggggagggggcggccgggggtcggtgtgcagctgcagagggggcggccggggtcagtgcgcacctgcggaga

SEQ ID NO: 430687 - DNA, 122 bp, Homo sapiens
ccggggcaagtgacaggggtcacccagcagagctcgcggaaatgggaggcgccttctgggcgcgccctatggggctgctccgggaggtggccgccaggggggcgcagtgtctcggaacgcga

SEQ ID NO: 430688 - DNA, 122 bp, Homo sapiens
tgtggcctcagccaggcggtggtctctgccagatgccaactgttgcccgctggggttcagcgacatgtccgaatgtcccgaggcctctgaggttgttttcttttgccgcagaacaaatcacc

SEQ ID NO: 430689 - DNA, 122 bp, Homo sapiens
cccagggactccaggctgagcagcaggactcaaggccgctcccgagaagtcggtcgtgctcgacaccccggatggcagcctggacgcactcacctcctccaccaccgcgatcagctggtcca

SEQ ID NO: 430690 - DNA, 122 bp, Homo sapiens
cttaaggccaactcaatgtatccacgtaaagagtaccctaaagccagtaaaagattatcacgaacacccagagatgtttatggccatcattccagatcctctttgctttttcttgacttact

SEQ ID NO: 430691 - DNA, 122 bp, Homo sapiens
aagtcctgtaacctgaaacttccctcgcatcctaaccgggacctggtggagaggtctgggcgggggcggagacacccggaggccgaccttccgccgaggcggtgcaggaaggaacgggagag

SEQ ID NO: 430692 - DNA, 122 bp, Homo sapiens
agggataggcctcttaaggcaggactgtagcgctggagctaaagggctttagcaggggtgcgcctgagtgtatgcagagggcgggtcctggcaggacgaattcaccgccactgccagaacga

SEQ ID NO: 430693 - DNA, 122 bp, Homo sapiens
tgttcctgctgcccccacaggagtgcatcagggccctgggacagaacaaggctcacaccccgttccgtgagagcaagctgacacaggtgctgagggactccttcattggggagaactctagg

SEQ ID NO: 430694 - DNA, 122 bp, Homo sapiens
gttgccctgggaaacggaagtggaatcagaaacccagagttggccgggcgcggtggttcacgcctgtaatcccagcactttgggaggccaaggcgggcggatcacgaggtcaggagattgag

SEQ ID NO: 430695 - DNA, 122 bp, Homo sapiens
tcttttctaaaaaacagaaatttatttctcacagttctggaggctggaaattcaagatcacggcaccagcagggttgaggtctggtgaggacttggtctctacttgttgctgcatcctctgg

SEQ ID NO: 430696 - DNA, 122 bp, Homo sapiens
cgtggactgccagggctgcctcctgtcctcctgcttaccgcccttgcccgcccagcaggtcgggcaagtgagtgactcacacacctgggctctgtgtgggcccagcccggggagccagcgta

SEQ ID NO: 430697 - DNA, 122 bp, Homo sapiens
caaagatgactaaaagagtacctgagctcccagtctagggattaccacaaggaagagtgacggatcatgagtggaagggagatgagttaatacaaatggaaaacaggtttcattgtaggaaa

SEQ ID NO: 430698 - DNA, 122 bp, Homo sapiens
atatgattctaaaatttgacattgttatgccacatataagatcatcctgtgggtttcagccgctctccatgacttacctacaaaagggtgtctagttagtgactctcccacttaggctttcc

SEQ ID NO: 430699 - DNA, 122 bp, Homo sapiens
gtcatctgcctttccccaccttctccgtgccttcaaagtcaggctgttgaatgaggaaatcgttcagatgtcgaactgccagctgtggagtgcgagaggccaaggaagggtcgggagggcct

SEQ ID NO: 430700 - DNA, 122 bp, Homo sapiens
tcaagaatgaagcggcggaccctcgtggtgagtgttaacagttcttaaaggcggcgtgtccggagtttgttccttccgatgttcggatgtgttcagaatttcttctttctggtgggttcgtg

SEQ ID NO: 430701 - DNA, 122 bp, Homo sapiens
cagagctcgcgctctcccttcactctcactgcctggtggcggagacagtcaccagcggctcggtctgcggctgagctgaccttgtcctctgcctgttttgagcaaaagcctgacccttcgcg

SEQ ID NO: 430702 - DNA, 122 bp, Homo sapiens
gatggtctcatttgatccacactacagacctggaagatgcctcttttattatcaatcctacgacttaggaagtattaatagataagtacctcatagagttatcttacatataaaaggagagc

SEQ ID NO: 430703 - DNA, 122 bp, Homo sapiens
accgggccagggagaaggcggagagcgagctgaggcggagcgggaagagggaggatagaacggactagggcggattcgcaggaaaggagattgccctctagaggctgtcttagcccaaagcg

SEQ ID NO: 430704 - DNA, 122 bp, Homo sapiens
gtggcgagatctggacggcctgggggcgggggactaagttgaccggaaatggggctaggccgcggccagggacggcagcagatgatggttgaggagtggcctaggaaggcctccctgacggc

SEQ ID NO: 430705 - DNA, 122 bp, Homo sapiens
tgggaagggtaggcgggggcgggctggggggagatgccctggcttgatagagctggggggcgcaccccaccctgagtccctacacagaagccggtttgttcattcctctgccacagggctca

SEQ ID NO: 430706 - DNA, 122 bp, Homo sapiens
gagagaagcctggcctcaccccagacgcctctgagaggaggagcagtcatgggcagcgaccgattccattccagagcagtggaaattcgggaaggaagcccttccagcagctgtgctgtggg

SEQ ID NO: 430707 - DNA, 122 bp, Homo sapiens
ctgttgggctgggcccaggaggagggaggggcgctctttcctggaggtggtccagagcaccgggtggacagccctgggggaaaacttccacgttttgatggaggttatctttgataactcca

SEQ ID NO: 430708 - DNA, 122 bp, Homo sapiens
ttctgatttatagtaagtaggccaaacttgtgccaatgggagtggatcactggaaatgagcggaagtgagggcaaagttgaagaggtcacaaaaatcttagtttaggacatttcatgggtta

SEQ ID NO: 430709 - DNA, 122 bp, Homo sapiens
cggcagttggcggggccgggcttctgccggcggcgggcacgttgctaggagctgccccaacgcctctccgggaagagggcgccaggctcaaaggccctcttgggaactgccgggaagcttaa

SEQ ID NO: 430710 - DNA, 122 bp, Homo sapiens
gggagttccgccgaggcccgccctcgctccaagccccgcccctggccgcccccccggagccggagccccgtggaaaacgccacttcctcgacggaattggcctgccgtctcgccggcgccgc

SEQ ID NO: 430711 - DNA, 122 bp, Homo sapiens
tcctggagctggtgaggccagacccgggcagagggggagcctgtgggcagccactgagggcgtcactccccaccgtcactgccaccgtcactgccacatctggtggccaccgagagtgtcac

SEQ ID NO: 430712 - DNA, 122 bp, Homo sapiens
caggcggttgccctgacaacggggaaccgaccgactcttcccggtagggagaggcgatggcggaattactcctctaatgtcaaggtactgggtaccagttagtacccttgtagtgggataca

SEQ ID NO: 430713 - DNA, 122 bp, Homo sapiens
cccgggcagggaggcaggattctcccggctggggcggtctgagtagctgggtctgagcctcgggctgagaagagtaaattctgcagaaagggccgcgtccgatcggcgcaaacgttcggttc

SEQ ID NO: 430714 - DNA, 122 bp, Homo sapiens
gtggctgaaaagtgaaggcaagagctgatttggcctctgtgctcccctccgcaaggggatcgttttctccaggtacgtgaatagcccggagaggtttggccgttagctgccatctgccaggt

SEQ ID NO: 430715 - DNA, 122 bp, Homo sapiens
cttatgacttgaaaatactttttctcagctgcatttgactacctaaaatcctaccgagcacgctgtttggcatgtcttactcctctgaaatcatcatctactttctaaaaaccagaaaatta

SEQ ID NO: 430716 - DNA, 122 bp, Homo sapiens
ttgagaaaattaaacaacagatataaaagcagtgtgtacagcccggtacacaggaagggccgatgcatgttagttaaatctgaatgtcctctaactggtgacttagaggcatatttctgtga

SEQ ID NO: 430717 - DNA, 122 bp, Homo sapiens
agccgtggggagacgtgttgcttctggccagtggctgtccacgcatgacccagcatctgccggctcctttagccgtgggctccccaggtaggctccgaggccccggagctgcccgctgtggg

SEQ ID NO: 430718 - DNA, 122 bp, Homo sapiens
agtcagttaaacttctttcctttataaattacccagtgtcaggtatatgtttattagcagcgtgaaaacagactaatacagctggcaactcccagaagccagaagagacaaggacagatcct

SEQ ID NO: 430719 - DNA, 122 bp, Homo sapiens
ggagcggatcccggttatcgccttgggcccctcagcccctcagccccggaacccgcgcgccgactggaggctttgcggtcatccttcccacatgacccagggcgtacgcagtgctccgtgtc

SEQ ID NO: 430720 - DNA, 122 bp, Homo sapiens
aatatttcaaatcatatctccttttagcaatatataacagaaaccaaaacctctccttggcgttgctattgtacacgtgttgacagcagagtcttcgaggcctttatcggaatgcactgcag

SEQ ID NO: 430721 - DNA, 122 bp, Homo sapiens
aagagttgactgtcgggtaggagacagagaggccttcaggcagctctagggggagaagtgcggggcccctccaggcttcattcctctgtcatgataggggcttactctgctgctgggccttt

SEQ ID NO: 430722 - DNA, 122 bp, Homo sapiens
ctcagtgttcatgcagataccctcgtggagcgctccacggtttacggaaaactcttgcatcgactgcataaattagaaaatgaagcgtaggaggccagactgcctagagtacagactcagat

SEQ ID NO: 430723 - DNA, 122 bp, Homo sapiens
cagggccaacgtcgaagccgaattcctggtctggggcaccaacgtccaagggggccacatcgatgatgggcaggcgggaggtcttggtggttttgtattcaatcactgtcttgccccaggct

SEQ ID NO: 430724 - DNA, 122 bp, Homo sapiens
gactagcctcagtttcttggagtaccagtggaagtaaaccctcacgccgcgtctgtcgctcggtaaggcactaggagggaaggatgcagtgtcaagactgcgccagctagggtggcggcgcc

SEQ ID NO: 430725 - DNA, 122 bp, Homo sapiens
cagattcaagtctgctttgtgtgtttttcattctgagacccaggctgaagaagcagtggccgcctggggcatccttttcttatggagagtagcaggagtgccagacaggaagcgaaaagaca

SEQ ID NO: 430726 - DNA, 122 bp, Homo sapiens
atggggaagcgaaatgaaaaaggctaaggcacaagcgaaaactattgtcagagatgaaaacggattaggacttagctccaaatgagggatggtgaaagataaagcagaaggatgctctatga

SEQ ID NO: 430727 - DNA, 122 bp, Homo sapiens
tgcgtccctgcccatctgacacatcaactcgcctccctcgcaccgcccctcgcccatacccggcacccccgctcatcctggcaccatcccagtcaccctgacaggacaaacactcgcgcgca

SEQ ID NO: 430728 - DNA, 122 bp, Homo sapiens
atccacaagcacccacttgtcctgggatacagcagagagcaaggaggcacgactggcacccggagatgcccgccaggccccttggcacccagaaggcttggctggaggactcaggagggtgc

SEQ ID NO: 430729 - DNA, 122 bp, Homo sapiens
tgtggattgtggaggaaattccacagctatttaacaactgctattggttcttccacacagcgcctgtagaagagagcacagcatatgttcccaaggcctgagttctggacctacccccacgt

SEQ ID NO: 430730 - DNA, 122 bp, Homo sapiens
acctattcttatccccatccatttgcttctaggattcctgcttaaaccaaatgagtatgtcgactttgcaatcttgacacactattattaacactgttcagctgtgtcattctaaaaaagtt

SEQ ID NO: 430731 - DNA, 122 bp, Homo sapiens
gggcccagcctccgcgatggcagctagggctcagaggctgggccacgtggctgccgccggcgctggttctgttccttcggctttgggctctgacccgggagggcaaatgcgcaggctctaag

SEQ ID NO: 430732 - DNA, 122 bp, Homo sapiens
aatgggctgtgcagctgctcaggagctcatcctgtccaggctgaaggcagcaacggtgcacgtgcgggctccaggctttcagccatcaacattgctaaggcgcatttttgatcagtgagacc

SEQ ID NO: 430733 - DNA, 122 bp, Homo sapiens
gtcaggcacacaacaggtactcaaaaaatgttgatggaatcggcaaataatcgcagagcacgttatcatgggaatctgggctgagctttataaggggagcttgaatttaggagccgagaaga

SEQ ID NO: 430734 - DNA, 122 bp, Homo sapiens
caaaacagggggaggcgccgagaccagctcgagcactagcggattttgagagaaactgaccgcaacctccatcgccttccccctctctttcaacttggatgggctgactctacccgtcggtg

SEQ ID NO: 430735 - DNA, 122 bp, Homo sapiens
ggcctgaggatagtggtgaatttaaaagcccaggcccctgctttcatggaatttatagtccggccgggtgacagacacctatcaaataatcactcaaaacggttatttcaaacaggtagagt

SEQ ID NO: 430736 - DNA, 122 bp, Homo sapiens
ggcagggaaagccgaccagctggcctcagggctcagggcaggctgggcctttggggcagtcgctcaccctgggcccctccgatgggtatccacacagcagatggcagtccccatggcaactc

SEQ ID NO: 430737 - DNA, 122 bp, Homo sapiens
caccgtctgaggcagtcactctggagtcccttcgcacccacgtccggggcacaggaggttcgtgggggaggcagcagcccggccttgtttcccatacactgcgcttcccatcagttccactt

SEQ ID NO: 430738 - DNA, 122 bp, Homo sapiens
gtgtcgccctcccacaagtccctgaccgcaacctggagcagggcagagacttcctccaggcggacgtccagcctggaactggcccgcttgggaggcacaggaatgacagtagctctgacatg

SEQ ID NO: 430739 - DNA, 122 bp, Homo sapiens
aaaggaggaattctctctgcattgaggctattatcgcacattgtgcggtggatatagtcacgcgctgggtcgtagtagcgtgtcgtttatttcagtccagctcactcttggtagaatccctt

SEQ ID NO: 430740 - DNA, 122 bp, Homo sapiens
cttctgagcagccggtgcagaatcctcattctcctcatccacgtgaccttctctggcattcgggcattggctgtacccttccgcttacctatgcccatatgcctgcccttccggcaggccaa

SEQ ID NO: 430741 - DNA, 122 bp, Homo sapiens
tccgggtttgccaggcggccgcgacggcgctgggtaaaatggcagtgctgagcctcgtgtcggagtgagggggactcggaggagagtggggcgctctagccgctcagtccggccgaccgctt

SEQ ID NO: 430742 - DNA, 122 bp, Homo sapiens
ctgcatgtctttccagagagatccatgtaaagtagacagacgccagagattctgcccatccgcgccttgcttttctgcattcaccaagatatattagaaacatgcatcagcaaatacagagc

SEQ ID NO: 430743 - DNA, 122 bp, Homo sapiens
ccaagcggaggagcttttccacaatctgtgcacgcagcagcaccgagaagactaccagctcgtcatggtctgtgatggggactgggagcactgctacctcccctctgccttcagccagcaca

SEQ ID NO: 430744 - DNA, 122 bp, Homo sapiens
cttccccactccccttactcctcccaccttcttgcttgttcctaggtctcagacttgatccgcagtggaaaacccatcaagcctgtcaaggatttgctaaagaagaaccaaatggaaaagtg

SEQ ID NO: 430745 - DNA, 122 bp, Homo sapiens
ctgcggagcagtgattgcggccctcgcgaggccggaagtgggcgggccttgaggcgaggccgccctaggtaggtgtggccgagacagcggggagcggaagtgggcgtggcctggtggcgtgg

SEQ ID NO: 430746 - DNA, 122 bp, Homo sapiens
cggcgggcggagggcgcatgggagcctcttggccctggacctgcccctgcaatccttccgcgggatctcttggaccctctccagggtcctggctctgagacgttgctagaggacaaatccgc

SEQ ID NO: 430747 - DNA, 122 bp, Homo sapiens
ccacctggaagtcctagggggtggggaggaaggggaaagcaggagcccgcctctctcgcccggcaactccgcttcagcgtctccccgccaggcccaagcctattctgctctcgggctgcggc

SEQ ID NO: 430748 - DNA, 122 bp, Homo sapiens
cgattgcaaaagaaaaagcccacaggtactccgtgcgctcaaagccatcatcctcacaaacgtaaagtgatgcactccaaatagagatcaaggaaaacgaatgccacgcaggtcaccaggct

SEQ ID NO: 430749 - DNA, 122 bp, Homo sapiens
ctcgcgcgcccttgcatgtgcgttaccaaacgcagaccgaaatcacagtcgcatctcagccgggctgccatcaccccatgcttccaggaggactcgccccactctatatacacttatcttgg

SEQ ID NO: 430750 - DNA, 122 bp, Homo sapiens
aagatggagctggtgagtgctgaatccatgggccaaggggacgagtccctagtgtagggccgggagggacgaactcatgctcccagagttaagctggagaggaggtagttaaaactctccac

SEQ ID NO: 430751 - DNA, 122 bp, Homo sapiens
aagactggaggatcgctggagcccaggagttccagaccagtcctggcaacagaactagaccgtgtctccaaaaaaaaagagaaagaaaaaatagaaaccttagctgggcttggtggtgcgca

SEQ ID NO: 430752 - DNA, 122 bp, Homo sapiens
ccccgccgcgaccccacaggcagggagccgcatttaggtttcgggcgggcggacgggggacggcccgagtgaggcgtcctccgaaggctgcgggcccgaagccagaactccttcctctccga

SEQ ID NO: 430753 - DNA, 122 bp, Homo sapiens
ttatagaaacgcctcttgcattcatcactgatgtgctcagcaaagacagtcttgaaggtccggaggcctcgaggggtttccacgtagcccacaatgcccacaaccaccatgggtggtgtctc

SEQ ID NO: 430754 - DNA, 122 bp, Homo sapiens
gcccagcccagcgccccggggagcaggtggggccaggaggcgcggctgggaaaagggtggcggaggagggcccggagactcactgtctggattctggtctctctgagtccaggcagggtatg

SEQ ID NO: 430755 - DNA, 122 bp, Homo sapiens
ggcggagcccacctgtgcccggggcgggggcgggggcggggccgggggcgggccaggttccgcgagcaggagagcccagagcccggagcccggtccggggctggcgggggcgcgggcggagg

SEQ ID NO: 430756 - DNA, 122 bp, Homo sapiens
gctccccttcctttctctctctcccttcccggctcctagactgggtctaggcaggagcttcgccatgatgtcaggagggaaggagatgcctctgggcctcgtaccacagcctcagctctctc

SEQ ID NO: 430757 - DNA, 122 bp, Homo sapiens
gtccaagcagagcgaggatgaggggaggcacaggcgggaaggaggacgggcgccccctggcggcccctggtcgtgccgcagcctcacattcccgcgggttcccttctcgccgcgttctctac

SEQ ID NO: 430758 - DNA, 122 bp, Homo sapiens
ctaacccgtccccagcggctcgacgctgtggatcccgccgccctccagccccggctccggcgccgactcctgctcaggctcctgctcctgcccccggccccgcccccggccccggccccggc

SEQ ID NO: 430759 - DNA, 122 bp, Homo sapiens
ggcagtggcagcggctgcggctgcgcagtggcgcgggcgtaggcggagcagcgcgcgccgcggtcagctgactgctgggctggcacgtgacttgttctgtgttcgcttgggtagaggaagcc

SEQ ID NO: 430760 - DNA, 122 bp, Homo sapiens
tcgggaaccccccagtggaagccctcaaattaccgtgaatactcactgctgcctcaaggccgccgcggagcccccaccccgggcagccgccccgcgcaccagctcgggttgcacgcggggga

SEQ ID NO: 430761 - DNA, 122 bp, Homo sapiens
tgactcagtcccatgcccaagtccgcaaattagggattcggctgcctaagggctagagaacgctccccgccccacaggacgcgccccaccccgccccctcctcctgcccctacgcacgcgca

SEQ ID NO: 430762 - DNA, 122 bp, Homo sapiens
gctgacctccgcgcggcgggccgagcccagggctttgtcgcggtacctgcgcccagcccgcgccgcaactctgtgcccagcttttgcaatcttttgttggcagcgctgaccgcaccaagtta

SEQ ID NO: 430763 - DNA, 122 bp, Homo sapiens
ggcgactcggcggtgacggctgctagatccccggctgagcccaggctcaaaggctccaggcgaagttgcagctgcgggttctctccgccccctccgccggcagagccagagccggggctggg

SEQ ID NO: 430764 - DNA, 122 bp, Homo sapiens
accggagcagcgtctgtaggcggccgccttctcttcccgggggatggcgggaaagaggctcggcaactgctgtacactggggcaaagtcagaattcttggggatttttcagagtgttgcgga

SEQ ID NO: 430765 - DNA, 122 bp, Homo sapiens
cctctgggtgctggtcatcggctccctggtggctcgctggctcctggggattcaggagggcggcttctgcttcaggagcacccggcacaatttcaactccatggcgttcccgctgctgggat

SEQ ID NO: 430766 - DNA, 122 bp, Homo sapiens
gggcccgtgaccggcaggtcgccgaggcaggccctacatccagctgaccacagcacaccccggagggcagggcccagactggcccgggtcagtcacctccattcactcacgcctgccgctgg

SEQ ID NO: 430767 - DNA, 122 bp, Homo sapiens
cctaggctctgtccttaaaaagggttgtccttaataagggttgttggaatccaaacaacccgccccttgatccaccttagggtggatgtccaatccccggaggtcttcccaagataattcat

SEQ ID NO: 430768 - DNA, 122 bp, Homo sapiens
gacacctttcaggattgtgccgagactcaagaggcctgtagaagcctacagaactacacccgtgcagaccaaagtccacagattgccaccacgctcgacgattgccaacagtcggaccacag

SEQ ID NO: 430769 - DNA, 122 bp, Homo sapiens
atctctgcctttagaaaaaaattattcttgctatatgtgtgctgggggtggaaaaaaatacgaaacacgaaagaaagaaaatattatctaagacctgttgcggtggctcacacttgtaatcc

SEQ ID NO: 430770 - DNA, 122 bp, Homo sapiens
gccagccggggcgccggccacctcacgccccacgccccacgccctcctcttctgcctcagcgaccagctctaccgaaggcagccatctccttcactgcctgcccctgcgcccgcggcatccc

SEQ ID NO: 430771 - DNA, 122 bp, Homo sapiens
cagcatggcgtggcaaatagctgctgcccttgttcaccgagaaaatcctcctgcccttggcgtacctggctcctaacgagtcccttatttggaaggaattcccccacccccattggtgtgtg

SEQ ID NO: 430772 - DNA, 122 bp, Homo sapiens
cgagcctcttctgcatctctttctgctgtggcaaagtgggttaaacagcgcgcggatttgcgaggaacatagccaacaaatgagatatcaaacgcagcttcccatgtaagagatcagactcc

SEQ ID NO: 430773 - DNA, 122 bp, Homo sapiens
gcccgtacgtggccttgggcacgacaggcagatctgtcagatccccaaaggcctgctcatcgaggagggggtcaggggaatgtggacccgcggccccattccgacggggcactgcctcctcc

SEQ ID NO: 430774 - DNA, 122 bp, Homo sapiens
gagctagtcctccatgggagctgccagctattccttctccacctttgtgattgtggtgaccgctgctgaaattcttggctccaggaacacattagctaatttgctcttcagagatcaggaaa

SEQ ID NO: 430775 - DNA, 122 bp, Homo sapiens
tggcccaggtgctaagcccctcattgccccgggctggcagccggccaggcgctccgagtgcggggcccgccatgcccacagccacccggaactcgtgctggcccgcaagcaccgcgcgcagc

SEQ ID NO: 430776 - DNA, 122 bp, Homo sapiens
cacgtcagttcctggggaatctctgcttccctttctgtgctcccctttcccatgggcccccgcctgccaggggctgcaaagcccgtgcccatcaatccccctgagcaccagcctcgcatggg

SEQ ID NO: 430777 - DNA, 122 bp, Homo sapiens
acttagatagcttcatatgcctgactgagcctgtttccccccagtgaaatttaaaatatgcgggaatttaaccacatttaaccacacccataggcatcaggcatagcactagctcagtttct

SEQ ID NO: 430778 - DNA, 122 bp, Homo sapiens
tggattcaaacctgcttgcagctctaggacgtgtcaggacggcagtcagctccagacccacgtagtcaccaccaaccctgaccgtgtgaagtacaaaggtaaattccggctctacctcaggg

SEQ ID NO: 430779 - DNA, 122 bp, Homo sapiens
tctggtgattcaatttccgccaattagaaagagcccaaccagaacacgcaggcgccttaacgctgagggcataacgaaggtaaagaaggcgtggctactgcccaaatccaagatggctacca

SEQ ID NO: 430780 - DNA, 122 bp, Homo sapiens
ccctaacgtatcccctgttgtcttgcttcttctcttcccacttgcagagcctgctgcccacgtctcttccctgagctgcctgctggggtcatggagctgccaacaaagcctggcaccttcga

SEQ ID NO: 430781 - DNA, 122 bp, Homo sapiens
ctggcagctgagtgcacatgtgaatgattaaaattcttctccccagcagacgtgactccacggttgctgcctctcagtgtcagacaattgtgagtcagatgcgtcatgaagtttctgcttcc

SEQ ID NO: 430782 - DNA, 122 bp, Homo sapiens
ggggtttcactatcttggccaggctggtcttgaattccttaccttgtgatgcacctgcctcggcctcccaaagtgctgggattacaggcgtgagccactgcgcccggccttttcattaattt

SEQ ID NO: 430783 - DNA, 122 bp, Homo sapiens
taaattggtcaggagagacctgggaaccagtaggccattcttagaactccaaaagttggccgggcacgtggtgactcacgcctataatcccagcactttgggaggccgaggcaggtggatca

SEQ ID NO: 430784 - DNA, 122 bp, Homo sapiens
tgggcttggtcagtgtgccctgaagctgagggaaggaggcagaactgtaggttggctgctcgggaggtacaaaagtcataataaggccccgggccaggcgcagtggctcacacctgtaatcc

SEQ ID NO: 430785 - DNA, 122 bp, Homo sapiens
tctacctcgtggcacttgaagaagggagaaacttctagagtggttcgaatggccttcagccggtcccgataggcgatctgggaatagaaagaggaccagatttttaagcgccgcgtggggaa

SEQ ID NO: 430786 - DNA, 122 bp, Homo sapiens
gctcagcagaaggaaccctccaaaaagtcagcgtctgcagccaggtgaagtatgtgtatacgtagcacaacccaggcatgggaatgcctaaagaggcagaggatacagggagctggcccttc

SEQ ID NO: 430787 - DNA, 122 bp, Homo sapiens
acgaatgcggagagaatggacataccgctgttccgaggggcgagggcgcaggctggagcccggccgaggcagccagcagatgcggagttgacaagctgacggctgctccatccttttcctct

SEQ ID NO: 430788 - DNA, 122 bp, Homo sapiens
actcatagcagagagttaattaggtaataagttcagttctgctctatcacagaacatgaacgctggggctgccttacaaaccaggaaactagagcccaggcacggtgaatggtacaactgtg

SEQ ID NO: 430789 - DNA, 122 bp, Homo sapiens
ctttagggtcgatgtgaggattaaatgattcaagttgtgtaaaatgcttaagacactttccgtgtctaagaagattcaataaatgtgggctcccgctagcatatcttctttttttaaaaaaa

SEQ ID NO: 430790 - DNA, 122 bp, Homo sapiens
ctgtgatctgaagagccgtaggcgcagtggcctttcaggacaatgtggtcagctgaataacgaatgtcccccagacatgtccacatcctcatccacagaccctcatatggcagagggaccta

SEQ ID NO: 430791 - DNA, 122 bp, Homo sapiens
accctttaataaattgaggttttgttgattgagacagagtttggctcttgttgcccaggccggagtgcaatggcgcaatcttggctccctgccacctctgcctcctgggttcaagcgattct

SEQ ID NO: 430792 - DNA, 122 bp, Homo sapiens
taagggcagaatttcaggggggtggagggtgcagagtgaaggggagggcattgcagtgcgcgcggtaagggtttctcatctcacctgagtgtggcgttcgattcactggcagcaggaaagac

SEQ ID NO: 430793 - DNA, 122 bp, Homo sapiens
acaaattagaaagatgactttgtactggcactagaatatttctcctgatggatgtatccccgaaacgcaagtgtgaaatacattagtttgaaaacaatcacaagtggtgaaattggtgattc

SEQ ID NO: 430794 - DNA, 122 bp, Homo sapiens
gctaacttaaccaactccaccttgcttctaacctccaagctctccttgttcattcctgggcgtaggctgaattaacatggggagaaacttagtttatagtttaaacaaaaacaaaaacagcc

SEQ ID NO: 430795 - DNA, 122 bp, Homo sapiens
gtacacaggcttcacatggaatctgatttgttcctttatcccagtccctcacccagaacccgaatctagcccttcatgttataaaaagggccagaggtccaaagagggtaagtgccttgtgc

SEQ ID NO: 430796 - DNA, 122 bp, Homo sapiens
cacgttcctacagtggctgaaatggcgtaggcttgagtggccttctctaaagtctcaaaccggttctactttatatgactccatgtgttggcagctcaaaatggcattcattcatgtgttca

SEQ ID NO: 430797 - DNA, 122 bp, Homo sapiens
tattttccacataaggtggctgtcgtttttctcctggcgtctgtggaggcgagtggtctgcgggcagcagctcccagaggcagccttggaattccagctcggactgggcgggaaggcgcagg

SEQ ID NO: 430798 - DNA, 122 bp, Homo sapiens
tactcagatgaacccgtccccttagaggacacaatcccacccccaacccccccaactccacgactgcccatcattgctgttaatccctcaggggagggttcacagctgtttatgaagccaag

SEQ ID NO: 430799 - DNA, 122 bp, Homo sapiens
gtctgggtatttaaggccttggccattgtgacagggaaggggcatggctcagcaggtgggcggggctctactgtgctgtcactcacctttgctgcactttggtcacatttgtgaaataaggt

SEQ ID NO: 430800 - DNA, 122 bp, Homo sapiens
tgcagtttcccaggcggtgtctccggggttgggcacacgagagtagcgggcagaagccaacgcagggttgggatacgtggggccacagccagtctctgtggtccccgggtctaggcttagca

SEQ ID NO: 430801 - DNA, 122 bp, Homo sapiens
caccagaacggcttcgtggggtgctcactatcccctggtcacgcttcggcacggctggcacgggctccctgaggggctgttggagaacccccaggccccctgggtcttgccacggagaccac

SEQ ID NO: 430802 - DNA, 122 bp, Homo sapiens
ttggtttcagacaccagtgaccagaagaagccagttttgcgtgtgaggggtgtgggcccccgctgccttgggcctgctcaccggggtggatggacccccgccgggtcacagcctgctgtcac

SEQ ID NO: 430803 - DNA, 122 bp, Homo sapiens
gcgggcaggaggggacagacagagacctgaaaacagagacagatgaagccagaaaagcttcgaagcaatgacagagacaagagggacagaactgcagctcacagagagtaggggaaccagag

SEQ ID NO: 430804 - DNA, 122 bp, Homo sapiens
gtttagtaaaatgtaccgctgctcttcttgactactcagaagacataaaaggtacagccacggcttggaggctagcccgccctccggaccgcagcaggtgcgaacgccagccctgcggaagg

SEQ ID NO: 430805 - DNA, 122 bp, Homo sapiens
gaaggtctattttcgctcagcttccctctgtctctggtttcatttcctttttcctgatcacgattcaaatacaatagaaggaaatcacatttaaagagacagctgcccggtccccccacctc

SEQ ID NO: 430806 - DNA, 122 bp, Homo sapiens
tgcatcgtaaacgttttttgggaggggccagggtgccaaaaccgctggtgacatcacacgcggtcggcctgttttccagggcggagacggagcggggcctgtccaggaagcacataatcgaa

SEQ ID NO: 430807 - DNA, 122 bp, Homo sapiens
ttaccttctgatcctcaattttctcacttaaaagctgggatagtaatagtatctacctcacgggattactgtgaatattaaatgaggtgatacttgggaaaacacataggaagggcttagta

SEQ ID NO: 430808 - DNA, 122 bp, Homo sapiens
acttgcctgtatgtttttaacctttgcgtctgtctttcagtggaatcaactatgacaagccgctgcctcccatccaggtggcatctctccgtgcagagcgaatcgcaaaagagaaaaaggtc

SEQ ID NO: 430809 - DNA, 122 bp, Homo sapiens
gggtcagtgaggcccgggacgaaggggccagcgctggcagagcccactcatgcctgcccacgccccgagggattccccgaattctgctcccacgtcaactgcccagagggctgacaggcctg

SEQ ID NO: 430810 - DNA, 122 bp, Homo sapiens
gggcgaggaggggcggggcgaggcgaggttggccacgggattgggctaggtgaggccgaccgggagggggcgaatctgggggcggggcgagatgagggtagtccgaggactgagcgagcccg

SEQ ID NO: 430811 - DNA, 122 bp, Homo sapiens
cgccggccagcgcaccaggttcaaggcatttgttgccatcggggactataattgccacgtcggtctgcgtgttaagtgctccaaagaggtggccactgccatccgcggggccattatcctgg

SEQ ID NO: 430812 - DNA, 122 bp, Homo sapiens
ctagacgtagccagtaattttctggaggccacagagcttgttaattatgaagatggaactcgaactaagatctgctcagccctgcagtaatgctgccctcactacaccacagatgctctgcc

SEQ ID NO: 430813 - DNA, 122 bp, Homo sapiens
agagggtagggaatcttgggccgtgagagcgtggcgccgggagctgaccagttctgcatccgagtccccggtgcctgctgctgtcctgggttgttcctttgtggaggttcacctgcgttgct

SEQ ID NO: 430814 - DNA, 122 bp, Homo sapiens
aatatctccagataaaataccaaatgtcccttgggggagaaatcgcccccagttgggaaccgctagtctggagaaactccaagatttaaaggttgtagaagagaaagagctgccagagaaga

SEQ ID NO: 430815 - DNA, 122 bp, Homo sapiens
ctggtcttcttggtcccctctgtcatcttggcaaattgtgtgaagcccttggccagcttgcgagtggccactcaaggctcgggacatcaaagttgaggtgcctctcccacctccccttcccc

SEQ ID NO: 430816 - DNA, 122 bp, Homo sapiens
gtgaggatttccaagaaataaagcaggagaagcatttggcaccgggcctggattcctggacgtggtaaaaccacggcaggatggtttactaagggccaggccccaggacaggccggggcagg

SEQ ID NO: 430817 - DNA, 122 bp, Homo sapiens
ggttgggacgagggagtgttaccatggtaactgggcggcgcttcgtgccctagcctctcccgccaggctggctgcccacaatggttggcccctttgcaggtagtcggctgaccttacactcc

SEQ ID NO: 430818 - DNA, 122 bp, Homo sapiens
atggtgcagcccatcgtatcctacgcaggatgtcaggactaggaggttcgggtcagaatacggggtgcgaaggcgcaggctgagggcaggcctgggatagtggagtacggatccacatccca

SEQ ID NO: 430819 - DNA, 122 bp, Homo sapiens
caagattgggtccagaaaggctgccctgggcttggtcagcacaatcttcgctctcctgggcgcatcgcttctctgcttttacccctcgccagggtggaaccgctctgggtgatctgggagga

SEQ ID NO: 430820 - DNA, 122 bp, Homo sapiens
gtccgctagcccgctgcgatgttgcgcgctgccgcccgcttcgggccccgcctgggccgccgcctcttgtcagccgccgccacccaggccgtgcctgcccccaaccagcagcccgaggtctt

SEQ ID NO: 430821 - DNA, 122 bp, Homo sapiens
aagcatgaagctgacaaaagcacttcccaggacaggacggtgaaggcacaaagcaaggtccgcacaaaagcacacgcccctctcagagctccgcgcgtgcgcacaccgactgtgactctcag

SEQ ID NO: 430822 - DNA, 122 bp, Homo sapiens
ggtaggatccggaatggcaggctaccttccattcttgctggagtctgggagagcaaagcacggtccgatgttgttcccggtggcctggattgccaagttccccattgggagtgcatatccca

SEQ ID NO: 430823 - DNA, 122 bp, Homo sapiens
cccgcagttcttaccattgcctgacgctacacatgcagagggcctagccgagaagccagccggggctgagggaaggacggctccagcgaagccgggaacagcggagggaaggctttggggac

SEQ ID NO: 430824 - DNA, 122 bp, Homo sapiens
ttagagcaatttgccaggtggaatttactttctttcctgagcacagcacgtgtccagccccgtgttcagatctgaagtcaaatgcctggttgtttcccaggccctcccctttccccatatct

SEQ ID NO: 430825 - DNA, 122 bp, Homo sapiens
catccacggccacccccaccccggacatcggccactgttggcattttctccaagaaggcccgtgaggggcttgaaaacagtttgtgtcccattacctgccaacgctgcctgcagtgcactaa

SEQ ID NO: 430826 - DNA, 122 bp, Homo sapiens
gcgagcctgacagacatgggaggctctgcgggccgggagctggacgcggggaggtgagaccggccgggggctggccgacaaacttccttttcttgtttggtttccctttttatctattgcta

SEQ ID NO: 430827 - DNA, 122 bp, Homo sapiens
ttacacagccggtggccccgggcccggagcgggagcccacgacctggcgggcagcggggccgagcagcctctgcggccacttcccaggctctgggctggcgcttcctactggcggccgagcc

SEQ ID NO: 430828 - DNA, 122 bp, Homo sapiens
gagccccaggcattcccgattacgctgcgacctctaaaggcaatgggacagagggttagacgttagcagggctgggtgcccggggttagggttttggccacgttgccgctcaaggtgcccag

SEQ ID NO: 430829 - DNA, 122 bp, Homo sapiens
ctcggcagccgccgcttcctcagacggaactcggggggcgccccttccgccgccccaggccgccttgcaccccaagctgctgcggcagtgacagggaagaagcagacccggccacctctgcc

SEQ ID NO: 430830 - DNA, 122 bp, Homo sapiens
ttcttcacagctgtgaagctacagtcacaacattttagcagagcttttggctggaaaagtcggaaaaaggcactgaattgattttactgttgcatgtgtctttcatcagtggatacgaaaac

SEQ ID NO: 430831 - DNA, 122 bp, Homo sapiens
tgagatctaaggacaacagagtggagagttcattttctttaaggactttcccccatccagcgaaaaaccacacacacccagatttccttagaatacatttctagcatttctctgctggaact

SEQ ID NO: 430832 - DNA, 122 bp, Homo sapiens
cccctgatggagatggagcccaaggcgctgagcgcccgcaagtgccaggtggtgttcttccgcgtgaaggagatcctgcactgccactccatgttccagatcgccctgtcctcccgcgtggc

SEQ ID NO: 430833 - DNA, 122 bp, Homo sapiens
cacatctattaccatctgcgtgctagccgacggaaccagagaaaaactgcaacaggacaacgtaatgatgctgatagctaccttgctaatttgttgtgcagtgttgtctttggctcctaaga

SEQ ID NO: 430834 - DNA, 122 bp, Homo sapiens
taggaggctcttagagacctcggaggaaaccagcccagcgctacgggactggcaagaatgcgaagaggaaccgagagtgaacggagtgcgaggcgccgggtcggaggcgagaggggctcttc

SEQ ID NO: 430835 - DNA, 122 bp, Homo sapiens
gggaagggtaacctggatagggcagtctcctgcttcagaggattcctggcgtccaagcgccgtctcttctctgacatacagtcctgtctcccctgcccgaggctgccggtcgccttcctgaa

SEQ ID NO: 430836 - DNA, 122 bp, Homo sapiens
tcattcagctctacaccttctgaccgcagcaaatgaaccgtggcctgcaaaacacacatgcggtgggaggggtcatgggcggagcacgggcccagcaccagataggaaacacacacgccctt

SEQ ID NO: 430837 - DNA, 122 bp, Homo sapiens
aagtcttcgtgcttctccctcattggccaccgagtcagcgggaggtggggctgctgccgtcgccatcttgttgaggggcgcggccggcttggtgcggacatgtttatgaggggcaacctcta

SEQ ID NO: 430838 - DNA, 122 bp, Homo sapiens
actgagatacgccctggtctcctgcagtacccaaaggcttactagggtggagaaaaactccgccctgatatatctgtggtcagcctggttctctgctcttgaaccctgttttctgttgttta

SEQ ID NO: 430839 - DNA, 122 bp, Homo sapiens
ccccccacggacacacccggccccgagggtcgctggcaaccatgccgacccaaaagcccacgcaccgccctccccgcggcctctccgtctctgaggtgggcaccagcgctcacctggggcgg

SEQ ID NO: 430840 - DNA, 122 bp, Homo sapiens
agcctgcactgcttgaggcttgtgacactgtctgagcccttctccaaatactttcattgtcggaagtcaatatatagtgcctaaaacaaaaaaaaagggagtgtaagcaattgtttaaggct

SEQ ID NO: 430841 - DNA, 122 bp, Homo sapiens
tttatgttcagaaagtgatcctggtttctaggtctttgctctgcaggatcgggatcagagcgtgggaggaggtgggggtggacgtccatccggtgaacagtgaaggcgtttgtgaggtcttt

SEQ ID NO: 430842 - DNA, 122 bp, Homo sapiens
aggtcactgtctcctcgttcctctggggtccctaagtgggaattggggggttatacggagcgggcccctggccagagcttaccttgtgggctgggcagaggcgggggtggagggctctggaa

SEQ ID NO: 430843 - DNA, 122 bp, Homo sapiens
gtctgtcctacaggatgaggcttgaactgtcctgagtgaccagacacccagcctctgcttcgagtgctcagttatgattattgtcctgatttagttaactgttcttcaggggctccaggagg

SEQ ID NO: 430844 - DNA, 122 bp, Homo sapiens
ttcctgtctttcaacctcttccaggaaaattacgggcagaaggaggctgagaaagtggcccgggtgaaggcgctatatgaggagctggatctgccagcagtgttcttgcaatatgaggaaga

SEQ ID NO: 430845 - DNA, 122 bp, Homo sapiens
accaccacccttacccccgggcaggttatgtaatctcagtttcctcctgtgaagtggggtcgggaatattatgttgcatagagcgatgataagaattagcggaaaaaatgcatgtcagtcgc

SEQ ID NO: 430846 - DNA, 122 bp, Homo sapiens
acgtcgagaagaggcccggctctgcctagtggagcttgtctcctttatccttgatccccgcgccttggctccgtctgttcttccccttggctgcacattggaatctcctgggcaactttcca

SEQ ID NO: 430847 - DNA, 122 bp, Homo sapiens
ggagcgcccgcttacgcagttcctcccggggtcggaggccgattcgccgtgtggcgggttcgagtcccgcctcctgactctggcctctagtccctgagtcccgggcgggctgcattcgtcgg

SEQ ID NO: 430848 - DNA, 122 bp, Homo sapiens
cattgttaaaaatgatgtgtgaaatagaatgagtgctatggtgttgaaaactgcagtgtccgttatgagtgccaaaaatctgtcttgaaggcagctacactttgaagtggtctttgaatact

SEQ ID NO: 430849 - DNA, 122 bp, Homo sapiens
agaaggccagctttctcccacctgtggaaaagccagacctgagtgaactcaggaagtctgcggactcctcagagaactggcccagcgaggaggagatcaggcgcttttggaagctgaggcag

SEQ ID NO: 430850 - DNA, 122 bp, Homo sapiens
gattacagcctctgcccggccgccaccccgtctgggaagtggggagcgtctctgcccggccgaccatcgtctgggatgtggggagcccctctgcccggccaccctgtctgggaagcgagggg

SEQ ID NO: 430851 - DNA, 122 bp, Homo sapiens
ggaacctgggggcggtaatggggcgtgaagaagaccctggtactctggcttatctggccccgcccagttgccctacacggagccctgcccctggagtcctggaccttccctagcccggcccc

SEQ ID NO: 430852 - DNA, 122 bp, Homo sapiens
gaacaggaggttaaaaatagacaaccccattgagtttatcgtgagagagaaaggagcgaacgagagagaattgccacgcccctagtatggtgacactaagtgcctgttatttttgctgttat

SEQ ID NO: 430853 - DNA, 122 bp, Homo sapiens
tggatgaaactgttaccataattttaacagcatgaatccacatctgtttaatctagtaaacgtagacagggtgtgaacaagaaggaactaaggtggagtaatgctttctagctaagatacat

SEQ ID NO: 430854 - DNA, 122 bp, Homo sapiens
cggatgacccgcagacagcttgagctcagcgagtgccagtgcgatctccggccttatagacgtctcgccccgaacatcccgtgctcggggcgtggcagcaccggggcctcaaccgtgcaggg

SEQ ID NO: 430855 - DNA, 122 bp, Homo sapiens
actccattctaagattggcgtttttttttgtttttttttttgtaaatagagacaaggtctcgctatgttgcccagcctgggctcgagcagtgctcctgcctcaccctcccaaagtgctggga

SEQ ID NO: 430856 - DNA, 122 bp, Homo sapiens
cccggccccggactgcgcgcatgcgcccgtctttcatacctgcactccggacgcgcccttcgggtctgcactgacaatgacttgcttgcatcctttgtggacaccttatttccccgactcca

SEQ ID NO: 430857 - DNA, 122 bp, Homo sapiens
actctgccagaagctccctagcatcccgctggcctgatctattcattgggagggaactaccgcagagcaagtagatgaattcctgaatctggggtggctcaacttacactgtataagcaagg

SEQ ID NO: 430858 - DNA, 122 bp, Homo sapiens
gatggggccttacctgccaggctgatcccttggagtagttctgaggcatgatgagtcatccgtgtgtgtctcttttgggtaagtctgggtgtttatgcatggtgtctgctggctttgacgct

SEQ ID NO: 430859 - DNA, 122 bp, Homo sapiens
agtgccgggcttccccagctcggcctgcctgggcctttttatttattatttatgccctcccggtcccgacggggctttggtggctcctttgtcggctcccacaggccttggaaggacttgtc

SEQ ID NO: 430860 - DNA, 122 bp, Homo sapiens
ggctggcagatcactcgcggttaggagctggagaccagcccggccaacacagcgaaaccccgtctccaccaaaaaaatacgaaaacctgtcaggtgtggcggcgcaggcctgcaatcgcagg

SEQ ID NO: 430861 - DNA, 122 bp, Homo sapiens
cggctcgcctcttaaagtcggtgctggagaggaatctgattcgtccacagaaggccactccgcccacttggtagatgtggaagtgaaagctacaaaggctggaaataccccactttggtgaa

SEQ ID NO: 430862 - DNA, 122 bp, Homo sapiens
cggtctgactcccaaacccgcttttctccggaggtccccgctcgccaggaccgctccgagcgctacctgcgaaggtaactgccaggagcagcagcgccaagcgcagcaccgacagcgccatc

SEQ ID NO: 430863 - DNA, 122 bp, Homo sapiens
atcctttctcctgaaactggggagccctacgaaggggttccggagaagacgcacggatctcgaatacctccccgcccggctgccactggatggcgcgcgcaacctgcggaaccacagggcga

SEQ ID NO: 430864 - DNA, 122 bp, Homo sapiens
ttttccaccacaccatgttgttcccaaggaaggtggtggtgctgtagaaactgtaaagtgcgcgcacattcaaaatggtcccaagaggaaatgatttcttagattcattcctccctcctgaa

SEQ ID NO: 430865 - DNA, 122 bp, Homo sapiens
tggaatttcacgcaggtatttgcctaatacttacaaaaacagaaacagacttttaaaaagcggttgtaggagagaaaggagacagggcgtcctgtctgggccgccctgcaacaacagccccg

SEQ ID NO: 430866 - DNA, 122 bp, Homo sapiens
agaaaaaaaagaaacggcgagctcagagtgggggccccggcgtccccggccttgcacgtgcgcgcccggatgcctagcccgggccgcctggcgctgcaaactttacactttctttgtgccga

SEQ ID NO: 430867 - DNA, 122 bp, Homo sapiens
aattgttaagttcttctttcaagagcacagcaggggaagggctggggaacttagacatatcgccaagtcagactgagatgagaacttctaatcttacatgtttaataccaaacacaaagcaa

SEQ ID NO: 430868 - DNA, 122 bp, Homo sapiens
gacggtcccgggcgccacctgcgcgtcggtgggaggctggtccacgcccgggtcccccgacgcccactgcaaagggcagtgggaatgacagactgtaaaccctctcgcctgcgtccccttca

SEQ ID NO: 430869 - DNA, 122 bp, Homo sapiens
tggcggccctcgactggagtcggttgagttcctgagggaccccggttctggaaggttcgccgcggagacaagtgagcagtgagtcgcagtgaccctacaagtggttcttttacccgagcggc

SEQ ID NO: 430870 - DNA, 122 bp, Homo sapiens
agttcatgtgcatctgtgcgtgtgtcctctgtgcactcaggcctccaggacttttgtcaccgtccagaatcactggtcttgaccatgacacattctccaagaagctgaactcccgtttttgt

SEQ ID NO: 430871 - DNA, 122 bp, Homo sapiens
cacttgagccaggaagttcaaggctgcagtgagccataatcgcaccattgcactccagcccgggcaacagggtaattaccagctctgcaggcaacgcttgcaggcctttctaaggttctgct

SEQ ID NO: 430872 - DNA, 122 bp, Homo sapiens
catcgatactctgagcttcctgcatgttgttggccagttcccaggttttctgggccataccgctcccggacgccgccatcgccgaggaagcggagaagttgtcgtctctacaaccaagacgc

SEQ ID NO: 430873 - DNA, 122 bp, Homo sapiens
cgctggaaagctcagctgtggagttttagtcgtggctgagtttaggtggccttgcttcaacgccatcagggttttgaacaccgtcggggggaagacgccagtctgctcaagtggtgcccaaa

SEQ ID NO: 430874 - DNA, 122 bp, Homo sapiens
aggcaagtctgcactctggctccccatgtgcaggtgcaagcagtggccccagtggggatccgagggcagttccctggctggtggggtaatgttccaggcaggaacacagctgcctctgctgc

SEQ ID NO: 430875 - DNA, 122 bp, Homo sapiens
taagatgattcggacttggatggacgggaccgtagagtgaatctaagcgccacatctctccgtcgcttcctctggccgtgagggaagagaggtgtccctagggaggtaggctggaccaggaa

SEQ ID NO: 430876 - DNA, 122 bp, Homo sapiens
ccctaatctgccttcaaatccatgtttttacccattgcatgtgattatggaacctgggaccgaggagcaggaggagaacattctaaattctgctcccatcttgtctttacatctcaggtcac

SEQ ID NO: 430877 - DNA, 122 bp, Homo sapiens
tgaggggcctcaggagtggacttggggaaaccgcccgccctgaaaactgactcagcggcgcgttactgaggccgttcctagttggaagagaattaatagcacttgtttgagaattacaagtt

SEQ ID NO: 430878 - DNA, 122 bp, Homo sapiens
attccaatacctgaagcggccacagggtacaggacagggagccctccgacagaaaagagtcgcggcgctaaacaaagcctgatatcactccgcttccataagccggatccccataaactacg

SEQ ID NO: 430879 - DNA, 122 bp, Homo sapiens
ctaaaaaagggagatattaaagatctgtatatgaaacaattgctcctcactccacccacacgcacagaatacaagacagccacaaaattaccaccattaaaaagaaaaaaaaagaaaaatat

SEQ ID NO: 430880 - DNA, 122 bp, Homo sapiens
tcccctccccgccaacggtaaccagcatcttcgttctccaaccagaacagctgtatgcaccggtgtataagcctgccttaagtgctatttttaatcttttttaaaaacaggccttaaaataa

SEQ ID NO: 430881 - DNA, 122 bp, Homo sapiens
aagagagcggggaaacgggtgagcagaaagcctggggaacggagcccagcggcgccaagtcgccccggcgtccacctgcgcccaccagagagcgccgggcccccgcgagcggaacctcgaac

SEQ ID NO: 430882 - DNA, 122 bp, Homo sapiens
tactctgtcaaagagtagaagaaactttctaaatgcttgtcctgccatgacttcctcaaccgcagactcatactccgctctcgtgcagcaccacaaggagagatccctctattcttaattta

SEQ ID NO: 430883 - DNA, 122 bp, Homo sapiens
caaagttactgagagtccaagccttccttacttggaaaacactggacccacttccccagccgtagcctctggtggactcaaaaatgttagggactagagatggaaaacactttatttaggat

SEQ ID NO: 430884 - DNA, 122 bp, Homo sapiens
aacgctgacggagaatcctttaatgaacattaatctttttagaagcgctccatggggagccgtcgctgaccttcagaactgtttatcttgcaaagaaatgctgggatgtaaactacccccac

SEQ ID NO: 430885 - DNA, 122 bp, Homo sapiens
ttcctcaaaagtttgggagctcttcattttagatgtttgctgtcaagttttgcttttccacgaaacaagcagttttcagcccagcaggaagttaaaaacactggtaaatcaacaaatgtttc

SEQ ID NO: 430886 - DNA, 122 bp, Homo sapiens
agtgagacatgaagtaaacctaacaggtcagtgtcattccccaaaccttcgtggttctttcgatccacgcgtgagccaccgaccctccgggcttgtagctttgtgtcgggctgtgagctgcg

SEQ ID NO: 430887 - DNA, 122 bp, Homo sapiens
ctccggcctgggcacctgagccctagaatgagacagcccggcggtcccgcggcgcgctggcgccctcgccctcgcgctccatggtctcgaagagcagccgcaccagcgccggccgtccctgg

SEQ ID NO: 430888 - DNA, 122 bp, Homo sapiens
cgggtagcagtgggcagcgggcggaggtgaggcggagctcccattggtaggagctgtggacggagaggaaggggctctccggagccagctggttgaagaggaaagggatgaagcccaggaca

SEQ ID NO: 430889 - DNA, 122 bp, Homo sapiens
ccacgcctacatgatggacgtgtgcagccccgcagaccaggaccgaggcctgaacatccacgccctcctggcaggtgagtctccgcagcagggccgaagctgaatctgccgggctgcaggct

SEQ ID NO: 430890 - DNA, 122 bp, Homo sapiens
agcgcccgggccatggcggcggcggtggcgggagctgctgtctgagcagcggttgcggaccgagcgaacttggcccaggagcccgggcctagggagaggcgcggcggcggcgggagcgcgaa

SEQ ID NO: 430891 - DNA, 122 bp, Homo sapiens
ttaaaactctttgaacaccagctttgaacaccagtaactcatgtgctaggattgtactagcgactctgcctatttacaaacgttgaccaacttctgcccagaccgccctcacagactatata

SEQ ID NO: 430892 - DNA, 122 bp, Homo sapiens
cgttcccttttcttttcccgtcgcgcggcgcctctgggagttgcagtttgagagcagttccgggcagggaggcgcctttgctgccctcacagacttggcccctagcagtgcagaactacaag

SEQ ID NO: 430893 - DNA, 122 bp, Homo sapiens
gacttttcctcccaagatttagatgtgaagccccttttgcctgtccctgcccttacccctcgggtcagccccaaatcggaggccaccatctctctcacagaagcctgcccctcccaccccat

SEQ ID NO: 430894 - DNA, 122 bp, Homo sapiens
gttacctagttcactggaatctccctaccctggctgttcagtgggggtggatgtaaaacacgcagctttattaaatctttctcagatagtagctgcagaaaggattacagttttctaaggca

SEQ ID NO: 430895 - DNA, 122 bp, Homo sapiens
caggcgtttccaggtatttagaaaggacatatgcagcgtcccaaacgatgcaacccatgccgccagagccatactgctgtagtggtagcaccgtaccatcccacttctccaaaacttgcaca

SEQ ID NO: 430896 - DNA, 122 bp, Homo sapiens
gggggcggctgtcatgtctcctagctctgctatgcgcggtacaggccggctagaggccagcgaggccgcccaggtgagggaagcaagttcctgtgcggcgcttcagcccggcaccgcttttg

SEQ ID NO: 430897 - DNA, 122 bp, Homo sapiens
cagcagatgcagaggggctggcctgttctccttttgatttcctccacaaggtcttctcttcggacatccacctggccaggatgggagaagaaggtggtataagcatcttccattccactgct

SEQ ID NO: 430898 - DNA, 122 bp, Homo sapiens
cgtaaggctcgggtctcatcgggtttctgtacatgctctagacgtgcagcgtcatgctaccgacactccaagtagccggccttgctggcactcctggctttctcccttattccaccccccgc

SEQ ID NO: 430899 - DNA, 122 bp, Homo sapiens
tcagggcggctcaccgagagggcgccgggagcgcccggttggggaacgcgcggctggcggcgtggggaccacccggcaggaccaggcaccagagctgcgtccctgctcgctttctctcgtgg

SEQ ID NO: 430900 - DNA, 122 bp, Homo sapiens
ggcctctttatctgcactgtataaagtcgttggtcacgctgtggagctgctcacggctgccggcgcgatgttattatccattacccgcccggcgcagtcgttggcgcactcccgggcctggt

SEQ ID NO: 430901 - DNA, 122 bp, Homo sapiens
gaaagactgcaaaagaaaggtttatcaccttcattaagtaaccaagccttgtcttaagaacggacaagcagttaacccacaggaagccaccctctgcccaaatcattttcttgggggaatga

SEQ ID NO: 430902 - DNA, 122 bp, Homo sapiens
aaacagcctcacatctgtgagaagggcctgcggtggagcccatactcaggtggaaggaaccgggaggtttctggccagttgcttctgtttttagattgtggtagtgaggtgtgtgcatgtgt

SEQ ID NO: 430903 - DNA, 122 bp, Homo sapiens
gttgcagtggttccgctcagggccaggtggggcaggaggccggacccctgtcttggtggacgctcggccgcagccctctgttgtggcctcagcagcgactccaaccgaatctgtggccagag

SEQ ID NO: 430904 - DNA, 122 bp, Homo sapiens
ctgacctggccacggcacaggcgggggtgcttgtgaggcaccagggctgctcaggacggccgtctgggccttgccctgaagcctgtatctgccttgcaccgaccacgccaccctctgcacca

SEQ ID NO: 430905 - DNA, 122 bp, Homo sapiens
cccggggcagggtcaccctcgcgaccggggcggtcattgccgtattccgtcctgagctgccgctcccccacgatcctcccaccaatcccgggagggccgcgacgtcccttgccgcttgggtg

SEQ ID NO: 430906 - DNA, 122 bp, Homo sapiens
ctccccctctatggatcaggaatatttgttttttctgctcctctcaatatggactgggcccgctcctgattcctcccacccttacctctcaacacaaaccagtacctcctcttcttttgcat

SEQ ID NO: 430907 - DNA, 122 bp, Homo sapiens
acatagttaacataacctttgaaaatccctggccgggcgctgtggctcacgcctgtaatccgggcactttgggaggccgagttgggcggatcacctgaggtcaggagtttgagaccagcctg

SEQ ID NO: 430908 - DNA, 122 bp, Homo sapiens
tcccggcccgagcggccgcggctcagcccagcaagtggctcccggggcccgagacgccgccgcccgcccttcaccgagtccggtgactccgcaagcgccctcaaaacgcctttcctgacaga

SEQ ID NO: 430909 - DNA, 122 bp, Homo sapiens
ccagtagaggtgttgagaggggtcacgaaagggggtccaggagacgaggtcagcgaaacgcgcctggtaaacagttaagggccgcgcagcactacccacaccggctcccgccccgggacctg

SEQ ID NO: 430910 - DNA, 122 bp, Homo sapiens
ttttgaagccagataccctagttttcaatctctgctttactcttgtgctgtctgcctccccggcatcatgcatttggcaggggacatgatatggacctgttacgtgggcccacagcatccag

SEQ ID NO: 430911 - DNA, 122 bp, Homo sapiens
cagggatgtgaggtacatctgggcatggctagctgggaaggaaagaggatggcagagcctcgagccgttgccagggactggttgcgtgtcccagaacgtgccaaaagcctgcctcgtgagca

SEQ ID NO: 430912 - DNA, 122 bp, Homo sapiens
tatttagctttcctctcttttcccctggcatttacgtaaaacccgttactgttacactaccggactaactatgtagctgaaagtctaagataaattgaggaatgatcttaaataaaatctct

SEQ ID NO: 430913 - DNA, 122 bp, Homo sapiens
ctctaggacctcatataagtggaatcatataatatttgtccttttgtgtttggcttatttcgcttagcatgtcttcaaggtttattcatgttgtgttgtaacatatcagaatttccttttca

SEQ ID NO: 430914 - DNA, 122 bp, Homo sapiens
gccccgggtccgcagaggaacttattgcttctgggaagggccccgggtaggtctgtgctgcgcactggatccctttttgcaggccagtctcttcgtggaattctccctgggtgctgaaagct

SEQ ID NO: 430915 - DNA, 122 bp, Homo sapiens
ggtccgagacggtccttaaaggacctcagaaggatacgacaaccatcccatgaggccccacgggaaccagctactcacccaggggcagaaacagcaagagcaagtgccctcagccggcctca

SEQ ID NO: 430916 - DNA, 122 bp, Homo sapiens
gaacccttctgaatccagatatcctgcctccgtgtttgtttcactcacctgcctaatctacgtttcagggaagctgtacaccactaatggtagcaactctccaccctcaagtagccaccatc

SEQ ID NO: 430917 - DNA, 122 bp, Homo sapiens
cagagttatttcaactggggaaagagaccaatagcagaagtacaataccacaacacccctcgccctactctctagctggccttttggcaagtggcctgctccgcgtgggggaagaggggtgg

SEQ ID NO: 430918 - DNA, 122 bp, Homo sapiens
cccccgaaactgtctcgtaatgaatttctgctgtcctcctgggagtggacggccgggtcccgtcccccgggagcatcgctcggctcagcaccttggctcccagtgggggccccgtggagggc

SEQ ID NO: 430919 - DNA, 122 bp, Homo sapiens
tcaagaccatgtatgtctatttgctaaccatgtgttctctgatcatagcacaatgcttggcgtatgaggaatgaactacttagaactatctgcagataggcttataaacttataaagtttca

SEQ ID NO: 430920 - DNA, 122 bp, Homo sapiens
ccctgcgcccatcagacagaccacaccgacgaggccggtaataccatgtgctggtgagaacgtccccgtgtccttcagaggacagtcttgcaggggctggaggagctgggcatacccggcct

SEQ ID NO: 430921 - DNA, 122 bp, Homo sapiens
cctaggctggaatgcagtggggtgatctcggctcactgcaatctctgtctcctgggtttacgtgattctcctgcctcagcctcccaagtagctgggattacaggcatgcaccaccaagcccg

SEQ ID NO: 430922 - DNA, 122 bp, Homo sapiens
tggttttaaagataacaatttaaagtgcaggaatgccacagagaaactttccctttgtcacgtaagagggtcccagaacaccctttaggacccaaatgcattctgtttctaatggaaacagg

SEQ ID NO: 430923 - DNA, 122 bp, Homo sapiens
cgggcgcaaggcgagcaccctgatgagtttggcttcctgctggaccacgtgcaaacggcccgctccctcaaccgctcctcctttacctactaccctgatcccagctttgagccgctggggcc

SEQ ID NO: 430924 - DNA, 122 bp, Homo sapiens
gtcacatctgggttgtcaaggtggcaaggggaatgccagataacacgcccaggatctttccggaagtttatttttattgtacaagtgaacctgctttaaatatgtacagtcattagctaagg

SEQ ID NO: 430925 - DNA, 122 bp, Homo sapiens
tctgaggagccacccgtggaccctgaggccggggaagcacaaatgttccgaaaactgccccgtcagctaggctggggccccaagagaggggcctgaacaagggacatgaggaaggaaacact

SEQ ID NO: 430926 - DNA, 122 bp, Homo sapiens
ctccacagcacgcccaccactgagcagggacaacttggaatcgcggagggagttgaggagcgctctgggtaacacaggcccaaggctagggatttctggagcactttgaagagtacaggaat

SEQ ID NO: 430927 - DNA, 122 bp, Homo sapiens
gatatgggccacaggaatgggtcctgatcggatgtaggagaagaggtcaggcctagggaacggtcttccattagaacaggtagagggaggaggcacaggtttaggcgaaagggaggaggatg

SEQ ID NO: 430928 - DNA, 122 bp, Homo sapiens
tgaaacactagcagaggctgaaaagtcatgatcacctgctggtaatgccccacaaaggcacggaggacacacgtgctgagcagtacctgatgcagcagcctctggagataagactttcccca

SEQ ID NO: 430929 - DNA, 122 bp, Homo sapiens
ctatcctggagaatattctatgtgctgatgaaaaaatgcatattctgtggttgtatagaacgatctgtaaatgttaggcccatttggcctaaagtccagtttaaatccaatgttctttgttg

SEQ ID NO: 430930 - DNA, 122 bp, Homo sapiens
gcatggatggatggtgcagaatattcatactctgtctaatctcaagtggactggagtcaacgcatttttaaatccatctaccttttttagaggcacagcatttaaaaccctgtagttcactc

SEQ ID NO: 430931 - DNA, 122 bp, Homo sapiens
atcacatctctttgcagttcccgcggtgatttcataatatacttacactgctatttccttcgactactagcaggaaaagctattgtttgattgatactccttcctctcccgtttccagtcct

SEQ ID NO: 430932 - DNA, 122 bp, Homo sapiens
ctattcccggccgggtgggtccagcagccgcgggcttcgccccgccgggactcgcggccgcgcctcctctgtaccacagctcccaaggtccccccacggacacacccggccccgagggtcgc

SEQ ID NO: 430933 - DNA, 122 bp, Homo sapiens
gaacattcaaaatggggacgagagagggacagagacagtgagttggattagcatggatttcggaaaggacagtcaagaatctagcctaacttcagtgcagacttacccagggggaaaaaaaa

SEQ ID NO: 430934 - DNA, 122 bp, Homo sapiens
acaccgcaaactcgggttcctcctcccacagcttcctttcggagagggctttctgggggacgcccagacccgtccaaggtcactgagctagcgggtccccggcttcaacaggggtcccttgc

SEQ ID NO: 430935 - DNA, 122 bp, Homo sapiens
ggcgcccctggcgccggcccagcccccacgctcaccgtctcgccccaggaccccgaggcccgcgctgcccactggcccctcggaaagacttgaggcgcaagcacaggctgctgccgcgacac

SEQ ID NO: 430936 - DNA, 122 bp, Homo sapiens
gaggatgagtaaagtgcctggctggacttgctaaaggcaaatttttatataccgaccctgcgcctaacaagggtctatactgcaagcttgtccaacctgtggcccactggccatgtgaggtc

SEQ ID NO: 430937 - DNA, 122 bp, Homo sapiens
ctgcctgaccatgcttggcagaccctggagatctgaccccagactcacaggtagcacagccggcctcatccgctccaccctcgcagtccttctccccgtcgcagcgccacgaggcaggtaca

SEQ ID NO: 430938 - DNA, 122 bp, Homo sapiens
cactttttaaaatgtcatgtgtttttgtaagttttcttaaatcctttggaaatgtgatgacggtgaaaaatccctgaaggcttctatacacctgttggcatggaatattttgcaacccgttt

SEQ ID NO: 430939 - DNA, 122 bp, Homo sapiens
cgggcgtcagatcctgcacgcccgcggggactgggagaggaacctggaggcgctcttcaacgccttcatgaaccccaagatggccaacgtgcaccagaccatgcccatgaggctccggaagc

SEQ ID NO: 430940 - DNA, 122 bp, Homo sapiens
aattgtgggttgaccttgccagggaatttttaagcagaactgactgcagccagtggtcagcgagggccacttcttcctagactttgcataactccaaacagccacaagccaaggacagtcat

SEQ ID NO: 430941 - DNA, 122 bp, Homo sapiens
aaacatgtagttcctcgctaaagtaagaaataagaataaagttcataattctttctgtggcgcaggctctgggtgatctggtttctgtctgcctctgccacctcttctggtgcagctctgct

SEQ ID NO: 430942 - DNA, 122 bp, Homo sapiens
gcggcacccagggccggcgctcctcaccaacgcgctgcagctacgggctcaggagggagccgcagcgtcggaggaggaaagcatttaagaatagcacaaagccttaggctcgaggaagcgtg

SEQ ID NO: 430943 - DNA, 122 bp, Homo sapiens
gtcactccggtgtgctggggatgggttgaaattaaaactttccgggatgcctggtgttcacgctaacagcactgtccactctctcctaaacagtgcttacgtgcccgtctcccctctaaacc

SEQ ID NO: 430944 - DNA, 122 bp, Homo sapiens
aaagactctaagtgcagtccgtatgtctctcaccctttctacccttccctcccccattgccgctccccccaaaaagagaagcttgcagcagattgtagaaggatttgagcctgcagctagag

SEQ ID NO: 430945 - DNA, 122 bp, Homo sapiens
ctagcgccagcccctgtgctactggtgggaaggggaggacacagccctgcctgagccttacgatcctattggtcagtttccctccatggcctgtgtgtgtcaggagcacaaagagtcttcca

SEQ ID NO: 430946 - DNA, 122 bp, Homo sapiens
tggtggagagcagtggcatggtaaccgagggctcaaagtcgggctcgcatcccggggactcgcagagactggactgcgcctgcggcaaggaaggacggagcagagccacctgaggccgagcg

SEQ ID NO: 430947 - DNA, 122 bp, Homo sapiens
cgcagacgtgggccctgcagcgagctctgaaggacgctgcctccctcctgaagttgcagacgtgggccctgcagcgagctctgaatgatgctccttcacagctgcttctgtggccgttgttg

SEQ ID NO: 430948 - DNA, 122 bp, Homo sapiens
ttcttttttccaccctctctaaacttcagtcattctagtgcccgcctcctccactcgcaccgaccaaccagtggtccccattctcgttggcggtccgcctcctgcccgccgggggccaatcc

SEQ ID NO: 430949 - DNA, 122 bp, Homo sapiens
ggctcctgcccatggtcacgtagagagagaggaatccgaggtggattcagtccttcctgccgcctgcacccagggagctcaacagccttgagcgtcccctgccgtcctgtcctcccggcccg

SEQ ID NO: 430950 - DNA, 122 bp, Homo sapiens
caaaaacatggagcatagcagttcttttcctcagagcagcgctagaccccaaatacttttcggtggaaacgagacagccccatggcctgcgctgctgtaagatatctcatccctgcacctca

SEQ ID NO: 430951 - DNA, 122 bp, Homo sapiens
ccgtggctcacatcagctgtgcccaggattctgcattttgtttggagtcacaggaagccacgtagagagcacacggtctgatttacgttcttcaaagatctctctggctttggggtgggtag

SEQ ID NO: 430952 - DNA, 122 bp, Homo sapiens
ggttgggggttagtttgtggcacaaatcactcatccttcctaaagaaagtgaagatggttcgtggaagcttgaaacagattctcaaatcattaagtgataacaaaaaatctattcttgaatt

SEQ ID NO: 430953 - DNA, 122 bp, Homo sapiens
caggagcctctggagcacagctgtcagtggggaaggtgagctgtgcttccagggcagtgacgagatgtgccccactagactggatgcatcacccacagcaagaccatgtatggcccttgagt

SEQ ID NO: 430954 - DNA, 122 bp, Homo sapiens
tcctcctcctgcttggagtgctcgccatggtgacttaatgacttagctgcaggtgactgacgtgctctaccccctgccgtgtttcctgtatgtgcaccgcctcctccttcaagattttaagt

SEQ ID NO: 430955 - DNA, 122 bp, Homo sapiens
tctgaccccttcccttcggcaacctgaacgactcccgccttccacggaagggaccgagcccgtgccaaacaggctgagcgatttgggagtgaggagccatcctaccgctttccccaacctgg

SEQ ID NO: 430956 - DNA, 122 bp, Homo sapiens
ccagcttcccaggggtacagcggctagaatggacctcgaggaggcccctcccaagactcccgtctcccgggttccaccgcagtgggggcagccacagctgcctctgcaatgcttgtaggacc

SEQ ID NO: 430957 - DNA, 122 bp, Homo sapiens
atgaggtgaggccaaagcgagctgcctgtccatcctcatacaccaaccgtatggcaggagcgtggcctgccttgcccagctccccctctaaggacagggagggggacacagagcccctaagc

SEQ ID NO: 430958 - DNA, 122 bp, Homo sapiens
aggggcaacaggctcagaagcctaaaggcatgaatcacgcaagagtgtaaaacagtagagcgaggcagagtctgcagcctgtgactgcatgccctgcttaaagaaacttcaaaaacaaacca

SEQ ID NO: 430959 - DNA, 122 bp, Homo sapiens
ggcggatggatcacttgaggtcaggagttccagacctgcctgaccaacatagtgaaaccccgtctcttctgaaactatgaaaattagcagggcatggtggggcacacctgtaatcccagcta

SEQ ID NO: 430960 - DNA, 122 bp, Homo sapiens
gaggacctctgcactgagattcctaatgttaatctggcctctgccatcactgagggtacccggggcttggccttgctagtgatagccacacagggccgtaaggctcagctgatcatcactgg

SEQ ID NO: 430961 - DNA, 122 bp, Homo sapiens
tggcccgttccatttgaagtggtgtcgcactgcaggatggcgcgtaggtcagcgaggggccgcgggtgcgagggtggtcctgtgagaggagcaggccgtgtttttgctgcagctttcccatg

SEQ ID NO: 430962 - DNA, 122 bp, Homo sapiens
tagcagcatcctggttaatgaaggcccattagaaagtcacgtttcctttaaacacattctcgcgttggtcgttgacgcagcgagccatcctctgatctcctgcgtctgcgtgggcaccgccg

SEQ ID NO: 430963 - DNA, 122 bp, Homo sapiens
tgtttgtgatgcccaaattttaggaggcagaggcaggaggattgcttgaacttaggagttcgagactgctttcggaaacacagtgatacctcgtctattaaaaagaaagcaaactagccgag

SEQ ID NO: 430964 - DNA, 122 bp, Homo sapiens
agatcatgttattcttattcattaatacatgttcaataatttctcaagttctaagtaggacgcatgcagcaggagcagagtacatggaagtaataaatctgaatagagagaagagaaattat

SEQ ID NO: 430965 - DNA, 122 bp, Homo sapiens
gagcagggcgggcagggaatcggcccgcccttcgtcctgcccctcgccctactctgtcaccgcccctgggaagagtggaacccatacttgctggtctgatccatgcacaaggcggggctgct

SEQ ID NO: 430966 - DNA, 122 bp, Homo sapiens
ttctacgcggtatgtctggtctggccaccccaagccccaccggcccctccccgaaagacccggagggcaggaggccaagcacccagtgctccaaccaccctgctggactgtggtggtcctca

SEQ ID NO: 430967 - DNA, 122 bp, Homo sapiens
tttaagggacccacactaccttcccgaagttgaaggcaagcggtgattgtttgtagacggcgctttgtcatgggacctgtgcggttgggaatattgcttttcctttttttggccgtgcacga

SEQ ID NO: 430968 - DNA, 122 bp, Homo sapiens
tcacatggagaagccgagttccacggaggttgagtgaggagccggcatcacacaaggactcggaggggctcctcgagactcgcgggacagagacggcagccccaggtgggaaaggcccaggc

SEQ ID NO: 430969 - DNA, 122 bp, Homo sapiens
ctgtgagaaacactgggcgaatacggagatgtgcacccggctgagcaggacccaggaaaacgccagcgcgctccgagcacaccttgaattcctacgggctctcagctcccgggagctgcaga

SEQ ID NO: 430970 - DNA, 122 bp, Homo sapiens
ctcgtcctaaacaggcattctgaaaagcactggctcccccgaccctgtgagggcccatcacgcgcggcggcttttgcaggccgcggccccgagggcttcctggaggcggcgacggcggcggc

SEQ ID NO: 430971 - DNA, 122 bp, Homo sapiens
agagccatctgtcctccctcccttcctgcctccagcagccgctgtgccccgggggcctagcgtgcactgtcagcagcagggagtaggccagacaggcaaacagacaactccagagccatgcg

SEQ ID NO: 430972 - DNA, 122 bp, Homo sapiens
accaggactggccctgagatgagggttggccccgccatctgcccgggctcccggcacacccggtgctctgggcagctccagtgctcagagaagcctccccctgggtgtgtgggggccaaatc

SEQ ID NO: 430973 - DNA, 122 bp, Homo sapiens
gtgtgaattgatgaccaaggcatggcagagcctctctcatctttataatcagttcagcggcggcctccactacagggaactcccagccagtcccgaggcctagggacatccagggagaaacg

SEQ ID NO: 430974 - DNA, 122 bp, Homo sapiens
ggggctgtctggtgtgggggccatctggcatggaagctgtctggcgtggggactctctggcgtgggggccatctggcgtggatgccgtccgatgtggggactgtccagcgtggaagctgtct

SEQ ID NO: 430975 - DNA, 122 bp, Homo sapiens
tgtctgcaattcatcaatcagcctgctcacctgaaggggttaaattacaagagttgttagcgagaagtaattgttgatgtcacacctattagatttttgagtacctagcttgatggggggaa

SEQ ID NO: 430976 - DNA, 122 bp, Homo sapiens
ttatagcttctcaagaccccaggggatctgggactaaacagtgaaagattaattaggtagcggaagccactaaggcagtgagtcttagttagagaactttggtttagacaatggttctcaaa

SEQ ID NO: 430977 - DNA, 122 bp, Homo sapiens
cctcatggggaatgtgcttggagcccctcagaagctggcttgctgtggctggctttttgccgcttcagaacacaggccctaacagccttgttctcctgcctctgtctgtcatagaaatgagg

SEQ ID NO: 430978 - DNA, 122 bp, Homo sapiens
gtcagattgtagggtctggaaatttctcactcaccaagtacaaccttcaacccacatacccgctgagactaagtacagctgtcaccctgagcaaggacactcacactctgttacagctgcag

SEQ ID NO: 430979 - DNA, 122 bp, Homo sapiens
ccgcaagctcttccccgggccgggcgctgggtggaggcagtcttaggatccacagtcttgcgcgcccccggctcccgggcccggcagacggcccccgcacgccgatctgtctgtcccaggga

SEQ ID NO: 430980 - DNA, 122 bp, Homo sapiens
aggttgcagtgagccagaccaagccagtgcactccaccctgggcaacagagtgagactcccgtctcaaaaacaaaaaggagggtcacactagatggtctctaagggtcccttaaggctgaga

SEQ ID NO: 430981 - DNA, 122 bp, Homo sapiens
gatatagtcactgtaatggtgctattaacaaacagtcaacaccattgtattttttaacttcgtgttctgtatctcctcagccatgtatcttaaatatattttgtcatcataatctttatggt

SEQ ID NO: 430982 - DNA, 122 bp, Homo sapiens
aggtgccgcgagatcagctgcctgctgagtaagatcagcaggctgtggctgattttgtgccgcagggacggcaggtattggaggttgtaaaattacaggaaattgccaggcgttgggatccc

SEQ ID NO: 430983 - DNA, 122 bp, Homo sapiens
gttttcttttttcttgagacagaattttgctcttgttgcccaggctggagtacaatggcacgatctcggctcaccacaacctccacctccggggttcaagcagttctgcctccgcctcccaa

SEQ ID NO: 430984 - DNA, 122 bp, Homo sapiens
agcgcagctttaatacctgagctcgaaggccccgctgtgctcgccgacccccgtacctcgcggccgggcccttgggacccacagcatccttgtgaggcccggaggcctgtccagcccgactg

SEQ ID NO: 430985 - DNA, 122 bp, Homo sapiens
taattgaccacttgactaatattttgcccttcagcttctctcacctttaatcatcctaaacgctatttgtcttatagtaagatatcagaaaataattgtaaatgtaagccacaggtaacaat

SEQ ID NO: 430986 - DNA, 122 bp, Homo sapiens
tcttgtccacagaccttgaggtcatcagacatcttgaatgctcccgagcccaggagcgagcgtttctgagctttgacggagcagcagtggggctgccgggccctagggggagcaaatggtcc

SEQ ID NO: 430987 - DNA, 122 bp, Homo sapiens
acgcccacctgtcatgcggccctggaaactgtgagtttggggattgttgtgtccactaaccggactcagaagggacttccctgctcggctggctttcggtttctctgctcacctccggataa

SEQ ID NO: 430988 - DNA, 122 bp, Homo sapiens
gctctgtaacactccgtccagctctcgcactctcagatgcaaacttccacacaaactcctcggctcgccttgtcccgcgggactagcatatcaagccttccgggacacaccgtgcgatgata

SEQ ID NO: 430989 - DNA, 122 bp, Homo sapiens
aaatataaaatcatatggtatggaggtcacctataaacttttcagcttgttgctaaataacgtatgagtatggaaaatgcactttttttattttattattttattttattttttgagacaca

SEQ ID NO: 430990 - DNA, 122 bp, Homo sapiens
ctccctaattctaataaattgccttattttacagactctaaaggacttggactggcctaccgagtcaactgcaaaagatttgtgatgattatttcttttaagaagcatttgaagtgtattcc

SEQ ID NO: 430991 - DNA, 122 bp, Homo sapiens
acggtggaaatcacaggtatggcgtgtctactgggggaatgcactccttctagccatctccgtcatgatctgtggctgtttggtccatgaataaggtgttgggagactgtgaatctcttctt

SEQ ID NO: 430992 - DNA, 122 bp, Homo sapiens
acaaagacaggaagagagcgtcagcatccgaaagaccggaaataagcactggccggaaaccgtggtgttccgcccaatgccttgtgggagttgtagttcttggagaagccccacctttccct

SEQ ID NO: 430993 - DNA, 122 bp, Homo sapiens
acaacccatatctaggtatctaccaaaacaggaatattagatgtattctccactcaccatcgtaacagtattattcctcagtgaatgaagcatggagaggaaagaacagttgtgcctaaacc

SEQ ID NO: 430994 - DNA, 122 bp, Homo sapiens
cctccgccccggcctcgcctggcgcttccttccgggtccttcggcctttccctggcggtgcggcaggccctcgcctcatcccaccaggcacgccgcggtgctcggccctgggtatccgggca

SEQ ID NO: 430995 - DNA, 122 bp, Homo sapiens
tgagtcggcctgccctccgcagagcaaccgggagctcccccgcggaagtggctctcgctgcgcctgtttcctgggtgaacaagctgatgagctcctggaggccggggctgtgctccccgccc

SEQ ID NO: 430996 - DNA, 122 bp, Homo sapiens
acttttccaccagaaaatgtgatcaatttagtaagccaataagtacataaatactacccccgcttatgttttatcgcagaatatcattgataatattaaatgtgtccaagaccgctcatgag

SEQ ID NO: 430997 - DNA, 122 bp, Homo sapiens
agctgtgactgccggcaggctgtgtgtgggactccttttggcagttggaattaaagggtccgaagattcaaaggacttcaagggctgccaccaatgtgagaaatcagtgggactgtagtgag

SEQ ID NO: 430998 - DNA, 122 bp, Homo sapiens
aagaaaaatcaagggccaggcatggcggttcatgcctgtaatcccagcactttgggaggccgagttgggcacatcatttgagcctaggggttccagaccagcctgagcaacacagcaaaacc

SEQ ID NO: 430999 - DNA, 122 bp, Homo sapiens
accgcacgccggcttgcgcgagaccacgctccctcaccgcgcgggcaataagtcccgccccgcacaggccacgccctccgcgcacagcccaagctcgcggccacacccccaccgcgcgggcg

SEQ ID NO: 431000 - DNA, 122 bp, Homo sapiens
cttcagtaggtgtagctggctggcagctctgttgattaccttagctcactgctgcctcctcgagttggaagacccgcttacccagagctaagcccctctcccaactctgaaggtgctcagca

SEQ ID NO: 431001 - DNA, 122 bp, Homo sapiens
cggagggggatggggaaatccgccgcctagaattgactggtttggactaaatgttgcaagcggggaaccttgagctacctacgccagcgttctggattattttccaaatttggttcctgata

SEQ ID NO: 431002 - DNA, 122 bp, Homo sapiens
tgagacatagagagaaggccatgtgaagacggaggcaggtattgggatgatgtagttacacgccaatgatcactgggaaccaccagaagccaggggagagaggcatgggatggagcatctct

SEQ ID NO: 431003 - DNA, 122 bp, Homo sapiens
attttaagcagcccttagcatgtaaatacttgcctgaatgacagtgaaactgtgctttcacgtgcgaaatactttgggtagtttgtcttaagaaaacaccctcaagtcctgagaaaaccaac

SEQ ID NO: 431004 - DNA, 122 bp, Homo sapiens
caaggggcacagggcagattcctggctgagttcccattttaaaaggatgggagagttccccgtatgttctgaaggttgtttagtgtgtaaatttcaatgttcccaacagagggagctagaga

SEQ ID NO: 431005 - DNA, 122 bp, Homo sapiens
gtcccactcctaccctaagacaaaaatctcagggtggcagaggcggtccctgtgtgcacgcgagttgggggtggggagtgaggttggtggaaggacggtgcaagagttactagtacaattta

SEQ ID NO: 431006 - DNA, 122 bp, Homo sapiens
aaatgttcagcagtgcaggagtggctgcactgctggcttgagctggggggccctgattggcgaagagtggcggggggggggggggggggtggaaggatcacagagaggagagactgggctcc

SEQ ID NO: 431007 - DNA, 122 bp, Homo sapiens
tggagtatgtcccgttaggacaggggtgaggaacaggctgcggctgcccacacttgtaagcgccccacatttctgcacgcgtagctaacgttagagagagtctttctatacactcacatcct

SEQ ID NO: 431008 - DNA, 122 bp, Homo sapiens
ggccgtgtgcccgcgcctctcccgccgggccgcgcgcctatcacggggactcggtggcctcgctgggcacccagccggacttgggctctgccctctaccaggtaggctgagcgccccggtgg

SEQ ID NO: 431009 - DNA, 122 bp, Homo sapiens
cctaacccttcgtattctgcacataaactggccacataacatactcatgagattctaacacggaataaaaaggaaacaaatagggattgctaagggcctttctaccacattgaatttacagc

SEQ ID NO: 431010 - DNA, 122 bp, Homo sapiens
tcctctaattaggtgatgtgctcccataagaaatttaacattaaagcacaaaaatgaactcgttagaggcatctattgctgggaacttcagtatcaatggtgaattgaagatactgtgtttc

SEQ ID NO: 431011 - DNA, 122 bp, Homo sapiens
ctgccgccgcactgctctgtgggacgcggcgacccctctcccgcggcggccgggaccccgcgcccaccgcgtctggagcccacctggcggccccactggctacatttccgacctggaccccg

SEQ ID NO: 431012 - DNA, 122 bp, Homo sapiens
caaccacagaacgctgaagcaaaagcaagtataaaacaggtacaggcttctcaaccacttcgcagatgtctgccaataatatcctgataaaatccaggaagcaggatttggcttgactccca

SEQ ID NO: 431013 - DNA, 122 bp, Homo sapiens
tgaggcaagccagctgccatattgtgagccgccctactcagaggcccatatggcaagggacggaaggagggctccaacctaagctagcggggaaccgaggcctgccaatagccacatgagtg

SEQ ID NO: 431014 - DNA, 122 bp, Homo sapiens
gtatctacatgtattaacacagttaatcctcaaaacagccctcttgtaaggaggactttacgaatgaggaaaccggtttttgaaaggttaaataacttgtccaaaatcacacagccagtagg

SEQ ID NO: 431015 - DNA, 122 bp, Homo sapiens
gagcttccagaacaaatgctacaacacaaaacagaaacacatgtgcggccgcgcggcaagcgagcgcgcggcggggcgggaggcgcggggcgcggggcgcgcgcgccccctgccggccggcg

SEQ ID NO: 431016 - DNA, 122 bp, Homo sapiens
tgtttcgcggtgcgggtgtgttggtgctctccaggcacctgcggttccggattggtgttccgcggtgcgggtgtgttggtgctctcgaggcacctgcggttccggattggtgttccgcggcg

SEQ ID NO: 431017 - DNA, 122 bp, Homo sapiens
cattacaaatggtttgagatcgcataacagtctccccaaatccagcatgtccagtgccctcgagatggggcagctgccggaaggtgtgaatccactggtctaatggagccaactgaagacac

SEQ ID NO: 431018 - DNA, 122 bp, Homo sapiens
agggcgagaggcagtggaggcgggacttggataggggcggaacctgagactacctttctgcgatcacaggattcccggcggtgacttgaccccggaagtggggtgtgaagctccggtgctgg

SEQ ID NO: 431019 - DNA, 122 bp, Homo sapiens
tagattaatctagttggagctacctaattctcccatccgtgcccctctcacccatagggtcgatctcccaagatccagcctagattgatacagggagggaaagtgatattgtaggatggggg

SEQ ID NO: 431020 - DNA, 122 bp, Homo sapiens
acatggctgcgagtctcagaccaaaatcaatagccggtatctactgaaactgcagcaaggcgaaaccacgggaatggcgctccgttgagtagagcaacgcacagcacatcacatcgcatcct

SEQ ID NO: 431021 - DNA, 122 bp, Homo sapiens
ctttcctgtagaataggaataattcccaccttgcagacttgtagggaggattaaaggaaacgatcttggttgacaagtttatcgtggtgtgagtacctaggtagtagctatcagtgttattt

SEQ ID NO: 431022 - DNA, 122 bp, Homo sapiens
ttttcttgtcagcaccctgcatgtagaggagttggcacagggctccaggagtaaaaggagcggatggttttgttaattgtcgcctgcctccctccgtgccgcggctagaactaagtgcgaac

SEQ ID NO: 431023 - DNA, 122 bp, Homo sapiens
gtaaaatcgccgttttctagcctacaggcatttcccttgtcccgtttcaacaaacttccacggcccaatttgttattcaaaaatttatggaaaatgtatgttaaagtgaaaagggtacattg

SEQ ID NO: 431024 - DNA, 122 bp, Homo sapiens
gagttggtccatcgcctttagggtatgtccacctctgttcacttcctccaaggaaaacgccggaggggatctctgccgtcaccctcaggcagccagagattcatgggggaagcaaaacttcc

SEQ ID NO: 431025 - DNA, 122 bp, Homo sapiens
ttagtagagacggagtaatcttctgtttgaggaaatgatcaccattttacaccttcgctgcgtgtgctggtctgtaatctgctattggcggaaatgatcaccgttttacaccttcactgcgt

SEQ ID NO: 431026 - DNA, 122 bp, Homo sapiens
tgctggtggggccaccgaagggtgcatgggacgccctctgtgaggactctccctgcaccgcgcatcccaccctaaacccaaggatgcgaccgcacctgcagccacgggccgtggaagtgtca

SEQ ID NO: 431027 - DNA, 122 bp, Homo sapiens
ccttctgcattcgcctggattaagttctgggagtagaggtgctattctacctcggtgatgcgaagaaaagccgcagcactgagcctgattgatgtgctttgcttaaagtttgcaaaattcca

SEQ ID NO: 431028 - DNA, 122 bp, Homo sapiens
ctgcacacaaccctccaggcttgctccacgtccccaggggctatagcaaagacagacgcacgatgaaaccaagctcacctgcagcgccagcggctcagagccagatgggggtcccacaagag

SEQ ID NO: 431029 - DNA, 122 bp, Homo sapiens
ggcaggcgggggacccacttacaaagacccagtgatgcagcctgagtctcatctttctctcgtattctctttatttgctctttctctggggtgactgaggtggaaggtgtgaagggtgctgg

SEQ ID NO: 431030 - DNA, 122 bp, Homo sapiens
atgtgaggtgaaatcttttcccctgggaacaggaagttttcagtgtttcttagaagaggacgtggggacctgatagcaacacacatgttgttgatgggcggactttctctatcagggaggct

SEQ ID NO: 431031 - DNA, 122 bp, Homo sapiens
cttttttcaaactctgtaatagattcccatataacttaagagtaaaagccgggcaagacgcggtggctcacacctgtaatccaagcactctgggaggccggcggatcacgaggtcaggagat

SEQ ID NO: 431032 - DNA, 122 bp, Homo sapiens
gagaggcatagctcaaggctctgacaatatagcagtgaacaaattaagtccctgcctttgcggaatttatattcctgtacaagaacgtaggaaaaaagcaaaagaaaaatataaaggattca

SEQ ID NO: 431033 - DNA, 122 bp, Homo sapiens
tggggcttttctgttttcgctttttgaatgttcaggtcccttactccccaaggtcaaaagcgcctgctcccatgtggcatgcacaggcgtcccgtttcttgcacacgccgatttcatgcctg

SEQ ID NO: 431034 - DNA, 122 bp, Homo sapiens
ccccctagtagctcggggtggggagacgggtggagaggaaggaggggcgaaaagggaaggcgcgaaatctacaaatgtttaagccagctggaactccgatgcctctttgccttttagggaaa

SEQ ID NO: 431035 - DNA, 122 bp, Homo sapiens
ggcgccccaacgctgcaccaccgtgggtctccgagccgtgctcgcagtcgctgagatcctcggtgcggagaagatgtgcccctccaatccccaggccgtgatccccttcacccagacccggc

SEQ ID NO: 431036 - DNA, 122 bp, Homo sapiens
gaaatagtaacacatgacatttgttgatcacttagtgaaccgcaaacacaaatcagtttacggtttcaacattacatcacaccacattcatctctatgacatcacatctttgcaaagctggg

SEQ ID NO: 431037 - DNA, 122 bp, Homo sapiens
tccctgcaccaaggcgacccctggctcggagcccaagggggcagcagaaggcagcggtggcgacggcgagggccccccgggagaggcgggggccgagaagagcagcagcgcaggtaggcacc

SEQ ID NO: 431038 - DNA, 122 bp, Homo sapiens
caggagctgggcaggcagagtccaaagaggttgttgggaggcaggagtcgggcctgcagacgcagccgggaggaagagctgggcccggagaggacgccgggaggctgcaagtgggtctggag

SEQ ID NO: 431039 - DNA, 122 bp, Homo sapiens
ccatgaactcaaatacaacagatgttcatgaagtcatccaaaagcattcacaaacacacacgggtgcacagacggttaactctctcatttaacaatcagacaaatccacaatgtggaaaaat

SEQ ID NO: 431040 - DNA, 122 bp, Homo sapiens
cgccagcctgtgggcagccccgctgcccccgctctgcgtagaggacgaggaggtggtggacgtggtggagccgtggatggcctggctgatccagtgctccatattgatgctgccctggctgg

SEQ ID NO: 431041 - DNA, 122 bp, Homo sapiens
atccgctttccgaaggggccggctggagccttataaagccgagcggggaactgcgccagccgagctggagcgcgaagagaagaggagggtgcctggagggccggcctgaagctcgtagcagg

SEQ ID NO: 431042 - DNA, 122 bp, Homo sapiens
aggaagggcctgctcccagtggggaattcagacagtgccccacacgccccaaatgcctggcgttcatatggtgtcggcttattgagaactgccctaaaaccctcggttcatgtttcaaagtg

SEQ ID NO: 431043 - DNA, 122 bp, Homo sapiens
gagaagttcttggcccagtacccaggcacaagagtctcctgctatgtgcttccatggaaacgagccagggatgtccacagctacacagcacaggaatgtggcccttgcagagatagtcaggg

SEQ ID NO: 431044 - DNA, 122 bp, Homo sapiens
taaagctgaagtcgtgctaagcattaaagattatttccagatgagcttcaactacctttccggccgccgttttcatctttcactaagaacaatacactcagattaaacttgtccccgacagg

SEQ ID NO: 431045 - DNA, 122 bp, Homo sapiens
tgaaggggcgcagcgataccggtgcgcggcgctggcgtcgggcgcgtgacgtctttcctgcgcgccacctagcgtctctatcgcgccagttcctcagcctcagtgctatgaaggtgacagcg

SEQ ID NO: 431046 - DNA, 122 bp, Homo sapiens
ctcgccaggtttccagcccatgccccgcagcatggccagcccataggcctccacggggaccgcctcataattagcctcctctggcacctacaggttcaggtagaggaaggagggtcaggctt

SEQ ID NO: 431047 - DNA, 122 bp, Homo sapiens
gaggcctgggtggggaagggtcatagctttgctgagctccccgctcaggcctggaggtgccgggtggagagaggccccagctttccgggtgaacactgggtgggtattggagccagagggcc

SEQ ID NO: 431048 - DNA, 122 bp, Homo sapiens
attactgtgtgccatagacccgctcttcacatgaaattaggccacgcttaaaacaaacagcgtcgcagacagcgtgggaggaaaacagtggcctacatattaagaaactctcggagccttca

SEQ ID NO: 431049 - DNA, 122 bp, Homo sapiens
ggctcaatctcttcccgtccttttcccttctagggttgcacgctctggttcccaaacccccggccgctggcttatgcaaatcacttaggtacatgcaaaagtatcccttctcccggagcgcc

SEQ ID NO: 431050 - DNA, 122 bp, Homo sapiens
tctcggcggagtcccagtgggaggcccggtgtccaaaatcctcaactagattgggcatgccgtttatcttgttccaactgttgacagtaatggcactagcaataatgtccttcccaggcaaa

SEQ ID NO: 431051 - DNA, 122 bp, Homo sapiens
aagacgcgcaaactagtcctagcgtgagtgagcagcaagcagtggtacttccttgtgaatcggggtgggaacccttcagaaccgcgagctcccactttctgtcgatcgctctgctcatgcgg

SEQ ID NO: 431052 - DNA, 122 bp, Homo sapiens
cccggccgccgcatctgctgtggtcctgggtgtctgctcctgcaggacaaggcctgtgcccggccagtgcccccaccatcctgcagacacacacccctcccgtgaatgctgggagctcaggg

SEQ ID NO: 431053 - DNA, 122 bp, Homo sapiens
gtcccgagccctgccccgcgggaaggcagctcaggctcggtgagaaattgagcgcagcaccggtgggccggcactgctgggggacccagtacaccctccgcagccactggcccgggtgctaa

SEQ ID NO: 431054 - DNA, 122 bp, Homo sapiens
tgatgcccaagttgtccccagagatccgtgtctgataatagactagcctgttaaacaaaacgaatgtgtggttagtggggtgtgtggtggagatttggaataaaggcaataccttgatactt

SEQ ID NO: 431055 - DNA, 122 bp, Homo sapiens
gaggggagccccattgaggtcgagccgtgcccacctgctatagctggtgttgttgtctcccgtaacccactggaagccgcgcaggggcccgaggcgcttggggtcgccgcagccgggtggca

SEQ ID NO: 431056 - DNA, 122 bp, Homo sapiens
gatacaactatgcactgcttcccttatgaggctgccgtgagtcctcggcaagaaaacgaacgcgagagtcaccggaaaagctaggagggccacacgaatgaacacagtgatcacgggtaccc

SEQ ID NO: 431057 - DNA, 122 bp, Homo sapiens
gccccgggggcggggcttccagggggcggggtcatacgggggcggggccgagggaccaagcggccgctcctggccggagggcggccgggtcggtgacgtcaccgcatgactgggtttttatg

SEQ ID NO: 431058 - DNA, 122 bp, Homo sapiens
aagagcagaattcagaacccgagctttgggcggcggagcaggacagggcgcgggtgggcgcggcctccgggaggccagcacgagggggagcggcggggcccggacacacccagccagaagga

SEQ ID NO: 431059 - DNA, 122 bp, Homo sapiens
ttttccctgtcccagcttgatttctttcatatcttactggcgaccgtggacagctaacttcgattttgagggggagggacagagacagagaaacagagagagatatgatcgcgattcaatct

SEQ ID NO: 431060 - DNA, 122 bp, Homo sapiens
agccggagtcagagttatggccgtcgaagcactgtctggcctctgctccgccttcatttacgacccatggttgctatgcctggtagggaatgcgggtgccctgcgagactctctttgcattt

SEQ ID NO: 431061 - DNA, 122 bp, Homo sapiens
tgcggggcgcggcggcaggaactttcccggggacccctgcgggaaggcctggccagtaagcgcgcctctttggcccgaatcaacatggaaacctaaggaaaaacgtctgacctgcggaggta

SEQ ID NO: 431062 - DNA, 122 bp, Homo sapiens
ccccaggggaaggtcacaggatgaaaatatcagcaggatcctggtggcaaatgctgccttcgccaggaagtcctcccaggccccagccacagtggtcccatgccccccatggcccctcctag

SEQ ID NO: 431063 - DNA, 122 bp, Homo sapiens
aggaaagggacagagttcgcgccgaggcgccggggccactctggctccgccgacgccgctcgccagggcggcagggtcttttgttgtcccctctgtgcaaataaatgcagatgtgggttacc

SEQ ID NO: 431064 - DNA, 122 bp, Homo sapiens
cagggagcctggacccaaacatgagcatcaggccttcccaggaaacgaacaccccgggtccgtcactctgaggcctcgatgtagatgagcacagcgagcatggcacatgggccctcggcccc

SEQ ID NO: 431065 - DNA, 122 bp, Homo sapiens
gtcacatatgctgccgaaaacctttaccctgcttggaaaatgtttccttatctacatatgcgttttcttcattctgattatttatgaaattctcacttagtccccagagttgcatgaacctc

SEQ ID NO: 431066 - DNA, 122 bp, Homo sapiens
aattcactgagaaagacagaagagggtcagacatatgcaatgatgaagaaatcccagaggcggccaacatctcagagcctcagagcagccatttccacaggtgacaccaaggtcagctgccc

SEQ ID NO: 431067 - DNA, 122 bp, Homo sapiens
ctcgcgcggctctgggcacctcccctccacctctgggggctttggttagcgcagcacaaccgccgaggtaatgatcccgaatcctcgaggaggctaagcaggaccacggggctgaggctccg

SEQ ID NO: 431068 - DNA, 122 bp, Homo sapiens
gactcccacgcacgcccggactcctggtgctggtgctcgctcagcaggcgcggctgggggcggctgaccgaggggcctgggcccaagaagctctgctttatgaagacaccgggcgcagggag

SEQ ID NO: 431069 - DNA, 122 bp, Homo sapiens
gcatcccctccccagcagcttctgggggctgcaggagagagtgcagcctgggtcctgtgccggaagggcctgtgtggtctgcccatctggtcgccctcgcccctgagtccccctcctttccc

SEQ ID NO: 431070 - DNA, 122 bp, Homo sapiens
ggaaccgccctccgacaccttcccgcggctgtgccgcgaccgcccggccggcgggacagacgctgggaccgctacggaaccgccagacccacggcgcccagccccagctgagccggactgag

SEQ ID NO: 431071 - DNA, 122 bp, Homo sapiens
cgcccctagatgtggccttcacacgcaggctgatgcgctcccttcccatccacgcctgctcggttttgccacatatgccgctgtgctgccggccttgaatgtgtatgagcggctcgtgctgg

SEQ ID NO: 431072 - DNA, 122 bp, Homo sapiens
cggacgtggatggggagcccggttcacagctgctccacgcggttttacgtgcactgaccacgtgccctgaccgaggttggaccccatgcacactgaccgcatgccctgaccaaggtagaacc

SEQ ID NO: 431073 - DNA, 122 bp, Homo sapiens
cgctgggccggcaggacggcctccccggacttgcgggcgccattcctggggtgcctggcccgccccggcctccatgtctgtgatcccagggcctcggatggaacggacctgagggcggacac

SEQ ID NO: 431074 - DNA, 122 bp, Homo sapiens
ggccgggaagggaattgagctgcccagaatccagggcggaagaggcccctgcagtgttctcgccagcggccccagtgagagcagcccagcgacgggcccttgtaggctcgtgcagctcgtga

SEQ ID NO: 431075 - DNA, 122 bp, Homo sapiens
atctagcatctctcacagccataggtgctcaggcactaagtgcagagttaaagctgttagcggggcactgccggccaccagaccacaggcaaaggatcctgaggcagctacagcctcgaaat

SEQ ID NO: 431076 - DNA, 122 bp, Homo sapiens
tgatcataagtctcctgaggctttcccagaggctgatgttgccatgcttcctgtaaggctcgcagaactgtcagccaattaaacttgttttcttcataaattacccagtgtcaggtgtttct

SEQ ID NO: 431077 - DNA, 122 bp, Homo sapiens
taaagtctagtttcttaatgtagtgggcattgcaaaatgaccccaaaatcttactttagacgtccacaagcacaggagtttagaagcttaagataatgcttataagtaacaagtttgtctaa

SEQ ID NO: 431078 - DNA, 122 bp, Homo sapiens
ggcgggggtggacggatccggaaaacttgcgtaggcgcggggggtgggtggatgacttgccgagatcccacaaggcagtgggatttggggaaagagcgaccgcttcctgttgctcgactgcc

SEQ ID NO: 431079 - DNA, 122 bp, Homo sapiens
gaagctaagcccctccttcctgggtggtagatcctggtgttggtagcccgagtgacggggcgtggggatgggagatggcttgaagagaattggtgactcctacctttccagacagagcctgc

SEQ ID NO: 431080 - DNA, 122 bp, Homo sapiens
ttttggaaggtgaaaaggaggagggaggcacggagggatgggggaagggaaagaagagctcgcttgagctttatttatgctctctcggcgcatcggattcggctgctcgcgagctgctttct

SEQ ID NO: 431081 - DNA, 122 bp, Homo sapiens
ccacagacgccacccaacgtggagaaggccctgcgcctcttcgggcagctgctgcacagccgcgcgttcgtgcttaccttcatccacacgctggaggcccagagcagcttctccatgcgcga

SEQ ID NO: 431082 - DNA, 122 bp, Homo sapiens
ggtggtgcgcgtcgcccgacccgagctcactggggcaggcacgcgtgccttccgtcagtccgagttgcagaggccaggtgccctcccccagccaggcgccttcccagctgtggtcctgggga

SEQ ID NO: 431083 - DNA, 122 bp, Homo sapiens
cagggaagggagagctgggcaaagatggagccggcggttcctggaccaccaaaccaagcacgctggagaccacatctgccaaaagtgtccccgtcacactacagcaggagcagtgtcttccc

SEQ ID NO: 431084 - DNA, 122 bp, Homo sapiens
gcaatctagaaaatgtaagatgtgtaaaagataaaattctatgtccatggattgtgaagccgaataacttcaggaatcctggatacaatagtgtttaggcagatcagtcagcgtgatgattg

SEQ ID NO: 431085 - DNA, 122 bp, Homo sapiens
gcctcgccccggggtggggacctgcccgggcggcttccccataggccagtgctgggcccgcggtgcttctagcggcccagggaaacgttttaattttcatttattttaaaatcaaaataaat

SEQ ID NO: 431086 - DNA, 122 bp, Homo sapiens
cccctatggccaaaaagtccatgtgactcaaacccttgccagttcctcttgggagcaggccggtgggatcacacttgcagatgagcccacccgggagggaggaagtgggggcccaaggccac

SEQ ID NO: 431087 - DNA, 122 bp, Homo sapiens
gggtggggccactaccgggttaaagacttgtagtgggtggggctacacgtagggccgagacgaccggatttccggaaatcagagccggcacacgtgacttttgtttgcagaagtgggaaggt

SEQ ID NO: 431088 - DNA, 122 bp, Homo sapiens
gctgtcctgtgtgagaaattgcctcatcagccaacacaggctttgacatatgggtagcttcgtgtttcttaggatacttgggctggtcagaaagtgccaagcatcagagaaactgagacctc

SEQ ID NO: 431089 - DNA, 122 bp, Homo sapiens
caaaagactatgccacattgtcaggaaaacgaatgcagtcactcttcctgtataagtaaccgcaacccgtgggaggagatgccggggacctgggccgcgctgccaggacctctgctgtgtct

SEQ ID NO: 431090 - DNA, 122 bp, Homo sapiens
caagatgcctcagcaatatacaatggcattgcaaccagagaggtgcccatccctgtgcagcgctagtaaagttgactcttgcagtggaatccctagaaccttggacctgagagtttccctta

SEQ ID NO: 431091 - DNA, 122 bp, Homo sapiens
gagagcggcacccaggaattccaagccagtctcctgggactctggcagcctgctccccggcgctggaccctaagggaccaggcgtgatgccttctggttctagcctctgagtgccccccaca

SEQ ID NO: 431092 - DNA, 122 bp, Homo sapiens
cacctccttccggtctgaacagtgaactcctccgcatggactcacgggttcacctccttccggtctgaacagtgaactcctccgcatcgactcacgggttcacctccttccggtctgaacag

SEQ ID NO: 431093 - DNA, 122 bp, Homo sapiens
gggccggcctcacctccaggacagcctcgggcacagtggagcggccgcgcggggtggcctcggccaggccaaatgcgccagcggccctggctcagttaccctgcactcgtgccagcggccgc

SEQ ID NO: 431094 - DNA, 122 bp, Homo sapiens
acacgcacacacccctcacggagggcaggcctgtgggggacctgcaaaaactcgtaaagacgacagccgaggcctccacaaaaaggaccaggttctccagaaaagtgagcagctaaaactgt

SEQ ID NO: 431095 - DNA, 122 bp, Homo sapiens
aaaactgaactttttctattctgttcctgaaaagggcaataatagaaacttgacagacatcgctcttaaaattaaagcaagagataagaatctttatacattatatatacaaggaaaagaaa

SEQ ID NO: 431096 - DNA, 122 bp, Homo sapiens
ttaatctggcaacaataaggaaatccagaactcacggtgctctgagcaatggcggactcccgctgcatgtgcgagtggatggatattccctgttcagtggaggggatatccaccacgactct

SEQ ID NO: 431097 - DNA, 122 bp, Homo sapiens
cctccactcccccactgcccctaggttccttcccggctctgagcgggttcttcagggtttcgcggcccccgctgtatctttacttttaccctttacccggagtttggcattctcagaggcca

SEQ ID NO: 431098 - DNA, 122 bp, Homo sapiens
tgcacatccagggaggaggacagaaggcccagctcagtggcccccgccccccaccccccacgcccgaacagcaggggcagagcagccctccttcgaagtgtgtccaagtccgcatttgagcc

SEQ ID NO: 431099 - DNA, 122 bp, Homo sapiens
ccgctccatggtgagaccggtaatcgccaggcgcctgcgcactcgagtggcggcgactcccgctcccgccgcggcccaaaaccgagcccgctcacactccgccctcagtcccgccccacccc

SEQ ID NO: 431100 - DNA, 122 bp, Homo sapiens
atggtaaataagtttgaggaagcctggagtaaaccaagctaagcagcgtattttcctccccgtgcctttaatctcccgttgtggggacagaaagccctgtacacgcgaaacctcgtagacgt

SEQ ID NO: 431101 - DNA, 122 bp, Homo sapiens
ttaggaagaaacagtaagccctgtgccacccggggtcactgcctagccctgccctccgcgcgcaccgtccgcgtctccgagggctcctcctcggacctggaccctctggagcggcttcgacc

SEQ ID NO: 431102 - DNA, 122 bp, Homo sapiens
gatgaggttggacaagatgccactgcttttcttagcactcttccctcccctaaaccatcccgtagtcttctaatacagtctctcagacaagtgtctctagatggatgtgaactccttaactc

SEQ ID NO: 431103 - DNA, 122 bp, Homo sapiens
acacagttatacagttgccttatttggtctatcccatgaggaagtcctagttactaattacgtttttgttggctgcttctgattggttgagcttaagttctgtgtttctttaacataggcat

SEQ ID NO: 431104 - DNA, 122 bp, Homo sapiens
aaacgggtgtttccaacccctttcatgggggagaggaagccgcggggagcccaggaacagcgaccgcagcaagatctgcacccggagcctcaggaacagccccagaggccaaaactgcaccc

SEQ ID NO: 431105 - DNA, 122 bp, Homo sapiens
gcgtcggtcgggaacggtcggggcgaccccagcccaggccgcgccactagccttcgccgccggccagggaagtggaatggcctctgcaggttacagaccgcccttgggtcctgccgacgagg

SEQ ID NO: 431106 - DNA, 122 bp, Homo sapiens
tgtgggaggtgtgcggcactgacttggggatcggtcagagctgctttcagacaaatggcccgtccaggacaaacctcccgcatctctagctgtttaactcatttcatttggttttctaacct

SEQ ID NO: 431107 - DNA, 122 bp, Homo sapiens
ccatccccaaaagcacagaggaagatgggggaaagtgtaaaccttgtggcagctcgccggcgcatgcgcgctccaggaagacccagcagccccacctcgagttccaattggctgcgcgtggc

SEQ ID NO: 431108 - DNA, 122 bp, Homo sapiens
ttccctcttacctacctcagagaaacccagacatttctgggagttcaaggcactgggtgacgaaccccttgtgtgttgtgtgccccgggggttaagcagctctccctgtgagttcttctctg

SEQ ID NO: 431109 - DNA, 122 bp, Homo sapiens
gtgtctctcgctgaaggcccccacaagtgaaaacagaaccacacggtagcatgtgcaagccgcagggacgtggggggacgtagaggaaggcaaaggaaagaagcggcgagaccgcagggaat

SEQ ID NO: 431110 - DNA, 122 bp, Homo sapiens
ccctggccaagcccactgagggatgtctagatttgggcacacgaacttagctatatgttacgttatctagcctggggcagagagggaaggcaagatatcaagccccatgcctaggactttaa

SEQ ID NO: 431111 - DNA, 122 bp, Homo sapiens
ttcaggaaggcttgtgtgaaccgttgcgcataaataaaccctttctaccgggctgtgcaacgctggtcctttcttgggcgctggtgtgggggatctctctctgctctcagggctgtgcctgg

SEQ ID NO: 431112 - DNA, 122 bp, Homo sapiens
aaaactcgccccttccctcacagtgttgactgttcccatcaaactctgagggcagctcttcggagtgagggctccccagggcccggtggggcaagcagagctctacctggacctgattcgtc

SEQ ID NO: 431113 - DNA, 122 bp, Homo sapiens
gtctaccgcaaacgcctgatcacaaggtccgaagtgggggctcatcctcgccccatttcccgtaaatatcagccacagaccacctttgaggactttgtatgcacttttacaaaactctggga

SEQ ID NO: 431114 - DNA, 122 bp, Homo sapiens
tccttccgaatccgccccaggtgttccaccccgagcttcccctcgggcttcccctcgccacgcagcctctgaagagaggagcatctacatacaaagaggcttaaactgcccagaacctccga

SEQ ID NO: 431115 - DNA, 122 bp, Homo sapiens
agtggtcaaaagctgaccccaagcaatcccagctccttgaaaggttttttctttttgtaccgacactatcattcccgcccttcgtccccaactcctttagtcccctaaggagtgaggggggt

SEQ ID NO: 431116 - DNA, 122 bp, Homo sapiens
tcctcacactacctggtatagcgagcaggtgtcgctggagatgagggaggcagctgccaccgagttccgccgagccatcaaaggtcgcatcccagaaagcttaagaaactgtgtgaacaagg

SEQ ID NO: 431117 - DNA, 122 bp, Homo sapiens
gaagagccgtggctggccggcctcccagtggcgacgacgacctcgctgtgttcgtggcagcggcactctcaaatctgggcacggtgatgggaaggttatttgttggaatccctttgcctttc

SEQ ID NO: 431118 - DNA, 122 bp, Homo sapiens
gacagcccaggccgtgagaggttgctccagtctgtgctctctgaccgtagtcagtagtcacggcgttagatttttgcggtttttgatctggaagccacacatccttagcttaatttccacgt

SEQ ID NO: 431119 - DNA, 122 bp, Homo sapiens
ggagggcggagccaactccccacaaggaagtcttgtgcaactctcaggcgcctgcagccacgtgagcgcgcggctttcattttactcaggtattattactattattacttcttttgagacaa

SEQ ID NO: 431120 - DNA, 122 bp, Homo sapiens
tcactctctggcccataaccgtagccctctccaactgtggggagcatggctgcagcatgacgcggttccacaataggaggaagtggtggccggagcggcagccatagtagctgaagtggcag

SEQ ID NO: 431121 - DNA, 122 bp, Homo sapiens
ttcacaggactcacggccccgccccgagtgatgtcagctgcctttccatccctttcccggcgatgcgaagcttgaataagctagcaacccggcagagtggcccttcattgctgtaaatgtgc

SEQ ID NO: 431122 - DNA, 122 bp, Homo sapiens
tagaaattgatcccagtcctgggctggccctggagagcctgaactcaacacgtgctccagcgccagccctggtgggtctcccaggctggctgagagcagccttgatggccaaggagtaaatg

SEQ ID NO: 431123 - DNA, 122 bp, Homo sapiens
caggagcagcaaaggcagcgaggccagcacatgcagcatggccgtcgctagtgccagggccggaacccgggcacctggcaacgggcaaacgcccctcccccgggaagaggcctggctctaag

SEQ ID NO: 431124 - DNA, 122 bp, Homo sapiens
cccctccacgaagttggatcatttgcggagcaggccaagtccctctagacctcacgcagacgcgggtgcagcctgctctgcgacttgcagtcagctggaagctgggcctctgcatcatcagg

SEQ ID NO: 431125 - DNA, 122 bp, Homo sapiens
aaaccagacatttagcagtaatgaccagttctaggtttcactaccaagttatcaatgctgcgggtccccacaggacggtgggcaaaggggaaagcagtcacgcagtcggcaagcaccgagca

SEQ ID NO: 431126 - DNA, 122 bp, Homo sapiens
gagctcggtttcccctcagtgtttttctcctgtcaattcgcgggcaaccagcggggtgttcgagaccctggtggggcgggctccctcacttccgggacccccggggaactcagcggtgcggg

SEQ ID NO: 431127 - DNA, 122 bp, Homo sapiens
gcatcacactaaaaagtctgaagacactggcttaggagagacacataaagaaacccctctcgggcttaatgtgcctatgaatcagccaggaatcttgttaggatgaagtttctaattcaatt

SEQ ID NO: 431128 - DNA, 122 bp, Homo sapiens
ccaggatcccccgccacggggctcacacgaaagaccccggggcggggaagccccgcagcccggagctgggtccaacctgcattaaggtgggcgtctcaaataccccctgtaaggccctgtag

SEQ ID NO: 431129 - DNA, 122 bp, Homo sapiens
caaagtcgcagcctctctgttaccttacctggggaagaagtgaggagtgttcagatatcacgtacacagtcagggagccctccgcttgttcctgaggctcatctaacatggcttctgcctct

SEQ ID NO: 431130 - DNA, 122 bp, Homo sapiens
ggaacaaacggcacaaacggggcacaaaaggggaacaaacggcatacgcaaccgtccccgcgggagccccggcccagctcagcgcacccgccagcatgccccaccctgattggtccacttgc

SEQ ID NO: 431131 - DNA, 122 bp, Homo sapiens
tatatatatatacacacacatacacaacacacacatttttattcttgtttatttgtttatcgtctctttttccccttcccagagcccagaaagatgcctggcaaaaagttcgtgttctgtaa

SEQ ID NO: 431132 - DNA, 122 bp, Homo sapiens
tgccctccccgcagctccctggcgctctgtatgctcagagcgtagatctcggcccccgcccgctgaagcggtggacaggcacccccgttttaatttgcctttagcagacctctaggcaagga

SEQ ID NO: 431133 - DNA, 122 bp, Homo sapiens
acactcacacacacatcgcacgcgctgcccgcccccacgtccagcctggctccgcgcagccgggcctgtcccgagcctcctgtaagctgcttctgcgccctgaacgctgcctgttgtcccct

SEQ ID NO: 431134 - DNA, 122 bp, Homo sapiens
ccttctccccgcgggctgggggccctggggctctgcaaggctctggctccgaacagattgcgcctcccgcctggctgccagtaggaactggggtgggagccgcgtaactaacagttgcgcgc

SEQ ID NO: 431135 - DNA, 122 bp, Homo sapiens
tctctctctctctctctctctctctctctctctctcattcctgggaatcgggggtgggggcgggtgataaagagaggtgggcaggagagaaatctctaagaggagacgggacacatctaggg

SEQ ID NO: 431136 - DNA, 122 bp, Homo sapiens
ctaagacgcaagagggtgtgacacagacgctaagcgccactggcgaggagatgaaggggtcgtcttcatcttcgccggatgatttccgcccacatagagggcgccagtgacgcccacacacg

SEQ ID NO: 431137 - DNA, 122 bp, Homo sapiens
gagtgtagaggagctgcttcgggaggcgcagctcaatctccagagcctgttgcaaggtaccgagagggaggggggctgcggccggagcccagaagcgagatgcgcagcggcaggagggaggc

SEQ ID NO: 431138 - DNA, 122 bp, Homo sapiens
ctgccactccagagagatggctatgccggtccgcgtggcgcgcagggccggatggtttggcgctctctgcgaggcccgcaaggctgcacttgggagggcttcagtatggtgacctttcctaa

SEQ ID NO: 431139 - DNA, 122 bp, Homo sapiens
ctaagagcctattttccttctcagcttagacaagttttcgtctcctggtgtgaatggagccgcagcagccttggggctccgcctgtgccactgacctgtgggtggggccctctgagaggatg

SEQ ID NO: 431140 - DNA, 122 bp, Homo sapiens
tgcgccctctccccaacttcagcagggcacaaagggccggggggcacgtagaccgcggggcgagcagtgccccctggagttgtgcccggtcccggcctccctttctcccctctctccgcgct

SEQ ID NO: 431141 - DNA, 122 bp, Homo sapiens
gcgtagagcaggcccccgatgctctgcccggctatggtcttctgcacgtctgtgggggtgcggaggtcaggtgggcgccgcagcccagggcccagcccagcatacccccacccaccgcccac

SEQ ID NO: 431142 - DNA, 122 bp, Homo sapiens
tgcactcccagagcaggcaggaggccggttggctggaacaacataaaccagggagtcacccgggaaggggctaaggacggagtgagtttgagcccttttgatgtgacatgggagggcatggt

SEQ ID NO: 431143 - DNA, 122 bp, Homo sapiens
tgacaaaaatgcacccagtggatcttaaaaagtagtagagattatgccaggcgttggcctcgtttgaaaggaaggatctggcttttcctggaaataataaccgcctgttttctctttgcatc

SEQ ID NO: 431144 - DNA, 122 bp, Homo sapiens
gggaattaacaaacctgcctgcgcggagaggtctgcttccttctttggcttcagaaccgacggcaatcaccaaattcctgcggccagcgagccctgcccctcagatctggccctctggttga

SEQ ID NO: 431145 - DNA, 122 bp, Homo sapiens
taagtttgtctctggccattttatcaacttttctgtgttaccattgacagggagaatattcgcaatgccacttacacaggccacgtaggcaggcatgcacacattctccttccaaaacatgt

SEQ ID NO: 431146 - DNA, 122 bp, Homo sapiens
attttcacagatggtgagcaggcggctggggagatggagctgagttagaaccaggtctcccggctccaagactgcgctcccagctcgacagcatccagcctccagcccaggtggcggggtcg

SEQ ID NO: 431147 - DNA, 122 bp, Homo sapiens
cgatacacccggggtacccccgagacaagcggggcccccaggagcccctgggggagcaggcgtcgggggcccacggctgcccagggcgtggggagggggtggggggagtaccgcagcgctgg

SEQ ID NO: 431148 - DNA, 122 bp, Homo sapiens
cactccagggttcagacagggctgcacaggcggcagagatacagggtctgagggctgagacgccatggggccgctgctgcttatgtggttggattgtttacaagcctcattattaaaactga

SEQ ID NO: 431149 - DNA, 122 bp, Homo sapiens
tggagaaactgcctttaaaggcagctattaaaatacaaatatgcccagcgcagtggctcacgcggcactttgggaggccaaggcgggtagatcacctgaggtcaggagttcgagaccagcct

SEQ ID NO: 431150 - DNA, 122 bp, Homo sapiens
actgtgctctgctctgggagatggcttagctttgcataggacaaaattctaatctagtttcgcgcagttcttacgaatttgttacaatgagacgggccaagctatacagcccattgcgatga

SEQ ID NO: 431151 - DNA, 122 bp, Homo sapiens
gccagacagagccgccatccattttccagagcccagaaaccgtgtcaccagggaatgatacgacatcggccttcctgcccagggctgctgtgaggatctaggagagactgccagcaaagcct

SEQ ID NO: 431152 - DNA, 122 bp, Homo sapiens
aggagaaaagcgtgagctaaagccactcccaggaaggccgggccagaggctgtggagactcggatcctgaggcaaaaggaagccgagtcagggacgcgcttccttccccagggctcgtcccc

SEQ ID NO: 431153 - DNA, 122 bp, Homo sapiens
gctctcctttttggtgtcttgcaggagaggcagcttccccccttgggtccaacaaacccgcgtgtgacgctggccccaccgtggaatggcctggcccccccagccccaccacccccaccccg

SEQ ID NO: 431154 - DNA, 122 bp, Homo sapiens
gctctctgactgactccttcccagatcttctcggcttagcggctgaagactgacactgcccgatcgcctcggaagccccctaaaccatcagggacaccgagcttcgggtaactctcacagtg

SEQ ID NO: 431155 - DNA, 122 bp, Homo sapiens
caagatcctcccccgacacgcccctctcttaaatgtcagccagggtgccctgccccttcccgctcccagttaaccccagccctgtgaaaccgggacagtcgcgcagcctcgagggatggagg

SEQ ID NO: 431156 - DNA, 122 bp, Homo sapiens
taccgacgcgtgtgcaatagaggcagcccgcaggacccggccaggactgggaaggtggagcggatgtgctgggggaaggaagcccaccagaggcagcaggccctcccggccacagatgggtc

SEQ ID NO: 431157 - DNA, 122 bp, Homo sapiens
acccgcaccaggaagcaaagtagctaagcatgttaatacaaatgcaagtcacaagataaacgtttgaaaaagatcatcctcaagtatcagatggaaacaaaaattcctgtggtggggcgtaa

SEQ ID NO: 431158 - DNA, 122 bp, Homo sapiens
ccagagtgatggagccctggtcccctgccactagcctggtcccggggagggtggcaactgcgaggcctgggtgctgctgtgctcgtggccacacactgaggccggccctcagccctgtgcac

SEQ ID NO: 431159 - DNA, 122 bp, Homo sapiens
tgccttctgtctttatcttaacaattcccttgccaaacttccttgaacttcccttgtacacgataattctgttgcttttctctatacctataaacttttccaggggattgaattatttttga

SEQ ID NO: 431160 - DNA, 122 bp, Homo sapiens
ctttctcttttcaatcccagactcctactttcaatcatagcattttctcttatcaggctccgactgaatactttccctattaaattccatgtctcctctttgaccccacaatctcttgagct

SEQ ID NO: 431161 - DNA, 122 bp, Homo sapiens
cctggctaattttttttttttttaacttttagtagagatggggtctcaccatgttgcccacgctagtcttgaacttggcctcccaaaatgctgggattacaaggcctgtgccaccatgccca

SEQ ID NO: 431162 - DNA, 122 bp, Homo sapiens
ggtgcaggatagaaaccttcaactagtttgctgttatcaaaaagactataggcaccatcccgtattgccacaacacctcgactccggcagtatatatcaatgcaatacatgttcctgaaggc

SEQ ID NO: 431163 - DNA, 122 bp, Homo sapiens
ccctccctatccctcacccccactccctctccagcccctcctctcttccttcctgtctcccgctcatctggttcatcttgctgcatcctgcagctccccccactgagccgtgaggataatgc

SEQ ID NO: 431164 - DNA, 122 bp, Homo sapiens
cctctccacttacagcgtaaacagtaatgtacagccacgaacaggagccggcaggagtggcggggagacccgcagtcccactgtgcggcacccacatgctgctcactgtggccggagcgtcg

SEQ ID NO: 431165 - DNA, 122 bp, Homo sapiens
atgttttgtggaaaggaaataaaaccagaggaaaggaagtcagaggtcagggaggtgggccgaagccatgatcacagagaatacaataagccatagttatgcatgtggatttaattgtatgt

SEQ ID NO: 431166 - DNA, 122 bp, Homo sapiens
cagggacccccatgtcagctcgcagaggctctccgcagggtatcaagctgcttcttgaaacgcgtctgagaattgaagtcaggagtcttggaaggcggtgtgaggtatcgttattattctgc

SEQ ID NO: 431167 - DNA, 122 bp, Homo sapiens
ccgggccctcctcgcagctggggccccactggcgcccccgcgggagcgctacgggagaggcgcctatgcggctgcaggttttattatggagctgtcaaggtagaaaggtacggagaacggga

SEQ ID NO: 431168 - DNA, 122 bp, Homo sapiens
gcagcccagctctgtgatggtttttttcatccctttggttacagccaataaatcaatcttcgttttcttaagggcagcatggaaaatattaaaccacagtcttgggctgcttgtgggggcta

SEQ ID NO: 431169 - DNA, 122 bp, Homo sapiens
taggagagggctgcctcctccttttcttcttcttcttttttttttcatcgttttgtagtgcgtcactcaaaaactgtaagaaaagtaagtatagaagctctttgggtggagccgcagttggt

SEQ ID NO: 431170 - DNA, 122 bp, Homo sapiens
gctcttactccccgcatagcggggtgagcctcacccccctgcgatggggatcatgagagacggggggggaggggggctggctttcactccctgcatcgcggggggtgcctcacccccctgcg

SEQ ID NO: 431171 - DNA, 122 bp, Homo sapiens
ccccaactccccaacaaaatgcacacattcagtggccatgtgaccagggcaaatgcctctcgttccacagctccaatgcaggaataataatagcatccacctggtgtgggtgggcgggttca

SEQ ID NO: 431172 - DNA, 122 bp, Homo sapiens
agaaggaaaggtgggagaaaacaacagcaaacctgtttgcccttctcatgtttcagtcagcgtcgggccacaacgtcgatttcctgcaatcctgaagcattgcgtgactaatcacatcttag

SEQ ID NO: 431173 - DNA, 122 bp, Homo sapiens
tgttaatcatattttggaatatagccacacccattcatttacctataatctatatacggtcgttttggtgcgacaaggaaagagttgcatttacaatagagacttcatgtcctgcaaagcct

SEQ ID NO: 431174 - DNA, 122 bp, Homo sapiens
gataattctctaaagctttggcacttggcgctgaaagtagccattccatgtcttctttcccgccccgcctcttgtgctccccaccgctttcgtgatgtccgcagttgcccacctgcctctac

SEQ ID NO: 431175 - DNA, 122 bp, Homo sapiens
tcggaaggttccctgactgagactgaatattcaactcataatagtaacaagggcttttaccgatgtgcagaataacacaaataacgctgcaacccacactttgtcttgacaattcagttcaa

SEQ ID NO: 431176 - DNA, 122 bp, Homo sapiens
gtgcccagagccgccccgtgcagtgcacacggcgggtgcactatgactcggagccagtcccggccagcctgtgccctcagcctgctccctccagcaggcaggcctgcaactctcagagctgc

SEQ ID NO: 431177 - DNA, 122 bp, Homo sapiens
caatgcattccacagcccacggagatgcccaagcccatctacaggaagcccacggtcaagcggcccacaatgtggaatgttagcaacaaccccgccagaccccccaccacccagatcagcca

SEQ ID NO: 431178 - DNA, 122 bp, Homo sapiens
aatggttgtttttggcacttctgtcaagcttttgcattgctttctgaagcagggattggccgaacttcttactctgccattttgggaatccccagacagcacaatgacccttccccgaccta

SEQ ID NO: 431179 - DNA, 122 bp, Homo sapiens
gggcggtggctctcccagctgttcctctctgtcaccgcgttgttccttctcaccacgtcccgttctggcgacggacacctgtctccgtttcacttgggtggcacccaggagtgctgctgtcg

SEQ ID NO: 431180 - DNA, 122 bp, Homo sapiens
ctgaatgaatgggaatgatggcttgcttgggtcctcttacctacctaagacagtcatcaccgtcttcattagcttcatgggtgtcctccggcggctgatggacccacttgtatgcggagaca

SEQ ID NO: 431181 - DNA, 122 bp, Homo sapiens
aggtctaaagcctgtattctgaagccaacgtctacctagggctgagggttggagatggcccgtctgccagctctggatgaaacagctgggacacagcaccatgaatggcaaaggttccttgc

SEQ ID NO: 431182 - DNA, 122 bp, Homo sapiens
gcgggggacgccacatctgaggtgtgggaggatcggccggcaggatccccaggacgacaacggcagctcaagggggagcctgtgggtctggctggggtagagggtgcacctgcctttgaggc

SEQ ID NO: 431183 - DNA, 122 bp, Homo sapiens
tgcaggggctctttcgtcaagcgcagggtggctgggtgtgggggtgcggggagcgcgcggcgagggctggagctgggaaaatgacccatatttcaatattaaagccctttacgatcgtcagc

SEQ ID NO: 431184 - DNA, 122 bp, Homo sapiens
acatcacagtacatgaagaaaatctgctttttgtgaaaagccaccaggcattttagatcccgtttaccatgaagtgcagacacagcagatacccagataatacagtcagtgcaaaagtcaaa

SEQ ID NO: 431185 - DNA, 122 bp, Homo sapiens
atatttcaattatcaaagaagattcgaaagaatatcagggggaattcggggaccctagaccggggaccagccgcaacctgggtaatgctggacaaatcacttaacctctcacagtccagttt

SEQ ID NO: 431186 - DNA, 122 bp, Homo sapiens
gggcctcccgtggacgctgctgggggtggaggagcagggggcttgcatcagccctggttgcgacagcactgcccggggacgcagagccagctgtgggcacagtgcccaccgtgagtccctgg

SEQ ID NO: 431187 - DNA, 122 bp, Homo sapiens
ttgaggactctgtcgaccataggcaccctgatggacctaaataaattactcaacttttcacgagaatattttacctaataactggaacttatcatccagaacaatgttttctgcctctttgt

SEQ ID NO: 431188 - DNA, 122 bp, Homo sapiens
actggttccttgttctggagagtatccatctgaagagattaccgctcttctggtgatcatcgccatcatcgtccaacacctgcctatgcaccatgtgccaggaattgtgcgaactgctttaa

SEQ ID NO: 431189 - DNA, 122 bp, Homo sapiens
cccagcactttgggaggcccaggcgggaggatcactttaacccacgcgttcaggaccatccgaagcacatagcaagaccgtgccactacaaaaaatttaaaaaattagcgggatgcagtcgc

SEQ ID NO: 431190 - DNA, 122 bp, Homo sapiens
tcatccaggccactgctgatgacacaggaggtggtacaggtaagggaggtgacatccccacggtgagcaaacacatggctgacccggctgccagtcagtacatcccacaggcagatggcccc

SEQ ID NO: 431191 - DNA, 122 bp, Homo sapiens
attgtacccgtgtttcttcccgcacattgtcacctgtggcttgttcatccgttcatttcgcgtgcactgaggacctctgaggaccttgcgccagactctggagcaagcgcgaaatgaacaaa

SEQ ID NO: 431192 - DNA, 122 bp, Homo sapiens
cggggtgcgaggcgggttgggcgcacgtgcttgtggtcagggcgaggtgcgaggtgccgccggtgggcaacctggttctcttccctgagagtttggaggtcggctccctgctctggccagcg

SEQ ID NO: 431193 - DNA, 122 bp, Homo sapiens
ctccgcccccccgataggtggaccgcgattggtctttgaagaccccgcccctttcctgggcggggccaaggctggggcaggggagtcagcagaggcctcgctcgggcgcccagtggtcctgc

SEQ ID NO: 431194 - DNA, 122 bp, Homo sapiens
aaagagcgcgcgaatatattcattcgacatacctcatgggcgcctaccctgggcctggtccggggcgggtgtttgcggggtggggccgaagcaggggcgtcgccgagttgaagacgtgtact

SEQ ID NO: 431195 - DNA, 122 bp, Homo sapiens
attcttggggaattgaggtgggcagagattggcagcccctgggacctgcttggctccaggcgatctgacagcagggaggattgcgaagtacagatctgtagacggggcgtggttttcaaaac

SEQ ID NO: 431196 - DNA, 122 bp, Homo sapiens
ggactcagggcacgtgcgtctcctcggctggcttccttcccccggccccgggcagcgccgcggatcctgagaccccgccgcgggctgtgtgctgctcagcgcccatcctctgcgcgcgcaac

SEQ ID NO: 431197 - DNA, 122 bp, Homo sapiens
aacaggtcacagactagccaagtggctgagacgagtgtggggtgcgtgactctgcctgcgcgcgcgccagccccgcagctctcgccagagccttggggtcggttctctcccgcctctcccgc

SEQ ID NO: 431198 - DNA, 122 bp, Homo sapiens
gaaacacccaaatcaattcctcagggagcgaaacggcagaggccggcagcccgcggcccacgtgcacttgctcagggaaccgttccagcgaaacctgacccggatcggaatcctcccgcagc

SEQ ID NO: 431199 - DNA, 122 bp, Homo sapiens
cccaggctctcggtgggatgccccgcagcgatgcagacaggggcctgcgggcagaggccacggcctccatgagccaggctatcagaaaggtgggacaagaggccagctgtgctcagtttgca

SEQ ID NO: 431200 - DNA, 122 bp, Homo sapiens
attaaaagagataaaatatgttcacagaattagtggaaatttcctttaactatggagttccggaaatttgacatatttgggtggccttgaattaagatgaataataccatcctctcaaaaaa

SEQ ID NO: 431201 - DNA, 122 bp, Homo sapiens
ctttgtcttcctccactcctttctccctcacctgcagcagccaccaccacccatccccctcgggcctcctccactcagactaaggcatcccctggcatccaggctggaaatctgctagaaag

SEQ ID NO: 431202 - DNA, 122 bp, Homo sapiens
ggtgcgggatataatcttgtggtgcatcgttttttaagcctgtcggaatagcgcagtattcgggtgggagtgacctgattttccaggtgccgtccgtcacccctttctttgactcagaaagg

SEQ ID NO: 431203 - DNA, 122 bp, Homo sapiens
gcatactggcaaaaactgccaaattcatctttttaggaactcagcatatacaaaggcttgcgacaatccaagaagcatatatttaagaaaaacagctgcatttcaagaacaacagccagctt

SEQ ID NO: 431204 - DNA, 122 bp, Homo sapiens
tggcggtggcggtagcagcggcggcggtggaggtggcgcgggcgacagctcggcccggcgcggcccctgaactgtccaactcttgcccgcgccgggcttaagcgcccggccgctgcccccgc

SEQ ID NO: 431205 - DNA, 122 bp, Homo sapiens
taaaagatgggatttgatcatggcatagattttaagagtacgatgtggtgagtaaattgccggtgagaacatcaattgtagtagtaagaaactaggaatacactgctttcttccaccgtttt

SEQ ID NO: 431206 - DNA, 122 bp, Homo sapiens
tttgcttctggacccgtgcatttcaaatcttgcttctctccactgcgcacgtttttccggcgccaggcaccgcaggatatgttcgtgtcttgtgatttttgattctgcgcggtaggtggaat

SEQ ID NO: 431207 - DNA, 122 bp, Homo sapiens
tcgcggagcgcggagtccgcatcatccccagaggtaggacgcagcttttcgccctgaatccgcgcagcggcagcttggtcacggcgggcaggatagaccgggaggagctctgtatgggggcc

SEQ ID NO: 431208 - DNA, 122 bp, Homo sapiens
tgatctgagagtcagcagaagcctagctttacatataatgaagctggggctggaaggaggcgggaggatcatgttacatggcggggtctcccccagatgaccttaagggcagcttggcagga

SEQ ID NO: 431209 - DNA, 122 bp, Homo sapiens
gctcacagcttgggcaacagttatgtgtctgctaatagaaaataatcacacttgattcaccggtgctactcccaaatgttggtttagtgaccatttcatcaggtttggccatttttcaagat

SEQ ID NO: 431210 - DNA, 122 bp, Homo sapiens
gggttcgaggcgtttctcagagcctgtgcttggaactgaccgtcaggaagcaatcggagccgaagccgctgctcccaaacctggccgcccatcggcctggccttcccggagcaggtggcaac

SEQ ID NO: 431211 - DNA, 122 bp, Homo sapiens
agccaatctttaaatcctgtaagattctagacatcagctaggtactgccagtatcacttacgatttcatgtaatctttgatgtacttcttgtaggcttcttttgtgaaacttgtttcctgca

SEQ ID NO: 431212 - DNA, 122 bp, Homo sapiens
aagctgtgattcacacaggcctgggtgactccagcatggctttcctctccaggacgtcaccggtggcagctgcttccttccagagccggcaggcaggtgacctcaccctcctcagagccatg

SEQ ID NO: 431213 - DNA, 122 bp, Homo sapiens
gccttttttcccctccctccctcccgcggcccgttatcctgcggccgcagcactcaccagcggctgcacctgagcctgccgctgcctcagttgctgcctgcgcctccgcagccgccgccgcc

SEQ ID NO: 431214 - DNA, 122 bp, Homo sapiens
ctcacgcctgtaattccagcactgtgggagaccggggtgcgggggggtggatcacctgagcgcaggagttcgagaccagcctgggtaacagggtgaaaacccgtattaaaaaaaaaaaagcc

SEQ ID NO: 431215 - DNA, 122 bp, Homo sapiens
acaccacaaatgtaatcaaagagctgatgaactggcttctgagtaagttcaactaattttcgtagggtctggagagcaaccacgcccctacagaaaagattaaagacaaaatgacaattcct

SEQ ID NO: 431216 - DNA, 122 bp, Homo sapiens
tttggcacaaagtcacaaagcagcatttctgtttggctctattcgcctgcagagcaaacacggcagattggaattcccacttgggctctcaccaactcaaacaggcttggccaagaccttta

SEQ ID NO: 431217 - DNA, 122 bp, Homo sapiens
tttatcagaacttagccagggccagccaagcaggcacagatgctctgctatgaaatgccacgcaggcagagactgacaagcggtaggaactgagctttccccttggactgctgcttcctgct

SEQ ID NO: 431218 - DNA, 122 bp, Homo sapiens
caaagtgagcctccttcctagggactactgtgtgcggtacctggggggtgccagcgcccgcggggtgcgcacccctcttttccccgcctgccccgcgtccccggctgccaggcccgtagatg

SEQ ID NO: 431219 - DNA, 122 bp, Homo sapiens
caaaacggcgtacagggggattctagggccccatggttacttctttggaccccccggaggcgctgtccagccacttccagtcgccctgatgactcgtcgtgggttcctttaggagacccgaa

SEQ ID NO: 431220 - DNA, 122 bp, Homo sapiens
ttataggtgtgagccactgcgactggctagcatttttattttttagaaatcttggccgggcgcggtggctcacgcctgtaatcccagcactttgggaggccgaggcgggcggatcacgaggt

SEQ ID NO: 431221 - DNA, 122 bp, Homo sapiens
gcagcggcccttcctgcgcagcccgctgggcgtgttgcggctgctgcagctgctggccggcgctgccttctggatcactatcgccaccagcaagtaccagggccccgtgcacttcgcgctct

SEQ ID NO: 431222 - DNA, 122 bp, Homo sapiens
atctcgtaatctgcctgcctcagcctcccaaagtgctgggattacaggcatgagcaaccgcgcctggccaggagtccttttcaatagctactaactatgggctaggctaagtgtccttcacc

SEQ ID NO: 431223 - DNA, 122 bp, Homo sapiens
gacgctgatgaagggattttctgccggacaggagaagtcactgtaaatccaggactgacccgtcgtggactgaccagggactccccccacggcccctgcagccccggcagccggacatccgc

SEQ ID NO: 431224 - DNA, 122 bp, Homo sapiens
aatgaaaattattacatactgttgcctgaagggagctcaggactcagtgcgagttcagtgcgtcacagatctcctaagtgagacagatctgagatttaaacacttgagcagatgataaagca

SEQ ID NO: 431225 - DNA, 122 bp, Homo sapiens
acgtggggccgtcagcctctgcagggaccccacccacccacagggaccctgctcaggccccgcaccaggtcagtgtctcagtctcagcgtcgacatgcccacgagacgcccttgtacatctg

SEQ ID NO: 431226 - DNA, 122 bp, Homo sapiens
gctgagtctcaccactccctccagcgggggcctagcttgtcccctggagaactgctgggccgtactacggctcagctagcacctttacccttcctatcccgcttcagcctggctcaggggct

SEQ ID NO: 431227 - DNA, 122 bp, Homo sapiens
gagggagaggaaggggaagctcctgaggatgtgtgagcaggagagccatgtaattagagccgtgaggtgaaggatgggaagtaaggggaagagctgcagtgaacaggggaacccaatactga

SEQ ID NO: 431228 - DNA, 122 bp, Homo sapiens
taacccaaatagtctaaaagacttgcattcattcatgtatttactcgctcagcaaaggttcgttgagcctctattatgtatcaggcacaattcattctacatgcttgggaattagcaaggac

SEQ ID NO: 431229 - DNA, 122 bp, Homo sapiens
aattactgatgtgcacaaaggacccagggaccacttaaaacaaggggaggactgagtccacgcagggatgaagccacaggcacagtccccacgtgcttgacagtggccccgcaacccacctg

SEQ ID NO: 431230 - DNA, 122 bp, Homo sapiens
cgtgagggtgctgcttctcccttcctgctcaggttcagtctctgactggagatcggggaacgctgtccctgtgcagctgacactctctttatctctttctccctctccctctttttgtttct

SEQ ID NO: 431231 - DNA, 122 bp, Homo sapiens
agccattgtcaaggtttgactctaccttaggtaagagccagtacaaatttgaatagtaaccgtatggagtttataatgagagatatatactagtcctgtcctaggagattctccactctggg

SEQ ID NO: 431232 - DNA, 122 bp, Homo sapiens
cttagcagagagaagcagctggaagatctcattagactctccatgttttgtttgtcctttcggaaatttaaactctgagtatattacccccgttgcaaatgcagtctttcaccattgttgtc

SEQ ID NO: 431233 - DNA, 122 bp, Homo sapiens
tgtagggctctgggaaatgtagtgtttttctcattcttttccgggagcccaatgctgcaccgccctctcagcttccgtttttctccccgctcccctggctctcctatctcggccccgtaacc

SEQ ID NO: 431234 - DNA, 122 bp, Homo sapiens
tactgcatacaataatctgtacacatatattctgtcttccctccaaagtctgcagaaggacgtgcacatttctatctaagggcaaccccttctcttgcatattagagtcctgccttcttaag

SEQ ID NO: 431235 - DNA, 122 bp, Homo sapiens
gctggcctccctgacctaccagcgctacaaggctggcgtggacgacttcatccagaactacgtcgaccccagtccggaccccaacactgcctacgcctcctacccaggtgcatctgtggaca

SEQ ID NO: 431236 - DNA, 122 bp, Homo sapiens
ctgccaacgaggtcccgcgagaatcgagagatctcgcgatacaaacccactcgcatctcgcgagcttccactagacccaacatggcggtacagaaaaaaatcagtatttcggaacttaaaaa

SEQ ID NO: 431237 - DNA, 122 bp, Homo sapiens
gcggaggcggagggccacggtggtggtgggggacctgcaccctctcagggatgccctgcccgagctgctggggctcgaggctggcagccggcgccaagcccgcaggtgagtgtccgggaggg

SEQ ID NO: 431238 - DNA, 122 bp, Homo sapiens
ccacagtggacggcaacaggaaggcttaaagtcggaagtggcactggagagtttctacctcgccccaaactcggagccatcagctcccaccgttctgtttggtaacagctttgcgcccagcg

SEQ ID NO: 431239 - DNA, 122 bp, Homo sapiens
tctctgcactgtgggagactccctaatgcgacttctaacaaaaatgtgagcctggctgagcgcagtagctcacacctgtaatcccaacactttgggaggccgaggcaggcggatcacctgag

SEQ ID NO: 431240 - DNA, 122 bp, Homo sapiens
gattccttaatcctcttcattaagtaccgttccgccttctcgtcagaactttgcatagctcgggtcagcactcctagtgctagtcgcagtgggtccgtatcccgaccggcaacgtggtaccc

SEQ ID NO: 431241 - DNA, 122 bp, Homo sapiens
acacttcaggaaatacaagaaaacgaccctgccactgactttcgaatgtgtctgcatccacgcccctgtcccatcggaggggcacagggtaatacatagcactgcgctcccctccttctcct

SEQ ID NO: 431242 - DNA, 122 bp, Homo sapiens
tcccctcccacccgggacctcttctcccctcccatccggggcctcctctcccctcccacccggggcctccgcggcttttaaaactgtctgctgtgtgctgtgcacgtgctgggagcacagta

SEQ ID NO: 431243 - DNA, 122 bp, Homo sapiens
tctgagtggctggtgcagctgagggaggttccaggtggcttgctcgggggctgcccagctcgccgtcctctgcagatcccctcgggactctcagcattttgtgggttagccgtggagacgcc

SEQ ID NO: 431244 - DNA, 122 bp, Homo sapiens
gccgggagcgaaggagacagaattctttggcaggggcgaccttagaatcctggggaggagcgagaatggaatcccggggaggaacaggggtggaatccggggggcggggtcagaacgccagg

SEQ ID NO: 431245 - DNA, 122 bp, Homo sapiens
actggtagctgcgggcagccttgttcctgtgctggcagaggaaccactcacctctgtttccgtctccacatggcctcctctgtatctgtctcttctgtcattctgcatgacggattagccca

SEQ ID NO: 431246 - DNA, 122 bp, Homo sapiens
aaggcacctgggcccttgccaggctgagtcacagctgacttagggaaatgccacacaggacgcttgcagtccccccgttctaagcgtaggttttgcaactgcatactcggaaaatgaatcag

SEQ ID NO: 431247 - DNA, 122 bp, Homo sapiens
ttggacacaaaagtttgtgtgagcatccctggttgacaattctttgtccatattgtcacacgtcattgctgggagaattaagttctgttcatataactccacagggagaggacaactggaag

SEQ ID NO: 431248 - DNA, 122 bp, Homo sapiens
tagtgtctccatttcacagatgaagatgctcaggccccgcctaagtttgcgcttctgatacgtggcagaagcctgtctctctgacgccaaagcccagtctggagtccacgctgctggaccac

SEQ ID NO: 431249 - DNA, 122 bp, Homo sapiens
gctcagccccgaagcgcctgtgaacaccgcccatcccaggacgcacgaagccagttggtacgagcacctagaagcagcactccccatttgtcatccttcccacggggaaggctgcctgctgc

SEQ ID NO: 431250 - DNA, 122 bp, Homo sapiens
ggcaccttcagtgaggcagccctgcctctgcattgggatcacagggaaacatcaggaagccgcgggcaatggctggaaagggagcctctgggacatgggtccttgcttctcacgcgctggtc

SEQ ID NO: 431251 - DNA, 122 bp, Homo sapiens
tgaaggaggcggggtggactcgcggagccggaaagaggtgtctcgtggcgaggcggcacgcgcacgcttgcgtgcgcgccccttttagcgtcacgcgctgagggacgcaggaaggcaagtgg

SEQ ID NO: 431252 - DNA, 122 bp, Homo sapiens
cagggccggtggcggggcggggtccgggactccgcggggctgagcgagagccgcggtcgccgcaggccagtccctccaggtgaagcccctgcaggtggagcccccggagccggtggtggccg

SEQ ID NO: 431253 - DNA, 122 bp, Homo sapiens
cctccctgaggttcttggggcatgccccgcccccctcgctttaaacctgagctttgacctcgagcctacccagggaactccctgggttcccaccccctggcagtaggaatcccaaaacacca

SEQ ID NO: 431254 - DNA, 122 bp, Homo sapiens
ggctgcggaggactgggccccacgacccactgggaggtgccagctctttgggggaggccacggagcccgacccgctccgggcgcgcaggcagccctcggccgacgggagtaagccctggtgg

SEQ ID NO: 431255 - DNA, 122 bp, Homo sapiens
cggcggcgtgcgctgggaggaatgctgggtctgtcgctagcgccaaacttgaccacgctgcgaccttttcactctgtgctctgaccttcaaatctccctcccccgatttttttttttttttt

SEQ ID NO: 431256 - DNA, 122 bp, Homo sapiens
ccccgggtgagggacttgacctccgcctggcaccctggcgtaagggtgattgccacatctcggattcgccgcggggcaactacctgggaaaaccgcagactgggcaatgaaagactacatcc

SEQ ID NO: 431257 - DNA, 122 bp, Homo sapiens
ctcccaccacgtgccaagccacgtccccaagcccgcgccaccaggcagcacctgcacacccgcgggccacgggccctagcacacccgtcacctgcccaggccagagaccgctctccgcgcta

SEQ ID NO: 431258 - DNA, 122 bp, Homo sapiens
tctcaatccggtggactggaacttcgcacagccagaagccaagagcaggccagaaggcaacgggcagctgctgcggaagaagaggccatagctgctccagccggggctccggggcggcagca

SEQ ID NO: 431259 - DNA, 122 bp, Homo sapiens
gaaatgagtgaacagactgctgcattagatacctcgtcgccacgcaataaggcgcctgcccgttctgacaggactgtatccaacaatgacttggcaagtatcttccagtgtccggtctgctt

SEQ ID NO: 431260 - DNA, 122 bp, Homo sapiens
cgcctctgctccctggtcactggaggtgactgcaggctttatgaggacttcctctttgtgcgttggttctgctggaacatccagctgaggttttgcgtgggccccttgctgagggccaggtg

SEQ ID NO: 431261 - DNA, 122 bp, Homo sapiens
tgcctccgcttacccgcagctccgaccactggctcgcgctacccaggtctccgcacgccgcggtggcttcagcccagacctgggcagccagcggagaaagagttaactggcaggggcgagga

SEQ ID NO: 431262 - DNA, 122 bp, Homo sapiens
tctggactgtatatcctagctgccttgtcaacatcttcgagcatcggcagctccggaggccggggtaactggcaggtaactaggctttggagtggtattttaaaatatgtgtcgttaagctg

SEQ ID NO: 431263 - DNA, 122 bp, Homo sapiens
gggccaggtggacccccaggactgcacctggaccgggtcccagctcctactttgggggatcgggtgttttcacttcatgaggccggaggaagcagttcaatcaaagcgcaggtgagaggcca

SEQ ID NO: 431264 - DNA, 122 bp, Homo sapiens
gtgctgcgtggggtgcagttccccgtgggcgccgagggtggtgtggggctgcctctcgctcgctccaccagccacccgagggcccgtgtcctggtcgtggccgcgtgtgctctgctgtgtgg

SEQ ID NO: 431265 - DNA, 122 bp, Homo sapiens
acctaaataaggtcccttgtgcgagttctgcgcacgcgcagccagctgcccgcaccgccccgttgcgtcacaaagagctctggcgcatgcgtaatttcaagagccagcccacctcccgccgg

SEQ ID NO: 431266 - DNA, 122 bp, Homo sapiens
aacccaccactcacaggcggtcccgcctggttccagcgagccgcttccggcacggtagctcgagaaatgagcaagcggccactaagactatggtagctaggagttccaggactcagtttccc

SEQ ID NO: 431267 - DNA, 122 bp, Homo sapiens
caaaacccctgctgggatgaggggccgggccctctctgaccccagaccaggcaaggctcccgtcgtccccactttgccacacttgctcgtctagggggactgaccagcccctgttcgcccag

SEQ ID NO: 431268 - DNA, 122 bp, Homo sapiens
ggaggaagatggagtccagcacatgtctcgggccgtctctggctccggctggagtctgaccgcctgggtcggcgcctctctcctgtagattttcggtacgtcacctgcgcaatccacaattg

SEQ ID NO: 431269 - DNA, 122 bp, Homo sapiens
cccagcaactgagcagttgagtcagttcagttctgcctaagcctcacttctcttcaagcccgaggtgctcagccctgagcctgagtccccactccccacaccacacacctcatacccaggaa

SEQ ID NO: 431270 - DNA, 122 bp, Homo sapiens
cgggggttggcctgtacgagggcacgatgatcgcgctgtgccggtggctcgggatgtagtcggcccgcatgatgtcactcccagggatactgaggttggaggatacaggggaggcctggatg

SEQ ID NO: 431271 - DNA, 122 bp, Homo sapiens
ctgacctacttagtattaccctttttaatcttgtcaaaaattacacagacagggccctgtcgcttgggccacgaagacacaagggagacaaaacgtgctcgggccgagcggtgacgcttcac

SEQ ID NO: 431272 - DNA, 122 bp, Homo sapiens
gaacccagggatcttcctgcgtccccccttccttctgatgccaactcaccaggctggggacgcccccagacaggtcacacaccctgcccgtaggccaggccctcacaccttccacctggcac

SEQ ID NO: 431273 - DNA, 122 bp, Homo sapiens
ctagagcgcaatccgaatgcaagcaggggagaggaggccccagcaggctggatgctgctacggggagtgacggtcacccctgtgtgtccagagcccactccacgcctggaacgcagtaaaca

SEQ ID NO: 431274 - DNA, 122 bp, Homo sapiens
ttcaccattagcagtactcttcttggacacaacctccagagtaaaagcaaatgccggatgcggtggctcacacctgtaatcccagcactttgggaggcggaggtgggtggattgcctgagct

SEQ ID NO: 431275 - DNA, 122 bp, Homo sapiens
ctggagaaccctggccaacacaattgcctcaccatgactaatggagcaggtgagtctgctcgggccctaagctggaggagggcggggtgggggggatggaagaatcttgtgtttgcccgtca

SEQ ID NO: 431276 - DNA, 122 bp, Homo sapiens
tgccctttatctcctaccgctaagagcagtagccagtaagtgtaaaaactcaaaacaaagcgctttcctatctccccagtggagtaaaagcagtgaagcccaaataatgcttagttaccaaa

SEQ ID NO: 431277 - DNA, 122 bp, Homo sapiens
tgaaattcgattctcagtgttggaggtggggcctagtggaaggtgattggatcatgggggcggatccctcatgactggtttagtgccatccacttggtgacaagtgagttctcggtctgagt

SEQ ID NO: 431278 - DNA, 122 bp, Homo sapiens
gggttgctgggaagccaggtcacagggagctcgagaggtgcgggaaggcagctgggcctgcgataaatcagccgccataacctgcccgctttcccagagtcagtctgctccctggggtgcag

SEQ ID NO: 431279 - DNA, 122 bp, Homo sapiens
gagcacgagtcctctgcaagcagtcctcccaacagattggctggaggatggtagtatttccgtttctcagtccctgtctgaaggaagatcccattcagcgggctgatggcgcgggacatatc

SEQ ID NO: 431280 - DNA, 122 bp, Homo sapiens
gtgcagccccgcatgctggcggtgaaggcgctgggtgcactagatgtgggcagccccggacgcgggcagcggcgtcccagccggccccagttgcaccttgactaggttaggttgaaagtaag

SEQ ID NO: 431281 - DNA, 122 bp, Homo sapiens
ttaaaattatcatagagaagtagagaaaataccaggattttcaggagtggacttgacagacgtttgcctgatgtgtgaaacgggtggctgtaggagaaggtgtccatcacacttacgggcag

SEQ ID NO: 431282 - DNA, 122 bp, Homo sapiens
aaaaaatgtggttgttgaatttgctcccactttcttcaccccctaacatcaggtcaaatccggcctagaattcctagtggaaagacagggacgactcttccgcaacacctctcagacccgtc

SEQ ID NO: 431283 - DNA, 122 bp, Homo sapiens
tcttctgaaggatttgatgctggtgcttttcaggtgtgggtcctgacagtgatgttgggacggcagctagccagacagcaactgtaccatgtaaactcacttcagaggtgtagaatgggggc

SEQ ID NO: 431284 - DNA, 122 bp, Homo sapiens
gcatcctttgtctttttgaccaatgcatcccagcacctagaacagtgctgtgtgtgcatgcgataaatactccttacttgaatatataccatgcatggatgtgtacatgtgcacccatgtac

SEQ ID NO: 431285 - DNA, 122 bp, Homo sapiens
gtgcgagggaggttgtgatgtgcttagtgagaagggcaggggtgactaggcttgggaaggcgcgattgtgaaagaaaaagaaaatatagcttcaaacaaaagcgccgaattcgcttggggct

SEQ ID NO: 431286 - DNA, 122 bp, Homo sapiens
ggggcgcaggaccgggggagccgcgccgggacgagggtcgggcaggtctcagccactgctcgcccccaggctcccactccatgaggtatttcttcacatccgtgtcccggcccggccgcggg

SEQ ID NO: 431287 - DNA, 122 bp, Homo sapiens
cctggccaggccacacggccggggcagcttctttcccttctgcaaggcagttggcattatcgcggatgttagcataggaagttctagcgggactagttaaaaatgagggaaaacatggtgtt

SEQ ID NO: 431288 - DNA, 122 bp, Homo sapiens
ggcagtcctcgggggggtcgtggagcaggcggcctaggcccactgtggagggaggggccgcgccccgacacacacactcggcgtcaacccgcacgcccgcggcagtttgacctgcgggcggt

SEQ ID NO: 431289 - DNA, 122 bp, Homo sapiens
ttgtgtttcgttagtgaaacgtgattgtaacccagggtttttgacgctcacagaagcatccgccttggtaatgctgtacatccaggctgctcttctttgtccctaacctggttgcaatgtgg

SEQ ID NO: 431290 - DNA, 122 bp, Homo sapiens
tcttcttttttattataaacaatgctaacctgtgagagtgggctgaccctgtaaatccaacggaggagtcttcggaccgaacggcgaaccgccttcaaaccccaattcttacagccaagccg

SEQ ID NO: 431291 - DNA, 122 bp, Homo sapiens
aaccggttcagactgggagattccatctcggttgagttttcagcccatggcgccgcggagcgtttggaacctgggcctccgcccccagcccgccctcctattggtcagttccagctacagcc

SEQ ID NO: 431292 - DNA, 122 bp, Homo sapiens
tagcgagctggccctggtgaaccgtgaacggaacaagaaatggccagacctggagccctacgtggcccagtattccggaaaggcgcgctgggtgcacatcctccggcgtcgcatcgacagag

SEQ ID NO: 431293 - DNA, 122 bp, Homo sapiens
attgggtgaaatgtcggacatagaactaatcaatctatcccttgcctctaggagaagctacgctttcattatggcagctcaacgtgtgactgaagactcaatctgtccaatctaaaaaaacc

SEQ ID NO: 431294 - DNA, 122 bp, Homo sapiens
tttattaattcagtagcttattaatgaaaagattaagaaaccctggtgagcaaagtggcccgattatatatgcattctttttactaggtgtaagttgcctgtggccaaaaaaccacgtaata

SEQ ID NO: 431295 - DNA, 122 bp, Homo sapiens
gtcgcaaatctttctgtttttgctaaagctgcggtcgcaaggcctagtgatcgcctgaaacgtcgttttaaaggggcgttgcatggaatgttcggccatccctgctgaaagtttttacctct

SEQ ID NO: 431296 - DNA, 122 bp, Homo sapiens
cagggtgcccctctctctgagaatccccttacatgtcactctcagctgagggtttagggccgccgtgtgagggtagctgggcctccatgacctcattgaagctcgtgtttcccatgttcaag

SEQ ID NO: 431297 - DNA, 122 bp, Homo sapiens
aaaggaagaatatgacatattcaatccagcagttaagattctccacaggtctcccgcgggcgtcagcaggggcggcggcgggtgggaaatggcggagtgtccagcctccatctttggcaccg

SEQ ID NO: 431298 - DNA, 122 bp, Homo sapiens
tcaggcctcatgaagattggaactggaaagtcaggaacggtggctcttctctccgtctcccgaggacctcaaggttcctctctttctcacatttctctgtactcattcctgtctcagcaggc

SEQ ID NO: 431299 - DNA, 122 bp, Homo sapiens
ggtgggggcagggatggaaaattacctggagaaaatggtggcgagtggtgtatttaagcacgtagatcattccagacgcccaggtctggccaagccccaggattagaataaccgatgcttga

SEQ ID NO: 431300 - DNA, 122 bp, Homo sapiens
catcgcgtcaccaagccccacgtgcaggttctggcatccatcatggcaaactggagaccgcggtgaattccaccggaatggcgcgcgcattgccacatgggaactgtagttcttggctagga

SEQ ID NO: 431301 - DNA, 122 bp, Homo sapiens
agccctcagggagctcattgaggagctggtcaacatcacccagaaccagaaggtgagtgtcggctagccagggtcctagctatgagggctccagggtgggtgattcccaagatgaggtcatg

SEQ ID NO: 431302 - DNA, 122 bp, Homo sapiens
ccctaaacttggggagcgcgtaggctcatgggaaatagagtctgttacttgtcctgggaccgcggtgggtgtccggggaggcggacttccggtgcactcctgcgcgtgtgcacctctccctg

SEQ ID NO: 431303 - DNA, 122 bp, Homo sapiens
cttggagagagtgactcatagttctgcagccataaaattccagagacagcatcgctttggcgttctggttactttgaaataacaaactgagaggttgtgccattgctctgtaaattcttaga

SEQ ID NO: 431304 - DNA, 122 bp, Homo sapiens
acaggcactgcaaaggaaagcataagttacatcaccttattttttgaagctaattaatctcgggtgttttcatcatcttaaggaatttctacccctagtctggctaacacttacacaaacag

SEQ ID NO: 431305 - DNA, 122 bp, Homo sapiens
gcctacataggcagcggctacggggtcgggggacagccttgaggctggagctcagaagtgcgtagagaatggcggggcggcttgcagctccctggcatgggcaggcccctggttggctggtg

SEQ ID NO: 431306 - DNA, 122 bp, Homo sapiens
ttcatggcttggagtcctcgtttacatcctagaaaccagaacaaattccatgggacctcccgcctccagcccccaacaaccagcggtgggaagggggaggtggtgggagagggccacagctg

SEQ ID NO: 431307 - DNA, 122 bp, Homo sapiens
tcgcaaccgaccaccccttctgcaggagaggtacataatggtcgcaaagagcaggcgaaccgggcagagatcgctcgctcgctcgcagactgagcgaatccggactcacccgtctccttcgc

SEQ ID NO: 431308 - DNA, 122 bp, Homo sapiens
caacatggcgaaaccctgcctttactaaaaatacaaaaattaaccaagtgtggtggcacacgcctgtcatgccagctacacaggaggatgaggcaggaaaatcacttgaacctgggaggtgg

SEQ ID NO: 431309 - DNA, 122 bp, Homo sapiens
cagctggcggcaagggcagtggagagaaaggaagcccgggaaggcagcagcccatgtgagcgtgactgcgtttctaagcagggtgctcagaaagaccaagcgtgagaaggtgaaggcggccg

SEQ ID NO: 431310 - DNA, 122 bp, Homo sapiens
tcccgaccgcccgcctagcactggcctgatggggaagcgtcccgggactggaagggcagccggcttgcgcgcgtggttcccacgcccctcgggctcgggggatcgctccgggtgctggctgc

SEQ ID NO: 431311 - DNA, 122 bp, Homo sapiens
gctcgcctcccgggctgcaactttgggggaactgttgcgcgcgggcgtcgcgggggcgggcgggcgggcggctgtcggcgctccccgcgctcctccctcttggctacccgggcgcgctcccc

SEQ ID NO: 431312 - DNA, 122 bp, Homo sapiens
ggctcggcgctgcgccaggcccgggtgcggggcggagctaggctgggactggctgggggccgccccgcccggcgcctgggcctccgcgccggcccccggggaggagttatgataatttcctt

SEQ ID NO: 431313 - DNA, 122 bp, Homo sapiens
agacacggaagagatgatgcgcgaggcgcagatcatgcaccagctggacaacccctacatcgtgcggctcattggcgtctgccaggccgaggccctcatgctggtcatggagatggctgggg

SEQ ID NO: 431314 - DNA, 122 bp, Homo sapiens
ccaactcctgacctcaggtgatccacccccctcggcctcccaaagtgctgggattacaggcgtgagccacagcgcccggcagaggcaggcattataattaatctcttatacagatgaagatg

SEQ ID NO: 431315 - DNA, 122 bp, Homo sapiens
aaggactgccctaaaatgcaggttcggtgccaggttgggtgagccctcgaggggagctgtcgttctctctctcaccaacttcttcctcaccttacacgcttcccttttctcctccagtccta

SEQ ID NO: 431316 - DNA, 122 bp, Homo sapiens
aactctgctggcgggccaacttcagacgccggcgctgccgcggcgcccaacccaggtccccgaagcaagcctcctgatttaaaggtgagcgcagaccatccccccggcaagcccagcccgcg

SEQ ID NO: 431317 - DNA, 122 bp, Homo sapiens
cttgctggggaaattgctgtttttgatcttttaatcctttctccctgcacctcacccttccgtcttaccaaggaggaaatgaggctccagggatgagggccttatcttggactttatgggtg

SEQ ID NO: 431318 - DNA, 122 bp, Homo sapiens
gcgcgcctccccggccctggagtccctgcagcccgacgatgagactcaagtgtggtggaacgtcctgtgcccactgtaggcacagattgaggaggggagaaaagagatacccggccctggag

SEQ ID NO: 431319 - DNA, 122 bp, Homo sapiens
cacccgaatactgtgcttttccaaccggcttaaaaaacagcgccccacgagactatatcccgcacctggctcggagggtcctacgcccacggagtctcgctgattgctagcacagcagtctg

SEQ ID NO: 431320 - DNA, 122 bp, Homo sapiens
ttctgccacacggaagccacccggtccctgcgtgggtgggggctctctgcagccccccgccgagggaaggttgcatctgttgcttggccttttctgcaggctgccaactcagcaaggagcac

SEQ ID NO: 431321 - DNA, 122 bp, Homo sapiens
cataacatcccaggggagcgcctcacactcaaggccctccacctgcttcctgtcttgctccggttcagtccaggagtgggcactcaagatgtacatccgatgctggtggccctctgctgaaa

SEQ ID NO: 431322 - DNA, 122 bp, Homo sapiens
ggccaggatgagaagtctcatggctgaggtcccgctgagctgtgcagggagagtgaggatcgggctctttgaggatctcttttatgcctccaatggtcagtgcacttcctgtggtgagaggg

SEQ ID NO: 431323 - DNA, 122 bp, Homo sapiens
cacatatttgtgatgaggagcgcacttccaaccatcttttcctgttgctctttcaggctgcgtgctcagcccctcccccagcgccacatcactgcatgccgcaggggaaggctcccagcact

SEQ ID NO: 431324 - DNA, 122 bp, Homo sapiens
gcaagatttattgcaaagagccaaggaacaaagctcccacgctttgcaagggaaccccagcgggttgccactgccggcgcgtgcagcctgcttttattctcttatctggccccacccacatc

SEQ ID NO: 431325 - DNA, 122 bp, Homo sapiens
aaggaacccaacttcatgcggaaaatcttgccatacttcttgtggtactccacctgcagccggccgggcacagcgcggtgtcagcgcgcatcctccgccgtgcccgaagcgctttccctcct

SEQ ID NO: 431326 - DNA, 122 bp, Homo sapiens
gctctttggaatgctggtgtatttttggtgctgtttttctaaactatagggttctgcacacggctgagatccaaacctgttggaactgtttgtctaacttgcactggatacatagagattaa

SEQ ID NO: 431327 - DNA, 122 bp, Homo sapiens
gtggacctctgacgctgtgaataaaactttttctttagttttacaatagatgtcactgtgcggcattcttaaacacaaagaagagggagaaacgaggttactaagataatttagtaactaag

SEQ ID NO: 431328 - DNA, 122 bp, Homo sapiens
tgcatccactcttcctttcccaggtgatagcctgtttgattctccttacctctgtggagacgctgggatgcggaagggtcagaaccaggagccccagtagcagcctctgtgtctttgctctc

SEQ ID NO: 431329 - DNA, 122 bp, Homo sapiens
gaggcagctgtagcggccgtggaggaggtcggctcagccgggcagtttgaggagctgctgcgcctcaaagccaagtaagcggggcggcgagcggtaggagtgaggagccggagcgggagcgg

SEQ ID NO: 431330 - DNA, 122 bp, Homo sapiens
agcagtcctaacagtagcatggtgctttacttcacttagtacagtgacagggccttgacccgcaagctccagcagaaccccaccacgtgtgtgatgtgtattcaacctgcaatggtaacata

SEQ ID NO: 431331 - DNA, 122 bp, Homo sapiens
tccatagaatcctaggctgtattgtccgaaacgccctgctgggaggaggtgaaggacccacgccactctcaaggagtcagacttcaccagcaatgtcgccttccatcgtgggtggcacctgg

SEQ ID NO: 431332 - DNA, 122 bp, Homo sapiens
cttaggagtcgaggccctgagtgtccgtccctggcccccaccccttcctcagaagttgttcgaggagcagctgaaaaagtatgaccagctgaaggtgtacctggagcagaacctggccgccc

SEQ ID NO: 431333 - DNA, 122 bp, Homo sapiens
agcttctagtttagtgcctggcacatggcaggttttcaagagggtttaaagttgacacatcgttttcaatagattgcatgatgtgtaccttaaagaagcttgggatacaaaagcagatagct

SEQ ID NO: 431334 - DNA, 122 bp, Homo sapiens
ctcggccgtgagttcgtggatagatacatcccactgaagtgagaaacttggccgtgagttcgtggatagatacatcccactgaagtgagaaactcggcagggagttcgtggatagatacatc

SEQ ID NO: 431335 - DNA, 122 bp, Homo sapiens
ggcctcagttttcttatcagtaaactgaggaatggtttcctgaagctcaacgcagtaggccgagtggtggcggggcccctgacgataatcacgggaaaggtcgctggagggcaggttggttc

SEQ ID NO: 431336 - DNA, 122 bp, Homo sapiens
caggcggctgcggtggagcttgcggcccggcacttagaggggcgcgggcggcgatgcccccgctggctcccaccttctggcctgcagcggccggctctactgaacttcagagttactcattt

SEQ ID NO: 431337 - DNA, 122 bp, Homo sapiens
gggccgcggaggggcgcggcgggcgcggtaaagaagtttagagatctccgaagtcgctatcgacagtgttactctgaggcggaggagaattaatcagcggtctcatcaatgctccagaaatc

SEQ ID NO: 431338 - DNA, 122 bp, Homo sapiens
tcttggtgcagcctctgaacctcttccagctcccgctggctcccctcttccaagttcttccggacaacctcagccccagccaaagcagcacgcaggccctcagcctcagctcggccggcctt

SEQ ID NO: 431339 - DNA, 122 bp, Homo sapiens
tgcggtgggaaagacgctgaagtggacgggactttacgacacttcgtcaagtcagcaggtcgtaaaacagcaggttgtaaaaccatctttaagatgggataggcgtttatgtgaagcacgaa

SEQ ID NO: 431340 - DNA, 122 bp, Homo sapiens
tccgccctgggcaacagagcaagaccttgtctcaacaacaacaaaaaaggcagccagctgcggtgtgtcacgcctagaatcccatcccagccatttgggaggccaaggcaagaggatcgctt

SEQ ID NO: 431341 - DNA, 122 bp, Homo sapiens
agcacagtgttttaaaatgtctcgaggtgtgaacacattgatccctgcattgtagcttatcgtcctatattgaccactgtttctgtcatgaaatacgtcagatcatcagtttggacacagct

SEQ ID NO: 431342 - DNA, 122 bp, Homo sapiens
cctgatctgaggcctcacaactcaggtgagcaagactgtgtccctttcacatggagaagccgagttccacggaggttgagtgaggagccggcatcacacaaggactcggaggggctcctcga

SEQ ID NO: 431343 - DNA, 122 bp, Homo sapiens
gtaagtgttttaaagaaaactaacaaagcagaaaggggcagagtaaagggaagcactgctcgcagtaaggtgaccagaatgagggagctattcatgcaaaggggaagggaggagtgggccag

SEQ ID NO: 431344 - DNA, 122 bp, Homo sapiens
aaagtggggatagtaatattataataccttatacactgatggaggggatgaatgagttgacgcgtggaaagcactcagaacacggcctggtgcatatagagcacatatgtattagtccgacg

SEQ ID NO: 431345 - DNA, 122 bp, Homo sapiens
ggctgcccacttccggtgggaggagctcgagtccgttactgggtgccgggtccagaccggcgcatgcgtgtcccgctccggcgcggtttagtgggtgcggcctggagagcccacgccagccg

SEQ ID NO: 431346 - DNA, 122 bp, Homo sapiens
ggacgcctggtggcgctgcaggctaagagtgtggatagtgggctctgcggataactcagacgccattaagctggggaatccaaactctaaaagaaggacgcattttaggtaagatctagtgg

SEQ ID NO: 431347 - DNA, 122 bp, Homo sapiens
ccgcagaacccgggaccggaagttccctcggcgccccaggctcagcaggcgactcctcggcgccatcgctgtcgctggaatcagccgcgcgctgccgaaaagtccttttcggcctgtgagcc

SEQ ID NO: 431348 - DNA, 122 bp, Homo sapiens
ctagaagagccagaggcagccttgtgatctcagcggacctggccagagtgggtgggcgggcgccaaggatggcgctccaaagtagagggcacacttggatgccaaggtgtctgtctggggct

SEQ ID NO: 431349 - DNA, 122 bp, Homo sapiens
gtagcgctccagctgcccgcaaagctcctgcagtgccgcctcgccggggcccacgcgcgccggccacagcagcgcccaccgcccgagccccagacctcaggccccgccgccgcccacgtcca

SEQ ID NO: 431350 - DNA, 122 bp, Homo sapiens
ctagcttcggcggtcacatttccgagaggtcggcgggggctgcgcggactcggtggtcctcgccgagccctcccgagagcaggcccacgccgcgccgccggcctggaggacgcgtgtgcccg

SEQ ID NO: 431351 - DNA, 122 bp, Homo sapiens
ctgccagcggaggaggacatggctgtggacgcgggctctgggctttgtgtggcgggtaggcggcggcgccgggccggtctgctccagctcctagggcgggtggaaaagcgagctctgcgcac

SEQ ID NO: 431352 - DNA, 122 bp, Homo sapiens
attatctgaggtggtttcaatggctgattatataacctttcgtctttcatttcagttcaacgaggatctgcataaacaggtaatattcctgctttgatttccttgtggggtgggttgcagga

SEQ ID NO: 431353 - DNA, 122 bp, Homo sapiens
tttaagaaacacagcactgccagggaggctggcccccaataattataataacaacaactacgataatagcaactgatgtgaaaggaatacgagctatgtctcaggcactgttggaggtgctt

SEQ ID NO: 431354 - DNA, 122 bp, Homo sapiens
tggggatgatgtgtacgttggcctgtcctgaagcaggaggtggtcttaatgggctgaagacgctaacttttttttttttgagacggagtctggctttgtcacccaggctggaatccagtggt

SEQ ID NO: 431355 - DNA, 122 bp, Homo sapiens
atgtcaggggagcctgccacatgccagagtctgtgcctggcagagctgagccctggcacacgcactgtttacagctgcctggtatggcagtggtgatatcacccttagagactttgccctct

SEQ ID NO: 431356 - DNA, 122 bp, Homo sapiens
gaactcgtcaacttcctgtcggtacttgaagaagcggagccagggctgagatcccgaaggcgggcgaggtctgggatggggcggggcctatgggagcggggctgaagccctgggcccggcag

SEQ ID NO: 431357 - DNA, 122 bp, Homo sapiens
agaactccggacgggtgagatttggggcagacagcaggggtagtcaccctacaagagtcacgccaagtgcaagcactcagagacatctcccaacactcaaaacagcaaagaagttctggtgc

SEQ ID NO: 431358 - DNA, 122 bp, Homo sapiens
ggagtgagctggttacaaagtgagcccgactttccatggatgcaccatcctagagtgcaccgtgagcccggctttccgctgatgcacagtcccagggtgcgccgggagccccgccgtccatg

SEQ ID NO: 431359 - DNA, 122 bp, Homo sapiens
agcataaacggtctaagacaatacctaaaaatgtgtgcatgatgtataaaatctctaggacgcgcttagatgaataacgccacactgctcctatattctaggaattacagtcacatgagtca

SEQ ID NO: 431360 - DNA, 122 bp, Homo sapiens
aggaaggcctgctcctgggcctctaggcgagcaagcttggccttcattgtgatcccaagacgggcagccctgaaacagacagggtccaagtcaaagcgagggtatcgggggaaatgggccta

SEQ ID NO: 431361 - DNA, 122 bp, Homo sapiens
gtaagggcagggtcattgctagggagctcaaaaggaaggcaagataagggaggttagaggcgagaaagccacctggggctagcacagagggaaaggaaagtgctaacggtcttcatggatat

SEQ ID NO: 431362 - DNA, 122 bp, Homo sapiens
cccccgcctcccccgccccgcctcccgccctccgccccgagccccaccccccgaaggccgcgccccaccgcacctccgcgcacggccaatggcgtgagcccctgacagagtcccgccccctc

SEQ ID NO: 431363 - DNA, 122 bp, Homo sapiens
gttccccaacacaaccttctgtctcagaagggactccggaaatacgtaaaaacagagcgccgggtccacgccttccccaaggaatggggcgtgtctcggcacccctcggtgacgcctccact

SEQ ID NO: 431364 - DNA, 122 bp, Homo sapiens
gctctccacgcaggaagaagatcaaggagtcacggataaagcctctctgggcggccaagtcgcctgtttgtctatggtttcagtaaatacgtctgttgcggcatctagcggctatgggtggc

SEQ ID NO: 431365 - DNA, 122 bp, Homo sapiens
ctatgaagtcatcagaagcccctctcctgagtgagtgtcttcctcacccctcctccatctcggttgccttgctctttgcccatctgcactgctttgagatcagagctttgtctgtccctggc

SEQ ID NO: 431366 - DNA, 122 bp, Homo sapiens
tacaaaaaatagccagttgtgggagagttagcggcctccggtgtgggaaggccacggagccgggccggagacatggcccgggggcccggccagctaggcaggcctcgccccgatacggtcgc

SEQ ID NO: 431367 - DNA, 122 bp, Homo sapiens
ggattggctctctgctatgcagatttagtggtggcggtagcaaactgcttaatttgttcccgtctgtacctctgccacatcccacatacacctggacatatacataagacagccacccctgt

SEQ ID NO: 431368 - DNA, 122 bp, Homo sapiens
ctatgaagtccagtgatgctgaacccctgttgccaaagcagtaacgtgttcattacaacacgttccagaggttttctttcctgtcttaattccccatcttctatgagtgtttctggatagac

SEQ ID NO: 431369 - DNA, 122 bp, Homo sapiens
agggtccctagaagttccaaattccagctgtttgagtggtcccagcccacatgccagccacgtgagcatcaagcattcagaatatttgagtgtcaaccattgtctgacagcaagtgtgtgag

SEQ ID NO: 431370 - DNA, 122 bp, Homo sapiens
gttttggataaaataagcagacgtgtttgaattaattaactttgtaaggcaactcagcaccgagactgaattagtgctgatggaaggagcactgtttcaggagtcccaatacttctgtccca

SEQ ID NO: 431371 - DNA, 122 bp, Homo sapiens
gtactatgtgtcatggaagatgctattcacgccttaataattgtgctttttttttaatatcgtgggtacagaatttatgaaatgtttaccctgtctctcagtatagtggattctcatttgtt

SEQ ID NO: 431372 - DNA, 122 bp, Homo sapiens
agaagtcgtttggaagtctgtgacaagggtttacgcttggatagggtgggcttgatcacccggcagaaatgagacgagtgatcccagccttcccaaccaatctttccagtgacctgggttta

SEQ ID NO: 431373 - DNA, 122 bp, Homo sapiens
gctctgggattcctgccatggggattttacaggcactgctaggctgctcagaggttctctcgctgactcaccctctgaggtgaggaacactgccctctgcagcccctgtactgccaccccgc

SEQ ID NO: 431374 - DNA, 122 bp, Homo sapiens
agcaccccctcccccgccgcggccaggcagcacggtccgcccttgcggctgggatccccgcgtctctccgccttcgctggagccccactgttgtgttgaaggagaccgtccttccgacgccg

SEQ ID NO: 431375 - DNA, 122 bp, Homo sapiens
tggagaggggtttggcgactcagccatgccccagggggaggcttgccggcctgcgggccccgccaccttcctgtaagcgctggtctagctgaatatcaaggtccccggagggccatatttga

SEQ ID NO: 431376 - DNA, 122 bp, Homo sapiens
tacggaactcaaatgccctcacatttagggagaaatagaaagaattacgactcatgaaatcgagctggggctggcacttctgaccctcccaacaggtttccagaaagctatttacacacgat

SEQ ID NO: 431377 - DNA, 122 bp, Homo sapiens
tctttgcttgtaacttctgccttcctaaaatgtacaaaaccaagaactgtaacccaaacacgttgggcgcatgttctcaagacctcttgaggctgtgtcatgggcggggtccttaaccttgg

SEQ ID NO: 431378 - DNA, 122 bp, Homo sapiens
gtgcacggccgagagaggcatgtgctgcagcgtgtccagcatcagagcagctgcgggtggcggatgctcaccgcggggggagggccggggaaccggttgctctgtgtgcacatgcacgcgcc

SEQ ID NO: 431379 - DNA, 122 bp, Homo sapiens
atgcacacctctaatcagatcctggtctttcaaagtcccatcaagttctgaaaataaaaacgttcatacttagtacaatagggatattgatgatatttatatgatatattgtacttcctttt

SEQ ID NO: 431380 - DNA, 122 bp, Homo sapiens
ctgccacggagcacaggagcagggcagaggtaaggaccatggccagaagcatcttgacagcggactggagctcgcttgcagacaccttcaaatcgagtggtatttaaagctccctctcaaac

SEQ ID NO: 431381 - DNA, 122 bp, Homo sapiens
gcgagctgcttctgtaacttggggtcccagtcctgtgtccttcatccatcctgacgaagtcgcaccactggagcatcgcgtcacactgtgcagttacacacagcaacctttccgtgttcacc

SEQ ID NO: 431382 - DNA, 122 bp, Homo sapiens
ctcggtgcgtcggtcagctcgtggcttggggtctctggtgcctccagctcctactacagccgccccgccccacctcaagaagaggtggagcctctcccggcccctctcggacgagctatttt

SEQ ID NO: 431383 - DNA, 122 bp, Homo sapiens
aaagctgtcctgtaccatttaagcacttcttacaaatactaccggcagcaccatttttagcgacaaaagtgcttaccaaaaacacgccctggagtgcccgcgacaacatgctgtccgtaatc

SEQ ID NO: 431384 - DNA, 122 bp, Homo sapiens
aggtaatccttccccatggagcctgctggggcctgaaagaagtagaggggccgagaagctcgacttcccagagttgtttcccggcaaagggcaccaagtgggccaacctcacctttgcgggg

SEQ ID NO: 431385 - DNA, 122 bp, Homo sapiens
tgacacgtgtttgactcgaccaaattttttcacacctggctgacactgtgcgaaacctgacggacatgaatgagacatgtgtgtgacatatgactgacacgtgtgtgacatgtgaccaacac

SEQ ID NO: 431386 - DNA, 122 bp, Homo sapiens
tattattatttttatttttattttccttttccttttctttttttccttaagacagagtctcgctctgtcacccaggctggagtgcagtggcatagtctcagctcactgcaacctccgtctcc

SEQ ID NO: 431387 - DNA, 122 bp, Homo sapiens
aataaataggacaccatttacatttggaagagaaaggttctctgttcattgtgagaagaacggtgaattatgagcaagagaggaaaaggttgcttttgaaagacacaggttcaccctttcac

SEQ ID NO: 431388 - DNA, 122 bp, Homo sapiens
agggagccatccctaggcccctcccctggggccaggcagaggctgcggggccaggcctgacgcagggggcggggtggccgttgggcagcgggtggacctcgggctctaatccccagcagctg

SEQ ID NO: 431389 - DNA, 122 bp, Homo sapiens
agagcacttggcacctgcgacggcgctctccccccacctcacccgcaaggcggcacgagccggaatcttccagtctcaggctgtttgttcccccgcggggcaatgcgactgcgcgtcgcttc

SEQ ID NO: 431390 - DNA, 122 bp, Homo sapiens
gcagatcagggtttcaggatcaactctgccacagatctgccttgaacacttaagctaagacgttacctcccctgaaattctggaccatcttttgtaaaaatagaaataatattactcaagtt

SEQ ID NO: 431391 - DNA, 122 bp, Homo sapiens
agggccactagtgccgggagacgggcaagggctaggccaggcactgtgctgaggttgcagcgctccagggtgagggtgctcaacttggctagccctgcaaaggcccccggagccacaaatac

SEQ ID NO: 431392 - DNA, 122 bp, Homo sapiens
agaacccgcgcccactttccacgagacgctgtctgccacccgcctgcagaacccagaacccgcgcccactttccacgagatgccgtctgccacctgcctgcagaacccacgcccactgccca

SEQ ID NO: 431393 - DNA, 122 bp, Homo sapiens
tcgagggttcgcggggaacaaggccgcgcggccccggctctcccggagtgcacggtcccgcgctcatgcggctagagggaggcacccgcaggactgcccagccgcctctgctcctcaggtcc

SEQ ID NO: 431394 - DNA, 122 bp, Homo sapiens
ttacacaggctcctgaagctttgctctgggttttattattgttatttaaatgttcattaacgtttacagtcagcctagaaaatagaaaggatgtgagagattgttttgtgtttattttatac

SEQ ID NO: 431395 - DNA, 122 bp, Homo sapiens
aacgtgccctgagccctctcctccaagaggtcccctcagcatcaagcagcccaaccaaggcgtgcatcgagccttgcacctcaacaaaaggctccctggatggctgtgaagcaaaaccagga

SEQ ID NO: 431396 - DNA, 122 bp, Homo sapiens
ctcatttaaattgcctttgtttatttttacagtgcaagtgggtggtggggggtggtggtgcggatgctgttttgaaattttaagctcaccctctccaagcaggtgaaccttctcatatgtgt

SEQ ID NO: 431397 - DNA, 122 bp, Homo sapiens
gctccgggtcccgggctcggcggcggtggcggcggcgtcagcgagggagggcccgccccccgcaccgcccccacccgggcccctgaagcgcggggcttccccggcctcccccgcctcccgcg

SEQ ID NO: 431398 - DNA, 122 bp, Homo sapiens
gccgagggtgagctcttacttctgagaaatttcccttaaccttgctttgcatttgttgtccggtcgcggtctccatcaccagctgcttcgtgttatagtttttgtatttgcgctcacggctt

SEQ ID NO: 431399 - DNA, 122 bp, Homo sapiens
attgaggacaggtgggagaatgctcaggcctgagaaaaactgatagctcatttctcccttcgaagagagatggctgttatgactactgctggtttagataaaatagatacagactttgttta

SEQ ID NO: 431400 - DNA, 122 bp, Homo sapiens
cgtctacaaaggttgtggggcaaaagactgtttcccagctctgtctgaggttcagcttggcgacattccctggaagagcgtgacggaaagtgcaatggaggcgggaggagagcgatttctta

SEQ ID NO: 431401 - DNA, 122 bp, Homo sapiens
tgacccatcccgtcccgcagatggcactgtacttctgctcggggctgctgcaggacccagcgcagttccggcactacgcgctcaatgtgcccctgtacacacacttcacctcgcccatccgc

SEQ ID NO: 431402 - DNA, 122 bp, Homo sapiens
ttttatagtgtataaaaatctaacttggtctatgtacaagtccttcagctttccccgtcacgtagaggctcaagtccttatctgtgaacattcattcctcaggcttcctgtgaaatcagaaa

SEQ ID NO: 431403 - DNA, 122 bp, Homo sapiens
cggggcggcggcgttacttggggccggggctcggacgggatccgcttctctccccgccggcggtgtcccaggctccggcctccacttccgcctttcagccgctccggatccggatctccacc

SEQ ID NO: 431404 - DNA, 122 bp, Homo sapiens
actccccttgtggcgcaagctgcagtaggagctacaggaattcaagagacagcaggaaatcgccagtcaggggaaaactgggcagagaggagggcaaagtaccaaatacaccctcaccaggc

SEQ ID NO: 431405 - DNA, 122 bp, Homo sapiens
tccaatgtcttttcctcacaggtcctaagtagaaagcttggcattaaagcttgcactagacgggagaaaaccaacgctgtccaactagatttggttaatgcaccctgttctgaatgctcaca

SEQ ID NO: 431406 - DNA, 122 bp, Homo sapiens
tttcctatccactccctgctgtgtaggtggggaggaaagggagaaacgctgtgaatcagtcgactgctcctctggcaagcaggacccatttctaaagcatgagtcactacaaaatgtagctt

SEQ ID NO: 431407 - DNA, 122 bp, Homo sapiens
gaagttaggctcactgatttggggcatgttctaattctaccagctaggaacacacagaatcgcttgtcaaacattctgagtcagatatgtcctccctatgtcttttctgagaaaggcataca

SEQ ID NO: 431408 - DNA, 122 bp, Homo sapiens
gaatggcatgcaaaggaggtggacgatattcaggatttggtaggacagtggaagcagctacgccccagctatcgcacggtccccagcatttgtaggaaaaagcccccagggctttgggtagc

SEQ ID NO: 431409 - DNA, 122 bp, Homo sapiens
ggaagatctttgttgggtagaataacctcaatagaggcttctctgctgaagaggggaatacgttttgtgtgatcaagggaaactagagaggatgtcaaactgtgctaaatatctgcatgtag

SEQ ID NO: 431410 - DNA, 122 bp, Homo sapiens
acaaccataatatcataggtagaaagagattggactagagggcaggcctgtacaccaagacggacctctgagaatgagtagtaagtggttctgattctctgaggccaaaactgtcaggactg

SEQ ID NO: 431411 - DNA, 122 bp, Homo sapiens
ccaaatgacaatccctggacatttttgggctcaatttatatattacccccaaaaagtcctcggtaagattaccttaaccttgcctcttaaaagttaagcagaaataatctatcttttatgcc

SEQ ID NO: 431412 - DNA, 122 bp, Homo sapiens
gcacacagcccaggcaccaactcatccacctcacacacgggagcactgcccaaagccacgcgccccggcacaggctcccgcccacaccaggaggacgaccccagtgcccgcctcaaactccc

SEQ ID NO: 431413 - DNA, 122 bp, Homo sapiens
gaaccagtcgttgctggaattgcacgctctagcctcagataaaggtgacccccatttgtgcgatttcctggaaacctactacctgaatgagcaggtgaagtctatcaaagaactaggtgacc

SEQ ID NO: 431414 - DNA, 122 bp, Homo sapiens
atttccaagatacctgaaattacatgtaatcatactatttcaaatcttatcttgaagctccggctgggttatttcacagtggccttcacttggtcgctgtggagacattgagctaccacgca

SEQ ID NO: 431415 - DNA, 122 bp, Homo sapiens
tggagttgttccacagagttcaaaggacaagaatgctgtgtgttcatacactgagctcttcgaagtaggaacttcgccctataaagcagaagagtggtgtttttttcttcttcttcttcttt

SEQ ID NO: 431416 - DNA, 122 bp, Homo sapiens
ctggctcccaactccgctcaccccctcctatacagggctcttggttcaggtctcttggttcgtcctgctgcaagttgggaagaaagataataggaatgctaattccttcttgatgaaacgac

SEQ ID NO: 431417 - DNA, 122 bp, Homo sapiens
cccggcgggcgacgtgaaggctggggactgaggctctgcggactctggggcctcctgggccgtccctcccggtgtcctctaaaccttctgaaaactttccactcagaaaatgtgagttctac

SEQ ID NO: 431418 - DNA, 122 bp, Homo sapiens
ctcaatctcctgacctcgtgatccgccggcctcggcctcccaaagtgctgggtttacaggcgtgagccaccgcgcccggcagagaacctcttgaacccgggaagcagaagttgcagtgagct

SEQ ID NO: 431419 - DNA, 122 bp, Homo sapiens
gaaggtggtagttgaggggggttgtgaaggaggagtaggacttagaaagtggggcacagtcgcctgggagaggagtcagcgtttgcaaagtcatgaagctaccgggacacagctgggctact

SEQ ID NO: 431420 - DNA, 122 bp, Homo sapiens
agacggtactacctcccagctctgttttccatccccttcaggtccttcctcgggaggcggcgaaggcggtccaccctgcgcgtgatcctttatgcccggcccctgcccctccctccgggtgg

SEQ ID NO: 431421 - DNA, 122 bp, Homo sapiens
ctgaactaaattgtgctgtaacacagccctgtgttgggggattgggagtaatcatgcaaacgcttgcaaatttgcacagtgacagagacaatcgtttggacagctgttcactatatgaaaag

SEQ ID NO: 431422 - DNA, 122 bp, Homo sapiens
tacccttctcaatctcatataagccatgctggttccttctctccacatgcccatccttttcgttaaacttaggagagaagttcctttcacccacttgagggtctgcccacacgggcccaggc

SEQ ID NO: 431423 - DNA, 122 bp, Homo sapiens
gcagcagacgggagccacaggcgtggaacttcccactttgtttcaggacagccagcagcacgtccctcccttcctctgggtttgtagttgtttgtttgaacttgagacttcctgaggcctgg

SEQ ID NO: 431424 - DNA, 122 bp, Homo sapiens
actccgtctcaaaaaaaagaaaaaaagaaaaaaagaaattccacctgtgtccttgtgtcacgtggcacacagcataagattttagtcttgctcataccagacttccttcagctgctcttcca

SEQ ID NO: 431425 - DNA, 122 bp, Homo sapiens
aaactaacgtcatcctgggtaccaaggagcctgattcgcccccctgttccccgcttgggccgagttgtcctcccggccgcctctttggtcccctggcctctggggctcagtgggctgttccc

SEQ ID NO: 431426 - DNA, 122 bp, Homo sapiens
gccatcatacctccaattacagctttgagaaacccagaatcctgttcactggaaggttgccgggtggcggctgacagcctcaaagtcgcaattgagtctgcgcaccggccattcaggatggg

SEQ ID NO: 431427 - DNA, 122 bp, Homo sapiens
cctggacacagttggtgactaatagaagctcttgtcttcaaaagggccacctctggccttcgcctattaccttgtctttgttggggagaccatgggtgtttcatttctcctctgccaataga

SEQ ID NO: 431428 - DNA, 122 bp, Homo sapiens
ccaccagcaggaaatgcccacagcaggtcagaccaccccaagctcactggcttgagagaccgcctgtccacgttgcttcgtgtgtgtgtgcctgtgcatgtacctggcagcccggtatcaca

SEQ ID NO: 431429 - DNA, 122 bp, Homo sapiens
ggggagcggcgactccgggaagagcggggccgcagacaatggacgcggcggtaggaggggcggcggctgtgggaacagccgggaggcggcacccgggagctcgcgctcccccgccccctgca

SEQ ID NO: 431430 - DNA, 122 bp, Homo sapiens
tcagatattgccagattccgctccagggtgtttcccgtctgcattcccaccagcagtgcacgagagcacctgtttccccacagcctcgccagcagaccgagttctcgaactttggagttttt

SEQ ID NO: 431431 - DNA, 122 bp, Homo sapiens
tgctgtctaagcttggatacctgagtaataacggacaacagataaagctccgcatccttgcgccacgtgcttcggtccgtggtttgcgtgcagacgtttgacctgtatggtgaccctcgcga

SEQ ID NO: 431432 - DNA, 122 bp, Homo sapiens
cctccgccgcctgaagtcccgctctctcctgaagccgccatttccccggcccagccaccacgtgacccttctgcgcaggcgtcgcctcacgtgattcttacaggtccgctcctctagccccg

SEQ ID NO: 431433 - DNA, 122 bp, Homo sapiens
ctatcaaccacgaatcctacagtcagctcaactatcattcaagagggaggacaaaacagccgttttcagacaattccggatagactgtcatggaatagaaaaactacagggtgcatttcagg

SEQ ID NO: 431434 - DNA, 122 bp, Homo sapiens
agttgagaggggccgctgtttcgccttgtccgtcagtgccagtgcctgtgccagaggtggcgaggtgagtcctccagagcttcctggccgggccctcctcctgcctgttctggctcctctgc

SEQ ID NO: 431435 - DNA, 122 bp, Homo sapiens
gcccatggcgactgcgcagaagacaggcggggttttttttctccctctaacattgtattacgatcattttaacgcatacggaacagttgaaaacagtgcagtgaacacctatatacctccgc

SEQ ID NO: 431436 - DNA, 122 bp, Homo sapiens
tcattccgccgccgccggggccgggacccgagacgggctcgctgccccatggcaccccgtcgccctccatcgcctctgcccgctctgtctttgcggctcggtccccggccgcaggcccggcc

SEQ ID NO: 431437 - DNA, 122 bp, Homo sapiens
ctgggattacaagcgggagccaccatgcctggccacatctgcttcttttgtcaacccctccgggtgtagcacgtgtctcctgggcactgtcacctttcaccttgtagacctgtcctccagcc

SEQ ID NO: 431438 - DNA, 122 bp, Homo sapiens
atgtgtccacccgcgcgctagagtgcgccaagatgcagaacgcagaagctgccgacgccacgctggtgttcatcggctacgtggtgccagcactggccaccctctacgcgctggtgctactc

SEQ ID NO: 431439 - DNA, 122 bp, Homo sapiens
atttggatttcccttaatgtcctttttctgttccaggatcccattcaggttacatttagtcgtcatgtctccataggctccacttagctgtgagagtttttcagactttgcctgtttttgat

SEQ ID NO: 431440 - DNA, 122 bp, Homo sapiens
cccgggatatgacctcaaatttcacccctgcgaaatttgagtacacgtgagtcagtcagtcggcctggacccataagagccccagctgagctaccagcagctgagctaccagccgacctcat

SEQ ID NO: 431441 - DNA, 122 bp, Homo sapiens
gaagactggtgtaaagcgaagaaggttctagagtcaaactctgactctcggggcctgactcgcaaaactcgggggctcccgagaagccgcggacgccgctctgcacctgttgccgccgtcac

SEQ ID NO: 431442 - DNA, 122 bp, Homo sapiens
attacaggtgcccgccaccacgcccagctaattatcatatttttaatagagacgtggtttcgccgtgttgggcaggctcatctcaaactcctgacctcaagccatcaagccatctgcccacc

SEQ ID NO: 431443 - DNA, 122 bp, Homo sapiens
gcggaggcagagtcgcccagcaccgacttcgccatttttgtgcggggcgcggggcgcgggcggaggaggtggagccaatggaggttgatgaaggtcaacctttaataaagaaatccgactcg

SEQ ID NO: 431444 - DNA, 122 bp, Homo sapiens
gttaccatcaagaggtgagatgggagggggttcgcccggtcgaccggcaaaagggaactgcgacttctgagcgaatcttactgctatccaaaaaaatgcaggccttctagcgactgcatggg

SEQ ID NO: 431445 - DNA, 122 bp, Homo sapiens
taattcactgtattcaactaatttccgagcagtgcaaaccggagagctccccattcccagcgccaacggcaggtttgcgcgcccctccggcccgcggttactccccgccctgctccaggctg

SEQ ID NO: 431446 - DNA, 122 bp, Homo sapiens
ttccttatcaattgatttctcattgaaatatcctgcagtaaaattcagtagtgggtgcaccgtggaaatagagcctgtttcattggatgtagcactgtttataaggcagcctcggacaccac

SEQ ID NO: 431447 - DNA, 122 bp, Homo sapiens
tgctgaggagtattccatagcataggtattctagtttagctactttgctagtagaagcaacgctgtaaagaaatccttgaacacgccttcttgtacagaagaatatttctcaaagacagata

SEQ ID NO: 431448 - DNA, 122 bp, Homo sapiens
tgtggtgcgtgttccggggctgtgctatgcgcagtgactctgggtctgtggtgcgtgttccggggctgtgctatgcgtagtgactctgggcctgtggtgcgtcctgcggggctgtgctacgc

SEQ ID NO: 431449 - DNA, 122 bp, Homo sapiens
gcacgcactgggcgaccagcctgaggccccgcccctcggccggctccccgcccgaggccccgcccctgagccagccccagcccgcctggccgctcgagtcacccttacccctcccgaggagt

SEQ ID NO: 431450 - DNA, 122 bp, Homo sapiens
ggcagagtgttctggccaggggcccccccatgccccttgctgaagctgagacattctgcacgttgggggtaggaaggggcgggacaggaagtcctccaatgactgtgaatgaggtggagggt

SEQ ID NO: 431451 - DNA, 122 bp, Homo sapiens
cttggagcttgattcacttcgctgccgctctggccagcaccgctcaccgtcagttccatccgaggctggctgtccaggctgttcatgacgcaggccctgttgcacggtttccttatagagtc

SEQ ID NO: 431452 - DNA, 122 bp, Homo sapiens
attggaaaaatacttgcttcactcaggcttctcaaaacaagactcaggatttgttagctgcggcagccttgccctctaatggctggaagttgaaggacaggactaaaatacttttgactata

SEQ ID NO: 431453 - DNA, 122 bp, Homo sapiens
agctgttcccagggcagggtgggagaccaaacagggagacaaaggtacttagcaagccttcgcatttttgaaattcatcctaagcctgagtgctaatcacctgagctgccaaagggcagggg

SEQ ID NO: 431454 - DNA, 122 bp, Homo sapiens
caaataagataatgggaacgggtgttgtcaggcattacacaaatgtaggattaggtccagcggtttactaacagaggtctggctcaattccagcgagtcccccctggggagcatttaacata

SEQ ID NO: 431455 - DNA, 122 bp, Homo sapiens
acttcagcctccatataatctttgtgtctttaaatgggtatgtctttccttctgctaggccgttagtgctggtatttgagttaatctagttaggaattggtgtagccaagtccaaggttgta

SEQ ID NO: 431456 - DNA, 122 bp, Homo sapiens
tcacatttcctaaattgtcttacacattgtttatccagtgtgtacgtttgaactgaaatccgagtaagatacaaacattgctgttggctgatgtagttatacattttccccttcacttcttt

SEQ ID NO: 431457 - DNA, 122 bp, Homo sapiens
aggcaagagaagagaccaagctggggctgccttacccaaaagcccagtgcccagccatctcgccggggctttgcctccgtccccagccccgggcatagtcctgttctctccggagcgcgcgg

SEQ ID NO: 431458 - DNA, 122 bp, Homo sapiens
cgttccggctccggctctgctggccggtctaaagcggcagccgccggggcgcaatgcgagcggctggcgtaggcttggtggactgtcactgccacctctccgccccggactttgaccgcgta

SEQ ID NO: 431459 - DNA, 122 bp, Homo sapiens
aaagactgagattcttttgacaggttgggcagttcggtggcacttcgggaatgtactgtacgtggtggagcgggaggcagggaagaacaggcgcaggggcagcgatgagaaagcaaggagag

SEQ ID NO: 431460 - DNA, 122 bp, Homo sapiens
ccttctgagtcaaaaacaattcagctgcaggtgctgctatgggaaaaaaatgcaaaggggcggcagcttttcaaaaagtcagatggctttgtccaaatttaacgtgtccaacatttcaagtt

SEQ ID NO: 431461 - DNA, 122 bp, Homo sapiens
tttatgcatatgaaagcatttctgtccagataaggttgtgccaattcacagctgctccagcgacagtggtgtgcaagtgcttattttctgaaatccttgcaaaaaaaaaaaaaaaaaaaact

SEQ ID NO: 431462 - DNA, 122 bp, Homo sapiens
cgagctcccgggccggcggcagagggcgggcgcctgtgatccgtggccagggagcgcgtgcgcgccgagcatctgggggcgccctcctgtgatcccccgccaggcccagctctgtggcagag

SEQ ID NO: 431463 - DNA, 122 bp, Homo sapiens
gactgacaccatcagtgctcctggttctcagaccttcggacagcagacttggggccttctcggcctccattattgtgtaagccaattccttataataaataagggtttatttattgataaat

SEQ ID NO: 431464 - DNA, 122 bp, Homo sapiens
ccgggcgggcagggccggccggctgctcccagtgcggggcccgccaagcccacgcccacccggaactccatctggcccgcaagctccacacgcagccccggttcccgctcacgccactcctt

SEQ ID NO: 431465 - DNA, 122 bp, Homo sapiens
cccagccccccggggctcggcgggcccgcagcgattgggcggtgagctggtcagggcacccgcgggcccgccccgtcccgctcgccctggcccccggctgaaggcgggcgcgtcctgcgcgc

SEQ ID NO: 431466 - DNA, 122 bp, Homo sapiens
tggccctgtgtgcccttggtctcttgctgtgtgtgtgtactctggcttcagaagcagagacggactgtgttaccttccataatgatgccgggtaaaggaggcattagctgatctggtgaaat

SEQ ID NO: 431467 - DNA, 122 bp, Homo sapiens
tcatggtcacaatcagatgaagaaaatgaggctcatggcagcaatttccccatgtcacaccgattggtggtgaatgattgaacctgtgttggaacctccacatacctcattaaacaccccac

SEQ ID NO: 431468 - DNA, 122 bp, Homo sapiens
ggaaggggggaggggggagaacttttgctgtggcagcttcggcaacagctcccacccctgcgcctttctcctcttcctccccctcctcctcctcctcctcttcctccttctcttcctcctcc

SEQ ID NO: 431469 - DNA, 122 bp, Homo sapiens
ttcgcagcagtggaagttcacgctcaacctgcagcagtaggagggtccgggaggccctgccgtcctgtctcctgcaccattgggtggagtctggtgatcacattattgattatgtttcttaa

SEQ ID NO: 431470 - DNA, 122 bp, Homo sapiens
agtggtggtggcgaggggacataggatgggtgaggtttttttttttttaagatggagtttcgctcttgttgcataggctggagtaaagtggtgcaatctcagctcactgcaacctctgcctc

SEQ ID NO: 431471 - DNA, 122 bp, Homo sapiens
gttggagccgcccaccgtggtggagaccctgcggcgcgggagtaagttcatcaaatgggacgaggtaagcgcgcgggcccctgctccgcccaaatcccgggactctttcagtcaagctcgac

SEQ ID NO: 431472 - DNA, 122 bp, Homo sapiens
tactgccttcaggagacaaagcccaaaggaaagcagctctgtaatgcgatcagaggcgtccgcctgcctggctggggacctggacacccatgcaggatgcagagcttacaagaaattgagtc

SEQ ID NO: 431473 - DNA, 122 bp, Homo sapiens
ccaccaccaccacacacacacacagtaaaggcaaagtctctttggcccctgaaataattccgcctgatctcaggaaaggtaacatcctcctccccaccccacccccgagttaggctccatct

SEQ ID NO: 431474 - DNA, 122 bp, Homo sapiens
gttgtctctcgtctactcccttcccttaaactcaccaaaccagatttttactcccaacaccggcaacttcccgtaaatctgccctgaaattttatcctgctggctgagcctcccctggctaa

SEQ ID NO: 431475 - DNA, 122 bp, Homo sapiens
ccgctggccgagtgggcgggacctaggggtggggctggaggctgaaacttgccaaagtcccggcgtgtgggacttaggggaggggccgcgagagccgtgggaccgagggggcggggccggac

SEQ ID NO: 431476 - DNA, 122 bp, Homo sapiens
cccgcgctccgaggccgccgaggaaacgaaacctagctcgagaggagcagtccctgaagccgtcaggaagtcacgtggggtgcgggggggcgggcggcgaggactgggcgggcctcgcgagg

SEQ ID NO: 431477 - DNA, 122 bp, Homo sapiens
gcagctggacgagtaccaggagcttctggacatcaagctggccctggacatggagatccacgcctaccgcaagctcttggagggcgaggaggagaggtgggctggggagacgtcggggaggt

SEQ ID NO: 431478 - DNA, 122 bp, Homo sapiens
gggcggtgcgttcttctacacatgcgcagggttgggcgggtcttcttccttctcgcctaacgccgccaacatggtgagtcttactgttgcgggctccggggccgtcgaccatgccgctcgac

SEQ ID NO: 431479 - DNA, 122 bp, Homo sapiens
cttcctgagcaggctgtacatggaagcaattgctccgacacagacagggacaccgtggtgcgtctctcggccccatcacgacggcctgcaccacatcccaaatcggaatccagctcatgcat

SEQ ID NO: 431480 - DNA, 122 bp, Homo sapiens
tctaacatttagttatggtaatcacaagtatggattaaatagggacaccgtagaaggtatcgcaagagatggtttggcaagctgtattcatatggaaatagaagtaagtgttttcattcaac

SEQ ID NO: 431481 - DNA, 122 bp, Homo sapiens
gcctcagggtccgggcgagcggccgcggcgcatcccccgccctgtcagagagactccgcccggcctgagcaggcacatcccccgccgcaccccgcccagagagcacgcgttggaccgccgcc

SEQ ID NO: 431482 - DNA, 122 bp, Homo sapiens
ctcacatcctcccagagcatccccgtgtccatttccccaccccaagctccatgcttctcacggctatgtcttgcgtccctgcatctgtacccctcacgtcgcggcccagcccagcaccccta

SEQ ID NO: 431483 - DNA, 122 bp, Homo sapiens
cacgatttctcctgcctcgtacagacacaccgcacatgtgtagtcggaggaggttttgctcgttcttgattgttttgcccaggtagtgtcgcactatatcgttactctgcggcctgctttga

SEQ ID NO: 431484 - DNA, 122 bp, Homo sapiens
aattattccaaagggtcttaaacgggtacctctgatctttctggtttattaggccaaggacgacctatgaatttcttctctgcatcacagtgtatacatgtgcatgctcccaatgtccagag

SEQ ID NO: 431485 - DNA, 122 bp, Homo sapiens
ggtgagcggaaatggtgagcggaaatcagtggttcctgaggcacagaggacttgggttaccggaggcttgccctcagctgaggacctgggaacaattcctgagcaagttgcttttttgatag

SEQ ID NO: 431486 - DNA, 122 bp, Homo sapiens
agcttgtgaaaaatgtaattcttggagcaggtgccatgtgcctcaagtaattttcccccccgggcccttcaatttggatttagtcaggtgtaataggaatggcccaatttgcataatcttct

SEQ ID NO: 431487 - DNA, 122 bp, Homo sapiens
ccaaagagcaaggcctgcccctttcgacctgtgggtccaaaggtttgtgtttctggcacgcggggatggtggaggcagcaagggtaggcctgagggacgggcaggacctccccctcaccttg

SEQ ID NO: 431488 - DNA, 122 bp, Homo sapiens
tgaaaagtttcaagtcagtggacatgaaaatatactccctttccggtctctagccctatccgttactccagctgaagcataaagcaaatgtaggggtgagtgaaatcagtgttagaagtccc

SEQ ID NO: 431489 - DNA, 122 bp, Homo sapiens
attgaaacgacatccatctgtcggagtcagtgtgaacagagctgtgccttggggcagaggcggaagctgggggacctagcagggcctttcctgtccttaggtcctatgacattaagcgggaa

SEQ ID NO: 431490 - DNA, 122 bp, Homo sapiens
accctcttcagtaaagctgtgacctcttgcaggcagagggaagaagtcaatattgaaacacgtgaaagcactggaaattcagactccattactttgaaatctaatggctgtaggacagcctg

SEQ ID NO: 431491 - DNA, 122 bp, Homo sapiens
gggttgggttgggtctttgacagctttctttgccagattcaaagatggcgcttacggccacgctaagaatgcagcgtgaagctgcagttctgccatcactcaagatggctgcccccatcaag

SEQ ID NO: 431492 - DNA, 122 bp, Homo sapiens
tgcatgcattatttcctgcaggtaatattcatacacaatttaaggattttaagaaacaaacgaaagagatttgtggacgaatacggcagacagatcatatgtgcttattctttgctccaccc

SEQ ID NO: 431493 - DNA, 122 bp, Homo sapiens
cggggcctcgggcgcggcggcggcggctcctcctcgcggctgcggcgccttctccgagcgcggctgctctagcaggggatccgcaagctcaagtccatccctgctgccctcccacacaacaa

SEQ ID NO: 431494 - DNA, 122 bp, Homo sapiens
cagggcttcgctagggaggggctccagcaagaccctgtttaaacctccttcccaccacagcgtgggcgccacgtcgcactctctgggtatgtctcaaggtgtggataatgcagacttctgag

SEQ ID NO: 431495 - DNA, 122 bp, Homo sapiens
cacgcaggatccctccgctgggacaagtagtgccctgagactcccgaggctctgcatcggcgcagccggtgtcatctagcggccggcagttccgagcgacttggggtccttgtgcctcggag

SEQ ID NO: 431496 - DNA, 122 bp, Homo sapiens
ggagcgggtcatgaggagcccagggcctggccgctgctccagggacctggttgaatggcccgagtcactgttgacggcgtttgaacaccaggaggtgtgggtgccggacagctgcagcttct

SEQ ID NO: 431497 - DNA, 122 bp, Homo sapiens
aaagagcccttgggccctcaacaatcagtagcggtacccaggcagtacttgttgtaggcacggggtgagactcagagacttgctggcttaagctgtgactcagcacattcctagctgtggtg

SEQ ID NO: 431498 - DNA, 122 bp, Homo sapiens
caccttcccggggctgctgaccgagccccagggcagctcgcccttccccctcctgaagcccgaggtcttcttcatggctccgtctaccggcttcggagacccgctggactttccgccgcctc

SEQ ID NO: 431499 - DNA, 122 bp, Homo sapiens
ctgaaggcaggcccctgctctctaccacctcctaatcattgcagacacaacccacccccacgataaggctgaaacagggaaaccagcacaaatgaactgactacagaaacccaaattagtaa

SEQ ID NO: 431500 - DNA, 122 bp, Homo sapiens
tcttatttctctgtttggtaaggcctaggagccaggtccttagccatgcctctggggtcacgccaggctttgttgaacctccccccatctggagaaaagggctgcccagcatccatagggca

SEQ ID NO: 431501 - DNA, 122 bp, Homo sapiens
ccaggatgcagacagtgagcttcccggccgtgggcacatagcgcagggaggtgcagatgtcgcccagcttctccggctgtccaggggaagagcaggacttgggtcatctcacccatcctagt

SEQ ID NO: 431502 - DNA, 122 bp, Homo sapiens
tcaccaaactgcccaatgccttaaccagagacattcaaactgcaaaccaggatgagaagtcgatggttccgcactgtagacaggttttcccaagataattgaacaaggggagactcttaccc

SEQ ID NO: 431503 - DNA, 122 bp, Homo sapiens
cctttccccagttttttaaaatgactatgcacaattctataactgggaaaaaaatcactacgcattagagggagccacactgaccatgagagaagcctggactcagcactccacaggcctgc

SEQ ID NO: 431504 - DNA, 122 bp, Homo sapiens
gacccggcttctgctcgcagcatccaagaagttgcaataacgtggaaggatggggaacggcgcctccctggctagcgtgaaactcagccacagcacaaaattgaggctgttggccgtgagcg

SEQ ID NO: 431505 - DNA, 122 bp, Homo sapiens
ctaagcccgcctcccgcgcgcccgagggcccggtgtcccggaagacgcgcgggggtgaggcggccctcgcgtccgcccgccccgccacagattgcctccgaagtggcctggccgtggagcgc

SEQ ID NO: 431506 - DNA, 122 bp, Homo sapiens
ggtccactacgtgtgggtaaagacactctaattagtgttattgtaacccggtttcctgcccgtggatatgctaaatcatgtgaactgcatgaatagcgaaatacagtggcaagtgtttcaga

SEQ ID NO: 431507 - DNA, 122 bp, Homo sapiens
gtgtattgatggcagtaaaagaccagcgggggtgaacggaaaatatgttctttgaaaattcgggatgcagtataggaaagttgctgatccaccgaatttgggcgatccaccgaatttgggca

SEQ ID NO: 431508 - DNA, 122 bp, Homo sapiens
ctccctaggcgccgcgccgctagggttgttccctagtttacgtctctgggcaaagcctctcggggaaggaaaaaaaacagcggtaaaccaaaatccacatatttgggccccagtgcttccct

SEQ ID NO: 431509 - DNA, 122 bp, Homo sapiens
cgacctcctggttggaaagcctgtagagcagcgcggatgacagtggaacagcgggtcaggcggtgggcgcctgagcgaggggctagagcgggatgggcgggcggagcaagcctgccagcctg

SEQ ID NO: 431510 - DNA, 122 bp, Homo sapiens
ggaagagatgctgctccctgcaggccaggccggctccggtggaaggaagtcctgggcgtccgctgcaggccaaggcctctcctgtgcacctgccctcactgcggctggcagggacggacgtg

SEQ ID NO: 431511 - DNA, 122 bp, Homo sapiens
cccaccgctttctggtgtcgcgcctttcaacccgggggggtaggaagctttctgttgctccgcataactgtggtcagctaatagctgctggtaagatcagcacgctttcatcagaaatgcta

SEQ ID NO: 431512 - DNA, 122 bp, Homo sapiens
gaggactgcatggttagaaaggcctgtttcagaattgcccagaagcaccagcctctcctgcgagtgccatcagggcgctccggcaccttcaggagggaggtgactgcagggcgcacagacag

SEQ ID NO: 431513 - DNA, 122 bp, Homo sapiens
tggagacaacctgtgcaacatggtaaaaccccatcttcactaacaatataaaaattagctcggtggtgcaagcctgtagtcccagctacaggaaagggaggctgagacaggaaaatcgcttg

SEQ ID NO: 431514 - DNA, 122 bp, Homo sapiens
cgcgtggaaaacgagctgatcaccatcctccccttccctgcagcccaccggttcccaggacgacgctcaaacgtcagtcctaggccacccacctagggcactgagtttcagagggagactcg

SEQ ID NO: 431515 - DNA, 122 bp, Homo sapiens
ttctgtgcccacagtaaggcaggctgtaaaagaattgcaagtctacagtaagtacttgtgcgatgtgttccagtctttgtgggaatcccaccttggttgtgtatagcaataaacttagcaga

SEQ ID NO: 431516 - DNA, 122 bp, Homo sapiens
ggctcctgcctgaaatcatgctgtgattgtcatttcagggtccacgtctgacaagtccaccgtggctgcccttctgggcctgttgctgctgactcacgttcccacggccacctttccctgcg

SEQ ID NO: 431517 - DNA, 122 bp, Homo sapiens
cattaaagcaccgagctgaaatccgggctcaggtgaagagcggctcgctgccagtcggcacgtttgtacagacccacaaaaagtgacctgaggacggttccagccctgggccaggcagagag

SEQ ID NO: 431518 - DNA, 122 bp, Homo sapiens
gcggcccgggagaagcagggagccccgcagccagcagagcagataattgcacaggaaccacgccctgcacattcatccctaacctgatttttaaaagaagtgttttttctcccccagcttat

SEQ ID NO: 431519 - DNA, 122 bp, Homo sapiens
atcgcggcgggccaggctcgggcaggggccgtgctcaggtgcggcagacggacgggccggcgcctctgaagtcacccggctcctttacgaactgagcccgttttggctgggagggttttttt

SEQ ID NO: 431520 - DNA, 122 bp, Homo sapiens
ccctcggagaatctgagtgcggacaactcactggcagaagatccgcattttggtaacccgcgaggccaactgccgcgtactctgttcccgcatgttgtgatgttgaggattggcctggggag

SEQ ID NO: 431521 - DNA, 122 bp, Homo sapiens
gcagtccgttctctacgtctgcgaagaattggcagataacgatgtgtctgagagaagaggcgttttctaaggagacacacaaagggagtgggaccctccaacctcactctgtgagaggaaca

SEQ ID NO: 431522 - DNA, 122 bp, Homo sapiens
aggagtacaggttggcactgatactggttggaccaggccaggaagagcagggcagcaagacggccccgaaacccccaggcgcacgcaccaccccgcgcctccccagcgagggcccgcggggc

SEQ ID NO: 431523 - DNA, 122 bp, Homo sapiens
agccgtttggcttataaaatagcaacgactgcagtggcccacactgtcatcacgaaatgccgcctcttgtcatggtccccggaaaacagggttgaggaggaggaggaggaggaggaaatgga

SEQ ID NO: 431524 - DNA, 122 bp, Homo sapiens
tgtcggccgtggggtccctgcggcgaagttcgggattcggtttgtcgccgtgaagagccgcgcgccccgcgggggacgcgtgcgggctgcagagactggccgggtgcgggcggcggtggggc

SEQ ID NO: 431525 - DNA, 122 bp, Homo sapiens
acatatgcaaaatagctcagtgtaaaaaccctgcagtaaacatcaatccttgtagattcccggggagttctagttggatttgctagcaaagcaacttccataaagactataaatagcaggca

SEQ ID NO: 431526 - DNA, 122 bp, Homo sapiens
gactcaccaaaaattaggtaaataattatcttgtttttattaatatttattaaatgtatacgcagtttccatttagttcattgttttatattagaagtgtttgggttctttatttataagtt

SEQ ID NO: 431527 - DNA, 122 bp, Homo sapiens
cccagcgaagaggcagtcgggctgattttacatgcacctctgcacttagagggatcagggcgttctcgcatgaaatcccatttttcatgaagctcctggatacctcagagataaagttatcc

SEQ ID NO: 431528 - DNA, 122 bp, Homo sapiens
ctggggtccaggctcgccggaggcaccagcgtgtgcaggcccggagcgccgtcttctgggcgaggagtgtcattagtaacactttatgttgcggataggtgaaagaaaaactgacgcttcgg

SEQ ID NO: 431529 - DNA, 122 bp, Homo sapiens
cagtaaccaccactacccctggtgaaaacatacacaccagaacccaggaacaaacatgcccgagataccgcacacccatcaacccaccagctcctgcacacacactcgcccagtgcaatgag

SEQ ID NO: 431530 - DNA, 122 bp, Homo sapiens
gtctcttctcgccctggtgagtaaggccaggactaaggggctgcagagcggggtggacatcggccttaagtactcggagaagcaggagccgaacttcgacgacgccaccatgaaggctggcc

SEQ ID NO: 431531 - DNA, 122 bp, Homo sapiens
cagtcaggatttatctctaggctaggagcgcaagctcatgtttattcattcatttggtagcgctagaaactggcaactgtgggctaaatctagcccatagacctaaatttatgtttttctta

SEQ ID NO: 431532 - DNA, 122 bp, Homo sapiens
ggagtggcacgtggagtcctatcgacctcagaggcactatcagattagccctaggaggtccgtctgggggtctcggcggcctgcgccagtggaggggcggcacctccccagaagccgggctt

SEQ ID NO: 431533 - DNA, 122 bp, Homo sapiens
cagacctctcctaaaagaataagaaattcattgtttggcccatcctgaaaggtgaggtggcgagacagtggggtgcctccgtgccgcttcgtgcagcagcaagttcagcctgagatgctggc

SEQ ID NO: 431534 - DNA, 122 bp, Homo sapiens
tttcggaaacatcattgtcatcgtcatcactgtcagcataagcaccaagcaagcatagaccgcctagaaacaaaaaggtaaacagtatttgtaacaacaatgtcaatatgtcctaagaagca

SEQ ID NO: 431535 - DNA, 122 bp, Homo sapiens
gcacggtactgagaatacggccgtttcccatagagtaggctgcattccgcttaccagggacgcataagtaatccacacccgccagtcctaggacccaaagcccagggagatgatcctgggca

SEQ ID NO: 431536 - DNA, 122 bp, Homo sapiens
ctggctcggtcccgtctctgtgatcagggcagcagatgctgagagtctggggctgagcctcggcctggcagtggggtgagggcagggccatggctcaggcttgggggggttcctggcagcgc

SEQ ID NO: 431537 - DNA, 122 bp, Homo sapiens
cctgaaagacactgtaaaggcatttggatgagattttccaccatctgatgcagttgcttccgctagagtttagggtttcgtcatctgaggtctgctgatctaaatctctctgcacgtgtgcc

SEQ ID NO: 431538 - DNA, 122 bp, Homo sapiens
agacggacaaagtcccacaatacctcgcttcgtcactgccaaatcagactcagggtgagacgcttccgcccggatgaaggtattgtcggggtgatagtccttgcttccggaaaggcgagctg

SEQ ID NO: 431539 - DNA, 122 bp, Homo sapiens
tgatagggctgtaactccacctgctgccttagcatctggctttttgatggaagagcacctcgcctaaaggatttccagaccctcagagtatactaaactgcagatgaggcccttctctttca

SEQ ID NO: 431540 - DNA, 122 bp, Homo sapiens
gtgaacagcggtaagtcaggagcaggagcgtctgaacgagaaatcctcagcacctacgaccgcgtcttcctccacagaattgtttttaggttattatcttggttgtaggtggccctttcaag

SEQ ID NO: 431541 - DNA, 122 bp, Homo sapiens
catgcacatatgcacaccacacacatgcgcacacacatgcacatttacataccacacgcacgcgtgtgcattccaggatagtattaggagggagctgtttggacacacaatcaagctcagcc

SEQ ID NO: 431542 - DNA, 122 bp, Homo sapiens
aagcgacaccagacggagcctccggagttcctccgcccccacctcgccgggtcctggagccgcagtcctcccagctgccctcctcgtggccatggagtgtccacacctgagctccagcgtct

SEQ ID NO: 431543 - DNA, 122 bp, Homo sapiens
caacaacatagggctgcgagggagggaagtggtgagcccctcgcacctccactcggatcccgtacaggtatttgatgtggagcagcattagacgcaagatcctgtggggtcatggcaagggg

SEQ ID NO: 431544 - DNA, 122 bp, Homo sapiens
cgcgcccggctctccggctcagcccagcacacagggctgttgattattttcttttgctctcggagataattgtttggaagggttggaaagagggcgtttccgccactctgcgtgtggggtgt

SEQ ID NO: 431545 - DNA, 122 bp, Homo sapiens
gtccgggcagcgccagcgctcagaccggccgagcgcaactccagcctggatcgtagtccccgctaaaacacctcctctggcgccttgagaccgaatttgagaatccaccaatcagcggcggc

SEQ ID NO: 431546 - DNA, 122 bp, Homo sapiens
tgcaaacagcaaaagaaaaaaagccacctcggtatcaaagaaaacaccccacctgcctgccgcagcaggagcgggcagcctgcttttatgctcttatctggccccacccacatcctgctgat

SEQ ID NO: 431547 - DNA, 122 bp, Homo sapiens
ttaagtcatgtacgttctagtaatgccagcactagtcccagagttgtccttggaaggtgccgttttcccacttgccgggccacagagatgaaggtgaaatcagaaccacaaactcacaccta

SEQ ID NO: 431548 - DNA, 122 bp, Homo sapiens
aacaaccccgaattctccaatctgcagcctgggggctgccctgggagcggtggccgaggacgccctttctggcgtccgggggcaccggaccgcggctcgccgggatggaggcaggcaggcag

SEQ ID NO: 431549 - DNA, 122 bp, Homo sapiens
acactgtggcctcgggactgtgatacactgcggcctcgggactgtgaaacactgcggcctcgggactggttgcaggaacaaggcttgtatcaactccgtagattcccttgcctattaagtat

SEQ ID NO: 431550 - DNA, 122 bp, Homo sapiens
ttgaggtttgttgatgaacttcctcgttgcactgaggtgaaatgttgaatgtcatgtggacgcaagtaggaacgtaattggtaggttgtgttctcatcttgtttgtcacaacatttttgact

SEQ ID NO: 431551 - DNA, 122 bp, Homo sapiens
atagggagggaatctcgggagctggctgccaggctctggagtgccctcagaggaagagctcggagtgaccgctcatcctagtgggcagaaataggaaggcagggaggaataggagaaatagg

SEQ ID NO: 431552 - DNA, 122 bp, Homo sapiens
gagagtagggcaggaggtggatttccaggccagaggcttccaggctgggcccggaccccacgccgaccccggccccggggggggctcagcgacctcggcgcctcctcaggcccccagtgaac

SEQ ID NO: 431553 - DNA, 122 bp, Homo sapiens
gcgctgcgggcgcaggtagggggcccggggcgcgtggagagcgagttccgggcgcgagggcgaggcggaaggctcagctggccgggccggcgggggtcggcgggggtggctcggccgccttg

SEQ ID NO: 431554 - DNA, 122 bp, Homo sapiens
aaactcccaattcacagtcctccgttgcgtaacagtgagcagacgttctgagaaatgcatcgtcaggcaattgcatcattgtgcaaacaatatagagtgtacttacccaaacctaaacagca

SEQ ID NO: 431555 - DNA, 122 bp, Homo sapiens
gccaaatgctctgcaggaaacacgctgaagatgcagaggaggggcgatgaggagtggtgccggatagagtcatggatcatgaaaagtttctgggaagaaccaatgcttgagctgagtcttaa

SEQ ID NO: 431556 - DNA, 122 bp, Homo sapiens
tgcaaaagcgaaggagggaggcggccaaactttccgcggagcagaaaggcagtggagggccgcactgccgcccgggcctgctgtcatcttttattccaaaatgggtctcggcgattagaaga

SEQ ID NO: 431557 - DNA, 122 bp, Homo sapiens
acagatgttcaacattcaagataagaacagcagctactttgctgactggctccccgacaacgtaaaaacagccgtctgtgacatcccaccctgggggctaaaaatgtcgccaccttcgttgg

SEQ ID NO: 431558 - DNA, 122 bp, Homo sapiens
agatctctacagagtgggcgtgagggcaggccgattctcccgttaagagctcttacaagccggctgacttcgtccaggagcctggggtcctggcctcctggtaggcgccctggggccctctc

SEQ ID NO: 431559 - DNA, 122 bp, Homo sapiens
cgcagtcgcccagactcgccgtgtgcagtgggagtggctagccagtctcgctagcgcaggcgcaggccctcccgcccaggcccttgcgcaaggcaggccatctccccgcagcgtctcaatcc

SEQ ID NO: 431560 - DNA, 122 bp, Homo sapiens
ctatgggaaaaagtggtctcatacagaacttataagattcccaaatccaaagacatttcacgtttatggtgatttcccagaacacatagcgacatgcaaatattgcagggcgccactcccct

SEQ ID NO: 431561 - DNA, 122 bp, Homo sapiens
ctgaggggccgccggtcaccaacatcatgttcctgaagacgcacaagacggccagcagcacggtgctcaacatcctctaccgcttcgccgagacccacaacctgtccgtggcgctgcccgcc

SEQ ID NO: 431562 - DNA, 122 bp, Homo sapiens
gccctgggcactgaggaagtgaatcagacactggtccactgggctagagatccacagaggcgtctccacccctcaaccccggatccacagccgggggaaaggggcggctggtgggaattact

SEQ ID NO: 431563 - DNA, 122 bp, Homo sapiens
gctgtggctgaggctgagctgtgagggtgaagatgaggtgggcggcctcggtggctgaggcggagctgtgaggacacatccataattaaggcactgcggggctggcaggactcgcctttctg

SEQ ID NO: 431564 - DNA, 122 bp, Homo sapiens
tgaactttgccctgtgagcgtgggaagctgtcagaaagttttaaacaggagtctggcagtcgtggatgttgcagagggattcttgcatcagttgggcgtttgaactcctttcctgaggtcct

SEQ ID NO: 431565 - DNA, 122 bp, Homo sapiens
agttatccagacaagacttatccatactagagtcctagaatctcccaggtggaaggggttcgaaagtcaaacgcagttccctggcctcatttttcaccagggaaaagagaggcccgacacag

SEQ ID NO: 431566 - DNA, 122 bp, Homo sapiens
acatgttacataggtgggctgccttctccacttattagagatgtatgttgcttaaaaaaccgtgaataatttagcatgtttctagaagtgcttgcattccttcagtatatttatgccactta

SEQ ID NO: 431567 - DNA, 122 bp, Homo sapiens
gtcctgccggcctccccctggtttccctgccttcgtggtccagcgccccttcacgctgggcggggacccagatccaaacccagtcccactgacctctgcagcacagggctggctgtcaggat

SEQ ID NO: 431568 - DNA, 122 bp, Homo sapiens
agctgcggaggatcgcttccggggggcgggtcagcggaagtgagggcggttgaggctgggcggcccaaggtggaaggaggggccgtgaggtgagagagtccgggagcccgagcttgaggtga

SEQ ID NO: 431569 - DNA, 122 bp, Homo sapiens
ctgacctgtcagatacttgttcctgggtgagcttcttgtcgctctccagcaggatggacacgtagtggcggatcatgtctacgaagagtgataacgatgggtaggaccacccagaggcagat

SEQ ID NO: 431570 - DNA, 122 bp, Homo sapiens
ccagggcaatggtcacatggcactgaggtgggcaacctgtggtgcgtatggcaggtgctccgggacttccagggagggggtcatgtaactgtagatctcaagcttagccagtctaggagaaa

SEQ ID NO: 431571 - DNA, 122 bp, Homo sapiens
aaccaaaaagccaaaagaaatgggggattggggaggggactgtctaacttcagtttctcccggctgctggcacccgcggcctcagaagctcttagccccgccccccattgtctttgactctg

SEQ ID NO: 431572 - DNA, 122 bp, Homo sapiens
gtattgtggtattgccggcccccacctcccgcacagcggtgcttcacggaattcctgaggcgtactgggagcaccggcacagccgccgccatttcccggcaggggcacatgggagcgacagc

SEQ ID NO: 431573 - DNA, 122 bp, Homo sapiens
tgtccacacccttattataatttcagtactctgaatcctgttctctgtttcccccaatttcgttttcccacgattaaaccttattcccttcccttttctgcttcaaattcccgtcccgccca

SEQ ID NO: 431574 - DNA, 122 bp, Homo sapiens
gctccacatcgtgcagcttggctcgctcctcctccagcttgcccttgaggctctcggcctcgctcttcagcgacgccagcgtctcgttctcgtgcagcccctcggttgccatcttcgcgcgg

SEQ ID NO: 431575 - DNA, 122 bp, Homo sapiens
gcgtccccggcgcgtatcgtaggcagtgtaccgtggccgtgccgtcagagtgtgcgtgtgcgtgtgtgccgtgtcgaggctgtgtagagtgcattgtacagcatattttcatgaataaaatt

SEQ ID NO: 431576 - DNA, 122 bp, Homo sapiens
agaccgttgaacaccgtggacacactgtcttgcgtttccgaatatttcctagaatacggacgtttcctaagactcacgataaagattttctgatcgtctctccaaaaccttgccaccaattt

SEQ ID NO: 431577 - DNA, 122 bp, Homo sapiens
cctccttgatgatatcttagaagatacctcagctttctggttacttccagctatacaaaacggtctccggttcaggtattaaacagcttaggccagtctgaatcgaaacttctaactcccat

SEQ ID NO: 431578 - DNA, 122 bp, Homo sapiens
cggcgctgcgctccgggcctcagctgccttcccgcggggcacggctcaggacctgcagcccgcgatgcctgagcctcccacccgctccatgggctcctgtgcggcccaagcctcccccatga

SEQ ID NO: 431579 - DNA, 122 bp, Homo sapiens
aaaataagtgcctcccacacaccctccctcccacctccagagtccccacattcccaggagcgggctggtctcattccatgatcctgcagggcctgctgggcgtgacatcaccagtcaccatg

SEQ ID NO: 431580 - DNA, 122 bp, Homo sapiens
tcgagcagcgagagggaggaatccgaggctgtgccaagcaccccgggaggagcacgagggcggagggagtgagcggggagggcgggcccgacagacaggccgactcggagcgagcccaggtg

SEQ ID NO: 431581 - DNA, 122 bp, Homo sapiens
ctgggcgggccgtgggaggcttcctgaggtgggggccgggccaggatggctgcagcgcagcgacggccggggccgggagcgggtcctgggcggcccaggagaagcagttcccgccggcgctg

SEQ ID NO: 431582 - DNA, 122 bp, Homo sapiens
tgggggactgactgctgcaggaggacccggctgcatgcctggcctatgacgctgctatgacgctgccccaaatcttcccagaacacagcagggtgaagcacacggcagcagggtctccagtc

SEQ ID NO: 431583 - DNA, 122 bp, Homo sapiens
agacgccagagcccttcttccagcgcctgcagcgagttaaggccgagggtatgcctctggcgggctcatcttccaacacagaagaccccgccgccctctctggttgccgcgcagctgcgtcg

SEQ ID NO: 431584 - DNA, 122 bp, Homo sapiens
aaacatgatgatgacacactgaaatgcgttgcgttttgtcagcaaattctgtcagaagcacggcaaacgctggagaaggtttgaggaagcgcatcctgaagctgatggcaccgtgtgggggc

SEQ ID NO: 431585 - DNA, 122 bp, Homo sapiens
tttgccatatcctaaaatatcattttatttcctccattatggaacagctctgagagtagacgatacgttgtcatccctaaattttttttttttttatggtagggagaaagcaactgccacca

SEQ ID NO: 431586 - DNA, 122 bp, Homo sapiens
tgaaggttttggttgactggctgatgcgggccttgagtctctgcagggaataaacctcttcgagaggtgggatggcagcgtgcagagtataatccccctgcagatactggagtcgcagggca

SEQ ID NO: 431587 - DNA, 122 bp, Homo sapiens
ccccgtgtccaggggatgcagaagtgtcctcgtccttggctgtgggtgagccccacaaaccgaaggtggtaacactccacttctcacatcaccaaactcttcagccctggtgcagcttctga

SEQ ID NO: 431588 - DNA, 122 bp, Homo sapiens
ccaggcggaggctctgcggccgcctccaccccggccacatcccgaggccggcgccgggttcggagaactgtcaagggacctccaggcccccacacgcctgcgagatccggcgcttgccttgc

SEQ ID NO: 431589 - DNA, 122 bp, Homo sapiens
gagccgcctgtgctgtgatgtggccggccttccctgccaccgaggggcgtgggatgcacccgtcccctgctcgcccctctgcctgcaaaggtaacatgctgctgttttttattttatggaaa

SEQ ID NO: 431590 - DNA, 122 bp, Homo sapiens
cgcgctccttatacacctatcactgggagcggtggcagcaacattccctggaccaaccgccgcctcttcaggcggccgctttgccggtcattcccgaagcccggcaactgagggcggccccc

SEQ ID NO: 431591 - DNA, 122 bp, Homo sapiens
agaacttcactggtcacaaacgcttgtggatcccctactacgccccaggaactgcaggagcgctcaggagagaaggaaaaggaaagagaatgcctgcctttgaggagctagctcacagtctg

SEQ ID NO: 431592 - DNA, 122 bp, Homo sapiens
cttcattcagcacggcgtggtcagcgtgctcgctaagggcaacaaggagatgaagctgttcgatggctcctacttcggagagatctgcctgctcacccggggccaccgcatggcgagcgtgc

SEQ ID NO: 431593 - DNA, 122 bp, Homo sapiens
cttaagacttaacgaatgaaaaaagggatgaaagaataacatttccgaaaggccggacaccgcagaaggcacagaaggagaaactgagggaaatccagcttcggagcgcaggggagtccctc

SEQ ID NO: 431594 - DNA, 122 bp, Homo sapiens
ttacctgcctctacccacttccccattccgtgcttccctcagcggatcgcctatatgcaccgggttcttaccgtatgtgggggatgccaaccccaccttgaagaatcttatagagcttgctc

SEQ ID NO: 431595 - DNA, 122 bp, Homo sapiens
tggcccgttcttttggaggtccacaccacaggtatgaggcctgtgggccctgaggaagcgcgatccccttaattcctccctcccctctctctccaccgcccgcccctttgcaaggagcaagc

SEQ ID NO: 431596 - DNA, 122 bp, Homo sapiens
gaggggcagtaagaatacaaaggaacgagtttctgtccaggtggaggtaaaatataaacacgacattttaaaattacgatggaatactcttgataaattgtgctattttagactgaatacat

SEQ ID NO: 431597 - DNA, 122 bp, Homo sapiens
cttgaaaatcaaaattgagaacttctaatttggactctcctttggcagtgatggaagctgcgatacctgcttcgtttgctgaggtggttccattccctatgtcagcatttgcatctaatgtg

SEQ ID NO: 431598 - DNA, 122 bp, Homo sapiens
gtcgtcaggttctggaaccaagacaagtccagggacaaccccaaagctggcctgggctcccgcgcggacagcttttataccctgtacggaaccgcccctgcccaggattgaagtggccccgc

SEQ ID NO: 431599 - DNA, 122 bp, Homo sapiens
ttgacttttaaaatcctgggcataaatagtgcagagcctcgtatgtttgtcagttcatgccgagatgaaataaatcacgcagaaagtgccagtcctcctgatgtgccccgagtgcttttctc

SEQ ID NO: 431600 - DNA, 122 bp, Homo sapiens
gttgcagcaaggcacagggcaactataccaagaaagctgccatttactgagaaaaaggatcgttttcactaattatacttgatagcaactggctgtaaattggattctttacaagagtacca

SEQ ID NO: 431601 - DNA, 122 bp, Homo sapiens
ttgtctaaccaacaagaagtctcaagaaatcaggcagtgcagctgcctgctctcagctatcgtatccagccaaaagatgcatgatgatggagtggtgggggaaggccagttcagtatcctat

SEQ ID NO: 431602 - DNA, 122 bp, Homo sapiens
ttttcacatctctggaatctgataaagttgtgacccaataactagagagagcatgcattgcggagaataatgagtataaaaggtctgggtaaaagccagaggacaggaagctggatgcttat

SEQ ID NO: 431603 - DNA, 122 bp, Homo sapiens
gggactccgggaggctctcagccagctgttcgattgatgtcgctgagggggccctctggccgcaacaattctgcctacaggacccaggatccccagcctcggagccaaatgccaagcaacgt

SEQ ID NO: 431604 - DNA, 122 bp, Homo sapiens
gcggagagagctttctgtgtttgggtatttctggggggtcagagttcgtgacctctttctcggctcggcggcgcgctatcccgccagcgcctgcgcattagcaacggggagaagcggcgaga

SEQ ID NO: 431605 - DNA, 122 bp, Homo sapiens
gttcgggagcttcggccctgcgtaggaggcgggtgcaggtgtgggtgctgagccgcccgccgcctggagggggagacagcttcaggacacgcaggccgcagcgagggcccgggccctgggga

SEQ ID NO: 431606 - DNA, 122 bp, Homo sapiens
gaggaaatgaggaaagactgaaagtctctttcagttccacactgaaagagactagagagacgaggcaactgggttcaaaggatcctggattggatcctttagctatgaaagacattattgaa

SEQ ID NO: 431607 - DNA, 122 bp, Homo sapiens
tggatcgtttttctttgggagaggctgtaaggttgtgtgtggagccctaatggcaaagcccgtgacgggtcccggagcccaagaccgctctccccgccgaatgtgcccgtgtcgcggccgtg

SEQ ID NO: 431608 - DNA, 122 bp, Homo sapiens
gtaactcactggaaaagtgaaaaattctcaccttcacacccacagagataacgggggcggcgtgggggcaagccgaacgcatgcgtgtgctctgtgcactcaccgccgccctctccgcggct

SEQ ID NO: 431609 - DNA, 122 bp, Homo sapiens
actagaccctccttccccactaggctctcgtgccccagctgtccttacggggaggtctgtcgccagacgtccgccatatcccgcctttgtgtgattgcttctctggagaaagagaagtgccc

SEQ ID NO: 431610 - DNA, 122 bp, Homo sapiens
ctactcgggaggttgagatgggaggatctcttggaggtctaggctgcagtgagtggtgatcgccacggcactccatacagcctaggtgacagaacaagaccctgtcctcccatccccccaaa

SEQ ID NO: 431611 - DNA, 122 bp, Homo sapiens
ttgaattataaaagcctgtttgtttatgtctcttctaatggaatatgagcccagtgtgggcgagggtccattactatcatattcatttgcatgcgccaatagtattagttgaattgatattc

SEQ ID NO: 431612 - DNA, 122 bp, Homo sapiens
catagataggaaatgaagggaaggaattgcagtattagtgaacagcatgttcaaaagcaccgggctacaaaaatgcaaggaatgttcaggaactcacaaggagggaaaggaagccagctggc

SEQ ID NO: 431613 - DNA, 122 bp, Homo sapiens
ccacttgtcagtgacttcccaggcgatgctccacttttctactaacatctatcaagcacacggaatgctaaaacttccaaccatgcagcctctgcataatggaactggttttagatttctaa

SEQ ID NO: 431614 - DNA, 122 bp, Homo sapiens
ctgcagcctgattgcccggttttcggccccgtgccccttattggataaagcttcaggccccgtccccagtccgtgagtgacagaagatgtgaccaaacactggactcaatgaggacggagtg

SEQ ID NO: 431615 - DNA, 122 bp, Homo sapiens
gccgggacctggcacccccagggctgtgactgggtgaactctgagggcacagctgctgtccgccgccccaggggtcccaggatggggcgagcagccctgaagaggcccaagggcaccccgtg

SEQ ID NO: 431616 - DNA, 122 bp, Homo sapiens
gcaacatcagcaatggacaccaaacacaccgacctgcagcgggtgcccagcctcggggtgcgtctgatcacacaccacggggcctgagctccacccagagtcctcgggtgcctgcaagtgtg

SEQ ID NO: 431617 - DNA, 122 bp, Homo sapiens
cggggcaggatatcggatattccacgcagagggagcagctcactcgagccgagtgacgtgcggctgtcagcacagggagctgcaaccgcccgcccctccgtctgcgtgaggggcccctcgtg
